United States Patent Application Publication US 2005/0228172 A9 - sequence listing, part 81

SEQ ID NO: 361721 - DNA, 615 bp, Homo sapiens
tttaaaatctgtgagttgttttcccaaagatgtttaccttgctaggacacaaagttatgcaaaagtgtgagacaatagctttactagagagtttcattagctgtcccaaacagaaagatacccaaagtccaggaaagacacagccatagcatggggccctgagacagttggatagagcacctttgccatcctgttaaggagaggtaaggtgtatgtctaaccagggctcatggtgccacaccagtttggcaattgacacacaaaaaaaggtgtcaataaaagcagcagtatgatagcacaaatggtgcagtggcagcatcagggcagttgagatgtggcaacctttaagggaaaacaaataataaaataatgcctatgagataactgggattactgggacattgtctcaagctaagacatttggacatatttatatccattctgataaataataatgatggataaggtaggggtgtctgtttctctaccacaacaccaaatgcataagttttgtattctggaaaacggagctatgtagagttatagtttkcaacctggggagttgtgggttctaatgttactctgttggatacttggtcagatttgtttccattg

SEQ ID NO: 361722 - DNA, 620 bp, Homo sapiens
tgagatgtggcaacctttaagggaaaacaaataataaaataatgcctatgagataactgggattactgggacattgtctcaagctaagacatttggacatatttatatccattctgataaataataatgatggataaggtaggggtgtctgtttctctaccacaacaccaaatgcataagttttgtattctggaaaacggagctatgtagagttatagttttcaacctggggagttgtgggttctaatgttactctgttggatacttggtcagatttgtttccattgttacattactgaaatttcactgamgttctatatccagaatgatggccagggaaaccctttggctaattcacagctctggcttataatcacaaaggactaagtctgtccatcctaagtttttggaagcaaagatatatttaattcattatgcattttatctagtaatctaaagagtttagcattttgggaatactaccagtgtttgtgtttatgtgaaatttagatgttgaaagcaacttaaaataaaaatatgcaatgttagaaattatttccaccaagaaaatcctgctaattcacagcctttaatgataactatcttcaaagagaaaaaat

SEQ ID NO: 361723 - DNA, 544 bp, Homo sapiens
aaaatgtattgttggtagtattaaagaagatacaagataaattctgagtacaaacatatgtacaagtgtatccacagaaaaacactaggctcaatgccaaaaaaaaaaaaaaggctaaatattatccaacagaaggtaacagaagcacagaatgaatggtagaaagtgggttgtcgggrgttagtttggtgggaagaaaaaatagatcttagatgtaataatcactcagctcttacccttgtagctcaacttaaaaggagagtttgtgtggtggctctgctgacttaattctgcttgaactagcgtagtgggagtcagagttagggcttcatacccaatcagagactcagcagctgttacaatatctaaagcaagtccaagagaagatattcttactgggacacatggtacgaaatgctctacaaggaacaagcccttttctctttaacatctgtacctccacatgattagcatgaataccacattgtcattttctttgccagaattaaatgttcctaataagatctgttttcaatttaatagt

SEQ ID NO: 361724 - DNA, 572 bp, Homo sapiens
aagataaatgtatcatagattaaaaaaaggtataagtgtaagagaaaaaaacagcagaaagagatacttaattagaaaatttctgataattttctagaggtgaacattgaaaaacaagatcaaagatgaaaggtaaaaatctggaaagggtaactagaaacaaattcacaagtacttgtgaagttgcagaacactaaagaargaagaaaaatgtctcaaaggaaaaaagtcagatgggctaggtaggcaagacaattagaacgctatacttttcaacatcaataataaatgccagaagacaatgaaaatacctttaatatgctgaagtattaaaggtcaactaaaatcttaaacgcagataaactagcatttaaaataaaggtaaagtaaattcatttctaaacattaaaaaatggatattttaccactcacagaccctccctgaaagaactactaagggaggatgaagaaatgagcgtgagtaaaactgaaaccaaaaaaaaaaaaaaaaaaaggagaatacaagaaacacacttgaacaaagatacagaagaacaaacacacagataaac

SEQ ID NO: 361725 - DNA, 593 bp, Homo sapiens
cataggttggcagaactttgtaagttttgttgaattagtgaatgagtaggaaatttaggacacatccagtgtcttctgtcacttaggattggctaatttcctgaacaaatgagtctaaacttgacttaataaaacaagagaaataggttgaaatatacatttgggatactatttcaatacctgacactttttctgcaagttaaaggcaaattgtataacttgcaaagtctcaatttcccaatttttcaagcagacatggtaacatttgcaacctatcaaaagagctcaggaaggtttaatgaggtgrcatatctaaaatgttatctgagagaaaatatttttattatctctgcagataatacctcagcttgactggagaaaaaagatactacaagatattattgtattatgataaagcaatgaactaccacctgcaggaaattggcttcatgaaaggcaatgacaaagagcacaacaggattacatgaaatcaatcagaggcaggcaggaagaacacaagccagatgaagtggagtctttcatgacaggcaggagaatatatcaaagccatccttgctaatttcaaaaagccc

SEQ ID NO: 361726 - DNA, 524 bp, Homo sapiens
ttggcagaaaagcatgcaaaacagtgtttagcatcatttttctatatgaaatgaaagttaaaaatacaattatatattactaaatatgttagaatagctaaaagtaaaaagactgatcacatttaatgttggsaaaaatgtgaagaaactacaactttccagtgctgctggtgggtaagtaaaatgatacaaccactttggaaaacatttggagattcttaaagtgttcaatatagacctacaatagcattgagccctttacttctagttatttgctcaagaaaaatgaaattacatctctataacaaatacttctatgcaaatgtcagtagcagatttatttgcattagtgaaaatctagaaaataccaaatatcaattatcaagtgaatggacaaacagtggaaaaatttgtgcaaggaaatactatctatcaatataaagacatagccattaacaaacataccattgatgaatctcaaaattattatgctaagtgacaaaagcaagacaaattgcacatac

SEQ ID NO: 361727 - DNA, 524 bp, Homo sapiens
ttggcagaaaagcatgcaaaacagtgtttagcatcatttttctatatgaaatgaaagttaaaaatacaattatatattactaaatatgttagaatagctaaaagtaaaaagactgatcacatttaatgttgggaaaaatgtgaagaaactacaactttccagtgctgctggtgggtaagtaaaatgatacaaccactttggaaaacatttggagattcttaaagtgttcaatatagacctacaatagcattgagccctttacttctagttatttgctcaagraaaatgaaattacatctctataacaaatacttctatgcaaatgtcagtagcagatttatttgcattagtgaaaatctagaaaataccaaatatcaattatcaagtgaatggacaaacagtggaaaaatttgtgcaaggaaatactatctatcaatataaagacatagccattaacaaacataccattgatgaatctcaaaattattatgctaagtgacaaaagcaagacaaattgcacatac

SEQ ID NO: 361728 - DNA, 584 bp, Homo sapiens
aaaaacttaaggcttacaaaccacttatagccctttagccttcttttgtaatctgtgtatgactttattagatttttccatccaaattaatagataacctgcacactaatattagtataaactcccccaacaattactagctactattctttamaagatgttttaagtgggtgagatagaaaagttataaggtaaaattcaggttctaatcaggtaaagtcattttcatttaaattctatttattcactgtaagtgtgaagtactctcacagaagtgtggtgtatccagttttagactcaggtacttagaggacatatacctagatgactgagagcaaatataccttcttattaattatgggttatttgggctcatggatgttgatgtatgacatttattctgtatttaaacaaaaagtcatttcatgcatttatttttaatgtagttaattgttccctactctgagctactataggtttaataataagtaagatataaaaagactttttaatttttttaaatccatattttctacattttaaaatctctgaaactggaatgtatttttattactgtaatgcag

SEQ ID NO: 361729 - DNA, 584 bp, Homo sapiens
aaaaacttaaggcttacaaaccacttatagccctttagccttcttttgtaatctgtgtatgactttattagatttttccatccaaattaatagataacctgcacactaatattagtataaactcccccaacaattactagctactattctttaaaagatgttttaagtgggtgagatagaaaagttataaggtaaaattcaggttctaatcaggtaaagtcattttcatttaaattctatttattcactgtaagtgtgaagtactctcacagaagtgtggtgtatccagttttagactcaggtacttagaggacatatacctagatgactgagagcaaatataccttcttattaattatgggttatttgggctcatggatgttgatgtatgacatttattctgtatttaaacaaaaagtcatttcatgcatttatttttaatgtagttaattgttccctactctgagctactataggtttaataataagtaagatataaaaagactttttaatttttttaaatccatattttctacaktttaaaatctctgaaactggaatgtatttttattactgtaatgcag

SEQ ID NO: 361730 - DNA, 544 bp, Homo sapiens
gaccatgattgacaattatcatgtgatttcaattttcataatataaaaattattctagtattctgttcacatttttgcttcttaaactccaaggtatccaggaagcttatatttttaatgaaaataaaaacaatttaaaaaatatttgttgttgtgtttagtagtgtttaatctctttttaatagaactgactgaagaggattaaatacatgagaaatgaaatgaatattaaactcttaggaaaaaataaatggctttgtcactggagaacacaaagaataagagtcaatacattaaaatggcaaaaatatatagtgggagttcatatattctttccaactgaacttcagatataagcaattcatgagatgtgatttgtggaaaaatattgcagataaaagaaagaaattagtttaggtgaataatattctttatatttgygaaaaatttaattcaactttttcaattaatttgactcaatcaagaaggttacatgtcaaatgctatctgtggctgaacttactggttgactgacttgattatc

SEQ ID NO: 361731 - DNA, 598 bp, Homo sapiens
tgatctaacaatgtaacatattaataatgtttcataacgttataaacttaattattgatataaaattgggattagaatgatagttgcctattctttcagaagtgacattagtgtgcctcccatgagctttgttgtcagaaaggactacatttaattcctaggtctgtcttcttctatctttgtgattttctgaacctcatcaataacagtataaaaataatacagtatcaatcttggcacatgggaaaagctgcataaatattcattgaataaaatgttaaatcctgttacatttcttagggaggcaaaaatgaagtcaatcaactttstatctaatatctataatcatgcccatttttataggcaccaaataataatgacaactacaataaggataaaactaatatttagttcttagatgtattattttgttaatcacagctactattactaactaggaattgaagaagaacttttgggtcagagacaagtaatctgtgaatcctcataggtcacatgtaccctagcctgccccacctattcagctacatatcagaagagcagaatgacaagatagagggaaatgagagaactgacc

SEQ ID NO: 361732 - DNA, 598 bp, Homo sapiens
tgatctaacaatgtaacatattaataatgtttcataacgttataaacttaattattgatataaaattgggattagaatgatagttgcctattctttcagaagtgacattagtgtgcctcccatgagctttgttgtcagaaaggactacatttaattcctaggtctgtcttcttctatctttgtgattttctgaacctcatcaataacagtataaaaataatacagtatcaatcttggcacatgggaaaagctgcataaatattcattgaataaaatgttaaatcctgttacatttcttagggaggcaaaaatgaagtcaatcaactttgtatctaatatctayaatcatgcccatttttataggcaccaaataataatgacaactacaataaggataaaactaatatttagttcttagatgtattattttgttaatcacagctactattactaactaggaattgaagaagaacttttgggtcagagacaagtaatctgtgaatcctcataggtcacatgtaccctagcctgccccacctattcagctacatatcagaagagcagaatgacaagatagagggaaatgagagaactgacc

SEQ ID NO: 361733 - DNA, 548 bp, Homo sapiens
atgagagaactgaccttttattttacactccttttttacactcttttttctattcaggaatgctaaaagagtcctttacaagcagtttctttatcaataagcctgtcagttctggctcaaaaaaaaaaaaaaaaaacaaaacatcctcttttctgttatcacatcactaaaattaccattgccaagaggaacctcatagactctaaaatctttgaatgatttttaccttctcatgtttttttgctttctcttgacgtttgactctcttgatcactcttactttctgaaccctctcttcytcccaaataccatactctgctgttctttctatagtttccttatctgttacatctcagcctctttcacactcctcttggtttgatcttaaagagtgaagggttcatccttgagcctctttttgtagtatataagctgtctctagatgacattatccatttcaaatgctttaccatttatattctgaattcttcaaaatccctttctctctcccagattagtcttctcatctccagagacatcatatttga

SEQ ID NO: 361734 - DNA, 531 bp, Homo sapiens
cttactacatggagctggggagaagacagacacaccctggcatctgagtcctcatgtggttagtgatgaggaaaaaaatcgaacgtttatagattgtcgctcctggccaataaaaggggaaaatagcaatggcctatgaagagggaagagaggttatgattattcttgttgttagtgtggagtaaagttacttaygaaatcaattttcttcctcctgtttttttcccttctctgcaattctaacaggtagttccatattcattttcaatggagaaatgttaaggataacagacagaagctcagatggttgcctggttttggtttaccaccatatcaagaagaggaggaagaaggaaaatggggtgagcatgttcaaaaatctctaaagatagggctagagttaaaagacttctagaaaacattatggtaaatggcttatttgaagggctttttttctgttgtaagagctatttgaaagtagagacattactactcctgcctctgtgcccagatatataacggctgcccttg

SEQ ID NO: 361735 - DNA, 531 bp, Homo sapiens
cttactacatggagctggggagaagacagacacaccctggcatctgagtcctcatgtggttagtgatgaggaaaaaaatcgaacgtttatagattgtcgctcctggccaataaaaggggaaaatagcaatggcctatgaagagggaagagaggttatgattattcttgttgttagtgtggagtaaagttacttatgaaatcaattttcttcctcctgtttttttcccttctctgcaattctaacaggtagttccatattcattttcaatggagaaatgttaaggataacagacagaagctcagatggttgcctggttttggtttaccaccatatcaagaagaggaggaagaaggaaaatggggtgagcatgttcaaaaatctctaaagatagggctagagttaaaagacttctagaaaacattatggtaaatggcttatttgaagggctttttttctgttgtaasagctatttgaaagtagagacattactactcctgcctctgtgcccagatatataacggctgcccttg

SEQ ID NO: 361736 - DNA, 429 bp, Homo sapiens
cattgacatctcctctccagctatgaaagtcctagatgataccttcatttaatacaaggctgtttcatctacatggaaaatctgttgttttgtgtagccaccttcattgattaccttagctggatattctattccagataacttgctggagcttctacatcagcacttgctgcttcaccttgcacttttatgttatggagatggcttctttccttaaacaccttgagtcaacctccrctagcctctaactttttttctgcagcttcctgacctctcttggccgtcacagtattcaagagagctagagccttgctctggattaagcaatggcttaagggaatgttgtgtctggtctgatttttctatccagaccactaaaactttcctcttatcaacaataaggctgcttcactttcttatcatttgtgt

SEQ ID NO: 361737 - DNA, 546 bp, Homo sapiens
aaattcatatttagtgttactgacagtgctgtaagcaattaaataaacagatattgttgatagctatattttgaaaacaactgttgttttaaaaaaaaattccacgttgtttacaatttttctgtgtccacagtatccctggtgtgcaactgcataaatgtaggctcaaamctccttaagcattactttgcagatcccactggtgggtagaatgacctctttcaccttgtcaaaaggacaaacttgtcaagctcaccatagtcaatactctgaagagcatcccttcagttcagagacatggaccaagcagggacttcgtagtgcagatgctgagatgtgtgggcttgacagagacaaatagtaccaggactcaccagctgatcaacgacaaagggacatcgggcctctgaagctgaagcccacttagatttctcctatatcacttaacaatgtgagaagagacttaattctttgaagctcctgatttaaggagctgaagagcaaaggaagccttttgcctgatctaatccttgttattaaaagaag

SEQ ID NO: 361738 - DNA, 595 bp, Homo sapiens
cttgtacagtccagaaggtatgtttcacattatgttcaatgaaatgaagtggcctggagggtgcagatggctgtacaatgaacatgataaatttgcttgtcttaattaggagaggtgatacctgaaatataattttagaattcatgtagttacttattacatatgtgtcaaccatctattatgtgtcaagcagtgttctggacactgagacattaaacatttgttgacragaacctagtagccatctaatcaagttcctaacttatacttgaattctccacatgaattctctagtgataggaaagtcacttccacaaggaaagtgacacttccattgaattgaagcaaaactttatttggattatcattctaattttgcccttagaaacataaatactcgtaattcctgtacattcttataaccctaaaatatttgaagaacttttctcatttctcctcttctccttttgacccccaaatcttgtcatttttaaggtaaatatattctgccagaaatattttatgtgtcagtgtttctagtctattcctatcttgaacaatgtctctcttacagtttctcatcatccctgaccta

SEQ ID NO: 361739 - DNA, 451 bp, Homo sapiens
gtttattgtggcattaattataatagacaaaaattgttaattttataaacaccartgattggggattgaatttgaatgcagttactaaaagttatgttttatgaaattaatgaaatgaaatgataatacaatattcagtaaagtaagcagaatataggaaaattgggtggaagaaattgttattctttttacacttttggcatagttgtaatatttaaaatatcttaatgtttcttaaaacagataaactgattacattcttcaaaaacaaatacttaatatttaaatatttgagaatacgtaaaaggcatgtattcttaaagagatgttatctcttttgtaaaaaccaataatacagggtttttctgactgtggattctgcatctaaaggatatttccaaagttgctttatttttaatttttatttttttaattttatgagtatataata

SEQ ID NO: 361740 - DNA, 451 bp, Homo sapiens
gtttattgtggcattaattataatagacaaaaattgttaattttataaacaccagtgattggggattgaatttgaatgcagttactaaaagttatgttttatgaaattaatgaaatgaaatgataatacaatattcagtaaagtaagcagaatayaggaaaattgggtggaagaaattgttattctttttacacttttggcatagttgtaatatttaaaatatcttaatgtttcttaaaacagataaactgattacattcttcaaaaacaaatacttaatatttaaatatttgagaatacgtaaaaggcatgtattcttaaagagatgttatctcttttgtaaaaaccaataatacagggtttttctgactgtggattctgcatctaaaggatatttccaaagttgctttatttttaatttttatttttttaattttatgagtatataata

SEQ ID NO: 361741 - DNA, 581 bp, Homo sapiens
aaatcattcaaagtattatttgtaataaaagtggacaaaataaagaatgactgaaagaactgtgtgtgatatagtgactttaaagtgccctagtttcacactgcatgtgtgaccaaagtcataaaatcctataaaatcacacgctaaaaaatcaacaaagttattcygtgttctgtgattggtatactttgttcccattagttcaatgagtttctatttagtccttagatgaacttcactttctgaattgtgaatctttcccctatatagccttttattttattttgtattgtttttgagatggggtttccctctgttgcccaggctggagtgcagtggcatgactcactgcaacctccatgattaaaagaactgtgcatgatacaagttctccatgattaaaagaactgtgtatgatacactttaaagtgctctggtttcatacatcatctgtgaccaaagtaataaaattctgtagaatcacacactaaaaaaatcaacagagttgatttggccttctctaatgcttgtcactgtttagcttctaggtcatcgcttcatccatttgatgatcacgtgat

SEQ ID NO: 361742 - DNA, 557 bp, Homo sapiens
  misc_feature (1)...(557): n = A,T,C or G
nnnnnnnnnnnnnnnnnnnnnnnnnnnnnnnnnnnnnnnncaaccattccagaatttgcacaaacatgcaaatacatacacacattttcttcttcactaaactattactcatacatcrcaaacactgttatgaacctgtacattgacacaatgaagtactcaagaacacatagattaaagtaagtgggtagtgggaacaattaagaagaaagattatgaagtagaatttttaagaaatggaaaataatgtgaaatttcagcttcatcacctcaatgaaacatgattactttctgcaaaagactatgtgaattgattttctctaaaacattcttgatttcattctcttttttcctttctctactagaaagcctggaaagcccaaaatactcacttatccagactctgttgcagctaggtatggtcatgtgacatgagtttggtcagtgagaaataagtagcagaaattaggtaagaattttgataaatttttaaatagaagaggcaactctcacatctattctttaacatttttttcttttctcctcttcttgcctgg

SEQ ID NO: 361743 - DNA, 509 bp, Homo sapiens
attattctacggagtacattttctttcaatcctaagggaagaaaaaagagaatgtgtgattagactatgataaaaagtgaagagatgatggcagccagagggccagaaccttctcaggccacttggaggatgccgcattctgactttgaacattggctggaattcattcttgctaacatgaatccaggaatgatgaatytctgggcgctgcacaacagccccagattcataaatcacccatagactttgcacatatgagttttataaatgattctccaggcatagtaatcacaggcagtgggaaaggaaaatgagcctctcctttgcagcaattttcctctgtgaagttgtcatcctatgaccagagtgcaatcccctaagaggagctgcctatgtagccactacaagtttggaaggttattggatccttaagtgacttctaaaggcttcactatatgtcgttttcaaagaatgctgggggaagtcaaaatttaaatttcaacactgtt

SEQ ID NO: 361744 - DNA, 429 bp, Homo sapiens
cccattatttctctttctctcctaaaaaatagatgagttaaacagaagtaaattgtcaaatgcccctgagttcagagctttcatgttctctgtgctgtctggtatggcatggatcacaaagacctttggttacctttcattgtccagttgtgttttttaaggatttacttggtacatggcattggactaatagtaatgttcttcagatttctgttttctttgtaatctaataatctaatttaatgctaaggcagattaatattatgtaataaatatatrccaccattatatatccataattaaagtaaatattttttaaaagattatatagataataggttagcaagaagaatttctcctagattagaggggacaaacagaggctaagttagacatagcgagtgagacatgttggcttagcaggcaaaa

SEQ ID NO: 361745 - DNA, 525 bp, Homo sapiens
tgcagtgagctgagatcatgccattgcactccagcctgggtgacaagagcaaaaactccataaaaaaaaaaaaaaaaacacctttttcaaattgattattttgacagtaaaataatattttcataaaacaacctgttaattccagtaatccccaagaagagtgagcgtaacacaattccaaaagtaacatagaaggttttaaacttattattagaagttggacaattacatagggtaatatatcaagtcatggagtgtacagtttttatggttgagctttgaaaagtaccatattatccctgttcaaacagaagttggaaacctctcctccaggaatgaaaagactttcaggctggatacattgtttaccaatgtctgttcaacaaccctcaatttcaaaacactaaatctgtcttcttccttggtattaggaagcatttttttttttttttttttttttttttttttttagggawagaaggtagaaaatgagcatttggggctgatgtagagactggggaaaat

SEQ ID NO: 361746 - DNA, 525 bp, Homo sapiens
tgcagtgagctgagatcatgccattgcactccagcctgggtgacaagagcaaaaactccataaaaaaaaaaaaaaaaacacctttttcaaattgattattttgacagtaaaataatattttcataaaacaacctgttaattccagtaatccccaagaagagtgagcgtaacacaattccaaaagtaacatagaaggttttaaacttattattagaagttggacaattacatagggtaatatatcaagtcatggagtgtacagtttttatggttgagctttgaaaagtaccatattatccctgttcaaacagaagttggaaacctctcctccaggaatgaaaagactttcaggctggatacattgtttaccaatgtctgttcaacaaccctcaatttcaaaacactaaatctgtcttcttccttggtattaggaagcatttttttttttttttttttttttttttttttttagggaaagaaggtagaaaatgagcatttggkgctgatgtagagactggggaaaat

SEQ ID NO: 361747 - DNA, 537 bp, Homo sapiens
ccaaacatactacccattgacgattcccctgagcatgcgtgagactgaaggcctgggaggatcaccattacagtgtggtgaagactttccattggaaaaggcatagcaaatggcagacagatcagggaagctgaagaataagttcaatayggaatctattgtatagtattaggttcccactaaaggaggatgaattgttcaaaaaagtgagtgaattggaaagattttagatttatcttcaaaggaaaaataccatgactatctgctttgaaatctgtatgaatactagaagcatgatttgagctaatatattccaggttccaaattcttccagtgaagggaggctactttacacattttatttccttaatatatagaatggagccttggctttttggtgaaaagccctgggcagtttttttttttttttttttttttaagcgagttaagaggctttttgcaaaagaggtcccttcattagtaaccagcatcactgccatgcttatttatatctgccttctgaggggctggaacaga

SEQ ID NO: 361748 - DNA, 537 bp, Homo sapiens
ccaaacatactacccattgacgattcccctgagcatgcgtgagactgaaggcctgggaggatcaccattacagtgtggtgaagactttccattggaaaaggcatagcaaatggcagacagatcagggaagctgaagaataagttcaatacggaatctattgtatagtattaggttcccactaaaggaggatgaattgytcaaaaaagtgagtgaattggaaagattttagatttatcttcaaaggaaaaataccatgactatctgctttgaaatctgtatgaatactagaagcatgatttgagctaatatattccaggttccaaattcttccagtgaagggaggctactttacacattttatttccttaatatatagaatggagccttggctttttggtgaaaagccctgggcagtttttttttttttttttttttttaagcgagttaagaggctttttgcaaaagaggtcccttcattagtaaccagcatcactgccatgcttatttatatctgccttctgaggggctggaacaga

SEQ ID NO: 361749 - DNA, 537 bp, Homo sapiens
ccaaacatactacccattgacgattcccctgagcatgcgtgagactgaaggcctgggaggatcaccattacagtgtggtgaagactttccattggaaaaggcatagcaaatggcagacagatcagggaagctgaagaataagttcaatacggaatctattgtatagtattaggttcccactaaaggaggatgaattgttcaaaaaagkgagtgaattggaaagattttagatttatcttcaaaggaaaaataccatgactatctgctttgaaatctgtatgaatactagaagcatgatttgagctaatatattccaggttccaaattcttccagtgaagggaggctactttacacattttatttccttaatatatagaatggagccttggctttttggtgaaaagccctgggcagtttttttttttttttttttttttaagcgagttaagaggctttttgcaaaagaggtcccttcattagtaaccagcatcactgccatgcttatttatatctgccttctgaggggctggaacaga

SEQ ID NO: 361750 - DNA, 575 bp, Homo sapiens
tcaagttaaatcacccatccacattttcactaactatacaaactgatgaggttaygcatttagctaatatgcatgtagctagctacttctgatcaagttaatttacctgacaatctcttttgttatattattaaatcatgctcacttgctgtggcatagtctctcctagttaccactactttttttttatatcccatgtataaatattacattttaataaaaaacgcatgtcaagaaacaagctcaattcagaggcaactgggattatcaggagatacagtcataagtatgttcctggtaacaaatctagtaaggattttcaatcaaatctggcttcttctaccacagacacctttatttacacaatatcttaatttattacttcaatttacttgctggtctgttttatttgtaggcttagtctaattttaacactgtcaagaataattcacagagtatcaggtgagtctgcttagaagagggaacctacgttaatcttttctgacattaatagaattggaccttattaattctgacatgatttatttcatatcgtgtaaatactaaatgcaagc

SEQ ID NO: 361751 - DNA, 575 bp, Homo sapiens
tcaagttaaatcacccatccacattttcactaactatacaaactgatgaggttatgcatttagctaatatgcatgtagctagctacttctgatcaagttaatttacctgacaatctcttttgttatattattaaatcatgctcacttgctgtggcatagtctctcctagttaccactactttttttttatatcccatgtataaatattacattttaataaaaaacgcatgtcaagaaacaagctcaattcagaggcaactgggattatcaggagatacagtcataagtatgttcctggtaacaaatctagtaaggattttcaatcaaatctggcttcttctaccacagacacctttatttacacaatatcttaatttattacttcaatttacttgctggtctgttttatttgtaggcttagtctaattttaacactgtcaagaataattcacagagtatcrggtgagtctgcttagaagagggaacctacgttaatcttttctgacattaatagaattggaccttattaattctgacatgatttatttcatatcgtgtaaatactaaatgcaagc

SEQ ID NO: 361752 - DNA, 575 bp, Homo sapiens
tcaagttaaatcacccatccacattttcactaactatacaaactgatgaggttatgcatttagctaatatgcatgtagctagctacttctgatcaagttaatttacctgacaatctcttttgttatattattaaatcatgctcacttgctgtggcatagtctctcctagttaccactactttttttttatatcccatgtataaatattacattttaataaaaaacgcatgtcaagaaacaagctcaattcagaggcaactgggattatcaggagatacagtcataagtatgttcctggtaacaaatctagtaaggattttcaatcaaatctggcttcttctaccacagacacctttatttacacaatatcttaatttattacttcaatttacttgctggtctgttttatttgtaggcttagtctaattttaacactgtcaagaataattcacagagtatcaggtgagtctgcttagaagagggaacctacgttaatcttttctgacattaatagaattrgaccttattaattctgacatgatttatttcatatcgtgtaaatactaaatgcaagc

SEQ ID NO: 361753 - DNA, 494 bp, Homo sapiens
tgttgttggtatatctaacatgcctgtttgcatctccccatgtttctaacttttgacttttctctttgttttagatatgtctcttgtacaaaacataaactgaatcatttgccaagtgtgttctatattttgaaatccttatctttcaaacttgcaaatgtgagttttcctttatacatatatcaatattttggatatgttkcctttcatttttaacactgattttatattctttacatcatcacttcaagatgactttttatttgtgttatttttcttatgatgtcttcagaatttctcctgataatttgcacattatttctgcttctctacatgcgaaagaattgatattttttcttccttctactcctctccctcacttccactccaaatttattttataatttaataattgacaaagtcatacacatgaagctactgccaaatgatgcaaaaactcacaatcttaatcactacacaatacttcctctgac

SEQ ID NO: 361754 - DNA, 494 bp, Homo sapiens
tgttgttggtatatctaacatgcctgtttgcatctccccatgtttctaacttttgacttttctctttgttttagatatgtctcttgtacaaaacataaactgaatcatttgccaagtgtgttctatattttgaaatccttatctttcaaacttgcaaatgtgagttttcctttatacatatatcaatattttggatatgtttcctttmatttttaacactgattttatattctttacatcatcacttcaagatgactttttatttgtgttatttttcttatgatgtcttcagaatttctcctgataatttgcacattatttctgcttctctacatgcgaaagaattgatattttttcttccttctactcctctccctcacttccactccaaatttattttataatttaataattgacaaagtcatacacatgaagctactgccaaatgatgcaaaaactcacaatcttaatcactacacaatacttcctctgac

SEQ ID NO: 361755 - DNA, 529 bp, Homo sapiens
tctttgaaccctgtcttttgggtttttatggcggcttcattatgattggttacatcgctagccattggtgatcgactcaaccttcagcctctctttcctctccggaggttgaaggtggggctgaaagttctaatcttctaattacatggttgattttcctgataacaggccactcatcccaaggctgtccaagtgccctcagcctccaggcatttcattagcatgtaaaaagacacttatcacttcagaaactataagrattttagaagctgtgtgccaggaacccagggcagagataaaatatatattatatcataatattacagttcacaccctaatctctggccatggactccttacagaaaaaaaagatatacaactcaaaagacatggacatatgataagaattccatttaatttttggtaattactccattccgcctttaaattgcatgaaaatgtctctgagtgaggctactcagatttttaaatttccactcaatcttgtcaagttttaaaagcaagagta

SEQ ID NO: 361756 - DNA, 375 bp, Homo sapiens
actattatatacatgcttaaactgggttgaagacccccaaatccatgcccactcataaactcagaatgtgagcttatgttaaaatagggcctttaactatataattagttaaaattagatcatactggactaaagtggwtcctaatccaatatgactggttttcttataagcagagggaaatttaggcacagatacatatagagagagcaccaaatgaacacaagagtaaaggcagaggcatacaattacaagccaaggaatgaaaaggattgtcaacaaccacaagaagttggaagacaggcatggaatataaattcctctagagccttcaaggggagcatcaccctgatgacaccttgattttggaattttag

SEQ ID NO: 361757 - DNA, 538 bp, Homo sapiens
taagcattcatcagtgaatgaatggataaagaaaacatggtatatattcagaatggaatactattcagcctttaaatgtcaatgacaggatttcctcaacagattgaataaatctgggaggatattatgttaagtgaaataagccacacacagaaagataaataccacatgagcttacttatatgtggaatctaagaattgaactcatagagtatagagtagaatggtggctaccwggggctgaggattgggaagggagagaatgaggagttgttgatcaaagggtacacagtttcaggtagaagggagaaataggttttgagatctactgtagagcatggtgactatagtcaataatattgtattgtatattttaaaataattaggagggtaaatttcaaatgtctcatcataagaaatgataggtaagagaggtgatggatatgttaattaacttgatttaatcgttcaaaattgtatacatgtatcaaacatcacattgtaccccatgcatgtataattatgatttatcaatgaa

SEQ ID NO: 361758 - DNA, 585 bp, Homo sapiens
ccactgctcacaaaggctcaggctttgaaaagtgagcccctcttcctctcactggggtcttggaactgccttctgctcctgctttgaattttcaagtgagcacaactgggctggaaatgtgtgaaacacaacctccgtcacatcaatttccccctaagaaaactatttatcatraaattctctctcagacaattgggtaaaagcaaaagacaatgttacttgtattcttctaactaataagccatctctctttggcttcaccttctgtacccttggggacagaaggctgtgaatcagcctccaagtcaccacatttctctgggtgctcctcggagctgctatcccggagctgctccagtgttctctgccccctacacttctcgtccttgtgcctttcaccagcacactcaaaaactgatgtgctatttgctttttggttttgctatttgtttttgttttctgactcctgcctggcccttcttgtaattcaaatttcctttaaacaagcagaccgcactaaggactggagggaaagccctggcccaaggtctggcttccactacagggcagggcaaagccttgaat

SEQ ID NO: 361759 - DNA, 585 bp, Homo sapiens
ccactgctcacaaaggctcaggctttgaaaagtgagcccctcttcctctcactggggtcttggaactgccttctgctcctgctttgaattttcaagtgagcacaactgggctggaaatgtgtgaaacacaacctccgtcacatcaatttccccctaagaaaactatttatcataaaattctctctcagacaattgggtaaaagcaaaagacaatgttacttgtattcttctaactaataagccatctctctttsgcttcaccttctgtacccttggggacagaaggctgtgaatcagcctccaagtcaccacatttctctgggtgctcctcggagctgctatcccggagctgctccagtgttctctgccccctacacttctcgtccttgtgcctttcaccagcacactcaaaaactgatgtgctatttgctttttggttttgctatttgtttttgttttctgactcctgcctggcccttcttgtaattcaaatttcctttaaacaagcagaccgcactaaggactggagggaaagccctggcccaaggtctggcttccactacagggcagggcaaagccttgaat

SEQ ID NO: 361760 - DNA, 585 bp, Homo sapiens
ccactgctcacaaaggctcaggctttgaaaagtgagcccctcttcctctcactggggtcttggaactgccttctgctcctgctttgaattttcaagtgagcacaactgggctggaaatgtgtgaaacacaacctccgtcacatcaatttccccctaagaaaactatttatcataaaattctctctcagacaattgggtaaaagcaaaagacaatgttacttgtattcttctaactaataagccatctctctttggcttcaccttctgtacccttggggacagaaggctgtgaatcagcctccaagtcaccacatttctctgggtgctcctcggagctgctatcccggagctgctccagtgttctctgccccctacacttctcgtccttgtgcctttcaccagcacactcaaaaactgatgtgctatttgctttttggttttgctatttgtttttgttttctgactcctgcctggcccttcytgtaattcaaatttcctttaaacaagcagaccgcactaaggactggagggaaagccctggcccaaggtctggcttccactacagggcagggcaaagccttgaat

SEQ ID NO: 361761 - DNA, 542 bp, Homo sapiens
gaaacattgtaggaaagaggggttgtattagtctgttctcacactgctgtaaggacatacctgagactgggtgatttacaaaggaaagaggtttaattgacttacagttccacagggttagggaggcctcaggaaacttacaatcatggcaaaaggggaagcaaacatgcccttcttcacaaggcagcaggagagagagaagaatgagagtgtgggcagggaaagcctcttctcaaaccatcagatctcgtgagaactcactatcaccatactagcatgagggtacccgcccccatgattaaattacctcccactaggtccctcctacgacatgtggagattatgggaactacaattcaagatgagayttgggtggggacacagccaaaccatatgaggggtcattaggatttttacggattcctcatccaaagcaaaaaattcttgaaatttccatactgggcaatacacagtgtggatgactttagcagccacacagaaaagactcctgggtcagacagagcagcttttgaaggccaact

SEQ ID NO: 361762 - DNA, 528 bp, Homo sapiens
gaagcaaatttagactacaatagtccaaacctgtcattttacagatataaaattgaggtccaaagagtgtgagtaaattgtcaagattcgggagctttaaggacactgtaaaggatataaaatagattctaaatgtaatgtgcaaaccaatgcaaaacgagacaaaaaacaaaaaacccagaaactgtaatgtgatgtaaaatggaarattatatgctttccattagttcttcgaatcagtttattcctaatatggcacgtagggtgattgaggagtaagatgtgatttgtgtaagggaaagtacccaaaggctgagaactctgtctgacagaattatagagattgaaaggaaacctttaggaacgttgtttatatttgacatagatcacctgtttttatatcttttctatgaaatgatggcatctgttaaagttggaatagtgaaaaagaaaagggacttctggaataatttgcgagtttttacatttgtatttatcttcattctttcctgagagggaaaaatgaat

SEQ ID NO: 361763 - DNA, 542 bp, Homo sapiens
gaaacattgtaggaaagaggggttgtattagtctgttctcacactgctgtaaggacatacctgagactgggtgatttacaaaggaaagaggtttaattgacttacagttccacagggttagggaggcctcaggaaacttacaatcatggcaaaaggggaagcaaacatgcccttcttcacaaggcagcaggagagagagaagaatgagagtgtgggcagggaaagcctcttctcaaaccatcagatctcgtgagaactcactatcaccatactagcatgagggtacccgcccccatgattaaattacctcccactaggtccctcctacgacatgtggagattatgggaactacaattcaagatgagatttgggtggggacacagccaaaccatatgaggggtcattaggatttttacggattcctcatccaaagcaaaaaattcttgaaatttccatactgggcaatacacagtgtggatgactttagcagccayacagaaaagactcctgggtcagacagagcagcttttgaaggccaact

SEQ ID NO: 361764 - DNA, 618 bp, Homo sapiens
tcataatctgtgggtaacaaaagtgcaatacatccttgattcctttttttggaatcaggcaaccagcagagcttgttcagccttgatgtgttgcacttttggtcaaatgtatagactaaaggataaacccacagaggcaggagaatttagtgatatttgataaaaaaaaaaaaaaagtagctttgttggtgcttttctctctgaacagcagggttactgaaaataacaggctccagtgtgtttctttctaagaggcaccaaaaatagttcttttgtcatcagtcttaatagagttacacagtcagttccatagaaattaaaagcaatactggagctcatctggattatgtgtggtctttttactgctgatcatacgtaacgcacaagatggggtgaggggggaatttagaataatcaatttctcagcaaagaaaaaagaaacagcacagaaaaacaaagaatttggaataaaatacaaggaaactggactcttcccactccttcccttctaaacatagtgagtatcacattcttccttcctgctgtggttttgcttctcacgggcctacaagtcagagatagatktaggaacaacttaaacaattttttcccttagaa

SEQ ID NO: 361765 - DNA, 569 bp, Homo sapiens
aatgaaaaagtcaggccggattctcaggctttctttgccacctgcttaagaaagtgcccgttttactgaacgcacaacacaaaagtttccatcttcttcctcatatggaaattttatgtgaaattttccctttttttttttttttttgttccttcacttccagaatcacaggctgcctgacaggattagcacgttccaggttccaactaaagccgtcttttgattgcaattgtggtgattgagtctaggaggaaaacacaaatgaattctcagccctgggattgagtgacatttaataaaaaatactatttgtttaacctgattgttatgttttttgaattataaaatgctgagcattatgatggctgccaggttatgttatctactacttgattttaagtgmtatctgtgggatttacatgtaaactgtaaattgatgttttctttttcttacctatacaacagaaaataaagggtttcagaatttttatatcactggatattctggcaatgaaatattaaatggctttaggagaaatgtgttttttacaggggaaaacaggacacat

SEQ ID NO: 361766 - DNA, 567 bp, Homo sapiens
tgataccaattgctgtccttggactaaagttctatgaggatgttttcacagatcaagagagaaatgggcaaaataagagcaacattatgacttttttaaaaataaatttacagttattgaattaaacaaacaaacaaaaaaactgtcttcagaaattatcgcccttcctccttcataggtattaaaacatcattaattttttgaaataatggtgtcacaaaattgtagttttatgcttttaatgttcttacttgaaaaaatattaaattaataacactatattgttttctccataatgtgtttttgaaagttttcttgtctattatacacaaaatttgaatgtaacatctgcccgtaaagttatataaattagataaaaattaaaataaaaattaacaagtaaatctttgcagatattctaatactaacttatctggatcccttctttttcctggaatatttttatctaaaaaaaagcctcagctattttaacctatctgtacagacatgtgctcagtgtatgtaatacaacaaagagagayggtatcaatagaagactataaagtg

SEQ ID NO: 361767 - DNA, 545 bp, Homo sapiens
acaaatttaaataaacatacagtcatttatcttctaaattaatttgttgacagataaggtagcatagagaatttgtactcagtattcctaacatactttgaacttcttgaacatacttttctctgttcaaatcaatcatacttaattgtttattggattatgaaaattatgcaagacagcttgtaataatgtataagctacaacaagatgatacattaaagttagtggtaaaatgaaagtgaagacgtgtagaggcatatatagaggcatacgtatgcaactaaaaaacattcctgatcatggataacttagttgatgtccatgctcctcaaccatagtcatagtcagagaataaaacgatttaaggatcttaagaatacagaygctagggtcccatcccactgattggccccctgaagtggtggcctcaccatgttagatttttaagaatttcaaaagtgtttctaatctatagccaaagctagagaactactattttagttggatcatagatttgtctcccagtttcagggcagacaatgcag

SEQ ID NO: 361768 - DNA, 603 bp, Homo sapiens
cagcacaggaaaacaaaacaaagcaaaagcaggaatattttctaaagtctaaaagtgatgtgctcacttttcttatgaagaacaggaaagggagcatgaggcacttgatggacttgtgtattagagtgcaactgctcagaattaaagacaacttttcccagggtccaaacatctttgtcctgctcctcctgctgtgagctgtggattctkccatctgtctcagagttgcaagattacaagaaagctgtgagccacggttgttgtctcatctgagggtcaaatggggaaggatctgcttccaaactcaggcagctgttagcagcgtttaccttcataagggtgttgcagtgcgatagaggctgctgtaatctgctttcaatggggtcctctccacacaccagcttccagtccacagcttgcctcttcagtctccaaaagaaagagtcccctggcctaatgaaagccacatcctccatgatgtaatcacatatataaacagagacatctatcacatttgctgccttctgttgattaaaagcaaatcacaggtcacactcaagaaaacgagaggggattccacacggagaattcacaaagctgtga

SEQ ID NO: 361769 - DNA, 567 bp, Homo sapiens
tatatatcatgactaagtggggtttgccacaagaatgcaagattggtgtaatatttagaacataaccaatattaattctctatgttaacagaataaagcagaaaaatcatatgaaaatctcaataaatgaaaaaaggcattaacataattcaactttcattagtgataaaagctcttgacaaactaagaatagaatgaatctttcctaacttaaagaagagcatctaagaaaaaacctcagcttgtatcacatttaatgttaaaatacctaatgctttctacctatgatcaggggtaaggaaggatttttttctcagaacttttgttcatcattgtactagagattctagctactagggaggttgaggtgggagaatcacttgtgcccaggaggttgaggctgcagtgagcyataattgtgccactacattccagtctgggtgacagagtgagaccctggctcaaaaaaataataataattgacaagctggttgatatttttgtggaaatgcaaaaaacctagacaagtaaaaacattcttcaaattggagaaacaggatgtagaac

SEQ ID NO: 361770 - DNA, 601 bp, Homo sapiens
atttgactttccacagttgtgttgtaagcagtgacccccgcaagaagagagtacttccttctgcgttgctccttctgaaaccttgcaaaaatttttgaagataatatatatgggacatgttaaggagaaagttatttgctttatttatctatttgatttatacttaggtttttctatgggatgcttccttgtatctccagtattcacctcagcccaagcttacatctacatgagtgtgtgcattatatgtattgcatattgtgtagcaggttcacggtgcctgcttacccacttayctgagtcccataagacagaacacactcacacacagcatgttgcatgaagtaggtttcactcacagataggcagcaagggacaacagaggcctaggatttacagtaagccagtcttccaaggctcaagaaagctgccgagggagataagagtctcatctgaaactaccccactctcactactgctgaaagcagctttgtcttaggttttatactctagggtcatgtgattatctcagctacagtgctgaaagatttcctgttttaagggggaactagaacagagcccaggctattgctgccagcca

SEQ ID NO: 361771 - DNA, 628 bp, Homo sapiens
tgtatgatctcagagttgtgagtaatgtttaaattaacgcatgtaggaggtcagacataaattaggctctgcggaatgtgtggggctgatttaaaggtaaatgcccctgaagtgtcctctcatgtcactgctgactctgcaacatcattccccataggaatttacatttctagagctcacttttgggttgtttccaaaacagcttgtttcaggaaagtgaattggaataatcatggttggttttcagttgtgtgcaacaaatcggttttcatctgatgaccctttgtactcttcctatgaccctacacaactacacagcttgattattcagttaaagaaagaaggctgagtgagcaaagagaggccacagggtcctagttcataaaactttgcagggacargaaagtgaattgcaatgtttactagatagacatgtgtccagcaaaattcatcaaactccctaagaggagttattgtaggaactacagggcagccttgccgtggctcacaaggccctgccctcagaccctccttccaacacttccaaagtagtccagcctcagagcctttgtgcttgcagtttcctccacctagaacactcttccccaagatatcatctgttctcatt

SEQ ID NO: 361772 - DNA, 547 bp, Homo sapiens
ggctctcccctttaaggacaggcttggtgaggtgaaggcctcttccctgaacaagaagaaggtctctggaagcacagttaacccattccctaagaaagcattcttttcaccacatttgattaacacaaatgccattgaccttgactaggaataagagggattttgcttagytcccagattaggacagaaagcacacttagcatttttttccccccagaaatgcacctttactatgtattacaagctttccaacaaattttggattctttgagggcatgcatgaatttaggtgacagacaaaatgtggtcggaatgataatgaacccaagtaagatttgcctgatttcaggtttcatgttctgtgcatctccattgtatgcaacaagggtatcaggttaaatgccaaacttcttcataagaggagcccttccattaaaaagttatacaaataaaagaactcgcaaggtctcatttatgtgttttttccttttttttttttttcttttggaagcctgttctttaaacttcactgaacagttgggttacg

SEQ ID NO: 361773 - DNA, 571 bp, Homo sapiens
ataaagtggctgttgaatattaaacagccttttagcctgaaatagaatctcaatatttctctagtttctctcatgaaaatattgttttaaaaacatcaacaatagatggatacaattcttcacctattttacctttaccagtatattgtttatggtaaaattttaagttatacagtataattcacactctgccatataatatttttttctattctttgaaaacaaaataaatagtaactttgagacctatgataagatgaaaacacattatcatctttttctccctgatgtataaccaaccacatttaaatatattgtatttctttctcatttgactgtttttttttattctgtgtttctatgtctttatgtacatgaaggtatttatataagcataaatatttacatgcacatgtgtatgtgagtaaaaaataagaattrcttattgtgcattgcaatttcctgcatttgttcaagtatggatcttagatattcatatgtttaacagaatatttatttaacacgctatatgccaagcactgcttctaagtttggagctaatattctgctt

SEQ ID NO: 361774 - DNA, 619 bp, Homo sapiens
gcgcttaagagcatggcccctagagctcttcctggcacctatctccccaccccactactgtctgtctttctgctctaatggaaagggaaatcagaacgtggtgaaacctttccactgctaccgcacagccagaggtgactcgggcagctgagtaattcctccagggaaacgcaggataagcctgagaagcttgaagagtttgagagagaaaacgcagcaaatgcatcccctagtttaaaaagaacaagctaaaacctcttaaatgaactctacccatcttcctatccctcagcttaacaccaagttactgctacacattcttaggtttacatctagagcaagcatgcacccaattaacagcaattgtttcaaggtaactctgaaaagttaaatgcaccagtatgatgaggttgcaagatgtttattaaataaagtccataagataatagaaaataagctcaggaaatgattttagaagttatcwtatgcagaatattcatcgaacaggcaagggagatgatgccacctagataaacaaattccaccattatattaggcatgtcatgtcaattaacaattactctagcaagcataggacttaaacatttgttgtcatgat

SEQ ID NO: 361775 - DNA, 648 bp, Homo sapiens
ggaaactccaacatggcacagctgctatattcttgcataatcaattatgattgaatttatttatttttccacttgataaaatatattctggaaatgcattgagaaacatgcacaaaaagaacctggttaaattattttaaacaattaaatatcaaataattcaaaaaataaactgctagtatcaaatgtcaaatgcataaaatgtcaatttctcggaaagggtgcagcacatttcatttctattatgcttttagcaccttttctctatttctagagacaaataaattttgaggaagcctaattagctrtctattcaagcacaactcagtgaaaaagctaagggtattcttggctgtttcctctcaacttctgattctttagaatgctgaatttatgcttaaactccctcaaagaccctgggatcaactgccaattttattttctacaatgctggattatgaaaacacagcatcaatagcattttttttccacataattttggtagaaaaactataggactttaagaataaaactcagcaacaagttgggtgtttttagcagtgtagaagaaaagacaagggtttattgccatgtttcatatgcatgattttgatgcatgctgccccaaagccaattcaaacagcagtc

SEQ ID NO: 361776 - DNA, 605 bp, Homo sapiens
agacattaggcacaggagcaggtttttaacaataggactgcttgggctttatgttacacatcaagaaacattttgtttatgctttataaatagtgtcacctatttataaccttcagccacgattcttttaatggcattctcaagtggcgtttggtttggttaacatcagccactcatgccttctgttctgttgcttgagaagttaaatgggartatgtgagttttagctggccaatctaataaaactctgggaaatcgttagggtaaaggaagttaagctataattgacatcatataacaaacattgaaaatgttgaaaagaaacagattggatgagttttatattatgaaaatgtcatctgacagatgcagtacagtagtttcatttgaaaagatctctacatacactgagtcttctattccattaaaagaagaaaaaaccctgaggtgacaggagattcctatgggggattagctgtctatgcatatctcagggaatctttgggggacatttattctcatcttggaggtagaaggaagattttaaagttaataatatttctgccaccctactctttcctcccgttgtgcttacaggcaaaggt

SEQ ID NO: 361777 - DNA, 605 bp, Homo sapiens
agacattaggcacaggagcaggtttttaacaataggactgcttgggctttatgttacacatcaagaaacattttgtttatgctttataaatagtgtcacctatttataaccttcagccacgattcttttaatggcattctcaagtggcgtttggtttggttaacatcagccactcatgccttctgttctgttgcttgagaagttaaatgggaatatgtgagttttagctggccaatctaataaaactctgggaaatcgttagggtaaaggaagttaagctataattgacatcatataacaaacattgaaaatgttgaaaagaaacagattggatgagttttatattatgaaaatgtcatctgacagatgcagtacagtagtttcatttgaaaagatctctacatacactgagtcttctattccattaaaagaagaaaaaamcctgaggtgacaggagattcctatgggggattagctgtctatgcatatctcagggaatctttgggggacatttattctcatcttggaggtagaaggaagattttaaagttaataatatttctgccaccctactctttcctcccgttgtgcttacaggcaaaggt

SEQ ID NO: 361778 - DNA, 595 bp, Homo sapiens
caaatgactgacacccacaatgtgatcaggctgaggtggagaccttgcctagaaataggcaaggttggctgggcctggtgctcacgcctgtaatcccagcactttgggaggccgaggcgggcagatctcctgaggtcgggagtctgagaccagcctgacccatatggagaaaccctgtctctactaaaaatacaaaattagctgggtgtggtgtgggtgcctgtaatccctcctactcaggaggctgagtcaggagaatctcttgagcctgggcgacagagtgagactccatctcaggaaaaaaaaaaaaaaaagagagagaaataggcaaggtctgctggtcttatggacagtatttcttctttccacatatgggtaacactagagtgaggacagcattaaagcctggagaggataaaaaggtctatgatggtagggggagattaatgtttctcacaatgccatrtaccaaacacagagttgacttttcagtaccagctgaccactctgaaatgccaagaactggggtcttccctgtagctagctgggcttctgatgcaaagttattaacagagattgtacgtcatgcaggaaa

SEQ ID NO: 361779 - DNA, 549 bp, Homo sapiens
aaacaaagtatatattaagagcctactatatgataagctttactaacactgctattcttgggagactgtctctgtgagtattttatgactatgatgcatggtttatgcattatcaaaatattttttgaaattttatttcaagactgttgttctgcagcctattcgtgatcataattttaattcttctgtctcacatagtcaagagtcttgaagaagtgttttgagagtgatgtaagtcagatgtcaaccacgcctcctggcctagtatttcagcattgaccgttctgcggctctctattcccatgttctgattatcagccatagtctgtggactaaactgagagccagaatctgcctgaaaggacttttatgctgttcttaaactctataygcatggttgttctgaaaccatttggattttaaatagttaaactacttcagaaatggagtctctttatgaacagagacctattttctgcattaaggagaatggcagtatctttactttaagaaaagattcttcattgaccatgacttaatatgggaata

SEQ ID NO: 361780 - DNA, 476 bp, Homo sapiens
ccagttgaatcatcctgcttattctggcccatgtatttagttggctttccccttccataattcccattaatggcttttstaagcagtatttgcataggaaacataaaggtgtctctgccacttccatttattaagttattccactgcgctgctgcaggctcacaggtaaacatcactgagcttttaggttaaataagtcccacaaagcagttttggaagaacctgagtttttattgtgggattttgaggagtgtaaagtaaactgtggttgcgacactgatgttactatgagtgaaatgggaaagcagattatatggattcttcctgccttgtggggctaagctctgctgatgtgtttgggctagcacagaccagagaagtggggagggaaacaagaaaggaggggggtggagaggaaggaactgtaaagaatgttatgcatacattttgggaagtgataaaagagtgccaacaag

SEQ ID NO: 361781 - DNA, 561 bp, Homo sapiens
tattaatattaatattatggaatcttctgtacccttgcgttccttgctgactatctgataattgggttgtggggggagtgctgagggtcatcttgtttagcttatctctgcaagagaaagagtggccaataataagggaaagcggcaataaaatggtaacaaaaaattgaaaagaagatttaatctctggccaatttgaaacatatcccagagaatccatagagaaaaagataaagtgtgactatgagtaagttaactaaacrcattacactgtgtgagagcaaatggagttagtccattgtacatgtttaatttcctattagtctctggcgtttactaccacgtctgagttggggcatctgtaaattcagttaaatacagtgcattgtctaaacatatcacagctccaatcagtcaccccagctgctgataagaagcctcttgtattattgaatctacaatggggaggctctgcaggcaccaagataacagctaggtatttcacttttaagtgtgtggtggttggggttgggggtgggcagtgaaggaacctagctgctg

SEQ ID NO: 361782 - DNA, 621 bp, Homo sapiens
agaatactcctttatacctggactttctgataacttatggctaaccacttcacattgacaggaagggacaaggtaggaggatctgatgtacagcgaaacacaccaggtatgcttgaccgtagtgcttttatcttctttacaatttgcagaaagcaaaggatgaagacaaaccaagaggctactgtcattgaatttttggttttcttctcattactaggtttgcagagagatttttkttttttaattaatcttgggtttaaagcactctttgttctttcccaaccttatcttttagactttattttctattacaaagaacttaaaatatgatattaaaattgctttctatttgctttcagttggggataacaacaacaaacataaaatagcaacagtgacatgtgttctgtgctaaacaaattgcttaagctcacacagtttataattggtggagccaggaactgaacctattgattctagatgccactcaactattccacacatgtcaaaggtcctgaaatatttgtatatttcatcatttctagtgaaattcacatgttagcttggagatggataaaaagttttctttacttcgtgaggcctgtgattcagtttttgttc

SEQ ID NO: 361783 - DNA, 453 bp, Homo sapiens
gctgtgattgctaccagtcagattttatttgaagtttgttactttttaaataaaaatattgacagcagtaggaaaggagaagagcaggcttatataattttaaatggcttctaaatatttcctmtggaggaaacaataagttattaaaacaagcaaaacaaatcagatagttatgtgttttattgatacccatttttgattttcatacttgatttgatctctttaaagtatctttcagccaggcgcagtggctcatgccagtaatcccagcactttgggaggccaaggtgggagggttgcttgagtacaggagtttgagaccagcctgggcaacgtgatgaaaccctcatttctaccaaaaaataaaaagtaaaaaattaacaaggtgtggtggcacacacctgtagtctcagctactccagaggctgaggtgggaggatggcttgagcttgg

SEQ ID NO: 361784 - DNA, 453 bp, Homo sapiens
gctgtgattgctaccagtcagattttatttgaagtttgttactttttaaataaaaatattgacagcagtaggaaaggagaagagcaggcttatataattttaaatggcttctaaatatttcctatggaggaaacaataagttattaaaacaagcaaaacaaatcagatagttatgtgttttattgatacccatttttgattttcatacttgatttgatctctttaaagtatctttcagccaggcgcagtggctcatgccagtaatcccagcactttgggaggccraggtgggagggttgcttgagtacaggagtttgagaccagcctgggcaacgtgatgaaaccctcatttctaccaaaaaataaaaagtaaaaaattaacaaggtgtggtggcacacacctgtagtctcagctactccagaggctgaggtgggaggatggcttgagcttgg

SEQ ID NO: 361785 - DNA, 453 bp, Homo sapiens
gctgtgattgctaccagtcagattttatttgaagtttgttactttttaaataaaaatattgacagcagtaggaaaggagaagagcaggcttatataattttaaatggcttctaaatatttcctatggaggaaacaataagttattaaaacaagcaaaacaaatcagatagttatgtgttttattgatacccatttttgattttcatacttgatttgatctctttaaagtatctttcagccaggcgcagtggctcatgccagtaatcccagcactttgggaggccaaggtgggagggttgcttgagtacaggagtttgagaccagcctgggcaacgtgatgaaaccctcatttctaccaaaaaataaaaagtaaaaaattaacaaggtgtggtggcrcacacctgtagtctcagctactccagaggctgaggtgggaggatggcttgagcttgg

SEQ ID NO: 361786 - DNA, 559 bp, Homo sapiens
taaagatttgtccatgattctgcatgtaatccgtgtggctcatagaagactatcacatactccttgcatacctggttctccaaaacaattttatatttatgtatatattttaaaatcacaattacattagaaatgaagtagatagaatctttgatgtgaactaaacagttgcagcactacagattatttcagctgaataaatctgtgctccctgcatttgtcttagagaggacagagagaaaggctgaaatcctaagaaacagttcctttagctttcttccccctgatttagtagggatactattaaaagttaatcatttatttgattgtccccatttgtcatttccatttgtgaacttgaattaggaagccagcatttatctaatatgttacatatttttattctttttggattaaaaaaatccctgatggatttagccccaagcrggggaaacctgcttgaacatttgctcaggcactagaaggccagcctggtaagtggtgaggggtggccagaaccatataggactctgtttaatgtggattttttccccaccag

SEQ ID NO: 361787 - DNA, 597 bp, Homo sapiens
ttctttaatcctctattttcatcagttgtccttagttcattctctggttcagatttatctgtctgaaatttgtgatatatgttttaaaaatccttcaaaaaataaacactagagacaaatggaaagcatcacatcaaatgtgttttattgctcaggggcatgtgagggtttatggaaggggctgtaaagtcttggtaacagaatgatttttcttgttggccctattttcaatttctatatgtagcttaagattttatgctttcttctaagtgaggagatacaaacgggtragaataaacccacatatttaaatgttctatgtactattactgtagaaaaccaggactttaaatgaggttcttgtgaacacagccaaagttcccaatgtgtttatcagactctttgcctctcgctctaagtttttaacttttttaacccaatataaaaacacttcacataacttagagttaaatatagcattcattttatctccttttatgaaagaatgtggcttgtccaagctataattagcactttttctaacataacatttaaacatttatgaatatggctcccatattaattataattatttca

SEQ ID NO: 361788 - DNA, 535 bp, Homo sapiens
gacaattctgcagtgcttcacatttctttttactacttcttccttaaatctccattcttgagtttctgcaataccacgttctcttgggttttcttcctacaactccaatcttcatctcctttaaattcctcttctcctaccctcggcttattatcagcaaacccaggattctgtcctgaactcamttcccatcttgtgttttaaagcatttttcccatgacttctatctttcattcccatccaaacactgacagcttccacagtttcatctgcagtccagatctcttctagcacaccatcctgcctactggatactgtggctccactatcgcacttccaactcagtacttcaaaagctatatgcataccttctcccctttcactccccaaatcccattcatcttgggtgccctggggcagtgaaatgcagcaccattgacagtcagagatgcctgtccctgtcctagtccagcaaccctcccgccacatttggtgcattcctctgtcttactacctccccactctgttcacttct

SEQ ID NO: 361789 - DNA, 565 bp, Homo sapiens
ttttttaggaaatatggcaggaaaagggaaaaggaacaaacaatgaaagaaattctgtgttctaccagagagtttcagttttatcatgyaggagatatggaaacaaagaaagcattttgatgagggaatggcataggtttcatattttaaagattgcttgactagccctgggtaggatggaagaaagaaatacaagatataaaaggattttggtaaggatgctgttaaaatttaccccaaaaggatgatgaaggcctaaccaaaactggaatggaggggaggagagaaagtgatggatatggatacatttaggagaatgtgtacaaccaagcactaaactctccttttctgcatagacatgtacttggatccatccttgcaatacttttcttttttggttgttatggtcttatccacttttactgtgctataaaatcttagatgacaaggattatgtcttattcattttgcatattccaatggtactgaacatagtgcttcacttgtaatagatactctaaatactagttgatttgaactttgtcacagtagaaccattggaagc

SEQ ID NO: 361790 - DNA, 565 bp, Homo sapiens
ttttttaggaaatatggcaggaaaagggaaaaggaacaaacaatgaaagaaattctgtgttctaccagagagtttcagttttatcatgtaggagatatggaaacaaagaaagcattttgatgagggaatgrcataggtttcatattttaaagattgcttgactagccctgggtaggatggaagaaagaaatacaagatataaaaggattttggtaaggatgctgttaaaatttaccccaaaaggatgatgaaggcctaaccaaaactggaatggaggggaggagagaaagtgatggatatggatacatttaggagaatgtgtacaaccaagcactaaactctccttttctgcatagacatgtacttggatccatccttgcaatacttttcttttttggttgttatggtcttatccacttttactgtgctataaaatcttagatgacaaggattatgtcttattcattttgcatattccaatggtactgaacatagtgcttcacttgtaatagatactctaaatactagttgatttgaactttgtcacagtagaaccattggaagc

SEQ ID NO: 361791 - DNA, 565 bp, Homo sapiens
ttttttaggaaatatggcaggaaaagggaaaaggaacaaacaatgaaagaaattctgtgttctaccagagagtttcagttttatcatgtaggagatatggaaacaaagaaagcattttgatgagggaatggcataggtttcatattttaaagattgcttgactagccctgggtaggatggaagaaagaaatacaagatataaaaggattttggtaaggatgctgttaaaatttaccccaaaaggatgatgaaggcctaaccaaaactggratggaggggaggagagaaagtgatggatatggatacatttaggagaatgtgtacaaccaagcactaaactctccttttctgcatagacatgtacttggatccatccttgcaatacttttcttttttggttgttatggtcttatccacttttactgtgctataaaatcttagatgacaaggattatgtcttattcattttgcatattccaatggtactgaacatagtgcttcacttgtaatagatactctaaatactagttgatttgaactttgtcacagtagaaccattggaagc

SEQ ID NO: 361792 - DNA, 580 bp, Homo sapiens
gtggcttccaaatggtgtttttccctattcagtatccatctaatcccaaagttagactgaaaaatgccttttttaaatatattttttagagtcctatattatatggcattgctttcctattttcttgatggccaaacaaatttcagtcagtctgctttccaggcagaacttattttcaactagtaaaaaataaaggttgtaggaaaagaaagccattagatttccctctttaacttaaggcagctcagcccatacttgcctccatgccccccsacattttttctttcttcttggcttagatgaaaggacaaaagaagtaaacttgaggtcaagtaagagggagtttgggaaaagctaagggaattatttcagatcctctccagtcattcagaagtactaggtaagtaggggtaagtaaggacttccaaagaggaactgcacactccgtgtagatggtctttacattcttattaggcattcattggccctgtgtctagtacttttcaaagtaggctggcagttgttaaaaaaaactcccactcacaggaaaaaaacaaaacaaaacaaaacctcttgtcat

SEQ ID NO: 361793 - DNA, 555 bp, Homo sapiens
aggctattatgaaggtatagttggtcaaataagagactagaacaaatttcacttagtgatttggtatcttgatttataacattaacatatttacatatactatgcagtatttgggtgcttgctgtactcttgtcctaggtcctgcaatgttcagagtggacttagttccataatggtcactcccacacctcacacagggaagatatgctactacttcagtgcctaaatttcacaagtgaagctaaactgagaattttatgttttatgcaagttccaaaattcaggcttgttttttgatgtatgcagtttcccattcttattcacagggaaataaagttaattgagcacgataagctaaatataactaaacaaatttccagacagttcacctaaatgcctccaatcatataaagscaccatcagtgagaaatggctacagggagagagggtttacgatcatagctaaagggtggagacagctgtgagctctggaaggtgacatacctgtccttctagtttagcatcaaggataactctgtgctagattacacgaac

SEQ ID NO: 361794 - DNA, 535 bp, Homo sapiens
ataaacctaatttctccatagataaaagagtgagatttttcatcagattttgtcagtgttgtgttgcatttatctcttcaaatgttcctgttttctttttttaaatatacataaatttagatttgtcagtgacggggaaaaatgatgatgaaacacattttctgttctaggaagctgagtccatcaggttaaacagagggaaaagaaaaaaaaaaaaaatcctgatacttttctatcacattaaaaacgggcagaaaagtagaaggctaacttgttaactcctcacctgataaactttcaaggatggaaytcagattctgtatgcatcactcataaggccaattgcatccccaaaaatagtcacaggaagttgctacgttcaaactgtgtatgtatacagtcactttctcagtgcacatgaaaatctgtaaccatgttagtagcaaggagaaagctcatccttcaagattcatgggctacttattatcttggtaaatagtgtttgttttaggaatacttggaaaatgcatttaca

SEQ ID NO: 361795 - DNA, 661 bp, Homo sapiens
tcttggtaaatagtgtttgttttakgaatacttggaaaatgcatttacatcatatttcaatggattaaagatttttgtgtgtgactaagatgtttagaagtactattgtcaagggaaaaataattattcttgtgttatgaagacttataaacagcccaggctctctaaacatcatttaattttcttcctttggtccctctccaatgtagaccaaatctcagtgtgttcagtgttaatgcaaaaaacctaatttaggtctttcctcaaaagggatatatgtacgtatataagtatatatacgatatataaaatacataccacacatacctatattatatatgtatatgaaatatacattcatacataggtacaaatacaggtacacacacatacacacatagtagaaataatacaactgtctattctttgtgaatactagtgtctcagaatttgatgaaattcacatgcatgggcccaaggaaaactgagaagctctctggctttgacagtggaagaggtgggacaaggattgggatgaggaagcagggggacaggaagccagcaagaactgtcactctctccctcctgaggtgccctccgtaccataagcaaataaacacatacaggaggtcccgaaggcttctaagaaagaaaacatggt

SEQ ID NO: 361796 - DNA, 539 bp, Homo sapiens
ccaatctctaacagaaggtattagccagcattttactggtcagcagtaaaccaccaatggacaaagaaattcacctcatagatctacatagaactatactgatcattccttttccacgctcagcccagtatctctgaagcataatgcttcaggtatcagtgamagggataagcttccaaatgtacaagcttcgggttatcttggatgaatgtgattttactttcaactcttagatactgtagggtcaaaggtagaattgccaatgagaattaaagatccctttaattagataacagtattcaaagacttgtaaattcccaagaagccactttgcaaagcaagagttacagtgttctcctgggggaaaagatgggcagtgggcttttatttttttttttctcagctattcaccactatgagagaatttttgaaaagaacaaaatggaatacattgtaagtaattcagaatgcctccagactttacaattctccctagagaaaaaactcaaacaatttgaagtcttcacaaactgcatcca

SEQ ID NO: 361797 - DNA, 614 bp, Homo sapiens
gcacagctagtaagtagtaaacctgacagtgaactctgagtctatctctgcactatccaatatggtagccatcagccatgtgggggctacttaatttaatttaataaaaattaaacaaaattagagactgacttccttagttgcattagacacatttcaagggctcaatcaatagtcacagactccatttgacccagagtctatgctcttwatctttatgctctatttccctctgtggaaaacatgaaattaaatgctaaacagtatgaaactgaatataaacgctggtgaaattctgaaaagggtaacatctctgtaattttaagtctttaggcttatgaaggatcataaactccacaaggatagaaactcttttgtccatgttcacaaagtgaatggtatggagccagctctcaaaacacacttgttgaatggatgagtcaaggatgagtgaataaaagtttggagatagacttacaatgtgtattatttggactgatagctagaaaacagctcctgggcagaataacctcaccccaactctagatgttgtaaagaacaggatgtacttctgccatagcagatagaaatatttacacagatcaaaccataag

SEQ ID NO: 361798 - DNA, 604 bp, Homo sapiens
atttaaaaagaaaaaaaaagtcatattttattgagcacctactatgtgatcattattgtactaggtgccatgaaagactaaaatacaaacagttcctgttctcaagttgtttatgctttgctccatgagacatcccaagtgaagaatggaatactaaaaattaataatacctattattttcctaatgctgtcatttaccagatgctgtaccaagaatattacatatattatctcatttaaccctcaaagctatcctctgatgtatgtataattacaatctccatttcataggtaaggcttaaaaaggtaaagtaacttgtctgagatggcacagctagtaagtagtaaacctgacagtgaactctgagtctatctctgcactatccaatatggtagccatcagccatgtgggggctacttaatttaatttaataaaaattaaacaaaattagagactgacttccttagttgcattagacacatttcaagggctcaatcaatagtcacagactccatttgacccagagtctatgctcttaatctttatgctytatttccctctgtggaaaacatgaaattaaatgctaaacagtatgaaactgaa

SEQ ID NO: 361799 - DNA, 547 bp, Homo sapiens
tttctgaaagagccacggttgaaaatcttaattaattgttccatactgcttcaggatcattatgcaatgtaataaaggccatgtaattatgaaattttacagccattatcaaggctgatggctcgtaattcatcctcagctggacccaatggcttttaggcactaggctcctctttgatgaactacagacagatctatcaggcccaaacaatatccaggcgaggcagctataatagctacctacagatgaagccatagataaagataaactataaatctacacacacaaatgcaggcacattgcctggggatgacagaggagagaggatgagacacttgggaaaggtagttgctcccacraaggccacctcctgtgcttctcgctcattcactccagaatggggtggattttataaaagacagcaaaaccccagtgaacatctcatttattctccgtatctcgaaatcaaatgagagaaggaaagggtgtccatgagcattgtatttagtgcattatttaaagggcagagactactcagatatccta

SEQ ID NO: 361800 - DNA, 547 bp, Homo sapiens
tttctgaaagagccacggttgaaaatcttaattaattgttccatactgcttcaggatcattatgcaatgtaataaaggccatgtaattatgaaattttacagccattatcaaggctgatggctcgtaattcatcctcagctggacccaatggcttttaggcactaggctcctctttgatgaactacagacagatctatcaggcccaaacaatatccaggcgaggcagctataatagctacctacagatgaagccatagataaagataaactataaatctacacacacaaatgcaggcacattgcctggggatgacagaggagagaggatgagacacttgggaaaggtagttgctcccacgaaggccacctcctgtgcttctcgctcattcactccagaatggggtggattttataaaagacagcaaaaccccagtgaacatctcatttattctccgtatctcgaaatcaaatgagagaaggaaagggtgtccakgagcattgtatttagtgcattatttaaagggcagagactactcagatatccta

SEQ ID NO: 361801 - DNA, 578 bp, Homo sapiens
gagtataaaaaggaaatgtaataaaagcttrtttgaggagttaatcagttaaataggtattttgttaaaaaatgcaaataaaatacatattggaacaatgagagatacagggagatcactactaagttagaaacattgtgcattcatgattttagaaaaaaaatctcttttgcacctctctcactaacgtaccctggcacagcatcattttggctaccagcaatatgactaagaccatcttatgtgcaccctaacacctctaaaagaggagaacaaggaaagaagcttattttgtatctcatagcaaggaacattcaaggcaggctaaactagcttgagaaaaagcaagaattatttcatgggttttgggggtattgctcaaattgtaaaggagctatatcagattgtcaaatgtccagccacaatgaaaaaactaattaaatagaacaagttaaatctatgaaaattcacaagtctaaaataggaaaataaatataaggcacttaaacagttatttataatgcaaaagaatggcagctcaaataatatataattagattcattgatttttattagta

SEQ ID NO: 361802 - DNA, 578 bp, Homo sapiens
gagtataaaaaggaaatgtaataaaagcttatttgaggagttaatcagttaaataggtattttgttaaaaaatgcaaataaaatacatattggaacaatgagagatacagggagatcactactaagttagaaacattgtgcattcatgattttagaaaaaaaatctcttttgcacctctctcactaacgtaccctggcacagcatcattttggctaccagcaatatgactaagaccatcttatgtgcaccctaacacctctaaaagaggagaacaaggaaagaagcttattttgtatctcatagcaaggaacattcaaggcaggctaaactagcttgagaaaaagcaagaattatttcatgggttttgggggtattgctcaaattgtaaaggagctatatcagattgtcaaatgtccagccacaatgaaaaamctaattaaatagaacaagttaaatctatgaaaattcacaagtctaaaataggaaaataaatataaggcacttaaacagttatttataatgcaaaagaatggcagctcaaataatatataattagattcattgatttttattagta

SEQ ID NO: 361803 - DNA, 564 bp, Homo sapiens
tatctgaataatattcattatgtggtctgcactaataagcacacatatacatacacatacctgttcctgttgtggttcccccattactcatccaactaattgcctaagccacagaactagaattatccttgattcttcctcccttgttagtatttcactccaatatttcacaatttctcactgctccttacctccttgatatctttaaattaatcccttccttgtatttcttctgccactgtattatttcaggttctcatcacttttcactcttattactctaatttctatagttttgytggcttctgctcaatcatcttttaattactttcggtatgaggttgttaaaggtccaaatctgagctcctgagacaaagatataagggcaaatagtttattggcgagttattcctgaaggcagagtaagggagtaggaaaagtaaaagaggaagaaagttattaaaggttgcatttatggctgtgtgtaactgaggacctctgagattttccacttgtgaccttctgaggaaccatgtataacatatttttgaattcttcctacca

SEQ ID NO: 361804 - DNA, 617 bp, Homo sapiens
agagagccctctatccttgcaataagacagggatctaattgagttgactaacagaagctgctgatgggcagataaactaaaagagcaccctgtaacacatgcccactggggcttcagctgtaaacattcacccctagacactgccatgggatcagagctccacagcctgcccatctgtatgctcccctagaggtttgagcagccggacactgaagaagtgagccacaccctcatcacacaccctgcaagggagacaagagaaattttcccatttcaataccagcacagccacaggggagtagagcaccaggtgggttcttggggtccctgatttcaggacttgaatcttaggcagcatctttggacctccctgggccagaagggagcccactgccctgaagagtgagctccaggccagacagtattcaccacaagctgacttcagagccyttgggtagcatcttgggatgtgccgtgggccagaagggagctcactgcccttgggccttaagggaacatcagcagtagtgtggcagtattccctgtgcctgggtggcagtggctacaaagtgaggctcctctgcctttggaaagggtggggaacagtgcgacggatt

SEQ ID NO: 361805 - DNA, 591 bp, Homo sapiens
aacttttgtgattatagcaaatgccctcaagcaaaaaaaaaaaagaaaaaaagttaaaaaggtttataaatgraaaagcaagaaaaagaaaaaaagatgaataaagtcatactaagggaagaaagattcttcaaggaagtggtaagaaaactaaaattaagtctcttcttgggtatattttattttcttgaaaaacaaatgttactgacaaccaccacaaaaatatttggcagtgtggttgatacatacataactgcattgtgtaaagattcagatgggcatgtgttaaaaatttttatttatttttaattctaagcagcagtatatgttggaaacatgttagagatttaaactagaaacaatactaagtacactgaaagccgcaggagtcatcatagacttttgttttgcgaaggatattaatggacatggattcaaatcttcacaccaacacagactccttttccagcatccatggtaagtgatcccaaagcctctggttgaacataagcagaagaggcagtttgacctctttttagtaatacaaatcatcagaaaattttgttttaatttgataaaaatgccttgtca

SEQ ID NO: 361806 - DNA, 591 bp, Homo sapiens
aacttttgtgattatagcaaatgccctcaagcaaaaaaaaaaaagaaaaaaagttaaaaaggtttataaatggaaaagcaagaaaaagaaaaaaagatgaataaagtcatactaagggaagaaagattcttcaaggaagtggtaagaaaactaaaattaagtytcttcttgggtatattttattttcttgaaaaacaaatgttactgacaaccaccacaaaaatatttggcagtgtggttgatacatacataactgcattgtgtaaagattcagatgggcatgtgttaaaaatttttatttatttttaattctaagcagcagtatatgttggaaacatgttagagatttaaactagaaacaatactaagtacactgaaagccgcaggagtcatcatagacttttgttttgcgaaggatattaatggacatggattcaaatcttcacaccaacacagactccttttccagcatccatggtaagtgatcccaaagcctctggttgaacataagcagaagaggcagtttgacctctttttagtaatacaaatcatcagaaaattttgttttaatttgataaaaatgccttgtca

SEQ ID NO: 361807 - DNA, 599 bp, Homo sapiens
tgttggctatttgtgcatcttcttttgagaaaggtcaattcaggttctttgctcatttttaaatcaggttttttgtttttgtttgctattgagttgcatgagttcctcacatattgtggatattaacccctaattaaatatatggtttgcaaatattttctgacattccatgagttgcctttttactatgttgattaatttatttgctgtgcagaaactttttagtttgatgtagtatgatgtatttatttttgcttttattgcctatgctttttgtatcatatccaaaaaatcattgccaagagcaatgtcatgaaactttttccctatgtttttgtccaggagtcttatggttttagatygtacatttaagtcttcaataaattttgagttgattttgtgtatgggggaaaaaaaacaaccctggggtttggtttgttttttggggggtttttttttttttttttttttgcatgcagatatccagtttcctcagctccatttactaatgacactattccttctattccttccctattgtgtattctaggtaactctgaccatgtgcatgtgggtttatttctgggctttctattctg

SEQ ID NO: 361808 - DNA, 599 bp, Homo sapiens
tgttggctatttgtgcatcttcttttgagaaaggtcaattcaggttctttgctcatttttaaatcaggttttttgtttttgtttgctattgagttgcatgagttcctcacatattgtggatattaacccctaattaaatatatggtttgcaaatattttctgacattccatgagttgcctttttactatgttgattaatttatttgctgtgcagaaactttttagtttgatgtagtatgatgtatttatttttgcttttattgcctatgctttttgtatcatatccaaaaaatcattgccaagagcaatgtcatgaaactttttccctatgtttttgtccaggagtcttatggttttagattgtacatttaagtcttcaataaattttgagttgattttgtgtatggkggaaaaaaaacaaccctggggtttggtttgttttttggggggtttttttttttttttttttttgcatgcagatatccagtttcctcagctccatttactaatgacactattccttctattccttccctattgtgtattctaggtaactctgaccatgtgcatgtgggtttatttctgggctttctattctg

SEQ ID NO: 361809 - DNA, 599 bp, Homo sapiens
tgttggctatttgtgcatcttcttttgagaaaggtcaattcaggttctttgctcatttttaaatcaggttttttgtttttgtttgctattgagttgcatgagttcctcacatattgtggatattaacccctaattaaatatatggtttgcaaatattttctgacattccatgagttgcctttttactatgttgattaatttatttgctgtgcagaaactttttagtttgatgtagtatgatgtatttatttttgcttttattgcctatgctttttgtatcatatccaaaaaatcattgccaagagcaatgtcatgaaactttttccctatgtttttgtccaggagtcttatggttttagattgtacatttaagtcttcaataaattttgagttgattttgtgtatgggggaaaawaaacaaccctggggtttggtttgttttttggggggtttttttttttttttttttttgcatgcagatatccagtttcctcagctccatttactaatgacactattccttctattccttccctattgtgtattctaggtaactctgaccatgtgcatgtgggtttatttctgggctttctattctg

SEQ ID NO: 361810 - DNA, 599 bp, Homo sapiens
tgttggctatttgtgcatcttcttttgagaaaggtcaattcaggttctttgctcatttttaaatcaggttttttgtttttgtttgctattgagttgcatgagttcctcacatattgtggatattaacccctaattaaatatatggtttgcaaatattttctgacattccatgagttgcctttttactatgttgattaatttatttgctgtgcagaaactttttagtttgatgtagtatgatgtatttatttttgcttttattgcctatgctttttgtatcatatccaaaaaatcattgccaagagcaatgtcatgaaactttttccctatgtttttgtccaggagtcttatggttttagattgtacatttaagtcttcaataaattttgagttgattttgtgtatgggggaaaaaaaacaaccctggggtttgktttgttttttggggggtttttttttttttttttttttgcatgcagatatccagtttcctcagctccatttactaatgacactattccttctattccttccctattgtgtattctaggtaactctgaccatgtgcatgtgggtttatttctgggctttctattctg

SEQ ID NO: 361811 - DNA, 607 bp, Homo sapiens
caaaaattgacattataataaatagtacctatgttacaaagttttttgtgtggaataaatgagatactgcatataaggtgcttagcacataatagaagcttaataaatttgaccaataatgataatattgcaaattacaacagtagccacatatgtttgataagaattactagtcaattcattacaaatgcacatttttctgtcccattgtctttttcattgattctccaaatcccttgataaggatagagatggcatgtattcatcaggtaaaccccagattaagaatttgacataatatatgtgagagtagagtttggtaaaccttttgtataaaggaccagatagtaagtattttagatgttgttgtctcggtcgaactactcagctctacttctgtgtygtgaaaatggctacagataatatatatttgaatggatgtgtctacattccaataaaactacttacaaacacaggcaaaggagaggaatctggtccatgggctatagtcgaccaaaccctgctttatacaacgtggttctaggttagaataacaacagatttgacatagtcctgttgctattgcagacaaagaagtagacattct

SEQ ID NO: 361812 - DNA, 501 bp, Homo sapiens
aaacacaggcaaaggagaggaatctggtccatgggctatagtcgaccaaaccctgctttatacaacgtggttctaggttagaataacaacagatttgacatagtcctgttgctattgcagacaaagaagtagacattcttgacacttttctgcatatctcattattggctagataattcattattggctagrtaactgtttcctttcttatatgttctaaagtgttttcctataaatgaacatcttcagaagctatttacattaagatgcatgtggcgttaaaccagtaagtgcatagcaagaccattagcaaacaaaagtttgtttcattttttcccttatccttctgtctctaaggatgatgtcaaacccatgtatctcaacaaccactttgaatctacttacaattgatggtaaatgcacagaagtgtttttcccctcaaatttgttcttataaaagagattctgattttaagggactctgtaaaagataatgaatca

SEQ ID NO: 361813 - DNA, 538 bp, Homo sapiens
atcaagctaaattcccatcaatgatagattgacaaagaaaatgtggtacatatacaccatgaaatactatgmagccataaaaaagaattagttcatgtcctttgcagggacatggttgaagctggaggccattatcctcagcaaacgaatgcaggaacagaaaatcaaatacacgttctcacttataagtaggagctaaaggatcagaactcatggacacatagaggggaacaacagacactggggcctatcggagggtggagggtgggattaggaagacgaaaaggaaaaataactaatgggttatcactcaggcttaatacctgggtaataattggaacaacaaacccccataacagaagtttacctataaaacaaacctgcacatgtaatcctgaacttaaaataaaagttaaaaaaaataaaatacaataaagagatgtctgtcctgcctattgaaaacaaacaaacaaaaaaaaagcgtaatcctcaggacatatttcaataaggactaaatatagggaagatgttggttaca

SEQ ID NO: 361814 - DNA, 459 bp, Homo sapiens
tccacaattaatgaattacttcttactcaagtaagctctttaaaatgttattgtgccttagaattttttaaacatttatttttattctttgatacaatctcttttcatttgattctgcttttccctcatttgacatttttacctcttaaaagtatctggttatatccacaggatgtgtcttctggaatcatataaagattttcaaatattttaatcatcttgtgcttatttcagaaggttattttcagatatttgcttattttctgaatgatgtttatttttcacctgaattctgtaattttatttcataagtgtgaaamgatcagtcagggttttggtcatgctcagttttcttttccaatatgtcagaaaacataaaaggccaagggtaggagcatgggtaggtcctgtgccaagggtgaccctatccagatgtcagagacacatgacctggcaagg

SEQ ID NO: 361815 - DNA, 529 bp, Homo sapiens
ctatgcactccactaaagaaagtttgttgttctcaggtctgcctcatttatcaaagccttgcccatttcattttatttattcatgcaaaaaatctttatttttaaggagtttaatttgtatagtttctcagatttgcagaataagggtgtgggacatatgttgtttctaataattgtattctctgttgggaatactaattccacaaaatgtccagggaagaaggtgttgcactttatggtaaacattttttggtaaatactgcaaactatgcagcttgctgtccccatagtcctgattacaatkcatattagcataataaaaatatgataaatcttattaggaaaattgctttttaaaaataacttattttttcagtcacttgaacacaagatcctatatcttattcatttgcgtgcattatgtaatatctatggtagttatttagaacttgagtacttggaaaaatatagactcagcccattccctgtatccaaaaggctcttttctctttcatctatgttaaaatgg

SEQ ID NO: 361816 - DNA, 601 bp, Homo sapiens
ttttgtgtgtgtgtgtgtgtgtgtgtgtgtgtgtgtgtgtgtaagtataacttcctaagtatttcagaggaacataagctgcctgccaaacaaatatcaaacagcaattctcatcctaaacctgcttttcaggaatcaacatttttaactaaaaaactgagactctcaatatgcaattttgcatatgagagaatgggtggaaatttgtaaatatgggatagagtggcctcaaaagacctgaaaacataccacatgggtgggtacacacacataaatctctcccagaaacatacacataaaattatgtggttatatgtrtatgaagatgggcatgtttatataaactactttatttttaaaatgttttcctacatccagaacaaatcaacaaaacaatattaaaattatatcatcaagaaattgaaaccaaactattagcagacactaggtaatgagaaaagtggaataatttttaaaagtagagataaagtttgataaataccacacaggtctgttaaaaaaatgataatcaaaaagcaatttctgtcttcactttgatcaacatatttacctattctgcagtttacaaactgaacttata

SEQ ID NO: 361817 - DNA, 478 bp, Homo sapiens
caaatcaacaaaacaatattaaaattatatcatcaagaaattgaaaccaaactattagcagacactaggtaatgagaaaagtggaataatttttaaaagtagagataaagtttgataaataccacacaggtctgttaaaaaaatgataatcaaaaagcaatttctgtcttcactttgatcaacatatttacctattctgcagtttacaaactgaacttataattttgactggaatgtgaaactgatcaatttctttggcagcatccacaaacaagttgagttattcctcaagaaatcacaggaaagaagattttgggaaagagcaaaggggagtaaccggtaayttatatgccagaggaagtatacaatgggttcttttagtgctggatattgaagagagaatgctcttgaagttcccataaaacattatgtaaattaagctaaaatggcaatgacttataaaaacaaagaaaaatgc

SEQ ID NO: 361818 - DNA, 601 bp, Homo sapiens
attctctcccaataacaccaccattttagtcactcaaagcttctgcaaaaatgactatcaaactaaaaagagtaataagtaatatttattatgcatcatgaaatattccacttactttatgcaaataagcttttaaaaaaatcaaccctaagaggtatgtattgttattattccacagcgataggcagaattataagatgccccctgtgatttctgctttctgggatccacacttttgtgtaacccccttctcattgattgcaggtagaacctgtaacttttttttccttctttttttttttttttttgagatggagtctcactctgtcacccaggctggagtgcagtaatgtgatctcggctcactgcagcctctgcctcccaagttccagcaattctcctgcctcagcctcccaggtagctgagattacaggcacatgccaccacacccagctaattttttttatttttagtagagacagggtttcaccatsttggccaggctggtctccaactcctgacctcaggtgatctgcctgccttcgcctcccaaagtgctaggattataggtgtgagccaccgcgcccagcctagaacctat

SEQ ID NO: 361819 - DNA, 632 bp, Homo sapiens
ttttccccaagggtgacactttctttacaactttcttatgtcaaagctgctttttattttattcaccatgtgaaccagtttgtaaagatgggtcaaggttctctttgttcctctttgctattttcaaaccatttttgttctttttgtcccccccacaaatctcaatctctatgaaagtcaggctctgagactctgccatttcccaccctcacttatatgtcatccatatttcttttgcaaaagrcacaatgtcttcttctttacctgtactttcacaaccattcctgatggcatcaattctcatttggataattcctctggcctctcagttctttgaccttccaaaatccagtgatcatttcttttatcccacagtagtcaagcacatggttatacccttgattttgttttagtagcaagtggcccaccttcgaactcacaataacaagtatcctttcttctaatgatcacctctatatcttccagttcacctaacctggaatccccataccatcattccctcaagggccctgagagttttcatccattaacccaactacattttcaatattggtcatactttcatcttctctcatcactctgctccatctcttacctagattccagaactc

SEQ ID NO: 361820 - DNA, 632 bp, Homo sapiens
ttttccccaagggtgacactttctttacaactttcttatgtcaaagctgctttttattttattcaccatgtgaaccagtttgtaaagatgggtcaaggttctctttgttcctctttgctattttcaaaccatttttgttctttttgtcccccccacaaatctcaatctctatgaaagtcaggctctgagactctgccatttcccaccctcacttatatgtcatccatatttcttttgcaaaaggcacaatgtcttcttctttacctgtactttcacaaccattcctgatggcatcaattctcatttggataattcctctggcctctcagttctttgaccttccaaaatccagtgatcatttcttttatcccacagtagtcaagcacatggttatacccttgattttgttttagtagcaagtggcccaccttcgaactcacaataacaagtatcctttcttctaatgatcacctctatatcttccagttcacctaacctggaatccccataccatcattccctcaagggccctgagagttttmatccattaacccaactacattttcaatattggtcatactttcatcttctctcatcactctgctccatctcttacctagattccagaactc

SEQ ID NO: 361821 - DNA, 585 bp, Homo sapiens
cataaaaatgaggaccattgctatattaacttcactgcattgctataaggtaatatttttaaaataagttttactcaacaatacaatcaagtctgacaactcaaatctatttttaagatattttcctatatgatgtacgttaccctaataatacaaactaatatttattgaaaaagtaccacctgctatgtatatttatcgcagcacaattcacaatttcaaagatgtggaaccaacttaagtgccyagcagttaatgagtggataaagaaaatgtggcatatatacaccatagattactactcagccattaaaaggaatgaaataatgtcttttgcagcaacttggatgcagctggaggctattattctaagtgaagtaacacaggagtggaaaatcaaaaactgttctcacaagtgggagataaactatgagtatgcaaaggcatgcagagtgatataatggactatagagactcagaaaggggaaagtgggagggaggctagggataaaaaactacacatttgttacagcgtccactactctggtgatgggtacactaaaatctcaattcaccactgtatca

SEQ ID NO: 361822 - DNA, 405 bp, Homo sapiens
tcaatgttctgttttaatccattaggaaatgtttgtcttacattggaaaaattcaattattcacataggctgtggttaattaacattttcttttcccctccttcccttctttccttcctttttgctttccatgtcttatgtctattgtttccttttagttatttcccatttttacartaattactaaacttctatggttgcttattgtggtagtaaacctataagagcccagtgattcctcctggtgtttacaaccttgtttggttccttcttacaatgaaccaggatcagtctgtggggtgaacagaacaagggagaactgacagcatatcacctccaataataggttgggcacccttctctctcactctccgcagcccccaatctttgttctttctcttatca

SEQ ID NO: 361823 - DNA, 595 bp, Homo sapiens
ttcattctgcctccaatgacagtaattctccctttttaaggccgataatatcctgttttgcatatacactgcattctttttatccattaatctgttgatgggcacttaggttgatcccatatttggctattgtgactaattctggaatgaatgtgggagtgcagatatctatccaacacaccggatagtcaatgaaatctcccaaggcagattttattacctttggatatatacccagtaataagactgctcgatcaaagggtaattctattgtttttttttttaggatccttcacaatttttcccataattactatattgtactaatttacattcccrccgacagtacacatgttcccttttctccctatctttatcaacactaacttttgtcttttaaaatagccattctaacaagtgtgagatgatatctcattgatttaaatttgcaattgtctatgtatgtcttcatatttatacagatttccaatatacaagatataacggggacttgtttttagatctactctgacaatgtgtctttaattggtgcatttcaaccattgctactcaaagggattactgacatggttgt

SEQ ID NO: 361824 - DNA, 588 bp, Homo sapiens
tccattacctcaaatatttattatttctttgtggtgagaacatttaaaatcatctcttttagctgttttgggaaatatacaacacattcttattatctataytcaccatgctgtgaaataaatcaccagacattattcctcctgtctaatagaaacttcaaaccctttgaccaatgtctctccttccccaaccaccccttcataacaacctgtggtaaccaccatatgattctccacttctatgagtttgacttctaagattccacatataattgagatcatatggtaatcgtccctctgtgtctagcctattttacctagcataatgtactgtaggttcatccaagttgttgcaaatgacagaatttcctatatttttaaggctgaatggtatcacattgtgtatatgtaccacatttttgttaatccatttatccattaatgagctcttaaattgtttccaaatcttggctaatgtaaataatgctgaaatgaacatgagagtaaagacatctcttcaacatagtgattccaatttttttggcatataccctggagagagattgctatatcatatagtaattctat

SEQ ID NO: 361825 - DNA, 595 bp, Homo sapiens
gtcagtaatcacttcttcaaagaaagcttcctgtgtctcacatatcacagaaaaccccattttaagaagttgtcagatagtttatctacaagatcccactaaagcctttttggaaggcagggattcaggacattagaaggaaagattgagagataccaatgacaaggaacatargtcatatttctgcatttaggagagtgtttccatgtgcaaggaatccttctttaaattttcacatgacaactataccttcaagactttgagagaaccctgtgataatgaagttattttattctatagactccaccatgaatttattgggagcatgtgttctgctgagatttcgttgtggaattattgttgtaaccaagcaagttagagagaaatgccacactttgagatgaattcaggagtcctttattagctggcgaccgagagacagctaatgcttgaaattctctcggccccgaagaaggggcttgattttcttttatactttggtttagaaaggagagcggggagcttaactgtagcaatcttacagaagtaaaacgggcaaaaaagttaaaaagacaaatggttacagaaaagcaaa

SEQ ID NO: 361826 - DNA, 595 bp, Homo sapiens
gtcagtaatcacttcttcaaagaaagcttcctgtgtctcacatatcacagaaaaccccattttaagaagttgtcagatagtttatctacaagatcccactaaagcctttttggaaggcagggattcaggacattagaaggaaagattgagagataccaatgacaaggaacataagtcatatttctgcayttaggagagtgtttccatgtgcaaggaatccttctttaaattttcacatgacaactataccttcaagactttgagagaaccctgtgataatgaagttattttattctatagactccaccatgaatttattgggagcatgtgttctgctgagatttcgttgtggaattattgttgtaaccaagcaagttagagagaaatgccacactttgagatgaattcaggagtcctttattagctggcgaccgagagacagctaatgcttgaaattctctcggccccgaagaaggggcttgattttcttttatactttggtttagaaaggagagcggggagcttaactgtagcaatcttacagaagtaaaacgggcaaaaaagttaaaaagacaaatggttacagaaaagcaaa

SEQ ID NO: 361827 - DNA, 420 bp, Homo sapiens
ctataccttcaagactttgagagaaccctgtgataatgaagttattttattctatagactccaccatgaatttattgggagcatgtgttctgctgagatttcgttgtggaattattgttgtaaccaagcaagttagagagaaatgccacactttgagatgaattcaggagtcctttattagctggcgaccgagagacagctaatgcttgaaattctctcggccccgaagaaggggcttgattttcttttatactttggtttagaaaggagagcggggagcttaactgtagcaatcttacagaartaaaacgggcaaaaaagttaaaaagacaaatggttacagaaaagcaaacagttccaggtgcaggggctttaaatccatcacaaggtgatagacactgggctactaaccagacacga

SEQ ID NO: 361828 - DNA, 638 bp, Homo sapiens
tttagtcttgtttttgttttgggtttgtttgyttgttttggcataaaaatacctttaacatttgtttgcagttttctttttttaatctcacataaacatcatctaaaagcaagttaacatttttgcattctctattcatgcctttctttcctttatttaaaaatgtattcataactttttaaatatacttttaattattttcatcttttcaagtatcattttaccaattgaatggaaatatcacttttattaggaaagataaatgttacacattatttattttagtgttccacagaaatttgctctgaaatacctgtggttgaaaaggagagggatagagacttttctgaaaatcacaagtcaaaatttgctcagaatcacatgctttaaaagagctgcgattgttttcattatatggcttagtttgttctaattatgaaaggtacacaaggaattaatttgtgtatacagaacactgagattattattctgaatgcagtgaaagccactttgctgctctggaagttagaatgtcctcatattgtttgctttttgtcttacacaaacgctatagacattggctaagtcttttctttgatgccttccaacttgtttttgtgaatacatgtctttgtaca

SEQ ID NO: 361829 - DNA, 638 bp, Homo sapiens
tttagtcttgtttttgttttgggtttgtttgtttgttttggcataaaaatacctttaacatttgtttgcagttttctttttttaatctcacataaacatcatctaaaagcaagttaacatttttgcmttctctattcatgcctttctttcctttatttaaaaatgtattcataactttttaaatatacttttaattattttcatcttttcaagtatcattttaccaattgaatggaaatatcacttttattaggaaagataaatgttacacattatttattttagtgttccacagaaatttgctctgaaatacctgtggttgaaaaggagagggatagagacttttctgaaaatcacaagtcaaaatttgctcagaatcacatgctttaaaagagctgcgattgttttcattatatggcttagtttgttctaattatgaaaggtacacaaggaattaatttgtgtatacagaacactgagattattattctgaatgcagtgaaagccactttgctgctctggaagttagaatgtcctcatattgtttgctttttgtcttacacaaacgctatagacattggctaagtcttttctttgatgccttccaacttgtttttgtgaatacatgtctttgtaca

SEQ ID NO: 361830 - DNA, 638 bp, Homo sapiens
tttagtcttgtttttgttttgggtttgtttgtttgttttggcataaaaatacctttaacatttgtttgcagttttctttttttaatctcacataaacatcatctaaaagcaagttaacatttttgcattctctattcatgcctttctttcctttatttaaaaatgtattcataactttttaaatatacttttaattattttcatcttttcaagtatcattttaccaattgaatggaaatatcacttttattaggaaagataaatgttacacattatttattttagtgttccacagaaatttgctctgaaatacctgtggttgaaaaggagagggatagagacttttctgaaaatcacaagtcaaaatttgctcagaatcacatgctttaaaagagctgcgattgttttcattatatggcttagtttgttctaattatgaaaggtacacaaggaattaatttgtgtatacagaacaytgagattattattctgaatgcagtgaaagccactttgctgctctggaagttagaatgtcctcatattgtttgctttttgtcttacacaaacgctatagacattggctaagtcttttctttgatgccttccaacttgtttttgtgaatacatgtctttgtaca

SEQ ID NO: 361831 - DNA, 626 bp, Homo sapiens
ctgataagtgggcagtaaatgaaagaatagtgtaatcagctgatgttagagtgcaccttttaacaacgttcaagtacagatgcatcttaaaattgacattgtaaaaacaaagtttgccagaatctagtcataatatggctgtccttgtctgcacatgcatgaacttgatctgaaaacctttgattgacgtcttctggtgatatgatcaccatcaaaacttacagagatgctgtcagtaggttgaataatctcataaataggagagtaggactctgtcaagaaatgtgatgtcaccaaagttcctgattagcaaagatgatgayaatgtggggtaaatcatggacagggtgtgttgaaggtgattcagaagagtttgatctgagtgacaggaattttaggaatgctgttgttagtgtattctgcttatattttccatctttgtcatcatagaagtgatataagactaatacctgcatttatagtagttgaaagtttttttcagtaataatataaaattgtaagtgataagatgtatttgtcctatagtctacgaatttattcctatattgtgacataaaataatgatgcattttacaattgactcaaataataactatttcaattcc

SEQ ID NO: 361832 - DNA, 581 bp, Homo sapiens
agataccacttcacacccatttggatggctactataaaacacagaagaaacagaacgtaagtcatggtgaagaccagaggaattgaaaaccttgtataatgttggtaggaatggaaaatttttacagccactatgcaaaacactatgtggtttcctaaaaaaaatgcaacagaagaattaccatgtgttctgggttttcttagcttctgtgtttgactatttgggatccgttcatcaccaagccaattatattaactatatcttattttctgtatttttgttgctctggcttttgagggccttgcaaatcatgggagagaatgtccytcccaaagctagctaattctcgaatataataacaatttgtctataagcatgtctttcatatgccaaacaaccaatcccagtctgtagcccagccaactccttagctaactctcgctggccactatttcccatattctatatacccagggcacaaaccaagtcactagagaccatccctgtagcccaaagccaaccagaattatttaaactaacccatcctatgctcaaacctgccctgtgtttcccttggagtc

SEQ ID NO: 361833 - DNA, 499 bp, Homo sapiens
atttggattcataccttctgaaattacttgacgattactgtgtctctggttatttgcttctagttggcaatacaaaggaacaatgtgaatgaaactcataaagaaaaacctatgatttaatgggcgtgtgtaacactagagggaaggtcagagttagtctatgcatgggtataggtaggagtctcagtgggtgtcagccattctgtgtcaacaaatcaaatatttaaggtggatctaaaagaaaggtaatatctctgccaattaaactagagtcacgcattgaytaatggcaaatacagtctaagaagtgcatttttaggcaattttgtcattatgagaacaacgtagagagtacttacacaaacttagatggtatagcctactacatggctaggctatatggtaaagcatgttgcttctaggctacaaacctttactgaactgtaagcaatgataacacgatggtgtcatatcccatatatatacacatacacacaca

SEQ ID NO: 361834 - DNA, 499 bp, Homo sapiens
atttggattcataccttctgaaattacttgacgattactgtgtctctggttatttgcttctagttggcaatacaaaggaacaatgtgaatgaaactcataaagaaaaacctatgatttaatgggcgtgtgtaacactagagggaaggtcagagttagtctatgcatgggtataggtaggagtctcagtgggtgtcagccattctgtgtcaacaaatcaaatatttaaggtggatctaaaagaaaggtaatatctctgccaattaaactagagtcacgcattgactaatggcaaatacagtctaagaagtgcatttttaggcaattttgtcattatgagaacaacgtagagagtacttacacaaacttagatggtatagcctactacatggctaggctatatggtaaagcatgttgcttctaggctacaaacctttactgaactgtaagcaatgataacrcgatggtgtcatatcccatatatatacacatacacacaca

SEQ ID NO: 361835 - DNA, 499 bp, Homo sapiens
atttggattcataccttctgaaattacttgacgattactgtgtctctggttatttgcttctagttggcaatacaaaggaacaatgtgaatgaaactcataaagaaaaacctatgatttaatgggcgtgtgtaacactagagggaaggtcagagttagtctatgcatgggtataggtaggagtctcagtgggtgtcagccattctgtgtcaacaaatcaaatatttaaggtggatctaaaagaaaggtaatatctctgccaattaaactagagtcacgcattgactaatggcaaatacagtctaagaagtgcatttttaggcaattttgtcattatgagaacaacgtagagagtacttacacaaacttagatggtatagcctactacatggctaggctatatggtaaagcatgttgcttctaggctacaaacctttactgaactgtaagcaatgataacacgatggtrtcatatcccatatatatacacatacacacaca

SEQ ID NO: 361836 - DNA, 593 bp, Homo sapiens
atttccaagctcagctattcccagcagtgccacttatcaaagatctgggaatcatctttcaagatgttttaagacatcttttctccaaaaaatccagtctgattaacttctacattcttggtaagtttagcctctatactagagtctataagacttgmtgccaaatagactcacttttggtatatccaaaggaagctagtagattgaagtgatgaaactaagactgaaagattttctgcctcagtgacaagttacgtgagtaattctatggtggttctattaccccacaatgagtagacatacagcgtaccaatttctacatattacacatgtattgcacaaaagcggcatatccagatgccatagaaagtgaaaacaagagttcacacagaaacagttgggacactgagccccaccatttacaagcccttgcgaagttaagtaattctttggagccacagtttaccatcttacaaaatgagtactgccatatttacatcctaattcattcaataaatatttattgagtaactactaagtgtcaagcaatgtactaggtgcggtggatacataaaacagtgagcaaaactaac

SEQ ID NO: 361837 - DNA, 557 bp, Homo sapiens
ctgaggcaggcagatcacttgagctcaggagtttgagaccaacctgggcaacatgacgaaaccccatccctacaaaaagtacaaaaattagccaggtgtggtggcgggcacctatagtcccagctacttgggggtgctgaggcgggaggatcacttgagcttgggaggtggagactgcagtgagctgtgttcatgtcattgcactccagcctgggtaacaaagtgataccttatttcaaaaaggaaacaaaaaagaaagtaaatatgtagtgaatcaggtgccctagagaataatggagaaagtgcctgggaagtcaagggtaggattagtagaaacagaaagacttctataataaggcaacayttgagcaggaacgtgaaggaagttgagggagcaaagcacgtgtatataatgagggaagaatgtgatgtgccaggcgagggcgcagcaggtgcacaggctcagaggtaggggagtacccagcatgtttccaaaccacgcagggcccagcgtggctgcagtggggttggaatgagagattcaaatggggttaggg

SEQ ID NO: 361838 - DNA, 557 bp, Homo sapiens
ctgaggcaggcagatcacttgagctcaggagtttgagaccaacctgggcaacatgacgaaaccccatccctacaaaaagtacaaaaattagccaggtgtggtggcgggcacctatagtcccagctacttgggggtgctgaggcgggaggatcacttgagcttgggaggtggagactgcagtgagctgtgttcatgtcattgcactccagcctgggtaacaaagtgataccttatttcaaaaaggaaacaaaaaagaaagtaaatatgtagtgaatcaggtgccctagagaataatggagaaagtgcctgggaagtcaagggtaggattagtagaaacagaaagacttctataataaggcaacatttgagcaggaacgtgaaggaagttgagggagcaaagcacgtgtatataatgagggaagaatgtgatgtgccaggcgagggcgcagcaggtgcacaggcycagaggtaggggagtacccagcatgtttccaaaccacgcagggcccagcgtggctgcagtggggttggaatgagagattcaaatggggttaggg

SEQ ID NO: 361839 - DNA, 554 bp, Homo sapiens
gcaagacttaataaatgccagaatctcttctctattcatgcgatgaagttgtcccatgagatccattactgtcagaccccaatagatgccactcattctcaaatactcagacatacagtattcctaaaataatacacaatttcttaaatctgtcatttgaactggtaacaagttataaagagattaaacacaaaggtaactcattagccatgctgctatttttacctctcctgaccttaamagcactgatcagtagtgagtttaaaatctgtgctgctcaatgttagaagccatcttcagacacaactattatcagaaaaaaacaattatctgagaagcacaggattagttaatctatggctgacaatacaaacagtgctttagtttctcccatgagccagagacagaaaaacatctacctttttcatcagtgaagttcagggagagtatttctttccgagtacctataccatatttatcagacatctattttaatgtggactctgtacaaaacctattatctattagtaaattatataactacatgaaaaatc

SEQ ID NO: 361840 - DNA, 574 bp, Homo sapiens
gttttgacctttttgaaagaaaaagaaatcacaacatatctaaaattgtggaatacagctaaagcattactcagagagaaatttatagtactaaaatgcttatattagaaggaaaaaagttctcaaatcaatgacctcagcttcctcctttacaacctcaaaaaagaacagtaggcacagagtaagcagaagagtgataaaaccagaaatcagtgaaataragaacaggagcaaaaaagagaaaccaatgaaatagaaagttggctccttgagaataccaataaaattgataatatctagccaggctgattaagaaaaacagagaacatattaaaattatcagtatcaggaatgagagagtgtatcactgccaattttacagatataaggaggatattatgagatagtttatgctgatacattgaaaagttgggtgaaatgaaaaattctttaaaagacacaaggtaccaaagcttgttcaagaagaaacagataacctgaagagcactatgcctatttaataagtggaatttatagttaaaaaccttcctaccaaaaaaattccaggctttaa

SEQ ID NO: 361841 - DNA, 564 bp, Homo sapiens
ttttctctcttaatgacttctttcttttacatttgaaagattaatctgtatattcatttttaggtggcccttaggaggtatgtcaccttggaaccacagatagacctttttaactttgcagactcagaaatatgaaattatcagttttcccaaataagatcagatagtaaactcagattctaatttggaccataataggtgaaggagctgagatttaccaaagggtaaaaccagtctttaccatgtagtrtacattcttccagccagaaaacagagagaaacaagttaggggcaagagtaggatttcctaggtcttggaaaccaatagaaagacaaagagaatgcttatatggtcagatcagacacactgtgcttagtaaatgccaccttcaaatgccaaaatcctttgagagccaaagaatagagcataatccagaactagagtgagaggactatacctggagggatttgaaaagaaactggaaatatctgagaccaaacagcaatattaatggaactcttgtgttggccagagtcagaataagatggtcatataaggagatg

SEQ ID NO: 361842 - DNA, 592 bp, Homo sapiens
ttaagtttctaatgcatgaactttggggacacattcaaaccatagcactctgctcctggctccctcaaattcatgtccttctcacatgcaaaatacattcatttcatcccaataggcctaaagtcttaacttgtttcaacacttactcaaaagtccagaatctcatctgaatcagatatgtgagactcaaggcatgattcctcctgaggcaaattccccaccagctatgagcctatgaaattaaaaaagttatctacatccaaaatgttgggacaggcataggataaacattcccattacaaaagggagaaataggcaataagaaaggagtaacaggcccaaggaaatcagttcaaacctcacaaggaaaacaacagtaagtcttaagaagaagaatcttctttgacyccatatcccacatcaggggcacagtggggaagaagtagggctctcaaggcctcaggcagcgtcagggcttagtccactcagcagctctcatggtttgcagtctcatgcccatggctttctcagattggagttacatgcttgtgccccctatagttctgtggtctcagggtggggaggtaggggg

SEQ ID NO: 361843 - DNA, 374 bp, Homo sapiens
gtgagactcaaggcatgattcctcctgaggcaaattccccaccagctatgagcctatgaaattaaaaaagttatctacatccaaaatgttgggacaggcataggataaacattcccattacaaaagggagaaataggcaataagaaaggagtaacaggcccaaggaaatcagttcaaacctcacaaggaaaacaacagtaagtcttaagaagaagaatcttctttgactccatatcccacatcaggggcacagtggggaagaagtagggctctcaaggcctcaggcagygtcagggcttagtccactcagcagctctcatggtttgcagtctcatgcccatggctttctcagattggagttacatgcttgtgcc

SEQ ID NO: 361844 - DNA, 395 bp, Homo sapiens
ctcatgcccatggctttctcagattggagttacatgcttgtgccccctatagttctgtggtctcagggtggggaggtagggggtgattacccactcccatggctttactaggcattgcctagtggggactctgtgaatgatggcctctatcctatggctccaccaggcatagtgggggctttctgtggtaggttctctgtggtggctctgccccatgataagtctctgcctgggccccaggctgtcctcaacatcctttgaaatttaggcagaagccaccatggcttcatacctattgyattctgtgtgcctgcagaattagcaccatgtggacactgccaagatacacagcttataccttctggagcagtgggttgagctgcagctgggctcac

SEQ ID NO: 361845 - DNA, 619 bp, Homo sapiens
cttcacagcaaaactcaagacttacactgtatggacctaatgcctccagttctcatcttcccattctctcttaaaccctccccattcaggcttttgctccacaactctatcaaaattactttttatcttgctaaaaccaatggttagttcttattcttcatcttactagacctagcagcacaatttgacatagctgatcacttcctccttctggagtcactttcttcacttggttttcaggatatcccacttccttagattttctcctacctcactggtctctatgtctttttcctttgctagtttctccttatctcctgaacctgtaaacattggtggrctccagtatgcagttctcagaactcttccgtaccatttttatcaggcttgtgacttaaaatacaatactgccttgggataagaaacgcttcagtaacttgaatctagatattatctaattgactgttgcctctggtcttttactcagtacccattcgcaaatgtatatgagctatcttctatggggtaggggatagagacaataaagtaaggccaggtgaacaaacagcagataactctttgaaaaactaggaggcagtgggtttgttcccccaaatcc

SEQ ID NO: 361846 - DNA, 619 bp, Homo sapiens
cttcacagcaaaactcaagacttacactgtatggacctaatgcctccagttctcatcttcccattctctcttaaaccctccccattcaggcttttgctccacaactctatcaaaattactttttatcttgctaaaaccaatggttagttcttattcttcatcttactagacctagcagcacaatttgacatagctgatcacttcctccttctggagtcactttcttcacttggttttcaggatatcccacttccttagattttctcctacctcactggtctctatgtctttttcctttgctagtttctccttatctcctgaacctgtaaacattggtgggctccagtatgcagttctcagaactcttccgtaccatttttatcaggcttgtgacttaaaatacaatactgmcttgggataagaaacgcttcagtaacttgaatctagatattatctaattgactgttgcctctggtcttttactcagtacccattcgcaaatgtatatgagctatcttctatggggtaggggatagagacaataaagtaaggccaggtgaacaaacagcagataactctttgaaaaactaggaggcagtgggtttgttcccccaaatcc

SEQ ID NO: 361847 - DNA, 615 bp, Homo sapiens
acaatttgacatagctgatcacttcctccttctggagtcactttcttcacttggttttcaggatatcccacttccttagattttctcctacctcactggtctctatgtctttttcctttgctagtttctccttatctcctgaacctgtaaacattggtgggctccagtatgcagttctcagaactcttccgtaccatttttatcaggcttgtgacttaaaatacaatactgccttgggataagaaacgcttcagtaacttgaatctagatattatctaattgactgttgyctctggtcttttactcagtacccattcgcaaatgtatatgagctatcttctatggggtaggggatagagacaataaagtaaggccaggtgaacaaacagcagataactctttgaaaaactaggaggcagtgggtttgttcccccaaatcctaaccggggctgctgaaatgggtgccaaggtaaatggaaaattcctggataatttctgctttctgaaagtctaagcaagccagaggccagaatataacccaatatttaggccaatactgaaaactgctatcagatggcaccaaacttccctagaactgaatgaattcacatggca

SEQ ID NO: 361848 - DNA, 615 bp, Homo sapiens
acaatttgacatagctgatcacttcctccttctggagtcactttcttcacttggttttcaggatatcccacttccttagattttctcctacctcactggtctctatgtctttttcctttgctagtttctccttatctcctgaacctgtaaacattggtgggctccagtatgcagttctcagaactcttccgtaccatttttatcaggcttgtgacttaaaatacaatactgccttgggataagaaacgcttcagtaacttgaatctagatattatctaattgactgttgcctctggtcttttactcagtacccattygcaaatgtatatgagctatcttctatggggtaggggatagagacaataaagtaaggccaggtgaacaaacagcagataactctttgaaaaactaggaggcagtgggtttgttcccccaaatcctaaccggggctgctgaaatgggtgccaaggtaaatggaaaattcctggataatttctgctttctgaaagtctaagcaagccagaggccagaatataacccaatatttaggccaatactgaaaactgctatcagatggcaccaaacttccctagaactgaatgaattcacatggca

SEQ ID NO: 361849 - DNA, 615 bp, Homo sapiens
acaatttgacatagctgatcacttcctccttctggagtcactttcttcacttggttttcaggatatcccacttccttagattttctcctacctcactggtctctatgtctttttcctttgctagtttctccttatctcctgaacctgtaaacattggtgggctccagtatgcagttctcagaactcttccgtaccatttttatcaggcttgtgacttaaaatacaatactgccttgggataagaaacgcttcagtaacttgaatctagatattatctaattgactgttgcctctggtcttttactcagtacccattcgcaaatgtatatgagctatcttctatggggtaggggatagagacaataaagtaaggccaggtgaacaaacagcagataactctttgaaaaactaggaggcagtgggtttgttcccccaaatcctaaccggggctgctgaaatgggtgccaaggtaaatggraaattcctggataatttctgctttctgaaagtctaagcaagccagaggccagaatataacccaatatttaggccaatactgaaaactgctatcagatggcaccaaacttccctagaactgaatgaattcacatggca

SEQ ID NO: 361850 - DNA, 571 bp, Homo sapiens
tctcaccaaaatttgtaagtatatctggaatggtcttcctcaacatacaaactaggtagcaagcatgaagtttctttaatgggtcttagaaggtattttagagatacaatcagtcatccttcagtaaagctgcaattgagggaragtgagaggcttataaaattaccaatcatgagaaatatttcacatatgatagctgctgtggacactacagtagcagttgggaagcaaaagaaacaggaaaatgtatcaatccaaaatgaaaaaaagaaaaatgaattggtaaacaggacacatgggataatatgacagaaatcagataaacatcactcatcacaaaattgccttctaaaaaatgatcagctatgttgcttgcaagaatcacaaggcaaaacaatacagaaacattgaaaataaagagatggaaaatatttgtgtttaataacagaagcagggcccataaagagcaaaaataacagatatattgaaaaaatgacaaatttacaatcacactaggtaattttaatgtaatactctcagaaatcagtacctcagtaagaaaacattaata

SEQ ID NO: 361851 - DNA, 587 bp, Homo sapiens
caattttctgttaccatatcatgtgaaaaagactaaacagattctcaccaaaatttgtaagtatatctggaatggtcttcctcaacatacaaactaggtagcaagcatgaagtttctttaatgggtcttagaaggtattttagagatacaatcagtcatccttcagtaaagctgcaattgagggaaagtgagaggcttataaaattaccaatcatgagaaatatttcacatatgwtagctgctgtggacactacagtagcagttgggaagcaaaagaaacaggaaaatgtatcaatccaaaatgaaaaaaagaaaaatgaattggtaaacaggacacatgggataatatgacagaaatcagataaacatcactcatcacaaaattgccttctaaaaaatgatcagctatgttgcttgcaagaatcacaaggcaaaacaatacagaaacattgaaaataaagagatggaaaatatttgtgtttaataacagaagcagggcccataaagagcaaaaataacagatatattgaaaaaatgacaaatttacaatcacactaggtaattttaatgtaatactctcagaaatc

SEQ ID NO: 361852 - DNA, 571 bp, Homo sapiens
tctcaccaaaatttgtaagtatatctggaatggtcttcctcaacatacaaactaggtagcaagcatgaagtttctttaatgggtcttagaaggtattttagagatacaatcagtcatccttcagtaaagctgcaattgagggaaagtgagaggcttataaaattaccaatcatgagaaatatttcacatatgatagctgctgtggacactacagtagcagttkggaagcaaaagaaacaggaaaatgtatcaatccaaaatgaaaaaaagaaaaatgaattggtaaacaggacacatgggataatatgacagaaatcagataaacatcactcatcacaaaattgccttctaaaaaatgatcagctatgttgcttgcaagaatcacaaggcaaaacaatacagaaacattgaaaataaagagatggaaaatatttgtgtttaataacagaagcagggcccataaagagcaaaaataacagatatattgaaaaaatgacaaatttacaatcacactaggtaattttaatgtaatactctcagaaatcagtacctcagtaagaaaacattaata

SEQ ID NO: 361853 - DNA, 562 bp, Homo sapiens
aatcacactaggtaattttaatgtaatactctcagaaatcagtacctcagtaagaaaacattaataatatagattaacaacaaaattagtaagggtgataaaatatacatctgtgcagagtaaatagagaaaataatttttaaattgaagtatacatggaatatttgcaaaaattatatttgaggtcaaaagaagaacctcatcaaatttttttgaactaatattatataacatactgtgttctckaataacaagtttccatgcatttggaaacttagaaatgaactccagtgatttgtaagttaaagaagaaatcaaaacaaaatattttgaactctttaataaaaaaccacatattagaattagtggacttaggggaaatttattaccttgaacacatctttttcaaaaatcaaaaaacagtgaaatacttagctcagaaagatttttaaaaagcaatgaaccaaccagagtaaacctgaataaagtacaaggaaggaacaaaagatcccgctattaatgtagcagaaaataagtaatggaattaacaaagtcaaaagct

SEQ ID NO: 361854 - DNA, 222 bp, Homo sapiens
gagcagctactccttgaaatacttaatgtttaataagcttttcgttgtaacgtttccacgttgcttacgggaaaaaaaaagtaaaaaaaaaaacctcctgcagaattttatgtgaacttgtgtgtrtattctagtattggatcttaatagattctaaataagtttgtcactagatgaattttggtatcttaaatattcttgatatgttcacaccactgccat

SEQ ID NO: 361855 - DNA, 603 bp, Homo sapiens
gtttcattcctttcctccctacgaaacccacaaattcaaagaacttgcccagaattcgtggcattaggagaaccatggctatagggtgactaacggtggctgaatgtacccacacccgctgggttgcttcacccagattatagctccaaagactctgggttcctgggaccccatgttggaaaacactgttggacagatggggaaactgaggaccagagagcaaaaggaactcacccaagtcatagtcaggcctggctgggcagtggtagaacccaggcctgcgatgctgcaagccagacagactcctgaggcctgccctcaggacaaatcagccacagatggcgcctccacacccacagaggcaccttctggtgggtgcatgacatagtccaacatgactgtaggggggtgggtttgaaggaactggggrcaaacagatgctctgcccgactccctgactcctcagtgtggcctaggacaagtgcttatcttctctgagcttctgcgtccacatcttaaagtggagatcaatcacaaggtaactgaggtttagaggatgtaatgctagtaaagagtttagcaggaggcccagcatatggtaag

SEQ ID NO: 361856 - DNA, 427 bp, Homo sapiens
aaatagacaaaggacataaacaggccatttcacaaaagaaaacatccaaatagccaataagcagatgatcaatttcactaataaccaaataaatgataataaaaacaataatgacaagttcacctgttagattacaaattgacaatgccttcttttagaaagagtgctgagaaacaggcattcatgtattgtcartagcagtgagattggtactagctttttggagggcaatatcaaaaattttaatattcacatttttttttgagacagggtccaggctggagtgcagtggtgtgtgtaatcacagggcactgcagcctcgacctccagggctcaagtcatcctcctgcctcagtttctcaagtagcgtggaccataggcatacaccaccatgcccagctaatttttaaattttttgtagaggcag

SEQ ID NO: 361857 - DNA, 524 bp, Homo sapiens
ttccagttccatccatgttgttgcaaatgacagaatttaattatttttatggatgaataatattccactgtgtacatgtacaacattttctttatttattcatctatttggggacacttagattgattccaaatcttggctattgtgcacagtgctgcaataaacatgggagcgcagatatctaatcaatacactactttcctttatttggatgtatacctactagtggaattgctagatcatatggtagttctatctttagtttttttgaggaacyttcaaactactctccatagtgactatactaatttacactcccaacagtgtacgagggttcccctttcaccatatcctcaccagtatttgttattgcctgtcttttgagtgaaagccattttaactggggtgagatgatatctcattgtagttttcatttgcatttctctgatgattaataatgttgagcatttttttcaaacacctatcaatcatttgtaggtcttctttggagaaatatctatttg

SEQ ID NO: 361858 - DNA, 649 bp, Homo sapiens
ttgttttaaaacccccaaaatagtaattattattattattactatagtaatcaatacttatttaaattcaccaacacatttaccagcttctttgttcactttactgcttcccacccttcttctgggattttttctaactgatttattgaaatacaattgacaaacaataaactgcccatacttaaagtgaacaattttgagaggttgttatgyatatatgtatgcatctgtgaaatcatcgccgtgattaagaaaatgaacttcaggctgggcgtagtggctcatgcctgtaatctcagcactttaggaggctgaggtgggtgggtcacctgaggtcaggagccaagatcgcaccactgcactccagcctgggcaacagagtgagactccatctaaaacaaaacaaaacaaaattctaaaaatttatatgaatagtataatacatacatactctttttgtccatcttctttcactcagcacaattattttgagattcagccatgctattgcacatataaaatttatcctttttattgccaaggagcatttccattgtatggatgtgccacatttagtttattcattcatccatggatttgggacattagggttacttctaaataaattgtgactattataaataaggca

SEQ ID NO: 361859 - DNA, 586 bp, Homo sapiens
aataaatgggactacatcaaaccaaagagcttcttyacagcaggggaaacagtcagtaaaaggaaaaggcagcatacaaaatgggagaaaatgtttgcaaaccgtacatctgatatccaaaatatataagaaactcaaacaattcaatagcaagaaacaatagcaagaaaacaaataacccaattaaaaaatgcgcaaaggactgaaaagacatttcttcaaagaagacattaaaatggtcaatacgtgtatgaaaaggtgttcaacatcactaatcatcagggaaatgcgaatcaaaaccacaaggagatatcacctcacacctgttaagatggttattatcaaaaagatgagagataacacatgttaagagtgtggagaaaagggaacccttgtacactgttggtgggaatgtagatcggtacagccattgtggaaaacagcatggaggtttccaaagaaattaaaaatagaagtactatatgacccagcaatccttcttgtgggtatatacaaaaatgaaataaaatcatcatctcatagaaacgtctgtactcccatgttcattgcagcattattcacaata

SEQ ID NO: 361860 - DNA, 550 bp, Homo sapiens
gtgactcaggcaagagacatggggccatgcccactattctgtcttgtctccaaagtatccctccacagagccgcacatggtcacagagtcagaggcttgtgaaattatgctggcaaacagaaatgagggaagtagcttcttccatttgctactgtgtctcccaggccactgggtgctctctgcagtgtgcaagggagtacagcacccctgggagcccaggactggtgttggctttctgttaagtcattttcaccctaagccattcttggcctcctcacccacagaatgagggaggttaggctgcaggccacaggtggatcttcatctacagcctggagctggggagagggaaccaccccagtcattgactygcctgggtttctaggaagaggaatgagaacgaggatgggagaggggctgttggcaggggtgggtggagaggtctctgattgtctgatggagagcagcccagttcacagggaagtgactggggtgattctgagactagagtatcccaagccctcccccatcctctcagatccctgtgact

SEQ ID NO: 361861 - DNA, 523 bp, Homo sapiens
gtctctaaataaactagaaagacagtctaggacataaggactgcacacrtatgtgagtcctagtgctgaactaggctcagagactatggactgggggaagacacagaatattcagagacaccaactgcaccagctgaggcagccaagagcgtgctggcatcacccaacccctaaccccaggcttcacatttcacagctccaaaagaaaccccttccttctgcttgaggagaggagagggaagaacggggaagactttgtcttacatcttggatatcagctcagacaaagcaggatagggcaactgtcaaaggaatgaggcccctgctttaagccctagctcccagatgacatttcttgacataccctgaaccaaaagggaacccaatgccctgaaggaaatgatgcagtcctggcagcattcacccagcctaactgaagagcccttggccctcaataacctgcagtgatacccagatactatgttgagggccttaggtgagcctctgagacttgctggcttca

SEQ ID NO: 361862 - DNA, 523 bp, Homo sapiens
gtctctaaataaactagaaagacagtctaggacataaggactgcacacgtatgtgagtcctagtgctgaactaggctcagagactatggactgggggaagacacagaatattcagagacaccaactgcaccagctgaggcagccaagagcrtgctggcatcacccaacccctaaccccaggcttcacatttcacagctccaaaagaaaccccttccttctgcttgaggagaggagagggaagaacggggaagactttgtcttacatcttggatatcagctcagacaaagcaggatagggcaactgtcaaaggaatgaggcccctgctttaagccctagctcccagatgacatttcttgacataccctgaaccaaaagggaacccaatgccctgaaggaaatgatgcagtcctggcagcattcacccagcctaactgaagagcccttggccctcaataacctgcagtgatacccagatactatgttgagggccttaggtgagcctctgagacttgctggcttca

SEQ ID NO: 361863 - DNA, 501 bp, Homo sapiens
catcttggatatcagctcagacaaagcaggatagggcaactgtcaaaggaatgaggcccctgctttaagccctagctcccagatgacatttcttgacataccctgaaccaaaagggaacccaatgccctgaaggaaatgatgcagtcctggcagcattcacccagcctaactgaagagcccttggccctcaataacctgcagtgatacccagatactatgttgagggccttaggtgagcctctgagacttgctggcttcaggtaccagcatggccacagkgggtagagaaccacctgggctcccagggtccccagttcctggacttgactggtgggtggcatttttggacataccgtggaccagatgggagcccagttcccagaagggtgaatcctaggctagccagcattcaccacaaactgacttaggagcacctaaaccttaagggaacatcagcagttgtctggcagtactcctcatggcctggagtggtgttagac

SEQ ID NO: 361864 - DNA, 501 bp, Homo sapiens
catcttggatatcagctcagacaaagcaggatagggcaactgtcaaaggaatgaggcccctgctttaagccctagctcccagatgacatttcttgacataccctgaaccaaaagggaacccaatgccctgaaggaaatgatgcagtcctggcagcattcacccagcctaactgaagagcccttggccctcaataacctgcagtgatacccagatactatgttgagggccttaggtgagcctctgagacttgctggcttcaggtaccagcatggccacagtggrtagagaaccacctgggctcccagggtccccagttcctggacttgactggtgggtggcatttttggacataccgtggaccagatgggagcccagttcccagaagggtgaatcctaggctagccagcattcaccacaaactgacttaggagcacctaaaccttaagggaacatcagcagttgtctggcagtactcctcatggcctggagtggtgttagac

SEQ ID NO: 361865 - DNA, 501 bp, Homo sapiens
catcttggatatcagctcagacaaagcaggatagggcaactgtcaaaggaatgaggcccctgctttaagccctagctcccagatgacatttcttgacataccctgaaccaaaagggaacccaatgccctgaaggaaatgatgcagtcctggcagcattcacccagcctaactgaagagcccttggccctcaataacctgcagtgatacccagatactatgttgagggccttaggtgagcctctgagacttgctggcttcaggtaccagcatggccacagtgggtagagaaccacctgggctcccagggtccccagttcctggacttgactggtgggtggcatttttggacataccrtggaccagatgggagcccagttcccagaagggtgaatcctaggctagccagcattcaccacaaactgacttaggagcacctaaaccttaagggaacatcagcagttgtctggcagtactcctcatggcctggagtggtgttagac

SEQ ID NO: 361866 - DNA, 501 bp, Homo sapiens
gtgatctggccttttatgtcctcaatgtcttccataatagctgagaaaacacattaaagtttaccctattgaattcctttagtcttatattttcccatgaggatctgccacaactttccaggtagagtagtaaccattcatttatgaactgccatcagaaagacaggataatcatctasgctctggcagcaggtgttctaatggagaatccctttaaactcttccttcagtagcctaagacagagcttcagcagtctctagagtgagtcccagaaaaagaggaggtatttactcatgaatatgaccaaggccattgctgtaccttcttgtagaattttccttcatataaaatttccatttaataatggaactcttttgggtattctctttttttttggtgtgtttttcagacaaaaccctgacactttggacatttcaaaagttgaaataattgtatacccttcaattattggaaccatttcaatcaatgccctatactat

SEQ ID NO: 361867 - DNA, 501 bp, Homo sapiens
gtgatctggccttttatgtcctcaatgtcttccataatagctgagaaaacacattaaagtttaccctattgaattcctttagtcttatattttcccatgaggatctgccacaactttccaggtagagtagtaaccattcatttatgaactgccatcagaaagacaggataatcatctacsctctggcagcaggtgttctaatggagaatccctttaaactcttccttcagtagcctaagacagagcttcagcagtctctagagtgagtcccagaaaaagaggaggtatttactcatgaatatgaccaaggccattgctgtaccttcttgtagaattttccttcatataaaatttccatttaataatggaactcttttgggtattctctttttttttggtgtgtttttcagacaaaaccctgacactttggacatttcaaaagttgaaataattgtatacccttcaattattggaaccatttcaatcaatgccctatactat

SEQ ID NO: 361868 - DNA, 329 bp, Homo sapiens
aatttttaaaaggggattaaaagacaattccttgttcattactgagctttgatgaagatagccctcaccattgtggttaataaatctaaaactcaaaatgcctattatttcataggtaatatcagacaaacattccaattagcatggaacagtttagaaaaactaataatatggaaatgacacatgcagcarctctccactggtggttgcttttggtgtatgttacattcataagcagtttgcagccagcatttttgaccaatgatataatccacaaaagaacttctggctccttttttgaaatggtctaaactctgtgattcttcttc

SEQ ID NO: 361869 - DNA, 329 bp, Homo sapiens
aatttttaaaaggggattaaaagacaattccttgttcattactgagctttgatgaagatagccctcaccattgtggttaataaatctaaaactcaaaatgcctattatttcataggtaatatcagacaaacattccaattagcatggaacagtttagaaaaactaataatatggaaatgacacatgcagcagctctccactggtggttgctyttggtgtatgttacattcataagcagtttgcagccagcatttttgaccaatgatataatccacaaaagaacttctggctccttttttgaaatggtctaaactctgtgattcttcttc

SEQ ID NO: 361870 - DNA, 555 bp, Homo sapiens
aaatatcataagaagccgtttgtagtattaataaagaggtgatacattacttcattctcaacatttaagagctcagaagaagcaatttcttgacagttcactggtttatatataaatgatattttctattgtttcagtaaaatatatttccctctgttgaaggataattcgattgaaatgggaattcctccattttaatgacctttaaaatttaaatgatcaaatctaggaaactaaaatccaaaaagcattttgaaggtggccaaatctttttgagattgattgttctagttagtggcattgcagagtgtatgcagaattacactaatacttcaccttgccaccgttagtatagcaggttttccctcatttaattcctctttacattctctatttggtggccatttacctttgcaacttagaggatggagagaactaattttattctatttycctgctaattgcatgttagaaagtatttccataaaatagattaatattataactcatttaaaatattttcatccatttattcatttaaaaatatgtaagcat

SEQ ID NO: 361871 - DNA, 540 bp, Homo sapiens
gtactaactggaagctagtttagtaaagtcctttgtggtaaacatcaaagttcatggagggttgtgcaaaataagcaaatagtgtctaatcagtgttttcacaataatactctgagtttatcatgtaatattaacttgagcaaaataaaagctgttcaatttccttgttgtggtccctgagtctctgagtttggaatattcagaaatgggccattgaagaggaaagaggaagccccttcttttttctagccaagagttcagctacatcartaggcaagcaagtgaaggtgatcagtcctcatcttaacataacagcatcactgttctagttataaattccacttaaaactggtattaagaatgaggtaacttcagaccatcctggctaacatggtgaaaccccatctctactgaaaatacaaaaattagctgggcgtggtggtaggtgcctgtagtcccagctacttgggaggctgaggcaggagaatggcgtgaactcaggaggcggagttcgcagtgagctgagatcgcatcactccc

SEQ ID NO: 361872 - DNA, 540 bp, Homo sapiens
gtactaactggaagctagtttagtaaagtcctttgtggtaaacatcaaagttcatggagggttgtgcaaaataagcaaatagtgtctaatcagtgttttcacaataatactctgagtttatcatgtaatattaacttgagcaaaataaaagctgttcaatttccttgttgtggtccctgagtctctgagtttggaatattcagaaatgggccattgaagaggaaagaggaagccccttcttttttctagccaagagttcagctacatcaataggcaagcaagtgaaggtgatcagtcctcatcttaacataacagcatcactgttctagttataaattccacttaaaactggtattaagaatgaggtaacttcagaccatcctggctaacatggtgaaaccccatctctactgaaaatacaaaaattagctgggcgtggtggtaggtgcctgtagtcccagctacttgggaggctgaggcaggagaatggcrtgaactcaggaggcggagttcgcagtgagctgagatcgcatcactccc

SEQ ID NO: 361873 - DNA, 540 bp, Homo sapiens
gtactaactggaagctagtttagtaaagtcctttgtggtaaacatcaaagttcatggagggttgtgcaaaataagcaaatagtgtctaatcagtgttttcacaataatactctgagtttatcatgtaatattaacttgagcaaaataaaagctgttcaatttccttgttgtggtccctgagtctctgagtttggaatattcagaaatgggccattgaagaggaaagaggaagccccttcttttttctagccaagagttcagctacatcaataggcaagcaagtgaaggtgatcagtcctcatcttaacataacagcatcactgttctagttataaattccacttaaaactggtattaagaatgaggtaacttcagaccatcctggctaacatggtgaaaccccatctctactgaaaatacaaaaattagctgggcgtggtggtaggtgcctgtagtcccagctacttgggaggctgaggcaggagaatggcgtgaactcrggaggcggagttcgcagtgagctgagatcgcatcactccc

SEQ ID NO: 361874 - DNA, 540 bp, Homo sapiens
gtactaactggaagctagtttagtaaagtcctttgtggtaaacatcaaagttcatggagggttgtgcaaaataagcaaatagtgtctaatcagtgttttcacaataatactctgagtttatcatgtaatattaacttgagcaaaataaaagctgttcaatttccttgttgtggtccctgagtctctgagtttggaatattcagaaatgggccattgaagaggaaagaggaagccccttcttttttctagccaagagttcagctacatcaataggcaagcaagtgaaggtgatcagtcctcatcttaacataacagcatcactgttctagttataaattccacttaaaactggtattaagaatgaggtaacttcagaccatcctggctaacatggtgaaaccccatctctactgaaaatacaaaaattagctgggcgtggtggtaggtgcctgtagtcccagctacttgggaggctgaggcaggagaatggcgtgaactcaggaggcggagttcrcagtgagctgagatcgcatcactccc

SEQ ID NO: 361875 - DNA, 622 bp, Homo sapiens
ctttcatttataaaaccattagatctcatgagatgtgtttactaccatgagtggggtatggggaaactgctcccatgattccattatctccacctggccctacctttgatgcatggtgattatataattcaaggtgaaaattgggtgggacacagccaaaccatatcagcaattatttttgaaattttatttatgatrtatgttgatgaagtagaattagtcactggaattaataaaacaattttttactttttattctccagtctctgcaaacctgttatttgaaaactgagttaagatttgatagcttatatcattcttcagtcttaaaaagttattcctagctttagccaccaaaacattctcagtctagcaattaatatttctcattctgtacaggactagatcattatacaagttcatgcttttttctctataatcaggaaaagtgttgggaaagggagcattgttttcttcttaccctgcaacttctcactaaccatatgctaactgggggtaaaaatctattaaagtgaatagagatttcaatttgttaacagggatatacaatcttttcaaaaaatccttatatacaaagaaaagtacagaacagaaagagagt

SEQ ID NO: 361876 - DNA, 474 bp, Homo sapiens
atggggaaactgctcccatgattccattatctccacctggccctacctttgatgcatggtgattatataattcaaggtgaaaattgggtgggacacagccaaaccatatcagcaattatttttgaaattttatttatgatatatgttgatgaagtagaattagtcactggaattaataaaacaattttttactttttattctccagtctctgcaaacctgttatttgaaaactgagttaagatttgatagcttatatcattcttcagtcttaaaaagttattcctagctttagccaccaaaacattctcagtctagcaattaatatttctcattctgtacaggactagatcattatacaagttcatgcttttttctctataatcaggaaaagtgttgggaaagggarcattgttttcttcttaccctgcaacttctcactaaccatatgctaactgggggtaaaaatctattaa

SEQ ID NO: 361877 - DNA, 516 bp, Homo sapiens
ttcttcttaccctgcaacttctcactaaccatatgctaactgggggtaaaaatctattaaagtgaatagagatttcaatttgttaacagggatatacaatcttttcaaaaaatccttatatacaaagaaaagtacagaacagaaagagagtgaaggcaattaacaggagaaaagacaaaaaaaaatctgaagcaaaacttaataagaaatgcaaaaaccatatrtgaagaaactttcaaaatatttgtattaagaaaatacaaatgtagccttaaataaatcagaaaaagaattatttccttaaataggaattttcagcatcctatttatttatttttaagacagagtctcactctattgcccaggctggagtgcagtggcactatcttggctcagttcaacctctgccccactggttaaagtgattctcccacctcagcctcctgagtagctgggactacaggtgcacgccatcatgccgagctagtttttctatttttagtagagacagggttt

SEQ ID NO: 361878 - DNA, 581 bp, Homo sapiens
ttctggctgtgttcccaatgctctgaaagggttagcaaaacctcttttcttttttcacaggaaaatgataataattcaccttctctagtactatttcctttaaatcatgataatgatgtaatgtcagtgtttgscaggaaacactacttttaataaaaatgaccctatttggttaactgcatctagaggaccatggctacaataagggaatactatagtgtgtttatcttcacttacaattttaatatctaattttatggtattattacttccccaaataaaatctaaagtcattttgtttctatgtctaagtatactatacaatatgcagaaagccattcagctgtctgtgtctatacttactaattcattgataagaagtccaatataagagtagtttttattattttagtacaagcataagcaataatttagtttgttttaatatatttttgagaatatattaagttgcaaattgaaactattatattaattttctttgaaataaagtagaaattacaacaatatcagaagctatctttgcaagctttgagaccataagagtgagaagtggaaaagtg

SEQ ID NO: 361879 - DNA, 581 bp, Homo sapiens
ttctggctgtgttcccaatgctctgaaagggttagcaaaacctcttttcttttttcacaggaaaatgataataattcaccttctctagtactatttcctttaaatcatgataatgatgtaatgtcagtgtttggcaggaaacactacttttaataaaaatgaccctatttggttaactgcatctagaggaccatggctacaataagggaatactatagtgtgtttatcttcacttacaattttaatatctaattttatggtattattacttccccaaataaaatctaaagtcattttgtttctatgtctargtatactatacaatatgcagaaagccattcagctgtctgtgtctatacttactaattcattgataagaagtccaatataagagtagtttttattattttagtacaagcataagcaataatttagtttgttttaatatatttttgagaatatattaagttgcaaattgaaactattatattaattttctttgaaataaagtagaaattacaacaatatcagaagctatctttgcaagctttgagaccataagagtgagaagtggaaaagtg

SEQ ID NO: 361880 - DNA, 581 bp, Homo sapiens
ttctggctgtgttcccaatgctctgaaagggttagcaaaacctcttttcttttttcacaggaaaatgataataattcaccttctctagtactatttcctttaaatcatgataatgatgtaatgtcagtgtttggcaggaaacactacttttaataaaaatgaccctatttggttaactgcatctagaggaccatggctacaataagggaatactatagtgtgtttatcttcacttacaattttaatatctaattttatggtattattacttccccaaataaaatctaaagtcattttgtttctatgtctaagtatactatacaatatgcagaaagccattcagctgtctgtstctatacttactaattcattgataagaagtccaatataagagtagtttttattattttagtacaagcataagcaataatttagtttgttttaatatatttttgagaatatattaagttgcaaattgaaactattatattaattttctttgaaataaagtagaaattacaacaatatcagaagctatctttgcaagctttgagaccataagagtgagaagtggaaaagtg

SEQ ID NO: 361881 - DNA, 557 bp, Homo sapiens
gtttatcttcacttacaattttaatatctaattttatggtattattacttccccaaataaaatctaaagtcattttgtttctatgtctaagtatactatacaatatgcagaaagccattcagctgtctgtgtctatacttactaattcattgataagaagtccaatataagagtagtttttattattttagtacaagcataagcaataatttagtttgttttaatatatttttgagaatatattaagttgcaaattgaaactattatattaattttctttgaaataaagtagaaattacaacaatatcagaagctatctttgcaagctttgagaccataagagtgagaagtggaaaagtggaagttggacatayatttagggtaacaatgctgccttattcgcatctggggtattccactatcccttcccgacacactgcttgaaatgatagaattgatgtatttgcattatatcccaatttacacataaattcaatggtatcccctgtttttgcataatattttctgtcacttcttccttttaactttatgttatt

SEQ ID NO: 361882 - DNA, 521 bp, Homo sapiens
cattgtttacatggaattttccaagcttatacacttatatattaagatctgaaaggcaaacattcagcagaatagctgtttgtgaacacagttctagggtaataacccataaaaattctagtataaaaaagcaaatatcaaacttattactctgattttctcaggwtctagaattttaagaacttacgtatgcatctaggtggttccgaccactctccattactacatgttacataattagaaccctgaagttcatagtaggactggcattggtactcgactcttgactgtggcacatacacttttagtagaaaggaggtggtatcaccattgctaataggtggaggaggcccacacttttctgaagaatctgaaaaaaaaatactttatatgtggggaaaaatcaatagtcttattggaaactttctaaataaagctttttatatactcttaactgtatcttatttgatttcttaggaagacatctgcattttcaacgttgttttttttttttaagtctc

SEQ ID NO: 361883 - DNA, 521 bp, Homo sapiens
cattgtttacatggaattttccaagcttatacacttatatattaagatctgaaaggcaaacattcagcagaatagctgtttgtgaacacagttctagggtaataacccataaaaattctagtataaaaaagcaaatatcaaacttattactctgattttctcaggttctagaattttaagaacttacgtatgcatctwggtggttccgaccactctccattactacatgttacataattagaaccctgaagttcatagtaggactggcattggtactcgactcttgactgtggcacatacacttttagtagaaaggaggtggtatcaccattgctaataggtggaggaggcccacacttttctgaagaatctgaaaaaaaaatactttatatgtggggaaaaatcaatagtcttattggaaactttctaaataaagctttttatatactcttaactgtatcttatttgatttcttaggaagacatctgcattttcaacgttgttttttttttttaagtctc

SEQ ID NO: 361884 - DNA, 585 bp, Homo sapiens
cttttaaatttgtgaatttaaaagttaatgtaaccatttatgtagttatgtaacgatttactaacagtaagggtgtatatattagataaaaattatattaattggatataagttctataaaatttatgaagcatcctgtcttttatttcacaagttttaaagtagatcatttatcaaagctgagtaaaattgaagtatacacctttttctttacacagagcccktgataagtatagaaattgaaaacagtattctagaaatgtaggaattcatataacccccaaaactcatgataacattgagataatcactttgtaagtgtatcttttttctcacttagcttaatatttttgagagtcttccatgttgtattatgtatcaaggttccatattatctcatgactaaaaatagttgaattgtacccttgaaaatgaagtggatttgggagtatgtaaattatacaacagtatttgggttgaaaatacattcagcaatttatctttaaaactctttgtgaatatataaagaggaaagaaaaaaaatcaacttctgccactgaaagatttcctttgttcattatgcat

SEQ ID NO: 361885 - DNA, 585 bp, Homo sapiens
cttttaaatttgtgaatttaaaagttaatgtaaccatttatgtagttatgtaacgatttactaacagtaagggtgtatatattagataaaaattatattaattggatataagttctataaaatttatgaagcatcctgtcttttatttcacaagttttaaagtagatcatttatcaaagctgagtaaaattgaagtatacacctttttctttacacagagcccgtgataagtatagaaattgaaaacagtattctagaaatgtaggaattcatataacccccaaaactcatgataacattgagataatcactttgtaagtgtatcttttttctcwcttagcttaatatttttgagagtcttccatgttgtattatgtatcaaggttccatattatctcatgactaaaaatagttgaattgtacccttgaaaatgaagtggatttgggagtatgtaaattatacaacagtatttgggttgaaaatacattcagcaatttatctttaaaactctttgtgaatatataaagaggaaagaaaaaaaatcaacttctgccactgaaagatttcctttgttcattatgcat

SEQ ID NO: 361886 - DNA, 585 bp, Homo sapiens
cttttaaatttgtgaatttaaaagttaatgtaaccatttatgtagttatgtaacgatttactaacagtaagggtgtatatattagataaaaattatattaattggatataagttctataaaatttatgaagcatcctgtcttttatttcacaagttttaaagtagatcatttatcaaagctgagtaaaattgaagtatacacctttttctttacacagagcccgtgataagtatagaaattgaaaacagtattctagaaatgtaggaattcatataacccccaaaactcatgataacattgagataatcactttgtaagtgtatcttttttctcacttagcttaatatttttgagagtcttccatgttgtattatgtatcaaggttccatattatctcatgactaaaaatagttgaattgtacccttgaaaatgaagtggatttgggagtatgtaaattatacaacagtatttgggttraaaatacattcagcaatttatctttaaaactctttgtgaatatataaagaggaaagaaaaaaaatcaacttctgccactgaaagatttcctttgttcattatgcat

SEQ ID NO: 361887 - DNA, 585 bp, Homo sapiens
cttttaaatttgtgaatttaaaagttaatgtaaccatttatgtagttatgtaacgatttactaacagtaagggtgtatatattagataaaaattatattaattggatataagttctataaaatttatgaagcatcctgtcttttatttcacaagttttaaagtagatcatttatcaaagctgagtaaaattgaagtatacacctttttctttacacagagcccgtgataagtatagaaattgaaaacagtattctagaaatgtaggaattcatataacccccaaaactcatgataacattgagataatcactttgtaagtgtatcttttttctcacttagcttaatatttttgagagtcttccatgttgtattatgtatcaaggttccatattatctcatgactaaaaatagttgaattgtacccttgaaaatgaagtggatttgggagtatgtaaattatacaacagtatttgggttgaaaatacattcagcaatttatctttaaaactctttgtgaatatataaagaggaaagaaaaaaaatcaacttytgccactgaaagatttcctttgttcattatgcat

SEQ ID NO: 361888 - DNA, 478 bp, Homo sapiens
agacttaagtctttatccatttgatttgatttttggatatggtgaaacatagaggtctagtttcattcttctgcatatgaaaatccagttttcctagaactgttaattgmagagactcttttccacagcgttcctttgtcaaaaatgcattcactgtagatgtgtaaatttgtttctgtgttttctattctgttccattagactgtatgtctgtttttatgccagtactatcctgttttagttactacaactctgtagtataatttgaagtcaggtaatgttattccttcagttttgtttttattgcttaggatagctttactatttttggtacctttagcttttgtggtaccataaaaattttaggattgtttttctctattactgtgaagaatgtccctggtattttcatagtgatttcttgaatctgtagattgccttgggtagtatggacattataacaatattgatccttcca

SEQ ID NO: 361889 - DNA, 478 bp, Homo sapiens
agacttaagtctttatccatttgatttgatttttggatatggtgaaacatagaggtctagtttcattcttctgcatatgaaaatccagttttcctagaactgttaattgcagagactcttttccacagcgttcctttgtcaaaaatgcattcactgtagatgtgtaaatttgtttctgtgttytctattctgttccattagactgtatgtctgtttttatgccagtactatcctgttttagttactacaactctgtagtataatttgaagtcaggtaatgttattccttcagttttgtttttattgcttaggatagctttactatttttggtacctttagcttttgtggtaccataaaaattttaggattgtttttctctattactgtgaagaatgtccctggtattttcatagtgatttcttgaatctgtagattgccttgggtagtatggacattataacaatattgatccttcca

SEQ ID NO: 361890 - DNA, 478 bp, Homo sapiens
agacttaagtctttatccatttgatttgatttttggatatggtgaaacatagaggtctagtttcattcttctgcatatgaaaatccagttttcctagaactgttaattgcagagactcttttccacagcgttcctttgtcaaaaatgcattcactgtagatgtgtaaatttgtttctgtgttttctattctgttccattagactgtatgtctgtttttatgccagtactatsctgttttagttactacaactctgtagtataatttgaagtcaggtaatgttattccttcagttttgtttttattgcttaggatagctttactatttttggtacctttagcttttgtggtaccataaaaattttaggattgtttttctctattactgtgaagaatgtccctggtattttcatagtgatttcttgaatctgtagattgccttgggtagtatggacattataacaatattgatccttcca

SEQ ID NO: 361891 - DNA, 608 bp, Homo sapiens
tgtctgtcaaatgcagctttgattatgtttgggtgtgttccttctatcttcagttttctttagtgttttatcatgaaggattttgaattttatcaaatgcctttttggaatcaattgaaataatcatgtggtttatatccttcattgtgttggtatgatgtattacattgattgagttgtgtatgttgagccatctttgcatctcaaggataaatcccatttggtcatgttgaatgatctttctagtatgctgttaaatttgttgctattcttttgttgagaatttttacaattacatttgtcagagatattgacctgtagtattctttttttaatgtgtctttgtctgattttcttttcagggtaatattagcctcacattggaagtatttgctcctcctcctcctctatttttcaaaatagttagagtagaattggtactagttcttctttaaaygttagggagaattcaacagtgaagccaatatgtcctgagcttttctttactatgaaactttttattctggctttgatctcattacttgaattaataattgatctgttcaggttttggatttctttctgcttcaatcttagtaggttttatg

SEQ ID NO: 361892 - DNA, 608 bp, Homo sapiens
tgtctgtcaaatgcagctttgattatgtttgggtgtgttccttctatcttcagttttctttagtgttttatcatgaaggattttgaattttatcaaatgcctttttggaatcaattgaaataatcatgtggtttatatccttcattgtgttggtatgatgtattacattgattgagttgtgtatgttgagccatctttgcatctcaaggataaatcccatttggtcatgttgaatgatctttctagtatgctgttaaatttgttgctattcttttgttgagaatttttacaattacatttgtcagagatattgacctgtagtattctttttttaatgtgtctttgtctgattttcttttcagggtaatattagcctcacattggaagtatttgctcctcctcctcctctatttttcaaaatagttagagtagaattggtactagttcttctttaaacgttagggagaattcaacagtgaagccaatatgtcctgagcttttctttactatgaaactttttattctggctttgatctcattacttgwattaataattgatctgttcaggttttggatttctttctgcttcaatcttagtaggttttatg

SEQ ID NO: 361893 - DNA, 561 bp, Homo sapiens
atattgcaagttaaaatgttgtggggtggggtggggggaggggggagggatagcatttggagatatacctaatgttaaatgacgagttactgggttcagcacaccaacatggcacatgtatacataggtaactaacctkcacgttgtgcacatgtaccctaaaccttaaagtataataataaaaaaaaatcctcctcactgttccctcccctttccaaagtcagaggagcctcaccctatggtctaacaccactccaggccatgagcagtactgccagacaactgctgatgttcccttaaggtttaggtgctcctaagtcagtttgtggtgaatgctggctagcctaggattcacccttctgggaactgggctcccatctggtccatggtatgtccaaaaatgccacccaccagtcaagtccaggaactggggaccctgggagcccaggtggttctctatcccctgtggccatgctggtacctgaagccagcaagtctcagaggctcacctaaggccctcaatatagtatctgggtatcactgcaggttattgagggccaa

SEQ ID NO: 361894 - DNA, 561 bp, Homo sapiens
atattgcaagttaaaatgttgtggggtggggtggggggaggggggagggatagcatttggagatatacctaatgttaaatgacgagttactgggttcagcacaccaacatggcacatgtatacataggtaactaaccttcacgttgtgcacatgtaccctaaaccttaaagtataataataaaaaaaaatcctcctcactgttccctcccctttccaaagtcagaggagcctcaccctatggtctaacaccactccaggccatgagsagtactgccagacaactgctgatgttcccttaaggtttaggtgctcctaagtcagtttgtggtgaatgctggctagcctaggattcacccttctgggaactgggctcccatctggtccatggtatgtccaaaaatgccacccaccagtcaagtccaggaactggggaccctgggagcccaggtggttctctatcccctgtggccatgctggtacctgaagccagcaagtctcagaggctcacctaaggccctcaatatagtatctgggtatcactgcaggttattgagggccaa

SEQ ID NO: 361895 - DNA, 561 bp, Homo sapiens
atattgcaagttaaaatgttgtggggtggggtggggggaggggggagggatagcatttggagatatacctaatgttaaatgacgagttactgggttcagcacaccaacatggcacatgtatacataggtaactaaccttcacgttgtgcacatgtaccctaaaccttaaagtataataataaaaaaaaatcctcctcactgttccctcccctttccaaagtcagaggagcctcaccctatggtctaacaccactccaggccatgagcagtactgccagacaactgctgatgttcccttaaggtttaggtgctcctaagtcagtttgtggtgaatgctggctagcctaggattcacccttctgggaactgggctcccatctggtccatggtatgtccaaaaatgccacccaccagtcaagtccaggaactggggaccctgggagcccaggtggttctctatcccctgtggccatgctggtacctgaagccagcaagtctcagaggctcacctaaggccctcaayatagtatctgggtatcactgcaggttattgagggccaa

SEQ ID NO: 361896 - DNA, 606 bp, Homo sapiens
agaggtgcaaagggcttcctgtatctttgtttgcaacctcctgtgaatctataattacttcaaaataagagcaaaaacttgatttttcaaaaagcactacttttaattaccaaggagaaatgtatgaaacacaacttttttcttacatttttcaaaccccacctttttaaaacaaccctaacactgtttgccaaatccaaagatactcttaaaaaatttattcataattcctactatgacatggggatgggtattttaaaagagtgaacaaatctactatcaactaggaagactaattgccttttttccccccttaaaattaatacaactaaatgtaaacttcactttagaggacaccgttaattgctattcgcctctgctgtggagctcctctagacaaagcctagagaaagtttctcagtacagttccttcacagycgttgctaagatacatccttcaggtgcacaaatcatcgagtttcctttgtgcaggaaagctgagtgcaccctgacacgggaacacttatgacagacatggggatcattttcgagcttcagttatggtctgtttcagtgacttttgcactcctttgctttttggaatgc

SEQ ID NO: 361897 - DNA, 408 bp, Homo sapiens
agtagctaggactacaggcatatgctaccacatctggctaatttttaatttttttttctttttttttctctttttttctttktttttgtagaggctgatctcaaactcctgggctcaagtgatcctcctgcctcaccctcacaaagtggtggggttacaggcatgagccaccatggctggcccattattctttaaatattcatgtgacactttctctctctcttctccttctggaacatccgtaatgagtatgttggctcacttaacgttgctttgttgctttattccctctctttcattctgccttttttttttttttgcttttcgtgtaatttaaatgactgtttttgagttcactgattttttttcttctgcttgaccaagtctgctgttgaactgttagttaac

SEQ ID NO: 361898 - DNA, 519 bp, Homo sapiens
tgggtctaggagtgaggaggcactgtagtgaggtttgcagagtcactagagagttagaagtatgagattgcatgatcactagaatataggaatatatacatgggatgtaggaagaaggaccctagagaaagctaagtgattggctaacggggaggaaatgcgaagcttaacaaagttttcaggaaaggatggcccttgctttattacacttcatgtcagatatctcagtattacttaagatrgtcttgatcactgtacactgatatagtagtcaaaaacttcaagctttattggctggtggtgtgtcttcctctttttctcccttcattgcttatttccctttttttttcctccagtacttttagagaactgtagtcatcattattacctgtattgctctatcactattcagttgtcataattagaagctgtcacaattatcagtaggtcataacaggtgttgaggactctcctataatgagatcttgtatcactgtgatgtagagagacacaaagccc

SEQ ID NO: 361899 - DNA, 671 bp, Homo sapiens
gggtcgtgccatgttgcccagactggtcttgaaatcctgggctcaagagattattgcacctcagccacctaaagtgctgggattagcagcatgagccaccatgcccagcttacaatttgcaaatcagaaattattctttccgtcttgcagctacaaaacctgaagcgcagaagatacatatgttatgtgtagaatcacacaacttgatgatacaaaatggaactaaattcaagtttctttacaggaagtctagtttctttctatcattgagttaatgtgactcctcactaaatamacatcccatgaggtattaattcctaattgcttgcagagggtatatcagcataatgagaaaatctgtattctaggtacacagagtaacatggtacacaaatctcatattgtaattctaaatccagggatctctgagttgtgcagagaggcccataagtcaccaccagtcaataattgccctgaaaatattaccctaaaaagcagggaatctaaggtaaaaaggataataagaaaaatagactgtggcatggcagctaagtagtcaggtttagaagtcagattgacagggagaagtgtgaatctactattatcttgggcaaatcaagcatatttctcttctgtaaaatagagataataatatttcctacctcttgaaa

SEQ ID NO: 361900 - DNA, 547 bp, Homo sapiens
aagtgttttctatgcagtttttttttcacataacataaatttggttagaaatcaagttatgaaaaacaagatttttgtcccagtagagttattgaatatttcatcattttagaagtccaattttcttcactcattctcagtgtctcctgcctttatgagataaggaacagattcaatttatactgtcaaatactagctacctagccatctagaaarctactccttttaaccttcttttatgtttaccttgctgaaatatagttaaatgctttcaataaaatataaaaccaacagacaaaacctaccaaagacttctgttcctctgcatataagcagaccttttgagacaaatgaactatttaacttaataacattttacacacttgactttgtagacaacctgtaagtaagcagggccatctcaattttgttgaatgcatttctgtagaatgcttattatgtgaccataatatgtttaagattgtgggaaagaaaaaaattaaaaggatatttctacacacccagctctcaagaggctataaaattt

SEQ ID NO: 361901 - DNA, 547 bp, Homo sapiens
aagtgttttctatgcagtttttttttcacataacataaatttggttagaaatcaagttatgaaaaacaagatttttgtcccagtagagttattgaatatttcatcattttagaagtccaattttcttcactcattctcagtgtctcctgcctttatgagataaggaacagattcaatttatactgtcaaatactagctacctagccatctagaaaactactccttttaaccttcttttatgtttaccttgctgaaatatagttaaatgctttcaataaaatataaaaccaacagacaaaacctaccaaagacttctgttcctctgcatataagcagaccttttgagacaaatgaactatttaacttaataacattttacacacttgactttgtagacaacctgtaagtaagcagggccatytcaattttgttgaatgcatttctgtagaatgcttattatgtgaccataatatgtttaagattgtgggaaagaaaaaaattaaaaggatatttctacacacccagctctcaagaggctataaaattt

SEQ ID NO: 361902 - DNA, 505 bp, Homo sapiens
ttaaaaactaatagaagacaaagacagttcaaagcagataaatgtagcctaatgatggctttgatgagcctttgtctcttatctctttatgcacagtaaaatatgaggaattaaaaaaagagcaaaatcrtcaaagacttatctgtatgtgtcactaacgagtgatgagaactggaaagacaaaggatgaatttcagcagttttgatgggcctttatcaggtatgtctgtgtgaattacaaagtatgaggcatgacaaagagtaggagtggagaaaagggaagagatatttgatatgtgaagagtaatacattgaggaggatgtgggttgggagagcgatgactatctgatggtttctatacaaataattagataactgattatctgatgtgaatctatcagtagaatctgtacatcattgccagacatatattagaacccaaagtcgtctatagagaggaaacctgggtatgactccacagggaaacactcaagcaatttattc

SEQ ID NO: 361903 - DNA, 586 bp, Homo sapiens
ctgtgactcctttccttatggcgtataatatctgtaagggagatattaataaaaaataatttaccaaacataatacttacaagggtagaaaacaaattgtaagctaaaaatgggtcaataaatggaaaaaattattttatcttgaatttaattatagattctcagaggaggcaactaatgcttgatcaaggacttaaaacaaatggaaagatatgtcacattttaaaatataatgactaaacataagcataaccactctcccgaagttgattcataaatgtattgtgaaaccttcaccaaatcactttattaatcaatttacctattgctatatgaccccccaaaccagacttattctaaaatttatatgaaaaataatattaagaaaaactctagaaagaaaaaagcaataaagaattaaccctactagatattaagacatattatataaaatcttatttatcaaaagaattgcatattggcacaaaaatrgacagatcaatggacaaatttaagtacagaaagagatacaaatatatgtggtgaagatagcatctcaagtcaaatggaaaaatgaacttttaaa

SEQ ID NO: 361904 - DNA, 586 bp, Homo sapiens
ctgtgactcctttccttatggcgtataatatctgtaagggagatattaataaaaaataatttaccaaacataatacttacaagggtagaaaacaaattgtaagctaaaaatgggtcaataaatggaaaaaattattttatcttgaatttaattatagattctcagaggaggcaactaatgcttgatcaaggacttaaaacaaatggaaagatatgtcacattttaaaatataatgactaaacataagcataaccactctcccgaagttgattcataaatgtattgtgaaaccttcaccaaatcactttattaatcaatttacctattgctatatgaccccccaaaccagacttattctaaaatttatatgaaaaataatattaagaaaaactctagaaagaaaaaagcaataaagaattaaccctactagatattaagacatattatataaaatcttatttatcaaaagaattgcatattggcacaaaaatagacwgatcaatggacaaatttaagtacagaaagagatacaaatatatgtggtgaagatagcatctcaagtcaaatggaaaaatgaacttttaaa

SEQ ID NO: 361905 - DNA, 580 bp, Homo sapiens
gttttaaactggaaaggtgtagatgatgcaaagaatttaaattataatctctagaacatttttgttgaaattttccaacatcttgctaccacttcctaaaacactctccacacatactgaagaccatgaactgttttgtggctaaatcaacaatattacttaatataatattacttttataataaacatatttttcctaaaatctgacttcttcccgtttgttatgaagattctcaaattaaatctttcatgatccaattcaaatacaatttttctcctttagtgtttttcctgatactgcaggaaagtctctcctaaatcatttataaaattcttgtacttaaaaatgttgtagatcttagcagtcccctagaccatattttttatcttagtggtaataaaactgtgctccagtgaggaagtatgatgggaagaagctccacctctgatcagcgatgggggaagaaatccagtcccagtgttctttctaccatgtgctatttgtatgtttcagatgatagacggtgctttccawcgggagtacgaatctaatctacctggctaaactgtaaattccttc

SEQ ID NO: 361906 - DNA, 580 bp, Homo sapiens
gttttaaactggaaaggtgtagatgatgcaaagaatttaaattataatctctagaacatttttgttgaaattttccaacatcttgctaccacttcctaaaacactctccacacatactgaagaccatgaactgttttgtggctaaatcaacaatattacttaatataatattacttttataataaacatatttttcctaaaatctgacttcttcccgtttgttatgaagattctcaaattaaatctttcatgatccaattcaaatacaatttttctcctttagtgtttttcctgatactgcaggaaagtctctcctaaatcatttataaaattcttgtacttaaaaatgttgtagatcttagcagtcccctagaccatattttttatcttagtggtaataaaactgtgctccagtgaggaagtatgatgggaagaagctccacctctgatcagcgatgggggaagaaatccagtcccagtgttctttctaccatgtgctatttgtatgtttcagatgatagacggtgctttccaackggagtacgaatctaatctacctggctaaactgtaaattccttc

SEQ ID NO: 361907 - DNA, 576 bp, Homo sapiens
tgctggaaagctcctgattgttttctttgtaaactattacacatctgcttatcaaaatctgccacatcaaaagtaattaaatgaataactgatgtgagacctgttttgaacttacttatgaggaattgtcatggaatcttttgtgaccttaggcaaattaactaaattctctaattttgataaaaataatagtacctactaaaaataactatgttaagaaattaaataaaaaagcttatttcttattatggtgaatagcacacagtaagcacttaatgggatagaaccattaatattgctgatatgattttcagattggcaaaaygcattgcccttattctcagcctgaaatggaatatccctgcagtttttatttctctatttacatgttgaattgatttggtagttctttgattctccccataggatgaaactaacgtactcttctctcttccagtgaagtaattccatccaaagcctcctacaggagtagtgagggaaacatagtcagaagtactgaaaggaaactgtctatggcccatgaggatggaaacactttagttgtttgttatgacc

SEQ ID NO: 361908 - DNA, 570 bp, Homo sapiens
aattatttatacagaacattggtccaataacataaaaacagagaaaagcatctagaaatttatctctttcaatgtttggagataaaacagttaaccatcttttccattattttctgcagtaagtccttgtacacaatgaaagttgatggcaattaaattcaggaattttccccagctactgtatgaagagaatgttgaagcccattactatacagcacactgcaacataaggaatcttccattcaccaattctgacacacttccaaaatatacccaacaattcagtttcatttctgtccatgaggctgggtgccaaggattgaatataaacacaggtacatataagcagcaagattatggtcaatagactctgaaaattgaaaatagcagacatagcaaggatggcaatgccacagccacgtcacccttccgggccccaggtggcttaaaaaccttttaaatatacacrcacatacacatacacatacatatacataaaaacacaaacattccatagtattacttcagtactttgaacatgagataataaaaaactccccagcttgcaaa

SEQ ID NO: 361909 - DNA, 546 bp, Homo sapiens
aaggctaggaaatgttcatttctaaaagaattttaagaaacatgaaaaaacccacacactgtagcaggatcaatattcacttatactgcactccgaagtacaaaaataaatagcctttttattcttctgtaattgatctggtcttcttcacaggctttcacccagttgatggcaacagaaatagatatttgtctgacctagtaatttagacttcctgggcatcatcacatctctgcttgaatgacctgggtaaatgctcmgggttttagagactgagctcccttcccttgctcctcctacgatgcatcttggatatgggagaaaggatgtggctcatgcaaccttgaggaggcagaagggagggagccggctggagtcctagagaggtaggttggtatctgctgcagagggcctaggctgggctggcccctggagactactgaggcatgaccttgtgccctgggcattctgctggggcctctctgtaaagtctatggctgttatacctcaggatgccagactcagctcttgcttgcagggtggaca

SEQ ID NO: 361910 - DNA, 578 bp, Homo sapiens
tatgtatacataaaatatatcaaatataaataaattgaaaagatgtgtatcttttcaagtaaatcaaacaatttcattcttttcaaagaatcaaagaaaatgattcttttatrtgtatgaaaaatacatatttttaattcccatgtcttcactgagaacgcatattagaaaaggtaattattggaacaaaatactgtgcattaaaaacactgccaaaaataaatttaatgattataattcaaaatgtcatgcacatttaaatacattttctttccttatccaattacatgtaaactccagcagtcacaaaaaacaaatgattatctatgaaccaaatattcatgttgaaatgaatatgaattataacaacttcagctgaaggtttatgctaatatatctaaaacaaaatggcttgatcagctcaaaatctgtcataatttgaaaggggaaatttccttctgcaattgaaccagcaatttttgtgtgtttcataatttgtcaatttgttccctaagtgtagtgatttagtgatgacaaaagaaatagggaaacaaatgaaaattgcttaattacagctt

SEQ ID NO: 361911 - DNA, 553 bp, Homo sapiens
tatggagctgatgatactctagagaagacagggtaagtgtattttgaggtagcacatccattcctgttggcatatattatctacacaccagtgaccccaggtcttgagaagaactgcccgatgccctacggaaggcagagaacaaagtggttcagggtgtgggctttgaaatctgattaggaccatagtctaactccatctcttcttataaggacaccagtcatactgggttggggcccacccttatgacctcatttaaccctaattatctctttaaaggccttatctccaaatacagtccacgttgggggttagggctccaacatgtaaatttgggaggcacamaattcagtccacaatagcaagctacctaactttatgccttggtttcctcatctgtaagttaaaaataataaaatgataaaaattaaaatgtacgaaagaactcactaggtcattataatgattaaacgagatgatacatgtgaagagctaagcattaatccctagaacttaataaatgttagctgctatcagtagtaatattagactt

SEQ ID NO: 361912 - DNA, 579 bp, Homo sapiens
atcctagctgagctttagagtgggctctgatgtcaatacattctaaaagcgagtcaggtgagtctaatgtgtagctaggtagagaaccaatggtctcaaaaatgtggatcaatgacccagaaaggatcaaggttgagagcaagctgatggcaatctgaagcagaacccagaaggaagataacaactcaaatgcctagggggccacttgaatgaatgaagtagacaatgtaagctcacatttttagactgtgtgagtgccagagagcgtgacaaactaaggagctcactgggcaagggctcctgagctctagttgatattgccatgaggaagtaacagatcttctcactggatccccccaaaaaaaacacaaatcaagattttcgtgtaaaattacccaactttcaaaygttggctcaattaataagcaataacactggatgagggaaacaaaacaaataatgaaaaacacaacatgggtttggcctcatcacatccagtctaaagggttgtttccattctacagaaaccacaacagcagcagcagcagcagcagcatcacaacagcaatacaaatacct

SEQ ID NO: 361913 - DNA, 579 bp, Homo sapiens
atcctagctgagctttagagtgggctctgatgtcaatacattctaaaagcgagtcaggtgagtctaatgtgtagctaggtagagaaccaatggtctcaaaaatgtggatcaatgacccagaaaggatcaaggttgagagcaagctgatggcaatctgaagcagaacccagaaggaagataacaactcaaatgcctagggggccacttgaatgaatgaagtagacaatgtaagctcacatttttagactgtgtgagtgccagagagcgtgacaaactaaggagctcactgggcaagggctcctgagctctagttgatattgccatgaggaagtaacagatcttctcactggatccccccaaaaaaaacacaaatcaagattttcgtgtaaaattacccaactttcaaacgttggctcaattaataagcaataacactggatgagggaaacaaaacaaataatgaaaaacacaacatgggtttggcctcatcacatccagtctaaagggttgtttccattctacagaaaccacaacagcagyagcagcagcagcagcatcacaacagcaatacaaatacct

SEQ ID NO: 361914 - DNA, 445 bp, Homo sapiens
tgatagtcttgtcagtagttcttattcttaaaaatgattgaagatctcaaagatcttttgtttacatgggttatgtctatcaacactcaccatatcaggaattaaaactgacaagtgttccaatatttgtatattggaatcattactaataatcaaattacatattaaaataagtatttttattaaaaatctattttctaaaaatagaaaatattgagaagcattattttacattttttcgaatctgttataatatctggctgaacagaagaaagttggattccctatttgtttctgcattcaatttttgaaatacactgttttagttgaagtaaagaaaatccagactcatatagataggtagttggaaaggggaggagtattttaatagtctttytatatagttgtggatatttttctttgatactacaccacgatctgaaaa

SEQ ID NO: 361915 - DNA, 589 bp, Homo sapiens
aggggtggcctaaagctgcttaaagttgcaaattaggaatgaactttttttcaaaaaaaraggtaaccgatgtgatcatttgtatgcacttgctcattaacggactaaaaatgactggacattgctatggttaggatatggtttgtttggcctcagcaagtcttatgttgaaatttgatccccaatgttggaggtaggtactggagggaggtgcttggtttcagagtagatccctcaggaacggcttggtgccattctctccagagtgagtgagttttcgctgagttctcactcttagttcccaaaagaactgattgttgaaaagagcctggcacctctttccctctctctcggttcctctctcgtcatgcagtttctgcacatgtggttcccctttggcttccccagaagcacacgctggctccatgcttcttgcacagcctgcagaaccatgagccaaataaacctcttttctttacccagcctcaggtattcttttacagcaacataaatggactaaggcagaagtacagtactggagaacctgaaaatgaaaatcaaacaaggctgccaacctttgagcaggaat

SEQ ID NO: 361916 - DNA, 589 bp, Homo sapiens
aggggtggcctaaagctgcttaaagttgcaaattaggaatgaactttttttcaaaaaaagaggtaaccgatgtgatcatttgtatgcacttgctcattaacggactaaaaatgactggacattgctatggttaggatatggtttgtttggcctcagcaagtcttatgttgaaatttgatccccaatgttggaggtaggtactggagggaggtgcttggtttsagagtagatccctcaggaacggcttggtgccattctctccagagtgagtgagttttcgctgagttctcactcttagttcccaaaagaactgattgttgaaaagagcctggcacctctttccctctctctcggttcctctctcgtcatgcagtttctgcacatgtggttcccctttggcttccccagaagcacacgctggctccatgcttcttgcacagcctgcagaaccatgagccaaataaacctcttttctttacccagcctcaggtattcttttacagcaacataaatggactaaggcagaagtacagtactggagaacctgaaaatgaaaatcaaacaaggctgccaacctttgagcaggaat

SEQ ID NO: 361917 - DNA, 589 bp, Homo sapiens
aggggtggcctaaagctgcttaaagttgcaaattaggaatgaactttttttcaaaaaaagaggtaaccgatgtgatcatttgtatgcacttgctcattaacggactaaaaatgactggacattgctatggttaggatatggtttgtttggcctcagcaagtcttatgttgaaatttgatccccaatgttggaggtaggtactggagggaggtgcttggtttcagagtagatccctcaggaayggcttggtgccattctctccagagtgagtgagttttcgctgagttctcactcttagttcccaaaagaactgattgttgaaaagagcctggcacctctttccctctctctcggttcctctctcgtcatgcagtttctgcacatgtggttcccctttggcttccccagaagcacacgctggctccatgcttcttgcacagcctgcagaaccatgagccaaataaacctcttttctttacccagcctcaggtattcttttacagcaacataaatggactaaggcagaagtacagtactggagaacctgaaaatgaaaatcaaacaaggctgccaacctttgagcaggaat

SEQ ID NO: 361918 - DNA, 589 bp, Homo sapiens
aggggtggcctaaagctgcttaaagttgcaaattaggaatgaactttttttcaaaaaaagaggtaaccgatgtgatcatttgtatgcacttgctcattaacggactaaaaatgactggacattgctatggttaggatatggtttgtttggcctcagcaagtcttatgttgaaatttgatccccaatgttggaggtaggtactggagggaggtgcttggtttcagagtagatccctcaggaacggcttggtgccattctctccagagtgagtgagttttcgctgagttctcactcttagttcccaaaagaactgattgttgaaaagagcctggcacctctttccctctctctcggttcctctctcgtcatgcagtttctgcacatgtggttcccctttggcttccccagaagcacacgctggctccatgcttcttgcacagcctgcagaaccaygagccaaataaacctcttttctttacccagcctcaggtattcttttacagcaacataaatggactaaggcagaagtacagtactggagaacctgaaaatgaaaatcaaacaaggctgccaacctttgagcaggaat

SEQ ID NO: 361919 - DNA, 503 bp, Homo sapiens
tgttccagattctatcccagaatatataccaccaccatgacagttgaaaacagtgtttctgggttttgttttcmttttattgcttttgcctgtcaagcaaatggtggcggtggctctggctactgtcataacaccgtgctttctgatagcactctgaggagccagagagaagaaactaaagaaagcaggagagaaaagttcattcaaaacaaaatcacaagagatgtgagcagggcaaaaactcaagtgttctctctttcgagcaaataaaactgaaaattacttcaaaggtaaaaagcagggcaaatgacctttacagacacaatagcagcatttcaatgaaaaactattccacatggaatactgctttccactgcaagctgacaatgagacattttagattaacaaaatggtaacatttagacatgaactaattcatctcaagtgaatatcaaagagtgtaaataagaaaatgatctcaccactggcatgaatgagaccta

SEQ ID NO: 361920 - DNA, 503 bp, Homo sapiens
tgttccagattctatcccagaatatataccaccaccatgacagttgaaaacagtgtttctgggttttgttttccttttattgcttttgcctgtcaagcaaatggtggcggtggctctggctactgtcataacaccgtgctttctgatagcactctgaggagccagagagaagaaactaaagaaagcaggagagaaaagttcattcaaaacaaaatcacaagagatgtgagcagggcaaaaactcaagtgttctctctttcgagcaaataaaactgaaaattacttcaaaggtaaaaagcagggcaaatgacctttacagacacaayagcagcatttcaatgaaaaactattccacatggaatactgctttccactgcaagctgacaatgagacattttagattaacaaaatggtaacatttagacatgaactaattcatctcaagtgaatatcaaagagtgtaaataagaaaatgatctcaccactggcatgaatgagaccta

SEQ ID NO: 361921 - DNA, 503 bp, Homo sapiens
tgttccagattctatcccagaatatataccaccaccatgacagttgaaaacagtgtttctgggttttgttttccttttattgcttttgcctgtcaagcaaatggtggcggtggctctggctactgtcataacaccgtgctttctgatagcactctgaggagccagagagaagaaactaaagaaagcaggagagaaaagttcattcaaaacaaaatcacaagagatgtgagcagggcaaaaactcaagtgttctctctttcgagcaaataaaactgaaaattacttcaaaggtaaaaagcagggcaaatgacctttacagacacaatagcagcatttcaatgaaaaactattccacakggaatactgctttccactgcaagctgacaatgagacattttagattaacaaaatggtaacatttagacatgaactaattcatctcaagtgaatatcaaagagtgtaaataagaaaatgatctcaccactggcatgaatgagaccta

SEQ ID NO: 361922 - DNA, 503 bp, Homo sapiens
tgttccagattctatcccagaatatataccaccaccatgacagttgaaaacagtgtttctgggttttgttttccttttattgcttttgcctgtcaagcaaatggtggcggtggctctggctactgtcataacaccgtgctttctgatagcactctgaggagccagagagaagaaactaaagaaagcaggagagaaaagttcattcaaaacaaaatcacaagagatgtgagcagggcaaaaactcaagtgttctctctttcgagcaaataaaactgaaaattacttcaaaggtaaaaagcagggcaaatgacctttacagacacaatagcagcatttcaatgaaaaactattccacatggaatactgctttccactgcaagctgacaatgagacattttagattaacaaaatggtaacatttagacatgaactaattcatctcaagtgaatatcaaagagtgyaaataagaaaatgatctcaccactggcatgaatgagaccta

SEQ ID NO: 361923 - DNA, 548 bp, Homo sapiens
atttagatactgttttccacatgaaaaaaaagcctaaaggagcagggaaaatacaataaaaccttaagaggaaagtgcacacagtaaaagatggtgaggctggtcatccaaatagtccctttaatcaatgtaacttggattgatttgttcatttatatcaacaatctaatttgactcattgcatggacacatcatattatattaactttcaaagctatatttagagatcactcttgttttgatattattaaatataatgtaacacttccattttttaaaamaattgctgatcagaaaaccatgtggcaaaatgagtacatttagactgaatgggattttgctcaaatgtataatcttttggaaaaggaaaagcttaaacacagacacatacacacacactcatctgtttagtatgtatctgcatattttactgtattgttcaatttaatttacagcctgtggttattttgagaaaaaatattcgtgcaactcttttagaatgaggctaccacatgtttgtaaagtcaaaagcttacaaaataaatagg

SEQ ID NO: 361924 - DNA, 634 bp, Homo sapiens
ccattcataaaaaaaattaattcaaaataaataacatgatagatatgttaacgtgcttcactataatgatctttttactatatatatttatcttaaaacatcatgttgtataccttaaatatacacaataaatatattaaaaataaaaataggcctgggcgcagtggctcacacctgtaatcccagcactttgggaggctgaggcgggtggatcatttgaggtcaggagttcaagactagcctggccaacaatggcaaaaccccgtctctactaacaatacaaaaattagccaggtagtagtggcgtgcacctataatcccagctactagggaggctgaggtgggagaatcccttgagcccgggaggcggaggttgtggtgagctgagatagagccattgcactccagtctgggacagagagtaagactctgtctcaaaaaatgaataaataaataaataaataatccaatatagatagtagacctaaacataaargctaaaactatacagcttctataagaaaactgagaagtacaaatttgcaaacttggggcaggcaaagatttgttagagagctcatggaaagaattaattacaaaagaaaaaaattggcagattagatttcgcaaaaat

SEQ ID NO: 361925 - DNA, 484 bp, Homo sapiens
gatggaaattataatggtgggaatgccaccaaatagaaccttggtattagaatgttaaacttttaggattgctactctagttcccagctaagagaccttgaggatgtatttaacctgtaatttggttttctgatttgttacattgaaaaatatcacaggatcaattgcggtaatgttaattatagctctgataaattataaagcatatcacatataattatttgatgataattatgattatgatatcactatatataaattcattagcaaatactaatttatttttgttattttctgacacagatagtagctgctcatcgttggctaatacttatttttaatgcttctagacagagtcttcattaagatgcgacgattcwtccagcttttcctagaagtcattcacaactcctcattttctctcacactccattgactaaaccttttccatacacaaacatccactaaatcaccaagtctcttt

SEQ ID NO: 361926 - DNA, 561 bp, Homo sapiens
gatctttctgaaactcatgattatcacccatctctaaaaccccccaacagtttccctgaagaaaatttccaaatttctctaatatggcctgcaagacatttcatgatttggcctctctctacttgttcaggttttagatatcctcgaactctaaatggtccagttatatcaaatgccttacagatattgargttccatattctctttttccccatctgaaactcctttcccttgactttttaactctggttaacttatgaagaatgtgtgtggaagggatactgaaataacattatctagaaaagtttttgcatgattttatagattaaacttttttaccactcattacagtgatgtttttaattccctatcagtaaggattaaaatgaccagctgacatacaacttaatagcaataataataataacctgaataaaaaataggcaaaggacctgaatagacatttttttcaaagaaagcataaaatagccaacaggtatatgaaatgttgaacatcactaatcatcaggaaaatgcaaatcaataccaaaatattacctc

SEQ ID NO: 361927 - DNA, 561 bp, Homo sapiens
gatctttctgaaactcatgattatcacccatctctaaaaccccccaacagtttccctgaagaaaatttccaaatttctctaatatggcctgcaagacatttcatgatttggcctctctctacttgttcaggttttagatatcctcgaactctaaatggtccagttatatcaaatgccttacagatattgaagttccatattctctttttccccatctgaaactcctttcccttgactttttaactctggttaacttatgaagaatgtgtgtggaagggataytgaaataacattatctagaaaagtttttgcatgattttatagattaaacttttttaccactcattacagtgatgtttttaattccctatcagtaaggattaaaatgaccagctgacatacaacttaatagcaataataataataacctgaataaaaaataggcaaaggacctgaatagacatttttttcaaagaaagcataaaatagccaacaggtatatgaaatgttgaacatcactaatcatcaggaaaatgcaaatcaataccaaaatattacctc

SEQ ID NO: 361928 - DNA, 561 bp, Homo sapiens
gatctttctgaaactcatgattatcacccatctctaaaaccccccaacagtttccctgaagaaaatttccaaatttctctaatatggcctgcaagacatttcatgatttggcctctctctacttgttcaggttttagatatcctcgaactctaaatggtccagttatatcaaatgccttacagatattgaagttccatattctctttttccccatctgaaactcctttcccttgactttttaactctggttaacttatgaagaatgtgtgtggaagggatactgaaataacattatctagaaaagtttttgcatgattttatagattaaacttttttaccactcattacagtgatgtttttaattccctrtcagtaaggattaaaatgaccagctgacatacaacttaatagcaataataataataacctgaataaaaaataggcaaaggacctgaatagacatttttttcaaagaaagcataaaatagccaacaggtatatgaaatgttgaacatcactaatcatcaggaaaatgcaaatcaataccaaaatattacctc

SEQ ID NO: 361929 - DNA, 558 bp, Homo sapiens
tttactgtcgttttatatgtctccttcaacttataaacatagagctactaacttgagaagggaaaggtaatgaagaaaaataaggattaaaaatatatctcttaatattatccctcaataatttctgaaataatgctataagggaaatccacggtgacttgagaacagttaacaaaggaaccaaatttaatttgattgggtggtaggtcctatgagagggagcttagagagggttcttctgaggagatsagataggaactgggatctgaaagccatgtagagttaatgttttgaaggagagtgaggagtggggaggagggtgttctcaacagaaaggatacacgtgccaaggcctctcagcaggagaacatggaaaaaaaaaacaaatctacaagcattatcatttatggataaaatcttaattatagattatacgcacttgcattttggtgtatgaggcctcagcaaactatataaggcatcaaccatttattatgccaaaatggaaagtgtataagaactggtcagagctttggacttgagttcaagcttgaccag

SEQ ID NO: 361930 - DNA, 623 bp, Homo sapiens
tggcttgtgatacattagtaagtgtgataaatagaagattagatatttctggatctattaaaatcaattcaagaacccaaaataaaaacactatcttgaatataccaatcttgtctttttcttttgtcatgattttgtaataatcaaactacctgagagactactgtgcaaaagaaaatataaattggtcctttgctggaatcggggtagcatttaatatcctgtatggaaattacatagaaaaacactggcttaaaataaataagaaactttctaacatttagagctacctgacaatggaactagcagtccagggaaatagtaagtgctctttcattacaactattccaagaaaagacagatatacactttcaaactacatgatattgaaaaaagaaaaaaataaattatatgataaagtataatttctcccaaattggtatkaccaatacatattcccagacagtcgtatataaaagtgatctgactcacattctcttcaacagttagttacatcagaaatattaaatgttgccattctattagatgtaaaattatatcacctgtttttaattcctaattatgtgaatatcaataaggtggagcactttacgttccttggc

SEQ ID NO: 361931 - DNA, 623 bp, Homo sapiens
tggcttgtgatacattagtaagtgtgataaatagaagattagatatttctggatctattaaaatcaattcaagaacccaaaataaaaacactatcttgaatataccaatcttgtctttttcttttgtcatgattttgtaataatcaaactacctgagagactactgtgcaaaagaaaatataaattggtcctttgctggaatcggggtagcatttaatatcctgtatggaaattacatagaaaaacactggcttaaaataaataagaaactttctaacatttagagctacctgacaatggaactagcagtccagggaaatagtaagtgctctttcattacaactattccaagaaaagacagatatacactttcaaactacatgatattgaaaaaagaaaaaaataaattatatgataaagtataatttctcccaaattggtattaccaatacatattcccagacagtcgtatataaaagtgatctgactcacattctcttcaacagttagttacatcagaaatmttaaatgttgccattctattagatgtaaaattatatcacctgtttttaattcctaattatgtgaatatcaataaggtggagcactttacgttccttggc

SEQ ID NO: 361932 - DNA, 561 bp, Homo sapiens
atgtgtatgtaaatgtgtctgttttagttgagatttatgttattaactttattgcactgtggccagaaattttcatttgtataattctattctgaaatttttgagaccttgcttcatagccttatgaataattttttataaatgctgcatgtgtgctgaaagagaatgtgttctctaattgttgagtgcagaagtctgtatctgaccattaagtttttattcaaattttctatatccatactaatgtgttctctggttgacctaccaataattaagagaggtgtgtttaaatctcctactttaacaggatatgtatcaagtttccaatttttgcttcacatattttcaggttattttatttatttatttatttatttatttatttatttatggagacggagctatgctctgtcacccaggctggagtgcagtggcgtgacctcagctcactgcaacctccrcctctcaggttcaagtgattctcctgcctcggcctcccgagaagctggtactactggcataagccaccacgcccagctaatttttgtatttttagtagac

SEQ ID NO: 361933 - DNA, 613 bp, Homo sapiens
acttaccattcatagacaaagccctaggatggcaaataggatttttgcctggagttctgtatcacccatttcctaaatgttgcttgaatttactatatgttcagaaactacccccaaaccacactctttacctatagaatctgcctatttcatgggtcagatcccctaactttagactggctgtaccacagattttgagtacacctctctctccacctagaaaagaatcacaattctatcaatctgttttgcctgctcctcttgactgccaatgatggagggaacatctacactcctraaggttcttcccagaggagggagctccagcctagtatgacaatcatggctcctctccacacctttactcatgaatccccttgagagggttaggagagtcctgaagtggtctagaacctttcgtgaatgggtgggtaagtctgtcaaatgtgagggtttaacaggggacttttatccataatgtgatattttggctccaattcatcatatttacccttatcatatttttcaattaattcagaacagggtgaggaaaagggatgcaattgtttggctattctcagagaccccagtagagaacaacctatgaagcctt

SEQ ID NO: 361934 - DNA, 539 bp, Homo sapiens
tgctccattttactagtaagagaaaggctataatggaaagaaaagataattttcaaaaatgaaagaggcaggaacatgacaaatgacactgtcttgtggaacatatttttttcgagtagaagtgatgctgaaggataaagaatgaaccatgcaacctgtgaaaagcgcagctctggagtaattgaaggtaatccagaaatggtgattgacaaagtacaacaattttaagtatgtggatagaagatcagagttagtgtctgaagcctgttgagctaatgctcatccaagagcaagggaggtgatagttaagcacagmtgatgaacttttgttgcagctcttggatgaaatgcattggttcaaagctgtgtcacgctgggcaatcatcagaggtgatgctggtagtgcaggtgccatgaatacctctacaaagctgtggagatcatcaaggaggagtgtggcctattacaacagatttccaacacaaatgaaactgttcttttgggttttttaaaaatagatgcacaatggaatgtgtcag

SEQ ID NO: 361935 - DNA, 529 bp, Homo sapiens
tttctgagaaaacttcatctttgtaacattttagcttaaagcaatattgtattttgttattattgttataataatgactaaaatttgttttctcccttgtttttagttctatgagtactgtgtcttatatggawgaacccagtcagcgtgatgatatctctcgccttacagttcagatggaaaacacctatcagttgggtgtgttcttttatctctcactcctattttaaacttctaaattggtgactgattctcttaaaaatgatatttgataacctggcattgtcttcaattctagcacaatataagggactttaatgaattgagtgatttgatgttgctttagtttcttcctcagcaaaaaggtaacaacacttgctgtcttacttttctttactaatgtttcccaaatgccaaacaattcactgggtggcactgatgcatacagtatactactgacttaacaaattcactgagtatttctgggtacatagatatgacttaaatgaaagagataagtattgatatt

SEQ ID NO: 361936 - DNA, 512 bp, Homo sapiens
acttgaactattgtcttacctaacctcttgttggcatacattattgttatttagttttccatatgtcttttttcctgaaagactacatatttgtgccctcaccatcttgtacatggtagtgtctcagtaaatatgacagagccacccaaatctccagtgaggttatgctgttttcagggcagtttatttttctgttagaaagttgttcttactgtaaaaattctaaatgcctatagacaacttaaaatcatagaatcttaaaacacagacattatgcagtctattgccttcatttcatgattgagagaaccttaacacctaaggttaagagatttccccaaggccacagagctcttaacttgcagatctatagccttgaactctggtctccagagtcgcwgtctgttaatattatttcagttattagaaaaaagtttccaggcccctcttagtcttcttaggccataaggcttgaatttctcattatcttggacacttttctggttttagcc

SEQ ID NO: 361937 - DNA, 518 bp, Homo sapiens
taaaaatgatgtatatatgtgtgctttgctctgaaaagtattcttagatttgtattagattatcaaaaaggaattatgattttaatgactataaagacaaattttcctaaatatttatataaaactcttcatgacctaattgctaactccccaagcctcatttgcttccacaygtcacccttcaatacccaccacactcacatacacacacaaataccacacttcccgtggtttcttaaaatgtgtctgctcagttccacacgtacatagaaggtggacctccttccttctacacttagtaagattatcttcatcctcagacctcagctccaatatcttcttaatgaaactttccctgacctatacaagcatcattaagtgctttcatagagctttgctcattctttgaaagaatttatcaaatcactgtatttgaatgtagatttatctatcctcctcaccaaacaccaagtttcaatcacatagtggcaatgaccctgatagagtggcaacagtcc

SEQ ID NO: 361938 - DNA, 610 bp, Homo sapiens
gataggagccaatctctttcatgtatgtccatttaacaaagcaagaactaaattctgacctgaaaaatcaacacagctatatgaattatcattctagcaacttgaaaagggaaaaaaatctgactttggatcttgggacagtggttcttgtgatagttacttgttgtatgatttaaaataccttagagtgatggtgaatgaataacatcaagcatttactttgcgagaaaaaaaaktcataaaagtaatgtaaaactgaatgagcgagatggaattaacatttgtatgatatactcattcaatggaacgtttaaaaattataaatggcttatgatctatcaggctgattcacaaactctggatggattaaaaactgaactatctttagagaaatgtaaagtgattcagtttgattcttttctatatgataacagacaatttaaccaggaagtttttaaagaaacttcgttaatttggtataaaagtaactgattggcaaagtaaagcaaagcaaaaaaagaaaaaaaaacagcaaaaaaaaaaccctatgaaatgctcattaaaagagtatagaatctcacaaaatctgtgctaaacagtgcactgctct

SEQ ID NO: 361939 - DNA, 515 bp, Homo sapiens
tgctgttaataaatatgtgggtaaatctctgttcagggctctcagctctgaaggccgtgagacccctgatttcccacttcacacctctatatttctgtgtgtgtgtctttaattcctctagcaccgctgggttagggtctccccgaccgagctggtctcagcactctcacctaggctggagtgcagtggtgtgatcttggctcactgcaacctccacytcccaggttcaagcgattctcctgcctcagcctcccaagcagctgggattacaggtgcgcaccaccatgctggctaattttttgtatctttagtagagatgggttttcactatgttggccaggctgtactcaaactcctgacctcgtgatctgcccaccttggcctcccaaaatgctgggattagaggtgtgagacactgcacttggccaagaataaggaattataaaagcaagcagaaataaaacaaaaaaggggatgcagaaaaaatcaacaaagaaatcttggaaataaaaaaa

SEQ ID NO: 361940 - DNA, 491 bp, Homo sapiens
cgattttgggaaatgccacgaggggcccatcctgggtcccattctaaaccgggacatttccagctcargccattctctcacccccgtacaatgtctatcccctgccacagccagtagtgccacagtagatttatgctgcacaaaagctgtgagccttctgcctggggaacccctgcaaaaggtcccaacaggagtctgtggacccttgccagcagggacaataggattacctttaggaaggtctagtttaggtttaaaaggggtgcaaatacatacaggagtcattgattcagattacaatggggaaattcaaattgttatatctacttctgttccctggaaagcagagccaggagggcgtatagcacagctcctgattgtgccatatgtgggaatgggaaaaagtgaaattaaacgaacaggaggatttggaagcacaaataaacaaggcaaagcagtgtattgggtaaatcatattactaatacatgcc

SEQ ID NO: 361941 - DNA, 491 bp, Homo sapiens
cgattttgggaaatgccacgaggggcccatcctgggtcccattctaaaccgggacatttccagctcaggccattctctcacccccgtacaatgtctatcccctgccacagccagtagtgccacagtagatttatgctgcacaaaagctgtgagccttctgcctggggaacccctgcaaaaggtcccaacaggagtctgtggacccttgccagcagggacaataggattacctttaggaaggtctagtttargtttaaaaggggtgcaaatacatacaggagtcattgattcagattacaatggggaaattcaaattgttatatctacttctgttccctggaaagcagagccaggagggcgtatagcacagctcctgattgtgccatatgtgggaatgggaaaaagtgaaattaaacgaacaggaggatttggaagcacaaataaacaaggcaaagcagtgtattgggtaaatcatattactaatacatgcc

SEQ ID NO: 361942 - DNA, 553 bp, Homo sapiens
gtgcatttattatttcacttctttaaccatctttgggtctgaatttcaaccaacacaatgagaggatttgtgtaaatgatttctaaggcccctttagctcaaatttggtgcaaagcagatattatttctctctggaatcagtgtgcaaacatttctttctagcctggttgattaagacaataaaggaaccctttttggctttttaaatttttgttaattawtgttttctcctttggtacagtctatcatgacttcttccacccaggttttctgtgatgttttaagtgtttgtattgaactttagagatctttatataataaatataaaagttctaagtttcccagtcattcatgttaatatcctttttgcaaaagcacagaaaggaaaaaaagcactctcttactctttttcttcattgcttcattactaaaaggctccaagaaaatttaggagcaggtttcacataaaaaggaaatgaggttttttttaaagtaaaggttgaatcttaactgaaggagacagatttctttcttttttttttttcaaataaat

SEQ ID NO: 361943 - DNA, 568 bp, Homo sapiens
ttgaacctttagtcttctgcttgtgtagaaaagggtggctatcttgctggctgtgcagtggcatagagtatatatactttttccatgtcctcctgtttttaggagataatttcaggatatacttaaaatctaaaaccttttcacagttttaagggtaaagtttgaacttcaagctaagcctataaagttctttgtgatctagtccttcctttctctattggttcaacttggttcttccccttctggatgaactaagaccacaccacaacatactatgttggctacagcccgttgaacttggagggatacaaacgcatcacatttcacatgtgatgtacccctctacctggagtgccttcttttccttttcttccacaatttcttattcttaattgttgttttctctcagtagccccgctcactttcatctactgtctgatktaaatatcttttacctgtattcctttaccacctcaaacttatctttgatagtgttaccagaaagggatattgatccaaaccccaagagaggattcctggatttcacgcaagaaagaattcctggtga

SEQ ID NO: 361944 - DNA, 568 bp, Homo sapiens
ttgaacctttagtcttctgcttgtgtagaaaagggtggctatcttgctggctgtgcagtggcatagagtatatatactttttccatgtcctcctgtttttaggagataatttcaggatatacttaaaatctaaaaccttttcacagttttaagggtaaagtttgaacttcaagctaagcctataaagttctttgtgatctagtccttcctttctctattggttcaacttggttcttccccttctggatgaactaagaccacaccacaacatactatgttggctacagcccgttgaacttggagggatacaaacgcatcacatttcacatgtgatgtacccctctacctggagtgccttcttttccttttcttccacaatttcttattcttaattgttgttttctctcagtagccccgctcactttcatctactgtctgatttaaatatcttttacctgtattcytttaccacctcaaacttatctttgatagtgttaccagaaagggatattgatccaaaccccaagagaggattcctggatttcacgcaagaaagaattcctggtga

SEQ ID NO: 361945 - DNA, 564 bp, Homo sapiens
aagacttgaagtagggaggggscttccacgtcacaggtaggtgagaagcaaatggttgcattcttttgtttctgattagcctctccaaaggaggcaatcagatatgcatttatctcagtgagcagaggggtgactttgaatagaatgggaggcaggtttgcccaagcagtgcccagcttgacttttccttttagcttagtgatttggggcccaagatattttcctttcacagtgcttttctcactttctcccagtaacctcctctgagatactcctttggtttgtctgatgagtcggctgccaccaggataggcatcctgttgtcagtgtcactcacacaggcttcattctgattgtaggtgacattgtggagacacatggaagggcgtcatgcagtcctcccacccgcaattagaataattcataaccctgtgggatggctccgtcaagacctcttcctggggagtgaatttatacatcatagaataaggaaaaaagtctctcaaggcttgaaaagaaaccaaggattcaatggctcttcatctgtgtcagtcaaatgaatct

SEQ ID NO: 361946 - DNA, 588 bp, Homo sapiens
cttctcaaaactttggagagcagtgaaaatagattcccaagtgaaagaggtggcagaaataaaaaaaaagaaagaaaaactctttctccccaaaactagcagcaagcaaacaaagacctaaaaattttaatccagaatcttcccccagggtctcccaagaattgagagaccagggccatttgtaagaatattatatcttttggtggtaagtccttgggtactgtaaacccagaaaatctgagacaggtctcagttaatgtagaaagtttattctgccaaggttgagggtacacacctgtcacacagcctcaggaggtcctgatgacatgtgcccaaggtggtcggggcatggcttggttttatacattttagggagacatgagacatcagtcaatattgtttctgtctggaaaggcaggacaacttgaagcaaaggcaggaagacttgaagtagggagggggcttccacgtcacaggtaggtgagargcaaatggttgcattcttttgtttctgattagcctctccaaaggaggcaatcagatatgcatttatctcagtgagcagaggggtgactttgaatagaatgg

SEQ ID NO: 361947 - DNA, 526 bp, Homo sapiens
gggttcactgggtttcctcttcctatggttgaactagttctagaatatccagagacgcttggggcacgcattcattcattctacaaatatttacaagtgagccctttctatgtgtcagacaacatgctagctgctgaattacgaagggtaacaggcagacagattcacagcttgggctatatctgtttctcttaacctgatctgttctattgatttacatacttacctgttgatggcaataataatatctaacatttattgctttttatatgcttgttataattttatctttatcataccagataagataggtgctattattactactatcctcattttacagatgaaaaaattgtggctcagaaatattaagtarcttgcctaaggtcataattagtggatggcagctccaggatttgagcccagatatgtctgactcaaagctcatgctttaactgctactttatatggtctttctaaaaacgtaacagtggttctgggccatgaaagatggaaacttcttaga

SEQ ID NO: 361948 - DNA, 620 bp, Homo sapiens
aaacatgtggacttttctccttgtagtcttcatccctgctacataaagggtggaatacaactcctgctattgtagtgtgttgtttcattagcattgcacttttggaatactgctatttgggaactactttcatgccatttcattgctcaagaaagatcctggttaaatttccaaatttagagatagtccttatgctttcatcactttgtaktttaattctagacagaaaacccacagctctgaagataagcatgctacctgaataaccaggctgcctgaaatcctgcctaaccctggaagcattgcagttgcatgagtacaaaaggagggaattcccctgaaggcaaaaatgaagtctgtctggtcctgctgaatacctatgtctggcccagcacctggcacatagtgcatgctcaataaatatttgttcagtgaaggagaacaaacagcaaatgcaatttaataactctccccagtccttgaaaatgttcctgtctgcatcacattctgacacagctggtatctaatggacagccattaggtacaagggctccatgtttcacatttgccaattcatcgaatccttctagccatcctgtggtattgcttaaaaaatcaaa

SEQ ID NO: 361949 - DNA, 609 bp, Homo sapiens
ggtcttttaaaatctaagacggcaataggattccccaggttttcttgtaattaaaagtttccagtgtgtctgatttctcttattttcactgcagaattactcagcaaaggaatccatggaactaatttctttttaggctcatttggcaacagtttgctgctggtgaagcaggaggaggttaaatagcagctgccaagcttttggttgtgcccagagcccagcacacgataggtgcttaacatatctttactgaaggaatgctttgctggcttttgttttaacatgggtaaaactcttcatagttgccaagtacttccctgatgttatctcttccgaagctccagcctttcctgcagtagaaaaaggggccggggaggaggccagggtgacttggtcagcactgaccagarctagggacgacagctttatagaggaaacgcctcgcagacgccactggggcagttcctcttcacctttcttggatttggtgactggagaatttcaaatacacaattgcagtttctactctggagctcgctttgaggaaggagaaagtgtttgctactctaaacgaaatatattgtaggcaaaatgcattttgttttgcaa

SEQ ID NO: 361950 - DNA, 493 bp, Homo sapiens
cctccccaggatttgttgtgaggatcaagtaaaacgatacctcagtgccaaacactggtgtgtttatggtggctatggttcctaatcctagcttctattctttctttggctaaagtaatagaaatggaaaaagaatgcacatgaaaaaaaaattgtgaaatatatacagttgstagagcccaacagagaaatgcctacaaacagaacaattctagaagattttcaagaaaactatacatttattgtttaacccagactacagatagggagaaggaagaagggccactgcaaacacacaccagtgcctgctccctggctaactaccaagcaggagtggagagagcaagagaggaagaggaggtaggggagaggagaggaagtgattaagcacagcagtttgagatcagagagacatgctggagacccccttcaccagtctccaatgacaaaatgaaaactttagtcaaaatcagtttaacaaagtgtatttgtt

SEQ ID NO: 361951 - DNA, 440 bp, Homo sapiens
atttgcagaaccttattttaaatacatttaatattatgttatttaactccctttttttcatagttcagttaactgtgaggcctgcagagtttgtgtgacttattcatacaaaaatgatatcacttaaagagaaagagtatgtgaaaagtggtttccaagtacggatctaatgaagttcttgaaaatcatttaaaattcctgtgagtgtatcaggcaagctgcatggtgtgtgtgacccagattttttytttaatcgcatctttttcttccttttcagaaacacacagatacataagaaaatggcttaaatgaaaaaacagaccactccaagggaggaaaaggatggaggtgacactgtgtaagttggcagccagccctggtggcgtgggtgatgcacagaccagggggtctcaatcagcagcaacctagtggccacctcc

SEQ ID NO: 361952 - DNA, 577 bp, Homo sapiens
gtgggcttctatgggctgacgcaagaaccttaagaacaaaccggtttctaagttggggacttgtctgtacatcgtttcaaaatgaaacctaataaatgtcatttgttttgaatgataccaaaattcacaacattttgtgaaacaaagatcaaggaaagcatcaaaatactgaagtagggagcacaagcctagtccagtgaaacaaactagattagcttgttacttgatgtaacacaagttacataaggttacacatttattagtaatttgcatatttaaacctttttttccactgaagtatcctcaagyacattaattagctattgaaggaacaaaggacatacataggaactcatctctgatgaagagtagctttatgtcagaaaggagaaggctaatgaatttttaagattccaaacagtggcaagaaagttcaaaggaaattgcagtaaaattgtacaatgttcaagttgaaaaaaaaaatggctctgaattacagcattcagttctatgctcaaggtatgtattagctaacactgcagttgtcagaggtgggaggcccctgagaaatgctgag

SEQ ID NO: 361953 - DNA, 507 bp, Homo sapiens
tcatttgtcttttttataataaaccagtaatagaaagtaaagtgtgttttagagttttgtgagctattctagcaaattaatgaacataaaataagggaggaggtgttgtgggaagcccttgactttgtagccaagtcagacagaagtatggttaacctgggaacctgaataacttgkgactggcatctgaagtgagggcagtcttgtgggactgagcccttaaaccagtgtagtctgacactaactctgggtaattagtgtcagagttgaattgaattgtaggacacacagttggtgattgaagagttagagaatggttgtgaggcataaaaacaaaaacaccacacatttggtttcagaactgttgtgagtcaaaacagctcatattggtgtcagaagtgggattagaaagaccctgattatttagtgtcagaaaatttaggattcactagaatggtcctagctaatggaaaagtggtttgggaagagaaaggatgaaagggtggg

SEQ ID NO: 361954 - DNA, 611 bp, Homo sapiens
tctgttgcagttcagaaccctgaagaagaaactagaagagggaatggtgttcacagaatatgagcaaattccaaagaaaaaggcgaatggcattttcagcacagcagctctgccagaaaacgccgagcgcagccgaatccgtgaagttgtcccctatgaggagaatcgagtagagctgataccaaccaaagaaaataacacaggatacattaatgcctcccacatcaaggtaagaaggcaagcctgttagaaggtttggtaaagatggctgggttaaagggaaaaatgcrgggagaagaaaatgtgtgggctgcagttgtaccttttggcttgtccccagaccctcagggattgtttttgaactcctgtgcttttcttagtcaagtggaagggcatgtctatcactgcagagagaaggaagtctagcagcctcaggaagaacttcaggtcagcgatttctgaagctcgctcattacagaggctttaacttttccttctctctgtgggctgtaactctctctatactcagattatccttttcagtttgtaattagcaggtgctggagactttggaagttacaggtattgcgttactgacataaaagtgtcat

SEQ ID NO: 361955 - DNA, 592 bp, Homo sapiens
aagcaatatatcctagaaaattccagggaaaaataaacagtagaacttagaaaatgtcccttatttgagagcagctacttgaaatatgaaaatgttgtatctccacagattttcctacattgtaacagtcacagaatgtcaaaaaaggaaatcttcatgcccagctataaaaatgagaagaacttggcaaaatagccgaggagatcctccacccagcaaacttgctttcaccacttggtgataacactttaggcctatgtttctgaaccctgaaattctgactgcaagggttgcaaggaagtgactgaaagtaagagctgaactctgaaagctgttacagagcaggcgtrgatgaacagaattacctgccaactcttgtttttggagctctcttggtggttccctcaattcccttcccttccccttagctctgctgagtcttaagggcctgtaatcaggccaagatgataaaaagaactacatattcagaggagaaacatgaggcatggcattttgtgaaagcttcaccccaaaataagaaggtggattgaaggtagcttctttcattcctcatgaactggacaaaaggaaa

SEQ ID NO: 361956 - DNA, 581 bp, Homo sapiens
ggcaccctttcttgggaatgtgttccctctaaccagcaagtcagcaactacagtgtggatcagattcccccctaccttgccactgatcccttcttttaggtgcccttggacagttacaacctatgcactggcacctgaaagtacatggtgactctcattgttgatragtaggataaggaccaagacttggtcaccaaatttagcaacgtggatgtcattaatgaccttgacaggagtcattttggaagagtggtatcacaaatccatgaatgttaagagtttaagaggaaatgagagcagggaaattggaggcagtgaatacagactgctctttggaagagatttgctgcaaagaggagcagagaaataaggcaggaactggtgggaaacatggagtcaagataaacggaaaagtaacagtatgtttgagtgcaatgggatagatgtacagcatcatcctatctttcagggactactgcagttgctttctcactgtttccttacatccactcttgcatcctgcggtgttttctccaaatatcccgagtatgcaactcttaaatcaaatactgtaatgatct

SEQ ID NO: 361957 - DNA, 581 bp, Homo sapiens
ggcaccctttcttgggaatgtgttccctctaaccagcaagtcagcaactacagtgtggatcagattcccccctaccttgccactgatcccttcttttaggtgcccttggacagttacaacctatgcactggcacctgaaagtacatggtgactctcattgttgatgagtaggataaggaccaagacttggtcaccaaatttagcaacgtggatgtcattaatgaccttgacaggagtcattttggaagagtggtatcacaaatccatgaatgttaagagtttaagaggaaatgagagcagggaaattggaggcagtgaatacagactgctctttggaagagatttgctgcaaagaggagcagagaaataaggcaggaactggtgggaaacatggagtcaagataaacggaaaagtaacagtatgtttgagtgcaatgggatagatgtacagcatcatcctatctttcagggactactgcagttgctttctcactgtttccttacatccactcttgcatcctgcggtgttttctccaaatatcccgagtatgcamctcttaaatcaaatactgtaatgatct

SEQ ID NO: 361958 - DNA, 562 bp, Homo sapiens
atgcaattcagtgcgcaaaataacattcacaatgttatgcaaccatcactactatttccaaaaaattctatctcgctaaatagaatcattgtaaccgggaagcattagctcagcatatttcctcttccacagtcgttggtaaccactagtctactatctgtctctacaaattttcctgttcgagatatttcatataaggggaattatataatatctgtccatttgtgtccagcctatttcacttgctataatgtttgcaagtttcacccrtattgtagcatgcatagaaacttcattcttcttatggctgaataataattttgcattgtatgtgtagaccacgttttgtttatccattcatttgtgatggacgctcgttttcacctttgtctcttgttaaaaggattcaactactttgtcttttaaaatttgtaatcaacatttgctgaagtgtatttattccctggaaaattcattctttaagggttagttttttaatatctttgctagggaaaacagtttccagatccatgctggctgtttcaaaggttcaaaccacact

SEQ ID NO: 361959 - DNA, 562 bp, Homo sapiens
atgcaattcagtgcgcaaaataacattcacaatgttatgcaaccatcactactatttccaaaaaattctatctcgctaaatagaatcattgtaaccgggaagcattagctcagcatatttcctcttccacagtcgttggtaaccactagtctactatctgtctctacaaattttcctgttcgagatatttcatataaggggaattatataatatctgtccatttgtgtccagcctatttcacttgctataatgtttgcaagtttcacccatattgtagcatgcatagaaacttcattcttcttatggctgaataataattttgcattgtatgtgtagaccacgttttgtttatccattcatttgtgatggacrctcgttttcacctttgtctcttgttaaaaggattcaactactttgtcttttaaaatttgtaatcaacatttgctgaagtgtatttattccctggaaaattcattctttaagggttagttttttaatatctttgctagggaaaacagtttccagatccatgctggctgtttcaaaggttcaaaccacact

SEQ ID NO: 361960 - DNA, 553 bp, Homo sapiens
aactagtttctgttgtcagtgccaagataaactgtggctagaagcccctccccactacccgcaacggacatttgaaagaaacatctgacaaagacttctggtttggggcttggaagccactcagtcaaagcttgactattttgacaaatcagagcagaacaagttcgaatccttcatttgcaaaaaggaccaaacttccaactggggtgagaactttaagccagatcctccatttattctttagagagcacactttcactttcaccaaaagctatgcccccctagtctgcagatgtgtgygtgtgtgtgtgtgtgtgagtgcgcatgtgtgtttgtgtgcatttgtgtgtaaaaataaagctctccctttttgtctgaagatttcattatcttttgttaacaggggagtttggaaattatttctctcagaataattaataatatatctttgtgtattctggaaagttaaagtcaccccttcatagtgttccttatttgctgcctaggtttcctgtagtacagtaaatttaggttcataattatttttattgat

SEQ ID NO: 361961 - DNA, 521 bp, Homo sapiens
atctgtgtaatatggatattagtactccccacaggatggggttgttgtgaggattaaatgagacaacaaatgcacagttattaacacaatgtctagtacatataaatgctctaaaaacaatacaattatcaatcgaaaaatattagctttttgctgcatarcaaacaatcctgaaactgaatgatttgcaaaaatatttttatttcctacttataaatctgtgatcagctataactctgctaagcttagctggccgtggctccagttttgggctcatgttgatcccataagtttcctcatcccagatccaggctgaaggaacaacccctaccttggatgcgttgttctcacgataaagaggaatataagaaatgggaaccatgtgatgcttcttaaaacctctactggacaccatcacaatgttgactcttcgcatattatacctatcacagcaagtcatttggccaagcccaaattcaatgaggcagaaaagttaattgcatccacaggcaagctatgtt

SEQ ID NO: 361962 - DNA, 523 bp, Homo sapiens
cttctgtctttccatcatctcagcacctatccagtgccaatgtgtctgggattctcaattcacaatgtgtttgttcctgtttgggaagccaaattacaaacaactcatgtttagcaacagattttaattctttaactgtcaataaagattgaattaatacacttttattcatacttcgtcattcttctttacttcctttcaccaccgtgayctccactgtaaaagtgtaatcaatttgaatatcccctatccaaaatgtttgggatcaaaaatgtttaaaagtttagatttttgaatatttgcattttacttactggtggagcactcctaatatgaatatctgaaatcaaaatgctccaatgagcatgttctttaagcatcatgtcaactttcaaaaagtttctgattttggagcatttcagatttcagattttcatattagggatacttaacctgtattatttttacaggttatttgcgtgcttttaaacaggtaacttttcaaagtccccttttcccccta

SEQ ID NO: 361963 - DNA, 531 bp, Homo sapiens
tctccactgtaaaagtgtaatcaatttgaatatcccctatccaaaatgtttgggatcaaaaatgtttaaaagtttagatttttgaayatttgcattttacttactggtggagcactcctaatatgaatatctgaaatcaaaatgctccaatgagcatgttctttaagcatcatgtcaactttcaaaaagtttctgattttggagcatttcagatttcagattttcatattagggatacttaacctgtattatttttacaggttatttgcgtgcttttaaacaggtaacttttcaaagtccccttttccccctaatgatttcggttttccttgcaaagtcaactacctaaggttatttctaactgggttcattctgttcggactatctacttgatttattacaactttgtatattttagttattttggtacttgatcaatcttgacataaggtaaatatggatttgctaataaacatcaagatggaaagtgaagtcatcagtattctgtctcctttttactgagtatataga

SEQ ID NO: 361964 - DNA, 523 bp, Homo sapiens
cttctgtctttccatcatctcagcacctatccagtgccaatgtgtctgggattctcaattcacaatgtgtttgttcctgtttgggaagccaaattacaaacaactcatgtttagcaacagattttaattctttaactgtcaataaagattgaattaatacacttttattcatacttcgtcattcttctttacttcctttcaccaccgtgatctccactgtaaaagtgtaatcaatttgaatatcccctatccaaaatgtttgggatcaaaaatgtttaaaagtttagatttttgaatatttgcattttacttactggtggagcactcctaatrtgaatatctgaaatcaaaatgctccaatgagcatgttctttaagcatcatgtcaactttcaaaaagtttctgattttggagcatttcagatttcagattttcatattagggatacttaacctgtattatttttacaggttatttgcgtgcttttaaacaggtaacttttcaaagtccccttttcccccta

SEQ ID NO: 361965 - DNA, 564 bp, Homo sapiens
actggtggagcactcctaatatgaatatctgaaatcaaaatgctccaatgagcatgttctttaagcatcatgtcaactttcaaaaagtttctgattttggagcrtttcagatttcagattttcatattagggatacttaacctgtattatttttacaggttatttgcgtgcttttaaacaggtaacttttcaaagtccccttttccccctaatgatttcggttttccttgcaaagtcaactacctaaggttatttctaactgggttcattctgttcggactatctacttgatttattacaactttgtatattttagttattttggtacttgatcaatcttgacataaggtaaatatggatttgctaataaacatcaagatggaaagtgaagtcatcagtattctgtctcctttttactgagtatatagaattcacatatgttttctcagatttaagtgtcttattgagaaggtttttttacgtcttctaggtagagatggtgctacagcttgaatgtgtcccctaaattcatggtttggaagtttgatttacaatgtaacatta

SEQ ID NO: 361966 - DNA, 564 bp, Homo sapiens
actggtggagcactcctaatatgaatatctgaaatcaaaatgctccaatgagcatgttctttaagcatcatgtcaactttcaaaaagtttctgattttggagcatttcagatttcagattttcatattagggatacttaacctgtattatttttacaggttatttgcgtgcttttaaacaggtaacttttcaaagtccccttttccccctaatgatttcggttttccttgcaaagtcaactacctaaggttatttctaactgggttcattctgttcggactatctacttgatttattacaactttgtatattttagttattttggtacttgatcaatcttgacataaggtaaatatggatttgctaataaacatcaagatggaaagtgaagtcatcagtattctrtctcctttttactgagtatatagaattcacatatgttttctcagatttaagtgtcttattgagaaggtttttttacgtcttctaggtagagatggtgctacagcttgaatgtgtcccctaaattcatggtttggaagtttgatttacaatgtaacatta

SEQ ID NO: 361967 - DNA, 467 bp, Homo sapiens
ctgttctagctgcatctcaagcaggcttaggtgtggctcaacctgctgctcaagaagatacaagctgtaaaccttggcagtgttcataggatactaattctgtaggcayagcttcttccatctggattgcaaataatgttgcagataacctggggacctaggcagagacatgctacaggggcaaagcagacacaaggagtccccaactagggcaatgcccagaggttctgtagggtcagcaccactgccaaaaccacagaactgtagggccaccaccatgcaactctaactgatgagagctactgagtggactgagcccagtgaagccttagggcgaggctgtctgaggttttgggtgcccaatccccaactccccaatgtgtccaggatgtgagacatggaatcgaaagagattattcttcagctttaagatttaacgtagttttccctgttgtgtttcagactta

SEQ ID NO: 361968 - DNA, 467 bp, Homo sapiens
ctgttctagctgcatctcaagcaggcttaggtgtggctcaacctgctgctcaagaagatacaagctgtaaaccttggcagtgttcataggatactaattctgtaggcatagcttcttccatctggattgcaaataatgttgcagataacctggggacctaggcagagacatgctacaggggcaaagcagacacaaggagtccccaactagggcaatgcccagaggttctgtagggwcagcaccactgccaaaaccacagaactgtagggccaccaccatgcaactctaactgatgagagctactgagtggactgagcccagtgaagccttagggcgaggctgtctgaggttttgggtgcccaatccccaactccccaatgtgtccaggatgtgagacatggaatcgaaagagattattcttcagctttaagatttaacgtagttttccctgttgtgtttcagactta

SEQ ID NO: 361969 - DNA, 467 bp, Homo sapiens
ctgttctagctgcatctcaagcaggcttaggtgtggctcaacctgctgctcaagaagatacaagctgtaaaccttggcagtgttcataggatactaattctgtaggcatagcttcttccatctggattgcaaataatgttgcagataacctggggacctaggcagagacatgctacaggggcaaagcagacacaaggagtccccaactagggcaatgcccagaggttctgtagggtsagcaccactgccaaaaccacagaactgtagggccaccaccatgcaactctaactgatgagagctactgagtggactgagcccagtgaagccttagggcgaggctgtctgaggttttgggtgcccaatccccaactccccaatgtgtccaggatgtgagacatggaatcgaaagagattattcttcagctttaagatttaacgtagttttccctgttgtgtttcagactta

SEQ ID NO: 361970 - DNA, 467 bp, Homo sapiens
ctgttctagctgcatctcaagcaggcttaggtgtggctcaacctgctgctcaagaagatacaagctgtaaaccttggcagtgttcataggatactaattctgtaggcatagcttcttccatctggattgcaaataatgttgcagataacctggggacctaggcagagacatgctacaggggcaaagcagacacaaggagtccccaactagggcaatgcccagaggttctgtagggtcagcaccactgccaaaaccacagaactgtagggccaccaccatgcaactctaactgatgagagctactgagtggactgagcccagtgaagccttagggcgaggctgtctgaggttttgggtgcccaatccccaactccccartgtgtccaggatgtgagacatggaatcgaaagagattattcttcagctttaagatttaacgtagttttccctgttgtgtttcagactta

SEQ ID NO: 361971 - DNA, 504 bp, Homo sapiens
ccaaactttccctcatcttcctgttttcttctgagccctccacacccttacaacttctgcccattacccagttccaaagttgcttccacattttcaggtacctttctagcaatacgtcactctttggtaccaattttctgtattagtttgttatcgtattgttataaagaaatacctgagactgggtaatttataaagaaaaggggtttaattggctcatggttccacatcctgtacaggaagcatgatgctggcatctgctcagtttctagggaggcctcaggaaacttccaatcacggtagaaggcaaaggggaagagaagcatctcacatggtgggagcaggagcaagggatgggaagaggtgctacatacttttaaacaaccagatctcacaagaactcactatcacgagaacagcaccaaggggacrgtgttaaatcactgaggagaaaaccaccccccatgatctcatcacctctcaccaggccttactcccaaaact

SEQ ID NO: 361972 - DNA, 512 bp, Homo sapiens
ccaaataggcaaaattctggaaaaaaaaatcagggaagaaaagttataaatgaatactttttaagaaggcaaagtgtggaatacctacacatggaggagagattaagaatattatgatcagtttcataccaaataaaccctgaaaactgagataagatgggtaaattcctagayaactataactttccaaaatttactcacaaataagtaagaaaattgaatagtccatatccattaataaaatcaaaccagcaaaaaatgctggttttactggcattattatgaaatattcaaaaggcatgttattctaattttaaactattcctaaaatagagaaaaaagagtagactctcttttttatttactgaggctggcataacttacataccaaaatctgacagtgatagtacaaaaaggaaaagctatagtccaaaatctcttaagaacataaacatagaaatgctaaattattaaccagccaattccagacatggttagataatgttttcatg

SEQ ID NO: 361973 - DNA, 485 bp, Homo sapiens
tttccataagtgacactcatttacgtccctctagtgttccatgaaataaccctcagaaaatgcaaacagatttcaaacagccctatcagagagcagcccaagacttaaaccctgatcattgtctataacaacagtgaaaataaatttcaggcaagccagcaagcttatgacagcccataaccctgtcacctcttcttgcctctttggaagaagagtgggagtgttacaaagtcctgaatagaagctyttcactgcaattataacagactcaaaatcaagtggcaaaaaggaacgccatcattaagcgaggaggggaaaaacatgacgctgacattctgccaaagctctttaaatgaggtcatgcactcgagcgcacagactattgctgataaccggcagcgcaggaagaattgttaggaaacaatagagcatgcatggtgtggctgtttcatgagtgggaaggaaagtgagtgtggggcgagctg

SEQ ID NO: 361974 - DNA, 485 bp, Homo sapiens
tttccataagtgacactcatttacgtccctctagtgttccatgaaataaccctcagaaaatgcaaacagatttcaaacagccctatcagagagcagcccaagacttaaaccctgatcattgtctataacaacagtgaaaataaatttcaggcaagccagcaagcttatgacagcccataaccctgtcacctcttcttgcctctttggaagaagagtgggagtgttacaaagtcctgaatagaagctcttcwctgcaattataacagactcaaaatcaagtggcaaaaaggaacgccatcattaagcgaggaggggaaaaacatgacgctgacattctgccaaagctctttaaatgaggtcatgcactcgagcgcacagactattgctgataaccggcagcgcaggaagaattgttaggaaacaatagagcatgcatggtgtggctgtttcatgagtgggaaggaaagtgagtgtggggcgagctg

SEQ ID NO: 361975 - DNA, 537 bp, Homo sapiens
tggaaaaagcagtggggagtttaggtgtgttgaggagggtctcaggggacacacattgtcttggtctgccctggccatcrtatgtcaaaatatcacatagcttaaacagcagaagtttattttctcacagtttcgggagcttgaagtctaagatcagggtaccagcattacaggtttctggtgaaggctctcttcctgtcttgtagatggctgccctctggctgtgttttcacatggtgggaagagggagcactctggtgtctcttgcttttcttataaggaaactaatcttatccccgtaatctcatcatatgacaactcaccctgctaatctcatgtaaagctaattatctcccaaaggccccatcaccaaatacaaaataccaccagactggggactacggcctcaacatatgaatttgggggaacaaaattcagcccatagcatccacccatattgagtggttaaggaaccggccactgataaatgaagtggaccctaaagattgctatcatccttctgccattattggggtt

SEQ ID NO: 361976 - DNA, 644 bp, Homo sapiens
gtggccaaagcctcatgttcgagtagcagcagagctgcaatatgaaaccagatatcctcactccaattctaactgcactctgtgttgactctgaaacacatggctgtgctttgttgcactgtattgtgatcaattgttttaacatgtgtgcctccctcactagaccatgyactcttaagaaaatattcatcaccagcttcctagcacagtcagtggcacataataggatcccaataaatgttggttgaaaaagtgaataaatgagtaaatacatgagacctgattttttcctcatcatatagaaacaaacaaatgccgtaacttttagtgatctctatgagtgcttggtcagcctgataatgaagaatagacaagatagggagtgaaaggtagaaaaaaatagtatgagaaagaagagaaaaaaaaagaatatacaattccataggaataataaccagacaaattcagtacatagacaaaatatttagattcaatttgggagcattttgtcaagactcttgcctcttctgatctcttctcattttcaaataagggctttttaagcagatggtgctttaagcaattcccatcattgctgctcctcctcaaaccccagaatgcaggattgactgcaggttaagttg

SEQ ID NO: 361977 - DNA, 492 bp, Homo sapiens
taaatgttggttgaaaaagtgaataaatgagtaaatacatgagacctgattttttcctcatcatatagaaacaaacaaatgccgtaacttttagtgatctctatgagtgcttggtcagcctgataatgaagaatagacaagatagggagtgaaaggtagaaaaaaatagtatgagaaagaagagaaaaaaaaagaatatacaattccataggaataataaccagacaaattcagtacatagacaaaatatttagattcaatttgggagcattttgtcaagactcttgcctcttctgatctcttctcattttcaaataagggctttttaagcagatggtgctttaagcaattcccatcattgctgctcctcctcaaaccccagaatgcaggaytgactgcaggttaagttgtctaaaaggcaaagttgttcgttactgtagctcacttccctgagatacgtcttcccattcattttgcatctattgctgcccc

SEQ ID NO: 361978 - DNA, 579 bp, Homo sapiens
tgcatatgtgtgcaaaagacaattcattttttaaaaatgctttaggtgttgcttttgtaaggcatagcattttgctgcactccttccaaaacacagggccctagtaaccaccctaactgccttacccacgggtggtcctgccaaccaggttggcttcctcattcctctacagtccttgtccaaataaaaagtccttccttacccaggtggtattccttacttcttcattcctctacagtctttcttcaaataaaaagtccttccttacccgggtggtgtgtcttactaccctcctgtgtttctctcgtccttctactgagctaaaatgtgtcataataccagctcccttctgttccacatacagcaaaatcctacttctcttcccagacctaacasaaagaccaactcatggagatttctaatcatctgtgtgtgtttctgtctctcccagcagcatatgaacccgaggtcaggaggaatatctgagtcatctttgtttctctaggtctgccccagaaccctacacatgcaggcattcactgaattccttcaggtaaaatgaataaattcccagttctc

SEQ ID NO: 361979 - DNA, 541 bp, Homo sapiens
ggaggcagccctgcttactcagccaaagatatcaaaacccctgctgggccttacatgtggccattttgcatcttactgataagtcttacgaacaaagactagaaaaataatagacggttttaaaaccttaaaagaaaagagagacaaacacatacttttaaagagcaacaaaaacccttgcaattcttccaaagactcatagcttaatcaagttttccttttctggttctaagtgactggaggtaatagatgggaatttgaacagaggaacagcctaaagtgtcagttccaagcttgtatcctaccacaytgccttccttctgtttgaaagtgtggggagttactcttcttaggcctgctttgtttctctttatagatcatgcaacagatgagtgaccaccgctacgacaaactcactgtgcctgatgacatagcagcaaactgtatatatctaaatatccccaacaaagggcacgtcttgctgcaccgaaccccggaagagtatccagaaagtgcaaaggtaaaaaaatatcccttctga

SEQ ID NO: 361980 - DNA, 554 bp, Homo sapiens
cacttgagcccaggaacccaagaccagccctggcaaaatagtgagaccctgtctccacagaaaataaaaaataaaaattagccagggatagtggtgtgtatctgttgtttgtcccaggtacttaggaggctgaggtgggaggatcacttgagcctgggaagtcgaggctgcagtgagccatggtcgcgccactgtacaccaacctggacgacagagcaagaccctgtctccaaaaatatataaataaataaaaataaagtgtgaagagaaagtaatattcagactgacacatggtcaccaacttccatgtaccacttaatctagcaatgacaatggcagagtaaaggcatctctagcaaaaccacatttctgacacatctttggccttgaggttaaagcacagggctagtggttaaccagttcccaccagctctatagggatgactgtgggcatgtgtgtggttgagactgcctgtgtgtcttgggattaaatgaatgaaaagcctagatrtacaaatcaaattgattctccacttctgaggatggtaaaacat

SEQ ID NO: 361981 - DNA, 554 bp, Homo sapiens
cacttgagcccaggaacccaagaccagccctggcaaaatagtgagaccctgtctccacagaaaataaaaaataaaaattagccagggatagtggtgtgtatctgttgtttgtcccaggtacttaggaggctgaggtgggaggatcacttgagcctgggaagtcgaggctgcagtgagccatggtcgcgccactgtacaccaacctggacgacagagcaagaccctgtctccaaaaatatataaataaataaaaataaagtgtgaagagaaagtaatattcagactgacacatggtcaccaacttccatgtaccacttaatctagcaatgacaatggcagagtaaaggcatctctagcaaaaccacatttctgacacatctttggccttgaggttaaagcacagggctagtggttaaccagttcccaccagctctatagggatgactgtgggcatgtgtgtggttgagactgcctgtgtgtcttgggattaaatgaatgaaaagcctagatgtacaaatcaawttgattctccacttctgaggatggtaaaacat

SEQ ID NO: 361982 - DNA, 573 bp, Homo sapiens
aggaattggctcatgggattatagaggttgacaagtcccagatctgccgtcaacacactgcagatccaggagagatgatggtgtaagttccagttcaaatctgattgcagaggaagaccaatgtctcagcccaaaggcagccaggcagagaaagaaaatccatccttactcagcctctcagtctattcaggccttcaacagacaataaagtccactcacactgggagtgggagggctctgttttcctcagtccactcattcacaggtgatcttaaccagaaacaccctcatagacacacacaaaatcaccttaatcaagtatctgggcaccccatggcccagtcaagtgcacacatgcaattgccctcccakttggcagtagcagcacctgtcggccacgctaccttctggttgcttgtgccaggctgctctcccactagacagtagaggctgagggcagaaacagccttttctagcacaagatcctggtatctagcacaagaactaacacaggaaatggtaagtgctcaggatgttttaaaactgcaaaaatggacaaatgaacaaatgcac

SEQ ID NO: 361983 - DNA, 620 bp, Homo sapiens
aacactaagtaatatgaacagaatatataaaccacaccaacctgtttcaccaagaaaaacctgcatattcattactaccctttgatttggagatgccttaggtttgttcagtggttcattcctaaatttgtccatatgtgctgattactttctttttttttttgagacagagtttcactctttttgcccaggctggagtgcaatggcatgattttggctcactgcaaccttcgcctcccaggttcaagcaattctgcctcagcctcccgaatagcttggattacaggcttgtgccaccacacccggctaattttgtatttttagtagagacggggtttcaccctgttggccaggctggtctcgaactcctgaccttaggtgttccgcctgtctcagcctcccaaagtgctgggattacaggcatgagccaccatgcctggctgtatgtgttgactactaaaactagccaaaactaccaacaaaaarggatcgaacagacattttgtgtactcaatgatccggtcttaaaaatttctaaataaaaacatattgggatcctcttctatattctaattttaggacaaagctctcagaaggaatttagttagcaatggtaacag

SEQ ID NO: 361984 - DNA, 612 bp, Homo sapiens
ttcctatgtgccaggcactctactatgaactcatattaaccttatttaacttttacaacctgatgaagcaagtacaagaatgatttgttttacagatgagaaaactggggcagagtaagtaaatttgatcaaagtctcatagcaagtaagcagagagctgagatttcaacttagctttgctcttaagtttgtgttattctttcctacacaatattgttactaaccaacaaatttaggtatctacaatgaaatcgagtgactgtgaggagctacagtactctccaaaacagattatgttcactrttatttatttattgaacaaaaatgtggactcagacattctggagaaatggaaggatagaggctacaaattgcagcagtctgaacttgcatttggtttctaaacagtctaaattttgcttttctaagcatacacaaactaaggctaataaattttgggagccactactttctcatcagagtatgaggaggagttagttatttgtgtaaaaatctttaggtagtcaacagtgtattttaaatagtgaggttaccaaagcatatggatatgcagacacactccaaaccaagacattatatacactccaaaca

SEQ ID NO: 361985 - DNA, 524 bp, Homo sapiens
tgctgtgcacatgatccaaaataagcaccagaaatagtactcgaagtgttcataattttctgtgaattcagaggaatcgcatgctgccagacacaaacagattaatgtatgggaaatattytgtatgttcagtatacaatttatacattgcaggcattaagctgccctaaaagccatccagcatatccctgctcccagcccaaatgtaggtcctggctgggtcagagattccttctgtgtgctcccatggctcccaggggattcttttttttttttttttttttttgagacagggtctcactctgtcctccaggctggagtgcagtggtgccatcatggctcactgcagcctcaacctccctggctcaaacaatcctcccacctcagcctcctgagtagctgggactacaggtgtgtgcccaatggccaatttttttttttttttttttgtagagatggggtctacttatgctgcccaggctcggggcattctattaacaagttctggcccctagttgactctc

SEQ ID NO: 361986 - DNA, 489 bp, Homo sapiens
ttaatttacaaattctggatagctgctttgtggaaaatggattggaaggcacaaatggaaacagggaacttagttaaaaagcaactgcagtagtccaggtgaaagaaaatggtggtgagcacaagtgtggtgacagtggagacaaagaaagtgctgaatttggaatgtgttctggagggtggacggaagttggtggattggatgtgggggtgaaggaaaggaagggcccagggtgacttttagatttttrtcttgagcaattgagtggataggtgtactgatttctaatatgaaaaattccagggagaggagcaaggctggagagaaaaaattgaagaactgtgtggccatgctgagtttgaaatgacttctagatattcagatggagagatcaaggggagtagtcagaaccagaaataaaaattgggagtcaatgatacaaaaagttacttaaatctaagagatatcagaagagctaactcaaaccat

SEQ ID NO: 361987 - DNA, 546 bp, Homo sapiens
gggcacagcttgtcagtgcgtactttccattactctaaacatccaaatactaacgtgactctagataggggagactggaccactggaagctgtattaccagagtcttttttgcttgggttatccacccctggttcacctgtggtctactccatccaggctctcactgttggagtccccatacttccctgggctattattttagactgaactcaaaacagccccagaccaactttttctcctacatgacccatttctagtccatgcaaacacttgcacatcctttgtttacaaactctggcagtgcagctatgaccaacacagtagcactttcttggcttcctacctaacctgttagtcaccagctgctaatcctctgtatctcccagacacctatccttggtgtttccaaactgcaaaaatatatttaatctctctgagaggtttatttaaagcccackctccctggacttgaagtgaaaaaggtaacatatcccatcccacaaatttaatgtagagaaattagaaagtatagataagtcaaatag

SEQ ID NO: 361988 - DNA, 544 bp, Homo sapiens
tgttctccctggactagaaacatattcataatataaatttgcatttccttcctacaacacatctgccagtaccatcatctgtggactttacagaatgccttattctctgtcataactttgattctgttcaaggagttcaataaaagacagatagcataggatacgtgctcagatttcatggtcttaacacttatcccatcacccagaagcagataacctactagaaatggtggaaagtacctgggtgcagtggtgtgygcctgtggtcccagctactcgggaggctggggaggaaggatcacttaagcctgggaggcagaggctgcagtgagccaagattgctccactgcactccagcctgggtaacagcgcgagaccttgtctcaaaagaaaaaaagagaaagaaagaaatggttgaatgacctcctgaaggcttagttttggtgccaactgggagacaacctcctgtgaaagggtgatgttctttctattttacaaaatggagtatgtgctttgtatcagcaaccaatataggatattgttt

SEQ ID NO: 361989 - DNA, 594 bp, Homo sapiens
ttattattaagtgctaactgcctgagatattttaaatatttacattmtttggtgagtggaagtcctactctctcttctaattacatttttctgcaagcatcctgccaaacagccttcaaaacaacttacatttaaagagctctttgcattttttttacccaatctgtcccaatttttaggaataaaacagcaaatcttagctaggaatttacttttcaactgtgaatgtcaaagattacaccaattttaaggaggttttttttttaacttttacaaattgaaaatagttctctgaactatcaagaaaaaactaaaaattgaaatctgtttcttaatagaagcattaagatcataaatcatggcaggcagaggggagaagtcatctcaaaagggtaaagtgcaatcccctaagaacagaacacttgagctcagcctaaagggcatatcttcaaattgcacatgttggtttgttattttagaactgctcttgagagctggggttataggaaaggccttgtttccattggctgctataaataaaatgtgaaccattatatcatctcttaagagagttttatagaaacaccaggcata

SEQ ID NO: 361990 - DNA, 594 bp, Homo sapiens
ttattattaagtgctaactgcctgagatattttaaatatttacattctttggtgagtggaagtcctamtctctcttctaattacatttttctgcaagcatcctgccaaacagccttcaaaacaacttacatttaaagagctctttgcattttttttacccaatctgtcccaatttttaggaataaaacagcaaatcttagctaggaatttacttttcaactgtgaatgtcaaagattacaccaattttaaggaggttttttttttaacttttacaaattgaaaatagttctctgaactatcaagaaaaaactaaaaattgaaatctgtttcttaatagaagcattaagatcataaatcatggcaggcagaggggagaagtcatctcaaaagggtaaagtgcaatcccctaagaacagaacacttgagctcagcctaaagggcatatcttcaaattgcacatgttggtttgttattttagaactgctcttgagagctggggttataggaaaggccttgtttccattggctgctataaataaaatgtgaaccattatatcatctcttaagagagttttatagaaacaccaggcata

SEQ ID NO: 361991 - DNA, 569 bp, Homo sapiens
tctctccttttacttttacagcttctgggtttcctgctaaaaaatccctccaacatcggctgggcgcggtggctcacgcctgtaatcccagctactcaggaggctgaggcaggagaatcacttgaacctgggaggtggaggttgcagtgagccgagatagcaccattgcactccagctgggtgacaagagtgaaactccatctaaaaaataaaatccctccaacatctagggcaaaatttcttttttatattttcttatattgacaaataaaaatggtgtatatttatcacatatgacatgatgttttgaaatatgtatacattgtggaatggctcaawtgagctaattgacatatacattatctcacatattttttattttttgtggtcagaatatttaaaatctactgtcttagtgattctcaagaaaataatgcagttatttactatagtcaccatattgtacaatagatttattgaacgtattcctcctatctaactgaaattttatagggctaaattttcatcattaccttttttttttttttttttttttaagagacagagtc

SEQ ID NO: 361992 - DNA, 593 bp, Homo sapiens
ttttgacagtttattttttctgcccagctggcacatttactggcattaaatataagacccttcccttccctggcaccaggaagccatgcccaaggggtatccctctgccccatttctgcaacagattcttcaggtcttagcagtagcctgagctgcccccagggctctgggctgctgaatcgtctggctcatcatttccatgacagcatgktgtgctcctggagagctggtggattttctctatctgcttggttaggaagtctgtcttcctcttcaagaagtccttggcatcctcggctatcttatctacatagtacccagttcctacatcaatgagcacatgttccacatcatgcagcttctcagggacatatattaaactcgtcagtgggaggagtaattctcttccctcattgttctcgctcagcatgttcagacagtccttggcttctacatacttggtctgtaccactttgagctgggcaatggaggtggacaagaactccatttcctggtccagctggttcttgagcatttctagctgcggcagattcatctctgtgatagtcttggaagttttatttataaaagcc

SEQ ID NO: 361993 - DNA, 575 bp, Homo sapiens
ttattctaagccagtattaccatgataccaaaaccaaagacaacacaataaaactacagatcagtatctcttaagaatatagctgcaaaaatctttaacaaaaatactagcaaactgagtccaacaacatataaaaagcattatacatcatgtccaagtcggatctatactaggaatgcaaggttggcttaacatctgaaaatcaattaatgcaaataataaaatagagatctaytgatctaaaccaaatcaaaagaatacaggaccaaaacctcatgatcatcacaatagacacagaaaaagcatctgaaaaaacacaataacccttcatgataaaaagactcaacaatgtaggaacagaaggaacttcctcaatctgataaagggcatctatgaaaaactcatagctaacattgaactgaatgataaaagactgcatgctttccccctaaaatcagtaataagacaaaaatgtctcttctcactacttttgttcattatattggtggttccagccaggacaattaagcaagaacataacaaaaagatatccaagattggaaaggaagaagtaa

SEQ ID NO: 361994 - DNA, 575 bp, Homo sapiens
ttattctaagccagtattaccatgataccaaaaccaaagacaacacaataaaactacagatcagtatctcttaagaatatagctgcaaaaatctttaacaaaaatactagcaaactgagtccaacaacatataaaaagcattatacatcatgtccaagtcggatctatactaggaatgcaaggttggcttaacatctgaaaatcaattaatgcaaataataaaatagagatctattgatctaaaccaaatcaaaagaatacaggaccaaaacctcatgatcatcacaatagacacagaaaaagcatctgaaaaaacacaataacccttcatgataaaaagactcaacaatgtaggaacagaaggaacttcctcaatctgataaagggcatctatgaaaaactcatagctaacattgaactgaatgataaaagactgcatgctttccccctaaaatcagtaataagacaaaaatgtctsttctcactacttttgttcattatattggtggttccagccaggacaattaagcaagaacataacaaaaagatatccaagattggaaaggaagaagtaa

SEQ ID NO: 361995 - DNA, 656 bp, Homo sapiens
gaactttaatttgccctgcttttataggaaaaaatatagcaaatattgaaaacagtggccataaattctggaaatacagggaagtatacacattagtttaatgttacaatacttggtaagattgtagctatcatatgatgtattcagcatgttgtccctcattagcaaagatggctcagtayacaagttcaaattgcaagagcactgcattaatataacagtttcatcaatctctatacatgcatgtatgatttactgtctcagatgatttatgtcaattgtttttactaaatctaggtaaacctggatttggaaataagactatattatattctctttagtgtgaaagtgtatggaatttgaaaatatgcattttattttaatcccaagttaggaactaaaaacctaccttctttcttataagactgttactactacatctcaggcaaattctcattttcataatgcatatcttcacaaatttcaaatttttcagtgtggaaattgcccagttttaccagatgttgctctgcttgatattggtgcaatttgctgggattcagattctggcattgctatttaataattgtgtgaccatggacaagttgattaaccttattgcatttcaattttttcatgtataaagtattaatatg

SEQ ID NO: 361996 - DNA, 576 bp, Homo sapiens
gaatgactaccatgtgaaagccactctgcctggcattagggacacaaagattaagtccctcactatgacctcaaggagttttacagtccagttggaggatacttataagtaaacttaagtagcaatagtgaaatgtgtgtttgaagagatatctgcaatgggtgttaagtgagaaatsggaaagagcaccaaaaagcacctaggatttgcatcaagggggtttagggaaaacgtcttggagggaacaaataggctttgttctgaaggattaattggatttagcttggcaatgttccaatgtaataaatagcatagccgtctgttctgggacacaaaagtactgcagaatgacctgaatataaaggacaagaaatagagaaaggcagtgggtagaaatgagattggagaggtaagcagggctaggacactggatgcaagtcattccaaagacaggcaggtaacattgtgcgaggaagtctggtttaaaacagacagctttgtgagttttggaccgcaatgaattggggacctcataaccaatgaaaacaaattcaaatttaattagaagaaaaaaac

SEQ ID NO: 361997 - DNA, 578 bp, Homo sapiens
ctcaagccatcaagtcacccctagcctttgagtcttcccagctgaggcctcagacatcgtggaagcacacagcctgttcccactgtgtgctttccaaattctagcccactgaacccctgggttcataaaacaattgctattttatgccagtacatttgggatggtttgttatagagtaactggaagggagaaccaccatgtgaaagattgggaagccgtacaaagrgtctataaagtttggaactataagagaggagaagacaatggatattggcatagaatatttagggtattattagatgagcttcaaaacaaaatagttattgtggggcagggttttcccatgtcctgagtgaacagattaaaaaacagacaaaggtaggattctcctgacaggcacaggaaggccgagacttactgaatgggatctaggcaggacaataatagtttgagtccaggcctgggtcgatttttggtttaattggaaaatgcctttcaagtgagactatctaactcagagaggtgagggttgatcagatttgtttggacaactgttgcctttggcagacccataaaac

SEQ ID NO: 361998 - DNA, 578 bp, Homo sapiens
ctcaagccatcaagtcacccctagcctttgagtcttcccagctgaggcctcagacatcgtggaagcacacagcctgttcccactgtgtgctttccaaattctagcccactgaacccctgggttcataaaacaattgctattttatgccagtacatttgggatggtttgttatagagtaactggaagggagaaccaccatgtgaaagattgggaagccgtacaaagggtctataaagtttggaactataagagaggagaagacaatggatattggcatagaatatttagggtattattagatgagcttcaaaacaaaatagttattgtggggcagggttttcccatgtcctgagtgaacagattaaaaaacagacaaaggtaggattctcctgacaggcacaggaaggccgagacttactgaatgggatctaggcaggacaataatagtttgagtccaggcctgggtcgatttttggtttaattggaaaatgcctttcaagtgagactatctaactcagagaggtgrgggttgatcagatttgtttggacaactgttgcctttggcagacccataaaac

SEQ ID NO: 361999 - DNA, 336 bp, Homo sapiens
gaagttgaatattccttctcccccagacagaaagaagcctcagaccaattagggaaatcaaggacataatttccattgccctcattagaattgaccaagtgatattgaaaagtaaggatgtctcagagtgcagaatcaagggccagagggtamagccaggaaccactccaaagagcagaagcaaggccaaatcaagacacactcttcactccaagagaacctgtaaacatttctccattgggatttcagaactgtcatgaaacagtggctgctatgtgcctcctcttattgaatgggaatctttattgtggttgttttgttcctattcaccattgc

SEQ ID NO: 362000 - DNA, 552 bp, Homo sapiens
caataccaaattaatctgtgttactaaaaatcaaaaattgtgtctccctagtctcatttggggtcgatactataattcatcataactcaaatatatcaatgcccaatatgtatatgaggtaaagacaatgactcatcattaataatggctaataaacagagatatttctaactaacactttctttttttttttttttttttaaatttatttttttattgataattcttgggtgtttctcacagagggggatttggcagggtcatgggacaatagtggagggaaggtcagcagataaacaagtgaacaaaggtctctggttttcctaggcagaggaccctgcggccttccgcagtgtttgtgtccctgattacttgagattagggattggtgatgactcttaacgagcatgctgccttcaagcatctgtttaacaaagcacatcttgcaccrcccttaatccatttaaccctgagtggacacagcacatgtttcagagagcacagggttgggggtaaggtcacagatcaacaggatcccaaggcagaagaatt

SEQ ID NO: 362001 - DNA, 496 bp, Homo sapiens
gagttttgatagaaatggcattgaattttcataatatgaacgggagatggcagattggctttctgaaaacatggccgagacagagatcgctttgtagcaaggttctatgctgcagttgtagattttcttggaagcccagtctagggctctttcttgagcccttctattgattctatgaacagctttcactcttttttgttttgcatatttgtatatttgccttttattcttatgaaataagaaagaaataaaaattatttaaattaccatatmaatttagattaagaattcttatctgttagtataaatacacgtcacccaactattattgcttatgtggaaatcattttaattttttaaattgtagtaagaatacttaacatgacatctaccctctcaacaaatatttaagtgtacaatacagtatagataactgtaggcatgatgctgtacaacagatatccagaactcaatcatcttgcataacaaactttat

SEQ ID NO: 362002 - DNA, 569 bp, Homo sapiens
ggattcccatatggcagttttggctgatggcaagaatgcaggagtttttaggtttgggaaagagagagtgctgggaaggccttcawtttttttcttcacaaaaagaagagatataactcttatttccctttctctcttctttttcacttgaatgcagattacatgcacagagctatgataaccatcttgtgaccaaaagaagggaaaagacaaaaaaaaaaaaaagaaattgatcacagggatgcagtttgtgatgttgctgggctgtgtaaccacagtcagcagctgctgatctctaggcttcttttcataggagaagagtaaacttgtactcttttaaatacattgttagaaagtcttctgttacttgaagctagaagcattcctaactgattcatagtattgtaattttcttgtttcctcattggcaaacatgagtctgttcatggaattgtattaccaattgatagtccctatggggagtgtatattgttccagccttgtctttaattcttatggattcccgagtcgtatttcttttttcttttctttttttgaggcagagtctt

SEQ ID NO: 362003 - DNA, 569 bp, Homo sapiens
ggattcccatatggcagttttggctgatggcaagaatgcaggagtttttaggtttgggaaagagagagtgctgggaaggccttcattttttttcttcacaaaaagaagagatataactcttatttccctttctctcttctttttcacttgaatgcagattacatgcacagagctatgataaccatcttgtgaccaaaagaagggaaaagacaaaaaaaaaaaaaagaaattgatcacagggatgcagtttgtgatgttgctgggctgtgtaaccacagtcagcagctgctgatctctaggcttctyttcataggagaagagtaaacttgtactcttttaaatacattgttagaaagtcttctgttacttgaagctagaagcattcctaactgattcatagtattgtaattttcttgtttcctcattggcaaacatgagtctgttcatggaattgtattaccaattgatagtccctatggggagtgtatattgttccagccttgtctttaattcttatggattcccgagtcgtatttcttttttcttttctttttttgaggcagagtctt

SEQ ID NO: 362004 - DNA, 569 bp, Homo sapiens
ggattcccatatggcagttttggctgatggcaagaatgcaggagtttttaggtttgggaaagagagagtgctgggaaggccttcattttttttcttcacaaaaagaagagatataactcttatttccctttctctcttctttttcacttgaatgcagattacatgcacagagctatgataaccatcttgtgaccaaaagaagggaaaagacaaaaaaaaaaaaaagaaattgatcacagggatgcagtttgtgatgttgctgggctgtgtaaccacagtcagcagctgctgatctctaggcttcttttcataggagaagagtaaacttgtactcttttaaatacattgttagaaagtcttctgttacttgaagctagaagcattcctaactgattcatagtattgtaattttcttgtttyctcattggcaaacatgagtctgttcatggaattgtattaccaattgatagtccctatggggagtgtatattgttccagccttgtctttaattcttatggattcccgagtcgtatttcttttttcttttctttttttgaggcagagtctt

SEQ ID NO: 362005 - DNA, 569 bp, Homo sapiens
ggattcccatatggcagttttggctgatggcaagaatgcaggagtttttaggtttgggaaagagagagtgctgggaaggccttcattttttttcttcacaaaaagaagagatataactcttatttccctttctctcttctttttcacttgaatgcagattacatgcacagagctatgataaccatcttgtgaccaaaagaagggaaaagacaaaaaaaaaaaaaagaaattgatcacagggatgcagtttgtgatgttgctgggctgtgtaaccacagtcagcagctgctgatctctaggcttcttttcataggagaagagtaaacttgtactcttttaaatacattgttagaaagtcttctgttacttgaagctagaagcattcctaactgattcatagtattgtaattttcttgtttcctcattggcaaacatgagtctgttcatggaattgtattaccaattgatagtccctatggggagtgtatattgttccagccttgtctttaattcttayggattcccgagtcgtatttcttttttcttttctttttttgaggcagagtctt

SEQ ID NO: 362006 - DNA, 456 bp, Homo sapiens
cccttcaaactgcaataggagaggaagcagaaagagctgagaggcagtggtagagaatctttgctttccttcttcaattacgctcctaatttgacttttgaatgctgcaccctcctggttttccttatatttcattgacagtttccaaaacacttacattctattgtgtacctgtaattctgaaagtggcttagccacagttctatattcaaattgatttgatgctcaccaacagtcttttcataccatggctttccaatttctgagctcatcttgattcacattttggttgactggatttcatctagtctttttttaaaaaaagaagagctcttggrttatctacatatatatatttgttaatgtcattatgttgccattcataaatgagcaaaacttagattagatgggtatgaaattcataggttcgtgttttattttatttctgagaactgt

SEQ ID NO: 362007 - DNA, 588 bp, Homo sapiens
gaatgcaaacttaagttgtctagagttttattctctaatattcattgtagagctccttatcattaaattataggatttttaatttaaatactcatttttatgctgtaaatttttaggacttttcaaggagttttattcttagaataatttttattgttggaattgattatartattgcaaatgcaatttttatgccataattatttttaaattttaataatacatttaggtttgcattcatgtagggtgttcataggttgctaagtacttttacgtcatctcgtgttattcttacaacagtgttgtgaggaaggcagggaaagttactgtgatttccattttgcaggtaaagaaaagtctctgaaagattaaatgatttttctgaaattacgtatggtaaatggaaatgctgttggaaaatttgaggttttgggctttacagtgtctttcaaagtgatcattcatctgtagagttcaggattgtctgttcttattgatatttctagtgatacttttgtataatacattattaatattgtgataccagtttttttctctcagactatttggcaaagttttgtttgtttt

SEQ ID NO: 362008 - DNA, 630 bp, Homo sapiens
ttgagctatcacttctcccgggccttctcagtagatggagctactgaatatgtatatatatgtagatatccatacacacatacagatrtgtgtacacttttaccaccatatttccatatctatttatgtatgttgaaaaccaagagtttatatctatactttaaattccaataaaaaaccatagggtggacctggcgtggtggctcatgcctataatcccagcaccttgggaggctgaggcaggtggatcgtctgaggtcaggatttcgccaccagcctgtccaacatggtgaaaccctgtctctgctaaaaatagaaaaattagatgggctttgtggtgggtgcctgtagtcccagctactcaggaggctgaggcaggagaatcgcttgaacctgggaggcggaggttgcagtgagcccagattgcaccattgcactcctgcctgggtgacaagagcgaaactccatctcaagaaaaacaacaacaacaaaaaccaccgcaggatgcattctagtttttctccattttgtgcttgtaattcccttttctgacaatgaaaagcctagctcaaattatccttagtacatgaatttattagattagtcaccctgtatgccaccaatctctcg

SEQ ID NO: 362009 - DNA, 630 bp, Homo sapiens
ttgagctatcacttctcccgggccttctcagtagatggagctactgaatatgtatatatatgtagatatccatacacacatacagatatgtgtacacttttaccaccatatttccatatctatttatgtatgttgaaaaccaagagtttatatctatactttaaattccaataaaaaaccatagggtggacctggcgtggtggctcatgcctataatcccagcaccttgggaggctgaggcaggtggatcgtctgaggtcaggatttcgccaccagcctgtccaacatggtgaaaccctgtctctgctaaaaatagaaaaattagatgggctttgtggtgggtgcctgtagtcccagctactcaggaggctgaggcaggagaatcgcttgaacctgggaggcggaggttgcagtgagcccagattgcaccattgcactcctgcctgggtgacaagagcgaaactccrtctcaagaaaaacaacaacaacaaaaaccaccgcaggatgcattctagtttttctccattttgtgcttgtaattcccttttctgacaatgaaaagcctagctcaaattatccttagtacatgaatttattagattagtcaccctgtatgccaccaatctctcg

SEQ ID NO: 362010 - DNA, 630 bp, Homo sapiens
ttgagctatcacttctcccgggccttctcagtagatggagctactgaatatgtatatatatgtagatatccatacacacatacagatatgtgtacacttttaccaccatatttccatatctatttatgtatgttgaaaaccaagagtttatatctatactttaaattccaataaaaaaccatagggtggacctggcgtggtggctcatgcctataatcccagcaccttgggaggctgaggcaggtggatcgtctgaggtcaggatttcgccaccagcctgtccaacatggtgaaaccctgtctctgctaaaaatagaaaaattagatgggctttgtggtgggtgcctgtagtcccagctactcaggaggctgaggcaggagaatcgcttgaacctgggaggcggaggttgcagtgagcccagattgcaccattgcactcctgcctgggtgacaagagcgaaactccatctcaagaaaracaacaacaacaaaaaccaccgcaggatgcattctagtttttctccattttgtgcttgtaattcccttttctgacaatgaaaagcctagctcaaattatccttagtacatgaatttattagattagtcaccctgtatgccaccaatctctcg

SEQ ID NO: 362011 - DNA, 566 bp, Homo sapiens
tagtgcgaaggcccatttaggggtgacactgatgaaaaacactacagtgtcagacccactgttttcaggattaaaatcccaagaagcccagttgctggtctactatctactactatattattaccagcaggagactagagtctcctggactagactactggagactagaatatacaaggaaatgctaattaacctgcctrcctggggcccaaaaaatcaaacagcactaattttatccacaccaaactgagaaaatggttcattccttttttatctggattttaaggagagtgctgatcatcagagaaaccaggaaattctttcctgaagcccaagagaagatatgatgggcatttcccagagttatagatggcgcaggggcaacacagtctgccacagtgaagggaaaaaagctatcttggtgagctttggtcctccacaggacatggaaccagagatgagcaagatcagggcctggatgaccaatcctgataagagcaggacttcctcacataaggtgcataggtccctgaggagaagggtctaaacatcctaaaactgcaagc

SEQ ID NO: 362012 - DNA, 581 bp, Homo sapiens
cactgcactccagcctgggtgacagagtgagagcctgtctcaaaaacaacaacaamaaaaaaaaaacaactgatagatcgtaataaaaatctattttattccctgaggcagctataagtttgactgcctgtcacattcaccacagcagttttcctgtctctaagcctttatctaaattttcaactcacctaccagtcctatcactccgtagatatgacttattactcccctaagaaaatcaaaactgttcaacctgggctctcttgccgttctcttttgctttctctagttttctctttatttcatctgttatctttgtctctttcctatgttagaggaatggttatctttttctaaggctgagcacccccccaccccaatacctacatacgacagcagagagaacagtatgtacaaaggcctgggagcttgaaagagcaaagttgtggaaaaatacagattctcctttgtggacaagtgggctttagatttaaacaggcctagtttgaatgccagttcttctctaccacctcctacttaaatgaccttgagttcacttctctcatcacacttcattttcc

SEQ ID NO: 362013 - DNA, 581 bp, Homo sapiens
cactgcactccagcctgggtgacagagtgagagcctgtctcaaaaacaacaacaacaaaaaaaaaacaactgatagatcgtaataaaaatctattttattccctgaggcagctataagtttgactgcctgtcacattcaccacagcagttttcctgtctctaagcctttatctaaattttcaactcacctaccagtcctatcactccgtagayatgacttattactcccctaagaaaatcaaaactgttcaacctgggctctcttgccgttctcttttgctttctctagttttctctttatttcatctgttatctttgtctctttcctatgttagaggaatggttatctttttctaaggctgagcacccccccaccccaatacctacatacgacagcagagagaacagtatgtacaaaggcctgggagcttgaaagagcaaagttgtggaaaaatacagattctcctttgtggacaagtgggctttagatttaaacaggcctagtttgaatgccagttcttctctaccacctcctacttaaatgaccttgagttcacttctctcatcacacttcattttcc

SEQ ID NO: 362014 - DNA, 552 bp, Homo sapiens
acagaatagagaacccaaaaataaagccacacatctaccgctagtaagcagtgggaaaaggactctattcaataaatggtgtctggataactggctgtccatatgcagaagagtgaatctggacccctatctcttaccatatacaaagattaactcaagatggattaaagacttaaatgtaagacctgaaactataacagaagaaagcctaggaaatatccttctcaacatcagccttggcaaagaatttatgactaagtcctcaaaagcaattgcaataaaagctaaaattgacaagtgggacctaattaaactgaggagcttctgaatagcaagagaaactatcaatggagtaaatagatgacctagagaatggcaggaaatatttgcargctatgtatctgacaaaagtctaatatgcagaatctataaggaacttaaatcaacaagcaaaaaacaaataaccctattaaaaatgggcaaaggacatgaacagacacttcttaaaaaaagatatacaagcagccaacgaacatgaaaaaatgctcatca

SEQ ID NO: 362015 - DNA, 552 bp, Homo sapiens
acagaatagagaacccaaaaataaagccacacatctaccgctagtaagcagtgggaaaaggactctattcaataaatggtgtctggataactggctgtccatatgcagaagagtgaatctggacccctatctcttaccatatacaaagattaactcaagatggattaaagacttaaatgtaagacctgaaactataacagaagaaagcctaggaaatatccttctcaacatcagccttggcaaagaatttatgactaagtcctcaaaagcaattgcaataaaagctaaaattgacaagtgggacctaattaaactgaggagcttctgaatagcaagagaaactatcaatggagtaaatagatgacctagagaatggcaggaaatatttgcaggctatgtatctgacaaaagtctaatatgcagaatctataaggaacttaaatcaacaagcaaaaaacaaataaccctattaaaaatgggcaaaggacatgaamagacacttcttaaaaaaagatatacaagcagccaacgaacatgaaaaaatgctcatca

SEQ ID NO: 362016 - DNA, 580 bp, Homo sapiens
tctgaacatcagtttcctcatctgtaaaatggaagagtgggtggcaggattggattaggtgatccctaaactccaagctctgaattgcggtaatttcaacaagggaagtggtggagaggcttgttgaggaataattgatgttttttctattcacagaagagaattcattaatgtaaatgtgtccctgaatgaccactctgttaatagctcttctcttacctggaatagcactgaatgcacaggcaactctaagaagatgagcagtaaaatttccctgaaggcatatattctaaacaggacrgcaagaatctgtctttaaataaagtgttttgagggcggtttacctcaagggagtgttaatacaaccagacaacctcatttaactgactcaggcatcaaagtgaattagaggcaagaggccagcataaagcacaagccagaggctgtcccttcaaaatggtacaacctctgtggggagcagtttggcaaaattcgatcaaaattataaatacatttactctttgaccatgcagtcccctctctcgaaatttagcctgcagtatgaaatgatatttatgcc

SEQ ID NO: 362017 - DNA, 504 bp, Homo sapiens
tcggtgaggtgaggaaagtcttctccaggatggtctagatctcctgacctcgtgatccgcccgcctcggcctccaaaagtgttgggattacaggcgtgcagctgcacctggccggcaagagattcttgaattgagatctgtaagattggtcataggtaaccaagtatgtatgagaacaggaaagaattggggagaagagaaagggatgttcaaaaagaggaaayagcaggatgaagcaggaagaagcatggcatccaaaagaagaccaggatagctggagtgcagatgagcctggaaagtagggctttgtagagcaggttaggggttttgactttatcctaagagcaatggggaaccttgaagagttggggtttctgaggagggaggagagtgtgttgacataattatatttgtgtttattttttaaaacatttttctggctgcaatgtggaaaacacattggaggaaagcaatctatggagttcaaaaaaaaaaaacaaaaaa

SEQ ID NO: 362018 - DNA, 504 bp, Homo sapiens
tcggtgaggtgaggaaagtcttctccaggatggtctagatctcctgacctcgtgatccgcccgcctcggcctccaaaagtgttgggattacaggcgtgcagctgcacctggccggcaagagattcttgaattgagatctgtaagattggtcataggtaaccaagtatgtatgagaacaggaaagaattggggagaagagaaagggatgttcaaaaagaggaaatagcaggatgaagcaggaagaagcatggcatccaaaagaagaccaggatagctggagtgcagatgagcctggaaagtagggctttgtagagcaggttaggggttttgactttatcctaagagcaatggggaaccttgaagagttggggtttytgaggagggaggagagtgtgttgacataattatatttgtgtttattttttaaaacatttttctggctgcaatgtggaaaacacattggaggaaagcaatctatggagttcaaaaaaaaaaaacaaaaaa

SEQ ID NO: 362019 - DNA, 504 bp, Homo sapiens
tcggtgaggtgaggaaagtcttctccaggatggtctagatctcctgacctcgtgatccgcccgcctcggcctccaaaagtgttgggattacaggcgtgcagctgcacctggccggcaagagattcttgaattgagatctgtaagattggtcataggtaaccaagtatgtatgagaacaggaaagaattggggagaagagaaagggatgttcaaaaagaggaaatagcaggatgaagcaggaagaagcatggcatccaaaagaagaccaggatagctggagtgcagatgagcctggaaagtagggctttgtagagcaggttaggggttttgactttatcctaagagcaatggggaaccttgaagagttggggtttctgaggagggaggagagtgtgttgacataattatatttgtgtttattttttaaaacatttttctggctgcaatgtggaaaacacattggagraaagcaatctatggagttcaaaaaaaaaaaacaaaaaa

SEQ ID NO: 362020 - DNA, 513 bp, Homo sapiens
caaaaacaatacagaaagttccatggatataaaacaaaccaacaaaaatccttaacctttccaaagctcagttttcctaaataatcaaaaaacataataaagacaatgtgaagcacaggaacttacaaaaatcttcatcttaggccaattaccaaaagggggaaagaaagaaaaagcttcctgcaatataattgcttcttactggaagcccgtttaaataacctggaagtctaacctgatgaaaaactacttgaatttaatcagacacaagaagagtgggtccagtggtatgagttkacatcatatcatagaagaagtaaacaagaaaactagtaccttgagcagaggaatacatggctctttaaaaaagtgaaaacatgaaattgcctggttagatggaacaattcaaacatatcaagaaaaaccaagattgcagaatcaagatatactggaggggaacattgcttttctagggcttcaagacaaacatttgagcatcaggtcataacagca

SEQ ID NO: 362021 - DNA, 615 bp, Homo sapiens
atttagccatgtgaacaggtcccattttgtcagaaatataatttggattcaactgtccttttataaactggtaagtttaaattactatgttttgctgtctcatgattaacatttcaaaatgaaagctaaagaatctgcttcgatgtattcatgttgtctgtatgtttttatgttgcatgtatgtatttttctaccaaaatatatcaaagagctaattaattaattaattaaagrgaaaaattaagcacttcaatcaagtatgttatcaaaaacataatagccacctcaaagtttttaagttcacctgacttgggtaaatgtttgataagtaaactgattttaaaattgttgataaaataaaaacagaaatgtcttaagaattgtcagcaaagatttgtgcctgagtttactggtcaggcagttttacatttatctttgttagatatattttaaggagtcagtgtttgacatgaatgtcatagaactatgaatccatcctaaaaagagaacgatctttgtttatgtaattccttgataagtaatactaatttaatattgttgatttaatgaaagcagctgtattttctgagttattggcaagatactgaagtattt

SEQ ID NO: 362022 - DNA, 545 bp, Homo sapiens
tatatctttacattttttacaggatgataaagtttttcaaaatggacatactaaaccatcaaaccattttggaaaagtaatcatagcgttgccatgaagagttgcagttgcataagtgtgttcagaacaaccctgggtgatgctagtcatgctgtcagcacagcccttgccagaccactgttcataagatggctgctagaatggagttggcaagactacccaccatactattaacagagattagaaggtagaggtgggaaactttaatttacatatgtattttaacattagtgggattatacataatttttctacctttgtacttttggtatttttttcaaataaataattttgtaaggtgtattttggggccaaaatactcagccgtcgtaaagcccagtttgaaggtcagtttgcacttaygttgtgaggcagtaagtatcagaaataaaaaaaaaatctatatatgtatttttcccattataagataatagacattttagaactatcaggttggtgcaaaagaaattgtggtttttgccact

SEQ ID NO: 362023 - DNA, 491 bp, Homo sapiens
caaatatttgttaagcatctacaacatgccaggyccagcctcgctggatcaaggcagtgagagggttccttggcttgatcactttcttgtgtggaagttgtaatgctaaaagtttatggtgtgtataatatacaccattggctctcctgtgtatgaatttcgagtaggataagagcttgtgaaaaaataggaaatctttttagaaagcataaagtcagaaatgtttttctaaagactactatttatctttctataaagaaaacttttcattcttcaaataatgttcctagaacactttaaattgacagataaaattgtatgtattcatcacacacgttttgcagtatatatacattgtgaaatggctaaacctagctaattaacaaatatatcatctcacatagttatcatttttgtggtgagaacactaacatccactttctttgcatttttcaagaatacaatatatctttgctaactatagtcactat

SEQ ID NO: 362024 - DNA, 555 bp, Homo sapiens
agaattcctgtggtacagccctgctgaaccaagcttggcggaacatactttttttttttttttttttttttaacagaatgaaagaaggacaaatcatgaaagaagacagatctaaaaacagacatgattggtatgcaaagggatgagtacagaacacttgaaggctgtgtatatctgagtaaaacacttattttctaagccttctgtacagaatctttatttcactggatataggcagcacccagagaactttgtggggaaaaagtcaacacaataaagagatactagagaaaattgttgtgatatttatgaactgttttatgaaaaacttytccttgaacatgaagcttaacactgtaatagtgactttgatttattctgctatagaaacctagcagagaaggttaacttaagataactttgattattcctacgacattagctcagagaatattttttggaatcttcatcagcactcaacaacaggagcaccaggtaacgccatttactgaacaactactatgtgccaacactgcattagaggttttctttata

SEQ ID NO: 362025 - DNA, 613 bp, Homo sapiens
ccaagaagttaaatacattttctctttgaataaaactgaagacatttatctgggtcattttcctctcagcagaagaactctctctgctgctatattttaatgaaccaaaatagttggcaaatgagccaaccccctaattaggctttatttttaaaaaagaaaaatgtccaaaactttcttccgcctctcatcagtgctcctcagcaatgctaaaagccaagtgaacatgttcttgggggaggctttgttcccatctttaactaatattcatcacaaataaagcaaacagatcwgaccagtgtccatgtgtaatggctggctgtatatttcatatacgtattcaggagctattttcttgagtataaagttctttccttatagcacaaagcaaggagatgatgttggcaagtgctataatagctacacatgtttatagtaatttttaacatctattaagcacttattacatgcaaaacgttgtgccgagtttcttatattaactcagcaattcttcacaacatctctaggaagtaagaattattatctctatatcacagacaaaaaaaaaaaggactagaagagtaatttacccaaggttacataaatagtttca

SEQ ID NO: 362026 - DNA, 613 bp, Homo sapiens
ccaagaagttaaatacattttctctttgaataaaactgaagacatttatctgggtcattttcctctcagcagaagaactctctctgctgctatattttaatgaaccaaaatagttggcaaatgagccaaccccctaattaggctttatttttaaaaaagaaaaatgtccaaaactttcttccgcctctcatcagtgctcctcagcaatgctaaaagccaagtgaacatgttcttgggggaggctttgttcccatctttaactaatattcatcacaaataaagcaaacagatcagaccagtgtccatgtgtaatggctggctgtatatttcatatacgtattcaggagctattttcttgagtataaagttctttccttatagcacaaagcaaggagatgatgttggcaagtgctataatagctacacatgtttatagtaatttttaacatctattaagcacttattacatgcaaaacgttgtgccgagtttcttatattaactcagcaattcttcacaacatctctaggaagtaaraattattatctctatatcacagacaaaaaaaaaaaggactagaagagtaatttacccaaggttacataaatagtttca

SEQ ID NO: 362027 - DNA, 586 bp, Homo sapiens
gggagggcctatcagtacttcttttgtgtccactgcactgtgacagggacactgtagagatccaaatagatttaatgaataaaataataatgccgcattccatggccagaacagagtttactgtggggagtctgtgtgtgtgtgtgtgtgtgtgtrtgtgtgtgtgtgtgtgtgtgtgtgttcaactgaatttccatagtgatattgagcttctaaatcaagaaaaatatttttttctaatttattttttaaatattttaagtaaactttattgtatatgtgtaaggtatacaacatgatgttaagagatacatctatatagtaaaataattattatagtggaacagattgacacatatgtcatctcacatagttaccttttgtcctccccacccacccaagacatgagcagctataagatacttatttagaaaaaatcctgactgcagtacactattattaactatagtcctcatgttgtacattaaatcttttcacttattcatcctacatatttgctactttgtatcctttgacctatagctacccatttcctgtcctctccctgccactgcccaaccctgat

SEQ ID NO: 362028 - DNA, 586 bp, Homo sapiens
gggagggcctatcagtacttcttttgtgtccactgcactgtgacagggacactgtagagatccaaatagatttaatgaataaaataataatgccgcattccatggccagaacagagtttactgtggggagtctgtgtgtgtgtgtgtgtgtgtgtgtgtgtgtgtgtgtgtgtgtgtgtgttcaactgaatttccatagtgatattgagcttctaaatcaagaaaaatatttttttctaatttattttttaaatattttaagtaaactttattgtatatgtgtaaggtatacaacatgatgttaagagatacatctatatagtaaaataattattatagtggaacagattgacacataygtcatctcacatagttaccttttgtcctccccacccacccaagacatgagcagctataagatacttatttagaaaaaatcctgactgcagtacactattattaactatagtcctcatgttgtacattaaatcttttcacttattcatcctacatatttgctactttgtatcctttgacctatagctacccatttcctgtcctctccctgccactgcccaaccctgat

SEQ ID NO: 362029 - DNA, 624 bp, Homo sapiens
ttgaattcatttctttggagggtaagcaccttaaatcacccatgtaacatcagctttattgttcagtgttatagaacagaagaaataggaaagggtttgaagaattaaacgaatatacagaaaacttgtttgtacacgtgccttctgttttaacagtaaatcactaactttttagacctgaaactgcttgctaacacttagttccgggggaaaaatgagagcaaaagagaaaatttcccccagattggaacagaaaataatgttgaagcaaatagaacgctatatacttctgacagttcaaatgatacataagtacacaggctgacaagggctgtgttgtccctgcagttcacttcgctcarctctgcatggttctgtaggacaatgaaattcaatgcacttagaatttaaaaaaaaaaaaaaaaaagcagaagaagaagaaggagaaaaagaaaaaagtgagctcagattcttttaaaagcatttctatgagaaaacagatcatttacatgccaaaagcacttttaatgtgacatatttagcacatgtattatttagaacgaaagctgcttgaacttagtgaattctaaagtctataaaatggcaccccactgagcagaaagg

SEQ ID NO: 362030 - DNA, 583 bp, Homo sapiens
gtgaaatctaggaaactgagtcatagactttgatttaatttgtcattgatgtagtctagttttcagcagtgctgaaaagaaataaactaatggaaaccttgaataaatatttttgacacactgtcgttagatcttttgagaaaatgcccatcactttaaaccagtatgttacaagtctataaaagctcacattgtattgctcgtgagattgttgggtagtctcgccatctcaaaaggaagcacagaggcagtcaaatagtctatgtgtttattcattggttcatgttcttattgggcacctattgtatgtttcatttgctcatgctgcccgaaatagagcgctcrtgagtcctaaagcacttttattccacataggaaaacagtttattccattcactctcaggaagaaaggatcctgtgaggggattgtattcatgacttgtcacatatcccaagtctgtctctgttctacaaacctcttagttttctatggaaaagaagggggatacctgagtatcttatgcaagaacagcatagaaagtgtcaaggagaaggaaaagcaagcagggactgaagttatagt

SEQ ID NO: 362031 - DNA, 583 bp, Homo sapiens
gtgaaatctaggaaactgagtcatagactttgatttaatttgtcattgatgtagtctagttttcagcagtgctgaaaagaaataaactaatggaaaccttgaataaatatttttgacacactgtcgttagatcttttgagaaaatgcccatcactttaaaccagtatgttacaagtctataaaagctcacattgtattgctcgtgagattgttgggtagtctcgccatctcaaaaggaagcacagaggcagtcaaatagtctatgtgtttattcattggttcatgttcttattgggcacctattgtatgtttcatttgctcatgctgcccgaaatagagcgctcgtgagtcctaaagcacttttattccacataggaaaacagtttattccattcactctcaggaagaaargatcctgtgaggggattgtattcatgacttgtcacatatcccaagtctgtctctgttctacaaacctcttagttttctatggaaaagaagggggatacctgagtatcttatgcaagaacagcatagaaagtgtcaaggagaaggaaaagcaagcagggactgaagttatagt

SEQ ID NO: 362032 - DNA, 581 bp, Homo sapiens
ctcttccagcttgtagggtttctgctacagggaaaaggtcttcatgggattccctttgtatgtgacctgtcctttctctctagctgttaaatgttctttgacattttttatttcatttcacccttggagaatctgatgattattgtcttggggatgatcttattgtttagtatcatgcaggagttctctggatttcctgagtttgaatgttggcctctctagcaagactgggaakgttttcatggatgatatcctgaaatatattttctaagttgtttgctttctacctgtctctttcagggacaccaatgagttgcagatttgatgtctttacgtaattccatatttctcagaggtttcatttattcctcttcatcttttttctttctttttgtctgtcttattttagagaactggtcttcaagctctgcaattctttcctcagcttggtctattttgctgttaatatttgagattcattacgaaattcttgtagtgtatttttcagctctatcaggtcaatttcatcctttttaatgctgcctatttcatctatcagcacctgtatcttttttgtgatc

SEQ ID NO: 362033 - DNA, 581 bp, Homo sapiens
ctcttccagcttgtagggtttctgctacagggaaaaggtcttcatgggattccctttgtatgtgacctgtcctttctctctagctgttaaatgttctttgacattttttatttcatttcacccttggagaatctgatgattattgtcttggggatgatcttattgtttagtatcatgcaggagttctctggatttcctgagtttgaatgttggcctctctagcaagactgggaatgttttcatggatgatatcctgaaatatattttctaagwtgtttgctttctacctgtctctttcagggacaccaatgagttgcagatttgatgtctttacgtaattccatatttctcagaggtttcatttattcctcttcatcttttttctttctttttgtctgtcttattttagagaactggtcttcaagctctgcaattctttcctcagcttggtctattttgctgttaatatttgagattcattacgaaattcttgtagtgtatttttcagctctatcaggtcaatttcatcctttttaatgctgcctatttcatctatcagcacctgtatcttttttgtgatc

SEQ ID NO: 362034 - DNA, 610 bp, Homo sapiens
aactaatctcattctccaggaccagttttaatggagctggattctcaaccatgagacaaacacaggtataagcaataaatattattccaataaagagttatttatattttatccgtgataaaacccatcacaagtgattgacattggataattttaagcttcagagttcaacttagtttctttccgaattagagcattcagaattaaaatttggctagaaagcctgagaacaaatcagggtgattttgaaattattttctatttgtagaactactatttttgatrtaacctttaagaaaaatccccttctttcttagctaaccctttggagctttaattaaaattgaggagttctttattttggtctagcatttaatttatacatgcatgattcagttctgttggtgtgttaggccgttcttgcattgctataaagaaatacctgagactgggtaatttataaagaaaagaagtttaattggcttatggttccacaagctgtagagaaagcatggaagcatctacttctggggcggcctcagggagcttttacttatggtggaagtcaaagcaggagcaggcatcttacatggccggaacaggaccaagg

SEQ ID NO: 362035 - DNA, 610 bp, Homo sapiens
aactaatctcattctccaggaccagttttaatggagctggattctcaaccatgagacaaacacaggtataagcaataaatattattccaataaagagttatttatattttatccgtgataaaacccatcacaagtgattgacattggataattttaagcttcagagttcaacttagtttctttccgaattagagcattcagaattaaaatttggctagaaagcctgagaacaaatcagggtgattttgaaattattttctatttgtagaactactatttttgatgtaacctttaagaaaaatccccttctttcttagctaaccctttggagctttaattaaaattgaggagttctttattttggtctagcatttaatttatacatgcatgattcagttctgttggtgtgttaggccrttcttgcattgctataaagaaatacctgagactgggtaatttataaagaaaagaagtttaattggcttatggttccacaagctgtagagaaagcatggaagcatctacttctggggcggcctcagggagcttttacttatggtggaagtcaaagcaggagcaggcatcttacatggccggaacaggaccaagg

SEQ ID NO: 362036 - DNA, 480 bp, Homo sapiens
tgaggcatatgggactggcaacagcagaaagcccttacctcatcttgcccaatgggaagggaatgggagacttacctgaaacctagtgggaactgtggctttaggaaagggctcctgagaggagcggtagcctttgttagaggaacagacctggagccctatggggggtgattgcagggaaatacktacttcaaagtcactccaatattctgctggtagctttcattgattgaatccacgtagaggccagcaagcccgttaatgcagtcaacaggaagaacacgagggtggaaagtggatcttgatggtgaaaaaattcagcacattaatcaataataatttttgaataaaagaatgatgcctacaagcaaataaatccaaagacaaaacaatataatggtccagaaaagtaatcaatattgatgtcagaggtagacgcaatgccacagagacaagaggcttccttagagattcaggggg

SEQ ID NO: 362037 - DNA, 593 bp, Homo sapiens
ggtctactgaaatccacattaagagttctctcatttaaagaaagcttccctaaattgtatccacagcccaagactctactgatgacayattcggagttgtcagaggtaattctcagtataacagcaagagattgactaagtagttctccatcaagacatttcttattgtctcctaagtaaagctccagtgccaccggtgatattttccaaagaggtacacacattgatctctgaagtttgggatttaccaggcaggtaacaacccaactttgtttcattttacccctctgatgtcaaagcataaactgtattttcattctgacacatttatccatttaggagatagttgaggatgacctaaccatctatcaccatggactcttcaggccaaaatggggttgctgtctcatttgtaaggcaggcaacaacggtgatcttaggtagaccggggaaaaatggaaaatccaagctgttcagcagtaaaatctgatactctacatcaccacaggttaggccagcagcctttctacacagggccacagaagtccaaaagaggcatcataagccaagtatgacaactgaggcctaggtcc

SEQ ID NO: 362038 - DNA, 593 bp, Homo sapiens
ggtctactgaaatccacattaagagttctctcatttaaagaaagcttccctaaattgtatccacagcccaagactctactgatgacacattcggagttgtcagaggtaattctcagtataacagcaagagattgactaagtagttctccatcaagacatttcttattgtctcctaagtaaagctccagtgccaccggtgatattttccaaagaggtacacacattgatctctgaagtttgggawttaccaggcaggtaacaacccaactttgtttcattttacccctctgatgtcaaagcataaactgtattttcattctgacacatttatccatttaggagatagttgaggatgacctaaccatctatcaccatggactcttcaggccaaaatggggttgctgtctcatttgtaaggcaggcaacaacggtgatcttaggtagaccggggaaaaatggaaaatccaagctgttcagcagtaaaatctgatactctacatcaccacaggttaggccagcagcctttctacacagggccacagaagtccaaaagaggcatcataagccaagtatgacaactgaggcctaggtcc

SEQ ID NO: 362039 - DNA, 475 bp, Homo sapiens
ttttctttgggtaaaattaattcttccctacccagtggttttgtcaccaactagcgatactgttaggtttgtttgtttgtttgtttctggtttttgtttgtttgtttttaggaattaaaattaatttcatttggttttagaatcaaataaaatagagttccaagtctaaaaaaaaaaaggatattcagagaagtctagtatctatttstgatactctattctgtcactcttctatagggtgattttgggtttatttcatagtttatctttaaacattttttagtataagaaagcatgtaaaataatctgcattcctccatatttttaggtaaatagcagccccagtacaattttctggaaaaagttattccattttacagatttgcaataccacttctgtcatatctattatgtccattatatatgtaggtctttcaacacacacaattctgttccattggtctatccaacacca

SEQ ID NO: 362040 - DNA, 582 bp, Homo sapiens
cagctgctgtcagatccaaacacaagtgcatccttcagctgccgccccctaccaagaacgccaggcaaaatctgcccatctttcatccacatctcctaccctgtagctcacaattagtattttcactggaaaaggaaaatcaaaggaaaccagaagtatagcttcttccccatcactgatgggatatgggagctgccagaagcacacactgaacaatatcactccctaaaaygcttctacatccttcccgaaccagcactaccctccgcccaaccaaccatcaccaccatcattttagacggtagtatctaatcaacaaaacccactgggagttactacgtgttaatgattagaacaatatctcataagcctttgtttggagtattttccccatcaggtctatagctaactccctcctttccaaccccaccacagaaatcatggtatcacattgtggcactgcagatattctttaagaggtgcagaataaagcaacagcctatggttctgtttttctttctacccagaaatcatagaattatttgcccttactagtatgagatgagcacattacattattca

SEQ ID NO: 362041 - DNA, 569 bp, Homo sapiens
aaatgtgagggttacaaatacctaagaatatctcagttcaaagaaaaaaccctggaaaattgcaaattctaggataacataccctttctttaaagttgaaaatgtrtatcgtttttaaaatttcaacaagtttaaattggacatttacttaccattcattagcttcctgcctgcatgtatgcatatatgtatgtatgtgtgtgtgtgtgtatgtattcattcctgattcacaaacaatgctttggaatttatagtgtatgtagtttcaaatcctgtttggatacatgaggagtatcatacatctacttggcagtcatgaatagaactgacacgtgagaattagaaagtgatgtaaaacacattagaatatgcatatagaataattcaaagaagagagctaagagtgtgtgctggatgtcggtataaaagagaaaaattagaatttgattcatattgtgaagagagaataatgaaagatgcatactttcttacatttaagagttactaataacagtctgactagaataaatgttttaggtcgaagaaaagcagctatgaaatcacatttt

SEQ ID NO: 362042 - DNA, 581 bp, Homo sapiens
aaaagtcatttttagcttcccagcctctaaagtagagggaggtatgatgaaaggatgttggaatgaatgctgagtgtgaatgcataatataaagcagaatcatactctttttttacttartgtacataaatattaccaaacaataaaaaaagaaacaacacagtcccacattaatgcaatatatccattgtacaagtgaataagtgcttaacttctcccctaaagagagacccatgtgccattaattgtgagtccatctcagcaatgtttatttcttttttggttcaatcagatgcttaccttggtattctataaactaaggactaaatgagaaatttattgtacatgcaatataaaaaataagtgtggaaagggaaattttaaataggttaatattcataaatataaaaaaaagagagagaggaagaaaagttaactaatgaagtctattactgcaaccagttactgaaccgtaattgatagctagaacttccttcctctgctatgctttaaatagtcaatcttctctcaactagtacttcagctagttagtttcttgaatgaataaagagtcactcact

SEQ ID NO: 362043 - DNA, 552 bp, Homo sapiens
taaatctttattttgtatgccctttgcccttgttctataattatcccttacagtaagttgaactcctgagagaagagaaaatgagcacaaacagtaatgatcaggtgtttagtgcctcctcccacaaactccagtccccactccccggcaggcatactcagagcccacagggaggggaagctcacagcctgggggaagaacagaaggcagcaaaagcacgtttggcctttctgaagatttgagtggggacgttcatacctccaaaggttgttcagactcttactgggcttctgagccaagctggcttgcctggtcaccagtagcagaagcaggccttctatgctttcaaaaaacagccatctgttgaggtttatttcaggtagcagccctagttgtcaggactctcatacccagtttactgtcactagcgtcctctctgggataaagtaatgggctttctgatgaccagttgcttgagcactcaggcctggctgttgagcctaagctgtggsaattctgattaggctaagcaagagggtgcacgtggtcatt

SEQ ID NO: 362044 - DNA, 361 bp, Homo sapiens
ctttgacacatttgtcacaacagctaaggttgaggaaaggagttgaaacgatttcacaaggcttgttatgactcacatggcccctctgtagtcctcttaacttcctttgttcccatccttccaataaaacatgagcaccagccgtttccccttgcacagtgtgaggcagaaaggctgaagcctttgagctsctgttccagtctacagatcattagagcagatgatactgttcagtacatcaaacccttcatgccaacttctaaatgagggagaaaactgaagtgatgacaatgatctatcagtaccccttttaataaagatacttttcgttaataaaaatgctccttttaataaaatttaa

SEQ ID NO: 362045 - DNA, 598 bp, Homo sapiens
ggaaataaaatttattgagaaggattttaataactgcatggtagcattacatttgccaaccacagaattatgactgcttaccgcaggcattctgagaacacagactgaacttattgacatgactttttattactgtcttataatataattgttacaaattctatgaaggccaagttttaccaaagtttctggaaacatcatttttggactttcaaatttgacaaaggaaagccccaccctaygtctatccttctcaggatgctaatgcagtattgctagtagtagcaagtacatgcgttcattgaaggagatatgaactaaaaatatgaccctatggatctgttatgactaagaaggaatgtctttctgtggcagctaagtgaagtgacagtctggagcagattccaagcaacccacatcctctcttagtgccagaggaaggtttgcggcctaggatgaaagtgatatgataaaagtgtgtgaaattctatcggaaaacaactcaagtgtcctcatttattttttccaacctgtgtaatggaatttttaactgtattttgcaggtcctctctacccagtgtgacctccaaatatgcac

SEQ ID NO: 362046 - DNA, 598 bp, Homo sapiens
ggaaataaaatttattgagaaggattttaataactgcatggtagcattacatttgccaaccacagaattatgactgcttaccgcaggcattctgagaacacagactgaacttattgacatgactttttattactgtcttataatataattgttacaaattctatgaaggccaagttttaccaaagtttctggaaacatcatttttggactttcaaatttgacaaaggaaagccccaccctacgtctatccttctcaggatgctaatgcagtattgctagtagtagcaagtacatgcgttcattgaaggagatatgaactaaaaatatgaccctatggatctgttatgactaagaaggaatgyctttctgtggcagctaagtgaagtgacagtctggagcagattccaagcaacccacatcctctcttagtgccagaggaaggtttgcggcctaggatgaaagtgatatgataaaagtgtgtgaaattctatcggaaaacaactcaagtgtcctcatttattttttccaacctgtgtaatggaatttttaactgtattttgcaggtcctctctacccagtgtgacctccaaatatgcac

SEQ ID NO: 362047 - DNA, 598 bp, Homo sapiens
ggaaataaaatttattgagaaggattttaataactgcatggtagcattacatttgccaaccacagaattatgactgcttaccgcaggcattctgagaacacagactgaacttattgacatgactttttattactgtcttataatataattgttacaaattctatgaaggccaagttttaccaaagtttctggaaacatcatttttggactttcaaatttgacaaaggaaagccccaccctacgtctatccttctcaggatgctaatgcagtattgctagtagtagcaagtacatgcgttcattgaaggagatatgaactaaaaatatgaccctatggatctgttatgactaagaaggaatgtctttctgtggcagctaagtgamgtgacagtctggagcagattccaagcaacccacatcctctcttagtgccagaggaaggtttgcggcctaggatgaaagtgatatgataaaagtgtgtgaaattctatcggaaaacaactcaagtgtcctcatttattttttccaacctgtgtaatggaatttttaactgtattttgcaggtcctctctacccagtgtgacctccaaatatgcac

SEQ ID NO: 362048 - DNA, 563 bp, Homo sapiens
cagtaaatatgatgtaacaacatcttattttaaagtctgctagtaattcagaaagtaaattctgtaagagggagtagaaacaaactaccatatattcaatcttatacccaccagagtaagctaagtaaaaaaatatgttcaggcatatttgtaatttgttatatagcaatagatagctaaattaccttctttatgattctgttaaaagattaacactgaaaaagttaaaaaaaatatgtctagtaaggttgatcctcaggttccactatttgaacacttgggcatccaactctggtctctcacttactgggctatctggcttttayaaggtgtctttgatttcattcttgattacttgcctcattcagctatttcagaatcagggcatcaactccaccccatatgtgtctagactcttgcatgtctcacccttgcttaggaactgaaggcctgaccaacacactacacttccctcataaaagtactcgtctgctgaaagtaggagaccaacttcatttcaagagagtcttggctccttaacccaggatgcagaccagggaagc

SEQ ID NO: 362049 - DNA, 549 bp, Homo sapiens
tctactagtatttattggttatagaccgtgtgtctggcacttgttaggtatagaatattaagagattagtaaaacttggtaactgtcttttagggacggatattcttaagttgtggttaatattaggtagatgtttataagccagaatgtttggtaagaatggtaaaaccccagtgttaaatccagtatgcaaggaacataaatgtttactataggctttttatggatgagaaagaaatactgaatttacaggtcttccatgaaaatcaatccccyttcttcacacaattatactttataggtttcattttatccgtgatatcattaaatctaccagtatagggaaaggttttaactaggttacatacatacatgcacacgtttgcatgcatatatatttatgtatataaaagttgtagtttgattcatctgcaagtgacagaaaaaatatggcataaaaaaaaagtttatttctcagtcatgtaaatgaagtccagagccagatggtggaactctgtaaggctccagcatgtcagagatgtaggattg

SEQ ID NO: 362050 - DNA, 533 bp, Homo sapiens
aagtaatttgcccaaagtcatgcagttagtgatagaaccttgatagaatccaggccaggggattacccagccagtgctcttatccatagtgttgtactgctggtctaatctaaggcattttcctctagcaytggagacaataaagtggattcagcaaatattgaggagaagaaatttacaatgtacacttagaagagaagatgaggaaggcatgcatgggtgtcaaaagtagctccttggtatcttaagtaaggcataataatagaaaatcatatagttaacccagatagggaaatgagaaggaggaggagtttaggtaggaaagatgagtttgatgttagacatgctgaatttgcagtgactgcctggaaaatctaggatagagccccccttaggctgtagaaaatgtgggtcaggagccaaaaagaaagatgagggtctagagataaatgcttgggagtaatcagcatttgagtagtagatgaagttataggtaatgagatcatccagaaggaaaaatggaagggtaagaa

SEQ ID NO: 362051 - DNA, 638 bp, Homo sapiens
ttgctccaaaacttgtgcagatttcttctagggccagtattaacccagaaccttaccagcgaagggccttctgggaactccagcataaccatgggcacagaacaaactaccgcaatgtggaatctaaataaatcatataggcttctgaaagttgatttttttttctctaccacttcaaataccagaattattgaatggagacaaaagaaaggttaatgtatttttcactagaaggtaaatgacagtcttgaatatgcagatcaccataataagaattgaattctgtctgtatttatcacatttggatgggcctaaatgtaattacttgaaaatatttascattgattaaaaatgtcacattttgtttaatataggaattataaatacaaatttaatcaaacaattaaaatgaattccttgctgaatcttgactggttggcaaatgaaaaggtacactgggctagacatcacttgatctagttttaaaagcagttgtgtcataaaccaactatgtgactttgcataaatatttagtttttttatctttagattatttataaaaattaaaaaaatacgtggaaacagtgaagcattttataatcttgagatattacaatgtctttagggaaaaaggtttc

SEQ ID NO: 362052 - DNA, 603 bp, Homo sapiens
gtacccctatgataaagctttgtgtgagactattttctttgagatgaatgtctctcagtcaagttgagattaactatatatttttgttgaggagacaccatcaccaggaaartgtagatcagaaaggggtaaataataggttattaccaattagatactagctacaattaatacttaagttgtgtaaattatggatttaaatagattgaatagcttcactaaaaattcgtatttaatttaggcacatatcaatgagtaatttcaaatttattaaaatattattatacttcagggtcattatttcagtgcctaaaacaatattttaaaagtaatcttcaaagcgaactttttctccccaaatacttatactaagaataaatgacataatatacctatgatatactggcctaaaattagtgtacagaaattaattgcattgaataatgcatagacatgcattgttctttccctaattcctcacttccctctctttttcaagcattgtgcccacatctgcctttttgcccacacctgaagatgagaaactgataagactgcagttgcccatagatagatgataagccctccggagggaccagtaat

SEQ ID NO: 362053 - DNA, 587 bp, Homo sapiens
cagaccatgcagtttctgttgcaactgtcacaactacattcaactctgcttttgtagtgaaagcagccataaacagtatgaaatgaatgagtgtagctgtgttccaataaaactttatttacaaaatcagacaacagctggatttggcacatgggttgtagtttgccaacctctgacctgatcggggtaaactgaatgcagggaaaactgaatttaaaacaataaaacacaataagaaaatgttctcaactcataagaaataaagtaattataaatctgggttttgatttaaatgattttataatttctagtccataaatatagcttccggtttctttctcacttgcttgctctgtgtatgtgtgtgtatatatatatttttttccaatttgtatatatccctattcagtattatttatgatgatgctataccaattgcactttaggatgacataaaacttgaaatgtaatgtttctgagtgctattttttgrtaacacttccattaaaagtaataatttgcctaatttcttaataacggactggatattagaggcaactgcattttgactgtataattttataaat

SEQ ID NO: 362054 - DNA, 587 bp, Homo sapiens
cagaccatgcagtttctgttgcaactgtcacaactacattcaactctgcttttgtagtgaaagcagccataaacagtatgaaatgaatgagtgtagctgtgttccaataaaactttatttacaaaatcagacaacagctggatttggcacatgggttgtagtttgccaacctctgacctgatcggggtaaactgaatgcagggaaaactgaatttaaaacaataaaacacaataagaaaatgttctcaactcataagaaataaagtaattataaatctgggttttgatttaaatgattttataatttctagtccataaatatagcttccggtttctttctcacttgcttgctctgtgtatgtgtgtgtatatatatatttttttccaatttgtatatatccctattcagtattatttatgatgatgctataccaattgcactttaggatgacataaaacttgaaatgtaatgtttctgagtgctattttttgataacacttccattaaaagtaataatttgcctaatttcttaataayggactggatattagaggcaactgcattttgactgtataattttataaat

SEQ ID NO: 362055 - DNA, 529 bp, Homo sapiens
agtatctttgatcatatctgatagttccccagaattaaacatatgtttgtgcatgctttaccacttactagtaagagagcacaatgttgatagatatgctcttcaagttttagcaataataatacatgttatatttggggtggatgaatttaaaacatgtattaagtaagttgaaaatgaccaacttttagtggagctcattatgtgataaacatctttgctggctcagatgggtatttatgggactctttatctaaggcttctatcacaccaatatttaattaacatatgatgagatgaaggtgttccatggagccaatggtaagccaagtcatggaaataacagtggaagcccttaagcactactcacttgttggcaaatacaaatttctgtattgtagatactgttattgaattaatattggaataaaattaaaggattgaatkaatggagtgcagatcattatgattttatctgacatagtttcaggtcttgatcaaaagcctgtactctaattaaactgcagca

SEQ ID NO: 362056 - DNA, 184 bp, Homo sapiens
aaaggttagtagctggaccctgaatgttatcacaaatcctcaatcatagtaaagtgcttctggttgyttcaccataattaagaaaactttcaagtaacaaattgtagtgttgatacttttgccactaaataataatggactcatctttgttaatttctactaagtatgtcaatttgtatatagt

SEQ ID NO: 362057 - DNA, 184 bp, Homo sapiens
aaaggttagtagctggaccctgaatgttatcacaaatcctcaatcatagtaaagtgcttctggttgcttcaccataattragaaaactttcaagtaacaaattgtagtgttgatacttttgccactaaataataatggactcatctttgttaatttctactaagtatgtcaatttgtatatagt

SEQ ID NO: 362058 - DNA, 184 bp, Homo sapiens
aaaggttagtagctggaccctgaatgttatcacaaatcctcaatcatagtaaagtgcttctggttgcttcaccataattaagaaaamtttcaagtaacaaattgtagtgttgatacttttgccactaaataataatggactcatctttgttaatttctactaagtatgtcaatttgtatatagt

SEQ ID NO: 362059 - DNA, 558 bp, Homo sapiens
gggtttttacttatgaatctaaaaattatcccagcaatcatactagtagataaatatgctgaggaaagtacttagtctactgtcatttaaataratttatataactgtgactgtgaaatgtaatattatagaagttttttgttatggaattttatcttttaaaactggcatgttcttaggaaacactgttaaatcattttttctagaaatatgttaacggtttccattgaaagcctagtaatgctgtctttcagtttctaaagtattccatatttaattacttaaactatagaggataggttacataccttatgtttttacaagtagacatttaaattgccaaatagaattatcctgttgttgaagtctagttttgaagatggaagagggaaaagacagtaaaccttgcaggaagtaaggtgtggaaaaataacagaattggctataggctatattattcccttttgttcttcagcagatatgtctctatcagtctacagcttcaacagtgacagaactctggaatcaactgaaagaggtaatgtgaattagacatgt

SEQ ID NO: 362060 - DNA, 583 bp, Homo sapiens
ttctgatccaatgttcacagtgaagctttcaggaacatgagtaatagccatcacttattgagcctttaccagatgccagccagtgttctaggcactttactttgttgtgataagacaaccctaagaggttttaaatcaaagtgaggcacagagaggcttagtaagtggcccaaagacacatagtaagtggtgaagcaggggttgaagcagaggcagtgtggctctggtgtccacattattcaccacatgctatgccttctctccaatgatgtcttgaaacttaattaggcacatattgaaagagaaacttgtagtcattatttactcactgtaatcatgaaacatctamaatgactaccgttattaatgtaacagtcatgagcttggaaattgctatttaattataaatatatgaaaaataaaaaagtctgcagaacagagtaagggagaggtgcactaatagttttgtagatggttgactagaaaggattttcacttcatctaatttaatcatgttgttttcctgtgagcaaacgaagacagacttgtaaatgcattcagaaaatgactcaaattcatgtta

SEQ ID NO: 362061 - DNA, 518 bp, Homo sapiens
ttttccttttcgttagacctgtttcgaactttcctattgataaattcatgactgtgttttatacagttatcatacacatgttgaatccattmatatacacactgagaaatttagagatgagaattgctgtaaaatccaatgtaaaaaaactctggcattaaaaacttaactatagttagaatgagtgtttctcttcttttagtagaagtgtatggagacaacgtctgtcctgtgagattgttagacttctaaggtcaattaagatttcctagtttgggaaggcaggattttgaagctccccgctcaaataagatgtcatcccatcatggcatctgtttgatattcaagatctcaacctctatatccagaccgaatgtggatgggatccttgggtgcagtgtctattgtgcactttttaaattatggtttttctctatttacaaatccattgagacagtgtatttcttccacatgcccagcacataatggagaaagagaggaccaggcaattaaaatag

SEQ ID NO: 362062 - DNA, 518 bp, Homo sapiens
ttttccttttcgttagacctgtttcgaactttcctattgataaattcatgactgtgttttatacagttatcatacacatgttgaatccattaatatacacactgagaaatttagagatgagaattgctgtaaaatccaatgtaaaaaaactctggcattaaaaacttaactatagttagaatgagtgtttctcttcttttagtagaagtgtatggagacaacgtctgtcctgtgagattgttagacttctaaggtcaattaagatttcctagtttgggaaggcaggattttgaagctccccgctcaawtaagatgtcatcccatcatggcatctgtttgatattcaagatctcaacctctatatccagaccgaatgtggatgggatccttgggtgcagtgtctattgtgcactttttaaattatggtttttctctatttacaaatccattgagacagtgtatttcttccacatgcccagcacataatggagaaagagaggaccaggcaattaaaatag

SEQ ID NO: 362063 - DNA, 348 bp, Homo sapiens
ttagtccctttcacctaagcatgtaaaatcaaaagcaacctagttatttccaagatacaaagaagatataggaattgggtaaattctttcattccaaaatggagaaatcagcacaaagaaaggggttacaggccccatggaaatctgtaatctggcagagtggtcactaaatcttgaagttacaaaacaattacctttgactccatgcctcacatccagggcataytggtacaatgggtagtcttctaaggccttgtgtagttccactcatgtggctttatagggtttgggcagcacagttgctcttaatgtcttttgttgctcttgagggggcccatggcttttcta

SEQ ID NO: 362064 - DNA, 499 bp, Homo sapiens
ggtcactaaatcttgaagttacaaaacaattacctttgactccatgcctcacatccagggcatactggtacaatgggtagtcttctaaggccttgtgtagttccactcatgtggctttatagggttygggcagcacagttgctcttaatgtcttttgttgctcttgagggggcccatggcttttctaggtgcagggtgcaagcttctggtggatctaccattttggggtctagaggatggtagtcctcttctcacagctccactagtcagtgcccccgtgggtactccgtgtgtgggctccaaccacacattttccctctgcactgtcctagtacagattgtctgtgattctccacccatgcagcaggctttggtctgaagttccagactttttgatacctcctctgaatcctggttggaggctcccaagcctcctctcttgcaatttgttcacctgcaggcttaacaccacatgaaagccttcaaaattcacagcttt

SEQ ID NO: 362065 - DNA, 400 bp, Homo sapiens
cattcacagaatggacaaaaacagtgttaacaaactgctgaatccaaagaaatgttaacccctgtgagatggatgtacacatcccaaagcgctttctctttcagcttctttctagtttttatctgaagatacttcctttctcaccattggcctcaatgtgctaccaaatatctcttcacagatgctaagaaaacagtgtttctcaatggctgaatgaaaaggaaggtttgactctgtgagataaatgcayacatcagaaataggtttcttagatggctttcttctagtttttatccttagatatttgctttttgccaaggcctcaatgagctcccaatgtgcattcacagaatggacaaaaacagtgtttacaacctgcagaatccaaagaaaggtttaa

SEQ ID NO: 362066 - DNA, 515 bp, Homo sapiens
tcttttaggtgaatgcacacatcacaaattggtttctcagataaattccttctagtttttatcctgatatattttcttcttcgccctggcctcagtgagctcccaaacgttgatttgtagaatgggcacaaacagtgttrccaaactgttgaatccaaagaaagttataactctgtgagatggatgcacacatccaaagcagtttctcattaagcttctttctaatttatctgaagacaaagcctttttcaccatctgtcttaatgcgctacaaaatacctcttctcagattctaagaaaacagtttttccaaatgtctgtttgagaagaaaagtttaactctgtgagatgaatgctcacatcataaagtggtatctcagagagcatacttctggtttttatcctgggatatgtgctttttagccattggcctcaatgagctccaaatgtccattcgcagaatggacaaaaacagtgtttccaaactgctgaatccaaagaaagcttcaatgctg

SEQ ID NO: 362067 - DNA, 608 bp, Homo sapiens
tatttcaccataggcctcaatgcactaccaaatatcttttcacagattctaagaaaacattttttcmaaatgaccgaatgaaaagaaaagtataactctgtgagatgaatgcacacatcacaaaccggtttctcagatagcttctttctagtgtttatcctgggaaattcactttttcgctattggcctcaatgagttcccaagccttctttctcgttttcatctgaatatagttccattttcacctttggccatcatgtgctgaaaaatatctcttggcattttctacaaaaacaatgtttccaaactactatatgaaaggaaagttttaacactgagggatgaattcacaaatcacaaagtggcttctcaggtaacttccttctagtttttatcttgggatatttgctttttcgccattagactcaatgatctcccaaatgtccattcacagaatggacaaaaacagtgtatacaaactgctgaatcaaaataaaaatttaactctgttagatgaaagaatgcatcccaaagcgtttctcagaaagtgtctttctaattttaatttgaagatatttcctttttcaccataggcctcaaagagttgc

SEQ ID NO: 362068 - DNA, 608 bp, Homo sapiens
tatttcaccataggcctcaatgcactaccaaatatcttttcacagattctaagaaaacattttttccaaatgaccgaatgaaaagaaaagtataactctgtgagatgaatgcacacatcacaaaccggtttctcagatagcttctttctagtgtttatcctgggaaattcactttttcgctattggcctcaatgagttcccaagccttctttctcgttttcatctgaatatagttccattttcacctttggccatcatgtgctgaaaaatatctcttggcattttctacaaaaacaatgtttccaaactactatatgaaaggaaagttttaacactgagggatgaattcacaaatcacaaagtggcttctcaggtaacttccttctagtttttatcttrggatatttgctttttcgccattagactcaatgatctcccaaatgtccattcacagaatggacaaaaacagtgtatacaaactgctgaatcaaaataaaaatttaactctgttagatgaaagaatgcatcccaaagcgtttctcagaaagtgtctttctaattttaatttgaagatatttcctttttcaccataggcctcaaagagttgc

SEQ ID NO: 362069 - DNA, 562 bp, Homo sapiens
aaactttatctctgcgaggtgaatgcacacatcacaaagtggtttctcagttagcttccttccagttttcatcctgggatattccctttattgcaattgacctcaaagagctcacaaatgtccattctcagaaaggacaaaaatagtgtttgcacactactgaattcacagaaagactgaactctgtgagatgaatgcacacatcagaaagcagtttgtcagaaagcttctacttttcatctgaagrtatttcctttttccccataggcctcaaatcgctcccaaatatccctttgcagattctatgaaaacagtgtttccaaactgctgagtgaaaagaaaggtttatctctgagagatgaatgcacacatcacaaagcggtgtctcagatagcttctttccagttttttccctgtgatatgcactttttcacctatgtccttaatgagctatcaaatttgcctttgcagattttacaaaaacagtgtttccaacctgctgaatacaaagttttaactctgagagacgaatgaacacatgacaaagcagttgttcagaaag

SEQ ID NO: 362070 - DNA, 616 bp, Homo sapiens
taaaaactagaaggaagctatctgagaaaatgatttctcaaatgtccattcatctcaaagaggtaaatctttctttggattcagcaatgtggaaacactgttgttgtagaatacacaaagggatatttcagtactcattgaagctaaagtcaaaaaagcaaatatcccaggataaaaactggaaggatcctatctgagaaacccaattgtgatttttgcattcatctagcagaattaaatatttcttttcattcaacagtttgtaaacacagtttttgtagaatctgcaaaggtatttttgggaccacctggaggcctatattgaaaaaggatatatcttccaataaaaactaagaagaagctttctgagaaactgctttgtgatgtgtgctttcatctcccagagttaaacctttctttgggttcgcagtttacagtttggaaacactgtttttgtccattatttgaatggacatttgggagmtccttgaggctaatggtgaaagagcgaatatcccagcataaaaactggaaggaagctacctgagaaaccattttgtgatgtcagcattcatcttgcagagttaaaaatttctttggattcagcagtttggaa

SEQ ID NO: 362071 - DNA, 520 bp, Homo sapiens
gggcaattgggagttcattggggccaatgatgaaagagcaaatatcccagaataaaaaatagaaggaagctatctgagaaactgttttgtgatgtgtgcattcatctcacagatttaaaactttctgtggattcagttgtttgtaaacactgtttttgtagaatctgcaaagggatatttgggagcacattgatgcctatggtgaaaaaggatatatcttcagataaaaactagaaagaagctttctgaaaaactgctttgtgatgtgtgcattcatctcaaagaattaaacatttctttggattcagcagtttggaaatttttttttgccaattctgtgaatggacatttgagagrccgttgagtccgcaggtgaagaaactaaattcccaggataaaaactagaaggaagctatctatctgagaaaccactttgtgatgtgtgcattcacctctcacagataattttttcttttcattcaggtgttaggatacagtgttttggtagtatatgtgaagg

SEQ ID NO: 362072 - DNA, 505 bp, Homo sapiens
tgaatggacatttgagagaccgttgagtccgcaggtgaagaaactaaattcccaggataaaaactagaaggaagctatctatctgagaaaccactttgtgatgtgtgcattcacctctcacagataattttttcttttcattcaggtgttaggatacagtgttttggtagtatatgtgaagggatatttgggagtgcatttgggcttatggtgaaaagggaaatatcttcagatgaaaaaaagaaagaaattttctgagaaattgctttgtgatgtgtgcattcatcttccagtgttaaatttctttggattcagtagtttggaaattttgtttgcgtagaatacttgaagtgatatttgggagctcattgaggcctaargtgtaaaagtgaatatgcatggataaaaactagaaggaagctttctgagaaaccactttgtgatgtgtgctttcatctcacagagttaaacatttctttgaattcagcagtttggaaatactgta

SEQ ID NO: 362073 - DNA, 609 bp, Homo sapiens
acctgctttgtgatgtgtgcattcatctcaccgattaaaccagttctttggattgagcagtttggaaacactgtttttgtccatgctgccaatggacattttggaggtcattgaggccaaatgcaaaaaaggaaatatcccagtataaacactggaagaaaccaatctgagaaacctctttgctatgtgtccattcttctcacagagataaacctttctttttattcagcagtttagaaactgtgtttgggtagtatctgggaagggatatttgggagtgcatagaggcccatgatgaaaaaggaaatatcttcagataaatactggaaagaagctttctgagaaactgctttgtgatgtgtgtattcattttacaaagttgaacttttctttggattctgtagtatgtaaactcttctggaataatttgggagctctctgatgccaaacgcaaaaaagtgaatatcccaggataaaaaytagaaacaggctatctgagaaacttctttgtgatgtgtgctttcatctcgcaaaattaaacatttctttttattcagcagtttggaaacattgttttggtagaatctgtgaagggatatttgctagaac

SEQ ID NO: 362074 - DNA, 588 bp, Homo sapiens
tgtgcactcatctcccaatgttaaatctttatttgggttcaacagtttggaaatgctgtttttgttsattcagtgaatggacacttgggagctcactgaggccaaaggggaaaaagtgaatatcccaggataaaaaatagaatgaagcaatctgagaaaccactttgttatatgtgcattcatctctcagagttaaacctttcttttcattcagcagtttggaaacactgttttgctacaatctgtgaagtgatatttaggagcacattgaggcctctggtgaaaaaggaaatatcttcagataaaaactagaaagaagattcattagaaagtgctttttgatgtgtgcattcatctcacagatttaaaatttctatggataaagcagttggaaatactgtttttacacaatctgtgaagggatgttttattgatcattgaggctatatgtgaaaaagataatgtcccaggataaaaactagaagggagctatctgagatatggctttgtgatgtgtgcattcatcttgaagagttaaatccttcttttcactcagaagtttggaaacactctttgggtagaatcttc

SEQ ID NO: 362075 - DNA, 588 bp, Homo sapiens
tgtgcactcatctcccaatgttaaatctttatttgggttcaacagtttggaaatgctgtttttgttgattcagtgaatggacacttgggagctcactgaggccaaaggggaaaaagtgaatatcccaggataaaaaatagaatgaagcaatctgagaaaccactttgttatatgtgcattcatctctcagagttaaacctttcttttcattcagcagtttggaaacactgttttgctacaatctgtgaagtgatatttaggagcacattgaggcctctggtgaaaaaggaaatatcttcagataaaaactagaaagaagattcattagaaagtgctttttgatgtgtgcattcatctcacagatttaaaatttctatggataaagcagttggaaatactgtttttacacaatctgtgaagggatgttttattgatcattgaggctatatgtgaaaaagataatgtcmcaggataaaaactagaagggagctatctgagatatggctttgtgatgtgtgcattcatcttgaagagttaaatccttcttttcactcagaagtttggaaacactctttgggtagaatcttc

SEQ ID NO: 362076 - DNA, 552 bp, Homo sapiens
ataaacaccgtacaaaaaggtacagaacagaggacactgttttatttttaacactatttagataccaagagtattcaaaaatagaaccttagtgtccagattccaaaaaaagcatactgaaagagaaagtccacgttcactgtaagatgacatcaatttgagtcattttctgaatgaatttacatgtctgtctcagtttgctcactggaaaacaatgtgattgaattagatgaactgagaatcgtttccagtcaaccacctacaaaactattagtgcacccytcccttattatattctgctgactctttcatttttcatatatttataattaaatagcaatttccaagctcataactgttacatgaataacggtagtcagtggtagatgtttcatgattagagtgagtaaattatgactacaagtttcccactcaatatgtgcctatttaagattcaagaaatccttggaaacaaagtgtagcatgtggcgaataatggggacaaaggagccacactgcctcagctacaagcccagtttcaccacttactat

SEQ ID NO: 362077 - DNA, 552 bp, Homo sapiens
ataaacaccgtacaaaaaggtacagaacagaggacactgttttatttttaacactatttagataccaagagtattcaaaaatagaaccttagtgtccagattccaaaaaaagcatactgaaagagaaagtccacgttcactgtaagatgacatcaatttgagtcattttctgaatgaatttacatgtctgtctcagtttgctcactggaaaacaatgtgattgaattagatgaactgagaatcgtttccagtcaaccacctacaaaactattagtgcacccctcccttattatattctgctgactctttcatttttcatatatttataattaaatagcaatttccaagctcataactgttacatgaataacggtagtcagtggtagatgtttcatgattasagtgagtaaattatgactacaagtttcccactcaatatgtgcctatttaagattcaagaaatccttggaaacaaagtgtagcatgtggcgaataatggggacaaaggagccacactgcctcagctacaagcccagtttcaccacttactat

SEQ ID NO: 362078 - DNA, 545 bp, Homo sapiens
catttcaacatatcacaggaatttttaatgaattatctcttgtcaatggtttcaaatactcacatcytggtccagaaaagcaatgcttctttcactgaggattgccatagatacctcatgcctctatgtgtcctcatgaaacacaggaatatacgtggctgatccatggatatagaactagttcctagtggctacagtttccacagttccatgcaggcttctcattatcttagtctttagagaagtatagcactatccaaagcagatgaccaaactataataatgctttaagataacgacaatatttactgtgaaaggtaattgaatattctcacgtgctggaaaatgccttcgaagaaaaacaaagagactgtctctgcttgactatgtaaaagtggaactaattagtggaaattaacctggacaacacccttttatatgacacaagtagcaacacttatatttgttacttgaatattttctcaattatagtgaagcaaccacaggtactttactgtcattgaggatttataacattcatgtgc

SEQ ID NO: 362079 - DNA, 583 bp, Homo sapiens
tgttataataagtcagatttttaaaataatactacttaaaagattaactgttacattttcagacagaatttacaagaaacataaaagagtcagaacttgtgggtgtcaaagatgaaaatggtttccctttccagtctctgcaaagagctaagtactctaaaagtaagagtggtcatcaaattaaaagtcattctgaacttgtgggtgtaaagacactatgaataaacttcagaaaaatttaatggtgggtcacgtaactatcttaaactagacaaatttaattccaaggttcttaagagtattatctgactgcacagagagtttcagctcaagtctgagaaggggcagtttcaaagatatttgtgaatatggtgcttgcctattccacaaagtstttaaataaattacacagaaggaagcaccatagccttcccttttgaacaggagcatctattttaattacctattcctccttttctccactctgtgctgggaatacaggagaaatgtcctgtctcaatagatgtgtaatagagaaaatacataatttaaaatgtacacaataggacctgcacccaagcat

SEQ ID NO: 362080 - DNA, 501 bp, Homo sapiens
gagaaatgtcctgtctcaatagatgtgtaatagagaaaatacataatttaaaatgtacacaataggacctgcacccaagcatccccatccactctcagttctggatatagaggttgagatcttgaacttcaaacagatgccaagataggatgacttcttaattgagcttggagcatctaaatcctgtcttcccactttggtatcccaagagwttttctatagcatttctcatctctgaatttctcaacatgtatataaaaggattcaacttgggtgtgataactgaataaaacacagtcaggaatttatcaataggaaagtttgaaacgggtctaacatataagaaaatacagggaacaaaaaacaagataaccatgataaagtgggagctgcagataaacggagctttatgcctcccttccggactataagttttaagggagtttaggatgaccccataggagattagtagaagggtgaagatgaccatacagattgctc

SEQ ID NO: 362081 - DNA, 542 bp, Homo sapiens
attcatgatggtcaaatagcgcagtggcttacaggtggccacgtagcgatcataggccatcaccaccagaaggaagacgtcagtatcaccaaacaagtgctctataaatagctgacccatgcaagctgggaaggaaatagtctttttatcacagagtaagtctacaatcaatacaggagaaatggtggtggaatacacagcatctataaatgacagrcaggcaaggaagaagtacactggggagcccaaaaagggactggcaataatagacaccacaatgagcaggttccccaccatagtcacaatatatatgagtaaaaacatgacaaataatgcattttgcacatcaggatactgagagaagcccaggaggacaaattctgtaatattgttattctgcctcatttacccttctttaaggcttgtatcagagatgagagctcaggagaacaagacctgtaatgaaatagtgaacaggaacatgcttacatccattgtgtcgcagagcaccttttcattgttgtatcctcaatagtgattta

SEQ ID NO: 362082 - DNA, 581 bp, Homo sapiens
ccaaatatgccatgttttttttttcatgaattcttgagatgagctaggtagtgagagaggagaaaatagacactgtagaaagaggtacagaacagtaggacatggctttattcataacactatttagataccaaaagtactcaaaaatagaatyttagctatcagattccaagaagaagcatactctaagagaaattccaaattccatgtaagaagacatggatttgagtcattttttgaatgcaattacaagtctgtctcaatttactcactggaaaacaatgggattaaatttgagaaattcagaatcctttctaatcaactatctacagaactattagtgcatctctcgtttatggtattctgctgacaattttctttttttataaatatataattaaataaaaattttccaagctcatgactgttacatgaaaaatggtagtctgtgggacaatgggttttattattacagtgagtagtgactataagcttctcactgagtatgcacctatttaagatccaagacatcctcaaagggaaagtgtagcatgttgtgaataatgtggacactggagtca

SEQ ID NO: 362083 - DNA, 581 bp, Homo sapiens
ccaaatatgccatgttttttttttcatgaattcttgagatgagctaggtagtgagagaggagaaaatagacactgtagaaagaggtacagaacagtaggacatggctttattcataacactatttagataccaaaagtactcaaaaatagaatcttagctatcagattccaagaagaagcatactctaaragaaattccaaattccatgtaagaagacatggatttgagtcattttttgaatgcaattacaagtctgtctcaatttactcactggaaaacaatgggattaaatttgagaaattcagaatcctttctaatcaactatctacagaactattagtgcatctctcgtttatggtattctgctgacaattttctttttttataaatatataattaaataaaaattttccaagctcatgactgttacatgaaaaatggtagtctgtgggacaatgggttttattattacagtgagtagtgactataagcttctcactgagtatgcacctatttaagatccaagacatcctcaaagggaaagtgtagcatgttgtgaataatgtggacactggagtca

SEQ ID NO: 362084 - DNA, 590 bp, Homo sapiens
gtctgactccttgtccaacttataaggagctgtgattctctccattttgtccttgcctataccccaattttttcaacacttacatacaatatcttaattttaattaatttgaactcaagtgaactaactcatgactatcaccaactaccaaatatgccatgttttttttttcatgaattcttgagatgagctaggtagtgagagaggagaaaatagacactgtagaaagaggtacagaacagtaggacatggctttattcataacactatttagataccaaaagtactcaaaaatagaatcttagctatcagattccaagaagaagcatactctaagagaaattccaaattccatgtaagaagacatggatttgagtcattttttgaatgcaattacaagtctgtctcaatttactcactggaaaacaatgggattaaatttgagaaattcagaatcytttctaatcaactatctacagaactattagtgcatctctcgtttatggtattctgctgacaattttctttttttataaatatataattaaataaaaattttccaagctcatgactgttacatgaaaaatggt

SEQ ID NO: 362085 - DNA, 460 bp, Homo sapiens
ggcatggtggtacacacctgctatcccacctactcaagaggctgaggcatgagaatcacttgaatccaggaggcagaggctgcagtgagccaggatcacactactgtcctccagcttgggtgaccgagtgagactatctcaaaaaaaaaaaaaaaaaaaaaagtgaggctagttttctgctaaaaatcctcttcaraaaaatttattttagtgaggaaatactggaagcacaacctcctgtgggtccctgggtgactcaggaggctttgggaatagccataacaaatagacattgactagatcctagtttaaaaaaaaaaagaaaagaaaagacaattcaaaaagaaaaataaaaacaacattgatctcttagtgtctctagatctgacagttaaggacaaacttaaagaaaaaaaacaatgggacaagtagaaatacaaacccaaactttgtgatattc

SEQ ID NO: 362086 - DNA, 549 bp, Homo sapiens
cctgagacttacaggcagagagcctcagaactgaagttgagattctaacacttagaaaaagaggtaatcatagttgtacagytttaggttggagtagaggtttttaatcaaaacctgaatctgtgtcatatgcaaccataatgataattagtccattaattcaatcctctaatgtatcagtccatttttatactactataaagaactgcctgagactgggtaatttataaaggaaagaggtttaattgactcacaattcagcatgtcttcggaggcctcaggaaacttacaattatagccgaaggcaaagggaaagcaaggcaccatcctcacagggcggcaggaaggataagtgctgaacaaagggaaaagagcccctttataaaaccatcagatctcatgaaaactcactatcacgagaacagcatgggggaaactacccccatgattcaattacctccacattttctctccctagacatgtggggattatggggattacaattcaagatgagatttgggtggggacacaaagtctaatcatatcat

SEQ ID NO: 362087 - DNA, 527 bp, Homo sapiens
caccattaacaaatttgaccaatttacataagagaacaatgtgcccaaaagctgcagaatatacattcttttttaaaattttaatttttaatttttgtgggtgcatagtacttctgtatatttatgtggtacattacatgtttggatacaggcatgcaatsgataataatcatatcatgaaaaatggggtatccatcccctgaagcatttaccctttgcattacaaacaatccacttatactcttttagttatttttaaatgtacaattaacatattatcgaccatagtcacccttttgtgctatcaagtagtaagtcttatatactctttctgattatttttctacccattaactatccttatctcccaccctctcacctccccgctacccttcctagcttctagtaaccatccttctattccccacttccctaagttcaattgttttgaattttagatcccacaaataagttagatatcatgatgtttgtctttctttgactggattacttcacataatataatg

SEQ ID NO: 362088 - DNA, 527 bp, Homo sapiens
caccattaacaaatttgaccaatttacataagagaacaatgtgcccaaaagctgcagaatatacattcttttttaaaattttaatttttaatttttgtgggtgcatagtacttctgtatatttatgtggtacattacatgtttggatacaggcatgcaatcsataataatcatatcatgaaaaatggggtatccatcccctgaagcatttaccctttgcattacaaacaatccacttatactcttttagttatttttaaatgtacaattaacatattatcgaccatagtcacccttttgtgctatcaagtagtaagtcttatatactctttctgattatttttctacccattaactatccttatctcccaccctctcacctccccgctacccttcctagcttctagtaaccatccttctattccccacttccctaagttcaattgttttgaattttagatcccacaaataagttagatatcatgatgtttgtctttctttgactggattacttcacataatataatg

SEQ ID NO: 362089 - DNA, 527 bp, Homo sapiens
cataagagaacaatgtgcccaaaagctgcagaatatacattcttttttaaaattttaatttttaatttttgtgggtgcatagtacttctgtatatttatgtggtacattacatgtttggatacaggcatgcaatcgataataatcatatcatgaaaaatggggtatccatcccctgaagcatttaccctttgcattacaaacaatccacttatactyttttagttatttttaaatgtacaattaacatattatcgaccatagtcacccttttgtgctatcaagtagtaagtcttatatactctttctgattatttttctacccattaactatccttatctcccaccctctcacctccccgctacccttcctagcttctagtaaccatccttctattccccacttccctaagttcaattgttttgaattttagatcccacaaataagttagatatcatgatgtttgtctttctttgactggattacttcacataatataatgacctcgggtcttatccatgttgttgc

SEQ ID NO: 362090 - DNA, 597 bp, Homo sapiens
aaaatggggtatccatcccctgaagcatttaccctttgcattacaaacaatccacttatactcttttagttatttttaaatgtacaattaacatattatcgaccatagtcacccttttgtgctatcaagtagtaagtcttatatactctttctgattatttttctacccattaactatccttatctcccaccctctcacctccccgctacccttcctagcttctagtaaccatccttctattccccacttccctaagttcaattgttttgaattttagatcccacaaataagttagatatcatgatgtttgtctttctttgactggattacttcacataatataatgacctckggtcttatccatgttgttgcaaatgagtgaatctcattctttttaatggctgaatagtactccattatatataggtaccacattttctttatccatttatctgtcaatggacacataggttgcttccaaattttggctattgtgaatagtgctgaaacaaacatgggaaggccaatatctctttgatatactaacttcctttcttttaggtatacattgagcaaaaggattactggatcatata

SEQ ID NO: 362091 - DNA, 495 bp, Homo sapiens
accacacctggataatttttatatttttagtagagatgggttttcaccatgttaaccaagctggtcttgaactcctggcctcaggtgatcctcccacctcggcctcccaaagtgccaggattacaggtgtgagccaccatgcccagccagatgttttcctatagaattgtttgagctccttctacattgtcattattaattctttgtcagatgggcagtttgcaaatatcttcacccattctatgagttgtctcttcactttgttggttgtatcctttgctgtgtggaagctttttaacttgaygtgatcccatttgtccatttttacttgtgcctttctgtgctagggaaatattgctcaagaaatctttgcacagaccaatgtccaagagagtttccccaaccccaatgttatcttgtagtcgtttcatattttgaggtcttacatttaagtatttaatccattttaattagatttttttgtatttagagaaa

SEQ ID NO: 362092 - DNA, 583 bp, Homo sapiens
ttttgaggtcttacatttaagtatttaatccattttaattagatttttttgtatttagagaaaaatagagatctagtttcattctcctgcatacggacatccagttttcccarcattatttgttgaagaaactgtcttttccccagcatatgttcttggcacctttgttgaaaatgagttcactgtgggtgtgtggatttgtttctgggttctccattctgttccattggtctatgtgtctgtttttaggccagtactgtcccattttgcttactatatctctgtagcataatatgaagtcaggtgacatgattcctccaatttggttctgttgctcaggatagctttggctagtctgcatctttagtgattccatgtaaattttaggttagatttttttctatttttgtgaagaacgtcattggcattttgatagggattgtattcaatctgtaggttgctttgggtagtatggacattttaacaaaattgtttcttccaatccatgaacatcaaatattttcccttttttgtgtgtgtcctcttcagtttccttaatcagtgtttacggttttcattatag

SEQ ID NO: 362093 - DNA, 627 bp, Homo sapiens
atgtgtgtctgaatacagacctatgcccatggctttaaagactgtgccaggaaatgccaggaaaagatgctgagtcctctcttgtcaggtcattgaaaatattaatcaaatgtaaataagagaattccctttttaaatgaaaaagtcaaaaagcaaggtatacatagactatgaagatgtttacaactttttttaatctttaagttcagtggtacatgtgaaggtttgttatggggatgtcatggaggtgtgtcattttagaagtctgacatagggagtcgttgtatggattatttcctcacctaggtattaagcctagtacccatcagtatttctgtgatcctctcacacctcccaccctccatcgtgtctgttgttcctctctatgtgttcgtgtgttctcatcatttagctcccacttagaagtgagaccatgtggtgtttggttttctgttcctgtgctaatttgctaaggataatggcctctggtccatccatgtttctgcaaaggacatggycttattcttttttatggctgaatagtattccatgctgtgtatgtaccacattttctttatccaatctaccaatgatgggcctttatgttgattttgtgtctttgcaatt

SEQ ID NO: 362094 - DNA, 489 bp, Homo sapiens
aaaaataaattttccattggctggaaaacaaatgtttttgtaaagtgatttttttaatggggacgactggaggcaggagagrgggagatgggcaagggctcaaaaactacctgctgggtaccatgctcactacctgggcgtgggtgcaatcatacttcaaacctcagcatcatgcaacatacctttgtaacaaacctgcacatgtgcctcctgattctaaaacaaaatctgaaaagaaaaataaataaataaaataaggtgttaaaaagtgtaaagtcactagagggaaatggaatttactgaggtgtgatgtgaccgaaaaaaataagaagtaaaaaagttaaggtaaaacatttctatataaaaacatccataattgtagcatcaataacatagtaaggtaaatatttatagcaaatatcaaagaatggtatgaacatatatgcatctttgatacggaaaaattttatcagaatgtatcagtaaaaa

SEQ ID NO: 362095 - DNA, 565 bp, Homo sapiens
ttttatgaattaagtgtctttccaacgaaacaatatgttttagtcctttttttacctaataatctgcattctatcaataaagtaagaatggaagcatcatatattgccagcatctttttttctttttctttcttttttttttctcagcgttgctctgtcacccacgttagagtgcagtagcrtgatcatggttcactgcagtcttgacctcctgggctcaaaaaatcgtccaacctcagcctcctgagcagctggaaccactgacatgcaccaccacaactgtctatcttccttgaaaatggtgtattccaaaatatttactatctggctctgcattccatatttgaagttcatagattatggattacgctaattttacatatgaaaagcagagcctggctgttttttagaaggccatgagaagggggtattgaaaatagcagagatattatcagatattctaaacatctgggaagatcaatggatcatttttacataaatatagcaccaaatcaagctgcttcacctgaggacttaatatgatttctcaattggagaaaaaagt

SEQ ID NO: 362096 - DNA, 599 bp, Homo sapiens
gcatccataaatgataagtagccaaggaagaagtacatggggcatccaaagttgggctgaccaccacagtcacaacaatgaatatgttgcctaccattgtcacaaygtagatgagcaagaacacaagaaataatattttctgtccctgggggctctgagtgagccccacaaggacaaactcagtcacatttttcctttgctccatatgcctttctgtatgtccttattccagttgaacacaggacaaaattacttaaaaatataattgttactagtagcttcattaaattttaggataatttgtttattcattcaacaaataggtgttatgagttattatgttccagaattgcaagacattataaaaatataaggctgattaaagcatggtccccaacctcagcaatcttacaaattaattgagagagaaataagtaatttgggatgtatatgggaaaaggacagtttattaaataaaagagtttgccaaaactagttttacatctggaagatcataaaattatacatatagctaataccataaacaaaaataaatacaaatgaattaaagatttaatataaaactaaagctagatttt

SEQ ID NO: 362097 - DNA, 338 bp, Homo sapiens
tatgactatatgagcatgggaaaataacgaaggatatatgttttttgttgtaagcagggtttacatttgcattggtgatgtgggggagaggagagaagttgtgtgtgaaagaataaaactaacgaagaggagaggaaggaaggaaagaaggaaggaagatggaggaagatggaataaaagagggagggaaagaaataggggagaaggaagggagggagggagggaagagagagttagaggaaaagaaggcttcacacacacacacacacacaaaactatatcatacrtagtgacaatattcactagcccagctatctcctaaaataatcctactaatg

SEQ ID NO: 362098 - DNA, 581 bp, Homo sapiens
cccatctgtttttcaaatacacagattgtctgtgttgctaacaatggccaacctctctagaggttgcactagattccgtgctctttaccactcttaagaacagtgttccttcaattttctccatttcgaatgtcaacaattttcctccctatattgcatccttcttccagcatatttgtatgatctatccccacgtttaaaaatatatttatacccctggacagcatatctctttcaagcaaccaccccatcttgattctctgttattctttctaaataacactttcactttactaaatcaagtggtcaatttcaatactcttcttacttgacctatcattcctatgaattgaagtaacaccttgcttactttagtcttaccttgggttcttgaaagtcactcattccacttctacagatgctatatcatctaatttttggcatattaatcaatgcatagagaacacactgcttgatcctataaagagatttacaaatacctgcccattaaaatatcccccaaatggttacatttgaaattagtttctaagaacacygatgtagagaaagtaaattttttc

SEQ ID NO: 362099 - DNA, 641 bp, Homo sapiens
gaatctttctaccttggcctacaagaccctagatgacctggatccaggctacctccccaaatccatcccttacaattgtccacatttatmctgctccagacagtttcgatattcaccaaatatacaatgtgcttttccatatccttaatttaatctattttttgtagacacttatttcagagattagaagccacttacttctaaaataatggtcaatattgtggaaatgtgtattgtaagtgtaatcttttatttattcattcaattgaaaaatgtttatatgacacctacattgtgttatgcctctcaaataaagtagactcccagccatcacagaatgttcacaaactcattcagggttagggtttagaccaaaagtgattatcagaggagaaatattagtgctaaccaaggaatcatcttttcaccattagtcacctacttttccaaacagaattatacctcctgaggtgaaaagatacataataactctattttaatctattaatgataaatagtatataaatactggccaacagctttctaaattttcttctcaatgatactgaactttccctgaggaagtctccattgagctagttgacttatttctaatcaacagccttattttagatgctgtg

SEQ ID NO: 362100 - DNA, 641 bp, Homo sapiens
gaatctttctaccttggcctacaagaccctagatgacctggatccaggctacctccccaaatccatcccttacaattgtccacatttatactgctccagacagtttygatattcaccaaatatacaatgtgcttttccatatccttaatttaatctattttttgtagacacttatttcagagattagaagccacttacttctaaaataatggtcaatattgtggaaatgtgtattgtaagtgtaatcttttatttattcattcaattgaaaaatgtttatatgacacctacattgtgttatgcctctcaaataaagtagactcccagccatcacagaatgttcacaaactcattcagggttagggtttagaccaaaagtgattatcagaggagaaatattagtgctaaccaaggaatcatcttttcaccattagtcacctacttttccaaacagaattatacctcctgaggtgaaaagatacataataactctattttaatctattaatgataaatagtatataaatactggccaacagctttctaaattttcttctcaatgatactgaactttccctgaggaagtctccattgagctagttgacttatttctaatcaacagccttattttagatgctgtg

SEQ ID NO: 362101 - DNA, 641 bp, Homo sapiens
gaatctttctaccttggcctacaagaccctagatgacctggatccaggctacctccccaaatccatcccttacaattgtccacatttatactgctccagacagtttcgatattcaccaaatatacaatgtgcttttccatatccttaatttaatctattttttgtagacacttatttcagagattagaagccacttacttctaaaataatggtcaatattgtggaaatgtgtattgtaagtrtaatcttttatttattcattcaattgaaaaatgtttatatgacacctacattgtgttatgcctctcaaataaagtagactcccagccatcacagaatgttcacaaactcattcagggttagggtttagaccaaaagtgattatcagaggagaaatattagtgctaaccaaggaatcatcttttcaccattagtcacctacttttccaaacagaattatacctcctgaggtgaaaagatacataataactctattttaatctattaatgataaatagtatataaatactggccaacagctttctaaattttcttctcaatgatactgaactttccctgaggaagtctccattgagctagttgacttatttctaatcaacagccttattttagatgctgtg

SEQ ID NO: 362102 - DNA, 641 bp, Homo sapiens
gaatctttctaccttggcctacaagaccctagatgacctggatccaggctacctccccaaatccatcccttacaattgtccacatttatactgctccagacagtttcgatattcaccaaatatacaatgtgcttttccatatccttaatttaatctattttttgtagacacttatttcagagattagaagccacttacttctaaaataatggtcaatattgtggaaatgtgtattgtaagtgtaatcttttatttattcattcaattgaaaaatgtttatatgacacctacattgtgttatgcctctcaaataaagtagactcccagccatcasagaatgttcacaaactcattcagggttagggtttagaccaaaagtgattatcagaggagaaatattagtgctaaccaaggaatcatcttttcaccattagtcacctacttttccaaacagaattatacctcctgaggtgaaaagatacataataactctattttaatctattaatgataaatagtatataaatactggccaacagctttctaaattttcttctcaatgatactgaactttccctgaggaagtctccattgagctagttgacttatttctaatcaacagccttattttagatgctgtg

SEQ ID NO: 362103 - DNA, 556 bp, Homo sapiens
aggtcacaaagatcacatgctttaaagggcaataaagatcacaaggcaaagggtgaaggaaatatcacaaggcaaaggaccaaattagaattactgatgtgggtctatgttcggctgtgcacatattgtcttgataaacaccttaagcaacagaaaacagggttcaagagcagataacccgtctgaccaaaatttaccaggctggaattttccaatcctagtaagcctgagggtagtgcaggagaccagggcatatttcagtccttatctcaactgcataagacagacactcccagagcgrcagtttatagatctccccccaggaatgcattccttccttagggtatgaattattagtattccttgctgggaaaagaattcagtgatatctctcctacttttatgtctgtttataggctctctgcaagaagaaaaatatggctctattgtgcctgaccctgcaggcagtcagaccttatggttgtcttcccttgttcccaaaaattgctgttattctgttcattttcaaggtgcactgatttcatattgttcaaac

SEQ ID NO: 362104 - DNA, 573 bp, Homo sapiens
ttaaaatttttgtctgtattttgcttttattctgctgtaccttttctgtttatccttttaaaacaaattattgtttttaaaattcattcttcatgaaactcataaaaccttataaattcatagcttaatatcgctcagcagttttagagaattttcagcaatatctcttcaaatattttgcctacctgattctctttctctcctttttctggaattgtaattaaattaaaagtatgtcagagttttacactttgtcctttatatctcttttatactgttttctgcatttgctttttttgctgtctgctttgatcgcatattttcttctaatattttttgcagtttactaattctctaattttttctctaatttgctgttaaatcccamcattatgtttttaatttgttattatacattttagtttttcagtttattttgttcattttattgtttatcttgttttaatatttgttcatactaaacttattaaaaatgcttatatttcattatctagatcatcttttttttattgcacttgtctttcaatcatgccttgtctactgtactttgtt

SEQ ID NO: 362105 - DNA, 616 bp, Homo sapiens
gattaagtctatttggggctccactgtagtaacttttggaattatgtttctctgtttaatcagcttgttttagtgtgctggaccagtcaaagaattctgcatcaaaatcgatagaatgaacgagccttcattgccatggcacatttatataaaaagaaagggagagatgttgtgggaattaagggacaccgagtggagggaccagcggaagccatggcagaagaacttaaattgtgaagattccatggacagattttagttccccaaattaatacttttataattttttatgcctgtctttactgcaatcgctgaacataaattgtgaagatttcatggacacttatcacttccccaatcagtactcttgtgatttcccatgcctgtctttactttaatctcttaattctgtcatcttcataagctgaggrtgaatgttgcctcagaaccatgtgatgattgcgttaactgcaaaaattgtttaaacaatatgaaatctgggcaccttaaaaaaagaacaggataacagcgatgttcagggaaaagggagataaccttaaagtcaggctgcctgtgggctgggtggaacagagccatagttctcttccttcagaag

SEQ ID NO: 362106 - DNA, 638 bp, Homo sapiens
tgtccattctgcgaatggacctttggaagctcattgagaaaaatggtgaaaaagtgaatattccaggttataaactagaaaaagctatctgagaaacctctttgctatgtgtgcactcatttcacagagttaaacttttcttttcattcagcactttaggaaaattgttttcgtagaatctgtgaagggattttgggacacactgaggcctatggtggaaaaggaaacatcttcarataaaaattagaaactttcagagaaacttctttgtgatgtgtgcaatcatctcacagagttaaacctttctgtggattcagcagtttggaaacactgtttatgttcgttgtgtgaatggacatttggaacatttggtgaaaaacagaatatcccaggaaacaaactagaaggaagctatgtgagaaacctctttgtgatgtgcacatgcatctcacagaattaaacttttcttttcattcagtactttggcaagagtgtttttgtagaatctacaatgggatatttgggagtgacttgaggcttgtggtgaaaaagaaaatatcttcagataaaaactagaaggaatcattctgagaaactgctttgtgatgtatgcatttgtctcacagagttaaacattt

SEQ ID NO: 362107 - DNA, 552 bp, Homo sapiens
tccttgaggccaatggtgaaaaagtgaatatcccaggataaaaacaagaaggaagctctctgagaaactgatttgtgatatctgcattcatcttgaagagttaaacctttcttttaattcagcagcttggaaaaattgtttttgtagaatctgcaaagggatatttgggagcgcttttaggcttatggggaaaaaggaaatatcttcagataaaaactagaaataagctttctgagaaaatgcttcataatgttgcattcatctcacacaattaaaactttcttttgattcagtagtttggaaacagtgtttttgtagaaactgttgagagatatttgtgagaacattgaggtcaatagtaaaaaaggaaatakcttcaggtaaaaaccagaaagaagctttctgataaacttctctgtattgtgtgcattcatctcacacagttaaacctttttgcttattcagaaattttgaagcactctttctgtccattctacaaatggacatttgggaactcattgaggccagtggtgaaaaagagaatatccccat

SEQ ID NO: 362108 - DNA, 552 bp, Homo sapiens
tccttgaggccaatggtgaaaaagtgaatatcccaggataaaaacaagaaggaagctctctgagaaactgatttgtgatatctgcattcatcttgaagagttaaacctttcttttaattcagcagcttggaaaaattgtttttgtagaatctgcaaagggatatttgggagcgcttttaggcttatggggaaaaaggaaatatcttcagataaaaactagaaataagctttctgagaaaatgcttcataatgttgcattcatctcacacaattaaaactttcttttgattcagtagtttggaaacagtgtttttgtagaaactgttgagagatatttgtgagaacattgaggtcaatagtaaaaaaggaaatatcttcaggtaaaaaccagaaagaagctttctgataaacttctytgtattgtgtgcattcatctcacacagttaaacctttttgcttattcagaaattttgaagcactctttctgtccattctacaaatggacatttgggaactcattgaggccagtggtgaaaaagagaatatccccat

SEQ ID NO: 362109 - DNA, 552 bp, Homo sapiens
tccttgaggccaatggtgaaaaagtgaatatcccaggataaaaacaagaaggaagctctctgagaaactgatttgtgatatctgcattcatcttgaagagttaaacctttcttttaattcagcagcttggaaaaattgtttttgtagaatctgcaaagggatatttgggagcgcttttaggcttatggggaaaaaggaaatatcttcagataaaaactagaaataagctttctgagaaaatgcttcataatgttgcattcatctcacacaattaaaactttcttttgattcagtagtttggaaacagtgtttttgtagaaactgttgagagatatttgtgagaacattgaggtcaatagtaaaaaaggaaatatcttcaggtaaaaaccagaaagaagctttctgataaacttctctgtaytgtgtgcattcatctcacacagttaaacctttttgcttattcagaaattttgaagcactctttctgtccattctacaaatggacatttgggaactcattgaggccagtggtgaaaaagagaatatccccat

SEQ ID NO: 362110 - DNA, 451 bp, Homo sapiens
tcgaagttcactgagacctatggcaaaaaagtgaaaatcccaggataaaaactaagtggaagctatctgagtaaatgctttgtgatgtgtgccttcatctgacagagctaaacctctctcagaaatcagcagtttgtaaactatgcttttgtaacatctgcatgggggtattttgtagcacactccgaccaatggtgaaaaaggaattatcttcagataaaaactagaaagaatctttctgagaaactgctttgtgatatgtacattcatctgacagagttcaacctctctttgaattcagaagtttgaaaaccctgtttttatagcatctccaaaggaatatttgggagctcattgaggcgaaagtcgaaaaagcaaatattcctggataaaarctagaaggaatctatctgagaaactgctttgtgatgtgtgcattcatctcacagag

SEQ ID NO: 362111 - DNA, 604 bp, Homo sapiens
cataaatcttgaagatttcctggacatttgtatttccccaaccaattcccttgtaatttcctatgcctgtctttaacctcttagtcccatcatcttccaaagctgagtatgtatgtcacctcaggaccctgtgatgattgtgttaatgcacagattgtttgtaaagcatatgtgtttgaacattatgaagtctgggcaccttaaggacaggataaccgtgattttcagggaacaagggagataaagtcyggttacctatggactgggcatgacagagccgtatttctcttattactgaaaatgaataagagaaatatcactgaattctttccaagtaaggaatattaatatttaatggcatgggaaaagaatacattcccagagggggcctctaaaatggctgctctggggatgtccgccttatcctgtttcagataagggatgaagcatgccctggcatactgcagcaccccgaggcttgctaggattaggacattcctgcctgccaaattgcagtcagaccaattctctgctcttgaaccctgttaagatgtttaccaatgaaaatgcatgcacagcaggacatgaaacttcattagtaatt

SEQ ID NO: 362112 - DNA, 604 bp, Homo sapiens
cataaatcttgaagatttcctggacatttgtatttccccaaccaattcccttgtaatttcctatgcctgtctttaacctcttagtcccatcatcttccaaagctgagtatgtatgtcacctcaggaccctgtgatgattgtgttaatgcacagattgtttgtaaagcatatgtgtttgaacattatgaagtctgggcaccttaaggacaggataaccgtgattttcagggaacaagggagataaagtctggttacctrtggactgggcatgacagagccgtatttctcttattactgaaaatgaataagagaaatatcactgaattctttccaagtaaggaatattaatatttaatggcatgggaaaagaatacattcccagagggggcctctaaaatggctgctctggggatgtccgccttatcctgtttcagataagggatgaagcatgccctggcatactgcagcaccccgaggcttgctaggattaggacattcctgcctgccaaattgcagtcagaccaattctctgctcttgaaccctgttaagatgtttaccaatgaaaatgcatgcacagcaggacatgaaacttcattagtaatt

SEQ ID NO: 362113 - DNA, 592 bp, Homo sapiens
attgataccataggtgaaaaagcaaatatcccaggaaaaaaactggaaggaacctatctgagaaacagctttgtgatgtatgcattcatctcacagaattaaacctttgttttcattcagcaatttggaaacactgttttggtagaatctgaaaagggaattttgggatcacattgaggcctatggtgaaaaaggaaatatcttcagataaaaactagaaakatgctttctgagaaactgctttggatgtgtgcatttatcacacagagttaaatctttctgttaattcagcagattgcaaacactgattttgtgcattctgcaaatggatctttgggagctcattgtggccaatggagaaaaagtgaataccctaggataaaaactacaagggctctctctctgagaaaccgctgtatgatgtgtgacttcacctcacagacttaaacctttcttttcattcagcagtttggaaacactgttttggtagaatctttgaagggatatttttgagcacattgaggcctatggtgaaaaaggaattatcttcacataaaagctggaaggaagctttctgagaaactgctttatg

SEQ ID NO: 362114 - DNA, 557 bp, Homo sapiens
taaaaactagaaggaagctatctgaaaaactcctgtgtgatgtgtgcattcattttacacagttaaaccttaccttgtattcacctrcttgggaacattgtttttgtccattctgcgaatggaaattatgtagctcattgagtccaatggcaaaaaagagaatatcccaggataaaaactagaagaaagttgtctgagaaacctctttgtgatgtgtgcattcatctcacagagttaaaacttatttttcattcagcagtttggaaaaactgttttggtataatctgtgaagggatatttgggagctcactgagggctatggttaaaaggaaacatcttcagataaaaatgagatagaagcattctgagaaattgtttggtgatgtgtgcattaatctcacagcctgaaacctcacaggcttaaacatttctttggtgtcagcagtttagaagcactattttgcagaatctgctaagggatatttgggaattcattgatgtgaaagtcaaaaaagtaaatatctcaggataaaaaccacaaggaaactaactgagaa

SEQ ID NO: 362115 - DNA, 557 bp, Homo sapiens
taaaaactagaaggaagctatctgaaaaactcctgtgtgatgtgtgcattcattttacacagttaaaccttaccttgtattcacctgcttgggaacattgtttttgtccattctgcgaatggaaattatgtagctcattgagtccaatggcaaaaaagagaatatcccaggataaaaactagaagaaagttgtctgagaaacctctttgtgatgtgtgcattcatctcacagagttaaaacttatttttcattcagcastttggaaaaactgttttggtataatctgtgaagggatatttgggagctcactgagggctatggttaaaaggaaacatcttcagataaaaatgagatagaagcattctgagaaattgtttggtgatgtgtgcattaatctcacagcctgaaacctcacaggcttaaacatttctttggtgtcagcagtttagaagcactattttgcagaatctgctaagggatatttgggaattcattgatgtgaaagtcaaaaaagtaaatatctcaggataaaaaccacaaggaaactaactgagaa

SEQ ID NO: 362116 - DNA, 557 bp, Homo sapiens
taaaaactagaaggaagctatctgaaaaactcctgtgtgatgtgtgcattcattttacacagttaaaccttaccttgtattcacctgcttgggaacattgtttttgtccattctgcgaatggaaattatgtagctcattgagtccaatggcaaaaaagagaatatcccaggataaaaactagaagaaagttgtctgagaaacctctttgtgatgtgtgcattcatctcacagagttaaaacttatttttcattcagcagtttggaaaaactgttttggtataatctgtgaagggatatttgggagctcactgagggctatggttaaaaggaaacatcttcagataaaaatgagatagaagcattctgagaaattgtttggtgatgtgtgcattaatctcacagcctgaaacctcacaggcttaaacatttctttggtgtcagcagtttagaagcactattttgcagaatctgctaagggatatttgggaattcattgatgtsaaagtcaaaaaagtaaatatctcaggataaaaaccacaaggaaactaactgagaa

SEQ ID NO: 362117 - DNA, 507 bp, Homo sapiens
ctgtagtaaacaggtgaaactgaactctcatgagtgtatcttcaacccctcatacgtgattctggcctcaccttagaatcacatgaggctcttaattaaaacaacatggatgtgtccaacaataaaaagaacccgtggaaagggcacgagcaaagatatttctgtgaattggccatgtaatctgagtatccacatctaagtaatccacattaattacaatggcagaaactgtaataacttttgcaccaaactaatagaaccctgggtttataaccacttagctaagcattgtcwctcaagctttaatgagtttataaaccactcggtaattttaatctctttctgtgtaatgtgattcttcaggttttcaaagagtacatgaatgtgtgttttaaataagtcccctgtcaatgcggatgatgctcccccaggctcattattagcattagttagagaaagcaggcacagcacagagtcccttatacttggcactgttgtcacaacaca

SEQ ID NO: 362118 - DNA, 637 bp, Homo sapiens
ttttatcctgggatatatgattctttgccattggcctcaatgagctcccaaatatccattcgcagattggacaaaaacagtgtttctaaactgctgaatccaaagaaagttttatctcggtaaaatgaatgcacacatcacaaagcagtttctctaaaagcttctttctagttttatctgaagatatttccttttttaccttagtcctcaatacgctcacaaatatccttttgaggtttctaccaaagcagtttccaaactgctgaatgaagtaaaaggtttaaccctacgaggtgaatgtagggttaaagtttttcactttttcacctagggacccaatgagcaatctaatatccattcactgattcttcaaaaactgtgtttacaaacaatggaatacaaagaaaggtttaattcagtgagtcaaaggcacacaaccagaagtactttstctgaaagtttttttgagtttttatctgaagacttttcctttttccccttaggcctcaatgagctcccaaaaatctcttggcagattctacaaaacagtttttccaaactgctgaatgaaaagaaaggtttaactctgcgaggtgaatgcccacatcacaaagcagtttctcagatagcttccttc

SEQ ID NO: 362119 - DNA, 637 bp, Homo sapiens
ttttatcctgggatatatgattctttgccattggcctcaatgagctcccaaatatccattcgcagattggacaaaaacagtgtttctaaactgctgaatccaaagaaagttttatctcggtaaaatgaatgcacacatcacaaagcagtttctctaaaagcttctttctagttttatctgaagatatttccttttttaccttagtcctcaatacgctcacaaatatccttttgaggtttctaccaaagcagtttccaaactgctgaatgaagtaaaaggtttaaccctacgaggtgaatgtagggttaaagtttttcactttttcacctagggacccaatgagcaatctaatatccattcactgattcttcaaaaactgtgtttacaaacaatggaatacaaagaaaggtttaattcagtgagtcaaaggcacacaaccagaagtactttctctgaaagtttttttgagtttttatctgaagacttttcctttttccccttaggcctcaatgagctcccaaaaatctctyggcagattctacaaaacagtttttccaaactgctgaatgaaaagaaaggtttaactctgcgaggtgaatgcccacatcacaaagcagtttctcagatagcttccttc

SEQ ID NO: 362120 - DNA, 633 bp, Homo sapiens
gttttagctgaaaatatttcctttttcagcataggcctcaatgcactcctaaatatcccttcacagacactacaaacacagtgtttccaaacagctaaatgaaaagaaaagtttatatcagcaagatgaatgcacccatcatgatgaagtttctcagatagcttccttccggtttttaattcagcaatatttactttttcgcatttcacctcagttagctcccaaatatcccttcgcagattctccaaaaacactgtttccaaacgagtgaatccaaagaaagttttatctctctgagatgtawgcatacttcacaaagcagtttctcagaaagctttttttctagttttcatctgaagatatttactttttcaccataggactcagtgccctcccaaatatcccttcacagattctaccaaaacagtgtttccaaactgctgaatgaaaaagaaaggtttagctctgtgagatgaatgcacacaacacaaagaagtttctcagatagctttctttttgtttttatcttaggatattcacttttttgtctctggcctcaatgagctccaaaatgtccatttgcagaatggacaaaaaaagcaatccaaactgctcaatccaaagaaagtttta

SEQ ID NO: 362121 - DNA, 633 bp, Homo sapiens
gttttagctgaaaatatttcctttttcagcataggcctcaatgcactcctaaatatcccttcacagacactacaaacacagtgtttccaaacagctaaatgaaaagaaaagtttatatcagcaagatgaatgcacccatcatgatgaagtttctcagatagcttccttccggtttttaattcagcaatatttactttttcgcatttcacctcagttagctcccaaatatcccttcgcagattctccaaaaacactgtttccaaacgagtgaatccaaagaaagttttatctctctgagatgtatgcatacttcacaaagcagtttctcagaaagctttttttctagttttcatctgaagatatttactttttcaccataggactcagtgccctcccaaatatcccttcacagattctaccaaaacagtgtttccaaactgctgaatgaaaaagaaaggtttagctctgtgagatgaatgcacacaacacaaagaagtttctcagatagctttctttttgtttttatcttagsatattcacttttttgtctctggcctcaatgagctccaaaatgtccatttgcagaatggacaaaaaaagcaatccaaactgctcaatccaaagaaagtttta

SEQ ID NO: 362122 - DNA, 645 bp, Homo sapiens
tagatgaggaggaaaacttttttgagacagagctttgctcttgttacccaggctggagtgcaayggcgcgatctcagctcactgaagcctcctcatccccggccaggagtgtgagaccaagcaattctcctgcctcagcctcccaagtagctgggattacaggcgcctgccaccatgtccagctaatttttgtatttttaggacagacggggtttcaccatgttggccaggctggtctcaaactcctgacctcaggtgatccactggcctcggcctcccgaagtgttgggattacaggcatgagccactatgcccacccagaggaggaaaacttttaatgagtgtctattctggtgccatttaatggcctagtgtccagaccctgatgtttcaaaccaatctgtttcatactgtggcctctgagtaataaagattctaaatattggaacagtatataatgctcagcagtgcctggtacatggtagacactgaatagacatccttatttttgaataagtgattgtgtaagatgggctcagtctactagcaccttgacacaaagtcttttccaacaaacagacaaacccacaaatgaaatatctagatacagaatatacagatgaccaagtaggtaagtgactgtca

SEQ ID NO: 362123 - DNA, 558 bp, Homo sapiens
gtattatatctggtttctgcagagcasaaggtagaaataaaatttgtcatcctgctgccctttcaagaaagaagaactgtaataattcccatttgtgttaattacctcatataataaactgattaattttgcaataaaaattattgagtgtttataaggtaccaggtactgtgctagtccctggaattgcagcgataaaccccagaggtggtcttgggtcccaccttcatgttattcccaaataagggaatgaactgaggcttcagttttatatacccagtttaagcaagggacttgagattaataaatgtttactatggaaagaaagaaaagtaaggtctgaatcttgagatctcatggtatgcttagaagccattgtgttcttcattgggtggaacttaacaggggttgaatgggtaggaatgacaggagaggaacctgaataatagacagaggccatagtagagtagacattcatgttatgggatatactttagagatctatattatcctagggcactagaatcgtctctgatacactatactccctatttcttc

SEQ ID NO: 362124 - DNA, 558 bp, Homo sapiens
gtattatatctggtttctgcagagcagaaggtagaaataaaatttgtcatcctgctgccctttcaagaaagaagaactgtaataattcccatttgtgttaattacctcatataatmaactgattaattttgcaataaaaattattgagtgtttataaggtaccaggtactgtgctagtccctggaattgcagcgataaaccccagaggtggtcttgggtcccaccttcatgttattcccaaataagggaatgaactgaggcttcagttttatatacccagtttaagcaagggacttgagattaataaatgtttactatggaaagaaagaaaagtaaggtctgaatcttgagatctcatggtatgcttagaagccattgtgttcttcattgggtggaacttaacaggggttgaatgggtaggaatgacaggagaggaacctgaataatagacagaggccatagtagagtagacattcatgttatgggatatactttagagatctatattatcctagggcactagaatcgtctctgatacactatactccctatttcttc

SEQ ID NO: 362125 - DNA, 558 bp, Homo sapiens
gtattatatctggtttctgcagagcagaaggtagaaataaaatttgtcatcctgctgccctttcaagaaagaagaactgtaataattcccatttgtgttaattacctcatataataaactgattaattttgcaataaaaattattgagtgtttataaggtaccaggtactgtgctagtccctggaattgcagcgataaaccccagaggtggtcttgggtcccaccttcatgttattcccaaataagggaatgawctgaggcttcagttttatatacccagtttaagcaagggacttgagattaataaatgtttactatggaaagaaagaaaagtaaggtctgaatcttgagatctcatggtatgcttagaagccattgtgttcttcattgggtggaacttaacaggggttgaatgggtaggaatgacaggagaggaacctgaataatagacagaggccatagtagagtagacattcatgttatgggatatactttagagatctatattatcctagggcactagaatcgtctctgatacactatactccctatttcttc

SEQ ID NO: 362126 - DNA, 588 bp, Homo sapiens
tttgacaaatacaataaatcattattaactatagttaccttatagtgctatagaacctgagaacatattgctcctatctacatgtaactttatatgtattaatcacctctccctatgctcccctttcttttacttttctcagcctctaataaccataaatctattttcttctatgagtacaactttactgcagcactattcacaatagccatgacataaaatccacmtgagtatccatcagcaaatgaatatacaaagaaaatgttacacacacacacacaaacaatggaacactgtatctgcagatatacacacacacacacacacacacaatggaacactatccaccataagatgaattaaatgctgtaatttgcagcaacataaatgagcctggatgatattatgttaagtgaaataagacactgaaagaaaaatactgcatgcttcactcatatgtgtgagctaaaatttgtctttgacaaatgacattttgattataacatggcttagagagaatctttttacactgagtctaactggggaatttttagcttcctggatttggatgtccatatctcgctcaag

SEQ ID NO: 362127 - DNA, 565 bp, Homo sapiens
tggaacactgtatctgcagatatacacacacacacacacacacacaatggaacactatccaccataagatgaattaaatgctgtaatttgcagcaacataaatgagcctggatgatattatgttaagtgaaataagacacwgaaagaaaaatactgcatgcttcactcatatgtgtgagctaaaatttgtctttgacaaatgacattttgattataacatggcttagagagaatctttttacactgagtctaactggggaatttttagcttcctggatttggatgtccatatctcgctcaagtattgtgaagttttcaatcattattgtgtaaaataggttttctgtgcctcctacagtaatatgatgctccaaatatttgttcatgtaatgatgtttcataagtactgtagtatctctttattctcttttatttctatatttttctgactttgttatttcaaaggacttgtttccaagttcagaaattccttcttttgtttgagctagtcttttgttgaaactctcaattgtgttttatatttcattcattgaattattcaggt

SEQ ID NO: 362128 - DNA, 565 bp, Homo sapiens
tggaacactgtatctgcagatatacacacacacacacacacacacaatggaacactatccaccataagatgaattaaatgctgtaatttgcagcaacataaatgagcctggatgatattatgttaagtgaaataagacactgaaagaaaaatactgcatgcttcactcatatgtgtgagctaaaatttgtctttgacaaatgacattttgattataacatggcttagagagaatctttttacactgagtctaactggggaatttttagcttcctggatttggatgtccatatctcgctcaagtattgtgaagttttcaatcattattgtgtaaaataggttttctgtgcctcctacagtaatatgatgctccaaatatttgttcatgtaatgatgtttcataagtactgtagtatctctttattctcttttatttctatatttttctgactttgttatttcaaaggacttgtttccaagttcagaaattccttcttttgtttgagctagtcttttgttgaaactctcarttgtgttttatatttcattcattgaattattcaggt

SEQ ID NO: 362129 - DNA, 532 bp, Homo sapiens
caaattaggtcagatccttgatgttcaaccacacactaatccagaggtcttctgctttgttttttccctaggaaagtagatctaatatttccatagaagcaaaaagtagctaacagaacttgacaaaaagatgtttagataaatcaagctataatttatcgaatagagaaaggaatcaaaaacatctgatgccccaggctatgagtaggacataagtcaaaattataaattattttattactgctttttctccggagaattttagagctaggttwaaaacacagtttgataaatacatctaatagtgattcatagtattattatttcaaacctgaaactttcctggactcatacagatgcctaagaaacacagctgctacagaataagttcattgagtactcctggcgaaaggcatatcctgtcccttttattttttccttcatctcaagtctctttaaaaataagtcccagaaaatgatccattaaaacaagacatgaaaaatagctcttaagtgaattaaaacttaacat

SEQ ID NO: 362130 - DNA, 532 bp, Homo sapiens
caaattaggtcagatccttgatgttcaaccacacactaatccagaggtcttctgctttgttttttccctaggaaagtagatctaatatttccatagaagcaaaaagtagctaacagaacttgacaaaaagatgtttagataaatcaagctataatttatcgaatagagaaaggaatcaaaaacatctgatgccccaggctatgagtaggacataagtcaaaattataaattattttattactgctttttctccggagaattttagagctaggttaaaaacacagtttgataaatacatctaatagtgattcatagtattattatttcaaacctgaaactttcctggactcatacagatgcctaagaaacacagctgctacagaataagttcattgagtactcckggcgaaaggcatatcctgtcccttttattttttccttcatctcaagtctctttaaaaataagtcccagaaaatgatccattaaaacaagacatgaaaaatagctcttaagtgaattaaaacttaacat

SEQ ID NO: 362131 - DNA, 627 bp, Homo sapiens
tactaccctccaaagactgttacctcctctatattctggagatggaaaacagaaagaaaataaaataaatggaatacaaattcttatttgtgtaaattgtgatgccaagcactcatattttctcaaccaagttgcctttgctttgacgacttttagcagctatttcctagtgacagctcaaaatttctgtatagcttgattttgggagcagcagtctggtggaagggtcagtgaaggcagttttaaayctggatgtgcctagaaggcactctctttttatttaggttatataatacaaataaaaatagcaagtacaccttctaaaatgcttctttttggttttatgtaaaattttaaaaatgtcaatgtgtttatgaaatagtactactttatgaaatgatatttgatttcaccttgggattttatgtagattatttaggggcagtgctaaacctccccacagactatttctaggccttatcaatgaccaagcaacttagtttatttgaaaatagtttgttttatgtacaacaaatattatatatatatatatatatatgctgtttttaacaaatacatgttttaacatgtatatgctgtttttaagtggtatttttaaatcattat

SEQ ID NO: 362132 - DNA, 588 bp, Homo sapiens
ataattccctgaaaaattagaaaactggtgcttgcactccacataagttttgtgttctgaaattaaacaaagtactgattcagaaaaagcaagtgcaaaacctctgaaattaaaacaaactaagaatttcaaggaacagattgattagaataactggaccattgtaaactagggagattgtacaggagaataagattggggacgtaatgaggctccttgaggatcattttaaggagtttcatgcttcaacatgaaaaggaaagcaacgtttaggaaatactcctttgttatgtcatttaataatagaaacagtctcacacygccatttgtttttaaaataaataaattgagtattttggaaaagtgcttctgaagtacaaagtggttaagtggtaaattgaaccataatcttctgatcccaaatccaggttaatttctctatattacatgactttatttcttctttcacatagcaatcaaattagtcatacctccaaatttaaactttagaattctaactcatttcagctggattagaatttctcttaattcgtatgctgtgtttcttcacttgtcagtgaaagatcc

SEQ ID NO: 362133 - DNA, 634 bp, Homo sapiens
caccctcactcagctggagttacttaatacattatgtctgtttcatccattttctaagtcatacctactggaataggtaatctattgcaaaagtatttctcaatccttgctgcatgaatcagtgtttttttttttaatacccatgtgcaagccccaaacacagaaattctgaattaacatatatggaagtctgggcatcagtattataataggttgagaaccattgcattcatgcccaaaatgaatgagtctagaattcgtaacatttatgtaaccacagatgtgctaaaaatgaattctaagaacacgatgagtatagcattctcctaatctccttttttacacagcctagacatctgccttgcaagcttascactttccttctcatactgagaatcaaattctgccctgttgtgtagaatattttgctagaacattagtatttggccttattctttttagtctttttctcaagagggttgatactatttaaacttctatcactgagaaagtaatgccaagcaggcagactacccaaagctataacctcaaccacctgtttctgaacaatagatctcacactaaattaggtccctttggaaataacatcaaatattactactctgaagtagct

SEQ ID NO: 362134 - DNA, 630 bp, Homo sapiens
agcatcagaaaatgaaatagaaaatttaaccaaggaggtgaagatttatacactgataactataaaatattgataaaagaaagtgaagaagatacaagtaaatgcaaaatatcctatgttcatgaattaaaataattaatattgttaaaatgtccatagtacccaaagcaatttacagattcattaaagcaatgacttctaacctcagattcaaatgcacatgaatggacttcagcaaggagaagaatacccaaaaatttaaataaaattcacgtggatacacactttattgtagaaaaggcctataattcatagaggcatactggattatactagtacwtatgaactacatatgcttaaccaaaatccccaattctgaaatcttactatgatagcaatttatttcttcctcacataaaatttaacggtaatatgtagccttactttctgaagtggtctcaggttcagttttctaaaatttttttcccaccatcttatgatatttattgctaggtggcacataaaaagatcagcatttcagccaacatagagatgccattcctttaaaggcaagtctgaaaattgtaccatgctttcagtgaactcctcattaattagaacttagaaata

SEQ ID NO: 362135 - DNA, 362 bp, Homo sapiens
ggtaggagttttgtgaaaccctggtaaagcacaggacccaggaagactgttttgagaatgcagaacagcaaccaggttgcrgatccactgatgatgttctcaggttcaaacccagaatcagttccattccccaaaggctttggctacagcaccatttggccttgagcctacaactaaaaccatttgccaagggagccaaaaggaatcacgaacaccagtgtctcagcaagaaaagataattttcctgctgacattgatctctgcaatggacctgaaacttgtcctgtggctcaattccagtccagcccagttgaagttccagcttagaactgctcacacaaggaccgcagagagacttgccc

SEQ ID NO: 362136 - DNA, 362 bp, Homo sapiens
ggtaggagttttgtgaaaccctggtaaagcacaggacccaggaagactgttttgagaatgcagaacagcaaccaggttgcggatccactgatgatgttctcaggttcaaacccagaatcagttccattccccaaaggctttggctacagcaccatttggccttgagcctacaactaaaaccatttgccaagggagccaraaggaatcacgaacaccagtgtctcagcaagaaaagataattttcctgctgacattgatctctgcaatggacctgaaacttgtcctgtggctcaattccagtccagcccagttgaagttccagcttagaactgctcacacaaggaccgcagagagacttgccc

SEQ ID NO: 362137 - DNA, 362 bp, Homo sapiens
ggtaggagttttgtgaaaccctggtaaagcacaggacccaggaagactgttttgagaatgcagaacagcaaccaggttgcggatccactgatgatgttctcaggttcaaacccagaatcagttccattccccaaaggctttggctacagcaccatttggccttgagcctacaactaaaaccatttgccaagggagccaaaaggaatcaygaacaccagtgtctcagcaagaaaagataattttcctgctgacattgatctctgcaatggacctgaaacttgtcctgtggctcaattccagtccagcccagttgaagttccagcttagaactgctcacacaaggaccgcagagagacttgccc

SEQ ID NO: 362138 - DNA, 362 bp, Homo sapiens
ggtaggagttttgtgaaaccctggtaaagcacaggacccaggaagactgttttgagaatgcagaacagcaaccaggttgcggatccactgatgatgttctcaggttcaaacccagaatcagttccattccccaaaggctttggctacagcaccatttggccttgagcctacaactaaaaccatttgccaagggagccaaaaggaatcacgaacaccagtgtctcagcaagaaaagataattttcctgctgacattgatctctgcaatggamctgaaacttgtcctgtggctcaattccagtccagcccagttgaagttccagcttagaactgctcacacaaggaccgcagagagacttgccc

SEQ ID NO: 362139 - DNA, 602 bp, Homo sapiens
acagaaatagccacaattgattcttacatgtgtgattacattgaggtaactgagaaattaaaggaggaaactccctgcactccataaagaaaacagcaaaaagcacacctaacaagaggtagcatacctgaacactccacagctgacagtagaatgtcatgcaactaagacgtccacagaaaacccctgcttatgtcccactggaggaagggctgcacgtagtcctggtcaatgcacctttggctgcttcaaacggccagtgcccaggattagagacagaaattagctctagctttgtccagagaaactctgaacaataaaataccatgtagcgaatggagaagaaggtgaaaaggagaagctgccttctcactggtctgtatcaatttcctattgaaaaagtaaagtattggagaccctatctccctggttactcgacgttacagtccagctaaggcagcatcaagattgtgtctaaataagcacaagsgcttgttatcctctcctaaatttcctttccacacagcaactcctctgaaaggaaatgagggcagctgtaaattcgagtaccaggtgaaagagccctccaggtggacctgtca

SEQ ID NO: 362140 - DNA, 391 bp, Homo sapiens
aaaaaaatgaaaaacttttagctaacagaaaaaaattaacagcagattacatttatacatacattatatatatataaaatatatatgtatgtagatatagatataagaatataacccagactatagtagttgataaaagggttgactaatttttttaaattctgattgctatggactaaatcatgtcctttatttttaaataccatttaaagataaaattatasaatcttcaggctatgatacatctttaaagtagatttttcagataaaatacaggaagctgttaaatttgaatttcagattaacgaattttttaaagtatacattcataatgaaaattgcataactctgtgccccaaagatttcatgggacattcttacactaaaaata

SEQ ID NO: 362141 - DNA, 485 bp, Homo sapiens
tttaacattgtattgaaggtttaagccagggccattaggcatgaaaaagaataaaaactgtccacactggaaaggaaaaattaaaactatttctgcagataatagtgtcttaaatcataaagaagctacaaataaacagtttgaacgagtttagaaaaattgcaagatacaaaatcaatatataaaaatcagttgtatttctaaacattagcaataaacaaactgaaaaggaaagtaagaaaacaatttcagtaatatcagaaagaatagaatacttaggaataattttaaccwaatcagggcaagacttatatactgaaaactataaaacactatggaaagaaattaataaagatctgaataaaataacaggaagaccccccttgttcacagattggaagacttaactatcattaacatgacaatactttctaagttagtctacaaattcaacacaatctctgtcaagtgagaggaagttaaaa

SEQ ID NO: 362142 - DNA, 485 bp, Homo sapiens
tttaacattgtattgaaggtttaagccagggccattaggcatgaaaaagaataaaaactgtccacactggaaaggaaaaattaaaactatttctgcagataatagtgtcttaaatcataaagaagctacaaataaacagtttgaacgagtttagaaaaattgcaagatacaaaatcaatatataaaaatcagttgtatttctaaacattagcaataaacaaactgaaaaggaaagtaagaaaacaatttcagtaatatcagaaagaatagaatacttaggaataattttaacctaatcagggcaagacttatatactgaaaactataaaacactatkgaaagaaattaataaagatctgaataaaataacaggaagaccccccttgttcacagattggaagacttaactatcattaacatgacaatactttctaagttagtctacaaattcaacacaatctctgtcaagtgagaggaagttaaaa

SEQ ID NO: 362143 - DNA, 555 bp, Homo sapiens
gtggcataaggaaaaaaatgttatgaaccatccttttctagtccgaaaagaaaacctccatttgtttctctaactaccaggaagcaaccttaactctgttcaagagatatcactagactggatttgctctggtggctgacaataaattgtaagctcagtggctcagatggacagcaaacttatgtttggaagttgctaaggatggcaacaagagacaacatgaaaaggtaaagataggtcatattgctaaagacttcagtgagagtgaaaatactctacactctttataaaggagcatgcaataataggaactacacaataacctggaagtgatctaygcttacaaaatgcatcagatggaattgaaaacatgttcatgatatattattattgttttttaaattaagtcagaaaagaaggtgcaaaaatcaatcttaatttttgttcaaatatgatttaataaaatataaagatagagagggaaggaggaaaagaaatggattgtgaaaagttatgctggcaaggttgcatagaaaaaagaatacttgacattgc

SEQ ID NO: 362144 - DNA, 543 bp, Homo sapiens
tgttcaatgggtatgtattttcagttttgcaaaataaaactaaattctagaaatctgttgcacaacagtgtgtgtatagttaacactgctgtactataygcttaaaaatggttgcaatgttgaattcagttatgtgttttactataataaaaattattaaaattgtttggctatttagattttttgtcttttcatataatgtattgtccctttaatatatgcagtgtcttttttatcctaatattggtaatttgtattttttattgatccatttgaacagagattaattttattgatctttttgaagaaacagctttcagtgtcaccttttctcgattgtttttagttttctattcttattgtactgatttctatttcattactttattcccttaattattttttctctctttatttagagcttacgcttcttattctagttccttaaattgaaggcttagaccattgattcattgctttattcccctctagtattagtatttagtgctataaatttatctctaagttgtatctagcatttta

SEQ ID NO: 362145 - DNA, 388 bp, Homo sapiens
ttcagtgtatgaaagcacagattcctgaaagaatggcctcaaatgaccaggagtaggagctctctatatccctgctcctgaaaaacaagctaactggagtctccatcacctgccaccagctatacacactaccaactacctaactgaactccatgactgatttgccagctaatcatgcccctracccagcccacatggacatgggaaggacatcagtgaactgtgaaaagaggcagaggtgaggagacacctgccctgtgccacacatctatgtagttcagcaatttccagccccttagtactccaggggctctaagccacccctttgtaagtcaggatggaagtagatgacaccacatttctatctgctgtagacattcttcccagt

SEQ ID NO: 362146 - DNA, 388 bp, Homo sapiens
ttcagtgtatgaaagcacagattcctgaaagaatggcctcaaatgaccaggagtaggagctctctatatccctgctcctgaaaaacaagctaactggagtctccatcacctgccaccagctatacacactaccaactacctaactgaactccatgactgatttgccagctaatcatgcccctaacccagcccacatggacatgggaaggacatcagtgaactgtgaaaagaggcagaggtgaggagacacctgycctgtgccacacatctatgtagttcagcaatttccagccccttagtactccaggggctctaagccacccctttgtaagtcaggatggaagtagatgacaccacatttctatctgctgtagacattcttcccagt

SEQ ID NO: 362147 - DNA, 490 bp, Homo sapiens
atccctgctcctgaaaaacaagctaactggagtctccatcacctgccaccagctatacacactaccaactacctaactgaactccatgactgatttgccagctaatcatgcccctaacccagcccacatggacatgggaaggacatcagtgaactgtgaaaagaggcagaggtgaggagacacctgccctgtgccacacatctatgtagttcagcaatttccagccccttagtactccaggggctctaagccacccctttgtaagtcaggatggaagtagatgacaccacatttctatctgctgtagacattcttcccagtgtctcaawatgttttggcatctttcagtaaaaatcttcaagtttgtcagtccttgatttaaaaaaaaagcagcaaaatttttagagctcccttgaaccttctattttaatgtgcctttgtagataattcccaacatcttgtgtccttcatttttataatttatctttat

SEQ ID NO: 362148 - DNA, 601 bp, Homo sapiens
ttatttattggttttatttctccacgtagaacaaagaagagaataagaaaataatcatctggtaaccatcatagtaataattgttcaaacacaagtcatccatgaaatgctaaatctagtgggttctgaggagtaaccagatatttacagagcctcaaagtatctccatacaaaatacggttgaactacaaaaagaaaattgtaacattagcatggacaaacctggcaggtactccttaactctcctaagtaataaaaactgtaaaatgcaaataagccttcgatgacmtttactaacctttactaaagtatcagtgatgacttggttgtttaaacagctgacatttgggcaatttgagtatgtcaaactcaataatactggttttcatttgcaagatccacttaaaacttaaggaggccaaaaaacatcatttaaaataccctataaattataatcgtacatgtgatacaaaaatatcctacttcagtaaatattggaatgttatatattttatgagaaacaattaaaatgtgtaaatagcccagtaataaagttttataatcttttaaatcatcatagaatttttccttaagactttat

SEQ ID NO: 362149 - DNA, 395 bp, Homo sapiens
aaaaaaaagcagcaaaatttttagagctcccttgaaccttctattttaatgtgcctttgtagataattcccaacatcttgtgtccttcatttttataatttatctttatcaaacttgtcataaaccccaatactttgatctcttgtagaagagttcatactcctatccaatccagtgttgtttatcttcaaacttggacttcccctgctcattccattcttatctacttccattgggttcaccagctaattccattctcattctatccacagactcactcycgtttgtattattaaaacacacaccaataggacataaaaagaagcaagaatactgggctttaccatgagttcaaatctcatttctgccaattcctatgtctaaaaaaaccagct

SEQ ID NO: 362150 - DNA, 533 bp, Homo sapiens
catctggtaaccatcatagtaataattgttcaaacacaagtcatccatgaaatgctaaatctagtgggttctgaggagtaaccagatatttacagagcctcaaagtatctccatacaaaatacggttgaactacaaaaagaaaattgtaacattagcatggacaaacctggcaggtactccttaactctcctaagtaataaaaactgtaaaatgcaaataagccttcgatgacctttactaacctttactaaagtatcartgatgacttggttgtttaaacagctgacatttgggcaatttgagtatgtcaaactcaataatactggttttcatttgcaagatccacttaaaacttaaggaggccaaaaaacatcatttaaaataccctataaattataatcgtacatgtgatacaaaaatatcctacttcagtaaatattggaatgttatatattttatgagaaacaattaaaatgtgtaaatagcccagtaataaagttttataatcttttaaatcatcatagaatttttc

SEQ ID NO: 362151 - DNA, 519 bp, Homo sapiens
cttaaaattctgtaattctatgtcctcttgattctgtctatagaaaaacttggaatacataggcagcagagtttgaaaaaataatagaacaaaagaaacaccaagaaaaacagagaagaaagttttaaaaaatgaagacaagattatataaaagtcatggaaaaagcaacaagactaaagaatgtattatggaagtaagcagaaatacttgcctaaatggaaaaccaaactgggaagtcaaataatttgtctctaagacttgcctaaacttgctttggtaaaacttacagtcctatggccaaagctaagtcagatctgccctagagcctttgaaggtaaaaataagatactggttaccactgaaatcgtcaaatttattaggactaaccacattctaacaataaacttaaatgagagttcaaggtatttaaactctcattaatttagaagttaatcaaattaatgaatctgattgatctgattcagacmtatactttgatccaagggctgcacagatat

SEQ ID NO: 362152 - DNA, 493 bp, Homo sapiens
tttggtaaaacttacagtcctatggccaaagctaagtcagatctgccctagagcctttgaaggtaaaaataagatactggttaccactgaaatcgtcaaatttattaggactaaccacattctaacaataaacttaaatgagagttcaaggtatttaaactctcattaatttagaagttaatcaaattaatgaatctgattgatctgattcagacctatactttgatccaagggctgcacagatatctatcaatctatgctgaggagcaagagaaaggatttggaaggcaggcaggctgatggtcaaactgtaggccagctactttgttaaccatgggatcatgaggcaattaatcagctctaatccatagttgtttatttaacagtaggttataggaacacagatgttatgatggctttatgagatgayaaatgcatagaacatattaggatgtctagcccagaatacaacactcaacagatattagtttct

SEQ ID NO: 362153 - DNA, 601 bp, Homo sapiens
ttatttattggttttatttctccacgtagaacaaagaagagaataagaaaataatcatctggtaaccatcatagtaataattgttcaaacacaagtcatccatgaaatgctaaatctagtgggttctgaggagtaaccagatatttacagagcctcaaagtatctccatacaaaatacggttgaactacaaaaagaaaattgtaacattagcatggacaaacctggcaggtactccttaactctcctaagtaataaaaactgtaaaatgcaaataagccttcgatgacctttactaacctttactaaagtatcagtgatgacttggttgtttaaacagctgacatttgggcaatttgagtatgtcaaactcaataatactggttttcatttgcaagatccacttaaaacttaaggaggccaaaaaacatcatttaaaataccctataaattataatcrtacatgtgatacaaaaatatcctacttcagtaaatattggaatgttatatattttatgagaaacaattaaaatgtgtaaatagcccagtaataaagttttataatcttttaaatcatcatagaatttttccttaagactttat

SEQ ID NO: 362154 - DNA, 601 bp, Homo sapiens
ttatttattggttttatttctccacgtagaacaaagaagagaataagaaaataatcatctggtaaccatcatagtaataattgttcaaacacaagtcatccatgaaatgctaaatctagtgggttctgaggagtaaccagatatttacagagcctcaaagtatctccatacaaaatacggttgaactacaaaaagaaaattgtaacattagcatggacaaacctggcaggtactccttaactctcctaagtaataaaaactgtaaaatgcaaataagccttcgatgacctttactaacctttactaaagtatcagtgatgacttggttgtttaaacagctgacatttgggcaatttgagtatgtcaaactcaataatactggttttcatttgcaagatccacttaaaacttaaggaggccaaaaaacatcatttaaaataccctataaattataatcgtacatrtgatacaaaaatatcctacttcagtaaatattggaatgttatatattttatgagaaacaattaaaatgtgtaaatagcccagtaataaagttttataatcttttaaatcatcatagaatttttccttaagactttat

SEQ ID NO: 362155 - DNA, 492 bp, Homo sapiens
ttcgtcactgaaagtcaaaaaagtaaccagcgctgcaacttaagatggatcatacaacagaaattagtaccaagttaccttatcttataatattatgttattaaaatgaaattttaaaacaacaccaaaaattaagttggggctatacaaagtgtgcagaaaagatttcatataacaggcaagagactgccatccttagaaaggcctgcatgcaaggctggcccttggctggtgtttaggaaattggaattgggagggtttccaccattccctgagaagagtggctcactgtgtctaaagtttttatagaaaccgccaatgggtgaaatcyaaagcagcagcgggtgtatccattaacattctcaaaacaggatgcatctggacccctgtgtgcaatcttcatagcacacagacagtaaacagaaaggcagtcattgctgccaaacaggacccaaatgccacacacagtgcaatgaagctataagctcccta

SEQ ID NO: 362156 - DNA, 492 bp, Homo sapiens
ttcgtcactgaaagtcaaaaaagtaaccagcgctgcaacttaagatggatcatacaacagaaattagtaccaagttaccttatcttataatattatgttattaaaatgaaattttaaaacaacaccaaaaattaagttggggctatacaaagtgtgcagaaaagatttcatataacaggcaagagactgccatccttagaaaggcctgcatgcaaggctggcccttggctggtgtttaggaaattggaattgggagggtttccaccattccctgagaagagtggctcactgtgtctaaagtttttatagaaaccgccaatgggtgaaatccaaagcagcagckggtgtatccattaacattctcaaaacaggatgcatctggacccctgtgtgcaatcttcatagcacacagacagtaaacagaaaggcagtcattgctgccaaacaggacccaaatgccacacacagtgcaatgaagctataagctcccta

SEQ ID NO: 362157 - DNA, 295 bp, Homo sapiens
cttgggaactgtttaagctttggaacatgatgaatttatggtgcataagtacagtcttctctgtgaaagtttttgttttcacatctttcattagatgtgtgtaagaaaaaaaatattgatgtagtatctactaacccaagaatgaaaagkaatgccatttgctatttacactttatttctaaaataaacctaaatttaattaataaattttgtcaacgtatttctctttgtttctctaattatttattctacacagtccggccccatctaaaataagtaaaaataataataatgt

SEQ ID NO: 362158 - DNA, 615 bp, Homo sapiens
tgtaaaccccacctgtgataccgttcctaatatcccggggaagagaggatgatattattcccaatattgcagggggtgtacacccaccctatgatattgttattaatacccaggaggggagacaatggtattactcacagtatcaaagaggttgtacagccctcctgtgatagtttctaatatccagggggtgtataccacccttgtgatattgtttctaatatgtagggggaaggacaatgatattactgtccgtatcacagggggtgtacaacaagccccccgggatatcattcctaatatccatgggaagaaagaatattataatatcacagaagttgtamaccccctctgtgatattgttcctaatatcaaagacagaagggtatgatgttcttcccaaaatcacaggaagtgtatacacaccctgtgctatttttcctaatatcgagagtgagagacaatgatacttccaatatcgtaaggagtgtacactctccccgtgataccaggtggggaaatgttgatattactccaaatgtcacagtgggtgtacacacgttttgcgatattgttcctaatagcaagtggggaggaggattgtattactcccac

SEQ ID NO: 362159 - DNA, 295 bp, Homo sapiens
cttgggaactgtttaagctttggaacatgatgaatttatggtgcataagtacagtcttctctgtgaaagtttttgttttcacatctttcattagatgtgtgtaagaaaaaaaatattgatgtagtatctactaacccaagaatgaaaagtaatgccatttgctatttacactttatttctaaaataaacctaaatttaattaataaattttgtcaacgtatttctctttgtttctctaattatttattctacacagtccggccccatctaaartaagtaaaaataataataatgt

SEQ ID NO: 362160 - DNA, 185 bp, Homo sapiens
tagcaggggttgtacaccacctttgtgatattgttctacatatccatggggaaagaaaatgatagtactccmcaatatcacaggtggtgtacaaccccttgtgatactgtttctaatatccatgttgggggaggatattactcccaatattgcacgtgttgcacagaccccctttgatattgctt

SEQ ID NO: 362161 - DNA, 409 bp, Homo sapiens
ggatattaagcttttatcagatacacattttgattttatcagatacatattttctcacatattatgggttgtcttttcactcccttgatagtrtcctttgatgcataaagggttttttattttgattaaatctaattttcgtgtattttcttttgttatctgtgcttttctgtcatatttcaaaatacacttaaaactcaaaggtcataaaggtttaccgtgtgttttcttctaagagttacatatttttagtccttacatttaagtcttttattaatttagaattaatttttgtgtatactgcaaggtaggggtctaacttctctcttgtgcactgacatccaactgttgaagagactgttctttcctcccttgactagacttggccaccttgttgaacagtcattga

SEQ ID NO: 362162 - DNA, 428 bp, Homo sapiens
ttttcttctaagagttacatatttttagtccttacatttaagtcttttattaatttagaattaatttttgtrtatactgcaaggtaggggtctaacttctctcttgtgcactgacatccaactgttgaagagactgttctttcctcccttgactagacttggccaccttgttgaacagtcattgaccatatatgtgaggactaacttgtaggatctcaaatctgttctattgtatttgtctgaaagtctattggtcttattccagtaccacactctcttgattactgtagatttgtagtaggctgtgaaactgaaaaatgtgagttttccaatgttctttttcaagactcttttgtctgtcagatcctttgaatttttgtatgattttagaatgagtttctttgtttctgcaaaaatgcctttgggat

SEQ ID NO: 362163 - DNA, 428 bp, Homo sapiens
ttttcttctaagagttacatatttttagtccttacatttaagtcttttattaatttagaattaatttttgtgtatactgcaaggtaggggtctaacttctctcttgtgcactgacatccarctgttgaagagactgttctttcctcccttgactagacttggccaccttgttgaacagtcattgaccatatatgtgaggactaacttgtaggatctcaaatctgttctattgtatttgtctgaaagtctattggtcttattccagtaccacactctcttgattactgtagatttgtagtaggctgtgaaactgaaaaatgtgagttttccaatgttctttttcaagactcttttgtctgtcagatcctttgaatttttgtatgattttagaatgagtttctttgtttctgcaaaaatgcctttgggat

SEQ ID NO: 362164 - DNA, 428 bp, Homo sapiens
ttttcttctaagagttacatatttttagtccttacatttaagtcttttattaatttagaattaatttttgtgtatactgcaaggtaggggtctaacttctctcttgtgcactgacatccaactgttgaagagactgttctttcctcccttgactagacttggccaccttgttgaacagtcattgaccatatatgtgaggactaacttgtaggatctcaaatctrttctattgtatttgtctgaaagtctattggtcttattccagtaccacactctcttgattactgtagatttgtagtaggctgtgaaactgaaaaatgtgagttttccaatgttctttttcaagactcttttgtctgtcagatcctttgaatttttgtatgattttagaatgagtttctttgtttctgcaaaaatgcctttgggat

SEQ ID NO: 362165 - DNA, 428 bp, Homo sapiens
ttttcttctaagagttacatatttttagtccttacatttaagtcttttattaatttagaattaatttttgtgtatactgcaaggtaggggtctaacttctctcttgtgcactgacatccaactgttgaagagactgttctttcctcccttgactagacttggccaccttgttgaacagtcattgaccatatatgtgaggactaacttgtaggatctcaaatctgttctattgtatttgtctgaaagtctattggtcttattccagtaccayactctcttgattactgtagatttgtagtaggctgtgaaactgaaaaatgtgagttttccaatgttctttttcaagactcttttgtctgtcagatcctttgaatttttgtatgattttagaatgagtttctttgtttctgcaaaaatgcctttgggat

SEQ ID NO: 362166 - DNA, 457 bp, Homo sapiens
ctgaataatactctgtgtatgtatatattacattttctttatctattcacctactgatgggcattaggtttgggctaccttttggccactgtgaataatgctgctgttaatygggtgtacaaatacctgtttgagtccctgctctcagttcttttgggtatatacgcttaaagggtgttgatggatcatataattctatgcttcatatttttaaggagctgctaaaccattttccacagtgggctgtaccattttacattccaaaaagcaatgcatacagcttccaatttctctatagccttgctgacagttaatattttctgtttatgtattgtatttttatagtgtttgaaattaatctgaggctttttgctgataccaaaatattaggaaaggttttccaaaaataatactgcttattataaaggattttacgtgttacttgatgccctgtgat

SEQ ID NO: 362167 - DNA, 457 bp, Homo sapiens
ctgaataatactctgtgtatgtatatattacattttctttatctattcacctactgatgggcattaggtttgggctaccttttggccactgtgaataatgctgctgttaatcgggtgtacaaatacctgtttgagtccctgctctcagttcttttgggtatatacgcttaaagggtgttgatggatcatataattctatgcttcatatttttaaggagctgctaaaccattttccacagtgggctgtaccattttacattccaaaaagcaatgcatacagcttccaatttctctatagcmttgctgacagttaatattttctgtttatgtattgtatttttatagtgtttgaaattaatctgaggctttttgctgataccaaaatattaggaaaggttttccaaaaataatactgcttattataaaggattttacgtgttacttgatgccctgtgat

SEQ ID NO: 362168 - DNA, 457 bp, Homo sapiens
ctgaataatactctgtgtatgtatatattacattttctttatctattcacctactgatgggcattaggtttgggctaccttttggccactgtgaataatgctgctgttaatcgggtgtacaaatacctgtttgagtccctgctctcagttcttttgggtatatacgcttaaagggtgttgatggatcatataattctatgcttcatatttttaaggagctgctaaaccattttccacagtgggctgtaccattttacattccaaaaagcaatgcatacagcttccaatttctctatagccttgctgacagttaatattttctgtttatgtattgtatttttatagtgtttgaaattaatctgaggctttttgctgataccaaaatattaggaaaggttttccaaaaataatactgcttattataraggattttacgtgttacttgatgccctgtgat

SEQ ID NO: 362169 - DNA, 313 bp, Homo sapiens
aaataatactgcttattataaaggattttacgtgttacttgatgccctgtgatctgttttctaagtaagaagaggaacttcttggctgggcacagcrgctcatgcctgtaatcctagcacttttggaggccgaggtgggtagattacctaaagtcaggagttcaagaccagcctggccaacatagcgaaacccagtctccactaaaaaaaaaaaaaaaaaaaaaattagctgggtgtggtggggggtgcctctaatcccaggtattcggaaggctgaggcagagaattgattaaacccataaggcagaggtta

SEQ ID NO: 362170 - DNA, 313 bp, Homo sapiens
aaataatactgcttattataaaggattttacgtgttacttgatgccctgtgatctgttttctaagtaagaagaggaacttcttggctgggcacagcggctcatgcctgtaatcctagcacttttggaggccgaggtgggtagatyacctaaagtcaggagttcaagaccagcctggccaacatagcgaaacccagtctccactaaaaaaaaaaaaaaaaaaaaaattagctgggtgtggtggggggtgcctctaatcccaggtattcggaaggctgaggcagagaattgattaaacccataaggcagaggtta

SEQ ID NO: 362171 - DNA, 313 bp, Homo sapiens
aaataatactgcttattataaaggattttacgtgttacttgatgccctgtgatctgttttctaagtaagaagaggaacttcttggctgggcacagcggctcatgcctgtaatcctagcacttttggaggccgaggtgggtagattacctaaagtcaggagttcaagaccagcctggccaacatagygaaacccagtctccactaaaaaaaaaaaaaaaaaaaaaattagctgggtgtggtggggggtgcctctaatcccaggtattcggaaggctgaggcagagaattgattaaacccataaggcagaggtta

SEQ ID NO: 362172 - DNA, 343 bp, Homo sapiens
atttttttggggagtgataattgatctaacttatggaaataatactagatagttagcggatggattctgtatctgatgagagttttgggcaaaacgaattcctastttctgagtcgtatttttcccctgattcaagaaaactgtgaattatccagccagtaaaaaactctcacagctccggatgtgagtttaggacactggatttctaccactcattttcttactacttttcttgtgcaaggatcatggcacaagttgcagtttccaccctgcccattgaagatgaggagtctgttgaagatgaggagtccttggagagcaggatggtggtgacattcctgtc

SEQ ID NO: 362173 - DNA, 343 bp, Homo sapiens
atttttttggggagtgataattgatctaacttatggaaataatactagatagttagcggatggattctgtatctgatgagagttttgggcaaaacgaattcctactttctgagtcktatttttcccctgattcaagaaaactgtgaattatccagccagtaaaaaactctcacagctccggatgtgagtttaggacactggatttctaccactcattttcttactacttttcttgtgcaaggatcatggcacaagttgcagtttccaccctgcccattgaagatgaggagtctgttgaagatgaggagtccttggagagcaggatggtggtgacattcctgtc

SEQ ID NO: 362174 - DNA, 468 bp, Homo sapiens
ggctttagcaactgggaaagacaagggaacatattctctccagaacctccagaagggatgcagtcctgctggcaccttgactttagccttaatagacctattttggacttctggcccccagacctcttagtkagtagatttgtggtgtattaagccactcaatgtagggtagtttgtaacagcagcaagaagaaatgaacatgaagccagaattggtggcccacacctataattccagctatttaggaggctgaggcaggatggttgctttggcccaggagttcacgataagtctgggcaacaaaatggtaccctgtctacatggaaaaaaaaattagcgggtgtggtggcatgcacttgtagtcttagccactagaggccctgaggcaggacaatttcttgacctaggagctccaggtctcagtgcgttgtgatcgtgccatggcaccccagtctgactgacacagc

SEQ ID NO: 362175 - DNA, 468 bp, Homo sapiens
ggctttagcaactgggaaagacaagggaacatattctctccagaacctccagaagggatgcagtcctgctggcaccttgactttagccttaatagacctattttggacttctggcccccagacctcttagttagtagatttgtggtgtattaagccactcaatgtagggtagtttgtaacagcrgcaagaagaaatgaacatgaagccagaattggtggcccacacctataattccagctatttaggaggctgaggcaggatggttgctttggcccaggagttcacgataagtctgggcaacaaaatggtaccctgtctacatggaaaaaaaaattagcgggtgtggtggcatgcacttgtagtcttagccactagaggccctgaggcaggacaatttcttgacctaggagctccaggtctcagtgcgttgtgatcgtgccatggcaccccagtctgactgacacagc

SEQ ID NO: 362176 - DNA, 468 bp, Homo sapiens
ggctttagcaactgggaaagacaagggaacatattctctccagaacctccagaagggatgcagtcctgctggcaccttgactttagccttaatagacctattttggacttctggcccccagacctcttagttagtagatttgtggtgtattaagccactcaatgtagggtagtttgtaacagcagcaagaagaaatgaacatgaagccagaattggtggcccacacctataattccagctatttaggaggctgaggcaggatggttgctttggcccaggagttcacgataagtctgggcaacaaaatgrtaccctgtctacatggaaaaaaaaattagcgggtgtggtggcatgcacttgtagtcttagccactagaggccctgaggcaggacaatttcttgacctaggagctccaggtctcagtgcgttgtgatcgtgccatggcaccccagtctgactgacacagc

SEQ ID NO: 362177 - DNA, 617 bp, Homo sapiens
ttaaatgcagcttttaaagacatttcaaacgtgtcagtttagtcacatttattgaataaagttagcaaatggatatctcttgaaaatgagagctccagggaattaaaaaatgtaaagttcccatttcctttctgtgttaacacagctaattatgatctttacttcacatgcaaaagtcaacagaacaactcagtatttcaccaaattataaacaagaattacgctagagaaatgaaaccctaaagagaaacggtcatataactaacctcagtcaagtagttctggcagttatttgaagtctgaggtttgaagtaggaattcttacgggcatttggggaatatattttctgttgagtcctatactagtaagattttcaacacaaggtgactctcgacctcgccttgtaggaagagtgctgagaaaatatttcacctgctctttctccataaagagctgatactgatcattgctattttcttattcgatctgtaaagrtagcaaagacaaatgcttaatatttcatttttccttaaatgattcttaatgacttgcagtttttaaaaacttaccctgagagtaaaccaaattacccactaaatagtgttttcacacagaa

SEQ ID NO: 362178 - DNA, 454 bp, Homo sapiens
ttcacacacaaaaaaaatagtttaaactgaaagaaaattttttaaaaacttaataaaatgtgggatgcagataaatcgtttcttaaaggtacatttatacatgtaatatattgaaaataaaaggcttcaatcaatgacctttaggttcttttttaagaggctaaaaaatragcaaagtatatccaaattaagaagaaggaagatgataaagataaaaatgtaaaccaacaacatagcaaataacaaaaggtggagctaattaatatacccacaaattggttctttgaaaaaaatttttttaataaacaatggctagcaagatttatctcgaaaaaaattagagaagctacataatgtagataatgggaattaaatagaggatgtaactacagaacctacagacatcaatataattatgaaaactttaggccaatacatttgacaattaaaataa

SEQ ID NO: 362179 - DNA, 579 bp, Homo sapiens
agtggttcccattaatattggggaaatcaacactataaaacagaaaaccatagacattatttaatatttggttttgggaggtatttttagtgacactgcwtacagttgtacctaataattgctaaattagagacgtaaaagtaaaacaaaggcacattgtgtttgagtaggaaatctatagacatctagctggttttcccatccagtcacaaaattctaaatataatcatggtacctgcactcaaatttatgttaaataccaacctcaatgaaatcactcttctcattctctttgttatttatatgttgctttccttaagggaagaatacaaataccttgctaagaaccattctgtttggttgtaggctgcataaggggagtaaacacaaagtacatttgaccacaaaatgactttttaaaagtcagaactatggtagcatgaagccaaacgaggtaatatagaataaaattttctatgcttctttcccttctttgctctctttctactctaataactgcgattcacacaggtaatgaagagtgtaattccttgatagaaacacagctccaagattaat

SEQ ID NO: 362180 - DNA, 579 bp, Homo sapiens
agtggttcccattaatattggggaaatcaacactataaaacagaaaaccatagacattatttaatatttggttttgggaggtatttttagtgacactgcttacagttgtacctaataattgctaaattagagacgtaaaagtaaaacaaaggcacattgtgtttgagtaggaaatctatagacatctagctggttttcccatccagycacaaaattctaaatataatcatggtacctgcactcaaatttatgttaaataccaacctcaatgaaatcactcttctcattctctttgttatttatatgttgctttccttaagggaagaatacaaataccttgctaagaaccattctgtttggttgtaggctgcataaggggagtaaacacaaagtacatttgaccacaaaatgactttttaaaagtcagaactatggtagcatgaagccaaacgaggtaatatagaataaaattttctatgcttctttcccttctttgctctctttctactctaataactgcgattcacacaggtaatgaagagtgtaattccttgatagaaacacagctccaagattaat

SEQ ID NO: 362181 - DNA, 579 bp, Homo sapiens
agtggttcccattaatattggggaaatcaacactataaaacagaaaaccatagacattatttaatatttggttttgggaggtatttttagtgacactgcttacagttgtacctaataattgctaaattagagacgtaaaagtaaaacaaaggcacattgtgtttgagtaggaaatctatagacatctagctggttttcccatccagtcacaaaattctaaatataatcatggtacctgcactcaaatttatgttaaataccaacctcaatgaaatcactcttctcattctctttgttatttatatgttgctttccttaagggaagaatacaaatrccttgctaagaaccattctgtttggttgtaggctgcataaggggagtaaacacaaagtacatttgaccacaaaatgactttttaaaagtcagaactatggtagcatgaagccaaacgaggtaatatagaataaaattttctatgcttctttcccttctttgctctctttctactctaataactgcgattcacacaggtaatgaagagtgtaattccttgatagaaacacagctccaagattaat

SEQ ID NO: 362182 - DNA, 579 bp, Homo sapiens
agtggttcccattaatattggggaaatcaacactataaaacagaaaaccatagacattatttaatatttggttttgggaggtatttttagtgacactgcttacagttgtacctaataattgctaaattagagacgtaaaagtaaaacaaaggcacattgtgtttgagtaggaaatctatagacatctagctggttttcccatccagtcacaaaattctaaatataatcatggtacctgcactcaaatttatgttaaataccaacctcaatgaaatcactcttctcattctctttgttatttatatgttgctttccttaagggaagaatacaaataccttgctaagaaccattctgtttggttgtaggctgcataaggggagtaaacacaaagtacatttgaccacaaaatgactttttaaaagtcagaactatggtagcatgaagccaaacgaggtaatmtagaataaaattttctatgcttctttcccttctttgctctctttctactctaataactgcgattcacacaggtaatgaagagtgtaattccttgatagaaacacagctccaagattaat

SEQ ID NO: 362183 - DNA, 465 bp, Homo sapiens
aagctatttagctaaattagatcacacttktcaatttttgttattcttgcaattgcttttgaggacttagccataaattaattgacaaatatgatatccagaagagtatttcctaggttttcttcaaggatttttatagtcagaagatgtactcttatgtaagaaaagcacaaacctttttttttgttttgttttgagacagagtctccatcaccaaggctatagtgcagtggtatgatcttggcttactgcaacctctgtctcctgggttcaagtgattctcctgcctcagcctcctgagtatctgagattacacatgcctgccaacacgccttgctaatttttgtatttttactagagacaggtttcatcatgttggccaggctggcctcaaactcctgacgtcaggtgattcacctgcctcggcctccccaaattttgggattacaagtgtgagccaccatg

SEQ ID NO: 362184 - DNA, 561 bp, Homo sapiens
caataaaacaaaaataccctgtccgaaggtcagcaacctcaaagatggaaggtggataagcccataaagatgagaaagaatctgtgtgagaacactgaaaactcaaaaagtcagcatgccttctttcctccaaatgactgcatcaactctccagcaagtgttcaraactgggctgaggctgagatgtctggaatgatacaagcagggttcaggatatgcgtaggaacaaagttcactgagtgaaagaagtatgttgtcatgcaatacaagtgagctaaaaatcattgtaaaacattgcaggagctaacagacaaaatagcaagtataaagaagacataatcgacctaatagagctgaaaagcacactacaagaattttcataatggagtcacatggtgattatgtgtgattgcattatgaaaattattgtagtgtgtgtgggcacccgatattgccctgtaagcaggtgtggccaggctggggtcctgggagaggcaagcagactaaggagggctgaggtcagaccagctccatctcatgtgcaagaccacccagcagaat

SEQ ID NO: 362185 - DNA, 561 bp, Homo sapiens
caataaaacaaaaataccctgtccgaaggtcagcaacctcaaagatggaaggtggataagcccataaagatgagaaagaatctgtgtgagaacactgaaaactcaaaaagtcagcatgccttctttcctccaaatgactgcatcaactctccagcaagtgttcagaactgggctgaggctgagatgtctggaatgatacaagcagggttcaggatatgcgtaggaacaaagttcactgagtgaaagaagtatgttgtcatgcaatacaagtgagctaaaaatcattgtaaaacattgcaggagctaacagacaaaatagcaagtataaagaagacataaycgacctaatagagctgaaaagcacactacaagaattttcataatggagtcacatggtgattatgtgtgattgcattatgaaaattattgtagtgtgtgtgggcacccgatattgccctgtaagcaggtgtggccaggctggggtcctgggagaggcaagcagactaaggagggctgaggtcagaccagctccatctcatgtgcaagaccacccagcagaat

SEQ ID NO: 362186 - DNA, 615 bp, Homo sapiens
catcaccagccactacaaaaatgcaccgaagtacacagaccagtgatgctaaaaaccaaccayatacacaagtctgtaaaataaccagctgacagcatgacgacaggatccaatccacacataccattactaaccttaattggaaatgggctaaatgctctgattgaaagacgcaggggggcaagatggataaagaaccaagacccatttgagtatgccgtctccaagaaacccatctcacatgcggtgccatacataggctcaaaataaaggaatggagaaaaatctttcaagcaaacggaaaacagaaaaaagcaggtgttgcactcccagtttcgacaaaacgtatataccaataaagataaaaaaaagacagagaaagacatacaaaggtggtcctgacctttgataaatctcattattgcttgataccaacctgggctatctttattgcccaaatcaacaggataatttgctgaggttgtggagcttctcccctgcagaggttccctgatctcccaaaatctggttgagaactaaggttgattttgctgtacaactccttttctgaagttttactcatttccaacaaagaaggcaagttttcctgcttcc

SEQ ID NO: 362187 - DNA, 615 bp, Homo sapiens
catcaccagccactacaaaaatgcaccgaagtacacagaccagtgatgctaaaaaccaaccatatacacaagtctgtaaaataaccagctgacagcatgacgacaggatccaatccacacataccattactaaccttaawtggaaatgggctaaatgctctgattgaaagacgcaggggggcaagatggataaagaaccaagacccatttgagtatgccgtctccaagaaacccatctcacatgcggtgccatacataggctcaaaataaaggaatggagaaaaatctttcaagcaaacggaaaacagaaaaaagcaggtgttgcactcccagtttcgacaaaacgtatataccaataaagataaaaaaaagacagagaaagacatacaaaggtggtcctgacctttgataaatctcattattgcttgataccaacctgggctatctttattgcccaaatcaacaggataatttgctgaggttgtggagcttctcccctgcagaggttccctgatctcccaaaatctggttgagaactaaggttgattttgctgtacaactccttttctgaagttttactcatttccaacaaagaaggcaagttttcctgcttcc

SEQ ID NO: 362188 - DNA, 615 bp, Homo sapiens
catcaccagccactacaaaaatgcaccgaagtacacagaccagtgatgctaaaaaccaaccatatacacaagtctgtaaaataaccagctgacagcatgacgacaggatccaatccacacataccattactaaccttaattggaaatgggctaaatgctctgattgaaagacgcagggggrcaagatggataaagaaccaagacccatttgagtatgccgtctccaagaaacccatctcacatgcggtgccatacataggctcaaaataaaggaatggagaaaaatctttcaagcaaacggaaaacagaaaaaagcaggtgttgcactcccagtttcgacaaaacgtatataccaataaagataaaaaaaagacagagaaagacatacaaaggtggtcctgacctttgataaatctcattattgcttgataccaacctgggctatctttattgcccaaatcaacaggataatttgctgaggttgtggagcttctcccctgcagaggttccctgatctcccaaaatctggttgagaactaaggttgattttgctgtacaactccttttctgaagttttactcatttccaacaaagaaggcaagttttcctgcttcc

SEQ ID NO: 362189 - DNA, 615 bp, Homo sapiens
catcaccagccactacaaaaatgcaccgaagtacacagaccagtgatgctaaaaaccaaccatatacacaagtctgtaaaataaccagctgacagcatgacgacaggatccaatccacacataccattactaaccttaattggaaatgggctaaatgctctgattgaaagacgcaggggggcaagatggataaagaaccaagacccatttgagtatgccgtctccaagaaacccatctcacatgcggtgccatacataggctcaaaataaaggaatggagaaaaatctttcaagcaaacggaaaacagaaaaaagcaggtgttgcactcccagtttcgacaaaacgtatataccaataaagataaaaaaaagacagagaaagacatacaaaggtggtcctgacctttgataaatctcattattgcttgataccaacctgggctatctttattgcccaaatcaacaggataatttgctgaggttgtggagmttctcccctgcagaggttccctgatctcccaaaatctggttgagaactaaggttgattttgctgtacaactccttttctgaagttttactcatttccaacaaagaaggcaagttttcctgcttcc

SEQ ID NO: 362190 - DNA, 538 bp, Homo sapiens
agcttgcttctgacagggaaggtgagtgtaagttttttccagcttctaagatggcagagaacgaccaccagcctgagccttatttccaggtaagtagctgaattagagttttgtcttaaaattyttccttaatgaataaaatttaagattactcaccagctgcttttaatttctgcttttaatttctccttaccattagaacactcagtaatcatatgaattgtgcatttgttgttttgcttaactctttgtttgtttatgcttggggttttattgttgttgtttcacttttctcccatctcttcctgacttggtcaaatccaaaggaatgttccaaattgtggggagcaaggcatctgaattggctaaaattcctatggctgcaaaaaaacaaacaaataaacaacaacaaaaagcattccagttagcagaaattattttttaaacctttttttttatgtaagtggtctcatctacataaaaaggtcacccttttgctagccaaggccaaactgaaggagtagctgtggtgacccaa

SEQ ID NO: 362191 - DNA, 538 bp, Homo sapiens
agcttgcttctgacagggaaggtgagtgtaagttttttccagcttctaagatggcagagaacgaccaccagcctgagccttatttccaggtaagtagctgaattagagttttgtcttaaaattcttccttaatgaataaaatttaagattactcaccagctgcttttaatttctgcttttaatttctccttaccattagaacactcagtaatcatatgaattgtgcatttgttgttttgcttaactctttgtttgtttatgcttggggttttattgttgttgtttcacttttctcccatctcttcctgacttggtcaaatccaaaggaatgttccaaattgtggggagcaaggcmtctgaattggctaaaattcctatggctgcaaaaaaacaaacaaataaacaacaacaaaaagcattccagttagcagaaattattttttaaacctttttttttatgtaagtggtctcatctacataaaaaggtcacccttttgctagccaaggccaaactgaaggagtagctgtggtgacccaa

SEQ ID NO: 362192 - DNA, 538 bp, Homo sapiens
agcttgcttctgacagggaaggtgagtgtaagttttttccagcttctaagatggcagagaacgaccaccagcctgagccttatttccaggtaagtagctgaattagagttttgtcttaaaattcttccttaatgaataaaatttaagattactcaccagctgcttttaatttctgcttttaatttctccttaccattagaacactcagtaatcatatgaattgtgcatttgttgttttgcttaactctttgtttgtttatgcttggggttttattgttgttgtttcacttttctcccatctcttcctgacttggtcaaatccaaaggaatgttccaaattgtggggagcaaggcatctgaattggctaaaaytcctatggctgcaaaaaaacaaacaaataaacaacaacaaaaagcattccagttagcagaaattattttttaaacctttttttttatgtaagtggtctcatctacataaaaaggtcacccttttgctagccaaggccaaactgaaggagtagctgtggtgacccaa

SEQ ID NO: 362193 - DNA, 603 bp, Homo sapiens
ttctgccctgttcactacagaaacatgagtttggttcctaagtctagttctttctgtttgatatttgtgttacttttaaaacgtcagcagtttgtcccagytatgatgtggtagtaaaagattcaaaagggttttctttacaagttctatgattaaaagcttaattaaaaacaaatttctttttttttaattatactttaagttctggggtacatgtgcagaacatgcaggtttgttacataggtatacacatgccatggtggcttgctgcatccatcaacccatgatctacattagttatttctcctaatgccatccctctcctagccccccacgctgacaggccctggtgtgtgatgttccccttcctgtgtccatgtgttcccattgttcaactccaagttatgagtgagaacatgtggtgtttggttttctgttcttgtgttagtttgctgagaatgatgctttccagcttcattcatgtcccagcaaaggacgtggattcatccttttttatggctacatagtattccatggtgtatatatgccacatttactttatccagtctatcattggtgggcatttgggttggttccaagtcg

SEQ ID NO: 362194 - DNA, 603 bp, Homo sapiens
ttctgccctgttcactacagaaacatgagtttggttcctaagtctagttctttctgtttgatatttgtgttacttttaaaacgtcagcagtttgtcccagttatgatgtggtagtaaaagattcaaaagggttttctttacaagttctatgattaaaagcttaattaaaaacaaatttctttttttttaattatactttaagttctggggtacatgtgcagaacatgcaggtttgttacataggtatacacatgccatggyggcttgctgcatccatcaacccatgatctacattagttatttctcctaatgccatccctctcctagccccccacgctgacaggccctggtgtgtgatgttccccttcctgtgtccatgtgttcccattgttcaactccaagttatgagtgagaacatgtggtgtttggttttctgttcttgtgttagtttgctgagaatgatgctttccagcttcattcatgtcccagcaaaggacgtggattcatccttttttatggctacatagtattccatggtgtatatatgccacatttactttatccagtctatcattggtgggcatttgggttggttccaagtcg

SEQ ID NO: 362195 - DNA, 229 bp, Homo sapiens
ttctgggtgtgggcacagtgccacatcttccatcactttctaatatatcccaccaccactgaagagacagcctggagagagtgcaagaggaaggctgagaaggatgagatagtgagtgctggcttctttctgaccctcagcacacccccasgtggtgaccatcaacctttaggggtgggagagcaagattgatggcttcaaatacttccccaagaagattgacacaggc

SEQ ID NO: 362196 - DNA, 229 bp, Homo sapiens
ttctgggtgtgggcacagtgccacatcttccatcactttctaatatatcccaccaccactgaagagacagcctggagagagtgcaagaggaaggctgagaaggatgagatagtgagtgctggcttctttctgaccctcagcacacccccacgtggtgaccatcaacctttaggggtgggagagcaagaytgatggcttcaaatacttccccaagaagattgacacaggc

SEQ ID NO: 362197 - DNA, 229 bp, Homo sapiens
ttctgggtgtgggcacagtgccacatcttccatcactttctaatatatcccaccaccactgaagagacagcctggagagagtgcaagaggaaggctgagaaggatgagatagtgagtgctggcttctttctgaccctcagcacacccccacgtggtgaccatcaacctttaggggtgggagagcaagattgatggcttcaaatrcttccccaagaagattgacacaggc

SEQ ID NO: 362198 - DNA, 229 bp, Homo sapiens
ttctgggtgtgggcacagtgccacatcttccatcactttctaatatatcccaccaccactgaagagacagcctggagagagtgcaagaggaaggctgagaaggatgagatagtgagtgctggcttctttctgaccctcagcacacccccacgtggtgaccatcaacctttaggggtgggagagcaagattgatggcttcaaatasttccccaagaagattgacacaggc

SEQ ID NO: 362199 - DNA, 531 bp, Homo sapiens
aggacctggacccagccacggacctgttagtgctgtctcagggacaccagaccaacatcctggacatcatcctcatacacaaggaagctcttaccacagtcatggagaacaggcaacatgtggcagaagggaagacacaggtacagaggctgatggcatcattatcacaggaacaggatttctttggccactttggctgaaattcaccacttccatccaattcactcaagcgagakacttgaaatcacagatggagcatttcttgcaacaggagatactattttttcaaaaagtcacctaaaatttgatagtgttggatgactagctattagattgtggactttttccagttcacgggtactttctacagcagaatgataacaatatcaaagagctagtgccagctatcggtggtagtacaaggatgactttgtgctcaactgaaacccagctgaatatagaattgtgtaggaaagtgttaatatggtgatagaatagaaacagtagcaaatgaactaaatcatactatga

SEQ ID NO: 362200 - DNA, 531 bp, Homo sapiens
aggacctggacccagccacggacctgttagtgctgtctcagggacaccagaccaacatcctggacatcatcctcatacacaaggaagctcttaccacagtcatggagaacaggcaacatgtggcagaagggaagacacaggtacagaggctgatggcatcattatcacaggaacaggatttctttggccactttggctgaaattcaccacttccatccaattcactcaagcgagagacttgaaatcacagatggagcatttcttgcaacaggagatactattttttcaaaaagtcacctaaaatttgatagtgttgratgactagctattagattgtggactttttccagttcacgggtactttctacagcagaatgataacaatatcaaagagctagtgccagctatcggtggtagtacaaggatgactttgtgctcaactgaaacccagctgaatatagaattgtgtaggaaagtgttaatatggtgatagaatagaaacagtagcaaatgaactaaatcatactatga

SEQ ID NO: 362201 - DNA, 531 bp, Homo sapiens
aggacctggacccagccacggacctgttagtgctgtctcagggacaccagaccaacatcctggacatcatcctcatacacaaggaagctcttaccacagtcatggagaacaggcaacatgtggcagaagggaagacacaggtacagaggctgatggcatcattatcacaggaacaggatttctttggccactttggctgaaattcaccacttccatccaattcactcaagcgagagacttgaaatcacagatggagcatttcttgcaacaggagatactattttttcaaaaagtcacctaaaatttgatagtgttggatgactagctattagattgtggactttttccagttcacgggtactttctacagcagaatgataacartatcaaagagctagtgccagctatcggtggtagtacaaggatgactttgtgctcaactgaaacccagctgaatatagaattgtgtaggaaagtgttaatatggtgatagaatagaaacagtagcaaatgaactaaatcatactatga

SEQ ID NO: 362202 - DNA, 531 bp, Homo sapiens
aggacctggacccagccacggacctgttagtgctgtctcagggacaccagaccaacatcctggacatcatcctcatacacaaggaagctcttaccacagtcatggagaacaggcaacatgtggcagaagggaagacacaggtacagaggctgatggcatcattatcacaggaacaggatttctttggccactttggctgaaattcaccacttccatccaattcactcaagcgagagacttgaaatcacagatggagcatttcttgcaacaggagatactattttttcaaaaagtcacctaaaatttgatagtgttggatgactagctattagattgtggactttttccagttcacgggtactttctacagcagaatgataacaatatcaaagagctrgtgccagctatcggtggtagtacaaggatgactttgtgctcaactgaaacccagctgaatatagaattgtgtaggaaagtgttaatatggtgatagaatagaaacagtagcaaatgaactaaatcatactatga

SEQ ID NO: 362203 - DNA, 563 bp, Homo sapiens
ggtctgaatgcttatccctcatataggattccagaacacttctgctgtggtctgaatgtttgctcctcacataggattccagaatactcctgccgtggtctgaatgtttgtccctcacataggattccagaacattcatgctggggtctcartgtttcccttaacataggatttcagaacactgctcttggggtctgaatgtttgtcactcacataggattacagaacactgttgctggagtctgaatgtttgtcagtcacatagaattccagaacactgctacaagggtgtgaatatttctccctcacctagtattccagaacactgttgcaagggtctgaatgttggtccgtcatataggattccagaacactgatgctgtggtctgaatgtttgtccctcacatagaattccggaacactgctacaagggtctgaatgtttgtccttcacataccattccagaacactgctgccgtggtctgaatgtatgtccctcacataggattccagaacactgctactaggttctgaatgtttttcccacacctaggattccagaa

SEQ ID NO: 362204 - DNA, 563 bp, Homo sapiens
ggtctgaatgcttatccctcatataggattccagaacacttctgctgtggtctgaatgtttgctcctcacataggattccagaatactcctgccgtggtctgaatgtttgtccctcacataggattccagaacattcatgctggggtctcaatgtttcccttaacataggatttcagaacactgctcttggggtctgaatgtttgtcrctcacataggattacagaacactgttgctggagtctgaatgtttgtcagtcacatagaattccagaacactgctacaagggtgtgaatatttctccctcacctagtattccagaacactgttgcaagggtctgaatgttggtccgtcatataggattccagaacactgatgctgtggtctgaatgtttgtccctcacatagaattccggaacactgctacaagggtctgaatgtttgtccttcacataccattccagaacactgctgccgtggtctgaatgtatgtccctcacataggattccagaacactgctactaggttctgaatgtttttcccacacctaggattccagaa

SEQ ID NO: 362205 - DNA, 563 bp, Homo sapiens
ggtctgaatgcttatccctcatataggattccagaacacttctgctgtggtctgaatgtttgctcctcacataggattccagaatactcctgccgtggtctgaatgtttgtccctcacataggattccagaacattcatgctggggtctcaatgtttcccttaacataggatttcagaacactgctcttggggtctgaatgtttgtcactcacataggattacagaacactgytgctggagtctgaatgtttgtcagtcacatagaattccagaacactgctacaagggtgtgaatatttctccctcacctagtattccagaacactgttgcaagggtctgaatgttggtccgtcatataggattccagaacactgatgctgtggtctgaatgtttgtccctcacatagaattccggaacactgctacaagggtctgaatgtttgtccttcacataccattccagaacactgctgccgtggtctgaatgtatgtccctcacataggattccagaacactgctactaggttctgaatgtttttcccacacctaggattccagaa

SEQ ID NO: 362206 - DNA, 563 bp, Homo sapiens
ggtctgaatgcttatccctcatataggattccagaacacttctgctgtggtctgaatgtttgctcctcacataggattccagaatactcctgccgtggtctgaatgtttgtccctcacataggattccagaacattcatgctggggtctcaatgtttcccttaacataggatttcagaacactgctcttggggtctgaatgtttgtcactcacataggattacagaacactgttgctggagtctgaatgtttgtcagtcacakagaattccagaacactgctacaagggtgtgaatatttctccctcacctagtattccagaacactgttgcaagggtctgaatgttggtccgtcatataggattccagaacactgatgctgtggtctgaatgtttgtccctcacatagaattccggaacactgctacaagggtctgaatgtttgtccttcacataccattccagaacactgctgccgtggtctgaatgtatgtccctcacataggattccagaacactgctactaggttctgaatgtttttcccacacctaggattccagaa

SEQ ID NO: 362207 - DNA, 576 bp, Homo sapiens
atgtcagttcaggggatagaggacactgactctgggccctgttgacccaagcagactcccatggtggtgggttgtgtcaccccacaatgtcactgttgctgagtccccatcgcctctgtgttgtggagcagttagagacacacagcagtgtctgtgagtagctctgcgtgaaggaccattttctagatgagaggcacatctcaacacagctcactgatcagattcaggtgagtgggacctgctcttttctcttcctcctggcttgggaaaagtcactatcaggtgggtggttttggcctctgggcagctactgagggtaatccctgaacactcaccagctgcctgttatgtgctgacagtcatctcattcatcctcgcagcaattccattytgcatcttttctgatcacctccgtgaccacacaggacaaccccatcagggcccctgtcaccaggcccagtctagctccatgataaccaagacagaggtccagagacaatcgtcctacattgtgcctgcatctgaccccccttggtaggtagtgaccagcacaacatggaagaagccagggcagca

SEQ ID NO: 362208 - DNA, 576 bp, Homo sapiens
atgtcagttcaggggatagaggacactgactctgggccctgttgacccaagcagactcccatggtggtgggttgtgtcaccccacaatgtcactgttgctgagtccccatcgcctctgtgttgtggagcagttagagacacacagcagtgtctgtgagtagctctgcgtgaaggaccattttctagatgagaggcacatctcaacacagctcactgatcagattcaggtgagtgggacctgctcttttctcttcctcctggcttgggaaaagtcactatcaggtgggtggttttggcctctgggcagctactgagggtaatccctgaacactcaccagctgcctgttatgtgctgacagtcatctcattcatcctcgcagcaattccattttgcatcttttctgatcacctccgtgaccacacaggacaaccccatcagggcccctgtcaccaggcccagtctagctccatgataaccaagacasaggtccagagacaatcgtcctacattgtgcctgcatctgaccccccttggtaggtagtgaccagcacaacatggaagaagccagggcagca

SEQ ID NO: 362209 - DNA, 476 bp, Homo sapiens
ggtggctgctccactggctcctggcacacccttgcagaggtgggtggttgctctttgagccagcttggctttgcctggcatgcacaggcctcagtgcaacaaatgtgctgcaaatggagccacatagaggaaatgagcagcaggctcagaactggggtgtgtgccgcctttggggctccagtccaagcatcggggcttctacagcactgtgggcttctcgggtgccaagaggcagaccayaggccatcttgaggaggactctggtaagagcttccttgtgtatgtggatgatgtccagaatgttggcctggtgtccctgagacagcactaacaggtccatgactgggtccagatcctgcctgggttgatgggcaaagagctcactgacagtgtggaaggcatctatggtgaagtggatctatgttcaagtgcagaaagggcccaatcttgtagatgaaccacacagccagcttctg

SEQ ID NO: 362210 - DNA, 476 bp, Homo sapiens
ggtggctgctccactggctcctggcacacccttgcagaggtgggtggttgctctttgagccagcttggctttgcctggcatgcacaggcctcagtgcaacaaatgtgctgcaaatggagccacatagaggaaatgagcagcaggctcagaactggggtgtgtgccgcctttggggctccagtccaagcatcggggcttctacagcactgtgggcttctcgggtgccaagaggcagaccacaggccatcttgaggaggactctggtaagagcttccttgtgtatgtggatgatgtccagaatgttggyctggtgtccctgagacagcactaacaggtccatgactgggtccagatcctgcctgggttgatgggcaaagagctcactgacagtgtggaaggcatctatggtgaagtggatctatgttcaagtgcagaaagggcccaatcttgtagatgaaccacacagccagcttctg

SEQ ID NO: 362211 - DNA, 476 bp, Homo sapiens
ggtggctgctccactggctcctggcacacccttgcagaggtgggtggttgctctttgagccagcttggctttgcctggcatgcacaggcctcagtgcaacaaatgtgctgcaaatggagccacatagaggaaatgagcagcaggctcagaactggggtgtgtgccgcctttggggctccagtccaagcatcggggcttctacagcactgtgggcttctcgggtgccaagaggcagaccacaggccatcttgaggaggactctggtaagagcttccttgtgtatgtggatgatgtccagaatgttggcctggtgtccctgagacagcactaacargtccatgactgggtccagatcctgcctgggttgatgggcaaagagctcactgacagtgtggaaggcatctatggtgaagtggatctatgttcaagtgcagaaagggcccaatcttgtagatgaaccacacagccagcttctg

SEQ ID NO: 362212 - DNA, 600 bp, Homo sapiens
cagcaggctcagaactggggtgtgtgccgcctttggggctccagtccaagcatcggggcttctacagcactgtgggcttctcgggtgccaagaggcagaccacaggccatcttgaggaggactctggtaagagcttccttgtgtatgtggatgatgtccagaatgttggcctggtgtccctgagacagcactaacaggtccatgactgggtccagatcctgcctgggttgatgggcaaagagctcactgacagtgtggaaggcatctatggtgaagtggatctatgttcaagtgcagaaagggcccartcttgtagatgaaccacacagccagcttctggatgcaggtgcagtgccacattttttgtcacttcctgatgtgccccaccagcactgaagagatagcctggagacagggcaagaggaaggctgagaaagatgagatggtgagtgccagattcttcctggccctgagcccacccccagtgtgacactcaacttttaggagtgggagagcaagactgatggcttcaagtgcttcaccaagaagatggacaacagggcactcagctcaacttcacagccaatgagtggtggcagg

SEQ ID NO: 362213 - DNA, 600 bp, Homo sapiens
cagcaggctcagaactggggtgtgtgccgcctttggggctccagtccaagcatcggggcttctacagcactgtgggcttctcgggtgccaagaggcagaccacaggccatcttgaggaggactctggtaagagcttccttgtgtatgtggatgatgtccagaatgttggcctggtgtccctgagacagcactaacaggtccatgactgggtccagatcctgcctgggttgatgggcaaagagctcactgacagtgtggaaggcatctatggtgaagtggatctatgttcaagtgcagaaagggcccaatcttgtagatgaaccacacagccagcttctggatgcaggtgcagtgccacattttttgtcacttcctgatgtgccccaccagcactgaagagatagcctggagacagggcaagaggaaggctgagaargatgagatggtgagtgccagattcttcctggccctgagcccacccccagtgtgacactcaacttttaggagtgggagagcaagactgatggcttcaagtgcttcaccaagaagatggacaacagggcactcagctcaacttcacagccaatgagtggtggcagg

SEQ ID NO: 362214 - DNA, 600 bp, Homo sapiens
cagcaggctcagaactggggtgtgtgccgcctttggggctccagtccaagcatcggggcttctacagcactgtgggcttctcgggtgccaagaggcagaccacaggccatcttgaggaggactctggtaagagcttccttgtgtatgtggatgatgtccagaatgttggcctggtgtccctgagacagcactaacaggtccatgactgggtccagatcctgcctgggttgatgggcaaagagctcactgacagtgtggaaggcatctatggtgaagtggatctatgttcaagtgcagaaagggcccaatcttgtagatgaaccacacagccagcttctggatgcaggtgcagtgccacattttttgtcacttcctgatgtgccccaccagcactgaagagatagcctggagacagggcaagaggaaggctgagaaagatgagatggtgagtgccagattcttcctggccctgagcccacccccagtgtgacactsaacttttaggagtgggagagcaagactgatggcttcaagtgcttcaccaagaagatggacaacagggcactcagctcaacttcacagccaatgagtggtggcagg

SEQ ID NO: 362215 - DNA, 502 bp, Homo sapiens
aagatggacaacagggcactcagctcaacttcacagccaatgagtggtggcaggctttgagaaagagcatcagaagcctgacagttcttcttcagcctcagccaggccttggagctggaccaggccatccacttcagtatagatgccttccactctgtcagtgagctctttgccagtcagtccaggaaggacctggacccagccatggacctgttagtgctgtctcagggacaccagaccaacatcctggacatcatccacatacacaaggaagctcttaccaaagtcatggagagcaggcaacatgtggccgaagggaagacagaggtgcagaggctgatgaygtcagaatcacaggaacaggatttctttggccactttggctgaaattcaccacttccatccaattccagtgagagacatggactcacagatgcagcatttcttgcaacaagagatactactttttcaaaaagtcacccaggaattgttagtgttgaac

SEQ ID NO: 362216 - DNA, 502 bp, Homo sapiens
aagatggacaacagggcactcagctcaacttcacagccaatgagtggtggcaggctttgagaaagagcatcagaagcctgacagttcttcttcagcctcagccaggccttggagctggaccaggccatccacttcagtatagatgccttccactctgtcagtgagctctttgccagtcagtccaggaaggacctggacccagccatggacctgttagtgctgtctcagggacaccagaccaacatcctggacatcatccacatacacaaggaagctcttaccaaagtcatggagagcaggcaacatgtggccgaagggaagacagaggtgcagaggctgatgatgtcagaatcacaggaacaggatttctttggccactttggctgaaattcaccacttccatccaattccagtgagagacatggactcacagatgcagsatttcttgcaacaagagatactactttttcaaaaagtcacccaggaattgttagtgttgaac

SEQ ID NO: 362217 - DNA, 470 bp, Homo sapiens
ggctgatgatgtcagaatcacaggaacaggatttctttggccactttggctgaaattcaccacttccatccaattccagtgagagacatggactcacagatgcagcatttcttgcaacaagagatactactttttcaaaaagtcacccaggaattgwtagtgttgaacgactcgatactcgatcgtggacggtttccagttcaaggatactttctacagcagaataataacactagcaaagagctagtacaaggatggttttgtgctcaactgaaatccagctgaatacagaattgtataggaaacagttaatatggtgatagaatagaaacagtagcaatcgtgaactaaatcatactatgaaagcctaaactactgctgtaacttttggaaaaatgataccactttattgctttttgaagtatgaatattttagtgtatatgctctagacttcaaactctataaagag

SEQ ID NO: 362218 - DNA, 470 bp, Homo sapiens
ggctgatgatgtcagaatcacaggaacaggatttctttggccactttggctgaaattcaccacttccatccaattccagtgagagacatggactcacagatgcagcatttcttgcaacaagagatactactttttcaaaaagtcacccaggaattgttagtgttgaaygactcgatactcgatcgtggacggtttccagttcaaggatactttctacagcagaataataacactagcaaagagctagtacaaggatggttttgtgctcaactgaaatccagctgaatacagaattgtataggaaacagttaatatggtgatagaatagaaacagtagcaatcgtgaactaaatcatactatgaaagcctaaactactgctgtaacttttggaaaaatgataccactttattgctttttgaagtatgaatattttagtgtatatgctctagacttcaaactctataaagag

SEQ ID NO: 362219 - DNA, 470 bp, Homo sapiens
ggctgatgatgtcagaatcacaggaacaggatttctttggccactttggctgaaattcaccacttccatccaattccagtgagagacatggactcacagatgcagcatttcttgcaacaagagatactactttttcaaaaagtcacccaggaattgttagtgttgaacgactcgatactcgatcgtggacggtttccagttcaaggatactttctacagcagaataataacactagcaaagagctagtacaaggatggttttgtgctcaactgaaatccagytgaatacagaattgtataggaaacagttaatatggtgatagaatagaaacagtagcaatcgtgaactaaatcatactatgaaagcctaaactactgctgtaacttttggaaaaatgataccactttattgctttttgaagtatgaatattttagtgtatatgctctagacttcaaactctataaagag

SEQ ID NO: 362220 - DNA, 470 bp, Homo sapiens
ggctgatgatgtcagaatcacaggaacaggatttctttggccactttggctgaaattcaccacttccatccaattccagtgagagacatggactcacagatgcagcatttcttgcaacaagagatactactttttcaaaaagtcacccaggaattgttagtgttgaacgactcgatactcgatcgtggacggtttccagttcaaggatactttctacagcagaataataacactagcaaagagctagtacaaggatggttttgtgctcaactgaaatccagctgaatacagaattgtataggaaacagttaatatggtgatagaatagaaacagtagcaatcgtgaactaaatcatactatgaawgcctaaactactgctgtaacttttggaaaaatgataccactttattgctttttgaagtatgaatattttagtgtatatgctctagacttcaaactctataaagag

SEQ ID NO: 362221 - DNA, 430 bp, Homo sapiens
cgtggacggtttccagttcaaggatactttctacagcagaataataacactagcaaagagctagtacaaggatggttttgtgctcaactgaaatccagctgaatacagaattgtataggaaacagttaatatggtgatagaatagaaacagtagcaatcgtgaactaaatcatactatgaaagcctaaactactgctgtaacttttggaaaaatgataccactttattgcttttygaagtatgaatattttagtgtatatgctctagacttcaaactctataaagagtctcaaagaagttggctggataaagcctgctgtggatgtctttatattcaaagattgatgatgcaatttgaatatgtgtccccacggaatctcatgttgaattatatttcctaatgtggaaggtggatcctggtataaggtga

SEQ ID NO: 362222 - DNA, 430 bp, Homo sapiens
cgtggacggtttccagttcaaggatactttctacagcagaataataacactagcaaagagctagtacaaggatggttttgtgctcaactgaaatccagctgaatacagaattgtataggaaacagttaatatggtgatagaatagaaacagtagcaatcgtgaactaaatcatactatgaaagcctaaactactgctgtaacttttggaaaaatgataccactttattgctttttgaagtatgaatattttagtgtatatgctctagacttmaaactctataaagagtctcaaagaagttggctggataaagcctgctgtggatgtctttatattcaaagattgatgatgcaatttgaatatgtgtccccacggaatctcatgttgaattatatttcctaatgtggaaggtggatcctggtataaggtga

SEQ ID NO: 362223 - DNA, 430 bp, Homo sapiens
cgtggacggtttccagttcaaggatactttctacagcagaataataacactagcaaagagctagtacaaggatggttttgtgctcaactgaaatccagctgaatacagaattgtataggaaacagttaatatggtgatagaatagaaacagtagcaatcgtgaactaaatcatactatgaaagcctaaactactgctgtaacttttggaaaaatgataccactttattgctttttgaagtatgaatattttagtgtatatgctctagacttcaaactctataaagagtctcaaagaagttggctggataaagcctgctgtggatgtctttatattcaaagattgatgatgcaatttgaatatgtgtccccacsgaatctcatgttgaattatatttcctaatgtggaaggtggatcctggtataaggtga

SEQ ID NO: 362224 - DNA, 549 bp, Homo sapiens
ggcaaaagagactgtagccttgacccagatgagactttggactttgtaactttgagttaatsctgaaatgagttaagactttgggagactgctggcaaggcatgtttgtattttgcaatgtgaggacatgagattcatcgggtcaaggacagaataatacggtttttgtctatgtccctaccaaaactcatgtggaattatattttggaatgttacaggcaaggtctaggtggaaaaagatttagtcataaaatggtgcaggtagatacttcacgaatgataaagaaccatcaccttgatgctatcctcctgataatgagtgagttcccatgagatctggttgtttaacagatctcatcctcctgctcctgctttaggagacatctcattgtcccttggctttctgatataatgaggaggcttcctgattcctcccagaaacagaagacactatacttccttcacagcttgcagaaccatgagtcaattacacctcttttatttacaataatacagaaaagtagaactgcagagaggagctgtgaaatg

SEQ ID NO: 362225 - DNA, 549 bp, Homo sapiens
ggcaaaagagactgtagccttgacccagatgagactttggactttgtaactttgagttaatgctgaaatgagttaagactttgggagactgctggcaaggcatgtttgtattttgcaatgtgaggacatgagattcatcgggtcaaggacagaataatacggtttttgtctatgtccctaccaaaactcatgtggaattatattttgkaatgttacaggcaaggtctaggtggaaaaagatttagtcataaaatggtgcaggtagatacttcacgaatgataaagaaccatcaccttgatgctatcctcctgataatgagtgagttcccatgagatctggttgtttaacagatctcatcctcctgctcctgctttaggagacatctcattgtcccttggctttctgatataatgaggaggcttcctgattcctcccagaaacagaagacactatacttccttcacagcttgcagaaccatgagtcaattacacctcttttatttacaataatacagaaaagtagaactgcagagaggagctgtgaaatg

SEQ ID NO: 362226 - DNA, 549 bp, Homo sapiens
ggcaaaagagactgtagccttgacccagatgagactttggactttgtaactttgagttaatgctgaaatgagttaagactttgggagactgctggcaaggcatgtttgtattttgcaatgtgaggacatgagattcatcgggtcaaggacagaataatacggtttttgtctatgtccctaccaaaactcatgtggaattatattttggaatgttacaggcaaggtctaggtggaaaaagatttagtcataaaatggtgcaggtagatacttcacgaatgataaagaaccatcaccttgatgctatcctcctgataatgagtgagttyccatgagatctggttgtttaacagatctcatcctcctgctcctgctttaggagacatctcattgtcccttggctttctgatataatgaggaggcttcctgattcctcccagaaacagaagacactatacttccttcacagcttgcagaaccatgagtcaattacacctcttttatttacaataatacagaaaagtagaactgcagagaggagctgtgaaatg

SEQ ID NO: 362227 - DNA, 549 bp, Homo sapiens
ggcaaaagagactgtagccttgacccagatgagactttggactttgtaactttgagttaatgctgaaatgagttaagactttgggagactgctggcaaggcatgtttgtattttgcaatgtgaggacatgagattcatcgggtcaaggacagaataatacggtttttgtctatgtccctaccaaaactcatgtggaattatattttggaatgttacaggcaaggtctaggtggaaaaagatttagtcataaaatggtgcaggtagatacttcacgaatgataaagaaccatcaccttgatgctatcctcctgataatgagtgagttcccatgagatctggttgtttaacagatctcatcctcctgctcctgctttaggagacatctcattgtcccttggctttctgatataatgaggaggcttcctgattcctcmcagaaacagaagacactatacttccttcacagcttgcagaaccatgagtcaattacacctcttttatttacaataatacagaaaagtagaactgcagagaggagctgtgaaatg

SEQ ID NO: 362228 - DNA, 331 bp, Homo sapiens
atataatgaggaggcttcctgattcctcccagaaacagaagacactatacttccttcacagcttgcagaaccatgagtcaattacacctcttttatttacaataatacagaaaagtagaactgcagagaggagctgtgaaatgycttcaaggcctttttccctttgttttggctattagcacagggattctttatatgcaaatttctgaaatcttcttgaatgtttccccttaaatgggatttttgttattgctacatagacaacctgctatacagatttctgaaaaagtagaagcaggctcagtagtgggtagcaaacaaagattggaag

SEQ ID NO: 362229 - DNA, 331 bp, Homo sapiens
atataatgaggaggcttcctgattcctcccagaaacagaagacactatacttccttcacagcttgcagaaccatgagtcaattacacctcttttatttacaataatacagaaaagtagaactgcagagaggagctgtgaaatgccttcaaggcctttttccctttgttttggctattagcacagggattctttatatgcaaatttctgaaatcttcttgaatgtttccccttaaatgggatttttgttattgctacatagacaacctgctatacagatttytgaaaaagtagaagcaggctcagtagtgggtagcaaacaaagattggaag

SEQ ID NO: 362230 - DNA, 421 bp, Homo sapiens
actatgaagtggagccatgaaatgccttcaaggccctttcccctttgtcttggcaaccagcactcagcttcttttcatgcaaatatctgaatccttcatgaactttccccctgaaaatggacttttctgttttaccacattgccaggctgtgataaagatagctgacaatgtagaaccaggttcagaagtgggtaaaagacagaggtcagaagagttggraaaacttagaagacagcaagatgaggaaaatattggaccactatagagaattgttaaatacttgtgataggaaggctgacaaaagtgtaaacactgaagtccagacctaaaagttctcagatgaaaatgaggaatttcctatgaacaagagacaagattacatttgattggccttagcaaagaagctggctgcatggggac

SEQ ID NO: 362231 - DNA, 452 bp, Homo sapiens
gtgctcaccctttcctgccctctgcctcgcttaatctggctaacctcactctctaagtctcagctcatggrtgatctttaggaaagccatccctgacagcttctattttccttccttattccccagtgcctaacacttagcaggaactcaataagtaattatttagcaaaattaagactgtttatacaaagatgattcaaaagattgtcctctacagtctagcagcaaagggggtcaacatgtaaagacatgatgtgcaggtcaggtggtaaagtgacactagaaaaattgacaaggtactgagggaccccaaggaagcagacacctgtgtgtgtgcagaaagatagctagaatcaaggaagatctcacatagcattctgagcctttgttttcctctttttggagacaagttcttactctatcacccaggattggagtgcaatggcatgatt

SEQ ID NO: 362232 - DNA, 393 bp, Homo sapiens
gccatccctgacagcttctattttccttccttattccccagtgcctaacacttagcaggaactcaataagtaattatttagcaaaattaagactgtttatacaaagatgattcaaaagattgtcctctacagtctagcagcaaagggggtcaacatgtaaagacatgatgtgcaggtcaggtggtaaagtgacactagaaaaattgacaaggtactragggaccccaaggaagcagacacctgtgtgtgtgcagaaagatagctagaatcaaggaagatctcacatagcattctgagcctttgttttcctctttttggagacaagttcttactctatcacccaggattggagtgcaatggcatgattgagactcactgaaacctcagactcct

SEQ ID NO: 362233 - DNA, 393 bp, Homo sapiens
gccatccctgacagcttctattttccttccttattccccagtgcctaacacttagcaggaactcaataagtaattatttagcaaaattaagactgtttatacaaagatgattcaaaagattgtcctctacagtctagcagcaaagggggtcaacatgtaaagacatgatgtgcaggtcaggtggtaaagtgacactagaaaaattgacaaggtactgagggaccccaasgaagcagacacctgtgtgtgtgcagaaagatagctagaatcaaggaagatctcacatagcattctgagcctttgttttcctctttttggagacaagttcttactctatcacccaggattggagtgcaatggcatgattgagactcactgaaacctcagactcct

SEQ ID NO: 362234 - DNA, 452 bp, Homo sapiens
gtgctcaccctttcctgccctctgcctcgcttaatctggctaacctcactctctaagtctcagctcatggatgatctttaggaaagccatccctgacagcttctattttccttccttattccccagtgcctaacacttagcaggaactcaataagtaattatttagcaaaattaagactgtttatacaaagatgattcaaaagattgtcctctacagtctagcagcaaagggggtcaacatgtaaagacatgatgtgcaggtcaggtggtaaagtgacactagaaaaattgacaaggtactgagggaccccaaggaagcagacacctgtgtgtgtgsagaaagatagctagaatcaaggaagatctcacatagcattctgagcctttgttttcctctttttggagacaagttcttactctatcacccaggattggagtgcaatggcatgatt

SEQ ID NO: 362235 - DNA, 393 bp, Homo sapiens
gccatccctgacagcttctattttccttccttattccccagtgcctaacacttagcaggaactcaataagtaattatttagcaaaattaagactgtttatacaaagatgattcaaaagattgtcctctacagtctagcagcaaagggggtcaacatgtaaagacatgatgtgcaggtcaggtggtaaagtgacactagaaaaattgacaaggtactgagggaccccaaggaagcagacacctgtgtgtgtgcagaaagatagctagaatcaaggaagatytcacatagcattctgagcctttgttttcctctttttggagacaagttcttactctatcacccaggattggagtgcaatggcatgattgagactcactgaaacctcagactcct

SEQ ID NO: 362236 - DNA, 563 bp, Homo sapiens
ttggccttccaaagtgctgggattacagatgtgagctattatgcccagcctactttctgagtcttaaaagatggaaataaatttttcagaatagcaggggaaaacatttgtgatgtaaaaaatggggtgcacactaattgaggtataaagaacaataattttgcaaattattagtaactgccaactcaattagtgtcttgttaaaaagatactgttatgaagtatagtaaagcattacattgtatattttgaatgtatttcaaatttctgttttgtttcyaacagttttgttgacttatgttgggtggaacaatttgtgagtgaccctgagattttgcatggcttgaatctggtgatatctggtgtctccccaagtggtttgttgaagttctggataattagaactatttcttacagaagtaaatatttcagtaaacattgtttcattcaaactctcaaaatataaaatacaaagaaatgttattctctatttatttttataaagattatagtctttatctaactcttcttagttcatttgaactaaatcaatgaatttgtca

SEQ ID NO: 362237 - DNA, 530 bp, Homo sapiens
aacagttttgttgacttatgttgggtggaacaatttgtgagtgwccctgagattttgcatggcttgaatctggtgatatctggtgtctccccaagtggtttgttgaagttctggataattagaactatttcttacagaagtaaatatttcagtaaacattgtttcattcaaactctcaaaatataaaatacaaagaaatgttattctctatttatttttataaagattatagtctttatctaactcttcttagttcatttgaactaaatcaatgaatttgtcaacagaacaaaccttaccagtggctttagaggaagagcaagaaaggtgtgaaagaagtgaaaagaagcaatcacaggtatatgaaaatttaagttcttgtttaatattaggttttttttttttgctttactaacaaagcatagtccaaatgacatgacctttcagactatacctttagaatccaatagatcataattttatatgtaatttttaaaacatcataaccagttatgaaacttaagatattc

SEQ ID NO: 362238 - DNA, 373 bp, Homo sapiens
ttgaggtataaagaacaataattttgcaaattattagtaactgccaactcaattagtgtcttgttaaaaagatactgttatgaagtatagtaaagcattacattgtatattttgaatgtatttcaaatttctgttttgtttccaacagttttgttgacttatgttgggtggaacaatttgtgagtgaccctgwgattttgcatggcttgaatctggtgatatctggtgtctccccaagtggtttgttgaagttctggataattagaactatttcttacagaagtaaatatttcagtaaacattgtttcattcaaactctcaaaatataaaatacaaagaaatgttattctctatttatttttataaagattat

SEQ ID NO: 362239 - DNA, 373 bp, Homo sapiens
ttgaggtataaagaacaataattttgcaaattattagtaactgccaactcaattagtgtcttgttaaaaagatactgttatgaagtatagtaaagcattacattgtatattttgaatgtatttcaaatttctgttttgtttccaacagttttgttgacttatgttgggtggaacaatttgtgagtgaccctgagattttgcatggcttgaatctggtgatatctrgtgtctccccaagtggtttgttgaagttctggataattagaactatttcttacagaagtaaatatttcagtaaacattgtttcattcaaactctcaaaatataaaatacaaagaaatgttattctctatttatttttataaagattat

SEQ ID NO: 362240 - DNA, 563 bp, Homo sapiens
ttggccttccaaagtgctgggattacagatgtgagctattatgcccagcctactttctgagtcttaaaagatggaaataaatttttcagaatagcaggggaaaacatttgtgatgtaaaaaatggggtgcacactaattgaggtataaagaacaataattttgcaaattattagtaactgccaactcaattagtgtcttgttaaaaagatactgttatgaagtatagtaaagcattacattgtatattttgaatgtatttcaaatttctgttttgtttccaacagttttgttgacttatgttgggtggaacaatttgtgagtgaccctgagattttgcatggcttgaatctggtgatatctggtgtctccccaagtggtttgttgaagttytggataattagaactatttcttacagaagtaaatatttcagtaaacattgtttcattcaaactctcaaaatataaaatacaaagaaatgttattctctatttatttttataaagattatagtctttatctaactcttcttagttcatttgaactaaatcaatgaatttgtca

SEQ ID NO: 362241 - DNA, 563 bp, Homo sapiens
ttggccttccaaagtgctgggattacagatgtgagctattatgcccagcctactttctgagtcttaaaagatggaaataaatttttcagaatagcaggggaaaacatttgtgatgtaaaaaatggggtgcacactaattgaggtataaagaacaataattttgcaaattattagtaactgccaactcaattagtgtcttgttaaaaagatactgttatgaagtatagtaaagcattacattgtatattttgaatgtatttcaaatttctgttttgtttccaacagttttgttgacttatgttgggtggaacaatttgtgagtgaccctgagattttgcatggcttgaatctggtgatatctggtgtctccccaagtggtttgttgaagttctggataattagaastatttcttacagaagtaaatatttcagtaaacattgtttcattcaaactctcaaaatataaaatacaaagaaatgttattctctatttatttttataaagattatagtctttatctaactcttcttagttcatttgaactaaatcaatgaatttgtca

SEQ ID NO: 362242 - DNA, 461 bp, Homo sapiens
tacccttggaattgaggcaagaaattttcagaattatcttgctgttttatttatataaccttactcataatacacaaggtaacatgaagtattgggtcatattactgaggaatagaaattatgaacagtttaacaacaatggccactgagttaaactagtgttaaaggagtcatcattgccagtgcttcaaatgttgcagttttatattgctggtcaccagtgccgaggttaaagatttattctgttttrtggtcaccagttgacttctgtgtctgtgttcagggagtgaatggggtcataaaagtcaatgcagttgcctattaagagaatcctaccttgcagaatgggacctttggtgtcagggtgtgaacaataactttatttcaacataaatacatagtaaacattactaaaatttaaaaaatccaaaccctatcactaccggaacttaaaatatatt

SEQ ID NO: 362243 - DNA, 461 bp, Homo sapiens
tacccttggaattgaggcaagaaattttcagaattatcttgctgttttatttatataaccttactcataatacacaaggtaacatgaagtattgggtcatattactgaggaatagaaattatgaacagtttaacaacaatggccactgagttaaactagtgttaaaggagtcatcattgccagtgcttcaaatgttgcagttttatattgctggtcaccagtgccgaggttaaagatttattctgttttgtggtcaccagttgacttctgtgtctgtgttcagggagtgaatggggtcataaaagtcaatgcagttgcctattaagagaatcctaccttgcagaatgggacctttggtgtcagggtgtgaacaataactttatttcaacataaatacatagtaarcattactaaaatttaaaaaatccaaaccctatcactaccggaacttaaaatatatt

SEQ ID NO: 362244 - DNA, 461 bp, Homo sapiens
tacccttggaattgaggcaagaaattttcagaattatcttgctgttttatttatataaccttactcataatacacaaggtaacatgaagtattgggtcatattactgaggaatagaaattatgaacagtttaacaacaatggccactgagttaaactagtgttaaaggagtcatcattgccagtgcttcaaatgttgcagttttatattgctggtcaccagtgccgaggttaaagatttattctgttttgtggtcaccagttgacttctgtgtctgtgttcagggagtgaatggggtcataaaagtcaatgcagttgcctattaagagaatcctaccttgcagaatgggacctttggtgtcagggtgtgaacaataactttatttcaacataaatacatagtaaacattacyaaaatttaaaaaatccaaaccctatcactaccggaacttaaaatatatt

SEQ ID NO: 362245 - DNA, 565 bp, Homo sapiens
ggtcataaaagtcaatgcagttgcctattaagagaatcctaccttgcagaatgggacctttggtgtcagggtgtgaacaataactttatttcaacataaatacatagtaaacattactraaatttaaaaaatccaaaccctatcactaccggaacttaaaatatattaaaagtggatataagcagaaattctatctagatacataacactatcatagtatatcatttgaattagaatttaaaattttgattctctttcttattggtgttcagtttagctcttaataatttagtgtttgcctagtgctctagttaatcttcagaaataaacatgcactgtaggggcttactctttctggtatgctgaggtaaagtctttgtaagagaggaagcttttataatactacctatcatctttgaattcatttctggtagattttacacaaatgcattaagtttagtccaaacagacactgagagttcagcttgctggttcatgtttctgtcctatgttaagccaaggcaaattatttttcactttttagtcacaatcccataatttaaga

SEQ ID NO: 362246 - DNA, 565 bp, Homo sapiens
ggtcataaaagtcaatgcagttgcctattaagagaatcctaccttgcagaatgggacctttggtgtcagggtgtgaacaataactttatttcaacataaatacatagtaaacattactaaaatttaaaaaatccaaaccctatcactacyggaacttaaaatatattaaaagtggatataagcagaaattctatctagatacataacactatcatagtatatcatttgaattagaatttaaaattttgattctctttcttattggtgttcagtttagctcttaataatttagtgtttgcctagtgctctagttaatcttcagaaataaacatgcactgtaggggcttactctttctggtatgctgaggtaaagtctttgtaagagaggaagcttttataatactacctatcatctttgaattcatttctggtagattttacacaaatgcattaagtttagtccaaacagacactgagagttcagcttgctggttcatgtttctgtcctatgttaagccaaggcaaattatttttcactttttagtcacaatcccataatttaaga

SEQ ID NO: 362247 - DNA, 565 bp, Homo sapiens
ggtcataaaagtcaatgcagttgcctattaagagaatcctaccttgcagaatgggacctttggtgtcagggtgtgaacaataactttatttcaacataaatacatagtaaacattactaaaatttaaaaaatccaaaccctatcactaccggaacttaaaatatattaaaagtggatataagcagaaattctatctagatacataacactatcatagtatatcatttgaattagaatttaaaattttrattctctttcttattggtgttcagtttagctcttaataatttagtgtttgcctagtgctctagttaatcttcagaaataaacatgcactgtaggggcttactctttctggtatgctgaggtaaagtctttgtaagagaggaagcttttataatactacctatcatctttgaattcatttctggtagattttacacaaatgcattaagtttagtccaaacagacactgagagttcagcttgctggttcatgtttctgtcctatgttaagccaaggcaaattatttttcactttttagtcacaatcccataatttaaga

SEQ ID NO: 362248 - DNA, 565 bp, Homo sapiens
ggtcataaaagtcaatgcagttgcctattaagagaatcctaccttgcagaatgggacctttggtgtcagggtgtgaacaataactttatttcaacataaatacatagtaaacattactaaaatttaaaaaatccaaaccctatcactaccggaacttaaaatatattaaaagtggatataagcagaaattctatctagatacataacactatcatagtatatcatttgaattagaatttaaaattttgmttctctttcttattggtgttcagtttagctcttaataatttagtgtttgcctagtgctctagttaatcttcagaaataaacatgcactgtaggggcttactctttctggtatgctgaggtaaagtctttgtaagagaggaagcttttataatactacctatcatctttgaattcatttctggtagattttacacaaatgcattaagtttagtccaaacagacactgagagttcagcttgctggttcatgtttctgtcctatgttaagccaaggcaaattatttttcactttttagtcacaatcccataatttaaga

SEQ ID NO: 362249 - DNA, 649 bp, Homo sapiens
gggcttactctttctggtatgctgaggtaaagtctttgtaagagaggaagcttttataatactacctatcatctttgaattcatttctggtagattttacacaaatgcattaagtttagtccaaacagacactgagagttcagcttgctggttcatgtttctgtcctatgttaagccaaggcaaattatttttcactttttagtyacaatcccataatttaagagtagcaacacatagattaagtttcacagttaaattttaactattttctaatattactttgtttatacttgattaaagctaattttaaaacatgcactctgacagaaaagacatctgagaaacaaaacaagcaaatttgttttccattttgcacctgccccccccccccaaaaaaaagtctcaagaaccagaactgggtaagaacagtgataaagggaatcaatctatatattcatgactttctttaaaattcattacaaacaagttcaagctgaatattggtaaaagttctgaaaactccaaaattactgcttgccctgaggaagagctcctacatggtaactctaaagagggatgaacaaaaaaggagtgccctctagtctgatgaatcatgtccctgattgtgaggagaaaaatgtatctgga

SEQ ID NO: 362250 - DNA, 649 bp, Homo sapiens
gggcttactctttctggtatgctgaggtaaagtctttgtaagagaggaagcttttataatactacctatcatctttgaattcatttctggtagattttacacaaatgcattaagtttagtccaaacagacactgagagttcagcttgctggttcatgtttctgtcctatgttaagccaaggcaaattatttttcactttttagtcacaatcccataatttaagagtagcaacacatagattaagtttcacagttaaattttaaytattttctaatattactttgtttatacttgattaaagctaattttaaaacatgcactctgacagaaaagacatctgagaaacaaaacaagcaaatttgttttccattttgcacctgccccccccccccaaaaaaaagtctcaagaaccagaactgggtaagaacagtgataaagggaatcaatctatatattcatgactttctttaaaattcattacaaacaagttcaagctgaatattggtaaaagttctgaaaactccaaaattactgcttgccctgaggaagagctcctacatggtaactctaaagagggatgaacaaaaaaggagtgccctctagtctgatgaatcatgtccctgattgtgaggagaaaaatgtatctgga

SEQ ID NO: 362251 - DNA, 649 bp, Homo sapiens
gggcttactctttctggtatgctgaggtaaagtctttgtaagagaggaagcttttataatactacctatcatctttgaattcatttctggtagattttacacaaatgcattaagtttagtccaaacagacactgagagttcagcttgctggttcatgtttctgtcctatgttaagccaaggcaaattatttttcactttttagtcacaatcccataatttaagagtagcaacacatagattaagtttcacagttaaattttaactattttctaatattwctttgtttatacttgattaaagctaattttaaaacatgcactctgacagaaaagacatctgagaaacaaaacaagcaaatttgttttccattttgcacctgccccccccccccaaaaaaaagtctcaagaaccagaactgggtaagaacagtgataaagggaatcaatctatatattcatgactttctttaaaattcattacaaacaagttcaagctgaatattggtaaaagttctgaaaactccaaaattactgcttgccctgaggaagagctcctacatggtaactctaaagagggatgaacaaaaaaggagtgccctctagtctgatgaatcatgtccctgattgtgaggagaaaaatgtatctgga

SEQ ID NO: 362252 - DNA, 649 bp, Homo sapiens
gggcttactctttctggtatgctgaggtaaagtctttgtaagagaggaagcttttataatactacctatcatctttgaattcatttctggtagattttacacaaatgcattaagtttagtccaaacagacactgagagttcagcttgctggttcatgtttctgtcctatgttaagccaaggcaaattatttttcactttttagtcacaatcccataatttaagagtagcaacacatagattaagtttcacagttaaattttaactattttctaatattactttgtttatacttgattaaagctaattttamaacatgcactctgacagaaaagacatctgagaaacaaaacaagcaaatttgttttccattttgcacctgccccccccccccaaaaaaaagtctcaagaaccagaactgggtaagaacagtgataaagggaatcaatctatatattcatgactttctttaaaattcattacaaacaagttcaagctgaatattggtaaaagttctgaaaactccaaaattactgcttgccctgaggaagagctcctacatggtaactctaaagagggatgaacaaaaaaggagtgccctctagtctgatgaatcatgtccctgattgtgaggagaaaaatgtatctgga

SEQ ID NO: 362253 - DNA, 557 bp, Homo sapiens
attaagtttagtccaaacagacactgagagttcagcttgctggttcatgtttctgtcctatgttaagccaaggcaaattatttttcactttttagtcacaatcccataatttaagagtagcaacacatagattaagtttcacagttaaattttaactattttctaatattactttgtttatacttgattaaagctaattttaaaacatgcactctgacagaaaagacatctgagaaacaaaacaagcaaatttgttttccattttgcacctgccccccccccccaaaaaaaagtctcaagaaccagaactgggtaagaacagtgataaagggaatcaatctatatattcatgactttctttaawattcattacaaacaagttcaagctgaatattggtaaaagttctgaaaactccaaaattactgcttgccctgaggaagagctcctacatggtaactctaaagagggatgaacaaaaaaggagtgccctctagtctgatgaatcatgtccctgattgtgaggagaaaaatgtatctggagggtctagctctgtgg

SEQ ID NO: 362254 - DNA, 520 bp, Homo sapiens
tgtatctggagggtctagctctgtggcagtccaggcagcgcctgaacagaggaagcccatgtcaaatgtctttttattcsattcacactccaggtccctgaaatacacttaccagtcatcttctaagcttcatttaaattaaaataaatcagactataaaaatgataacaaaccagacacacagcttgtttctaacacagatgatggaaatttttgttatgatatagaaactgaaaaagtaaggaacccagtaattatgatcgaaatgaaagatgattaagagtttgacatgcaaatggaaaaatatataaacccaaatactactaattggaaattagacattaggcattggtctcagtctagagatccagaaagtctttttgatttgtagtttacccaccccaaagaaatgaagcatatgattcagatagaaagtcacagtatttctgctgctacagatacttataaaaacagaaaaccaacatagtgcttattccagaagccgctgtatgacaatccc

SEQ ID NO: 362255 - DNA, 520 bp, Homo sapiens
tgtatctggagggtctagctctgtggcagtccaggcagcgcctgaacagaggaagcccatgtcaaatgtctttttattcgattcacactccaggtccctgaaatacacttaccagtcatcttctaagcttcatttaawttaaaataaatcagactataaaaatgataacaaaccagacacacagcttgtttctaacacagatgatggaaatttttgttatgatatagaaactgaaaaagtaaggaacccagtaattatgatcgaaatgaaagatgattaagagtttgacatgcaaatggaaaaatatataaacccaaatactactaattggaaattagacattaggcattggtctcagtctagagatccagaaagtctttttgatttgtagtttacccaccccaaagaaatgaagcatatgattcagatagaaagtcacagtatttctgctgctacagatacttataaaaacagaaaaccaacatagtgcttattccagaagccgctgtatgacaatccc

SEQ ID NO: 362256 - DNA, 520 bp, Homo sapiens
tgtatctggagggtctagctctgtggcagtccaggcagcgcctgaacagaggaagcccatgtcaaatgtctttttattcgattcacactccaggtccctgaaatacacttaccagtcatcttctaagcttcatttaaattaaaataaatcagactataaaaatgataacaaaccagacacacagcttgtttctaacacagatgatggaaatttttgttatgatatagaaactgaaaaagtaaggaacccagtaattatgatygaaatgaaagatgattaagagtttgacatgcaaatggaaaaatatataaacccaaatactactaattggaaattagacattaggcattggtctcagtctagagatccagaaagtctttttgatttgtagtttacccaccccaaagaaatgaagcatatgattcagatagaaagtcacagtatttctgctgctacagatacttataaaaacagaaaaccaacatagtgcttattccagaagccgctgtatgacaatccc

SEQ ID NO: 362257 - DNA, 520 bp, Homo sapiens
tgtatctggagggtctagctctgtggcagtccaggcagcgcctgaacagaggaagcccatgtcaaatgtctttttattcgattcacactccaggtccctgaaatacacttaccagtcatcttctaagcttcatttaaattaaaataaatcagactataaaaatgataacaaaccagacacacagcttgtttctaacacagatgatggaaatttttgttatgatatagaaactgaaaaagtaaggaacccagtaattatgatcgaaatgaaagatgattaagagtttgacatgcaaatggaaaaatatataaacccaaatactactaattggaaattagacattaggcattggtctcagtctagagatccagaaagyctttttgatttgtagtttacccaccccaaagaaatgaagcatatgattcagatagaaagtcacagtatttctgctgctacagatacttataaaaacagaaaaccaacatagtgcttattccagaagccgctgtatgacaatccc

SEQ ID NO: 362258 - DNA, 614 bp, Homo sapiens
tttctctcttgttgcccaagctggagtgcaatggtgtgttctcacctcactgcaacctatgcatactgggttcaagtgattctcctgactcagcctccctagtagctgagattacagacatrtgccaccatgcccagctaattttttgtatttttagtagaaatgaggtttcaccatgttatccaggcttgtctcgaactcctgacctcaggtgttctgcccacctcagcctcccaaagtgctgggtttacaggagtgagccaccgtgcctggccacctatagcagtatttctcagcggataattgtcattgtgctataaactaattcaaaattggactaatgttccttatgattaacaagttttatagttttaccagggatatttagccctgcctggtaatcagaaaaatgcaaattaacataaaataagatatattttgtaaagtcatgctgatattgaaaaagtaattactaccattgaaaatgtgaggaaaaaagcattctcatacactgttggtatatgaaattggtaaattatttctgaagggtaacttagtgctgtgtatcaaaatttcaaataacctgacatccctttaactcaacaactccactt

SEQ ID NO: 362259 - DNA, 614 bp, Homo sapiens
tttctctcttgttgcccaagctggagtgcaatggtgtgttctcacctcactgcaacctatgcatactgggttcaagtgattctcctgactcagcctccctagtagctgagattacagacatgtgccaccatgcccagctaattttttgtatttttagtagaaatgaggtttcaccatgttatccaggcttgtctcgaactcctgacctcaggtgttctgcccacctcagcctcccaaagtgctgggtttacaggagtgagccaccgtgcctggccacctatagcagtatttmtcagcggataattgtcattgtgctataaactaattcaaaattggactaatgttccttatgattaacaagttttatagttttaccagggatatttagccctgcctggtaatcagaaaaatgcaaattaacataaaataagatatattttgtaaagtcatgctgatattgaaaaagtaattactaccattgaaaatgtgaggaaaaaagcattctcatacactgttggtatatgaaattggtaaattatttctgaagggtaacttagtgctgtgtatcaaaatttcaaataacctgacatccctttaactcaacaactccactt

SEQ ID NO: 362260 - DNA, 608 bp, Homo sapiens
cttctaactatactgaattatttccagtatccttttttataatacatactagagtgactagtaacaaaaactttagcagaatattctttccttactacttttcaagtatatacattcgtttgaagatgttgaagtgagaaattaaatatctgagaactacaaaggaaaaataatccagcacatagaaattttattaggatgataaggagcatctgcagaggtagatcacaggatgatctctttgttttttaacaaaatgaattttaagataaatgtctttatctgcagatgcatcttaagacaagaaagtgaagaaaaaacaaatgttaatatgctgtacaaaaaaatagagaagaattaraaaggaaagagaaacaatataagaaagaagttgaagcaaaacaacttgaaccaactgttcaatcactagagatgaaactgaagactacaagaaatactccaaatcagataaatcaatctttggtaaaaattctatattttaaactttattttatcaatgttacttataatatcctcttgatttaatatataatattttggtctaaaacaaaccagaaatgttatctcattgtcaaaaaatgaatgat

SEQ ID NO: 362261 - DNA, 575 bp, Homo sapiens
gatgacacttacaggtacaattattaatatttattataaatcatggcatccacataggatattattttattacaaagagcttttgaaaacaataatatgccataatatatacttagtgataacctattgataaagattttttcccagtaaarttgttccttgtacttcccactatttcatattgattactgtacctaatactataaagaggaaacaaattattgcaatcacaagtaatctcattatattctaagaagagctctataaattttatcttatttaccattggtgttttgaaataaaagttttctttcgtattgatacatttacaccacagaagtaactgtgatctgtcagagaactagaagtagagtcagaagtcctggggaaaatcctgtagcttgcttatatttttaacatctctttttcaaaattgtggtaactagatgagttcatcaatgaatgtatataggagtgactagtataatgtctagatttatgatttagtaaatgtaattcttacaactgactataaaagtgttaaaagagtcaaattgaaatagaatgttatcagt

SEQ ID NO: 362262 - DNA, 575 bp, Homo sapiens
gatgacacttacaggtacaattattaatatttattataaatcatggcatccacataggatattattttattacaaagagcttttgaaaacaataatatgccataatatatacttagtgataacctattgataaagattttttcccagtaaaattgttccttgtacttcccactatttcatattgattactgtacctaatactataaagaggaaacaaattattgcaatcacaagtaatctcattatattctaagaagagctctataaattttatcttatttaccattggtgttttgaaataaaagtwttctttcgtattgatacatttacaccacagaagtaactgtgatctgtcagagaactagaagtagagtcagaagtcctggggaaaatcctgtagcttgcttatatttttaacatctctttttcaaaattgtggtaactagatgagttcatcaatgaatgtatataggagtgactagtataatgtctagatttatgatttagtaaatgtaattcttacaactgactataaaagtgttaaaagagtcaaattgaaatagaatgttatcagt

SEQ ID NO: 362263 - DNA, 575 bp, Homo sapiens
gatgacacttacaggtacaattattaatatttattataaatcatggcatccacataggatattattttattacaaagagcttttgaaaacaataatatgccataatatatacttagtgataacctattgataaagattttttcccagtaaaattgttccttgtacttcccactatttcatattgattactgtacctaatactataaagaggaaacaaattattgcaatcacaagtaatctcattatattctaagaagagctctataaattttatcttatttaccattggtgttttgaaataaaagttttctttygtattgatacatttacaccacagaagtaactgtgatctgtcagagaactagaagtagagtcagaagtcctggggaaaatcctgtagcttgcttatatttttaacatctctttttcaaaattgtggtaactagatgagttcatcaatgaatgtatataggagtgactagtataatgtctagatttatgatttagtaaatgtaattcttacaactgactataaaagtgttaaaagagtcaaattgaaatagaatgttatcagt

SEQ ID NO: 362264 - DNA, 575 bp, Homo sapiens
gatgacacttacaggtacaattattaatatttattataaatcatggcatccacataggatattattttattacaaagagcttttgaaaacaataatatgccataatatatacttagtgataacctattgataaagattttttcccagtaaaattgttccttgtacttcccactatttcatattgattactgtacctaatactataaagaggaaacaaattattgcaatcacaagtaatctcattatattctaagaagagctctataaattttatcttatttaccattggtgttttgaaataaaagttttctttcgtattgatacatttacaccacagaagtaactgtgatctgtcagagaactagaagtagagtcagaagtcctggggaaaatcctrtagcttgcttatatttttaacatctctttttcaaaattgtggtaactagatgagttcatcaatgaatgtatataggagtgactagtataatgtctagatttatgatttagtaaatgtaattcttacaactgactataaaagtgttaaaagagtcaaattgaaatagaatgttatcagt

SEQ ID NO: 362265 - DNA, 584 bp, Homo sapiens
aagaagctaatgaatgaatgtgatcatttaaaagaaagtctctttcaatatgagagagagaaagcagaaaaagtagtaagtatcaaggaagataaatattttcaaacttttagaaagaaaatttaaacatttggttctggatacatgttgaacttagttgaatataaaaatcaatggataaaaagtgtgtttaccatactgtataattccatttacatgaagcatccagaaaagataaacgtatagggacaaaaagtagactaatgtttgcaaarggctgggtctgaaagctggtagtgactgctaatgggcgtgagggatcttgcagtgatggaaatgctgtaaagttggattgtagagatggctgcacaactcagtaaatggactaaaaaatcttttaactttaagttaaaacagatacattctatagtatgtaaattatatttcaacaaagctgttttaataaaaaaaaaaggaaaaccgtgtttactataccagcttagaaatgtgtctcatttctaggaaatcaaaggtagaggtgagagatgatttactttgagaaaagacattgtgtcacctatgaa

SEQ ID NO: 362266 - DNA, 513 bp, Homo sapiens
aatattttcaaacttttagaaagaaaatttaaacatttggttctggatacatgttgaacttagttgaatataaaaatcaatggataaaaagtgtgtttaccatactgtataattccatttacatgaagcatccagaaaagataaacgtatagggacaaaaagtagactaatgtttgcaaagggctgggtctgaaagctggtagtgactgctaatgggcgtgagggatcttgcagtgatggaaatgctgtaaagttggattgtagagatggctgcacaactcagtaaatggactaaaaaatcttttaacyttaagttaaaacagatacattctatagtatgtaaattatatttcaacaaagctgttttaataaaaaaaaaaggaaaaccgtgtttactataccagcttagaaatgtgtctcatttctaggaaatcaaaggtagaggtgagagatgatttactttgagaaaagacattgtgtcacctatgaaattttattaggcacagagtcgta

SEQ ID NO: 362267 - DNA, 584 bp, Homo sapiens
aagaagctaatgaatgaatgtgatcatttaaaagaaagtctctttcaatatgagagagagaaagcagaaaaagtagtaagtatcaaggaagataaatattttcaaacttttagaaagaaaatttaaacatttggttctggatacatgttgaacttagttgaatataaaaatcaatggataaaaagtgtgtttaccatactgtataattccatttacatgaagcatccagaaaagataaacgtatagggacaaaaagtagactaatgtttgcaaagggctgggtctgaaagctggtagtgactgctaatgggcgtgagggatcttgcagtgatggaaatgctgtaaagttggattgtagagatggctgcacaactcagtaaatggactaaaaaatcttttaactttaagttaaaacagatacattctatagtatgtaaattatatttcaacaaagctgttttaatwaaaaaaaaaggaaaaccgtgtttactataccagcttagaaatgtgtctcatttctaggaaatcaaaggtagaggtgagagatgatttactttgagaaaagacattgtgtcacctatgaa

SEQ ID NO: 362268 - DNA, 584 bp, Homo sapiens
aagaagctaatgaatgaatgtgatcatttaaaagaaagtctctttcaatatgagagagagaaagcagaaaaagtagtaagtatcaaggaagataaatattttcaaacttttagaaagaaaatttaaacatttggttctggatacatgttgaacttagttgaatataaaaatcaatggataaaaagtgtgtttaccatactgtataattccatttacatgaagcatccagaaaagataaacgtatagggacaaaaagtagactaatgtttgcaaagggctgggtctgaaagctggtagtgactgctaatgggcgtgagggatcttgcagtgatggaaatgctgtaaagttggattgtagagatggctgcacaactcagtaaatggactaaaaaatcttttaactttaagttaaaacagatacattctatagtatgtaaattatatttcaacaaagctgttttaataaaaaaaaaaggaaaaccgtgtttactataccagcttagaaatgtgtcycatttctaggaaatcaaaggtagaggtgagagatgatttactttgagaaaagacattgtgtcacctatgaa

SEQ ID NO: 362269 - DNA, 330 bp, Homo sapiens
taactgcctgtgatttatgagtaaggcattagatccctattttcagactgaggggtggcaggcttcacgtacagtgggaatggagtaattgcaggagggagttgtaggagctttgaagtcagagagggaggtagagacctgtttacctaggacctcaaaggccattgraattttacttttattctgagataggaatctgttggaaggatttgaacaggtgattgaatatgtcaggaactttgaggttgagttgagcttctaagatgattgaatggtgggatgaatctgttatgtaagtaagagaataccaactttggcaggaagaggaac

SEQ ID NO: 362270 - DNA, 563 bp, Homo sapiens
atccctattttcagactgaggggtggcaggcttcacgtacagtgggaatggagtaattgcaggagggagttgtaggagctttgaagtcagagagggaggtagagacctgtttacctaggacctcaaaggccattgaaattttacttttattctgagataggaatctgttggaaggatttgaacaggtgattgaatatgtsaggaactttgaggttgagttgagcttctaagatgattgaatggtgggatgaatctgttatgtaagtaagagaataccaactttggcaggaagaggaacatattgtgcatccctcactgaattcagtaatatataacaatgtgtacatgtgattaaaagaaggtgaatttatatgtgtggtgataattttcaaagtaggtatgttagagttaaatattattaacataatttaataataaggcaatttataaaatcagtaacaaaaatattttctcaggtggttgtgagaaaacttcaacaagaagcggctgacagcctaaaaaaattaactatgttagagtctccactggaaggtatatcacat

SEQ ID NO: 362271 - DNA, 563 bp, Homo sapiens
atccctattttcagactgaggggtggcaggcttcacgtacagtgggaatggagtaattgcaggagggagttgtaggagctttgaagtcagagagggaggtagagacctgtttacctaggacctcaaaggccattgaaattttacttttattctgagataggaatctgttggaaggatttgaacaggtgattgaatatgtcaggaactttgaggttgagttgagcttctaagatgattgaatggtgggatgaatctgttatgtaagtaagagaataccaactttggcaggaagaggaacatattgtgcatccctcactgaattcagtaatatataacaatgtgtacatgtgattaaaagaaggtgaattkatatgtgtggtgataattttcaaagtaggtatgttagagttaaatattattaacataatttaataataaggcaatttataaaatcagtaacaaaaatattttctcaggtggttgtgagaaaacttcaacaagaagcggctgacagcctaaaaaaattaactatgttagagtctccactggaaggtatatcacat

SEQ ID NO: 362272 - DNA, 597 bp, Homo sapiens
agcttctaagatgattgaatggtgggatgaatctgttatgtaagtaagagaataccaactttggcaggaagaggaacatattgtgcatccctcactgaattcagtaatatataacaatgtgtacatgtgattaaaagaaggtgaatttatatgtgtggtgataattttcaaagtaggtatgttagagttaaatattattaacataatttaataataaggcaatttataaaatcagtaacaaaaatattttctcaggtggttgtgagamaacttcaacaagaagcggctgacagcctaaaaaaattaactatgttagagtctccactggaaggtatatcacattatcacattaatttggatgagacacaggtcccaaagaagaaattatttcaagtggaaagtcaagtatgtatggaacttagcatgtaaactgttattctgtagctagttgaattacatacatgttttaggatactaattatggcagaagcttgattttttattttcattacaatgaattatttccattttactatctctataatgtacttatttttataaagtgactttcattctaccattttgaaaaaccattgc

SEQ ID NO: 362273 - DNA, 597 bp, Homo sapiens
agcttctaagatgattgaatggtgggatgaatctgttatgtaagtaagagaataccaactttggcaggaagaggaacatattgtgcatccctcactgaattcagtaatatataacaatgtgtacatgtgattaaaagaaggtgaatttatatgtgtggtgataattttcaaagtaggtatgttagagttaaatattattaacataatttaataataaggcaatttataaaatcagtaacaaaaatattttctcaggtggttgtgagaaaacttcaacaagaagcggctgacagcctaaaaaaattaactatgttagagtctccactggaaggtatatcacattatcacattaatttggatgagacacaggtcccaaagaagaaattatttcaagtggaaagtcaagtatgtatggaacttagcatgtmaactgttattctgtagctagttgaattacatacatgttttaggatactaattatggcagaagcttgattttttattttcattacaatgaattatttccattttactatctctataatgtacttatttttataaagtgactttcattctaccattttgaaaaaccattgc

SEQ ID NO: 362274 - DNA, 373 bp, Homo sapiens
gtcaagtatgtatggaacttagcatgtaaactgttattctgtagctagttgaattacatacatgttttaggatactaattatggcagaagcttgattttttattttcattacaatgaattatttccattttactatctctataatgtacttatttttataaagtgactttcattctaccattttgaaaaaccattgcataccttttctcttacaatatgtacccttggaaaagttgagaattatayatcattcctcatagaaaactgacttttgtcctgttaaaacagtatttttaagtaatttttgtattgctctgatgaggcaggccagattaaatcagagaagaatgtttcatggaatgttccagaaaat

SEQ ID NO: 362275 - DNA, 575 bp, Homo sapiens
attttcattacaatgaattatttccattttactatctctataatgtacttatttttataaagtgactttcattctaccattttgaaaaaccattgcataccttttctcttacaatatgtacccttggaaaagttgagaattatacatcattcctcatagaaaactgactkttgtcctgttaaaacagtatttttaagtaatttttgtattgctctgatgaggcaggccagattaaatcagagaagaatgtttcatggaatgttccagaaaattgtcttatttcttcacttttgtgagtggacacagaatctgtgtctatttatttcacagattctaggttaacttgtacagaaaggccatcatactattcttttaaaagtgcatgttttaggttaatttacaaactatttgaaaagttaggcattttctttatttatcttttatttaaaatatactataaaactgtggaaatatttaaatttgagataacatgtacatcaaaaattgagagttgagaaaattatcttgatcctgcctttggattttaaaaacagtttcactgagatatcattcac

SEQ ID NO: 362276 - DNA, 373 bp, Homo sapiens
gtcaagtatgtatggaacttagcatgtaaactgttattctgtagctagttgaattacatacatgttttaggatactaattatggcagaagcttgattttttattttcattacaatgaattatttccattttactatctctataatgtacttatttttataaagtgactttcattctaccattttgaaaaaccattgcataccttttctcttacaatatgtacccttggaaaagttgagaattatacatcattcctcatagaaaactgacttttgtcctgttaaaasagtatttttaagtaatttttgtattgctctgatgaggcaggccagattaaatcagagaagaatgtttcatggaatgttccagaaaat

SEQ ID NO: 362277 - DNA, 486 bp, Homo sapiens
tgactttcattctaccattttgaaaaaccattgcataccttttctcttacaatatgtacccttggaaaagttgagaattatacatcattcctcatagaaaactgacttttgtcctgttaaaacagtatttttaagtaatttttgtattgctctgatgaggcaggccagattaaatcagagaagaatgtttmatggaatgttccagaaaattgtcttatttcttcacttttgtgagtggacacagaatctgtgtctatttatttcacagattctaggttaacttgtacagaaaggccatcatactattcttttaaaagtgcatgttttaggttaatttacaaactatttgaaaagttaggcattttctttatttatcttttatttaaaatatactataaaactgtggaaatatttaaatttgagataacatgtacatcaaaaattgagagttgagaaaattatcttgatcctgcctttggattttaa

SEQ ID NO: 362278 - DNA, 445 bp, Homo sapiens
aatgtttcatggaatgttccagaaaattgtcttatttcttcacttttgtgagtggacacagaatctgtgtctatttatttcacagattctaggttaacttgtacagaaaggccatyatactattcttttaaaagtgcatgttttaggttaatttacaaactatttgaaaagttaggcattttctttatttatcttttatttaaaatatactataaaactgtggaaatatttaaatttgagataacatgtacatcaaaaattgagagttgagaaaattatcttgatcctgcctttggattttaaaaacagtttcactgagatatcattcacatttgagagagttcaaccatttaaaatgtacaactgagtatctattagtatattcacagcattttcatcaccctgaaaagcaaccccacatctcctaggcatgactgcagccttc

SEQ ID NO: 362279 - DNA, 486 bp, Homo sapiens
tgactttcattctaccattttgaaaaaccattgcataccttttctcttacaatatgtacccttggaaaagttgagaattatacatcattcctcatagaaaactgacttttgtcctgttaaaacagtatttttaagtaatttttgtattgctctgatgaggcaggccagattaaatcagagaagaatgtttcatggaatgttccagaaaattgtcttatttcttcacttttgtgagtggacacagaatctgtgtctatttatttcacagattctaggttaacttgtacagaaaggccatcatactattcttttaaaagtgcatgttttargttaatttacaaactatttgaaaagttaggcattttctttatttatcttttatttaaaatatactataaaactgtggaaatatttaaatttgagataacatgtacatcaaaaattgagagttgagaaaattatcttgatcctgcctttggattttaa

SEQ ID NO: 362280 - DNA, 589 bp, Homo sapiens
ttttgtcctgttaaaacagtatttttaagtaatttttgtattgctctgatgaggcaggccagattaaatcagagaagaatgtttcatggaatgttccagaaaattgtcttatttcttcacttttgtgagtggacacagaatctgtgtctatttatttcacagattctaggttaacttgtacagaaaggccatcatactattcttttaaaagtgcatgttttaggttaatttacaaactatttgaaaagttaggcattttctttatttatcttttatttaaaatatactataaaactgtggaaatawttaaatttgagataacatgtacatcaaaaattgagagttgagaaaattatcttgatcctgcctttggattttaaaaacagtttcactgagatatcattcacatttgagagagttcaaccatttaaaatgtacaactgagtatctattagtatattcacagcattttcatcaccctgaaaagcaaccccacatctcctaggcatgactgcagccttcctccatgtccctccacctacctctgttgtaggcaaccaccatctatctacttttgtctccatatgtt

SEQ ID NO: 362281 - DNA, 445 bp, Homo sapiens
aatgtttcatggaatgttccagaaaattgtcttatttcttcacttttgtgagtggacacagaatctgtgtctatttatttcacagattctaggttaacttgtacagaaaggccatcatactattcttttaaaagtgcatgttttaggttaatttacaaactatttgaaaagttaggcattttctttatttatcttttatttaaaatatactataaaactgtggaaatatttaaatttgagataacatgtacatcaaaaattgagagttgagaaaattatcttgatcctgcctttggattttaaaracagtttcactgagatatcattcacatttgagagagttcaaccatttaaaatgtacaactgagtatctattagtatattcacagcattttcatcaccctgaaaagcaaccccacatctcctaggcatgactgcagccttc

SEQ ID NO: 362282 - DNA, 492 bp, Homo sapiens
tctcattataaatttgcttaatgggggaataatatataatatgtatgccacctatccttgcatacattgaaaatattttagcttmgaagtttgtagcatacaattcaatactttataccataccaattatttcttctttgagaccttgacacagtaaggtttatattctaagtgtgtttttagcaattatatatcaaatctaaaccaattagtttaatacaggagacttgttaaatcacatatttatgtttttctctctatgaaaaagaatctaaattggccttttttcactatgcagcagaactgtatttctggactgctaccagtttgtcagctgaacagttctgggtgcagcttgtctgatgacggatagcacagcacctcaatctgagtgctcagcagagtgcttgtgaaggcagcaccacagcaacagttgctcagagggaacggattcaggagccttgatttagcaatagagtccagggttttcag

SEQ ID NO: 362283 - DNA, 492 bp, Homo sapiens
tctcattataaatttgcttaatgggggaataatatataatatgtatgccacctatccttgcatacattgaaaatattttagcttcgaagtttgtagcatacaattcaatactttataccataccaattatttcttctttgagaccttgacacagtaaggtttatattctaagtgtgtttttagcaattawatatcaaatctaaaccaattagtttaatacaggagacttgttaaatcacatatttatgtttttctctctatgaaaaagaatctaaattggccttttttcactatgcagcagaactgtatttctggactgctaccagtttgtcagctgaacagttctgggtgcagcttgtctgatgacggatagcacagcacctcaatctgagtgctcagcagagtgcttgtgaaggcagcaccacagcaacagttgctcagagggaacggattcaggagccttgatttagcaatagagtccagggttttcag

SEQ ID NO: 362284 - DNA, 492 bp, Homo sapiens
tctcattataaatttgcttaatgggggaataatatataatatgtatgccacctatccttgcatacattgaaaatattttagcttcgaagtttgtagcatacaattcaatactttataccataccaattatttcttctttgagaccttgacacagtaaggtttatattctaagtgtgtttttagcaattatatatcaaatctaaaccaattagtytaatacaggagacttgttaaatcacatatttatgtttttctctctatgaaaaagaatctaaattggccttttttcactatgcagcagaactgtatttctggactgctaccagtttgtcagctgaacagttctgggtgcagcttgtctgatgacggatagcacagcacctcaatctgagtgctcagcagagtgcttgtgaaggcagcaccacagcaacagttgctcagagggaacggattcaggagccttgatttagcaatagagtccagggttttcag

SEQ ID NO: 362285 - DNA, 492 bp, Homo sapiens
tctcattataaatttgcttaatgggggaataatatataatatgtatgccacctatccttgcatacattgaaaatattttagcttcgaagtttgtagcatacaattcaatactttataccataccaattatttcttctttgagaccttgacacagtaaggtttatattctaagtgtgtttttagcaattatatatcaaatctaaaccaattagtttaatacaggagacttgttaaatcacatrtttatgtttttctctctatgaaaaagaatctaaattggccttttttcactatgcagcagaactgtatttctggactgctaccagtttgtcagctgaacagttctgggtgcagcttgtctgatgacggatagcacagcacctcaatctgagtgctcagcagagtgcttgtgaaggcagcaccacagcaacagttgctcagagggaacggattcaggagccttgatttagcaatagagtccagggttttcag

SEQ ID NO: 362286 - DNA, 505 bp, Homo sapiens
aataaaacgttttgtatagattcccatagaartgagttagacatcagtcatagaattattagccactttgatgtctaccttgggagtaaaacatataataaggggcagcgttaaaccatctcaatcaatagcctccaacttctcgagaaggttcttatttcatgaatttctaaacaagccactacctggattaagacatttggtggacaccattttgagatgaagaatcttgagtgagaagaagggagatttctacttactgaagcttcccaatgacatagttaagtgtcccccaaaagaaactttagaacaagactttcatcatgccatatctctatggaaaaggaatttctttaaaagaaaacaaagtcaaacaattgataatatgattctcatgggaaagttttcatcataaaagaaaaagagggctgggtgccgtggctcacgtctgtaatcccaacactttgggaggctgaggtgcgtggattacctgaggtcagcagtt

SEQ ID NO: 362287 - DNA, 505 bp, Homo sapiens
aataaaacgttttgtatagattcccatagaaatgagttagacatcagtcatagaattattagccactttgatgtctaccttgggagtaaaacatataataaggggcagcgttaaaccatctcaatcamtagcctccaacttctcgagaaggttcttatttcatgaatttctaaacaagccactacctggattaagacatttggtggacaccattttgagatgaagaatcttgagtgagaagaagggagatttctacttactgaagcttcccaatgacatagttaagtgtcccccaaaagaaactttagaacaagactttcatcatgccatatctctatggaaaaggaatttctttaaaagaaaacaaagtcaaacaattgataatatgattctcatgggaaagttttcatcataaaagaaaaagagggctgggtgccgtggctcacgtctgtaatcccaacactttgggaggctgaggtgcgtggattacctgaggtcagcagtt

SEQ ID NO: 362288 - DNA, 505 bp, Homo sapiens
aataaaacgttttgtatagattcccatagaaatgagttagacatcagtcatagaattattagccactttgatgtctaccttgggagtaaaacatataataaggggcagcgttaaaccatctcaatcaatagcctccaacttctcgagaaggttcttatttcatgaatttctaaacaagccactacctggattaagacatttggtggacaccattttgagatgaagaatcttgagtgagaagaagggagwtttctacttactgaagcttcccaatgacatagttaagtgtcccccaaaagaaactttagaacaagactttcatcatgccatatctctatggaaaaggaatttctttaaaagaaaacaaagtcaaacaattgataatatgattctcatgggaaagttttcatcataaaagaaaaagagggctgggtgccgtggctcacgtctgtaatcccaacactttgggaggctgaggtgcgtggattacctgaggtcagcagtt

SEQ ID NO: 362289 - DNA, 505 bp, Homo sapiens
aataaaacgttttgtatagattcccatagaaatgagttagacatcagtcatagaattattagccactttgatgtctaccttgggagtaaaacatataataaggggcagcgttaaaccatctcaatcaatagcctccaacttctcgagaaggttcttatttcatgaatttctaaacaagccactacctggattaagacatttggtggacaccattttgagatgaagaatcttgagtgagaagaagggagatytctacttactgaagcttcccaatgacatagttaagtgtcccccaaaagaaactttagaacaagactttcatcatgccatatctctatggaaaaggaatttctttaaaagaaaacaaagtcaaacaattgataatatgattctcatgggaaagttttcatcataaaagaaaaagagggctgggtgccgtggctcacgtctgtaatcccaacactttgggaggctgaggtgcgtggattacctgaggtcagcagtt

SEQ ID NO: 362290 - DNA, 581 bp, Homo sapiens
tgtggttgagaatattttctataatatgkgtactagaaggaagagacctcaagaaaatggtcagagctggaaatgtagattagggaatctaggtcaaagttttgagattttaggagccctgagagaatttaaaaagagaaatagccaccaggcatggtggccacacctgtaatcccagcactttgggaggccaaggcaggaagatcatgaggtcaggagttcaagaccagtctggccaacaagtttcttatataggtaaacgtgttccatgatggtttgctgcacctatcaatccatcacctagatattaagccctgtgggcattagttattgatcttgatgctctccctcctgaccccaacaggccccagtgtttgttgttcccctccccgagtctatgtgttcttatcgttcagctcccgcttataagtgagaagatgcagtgtttggttttttcttcctgcattagtttgctgaatatatcagcttcaggttcatccatatccctgcaaagagcatgatctcattcatttttatggctccatagtattccatggtgtatatataccacattttcttta

SEQ ID NO: 362291 - DNA, 581 bp, Homo sapiens
tgtggttgagaatattttctataatatgtgtactagaaggaagagacctcaagaaaatggtcagagctggaaatgtagattagggaatctaggtcaaagttttgagattttaggagycctgagagaatttaaaaagagaaatagccaccaggcatggtggccacacctgtaatcccagcactttgggaggccaaggcaggaagatcatgaggtcaggagttcaagaccagtctggccaacaagtttcttatataggtaaacgtgttccatgatggtttgctgcacctatcaatccatcacctagatattaagccctgtgggcattagttattgatcttgatgctctccctcctgaccccaacaggccccagtgtttgttgttcccctccccgagtctatgtgttcttatcgttcagctcccgcttataagtgagaagatgcagtgtttggttttttcttcctgcattagtttgctgaatatatcagcttcaggttcatccatatccctgcaaagagcatgatctcattcatttttatggctccatagtattccatggtgtatatataccacattttcttta

SEQ ID NO: 362292 - DNA, 581 bp, Homo sapiens
tgtggttgagaatattttctataatatgtgtactagaaggaagagacctcaagaaaatggtcagagctggaaatgtagattagggaatctaggtcaaagttttgagattttaggagccctgagagaatttaaaaagagaaatagccaccaggcatggtggccacacctgtaatcccagcactttgggaggccaaggcaggaagatcatgaggtcaggagttcaagaccagtctggccaacaagtttcttatataggtaaacgtgttccatgatggyttgctgcacctatcaatccatcacctagatattaagccctgtgggcattagttattgatcttgatgctctccctcctgaccccaacaggccccagtgtttgttgttcccctccccgagtctatgtgttcttatcgttcagctcccgcttataagtgagaagatgcagtgtttggttttttcttcctgcattagtttgctgaatatatcagcttcaggttcatccatatccctgcaaagagcatgatctcattcatttttatggctccatagtattccatggtgtatatataccacattttcttta

SEQ ID NO: 362293 - DNA, 581 bp, Homo sapiens
tgtggttgagaatattttctataatatgtgtactagaaggaagagacctcaagaaaatggtcagagctggaaatgtagattagggaatctaggtcaaagttttgagattttaggagccctgagagaatttaaaaagagaaatagccaccaggcatggtggccacacctgtaatcccagcactttgggaggccaaggcaggaagatcatgaggtcaggagttcaagaccagtctggccaacaagtttcttatataggtaaacgtgttccatgatggtttgctgcacctatcaatccatcacctagatattaagccctgtgggcattagttattgatcttgatgctctccctcctgaccccaacaggccccagtgtttgttgttyccctccccgagtctatgtgttcttatcgttcagctcccgcttataagtgagaagatgcagtgtttggttttttcttcctgcattagtttgctgaatatatcagcttcaggttcatccatatccctgcaaagagcatgatctcattcatttttatggctccatagtattccatggtgtatatataccacattttcttta

SEQ ID NO: 362294 - DNA, 456 bp, Homo sapiens
aatagccaccaggcatggtggccacacctgtaatcccagcactttgggaggccaaggcaggaagatcatgaggtcaggagttcaagaccagtctggccaacaagtttcttatataggtaaacgtgttccatgatggtttgctgcacctatcaatccatcacctagatattaagccctgtgggcattagttattgatcttgatgctctccctcctgaccccaacaggccccagtgtttgttgttcccctccccgagtcyatgtgttcttatcgttcagctcccgcttataagtgagaagatgcagtgtttggttttttcttcctgcattagtttgctgaatatatcagcttcaggttcatccatatccctgcaaagagcatgatctcattcatttttatggctccatagtattccatggtgtatatataccacattttctttatcccattatcactg

SEQ ID NO: 362295 - DNA, 456 bp, Homo sapiens
aatagccaccaggcatggtggccacacctgtaatcccagcactttgggaggccaaggcaggaagatcatgaggtcaggagttcaagaccagtctggccaacaagtttcttatataggtaaacgtgttccatgatggtttgctgcacctatcaatccatcacctagatattaagccctgtgggcattagttattgatcttgatgctctccctcctgaccccaacaggccccagtgtttgttgttcccctccccgagtctatgtgttcttatcgttcagctcccrcttataagtgagaagatgcagtgtttggttttttcttcctgcattagtttgctgaatatatcagcttcaggttcatccatatccctgcaaagagcatgatctcattcatttttatggctccatagtattccatggtgtatatataccacattttctttatcccattatcactg

SEQ ID NO: 362296 - DNA, 456 bp, Homo sapiens
aatagccaccaggcatggtggccacacctgtaatcccagcactttgggaggccaaggcaggaagatcatgaggtcaggagttcaagaccagtctggccaacaagtttcttatataggtaaacgtgttccatgatggtttgctgcacctatcaatccatcacctagatattaagccctgtgggcattagttattgatcttgatgctctccctcctgaccccaacaggccccagtgtttgttgttcccctccccgagtctatgtgttcttatcgttcagctcccgcttatargtgagaagatgcagtgtttggttttttcttcctgcattagtttgctgaatatatcagcttcaggttcatccatatccctgcaaagagcatgatctcattcatttttatggctccatagtattccatggtgtatatataccacattttctttatcccattatcactg

SEQ ID NO: 362297 - DNA, 456 bp, Homo sapiens
aatagccaccaggcatggtggccacacctgtaatcccagcactttgggaggccaaggcaggaagatcatgaggtcaggagttcaagaccagtctggccaacaagtttcttatataggtaaacgtgttccatgatggtttgctgcacctatcaatccatcacctagatattaagccctgtgggcattagttattgatcttgatgctctccctcctgaccccaacaggccccagtgtttgttgttcccctccccgagtctatgtgttcttatcgttcagctcccgcttataagtgagaagatgcagtgtttggttttttcttcctgcattagtttgctgaatatatcagcttcrggttcatccatatccctgcaaagagcatgatctcattcatttttatggctccatagtattccatggtgtatatataccacattttctttatcccattatcactg

SEQ ID NO: 362298 - DNA, 500 bp, Homo sapiens
tatataccacattttctttatcccattatcactgataatgtccatctgkgttgattccatgtctttactattgtgaagagtgctgcagtgaacatgtaaatgcatgtatctttataatagaataatttatattccaacgtatggtaattttaaatcagttttggtattaaaaatcatgcattttggaaaatattgataatggaaaaatccaaattctgccaaaatatgttgagaaaatagagggtaaatatatcttttcaaactttaaatgcctcaggctcttagttaatcttccccagatctgggaagacctagaaggggagagattgggctaccttaatgagggccatttcaatctcttggccctgcagcagcaatttcaaaataagtcaaaaaaatatatttgggggtaaaatattttgatttccttcagcttcttctctctgtgatgctgcaccagaatcagattagaaaggaagccacattataagtgttaataa

SEQ ID NO: 362299 - DNA, 500 bp, Homo sapiens
tatataccacattttctttatcccattatcactgataatgtccatctgggttgattccatgtctttactattgtgaakagtgctgcagtgaacatgtaaatgcatgtatctttataatagaataatttatattccaacgtatggtaattttaaatcagttttggtattaaaaatcatgcattttggaaaatattgataatggaaaaatccaaattctgccaaaatatgttgagaaaatagagggtaaatatatcttttcaaactttaaatgcctcaggctcttagttaatcttccccagatctgggaagacctagaaggggagagattgggctaccttaatgagggccatttcaatctcttggccctgcagcagcaatttcaaaataagtcaaaaaaatatatttgggggtaaaatattttgatttccttcagcttcttctctctgtgatgctgcaccagaatcagattagaaaggaagccacattataagtgttaataa

SEQ ID NO: 362300 - DNA, 500 bp, Homo sapiens
tatataccacattttctttatcccattatcactgataatgtccatctgggttgattccatgtctttactattgtgaagagtgctgcagtgaacatgyaaatgcatgtatctttataatagaataatttatattccaacgtatggtaattttaaatcagttttggtattaaaaatcatgcattttggaaaatattgataatggaaaaatccaaattctgccaaaatatgttgagaaaatagagggtaaatatatcttttcaaactttaaatgcctcaggctcttagttaatcttccccagatctgggaagacctagaaggggagagattgggctaccttaatgagggccatttcaatctcttggccctgcagcagcaatttcaaaataagtcaaaaaaatatatttgggggtaaaatattttgatttccttcagcttcttctctctgtgatgctgcaccagaatcagattagaaaggaagccacattataagtgttaataa

SEQ ID NO: 362301 - DNA, 500 bp, Homo sapiens
tatataccacattttctttatcccattatcactgataatgtccatctgggttgattccatgtctttactattgtgaagagtgctgcagtgaacatgtaaatgcatgtatctttataatagaataatttatattccaacgtatggtamttttaaatcagttttggtattaaaaatcatgcattttggaaaatattgataatggaaaaatccaaattctgccaaaatatgttgagaaaatagagggtaaatatatcttttcaaactttaaatgcctcaggctcttagttaatcttccccagatctgggaagacctagaaggggagagattgggctaccttaatgagggccatttcaatctcttggccctgcagcagcaatttcaaaataagtcaaaaaaatatatttgggggtaaaatattttgatttccttcagcttcttctctctgtgatgctgcaccagaatcagattagaaaggaagccacattataagtgttaataa

SEQ ID NO: 362302 - DNA, 618 bp, Homo sapiens
ttgtttatgtctattcttatgtcaaggcccaatcgaattgaatgrgaagtttttttcaatcatgttgcatattaccagttgtcttatgtcataataaaaattaaatttagtagaatgtctgtaacttcaccttttttgtcacaaaggagtctctggccagcttataccttacttcctctaagacatgatcagacgccaggcttacaagacacacttaatttctttttttctccattcaagcctttagtctcttttccattgcctcccactatagttacattttcagtaagttttggttacaggatctgctgacatagtctaatattcagtgcattatgttttactaactcattataattcatagaaccttccatagatgttcaccatctaggaaggagaagtttaagtctgagccaccagctttcctcagtggaaatcaagtgaagtcatcatcttgcagtttacagaccctctttcctcctggtagctggttctcttgggtagcactgtggctaatccttttcttagtgcagatcttgcattctcagaaaccacagttccctgtattgacctccttttactgaaacagagatgcacagctctgctttctatctcagt

SEQ ID NO: 362303 - DNA, 618 bp, Homo sapiens
ttgtttatgtctattcttatgtcaaggcccaatcgaattgaatgagaagtttttttcaatcatgttgcatattaccagttgtcttatgtcataataaaaattaaatttagtrgaatgtctgtaacttcaccttttttgtcacaaaggagtctctggccagcttataccttacttcctctaagacatgatcagacgccaggcttacaagacacacttaatttctttttttctccattcaagcctttagtctcttttccattgcctcccactatagttacattttcagtaagttttggttacaggatctgctgacatagtctaatattcagtgcattatgttttactaactcattataattcatagaaccttccatagatgttcaccatctaggaaggagaagtttaagtctgagccaccagctttcctcagtggaaatcaagtgaagtcatcatcttgcagtttacagaccctctttcctcctggtagctggttctcttgggtagcactgtggctaatccttttcttagtgcagatcttgcattctcagaaaccacagttccctgtattgacctccttttactgaaacagagatgcacagctctgctttctatctcagt

SEQ ID NO: 362304 - DNA, 555 bp, Homo sapiens
gttgcatattaccagttgtcttatgtcataataaaaattaaatttagtagaatgtctgtaacttcaccttttktgtcacaaaggagtctctggccagcttataccttacttcctctaagacatgatcagacgccaggcttacaagacacacttaatttctttttttctccattcaagcctttagtctcttttccattgcctcccactatagttacattttcagtaagttttggttacaggatctgctgacatagtctaatattcagtgcattatgttttactaactcattataattcatagaaccttccatagatgttcaccatctaggaaggagaagtttaagtctgagccaccagctttcctcagtggaaatcaagtgaagtcatcatcttgcagtttacagaccctctttcctcctggtagctggttctcttgggtagcactgtggctaatccttttcttagtgcagatcttgcattctcagaaaccacagttccctgtattgacctccttttactgaaacagagatgcacagctctgctttctatctcagt

SEQ ID NO: 362305 - DNA, 438 bp, Homo sapiens
ttttttcaatcatgttgcatattaccagttgtcttatgtcataataaaaattaaatttagtagaatgtctgtaacttcaccttttttgtcacaaaggagtctctggccagcttataccttacttcctctaagacatgatcagacgccaggcttacaagacacacttaatttctttttttctccattcaagcctttagtctcttttccattgcctcccactatagttayattttcagtaagttttggttacaggatctgctgacatagtctaatattcagtgcattatgttttactaactcattataattcatagaaccttccatagatgttcaccatctaggaaggagaagtttaagtctgagccaccagctttcctcagtggaaatcaagtgaagtcatcatcttgcagtttacagaccctctttcctcctggtagc

SEQ ID NO: 362306 - DNA, 555 bp, Homo sapiens
gttgcatattaccagttgtcttatgtcataataaaaattaaatttagtagaatgtctgtaacttcaccttttttgtcacaaaggagtctctggccagcttataccttacttcctctaagacatgatcagacgccaggcttacaagacacacttaatttctttttttctccattcaagcctttagtctcttttccattgcctcccactatagttacattttcagtaagttttkgttacaggatctgctgacatagtctaatattcagtgcattatgttttactaactcattataattcatagaaccttccatagatgttcaccatctaggaaggagaagtttaagtctgagccaccagctttcctcagtggaaatcaagtgaagtcatcatcttgcagtttacagaccctctttcctcctggtagctggttctcttgggtagcactgtggctaatccttttcttagtgcagatcttgcattctcagaaaccacagttccctgtattgacctccttttactgaaacagagatgcacagctctgctttctatctcagt

SEQ ID NO: 362307 - DNA, 402 bp, Homo sapiens
aatttctttttttctccattcaagcctttagtctcttttccattgcctcccactatagttacattttcagtaagttttggttacaggatctgctgacatagtctaatattcagtgcattatgttttactaactcattataattcatagaaccttccatagatgttcaccatctaggaaggagaagtttaagtctgagccrccagctttcctcagtggaaatcaagtgaagtcatcatcttgcagtttacagaccctctttcctcctggtagctggttctcttgggtagcactgtggctaatccttttcttagtgcagatcttgcattctcagaaaccacagttccctgtattgacctccttttactgaaacagagatgcacagctctgctttctatctcagt

SEQ ID NO: 362308 - DNA, 402 bp, Homo sapiens
aatttctttttttctccattcaagcctttagtctcttttccattgcctcccactatagttacattttcagtaagttttggttacaggatctgctgacatagtctaatattcagtgcattatgttttactaactcattataattcatagaaccttccatagatgttcaccatctaggaaggagaagtttaagtctgagccaccagctttcctcagtggaaatcaagtgaagtcatcatcttgcagtttacagaccctctttyctcctggtagctggttctcttgggtagcactgtggctaatccttttcttagtgcagatcttgcattctcagaaaccacagttccctgtattgacctccttttactgaaacagagatgcacagctctgctttctatctcagt

SEQ ID NO: 362309 - DNA, 535 bp, Homo sapiens
aaagccaccactgactaggtccccccactgaccaggcttccaatgactaggtcaccaggtccccactgatgaggcctttactgaggaggccrccactaaccaggcccctgctgatcaggtcccaaatgactaggtcctgatgaccaggtcatttctgaccatggtccactgaccaggccccagagcaaaggggttcaaagtctcattacaatgtccccctcagctcatagaccctccctccctgcatgtgtgcccagaggtcaggccctggggttttttttgggacatggcctttcctccaagacacagggagagacagttggcctcaggctccaggttcccagctccacactcaccccaaaggccctctggcccgtctcaaaggagaaagtgaggtggcctgacactgcctggacacaccatctaccctattcctgagtgtcagagtgtgaggaagggagggacatttggcagataaggcatgctgtgctgttgggtctctcagggcccttcccacagagccccgatctaaaca

SEQ ID NO: 362310 - DNA, 529 bp, Homo sapiens
atttaccttcccaccaacagcatgtaagagtttactgttctctggagcctcaccagcatttgyttttttttttgtcttttcaatgacagcaatttattcaaattgaagcaagattatatcacattgtagatttgatttgtatttccctgaggattagtgatactgagcattttaaaatttatttattggctatttgtatttctttttctaaaaaaaagtatagttagatattttgcccaattttaaactcagatttttttttactgtgaagttgtttgagtttttttgtatatttcgtatattagtcccttattagatgaatagcttgacaatattttctcctattctacaggttttctcttcactcagttgtttgctggacagaagctctttagcttaatgtagtgtcttttgtctatgatttgttgtttgcctatgcttctgatgtcttacccataaaaatctttgtgcagactaatgtcctcaagcattttccctatatttacttagagtagtttgataattttgg

SEQ ID NO: 362311 - DNA, 529 bp, Homo sapiens
atttaccttcccaccaacagcatgtaagagtttactgttctctggagcctcaccagcatttgttwttttttttgtcttttcaatgacagcaatttattcaaattgaagcaagattatatcacattgtagatttgatttgtatttccctgaggattagtgatactgagcattttaaaatttatttattggctatttgtatttctttttctaaaaaaaagtatagttagatattttgcccaattttaaactcagatttttttttactgtgaagttgtttgagtttttttgtatatttcgtatattagtcccttattagatgaatagcttgacaatattttctcctattctacaggttttctcttcactcagttgtttgctggacagaagctctttagcttaatgtagtgtcttttgtctatgatttgttgtttgcctatgcttctgatgtcttacccataaaaatctttgtgcagactaatgtcctcaagcattttccctatatttacttagagtagtttgataattttgg

SEQ ID NO: 362312 - DNA, 535 bp, Homo sapiens
aaagccaccactgactaggtccccccactgaccaggcttccaatgactaggtcaccaggtccccactgatgaggcctttactgaggaggccgccactaaccaggcccctgctgatcaggtcccamatgactaggtcctgatgaccaggtcatttctgaccatggtccactgaccaggccccagagcaaaggggttcaaagtctcattacaatgtccccctcagctcatagaccctccctccctgcatgtgtgcccagaggtcaggccctggggttttttttgggacatggcctttcctccaagacacagggagagacagttggcctcaggctccaggttcccagctccacactcaccccaaaggccctctggcccgtctcaaaggagaaagtgaggtggcctgacactgcctggacacaccatctaccctattcctgagtgtcagagtgtgaggaagggagggacatttggcagataaggcatgctgtgctgttgggtctctcagggcccttcccacagagccccgatctaaaca

SEQ ID NO: 362313 - DNA, 529 bp, Homo sapiens
atttaccttcccaccaacagcatgtaagagtttactgttctctggagcctcaccagcatttgtttttttttttgtcttttcaatgacagcaatttattcaaattgaagcaagattatatcacattgtagatttgatttgtatttccctgaggattagtgatactgagcattttaaaatttatttattggctatttgtatttctttttctaaaaaaaagtatagttagatattttgcccaattttaaactcagatttttttttactgtgaagttgtttgagtttttttgtatatttygtatattagtcccttattagatgaatagcttgacaatattttctcctattctacaggttttctcttcactcagttgtttgctggacagaagctctttagcttaatgtagtgtcttttgtctatgatttgttgtttgcctatgcttctgatgtcttacccataaaaatctttgtgcagactaatgtcctcaagcattttccctatatttacttagagtagtttgataattttgg

SEQ ID NO: 362314 - DNA, 535 bp, Homo sapiens
aaagccaccactgactaggtccccccactgaccaggcttccaatgactaggtcaccaggtccccactgatgaggcctttactgaggaggccgccactaaccaggcccctgctgatcaggtcccaaatgactaggtcctgatgaccaggtcatytctgaccatggtccactgaccaggccccagagcaaaggggttcaaagtctcattacaatgtccccctcagctcatagaccctccctccctgcatgtgtgcccagaggtcaggccctggggttttttttgggacatggcctttcctccaagacacagggagagacagttggcctcaggctccaggttcccagctccacactcaccccaaaggccctctggcccgtctcaaaggagaaagtgaggtggcctgacactgcctggacacaccatctaccctattcctgagtgtcagagtgtgaggaagggagggacatttggcagataaggcatgctgtgctgttgggtctctcagggcccttcccacagagccccgatctaaaca

SEQ ID NO: 362315 - DNA, 529 bp, Homo sapiens
atttaccttcccaccaacagcatgtaagagtttactgttctctggagcctcaccagcatttgtttttttttttgtcttttcaatgacagcaatttattcaaattgaagcaagattatatcacattgtagatttgatttgtatttccctgaggattagtgatactgagcattttaaaatttatttattggctatttgtatttctttttctaaaaaaaagtatagttagatattttgcccaattttaaactcagatttttttttactgtgaagttgtttgagtttttttgtatatttcgtatattagtcccttattagatgaatagcttgacaatattttctcctattctacaggttttctcttcactcagttgtttgctggacagaagctctttagcttaatgtagtgtcttttgtctatgatttgttgtttgcctatgcttctgatgtcttacccataaaaatctttgtgcagactaatgtcctcaagcattttccytatatttacttagagtagtttgataattttgg

SEQ ID NO: 362316 - DNA, 493 bp, Homo sapiens
tttaaagtgctaggattacaggaatgagccaccatgcctaatatagagtgtaatatcaytttcaaagtcttattcctagacccatttattgactttggcctaaataactcaatatgatatctctgaaactttttttgacatactgtggggaatgataatgaaggaagggggttagacactttttactaggagataactttgtgccatttaaggaggaacaaaaatgaattatcagaaaaataaaagtaaaatgaagtacaaaaattctgtggcaaagatgatgatagtaaagaatatatttttatgactcatggtagctttaactttgttcttaaaattctgagtaatttaagggttcacatttgaagaatctgctgcactacagataacattttattgcaagtaaatgcatttcaaaatttgctattggttttctattagattattctcagcctacttcattatcaagctatactattttattcatgcaatt

SEQ ID NO: 362317 - DNA, 493 bp, Homo sapiens
tttaaagtgctaggattacaggaatgagccaccatgcctaatatagagtgtaatatcattttcaaagtcttattcctagacccatttattgactttggcctaaataactcaatatgatatctctgaaactttttttgacatactgtggggaatgataatgaaggaagggggttagacactttttactaggagataactttgtgccatttaaggaggaacaaaaatgaattatcagaaaaataaaagtaaaatgaagtacaaaaattctgtggcaaagatgatgatagtaaagaatatatttttatgactcatggtagctttaactttgttcttaaaattctgagtaatttaagggttcacatttgaagaatctgctgcaytacagataacattttattgcaagtaaatgcatttcaaaatttgctattggttttctattagattattctcagcctacttcattatcaagctatactattttattcatgcaatt

SEQ ID NO: 362318 - DNA, 497 bp, Homo sapiens
gcaactggaagtgagttgtctcaagtttacttggctttaactcccaagaccccagcaaatgtctttctttcctccttttgtgtcctttcaccatccctcttcctttgaaaaaatgattatcagaactgtcatcctgatgyttcccttcctaactgctttttatggatgattatggccattttttcatctgtattcagcagtagtatacacttgtaatctctcttttttcatctcattttccttcccctgtggctagaatcatgctcagaaataaaaggaaattaaagctttccctggattctgttattttttaaattgctctccagtggttcttgttccagatttctctaaaggaaggctattcccttgctattcagagctgtgtccaaggaccagcacaaacatcacctgagtgctcatgagaaatgcagactccaatacctgctgagtcagaatgtgcactttccagaagctcctcaacgaattcatgacaattt

SEQ ID NO: 362319 - DNA, 497 bp, Homo sapiens
gcaactggaagtgagttgtctcaagtttacttggctttaactcccaagaccccagcaaatgtctttctttcctccttttgtgtcctttcaccatccctcttcctttgaaaaaatgattatcagaactgtcatcctgatgtttcccttcctaactgctttttatggatgattatggccattttttcatctgtattcagcagtagtatacacytgtaatctctcttttttcatctcattttccttcccctgtggctagaatcatgctcagaaataaaaggaaattaaagctttccctggattctgttattttttaaattgctctccagtggttcttgttccagatttctctaaaggaaggctattcccttgctattcagagctgtgtccaaggaccagcacaaacatcacctgagtgctcatgagaaatgcagactccaatacctgctgagtcagaatgtgcactttccagaagctcctcaacgaattcatgacaattt

SEQ ID NO: 362320 - DNA, 497 bp, Homo sapiens
gcaactggaagtgagttgtctcaagtttacttggctttaactcccaagaccccagcaaatgtctttctttcctccttttgtgtcctttcaccatccctcttcctttgaaaaaatgattatcagaactgtcatcctgatgtttcccttcctaactgctttttatggatgattatggccattttttcatctgtattcagcagtagtatacacttgtaatctctcttttttcatctcattttccttcccctgtggctagaatcatgctcagaaataaaaggaaattaaagctttccctggattctgttattttttaaattgctctccagtggttcttkttccagatttctctaaaggaaggctattcccttgctattcagagctgtgtccaaggaccagcacaaacatcacctgagtgctcatgagaaatgcagactccaatacctgctgagtcagaatgtgcactttccagaagctcctcaacgaattcatgacaattt

SEQ ID NO: 362321 - DNA, 409 bp, Homo sapiens
ccatttaaaattataatgagttgcatcaagagtttcttatcaatctctttttatgaaactgggtctcactctgtcaacccagggctagaatgcaggggcctgattatggctcactgtggtctcaaactcctgacctcaagcaatcttcccacctcaacttcctgaatagctggaactacagrtgcataccatcatgtcatgctaatgtttttattgttatctttgtagagacaaggcctcattatacctcccaggctggtctcaagctcctgggctcaagcaaatcttccacttctgcctcccaaaatgttgagataagcagtgtgcaccaccacacccagccctaatcaatttctttaaatcaatctcaatgttgcccaggcatggtggctctcacctgtaatctcag

SEQ ID NO: 362322 - DNA, 203 bp, Homo sapiens
agtcaggcatgatggtgtgtgcctgtagtcccagctgcttgggaagctgawgtgggaggatcacttgagcctcagaggtggatacagcagtgagccaagatcatgccactacactgcagcatgaacaacagagcaagaccctgcctccccaaaaatttcaatttaaaatgtgagaacaaagagagatacaaacaaaaaacaag

SEQ ID NO: 362323 - DNA, 203 bp, Homo sapiens
agtcaggcatgatggtgtgtgcctgtagtcccagctgcttgggaagctgaagtgggaggatcacttgagcctsagaggtggatacagcagtgagccaagatcatgccactacactgcagcatgaacaacagagcaagaccctgcctccccaaaaatttcaatttaaaatgtgagaacaaagagagatacaaacaaaaaacaag

SEQ ID NO: 362324 - DNA, 203 bp, Homo sapiens
agtcaggcatgatggtgtgtgcctgtagtcccagctgcttgggaagctgaagtgggaggatcacttgagcctcagaggtggatacagcagtgagccaagatcatgccactacactgcagcatgracaacagagcaagaccctgcctccccaaaaatttcaatttaaaatgtgagaacaaagagagatacaaacaaaaaacaag

SEQ ID NO: 362325 - DNA, 363 bp, Homo sapiens
caatttaaaatgtgagaacaaagagagatacaaacaaaaaacaagcctaattagtcaaygaaatatgagcttaagccaagaaagaaaacgaaaaacatgaagtacaataaagtacatggggaaatagatctataacagagccttcggtctttcataactctgataatactaattaatatttatgctgcaattagttttttgtaagtacttctgtgatagtgtttcttactataagacattcaattagctaaatatggtcatctaccattacctgaaagaacattattataacagagagagaaaactggaactttccatcaactttccacccagaaaaagaattggtcaccagaattctaaaga

SEQ ID NO: 362326 - DNA, 363 bp, Homo sapiens
caatttaaaatgtgagaacaaagagagatacaaacaaaaaacaagcctaattagtcaacgaaatatgagcttaagccaagaaagaaaacgaaaarcatgaagtacaataaagtacatggggaaatagatctataacagagccttcggtctttcataactctgataatactaattaatatttatgctgcaattagttttttgtaagtacttctgtgatagtgtttcttactataagacattcaattagctaaatatggtcatctaccattacctgaaagaacattattataacagagagagaaaactggaactttccatcaactttccacccagaaaaagaattggtcaccagaattctaaaga

SEQ ID NO: 362327 - DNA, 363 bp, Homo sapiens
caatttaaaatgtgagaacaaagagagatacaaacaaaaaacaagcctaattagtcaacgaaatatgagcttaagccaagaaagaaaacgaaaaacatgaagtayaataaagtacatggggaaatagatctataacagagccttcggtctttcataactctgataatactaattaatatttatgctgcaattagttttttgtaagtacttctgtgatagtgtttcttactataagacattcaattagctaaatatggtcatctaccattacctgaaagaacattattataacagagagagaaaactggaactttccatcaactttccacccagaaaaagaattggtcaccagaattctaaaga

SEQ ID NO: 362328 - DNA, 363 bp, Homo sapiens
caatttaaaatgtgagaacaaagagagatacaaacaaaaaacaagcctaattagtcaacgaaatatgagcttaagccaagaaagaaaacgaaaaacatgaagtacaataaagtacatggggaaatagatctataacagagccttcggtctttcataactctgataatactaattaatatttatgctgcaattagttttttgtaagtacttctgtgatagtgtttcttactataagacattcaattagctaaatatggtcatctaccattacctgaaagaacattattataacagagagagaaaactggaactttccatcaackttccacccagaaaaagaattggtcaccagaattctaaaga

SEQ ID NO: 362329 - DNA, 598 bp, Homo sapiens
caggttcccagctccacactcaccccaaaggccctctggcccgtctcaaaggagaaagtgaggtggcctgacactgcctggacacaccatctaccctattcctgagtgtcagagtgtgaggaagggagggacatttggcagataaggcatgctgtgctgttgggtctctcagggcccttcccacagagccccgatctaaacacacaacacagaggctacaggaagactaatccagaacctctgagacagccagggaccacatgaggactctccccagacagccagaaggccctttgctagtttcttggtacctcagtggatgtggcagtggttcttctgttggggaccagtgagtacacaatggggagggctcacctgtgcttcctcagtggctccacctcttcttctaaaaaaaattactcattccagagctggcgcagagaaaatacaagctgagcttagaacatcttctgccagaaagtaaaaaagtgccracagagtaatggagacaaatcaaagagacataaagtcagcttggaatgtctactactggcctaatcttggggaattggagcatcagaatcatgagctttccttc

SEQ ID NO: 362330 - DNA, 500 bp, Homo sapiens
caaaaaacaacaagtaaaatgcttcttacatggaagactgtattctaggtactccaggatacacacaaatatgtttactgacytccagtagcttatggtatgcaggagcttccaatgatcattcaaaaaactaaatagaaaaccttctgacattcaaactttcagaatatgatataagaactttgagtggttattttattttattttattttttaagatgtagtcttgctctgtcacccagcctacagtgcaatggtgcgatcttggctcactgcaatctttgcctcctgggttcaagcgattctcctgccttggcctcctgagcaactgggattacaggcatgcactatcatgcctggataatttttgtgctttttttttttttagggacagggtttcaccatgttggccaggctgatcttgaactcctgacctcaggtgatctatccacctcggcctccaaaagtgctgggatcacaggtgtgagccaccacgcctgg

SEQ ID NO: 362331 - DNA, 500 bp, Homo sapiens
caaaaaacaacaagtaaaatgcttcttacatggaagactgtattctaggtactccaggatacacacaaatatgtttactgacttccagtagcttatggtatgcaggagcttccaatgatcattyaaaaaactaaatagaaaaccttctgacattcaaactttcagaatatgatataagaactttgagtggttattttattttattttattttttaagatgtagtcttgctctgtcacccagcctacagtgcaatggtgcgatcttggctcactgcaatctttgcctcctgggttcaagcgattctcctgccttggcctcctgagcaactgggattacaggcatgcactatcatgcctggataatttttgtgctttttttttttttagggacagggtttcaccatgttggccaggctgatcttgaactcctgacctcaggtgatctatccacctcggcctccaaaagtgctgggatcacaggtgtgagccaccacgcctgg

SEQ ID NO: 362332 - DNA, 500 bp, Homo sapiens
caaaaaacaacaagtaaaatgcttcttacatggaagactgtattctaggtactccaggatacacacaaatatgtttactgacttccagtagcttatggtatgcaggagcttccaatgatcattcaaaaaactaaatagaaaaccttctgacattcaaactttcagaatatgatataagractttgagtggttattttattttattttattttttaagatgtagtcttgctctgtcacccagcctacagtgcaatggtgcgatcttggctcactgcaatctttgcctcctgggttcaagcgattctcctgccttggcctcctgagcaactgggattacaggcatgcactatcatgcctggataatttttgtgctttttttttttttagggacagggtttcaccatgttggccaggctgatcttgaactcctgacctcaggtgatctatccacctcggcctccaaaagtgctgggatcacaggtgtgagccaccacgcctgg

SEQ ID NO: 362333 - DNA, 500 bp, Homo sapiens
caaaaaacaacaagtaaaatgcttcttacatggaagactgtattctaggtactccaggatacacacaaatatgtttactgacttccagtagcttatggtatgcaggagcttccaatgatcattcaaaaaactaaatagaaaaccttctgacattcaaactttcagaatatgatataagaactttgagtggttattttattttattttattttttaagatgtagtcttgctctgtcacccagcctacagtgcaatggtgcgatcttggctcactgcaatctttgcctcctgggttcaagcgattcycctgccttggcctcctgagcaactgggattacaggcatgcactatcatgcctggataatttttgtgctttttttttttttagggacagggtttcaccatgttggccaggctgatcttgaactcctgacctcaggtgatctatccacctcggcctccaaaagtgctgggatcacaggtgtgagccaccacgcctgg

SEQ ID NO: 362334 - DNA, 484 bp, Homo sapiens
atattttaaataaactacaatgacaaaattatgatgataaagacttaccatattggtattaagagtctctgcttctagaactggttatttgcaggaaaatacatgttattcaattagatgaagtgttttatataaactcttcatggacaactcataaatcacataaaaatccctttgcaatacaaatcttgagaacataaatttaaatttctacatttccacaatttatatttttaaatcagatacaatgttgcccaggctgttctcaaactcctgtgttcaagcratcttactgtctcaaactcccaagtagcagggactacaggtgtacgccaccaaactcagctatttttctacaatttttaatacttttttgtctctctacagaaccaataatataagtagagaaacaatctctcctaaaaactatgtggcaccaaaatgataagtttccaagaacaaaagctatatgctatgtgctgaa

SEQ ID NO: 362335 - DNA, 484 bp, Homo sapiens
atattttaaataaactacaatgacaaaattatgatgataaagacttaccatattggtattaagagtctctgcttctagaactggttatttgcaggaaaatacatgttattcaattagatgaagtgttttatataaactcttcatggacaactcataaatcacataaaaatccctttgcaatacaaatcttgagaacataaatttaaatttctacatttccacaatttatatttttaaatcagatacaatgttgcccaggctgttctcaaactcctgtgttcaagcgatcttactgtctcaaactcccaagtagcagggactacaggtgtacrccaccaaactcagctatttttctacaatttttaatacttttttgtctctctacagaaccaataatataagtagagaaacaatctctcctaaaaactatgtggcaccaaaatgataagtttccaagaacaaaagctatatgctatgtgctgaa

SEQ ID NO: 362336 - DNA, 484 bp, Homo sapiens
atattttaaataaactacaatgacaaaattatgatgataaagacttaccatattggtattaagagtctctgcttctagaactggttatttgcaggaaaatacatgttattcaattagatgaagtgttttatataaactcttcatggacaactcataaatcacataaaaatccctttgcaatacaaatcttgagaacataaatttaaatttctacatttccacaatttatatttttaaatcagatacaatgttgcccaggctgttctcaaactcctgtgttcaagcgatcttactgtctcaaactcccaagtagcagggactacaggtgtacgccaccaaactcagctatttttctacaatttttaatacttttttgtctctctacagaaccaataatataagtagagaaacaatctctcctaaaaactatrtggcaccaaaatgataagtttccaagaacaaaagctatatgctatgtgctgaa

SEQ ID NO: 362337 - DNA, 484 bp, Homo sapiens
atattttaaataaactacaatgacaaaattatgatgataaagacttaccatattggtattaagagtctctgcttctagaactggttatttgcaggaaaatacatgttattcaattagatgaagtgttttatataaactcttcatggacaactcataaatcacataaaaatccctttgcaatacaaatcttgagaacataaatttaaatttctacatttccacaatttatatttttaaatcagatacaatgttgcccaggctgttctcaaactcctgtgttcaagcgatcttactgtctcaaactcccaagtagcagggactacaggtgtacgccaccaaactcagctatttttctacaatttttaatacttttttgtctctctacagaaccaataatataagtagagaaacaatctctcctaaaaactatgtgrcaccaaaatgataagtttccaagaacaaaagctatatgctatgtgctgaa

SEQ ID NO: 362338 - DNA, 568 bp, Homo sapiens
tccatgattactgcaaacaatttgatccactgaagrtttatacaggaataaatattaacaaagtcacactcgtatgatttaaaagtcaaagtattagtatttatccaaataaactttaaccaaatttcatatttcctctattggagaaagcatttcctaatgtgattttcctgtgactacttattttccagttcatttatttttcagctcccaccctgtcacagtacttaccaatctttattagttaccaaactgaaacacattttttgaatcaactagccatgtgtatgtttttctctgaccagctttccattaccaccataaaacaatgataggtaaaccactgctaaatttgaaaagtaaatactatgcaaaactacactcagagtgagaagattaattttacaagagaccactttaccttagtagcaacactcaagtcttcatcatccaatgtaggcaatgaatccacacacagttcatgcaaaatgcttgagagcaaaaatacacaatgaaaatgagcaagttgatttctttacaatttttttaactgccagtttatatccag

SEQ ID NO: 362339 - DNA, 568 bp, Homo sapiens
tccatgattactgcaaacaatttgatccactgaagatttatacaggaataaatattaasaaagtcacactcgtatgatttaaaagtcaaagtattagtatttatccaaataaactttaaccaaatttcatatttcctctattggagaaagcatttcctaatgtgattttcctgtgactacttattttccagttcatttatttttcagctcccaccctgtcacagtacttaccaatctttattagttaccaaactgaaacacattttttgaatcaactagccatgtgtatgtttttctctgaccagctttccattaccaccataaaacaatgataggtaaaccactgctaaatttgaaaagtaaatactatgcaaaactacactcagagtgagaagattaattttacaagagaccactttaccttagtagcaacactcaagtcttcatcatccaatgtaggcaatgaatccacacacagttcatgcaaaatgcttgagagcaaaaatacacaatgaaaatgagcaagttgatttctttacaatttttttaactgccagtttatatccag

SEQ ID NO: 362340 - DNA, 568 bp, Homo sapiens
tccatgattactgcaaacaatttgatccactgaagatttatacaggaataaatattaacaaagtcacactcgtatgatttaaaagtcaaagtattagtatttatccaaataaactttaaccaaatttcatatttcctctattggagaaagcatttcctaatgtgattttccygtgactacttattttccagttcatttatttttcagctcccaccctgtcacagtacttaccaatctttattagttaccaaactgaaacacattttttgaatcaactagccatgtgtatgtttttctctgaccagctttccattaccaccataaaacaatgataggtaaaccactgctaaatttgaaaagtaaatactatgcaaaactacactcagagtgagaagattaattttacaagagaccactttaccttagtagcaacactcaagtcttcatcatccaatgtaggcaatgaatccacacacagttcatgcaaaatgcttgagagcaaaaatacacaatgaaaatgagcaagttgatttctttacaatttttttaactgccagtttatatccag

SEQ ID NO: 362341 - DNA, 568 bp, Homo sapiens
tccatgattactgcaaacaatttgatccactgaagatttatacaggaataaatattaacaaagtcacactcgtatgatttaaaagtcaaagtattagtatttatccaaataaactttaaccaaatttcatatttcctctattggagaaagcatttcctaatgtgattttcctrtgactacttattttccagttcatttatttttcagctcccaccctgtcacagtacttaccaatctttattagttaccaaactgaaacacattttttgaatcaactagccatgtgtatgtttttctctgaccagctttccattaccaccataaaacaatgataggtaaaccactgctaaatttgaaaagtaaatactatgcaaaactacactcagagtgagaagattaattttacaagagaccactttaccttagtagcaacactcaagtcttcatcatccaatgtaggcaatgaatccacacacagttcatgcaaaatgcttgagagcaaaaatacacaatgaaaatgagcaagttgatttctttacaatttttttaactgccagtttatatccag

SEQ ID NO: 362342 - DNA, 490 bp, Homo sapiens
atccctgctcctgaaaaacaagctaactggagtctccatcacctgccaccagctatacacactaccaactaccyaactgaactccatgactgatttgccagctaatcatgcccctaacccagcccacatggacatgggaaggacatcagtgaactgtgaaaagaggcagaggtgaggagacacctgccctgtgccacacatctatgtagttcagcaatttccagccccttagtactccaggggctctaagccacccctttgtaagtcaggatggaagtagatgacaccacatttctatctgctgtagacattcttcccagtgtctcaaaatgttttggcatctttcagtaaaaatcttcaagtttgtcagtccttgatttaaaaaaaaagcagcaaaatttttagagctcccttgaaccttctattttaatgtgcctttgtagataattcccaacatcttgtgtccttcatttttataatttatctttat

SEQ ID NO: 362343 - DNA, 636 bp, Homo sapiens
taagttcctcttgctctgcaaggcaataaacaacttcagaaaaaagtctttagtaaggctaacactggtgttcagaatgtttttgaaaagtaaggtgaaaacttcttacgctgaaaatttattataaacaattaggaacaactcacactagtattccttcttcaaaaatggaagtagcaatgagagagtgctttttacaatgatatagtagtttactgtagccagcctctcaatgcaaatgataaaattgtgtggttgtcagaatatttgctacamaggggaaaagaaaaaatctgaggcagcagtttctcttaatgtggtaatagcctagtcataaaagaacatcctacttcattgtcatgaatgtatgaatgattcccgtagtttaccatgaatatttttaccatttacaagaaaacagctgttacaactaaaagaatgattagctgctaagtacataacaagttgctttttaggactgctttccaaagtacccccatttcacccttcacttcatttaggtgcatgcatattgacataagagggcatttccagaattttctggattaagtagaagcaaattcttaaagaagtccataaggtaaagtttctgctactctcagaatttgagcattt

SEQ ID NO: 362344 - DNA, 636 bp, Homo sapiens
taagttcctcttgctctgcaaggcaataaacaacttcagaaaaaagtctttagtaaggctaacactggtgttcagaatgtttttgaaaagtaaggtgaaaacttcttacgctgaaaatttattataaacaattaggaacaactcacactagtattccttcttcaaaaatggaagtagcaatgagagagtgctttttacaatgatatagtagtttactgtagccagcctctcaatgcaaatgataaaattgtgtggttgtcagaatatttgctacaaaggggaaaagaaaaaatctgaggcagcagtttctcttaatgtggtaatagcctagtcataaaagaacatcctacttcattgtcatgaatgtatgaatgattcccgtagtttaccatgaatatttttaccatttacaagaaaacagctgttacaactaaaagaatgattagctgctaagtacataacaagttkctttttaggactgctttccaaagtacccccatttcacccttcacttcatttaggtgcatgcatattgacataagagggcatttccagaattttctggattaagtagaagcaaattcttaaagaagtccataaggtaaagtttctgctactctcagaatttgagcattt

SEQ ID NO: 362345 - DNA, 618 bp, Homo sapiens
atattaactataggcaccaatggagcacattgagaagcaatttctctcccggaagcaccaaagccttttaagtagttcaggcttcactgttcacgtccagttgccaaaaagcaaatgaattgcctgatttaaaagacatttgtttcctcatttttttggcagtcaggatgatcctcttgttttccccataatcaggctccacagaactacatgcctgtgcactaacaatttaaaataaacaaagcgtggttttcaggtgaccgctttgcctctatttgcttatagactgtctcgaggrtgcctacggagctggctgcacttcagaatgtcagtgtgtggaggagaataccctggaatgcagtgccaaaaatggtagttgcacctgcaaatctggttaccaaggcaacagatgccagaaaggtatgctctgatgatagattttctttcttctttaataataatcctcagcctttgttcagcatcatatgattattaattagttaatccaccagtgccctcagaagatgggtaagctctattaatcccctatatgcaggtgaggaaactgagacatagggcaatagagttatttaatgcagtcttcttagcctctgctgc

SEQ ID NO: 362346 - DNA, 544 bp, Homo sapiens
aatataaaacaataacacacattacacaattactttggagaataaatgataaaacsatagtgcttactttcaagaactagagaccatagcacatcatagcatggatttgggggaaaaaatatgggttcaggttctgactccccacttattatttgaccctgggcaaataataagatgggtgtaagaaagatgggtctaagtaagttaggtgtaataatatcaatgatgtgtatcaaatgataatatcaattgatatgtaataatatcaatattcacttatatattcatttattcattggtaaatatttgtctgaactaatgtataactgattatgtatcaaatgctggctatgcagtgataaacaagatgtataccctgccattataaaatttacagtcttgaaaagcataaatttaaaaaaattatacgaatgactgagaccaattctcaaaagaaagaaattggtgtgcaataaaaggctcttttaatggtactgtatataaagtatttggaatgtagtaaacactcagtaaatgatggtag

SEQ ID NO: 362347 - DNA, 634 bp, Homo sapiens
tcctctttcccttttactcagaagtatagagttttctgtaaagctgtttagtaaactaattaaataacttaatgagatataagcttggcaggtaagatagcctgggataagtataggacctaagggagaaaatacctgggtttttgctctttgccagccatataatcttgagtaatttgcataacctgttttgagcccagatttttgttyatttgtttgtttaatacactaaatgggattataaatcaaacttcaaataattcttgtgagagacaaaaataaatcaaatgtgaggcacaatacctcataaaaaatagatgtccaatatactgcagaacatttttcattaacccatttgtcctacataatgcctaattttagattttatcttcatgaaaaatatctattgtactgaattatattgataagtttataaaaggttcaaacatacactacaagctgctgaaaataatcccacatttcatcactgtaacagaccagagacatatataaatcactgggtcactgaaaatcttaaaactttaatatacctggagtcattaggaattgtcttgcctaaaactctagttgtggatttgggaagattattctggcatttctgaatgtttttctg

SEQ ID NO: 362348 - DNA, 634 bp, Homo sapiens
tcctctttcccttttactcagaagtatagagttttctgtaaagctgtttagtaaactaattaaataacttaatgagatataagcttggcaggtaagatagcctgggataagtataggacctaagggagaaaatacctgggtttttgctctttgccagccatataatcttgagtaatttgcataacctgttttgagcccagatttttgttcatttgtttgtttaatacactaaatgggattataaatcaaacttcaaataattcttgtgagagacaaaaataaatcaaatgtgaggcacaatacctcataaaaaatagatgtccaatatactgcagaacatttttcattaacccatttgtcctacataatgcctaattttagattttatcttcatgaaaratatctattgtactgaattatattgataagtttataaaaggttcaaacatacactacaagctgctgaaaataatcccacatttcatcactgtaacagaccagagacatatataaatcactgggtcactgaaaatcttaaaactttaatatacctggagtcattaggaattgtcttgcctaaaactctagttgtggatttgggaagattattctggcatttctgaatgtttttctg

SEQ ID NO: 362349 - DNA, 634 bp, Homo sapiens
tcctctttcccttttactcagaagtatagagttttctgtaaagctgtttagtaaactaattaaataacttaatgagatataagcttggcaggtaagatagcctgggataagtataggacctaagggagaaaatacctgggtttttgctctttgccagccatataatcttgagtaatttgcataacctgttttgagcccagatttttgttcatttgtttgtttaatacactaaatgggattataaatcaaacttcaaataattcttgtgagagacaaaaataaatcaaatgtgaggcacaatacctcataaaaaatagatgtccaatatactgcagaacatttttcattaacccatttgtcctacataatgcctaattttagattttatcttcatgaaaaatrtctattgtactgaattatattgataagtttataaaaggttcaaacatacactacaagctgctgaaaataatcccacatttcatcactgtaacagaccagagacatatataaatcactgggtcactgaaaatcttaaaactttaatatacctggagtcattaggaattgtcttgcctaaaactctagttgtggatttgggaagattattctggcatttctgaatgtttttctg

SEQ ID NO: 362350 - DNA, 634 bp, Homo sapiens
tcctctttcccttttactcagaagtatagagttttctgtaaagctgtttagtaaactaattaaataacttaatgagatataagcttggcaggtaagatagcctgggataagtataggacctaagggagaaaatacctgggtttttgctctttgccagccatataatcttgagtaatttgcataacctgttttgagcccagatttttgttcatttgtttgtttaatacactaaatgggattataaatcaaacttcaaataattcttgtgagagacaaaaataaatcaaatgtgaggcacaatacctcataaaaaatagatgtccaatatactgcagaacatttttcattaacccatttgtcctacataatgcctaattttagattttatcttcatgaaaaatatctattgtactgaattatattgataagtttataaaaggttcaaacatacactacaagctgctgaaaataatcccacatttcatcactgtaacagaccagagacatatakaaatcactgggtcactgaaaatcttaaaactttaatatacctggagtcattaggaattgtcttgcctaaaactctagttgtggatttgggaagattattctggcatttctgaatgtttttctg

SEQ ID NO: 362351 - DNA, 584 bp, Homo sapiens
tgatggctaaaaagttccagattgggtatctggatctggtgagggcctcaggcttcatccactcattgggaaacatgaaggggagctggcttgtacacaggtcacatggagagaaagcgagagagagggaagagcaatatatcaggctttgtaacaaccagctcttggcaggaatgaatatagtagaactcactcaataccccccatggaaggcattactatactcaggagggatccacctccatgacccagacagctcccattaagtctcacctccaacagyatatataaaatttgaacatgaggtttggcagagacaaaccttcaaaccacagcaacatctttgtaaatgatctcaccaatactctggtctcaggttattcacctctttatcattaatcatcaatgaccttctctcctcctcttccccaatcatcgtatgtcatagtcaattccaatgacactttttaggatttattagcaccaaattctaagtattgtcaaattattgaatgtatgccttctattctggcaccataattccctgtcttttctctctacttactcaagtaactccacttaaa

SEQ ID NO: 362352 - DNA, 584 bp, Homo sapiens
tgatggctaaaaagttccagattgggtatctggatctggtgagggcctcaggcttcatccactcattgggaaacatgaaggggagctggcttgtacacaggtcacatggagagaaagcgagagagagggaagagcaatatatcaggctttgtaacaaccagctcttggcaggaatgaatatagtagaactcactcaataccccccatggaaggcattactatactcaggagggatccacctccatgacccagacagctcccattaagtctcacctccaacagcakatataaaatttgaacatgaggtttggcagagacaaaccttcaaaccacagcaacatctttgtaaatgatctcaccaatactctggtctcaggttattcacctctttatcattaatcatcaatgaccttctctcctcctcttccccaatcatcgtatgtcatagtcaattccaatgacactttttaggatttattagcaccaaattctaagtattgtcaaattattgaatgtatgccttctattctggcaccataattccctgtcttttctctctacttactcaagtaactccacttaaa

SEQ ID NO: 362353 - DNA, 555 bp, Homo sapiens
ttgttattattaacatattattactatatactctcttgaatcctggatagttttgaaattttagcaaacttgaaaaaaattaaagttggtgattatggatattcaaaatcaartctttcttattaagtctgtaacattattagctcacagaaaagtagaatttgcgatgcagaagaaccacagccatgaacctataagtattcccaaaatgtttagtgtttgtctagttggtgttagatattcattttcaccctcacagatcttcagtcaatgagatacaatttaactaggttaataatcattgaggaccaaccacctataatcttccagattggactctgtgagggaatttgaaataagtaattcatagttcctcagggagctcattattttgtagaatgtagcatcaaaaatatcaagcaccaaaagacaaaaagacaaagaagatctaaggaaatcaaaaccctgaatagcagtggagatgtgaatatttatttgctaataaatattgagcatctaatatatatcagattatataaaaggttattttatgtt

SEQ ID NO: 362354 - DNA, 555 bp, Homo sapiens
acagactgcctcctcaagtgggtccctgacctctgtatctcttaactgggagacacctctcagcagggatcaacagacacctcatacaggaaagttccggctggcatcaggagggtgcccctctgggacgaagcttccagaggaaggaacaggcagcaatctgctgttctacagcctccgctggtgatacccaggcaaacagggtttggagtggacctccagcaaataccagcagagctgtggaagaggggcctgactgttagaaggaaaactgacaaacagaaagcaataacatcaatctcaatgaaaaagatgcccacagaaaaaccccatccaaaagccatcagcatcaaagatcaaaggtagaaaaatccacaaagatgaggaaaaatcagcgctaaaatgctgaaaattccaaaaaccagaatctctcttttccaaaygatcacaactcctctccagcaggggcacaaaactggacatagaatgactttgacaaattgacagaaataggcttaagaaggtgagcaataacaaacttctgtaagctaaaag

SEQ ID NO: 362355 - DNA, 533 bp, Homo sapiens
gcaaccatggcctttgctccagttcccaatatgttcctctctccatctgagaccacctcagcctggacttcattatccatatcactgtcaacattttggtcaaaaccattygacaagtctctaggaagtttcaaactttcccaaatcttcctgtctttttctgaaccctgaaaactgctccaaccactctgctataaagaactacatgagactaagtaatttattaagaaaagatatttaattgacttacagttcaattaaacctggaggacagcagacctcttctcacagaccactaggcagtgccccagtagggactctgtgtggcaactcctaccctacatttccctgctgtactaccctcgaagaggtactgcataagagccccgcccatgcagcaaacttatgcctggatacccaggcatttcaatacatcctctcaaatctaggcagaggttcccaaacttcagttcttgacttctgtgcactcacaggctcaacaccacatgaaagctgtcaaggttggggacttg

SEQ ID NO: 362356 - DNA, 545 bp, Homo sapiens
acagtgagacttccatttaaaaacacaactttcaactgctatgttgaaaaaagactgtagaagagaatgaaaagatcatggaaaccaagccaaaaawtattgctgaaatttaagtgaaagagggtgacttgggctagtgtgataatggtggagttggtaagaactagccaaattttttgtatttttaaataagattttttttatgagcatgatgtggagtaagagacaaagagaggaatcaagaataatcacaacatctttggtctcagccaaataattgatctgatatttactgagtttagaatgagtacataagatgcagatttaaagagaaaaatcagaatttcatttccaaaccttttacttttctagatagatatctaagtgtggatatcaaatatgtagttgtagactagaatttagcaatgtgatctaggctgaaaacaacttttaatccttaaaacagcattttccaaagtgtattccgtaagtgtctatttctgcagcaggttaataagtactaaacacacagcttatttaatcaa

SEQ ID NO: 362357 - DNA, 545 bp, Homo sapiens
acagtgagacttccatttaaaaacacaactttcaactgctatgttgaaaaaagactgtagaagagaatgaaaagatcatggaaaccaagccaaaaaatattgctgaaatttaagtgaaagagggtgacttgggctagtgtgataatggtggagttggtaagaactagccaaattttttgtatttttaaataagattttttttatgagcatgatgtggagtargagacaaagagaggaatcaagaataatcacaacatctttggtctcagccaaataattgatctgatatttactgagtttagaatgagtacataagatgcagatttaaagagaaaaatcagaatttcatttccaaaccttttacttttctagatagatatctaagtgtggatatcaaatatgtagttgtagactagaatttagcaatgtgatctaggctgaaaacaacttttaatccttaaaacagcattttccaaagtgtattccgtaagtgtctatttctgcagcaggttaataagtactaaacacacagcttatttaatcaa

SEQ ID NO: 362358 - DNA, 575 bp, Homo sapiens
tgtgtatgtataccacattgtctttatctgtttaaccattgatgaaaatatgttgattccatatcttggctattgtgaatagtgatggaagaaaacaggggaaacactttatgacattggtctgggcaaggattttttggataaggcctccaccagaaaggcaacaaaagcaaaaacagacaaatgggatcacatcaaactacaragcttctgcaaagcaaaaaaaaacaaacaaaatcaaacaacaacaacaacaacaaaatatatggagtaaggagaaaacctacagaatgggaggaaatatttgccaactatccatctgacaaggagttaatattcagaatataatgaactcaatagcagaaaaacaaataatctgatttaaaaataggcaaaagacctgaatagacattttttcaaaggaaaacaaacaaatgaccaatagggatgtgagaacattctcagcagtaatcatcaggaaaacacaaatcaaaaccacaatgagatatcatctcacttagaatggtcatgaataaaaagaaaaaataacaaatgctggcatagatgtggacaaa

SEQ ID NO: 362359 - DNA, 575 bp, Homo sapiens
tgtgtatgtataccacattgtctttatctgtttaaccattgatgaaaatatgttgattccatatcttggctattgtgaatagtgatggaagaaaacaggggaaacactttatgacattggtctgggcaaggattttttggataaggcctccaccagaaaggcaacaaaagcaaaaacagacaaatgggatcacatcaaactacagagcttctgcaaagcaaaaaaaaacaaacaaaatcaaacaacaacaacaacaacaaaatatatggagtaaggagaaaacctacagaatgggaggaaatatttgccaactatccatctgacaaggagttaatattcagaatataatkaactcaatagcagaaaaacaaataatctgatttaaaaataggcaaaagacctgaatagacattttttcaaaggaaaacaaacaaatgaccaatagggatgtgagaacattctcagcagtaatcatcaggaaaacacaaatcaaaaccacaatgagatatcatctcacttagaatggtcatgaataaaaagaaaaaataacaaatgctggcatagatgtggacaaa

SEQ ID NO: 362360 - DNA, 581 bp, Homo sapiens
tctgtgatttgtgagactctcaaaagtacagggcttttgcctgttcagtatctgtttcaatatctaccatcttcaaaaccctaaataaggctgggtgtgatagctcacacctgtaatcccagcacgttgggagactgaggcgrgcagatcatttgaggtcaggagttcaagaccagcctggccaatatggtgaaaccccatctctactaaaaatacaaaaaattagctgggcgtggtggcacatgcctgtagctccagctacttgggaggctaaggcatgagagtcgcttgagcccggggaactggaggttgaaaagagccgaaattgcaccactgaactccagcctgggcagtgggagtgagatcctgtctcaaaaaaacaaaaacaaaacaaacccaaaaaaccctaaacaggatggaccagtgaataatttggcttctgtgtatgatttactattctgaaaagggacaatctggattcagattcaagctgtatccagactctagaaagatccagaatttgcagctatgcaaccttggttgaggcggtccaaggagattactgctttatcctgttttca

SEQ ID NO: 362361 - DNA, 581 bp, Homo sapiens
tctgtgatttgtgagactctcaaaagtacagggcttttgcctgttcagtatctgtttcaatatctaccatcttcaaaaccctaaataaggctgggtgtgatagctcacacctgtaatcccagcacgttgggagactgaggcgggcagatcatttgaggtcaggagttcaagaccagcctggccaatatggtgaaaccccatctctactaaamatacaaaaaattagctgggcgtggtggcacatgcctgtagctccagctacttgggaggctaaggcatgagagtcgcttgagcccggggaactggaggttgaaaagagccgaaattgcaccactgaactccagcctgggcagtgggagtgagatcctgtctcaaaaaaacaaaaacaaaacaaacccaaaaaaccctaaacaggatggaccagtgaataatttggcttctgtgtatgatttactattctgaaaagggacaatctggattcagattcaagctgtatccagactctagaaagatccagaatttgcagctatgcaaccttggttgaggcggtccaaggagattactgctttatcctgttttca

SEQ ID NO: 362362 - DNA, 581 bp, Homo sapiens
tcctgtttgtgcagcttagtaatcacacaagagaggaagagcagagacagttgagagtaaaacaagagaacaatatattcacgctacataaagaagtgaggtgggaatatggagaaagaggagcagatgagaatcaaagaaaagaaaaatcaggtgattgaagtagacacattgaatgaggacagacaaatgaatacgaagccctcttctttaacctttttawggattgatgatttttgagaaaggggcatgttttagcattcatattctgataaatacattcgcatgatgtgatgaaaacacacttctgaaattcttttaaaagttctttacgttcagatttttacaagaacagcttagttttataaaagttattttaaagaaaagaataagaaaccaatattacattttgaattaatgaccttggtcttaatttgaagtttggccaagcacaggggatgcctgatctcataaaattcattctgttcatagtttattgagagttcaaaaggatcctgctacagaaactttacctgcacattgaagtcatgtgcaggcaatatggattgacaatgtctgag

SEQ ID NO: 362363 - DNA, 464 bp, Homo sapiens
ttttactcaactctaagtcttgtccttgctgatgtgaagtggaagcgatggtcagaaatgccatggtcatcttgggacatgaagtgactttgaagattggtggcatatgctgaggaacaaacagcagatagaagaccagggcctattaatagtgaagcagacacacctcataccagcagcagactgcctacatctagacttctctygcttatgaaataaataaaattttatcttgtttaagcctctgacataaaaaatcagcccaacttaattctgatacttacatttatagaccaaaatgtctagaattgcaatagctacttttgccttattgctgttgatataccctacactgctatgaaaagggtctcaataactttaagaaatggccatgagaaatgcatgaactcacatagaagaaataaaaaaaatcctgagcaaatgaggaacagctcatgagctat

SEQ ID NO: 362364 - DNA, 544 bp, Homo sapiens
tattgatgtgaaaccgtggggagtttctcaactgtggtatacttattcataaagtgagagtttgcaaaacagccacataaatatgggtcataaagaatggccataagtaaagcatctacctttagttaacaaaattctaggctgctaggcttttaggacattgggaagatcagactacttgcaaagtgaaagatttagacagcctacagcattcagtagcagagattcaatagatggcactcttccctctgctttgagctcattcctcaagatgactcagatttccaggtctccagacaaatatgctgggccctccttcttatctcttcaacatttctctccaatcactcacctatatttaatttggtgcttcagccacagtaagctacttatggatgccttaatatctcattctctcttaggtccctattctttttcaaaatgtgctctctcaggttgggaaatccctcctctatcttctcatcaacttgagcagtatgtctactgctagccctttcttctraactctcccctcatcatcatg

SEQ ID NO: 362365 - DNA, 316 bp, Homo sapiens
gtgtgagaacgtactaatgtaatattcaaaaaggatttagaaaatgtttgtgagcatctgtttaatactataataattctcacatagtttttcagcaattagataattcttaggataatgaaaactatctttccaagttggatggagcccactgctatattaaagatcaaataaagcttgtaataacaatcctacttatttagagtcatttaatctagcatctatcmctttacatttttaacatcataagatttttaaaatgtattatatctgttaataagaacacattaagaaggactctctgggttgaatatat

SEQ ID NO: 362366 - DNA, 526 bp, Homo sapiens
aaatgggatttcatcaaaataaaaaagcttctgtactgcaaagraaaccattaatagaggaatgaggcgacccacaggttaagaaaaatatttgctaatcatgcattgcacatggggaaaatatctaatatattcatagaactaaaactactaaataatgagaaaacataacattcttaaaactgtacaaagagtgtgaacagacatttgtcaaaagaaaatatacaaatgtctagctaatatactaaaaatgctcaacatttctaattacaggagaaatacaaattaaaaccaaattaaaaatgagatatcatctcatacctgtcagaatggcaattatataaatatgaaagataaaaagtgttagtgagaatgtggagaaaagtaaatgcttatatgctattggtgacctcattaattagtacagcctttttgacaaatagggtgaagattcctcaaaaaacgaaaagtagaattactataggatccagtaattcccctactgtgtatatactcaaaagcattg

SEQ ID NO: 362367 - DNA, 564 bp, Homo sapiens
gcaacaaagtgagatcccattctaaacaaaatttaaaaattagttgggcatagtggtacatgctcgtggtcccaggtactcagggggctgaggcagtatgatcacttgaatccaagcagtcaaggctgcagtgagacagtgagaggtgattacaccacagccctccaacctgggcagtggagtgagaccctgtctaaaaaaacaaaaagaatgttaattcaacttctgggaaagagggacattttttaaattactattttcccgtggatactgagtccaaaaaatgatcatgaagttttgtaccttaatggctctcagctacatttaagacatttcaaggtaactttaaagtttcagataattataacaaaatattcaatcatattctatatttatctgcccccaaatgattttagtaagaaaaatatttactttcttttactccatcaaagcttyaggcatattctcagatttcagacaccattttatttcaaaaattatctaggaaatactctacctacagtcatcgggttctactcaaaactacacatggtcagttgagat

SEQ ID NO: 362368 - DNA, 598 bp, Homo sapiens
gtgcaattttgaggtaatcccctctgagaacagtacagggagaattttcactgtggataaaatgagttgatcagctccctggagataacaggagataggaagggaagattcaggttttttaaaaagtgtaataacatcaaactttacccattgcccagttttgcaagaaacttttctattaaccattgcacctgacttctaagccaagtaaaggaatgaaagtttattctgtcttagttgttttcaatgcatctatgcccattaactggaacagaaacttcaaacacgctggctttaaaaaattagcaatatatccagccaaactaagcttcataagtgaaggagaaataaaatcctctacagacaagcaaatgctgagagattttgtcaccaccaggcctgccctaaaagagctcctgaaggaagcactaaccatggaaaggaacaaccggttccagccactgcaaaamcatgccaaattgtaaagaccatccaggccaggaagaaactgcattaactaacgagcaaaataaccagctaacatcataatgaaaggatcaaattcacacataacaatattaaccttaaatgtaaatgg

SEQ ID NO: 362369 - DNA, 642 bp, Homo sapiens
tgtcttcacttttttttatgatcctcataaaaaaaagccagaaagttttttttttatgcacaataattaaagagccaaactttctggaaaggactgtaaaacttgtacactatcagtgaaatataagccccttacccctcaggaagaagtctcaaagtggagtkttctttctgagtggagtataaagctctgtgctcagggtgacgttagtgcataggtgtatctccaccttttctatccttcttatgtggatatttttttagtcatccagtgtgtaggaggctgggtgactaaaaaaatttcaactggattttggctttctctagagagtactgatccatttgtaggtgtttattgatgtgattgcagcaggaggggtagtcaagagccccttattctgccatgttactcaaatgattaaataatgtatcttatttatatttccaatcttttttcaatagtctaatcttatttttaatatatattcaatattgcttatgataagtctgatgatatcctactcccctttcctgaatgtattttatcatttccatttagaggccttggcttaaaaaaattataattcaaatgtcttgctaggatatcaccatagctaacacatatattttttatgtacttatt

SEQ ID NO: 362370 - DNA, 549 bp, Homo sapiens
ctctgtgctcagggtgacgttagtgcataggtgtatctccaccttttctatccttcttatgtggatatttttttagtcatccagtgtgtaggaggctgggtgactaaaaaaatttcaactggattttggctttctctagagagtactgatccatttgtagrtgtttattgatgtgattgcagcaggaggggtagtcaagagccccttattctgccatgttactcaaatgattaaataatgtatcttatttatatttccaatcttttttcaatagtctaatcttatttttaatatatattcaatattgcttatgataagtctgatgatatcctactcccctttcctgaatgtattttatcatttccatttagaggccttggcttaaaaaaattataattcaaatgtcttgctaggatatcaccatagctaacacatatattttttatgtacttatttctctaagggcttaatacataaactatttcattgaattttcaaagtatgatccatcaagtatatattgcaatttatattttacatgttaaaaat

SEQ ID NO: 362371 - DNA, 644 bp, Homo sapiens
aaaccatgcttttttcatggaactgtgcaacccatggattggaagctcccactcatgagcccacaccactggggccttgagtcctaaccacagagccgcacagattttcgcttgggtagaattggcctaagcctgccgagttcccaggggaagggatgagagccaacattggaactgcagggcctccctgaaggaaccccaactccagccaggagctcagggacagaactcagatttccctgggcctgagcccttgggagaaggaaggccatagtctccatggaccagcagacttagtctttcctcctgctagctctgaggaatctggggagcccaaaagagtggattttccccacagcacagcacaccccctccaccartgaacagccaaagtgctttattgaatgggtcctgcttcccatgccacccaactgtgtgagatccccccaacaggggttgtcagacatcctatgcagtagtgtcactactgacatcaggtcaatgcccctcgaggtcagagatcatagaggaagaagcaggcacccatctttgctgttctccagcctcctcaagagacatctacaggcacgggagtgaaccagatgaatagggcctgaagtgaacccccagcaaactgcagcagc

SEQ ID NO: 362372 - DNA, 644 bp, Homo sapiens
aaaccatgcttttttcatggaactgtgcaacccatggattggaagctcccactcatgagcccacaccactggggccttgagtcctaaccacagagccgcacagattttcgcttgggtagaattggcctaagcctgccgagttcccaggggaagggatgagagccaacattggaactgcagggcctccctgaaggaaccccaactccagccaggagctcagggacagaactcagatttccctgggcctgagcccttgggagaaggaaggccatagtctccatggaccagcagacttagtctttcctcctgctagctctgaggaatctggggagcccaaaagagtggattttccccacagcacagcacaccccctccaccaatgaacagccaaagtgctttattgaatgggtcctgcttcccatgccaccsaactgtgtgagatccccccaacaggggttgtcagacatcctatgcagtagtgtcactactgacatcaggtcaatgcccctcgaggtcagagatcatagaggaagaagcaggcacccatctttgctgttctccagcctcctcaagagacatctacaggcacgggagtgaaccagatgaatagggcctgaagtgaacccccagcaaactgcagcagc

SEQ ID NO: 362373 - DNA, 586 bp, Homo sapiens
aaacctcatcaaagagtcatcagcctcaaagattgaaactagacaaactcataaacacaagaaagaatcaataataaaaaaatgttgaaaacacaaaaggccagagtgcctcttctcctccaaatgatgataacacctctccagcaagggygcaaaacaggacagaggatgagacagacaaattgacagaagtaggcttcacaaggtgggtaataaaaaactttgctgaggtaaaggaacatgttctaacccagaacaaagaacctaagaactttgataaaaggttagaggtgctgctaagtagaacaaccagtttagagaggaacgcaaatgacctggtggagctgaaaaacacagcatgaaaacttagtgaagcatgtataactatcaatagctgaatcaatcaagcagaagaatggatattagagtttgaagatcatctttctgaaataagtcaggcagaaaagactagaggaagaagaatgaaaaggaacaaacaaaacctctgagcaatatggaactctgtaaaaagactgaacctatgctatgactcattgtagtacctgaaggaaatggagagaataga

SEQ ID NO: 362374 - DNA, 566 bp, Homo sapiens
accacaaaactttaaaaataaacattaaaagagaaagtaaaaaaaaaatagcaatacaaaccaaacagaaaataatcaacatgacaagagtatgtcctcacacaccaacaaagcattaaatgtaaactgatttaattcctcaattaaaaattatagaccggtctaatggtaaaaaagaaaaatcaactacatgatgcccataaaaacagacattccatgcaaacaaaaagcaaaagtgaataaaaatasctatacttatagcaaataatatagactttaaggtggtataaaaaaaaaaaaaaaaagccaggcatggtggcgggcgcctgtagtcccagctacttgggaggctgaggcaggagaatggcgtgaagcggggaggcggagcttgcagtgagccgagatctcgccgctgcactcgagcctgggcgacagagcgagactccatctcaaaaaataaataaataaacaaacaaataaataaaacaaagaagatcattatatattgacaaaaggattatttcagcaaaatgatataacaattataaacatatgtacactcaaca

SEQ ID NO: 362375 - DNA, 658 bp, Homo sapiens
aaaatttatatggagccacaaaaatccccaatagataactactcctaaacaaaaagaacaaaaccagacacatttcactatgagtcttcaaaatatactataaagttgtattagccaaaacagcatggtaccaatgaaaagcatatatgcaaatcaatggaacagaatagagaacccagaaattaatccgtttatttacaaccaacttatttttgacagagataccaagaacactcattaggcagtcacttcaataaatgttgctgggaaaactagatacctatgtgcaaaagaataaagctatactctcttctttcaccctaattgaaacaaaaatctactcaaaatgggttaaagacctacatgtaagacttaaagctttaaaactaccaaaggaaaacccagagagaacacttcaagacattggtctgagaaaatattttatgaataaggccttaaaatcacaggcaacaaaaggaaaaataagcaaacaggattatatcaaactaaaaaacttctgcatagcaatagaaataatcaacagtgtraaaagacaacctccagaataagcaaaattatttgcaactcctcttcccacataatattaatgtccagaatatacaaagaactcaactatctcaacaggaaaaaaattgat

SEQ ID NO: 362376 - DNA, 626 bp, Homo sapiens
tattctgatgttgataagccatataactccagaattcagtcacacagagctgtttgaatttgagtgttagtaaaaatgtgattgctcttacttctgatgtcacattactaaatataactcttaatatttggtgtattccccttcctttccaccacaccctagaagtttcaggaggataaatgtgtattttacattgattttgatcaaatggcttttgccctgagtagtattagatggttaggtcattgcagcaattatatggcagtattccccaagcagacctttcatctacttttaatagaaaatcaataatggctaaacaaggacagagatggcattttaatgtttaccaragagcatttagacatctgagatgcctcagaagtggtttcaaaatccattttgagaatagggacaaaaaatgttctttatattctatttgtaccctgaaaatacacctttttagggagctaaatgatgagagcacatggactcatagagggaaacaacacacactagggcctttcagagaggggagggaaggaggagggagaagatcaggaaaaagtaactaataaattctagactcaatacctgggtaatgaaataatctatacaacaaatcc

SEQ ID NO: 362377 - DNA, 570 bp, Homo sapiens
tttacccaatggaatataaaaattctacataattttaagtctattgctaatatatgctaatcaattaagaataactttgcacttataaggtrtcagtattttctttaagtttcttaaacaccttgtttactcagttaagtctatcaactgacttatgtttattagttattaacccaaagtaatcctatatgatagatatccttattttggagatcaaggaaattatggtttagagacactaagccactttagcaagttatcacaaccaataagcaattgtatttgtaattgaatgtagacaaacttacatcacagctgacagaactggtcactacccagctacagtatttattgtgtatgagacgtggcaaacacattaattggtatatttaagtgaagatataactaaaaatatgtttaatacattaggtgacaaatggggcatgggaaagtctagtgcaaatggattttagagcaagaggaaaaattatcttcgaatattgttgaaaggaacttcaaaatattgggcaatatagaatgggcattttcaggaagttgaaatattattaa

SEQ ID NO: 362378 - DNA, 481 bp, Homo sapiens
atttggaaataaaatacatcattcaatttttagaattctgtttttagtagtgttatttcaatttataaaatatagtaatcctcaattgctgaaaatgtcaaatcctagaaaacgtagcattcctatgcatgatgttaacatcgctcttgaacagttattggttgaagattcataygatgaatgcggttttcctgaaatagataattctgatgattaggatgattctgatgctaactctgtttagaactaactccaagaacagtctttatattttatttttacattgaaactcagtctgatttgcttcagcctcaaagagcttccttatgtaaaattaaatgaatggcggcggtgagctacatttttttttttttctaaacagtaaaaggtttaagaaagtaattcatggaaactacatttcataaaatttatctatgcagaaatgtttataagtgaatacaaaatattgtaattggtgaaa

SEQ ID NO: 362379 - DNA, 621 bp, Homo sapiens
ctttttcttgtaattgcttttctaggtaaaaatactcttcgtcatgattcttgtggatgtgactgtatctgaacagcctcagtgtaatatgaataaacaagaatcaaattactgagtacctactgtgtgccagacactgtgtagacatatattttcattaccctacacattagcataatgaagacagtatttattcattaaatcaactaagactatgatacataccagtataatctctaacacttttcccataatattttgagtgcttattaattatgtgcaaggcacagatgaaatgcctagtctgatgaagtattaaaatggttatcaattcaaaagcaaataaatgaacactgcagattaagccatgcagctataaaatctagcatacctttataaatttaaaaattattagctgaatactaccaactgccagcagtcagaattgaatgcttgctttgttcctgagattataataaacacttcactaatgctgagggcagtaaagtgggatgccctaattcttgcagctagtagataaggaagtccatggtcatctgcacacagatctcataatcttcccataataaaatactggacartgtatgagatattgtcaat

SEQ ID NO: 362380 - DNA, 553 bp, Homo sapiens
atattgacagtgatgttggcacaggccagtcggcaatgcccatatgctcacagtatgtgtgtgtcatgacacggtgaccacagtaggggagtcgcctcagcaagaagatgaagggggagacaatagccacactacggaatagcccaacaaagccaattctgcctatgacagcatggttgagaatggttgtrtaccttaatgggttacagatagccacatacctatcaaaggccatggcaagtagaattgaggactccagagcatagatagaatggacacaaaacatctgggccaggcatccaccaaaggaaatctcaccagcatggagccacaaaatggccagcatcttgggcacagtggtagaactgagagccaggtctgtgagtgagagaaggcagaggaagaggtacataggtgcatgaagagcattgtccatggcaatgaccaggatgagggcagcatttccaaccagtgctacaagatacatggcacagaaagggatggcaatccagaagtgggcagcctccagccctgggatccctgttaagaagaa

SEQ ID NO: 362381 - DNA, 553 bp, Homo sapiens
atattgacagtgatgttggcacaggccagtcggcaatgcccatatgctcacagtatgtgtgtgtcatgacacggtgaccacagtaggggagtcgcctcagcaagaagatgaagggggagacaatagccacactacggaatagcccaacaaagccaattctgcctatgacagcatggttgagaatggttgtgtaccttaatgggttacagatagccacatacctatcaaaggccatggcaagtagaatygaggactccagagcatagatagaatggacacaaaacatctgggccaggcatccaccaaaggaaatctcaccagcatggagccacaaaatggccagcatcttgggcacagtggtagaactgagagccaggtctgtgagtgagagaaggcagaggaagaggtacataggtgcatgaagagcattgtccatggcaatgaccaggatgagggcagcatttccaaccagtgctacaagatacatggcacagaaagggatggcaatccagaagtgggcagcctccagccctgggatccctgttaagaagaa

SEQ ID NO: 362382 - DNA, 322 bp, Homo sapiens
gtagtcattctctgattttctgtctgctcactatgtggcattgaaaaaaattccaaagcctttttgtgscttagtttttatctttaaattgggaatgacaccatctgacctaacttcacaaaattttgtggttgacaaaagatgactattcatggaattaaacatttgtatacccagaataattcccctattttttcctaaaaaaataagatatttatattttaacaacatatactctcgataaaagagagtacagttatcatttacatccctaaccaatgaaaagaccaatcccagagaagtgaactgatataatttagat

SEQ ID NO: 362383 - DNA, 619 bp, Homo sapiens
tgacctgcaagatcatacatgacgtagcatttagctgctacttcaagtgcatttgccaccattccccaccttgcttcctccattgaatatacattggccttcttttgtcttttaaacttgtcaagctgctctctgcttcaggaactttcacttgttcttcctccttccttgaataggctatccctaagatagccacacacttgccctctgattttgatttcttctctaaaattacctactcagagaggtcttctctgactaccctatataaaatgcatcactcttaccttcctcctttgctccmtacttctttattgcattacattaccttgcattgcagtatgtatgtatgtgtttatttttgtctctgttctgtttctgttcattgtattttcagtacctaggtgtaaaagtaattgcagttcttgccattgaaagtaatggtaaaaaccacaattacttttgcaccaacctaatagaattatgtctgccatgtaatacaatttcaatatgtatttattgaatcaattaatgaataattattgaaataattgaatattgagataattattgaaataagattaatggtaatgatacatatttaataatttattcaaat

SEQ ID NO: 362384 - DNA, 565 bp, Homo sapiens
gatcattattaagaccaaccctcgtctgcacacacccatgtactatctactatccttgctggccctcactgacctggggctgtgtgtgtccacgttgcccaccactatggggatcttctggtttaactcccakagtatctactttggagcgtgtcaaatccagatgttctgcatccactctttttccttcatggagtcctcagtgctcctcatgatgtcctttgaccgctttgtggccatctgccaccctctgaggtattcggtcattatcactggccagcaagtggtcagagcaggcctaattgtcatcttccggggacctgtggccactatccctattgtcctcctcctgaaggcttttccctactgtggatctgtggtcctctcccactcattttgcctgcaccaggaagtgatacagctggcctgcacagataccaccttcaataatctgtatggactgatggtggtagttttcactgtgatgctggacctggtgctcatcgcactgtcctatggactcatcctgcacacagtagcaggcctggcctcccaagaggagcag

SEQ ID NO: 362385 - DNA, 565 bp, Homo sapiens
gatcattattaagaccaaccctcgtctgcacacacccatgtactatctactatccttgctggccctcactgacctggggctgtgtgtgtccacgttgcccaccactatggggatcttctggtttaactcccagagtatctactttggagcgtgtcaaatccagatgttctgcatccactctttttccttcatggagtcctcagtgctcctcatgatgtcctttgaccgcyttgtggccatctgccaccctctgaggtattcggtcattatcactggccagcaagtggtcagagcaggcctaattgtcatcttccggggacctgtggccactatccctattgtcctcctcctgaaggcttttccctactgtggatctgtggtcctctcccactcattttgcctgcaccaggaagtgatacagctggcctgcacagataccaccttcaataatctgtatggactgatggtggtagttttcactgtgatgctggacctggtgctcatcgcactgtcctatggactcatcctgcacacagtagcaggcctggcctcccaagaggagcag

SEQ ID NO: 362386 - DNA, 565 bp, Homo sapiens
gatcattattaagaccaaccctcgtctgcacacacccatgtactatctactatccttgctggccctcactgacctggggctgtgtgtgtccacgttgcccaccactatggggatcttctggtttaactcccagagtatctactttggagcgtgtcaaatccagatgttctgcatccactctttttccttcatggagtcctcagtgctcctcatgatgtcctttgaccgctttgtggccatctgccaccctctgaggtattcggtcattatcactggccagcaagtggtcagagcaggcctaattgtcatcttccggggacctgtggccactatccctattgtcctcctcctgaaggcttttccctactgtggatctgtggtcctctcccactcattttgcctgcaccaggaagtgatacagctggcctgcacagataycaccttcaataatctgtatggactgatggtggtagttttcactgtgatgctggacctggtgctcatcgcactgtcctatggactcatcctgcacacagtagcaggcctggcctcccaagaggagcag

SEQ ID NO: 362387 - DNA, 607 bp, Homo sapiens
ttttgaccatgcactgtatatttatatttaaaactattttaatattcaccatatcataattctttgcaataaaaatgtacataatttaaatttgatgtttaaaaatagttgaagttgtttttattttctaatatcattcccgtatgaaatataatgstagaaaaacattttaattaccagaagttttaggtttatttttctcatcaaaaatctaaattttgagcttcagtattttctatgctggttttatttgtcagataagttaaaattatttccaaagatattcagttttatgttaattcatgtgtttgttcctactggattgtcgtcacttctaggtgctcctagcttacagagcaaaaaaaatatgtcagcatactaaactgtgcatatacaaaatctataaatatttctgtgtttatctgcatctatattaggctaaactgacatcacactgatgtcttcaactctaattcatggttcattcaaggcttttccccttgtgtctgtaaccttctactctaactctgaaaaacctggctcacgccatctgtcattcacttcacttacctaactgttcaatttcagcacacatgtgtaggggcag

SEQ ID NO: 362388 - DNA, 607 bp, Homo sapiens
ttttgaccatgcactgtatatttatatttaaaactattttaatattcaccatatcataattctttgcaataaaaatgtacataatttaaatttgatgtttaaaaatagttgaagttgtttttattttctaatatcattcccgtatgaaatataatggtagaaaaacattttaattaccagaagttttaggtttatttttctcatcaaaaatctaaattttgagcttcartattttctatgctggttttatttgtcagataagttaaaattatttccaaagatattcagttttatgttaattcatgtgtttgttcctactggattgtcgtcacttctaggtgctcctagcttacagagcaaaaaaaatatgtcagcatactaaactgtgcatatacaaaatctataaatatttctgtgtttatctgcatctatattaggctaaactgacatcacactgatgtcttcaactctaattcatggttcattcaaggcttttccccttgtgtctgtaaccttctactctaactctgaaaaacctggctcacgccatctgtcattcacttcacttacctaactgttcaatttcagcacacatgtgtaggggcag

SEQ ID NO: 362389 - DNA, 550 bp, Homo sapiens
tttcatcttgctgaaaggtgtttttttgtttgtttgtttgttttttgtttgtttgttttgttttcccttttctcttttccccgaataactttcattttcctcacccttctatgtgtctacgagcctaatccttcctggttgtgtgacaagagctcagttttagcggaactaaggagaaagttctgtaacactaccttccactgtgctcccactgcctatgttgattcaaatctaagtggatcccaatattgaccacctgcaccatgaatccagcaatcagaagctgtgatcaaatttatagttgtcccttcaaaccgatattkctgggaaagtttatcttgtttccacaaaatattttttatgatccttaaggtcatatcactgtactagaatatttgctcgtgaaaaattcatgatgcccaaggaaatctgcctgtaagaagcagagctacattaagaacataaaagtatgaaaaaagtctgctctggtccggaaaaaaaatgagtttttcttcccacaagaaagaagtttgaattctgaatactgaaa

SEQ ID NO: 362390 - DNA, 550 bp, Homo sapiens
tttcatcttgctgaaaggtgtttttttgtttgtttgtttgttttttgtttgtttgttttgttttcccttttctcttttccccgaataactttcattttcctcacccttctatgtgtctacgagcctaatccttcctggttgtgtgacaagagctcagttttagcggaactaaggagaaagttctgtaacactaccttccactgtgctcccactgcctatgttgattcaaatctaagtggatcccaatattgaccacctgcaccatgaatccagcaatcagaagctgtgatcaaatttatagttgtcccttcaaaccgatattgctgggaaagtttatcttgtttccacaaaatattttttatgatccttaaggtcatatcactgtactagaatatttgctcgtgaaaaattcatgatgcccaaggraatctgcctgtaagaagcagagctacattaagaacataaaagtatgaaaaaagtctgctctggtccggaaaaaaaatgagtttttcttcccacaagaaagaagtttgaattctgaatactgaaa

SEQ ID NO: 362391 - DNA, 550 bp, Homo sapiens
tttcatcttgctgaaaggtgtttttttgtttgtttgtttgttttttgtttgtttgttttgttttcccttttctcttttccccgaataactttcattttcctcacccttctatgtgtctacgagcctaatccttcctggttgtgtgacaagagctcagttttagcggaactaaggagaaagttctgtaacactaccttccactgtgctcccactgcctatgttgattcaaatctaagtggatcccaatattgaccacctgcaccatgaatccagcaatcagaagctgtgatcaaatttatagttgtcccttcaaaccgatattgctgggaaagtttatcttgtttccacaaaatattttttatgatccttaaggtcatatcactgtactagaatatttgctcgtgaaaaattcatgatgcccaaggaaatctgcctgtaagaagcagagctacattaagaacataaaagtatgaaaaaagtctgctctggtccgraaaaaaaatgagtttttcttcccacaagaaagaagtttgaattctgaatactgaaa

SEQ ID NO: 362392 - DNA, 588 bp, Homo sapiens
catggccccacttccaatccttttgaggcaactgccctattgccacactaatgtcctctcacactcctactgcctccactcagatctgatccagctgccttgtgcagatactaaactcaacagcatcctgggcttagccattgttctcgcaaatttcgggctggactcattgcttatcgtggtctcttatgtcttgattctttatacagtgatgggcattgcttctggagagggacggtggaaggctctcaacacatgtgtgtcacatatttgtgcagtgcttatatattatgtgcccatgattggggtgtctgtgatgcatcgtgctgccaaacatgcttctcccattgtccacacacttatgtctagcatctgccttttggtgccacctgtacttaatcccatcatctatagtgttaagacccagacaataagacagggaattctcaccttgttttcctgcaagagggaattgctctgaatcactgyaaggagtcaggaactgtcattaaattcataaattccgataatgtttctgctatgggcaaagctctacattaggcattttgaggaggaataggaacaagg

SEQ ID NO: 362393 - DNA, 582 bp, Homo sapiens
attttgaaatcactcatcatgactgatacaatataaatgctrtgtaaataattgatattctatattgtttagggaataatgacaggggaaaataatctgtgcatgttcagtgtagatggaagttttttttccaatacttttgacccaagattggttgaatccatgaatgtggaacccacaaatacggaggaccaactgtagttctgttgaattccaaagccaaagtacattaccactatgttcttaaaagcacttcttttctctaggtgtgcctgataactccttattacctgagatgctaaagacattttcattcctggatatagatataaattgggcactatgagtaaagcattagcttgtcatcatgattttgggatgtctgtgacacacaagtgtgcccccaaaagtctcattatggcaaacatagagaagataagaaatcttacatcatttcaaagataaaggggaatattttagacaatttgaaggagagtgaagatatatcaaaagtaagtcctcagatgtcatactaggatatagaattcatatacctgcacatgactcaaaaaatgagcacat

SEQ ID NO: 362394 - DNA, 582 bp, Homo sapiens
attttgaaatcactcatcatgactgatacaatataaatgctgtgtaaataattgatattctatattgtttagggaataatgacaggggaaaataatctgtgcatgttcagtgtagatggaagttttttttccaatacttwtgacccaagattggttgaatccatgaatgtggaacccacaaatacggaggaccaactgtagttctgttgaattccaaagccaaagtacattaccactatgttcttaaaagcacttcttttctctaggtgtgcctgataactccttattacctgagatgctaaagacattttcattcctggatatagatataaattgggcactatgagtaaagcattagcttgtcatcatgattttgggatgtctgtgacacacaagtgtgcccccaaaagtctcattatggcaaacatagagaagataagaaatcttacatcatttcaaagataaaggggaatattttagacaatttgaaggagagtgaagatatatcaaaagtaagtcctcagatgtcatactaggatatagaattcatatacctgcacatgactcaaaaaatgagcacat

SEQ ID NO: 362395 - DNA, 582 bp, Homo sapiens
attttgaaatcactcatcatgactgatacaatataaatgctgtgtaaataattgatattctatattgtttagggaataatgacaggggaaaataatctgtgcatgttcagtgtagatggaagttttttttccaatacttttgacccaagattggttgaatccatgaatgtggaacccacaaatayggaggaccaactgtagttctgttgaattccaaagccaaagtacattaccactatgttcttaaaagcacttcttttctctaggtgtgcctgataactccttattacctgagatgctaaagacattttcattcctggatatagatataaattgggcactatgagtaaagcattagcttgtcatcatgattttgggatgtctgtgacacacaagtgtgcccccaaaagtctcattatggcaaacatagagaagataagaaatcttacatcatttcaaagataaaggggaatattttagacaatttgaaggagagtgaagatatatcaaaagtaagtcctcagatgtcatactaggatatagaattcatatacctgcacatgactcaaaaaatgagcacat

SEQ ID NO: 362396 - DNA, 586 bp, Homo sapiens
ataatgatgccttattcttgaatacctcctgaaggacctacctgagtcttttttacagttaactttttttttctaagtagaagaaatactctctcaaataacaataaaagtaaagtatagtaaataacaagtgataggatttttcactttcattataatctatggaaccactgtcctatatgcagtccgttgttgrttgaaaagtcattatgtgaaacatgaccgtattttactattcttttagtgattatctcgtagataacaaattgcatcttgacatcttatcgtctactataaattaccatttttcaattttcccagtaatgctagatagaagctcagaactttaaaaactcaaatgatatctctttctttttgcatgattcctgccacaattatagttcaaagaatgtttaaaccccaatacaacatgagtattattgtttttttcagtcagtgtttgctttcttctacatatttaccttttccgatgcttttaatttcactccatatttctgtgcttgtctctgggttcattttccttttgactaaagaacttatttgatataacgcaggtttgctgcta

SEQ ID NO: 362397 - DNA, 564 bp, Homo sapiens
tagttgtgttatttactagaaaaggtgtagtacaaattttcactgtcattatgcatttgagtacttatttttgtagctctgamagttgtctccttgtactccaaccctctgagtttgctgtaagctcttcttatttactcatctattacttttaaattgatacattccttaagggaaaaaatctcaataaatatcaggctcacttctctaggcttcccttctctttggaatcttgatctttacatcctcattgccttgaatgctctctcaagtcatttaaaactatttctatatcttttctaattgttcttggcaggagaattggcttgaaacaaactcatattcactggataaatgtgaaagtgtttatttagtgtcctaatttttaatttagctccatgcttagctgaatataacgacttataactttgtcttgttgagaacataaaacgtagttccaaaggtataaattttaagttagcatagaatataaaggtagaaaatcccagggagccatcagattctgcttattacacaatttcatagacaccaagagattccaag

SEQ ID NO: 362398 - DNA, 547 bp, Homo sapiens
agtctaggaaataataaatattttttgacttctagaaacaagaacttttgtaattccttatgattgctctaaagtgattataaracttttaatgaagacaatgtaatgattggcaaatctgaatggtttttcagatttatttatcatggtagtttatttatacatcatagcaaggcaggaaaattacctctttgatgactctgcagggttctgggtttttactttgttcactcctattaatttctaaacaacatcaagtataatacctagcacacactagggacataggcaacatttatcaaataaataaatggcaaataatcataaaattattaatttaagagtgcaggtgtttatattaagcaaagggataaggcaatgataaaactcaatgtttaactcaaccttgagaaagccaaatgagttgtgggtgggtggagttttccacaaggaataaaaggaggaaggcaaattcctatggctagtaaaatggtaaagcacgtacagactaagaagtgggtttaagacttgaccaattggaagcatt

SEQ ID NO: 362399 - DNA, 547 bp, Homo sapiens
agtctaggaaataataaatattttttgacttctagaaacaagaacttttgtaattccttatgattgctctaaagtgattataaaacttttaatgaagacaatgtaatgattggcaaatctgaatggtttttcagatttatttatcatggtagtttatttatacatcatagcaaggcaggaaaattacctctttgatgactctgcagggttctgggtttttactttgttcactcctattaatttctaaacaacatcaagtatratacctagcacacactagggacataggcaacatttatcaaataaataaatggcaaataatcataaaattattaatttaagagtgcaggtgtttatattaagcaaagggataaggcaatgataaaactcaatgtttaactcaaccttgagaaagccaaatgagttgtgggtgggtggagttttccacaaggaataaaaggaggaaggcaaattcctatggctagtaaaatggtaaagcacgtacagactaagaagtgggtttaagacttgaccaattggaagcatt

SEQ ID NO: 362400 - DNA, 547 bp, Homo sapiens
agtctaggaaataataaatattttttgacttctagaaacaagaacttttgtaattccttatgattgctctaaagtgattataaaacttttaatgaagacaatgtaatgattggcaaatctgaatggtttttcagatttatttatcatggtagtttatttatacatcatagcaaggcaggaaaattacctctttgatgactctgcagggttctgggtttttactttgttcactcctattaatttctaaacaacatcaagtataatacctagcacacactagggacataggcaacatttatcmaataaataaatggcaaataatcataaaattattaatttaagagtgcaggtgtttatattaagcaaagggataaggcaatgataaaactcaatgtttaactcaaccttgagaaagccaaatgagttgtgggtgggtggagttttccacaaggaataaaaggaggaaggcaaattcctatggctagtaaaatggtaaagcacgtacagactaagaagtgggtttaagacttgaccaattggaagcatt

SEQ ID NO: 362401 - DNA, 528 bp, Homo sapiens
ccaggcctggagcaattccatgtgtggattggaattcccttctgtatcatctacattgtagctgttgtgggaaactgcatccttctctacctcattgtggtggagcatagtcttcatgaacccatgttcttctttctctccatgctggccatgactgacctcatcttgtccacagctggtgtgcctaaagcactcagtatcttttggctaggggctcgcgaaatcacattcccaggatgccttacacaaatgttcttccttcactataactttgtcctggattcagccattctgatggccatggcatttgatcrctatgtagctatctgttctcccttgagatataccaccatcttgactcccaagaccatcatcaagagtgctatgggcatctcctttcgaagcttctgcatcatcctgccagatgtattcttgctgacatgcctgcctttctgcaggacacgcatcataccccacacatactgtgagcatataggtgttgcccagctcgcctgtgctgatatctcc

SEQ ID NO: 362402 - DNA, 607 bp, Homo sapiens
aagaaataaaaggcatccaaatgggcagagaggaagttaaactatccctattttcaratgacatgtttctatacctagaaaatcccatagtctttgcctataggctcctagatctgataaacaatttcagcgaaaatttaagacaaattgatatacaaaaatcagtagcatttctacatatcaataacatccaagttgagagccacatcaagaagtcagtcccaatcaaaatagttacaaaaagaataaaatacctaggattacagttaacggtgcaggtgaatgatctctacaatgagaattacaaagcactgttgaaagaaatcagagaggacacaaacaaatgggaaaacatttcatgcccgtggataggaagaatcaattttgttaaaataaccacactgcccaaagcaattcagagattcaacattattcctatcaaactaccaacatcttctcagaattagggaaactattctaaaattcatataaaacaaacaaaaaagaatgcaaagagccaaagcgttcctaaacaaaaataacaaaaccagaggcatcacatcacctgatttcaaactatactataaggctactgtaagcaaagcag

SEQ ID NO: 362403 - DNA, 607 bp, Homo sapiens
aagaaataaaaggcatccaaatgggcagagaggaagttaaactatccctattttcaaatgacatgtttctatacctagaaaatcccatagtctttgcctataggctcctagatctgataaacaatttcagcgaaaatttaagacaaattgatatacaaaaatcagtagcatttctacatatcaataacatccaagytgagagccacatcaagaagtcagtcccaatcaaaatagttacaaaaagaataaaatacctaggattacagttaacggtgcaggtgaatgatctctacaatgagaattacaaagcactgttgaaagaaatcagagaggacacaaacaaatgggaaaacatttcatgcccgtggataggaagaatcaattttgttaaaataaccacactgcccaaagcaattcagagattcaacattattcctatcaaactaccaacatcttctcagaattagggaaactattctaaaattcatataaaacaaacaaaaaagaatgcaaagagccaaagcgttcctaaacaaaaataacaaaaccagaggcatcacatcacctgatttcaaactatactataaggctactgtaagcaaagcag

SEQ ID NO: 362404 - DNA, 607 bp, Homo sapiens
aagaaataaaaggcatccaaatgggcagagaggaagttaaactatccctattttcaaatgacatgtttctatacctagaaaatcccatagtctttgcctataggctcctagatctgataaacaatttcagcgaaaatttaagacaaattgatatacaaaaatcagtagcatttctacatatcaataacatccaagttgagagccacatcaagaagtcagtcccaatcaaaatagttacaaaaagaataaaatacctaggattacagttaackgtgcaggtgaatgatctctacaatgagaattacaaagcactgttgaaagaaatcagagaggacacaaacaaatgggaaaacatttcatgcccgtggataggaagaatcaattttgttaaaataaccacactgcccaaagcaattcagagattcaacattattcctatcaaactaccaacatcttctcagaattagggaaactattctaaaattcatataaaacaaacaaaaaagaatgcaaagagccaaagcgttcctaaacaaaaataacaaaaccagaggcatcacatcacctgatttcaaactatactataaggctactgtaagcaaagcag

SEQ ID NO: 362405 - DNA, 607 bp, Homo sapiens
aagaaataaaaggcatccaaatgggcagagaggaagttaaactatccctattttcaaatgacatgtttctatacctagaaaatcccatagtctttgcctataggctcctagatctgataaacaatttcagcgaaaatttaagacaaattgatatacaaaaatcagtagcatttctacatatcaataacatccaagttgagagccacatcaagaagtcagtcccaatcaaaatagttacaaaaagaataaaatacctaggattacagttaacggtgcaggtgaatgatckctacaatgagaattacaaagcactgttgaaagaaatcagagaggacacaaacaaatgggaaaacatttcatgcccgtggataggaagaatcaattttgttaaaataaccacactgcccaaagcaattcagagattcaacattattcctatcaaactaccaacatcttctcagaattagggaaactattctaaaattcatataaaacaaacaaaaaagaatgcaaagagccaaagcgttcctaaacaaaaataacaaaaccagaggcatcacatcacctgatttcaaactatactataaggctactgtaagcaaagcag

SEQ ID NO: 362406 - DNA, 558 bp, Homo sapiens
gtatcctgcagggacacagccagatggaggcaggagatggggctggatcctgcactgccagctttcagtcagaacttgctgatctctgggtctgggtcctttgtcctgctggggatgccgggactggaggctctgcatgcctggctctctgtgcytgtgtgcctgctctacatggcagctttggtagggaatgcccttctagtggggctggtggtcactgacaaggcactctgggcacccatgtaccagctgctgtggcttctggcagctgctgattttgttctggccacatccacagtgcccaaagctctggctgtactttggggcttgtctagtgagatatcatttggaggctgcttggctcaactctttgttgcccatgtgtcaatcattgccacattgctgagtcctcagtgctgctgtccacggccgtagactgccagcctttgcgctatggggcgttgctggcccagtttgtggtaggtctagtggctctgactaccatgacccgtgatgtctgtgtcatgtacaccctgtgatcctgttcaagaaactgcc

SEQ ID NO: 362407 - DNA, 558 bp, Homo sapiens
gtatcctgcagggacacagccagatggaggcaggagatggggctggatcctgcactgccagctttcagtcagaacttgctgatctctgggtctgggtcctttgtcctgctggggatgccgggactggaggctctgcatgcctggctctctgtgcttgtgtgcctgctctacatggcagctttggtagggaatgcccttctagtggggctggtggtcrctgacaaggcactctgggcacccatgtaccagctgctgtggcttctggcagctgctgattttgttctggccacatccacagtgcccaaagctctggctgtactttggggcttgtctagtgagatatcatttggaggctgcttggctcaactctttgttgcccatgtgtcaatcattgccacattgctgagtcctcagtgctgctgtccacggccgtagactgccagcctttgcgctatggggcgttgctggcccagtttgtggtaggtctagtggctctgactaccatgacccgtgatgtctgtgtcatgtacaccctgtgatcctgttcaagaaactgcc

SEQ ID NO: 362408 - DNA, 536 bp, Homo sapiens
caaattgatatacaaaaatcagtagcatttctacatatcaataacatccaagttgagagccacatcaagaagtcagtcccaatcaaaatagttacaaaaagaataaaatacctaggattacagttaacggtgcaggtgaatgatctctacaatgagaattacaaagcactgttgaaagaaatcagagaggacacaaacaaatgggaaaacatttcatgcccgtggataggaagaatcaattttgttaaaataaccacactgcccaaagcaattcagagattcaacattattcctatcaaactaccaacatcttctcagaattagggaaactattctaaaattcatataaaacaaacaaaaaagaatgcaaagagccaaagcgttcctaaacaaaaataacaaaaccagaggcatcacatcacctgatttcaaactatactataaggctacwgtaagcaaagcagcattttactggtacaaatagacaaatggaacaggttagagaaaccagaaacaaagccacacacctacaacca

SEQ ID NO: 362409 - DNA, 632 bp, Homo sapiens
acacatgcctccagaaatctgtagaaagtttggctggcaattatactttacrcttgaagagtactggaggcttgtgcaactatttatttgtgcaaatatttattgtcaactgacgcctgaattgtacatgtacaaatcaaatgaactaattaattgcctattcaatggataatttattctatttcatacatatttttggcggagaagtcttccatgcataatggaaacaaagaaaaatcctttatacatatgaatgaaaccacacccacctacccctaatacgacaaaacaatgagaccaaatcttgatttctgacataagtgtcgagttactatttgcttaatagtcctcctattccctgcagagggtaattttttggaacagattcttgattagttttttgatgttaggaagatgagaattcacaaagtaactgatgacttcatacactgtatgctgtttctaggaatcctgaaagcatttacgagcaaatgctctcctcagttgtctggagggcatctggttgcctgtgttcaaatgtacaagcacctacaagtagattacttcttatctgagaatgaaattaaacaacagagggtcctgagtccaaagtagtgcatcagcccaggtag

SEQ ID NO: 362410 - DNA, 632 bp, Homo sapiens
acacatgcctccagaaatctgtagaaagtttggctggcaattatactttacacttgaagagtactggaggcttgtgcaactatttatttgtgcaaatatttattgtcaactgacgcctgaattgtacatgtacaaatcaaatgaactaattaattgcctattcaatggataatttattctatttcatacatatttttggcggagaagtcttccatgcataatggaaacaaagaaaaatcctttatacatatgaatgaaaccacacccacctacccctaatacgacaaaacaatgagaccaaatcttgatttctgacataagtgtcgagttactatttgcttaatagtcctcctattccctgcagagggtaattttttggaacagattcttgattagttttttgatgttaggaagatgagaattcacaaartaactgatgacttcatacactgtatgctgtttctaggaatcctgaaagcatttacgagcaaatgctctcctcagttgtctggagggcatctggttgcctgtgttcaaatgtacaagcacctacaagtagattacttcttatctgagaatgaaattaaacaacagagggtcctgagtccaaagtagtgcatcagcccaggtag

SEQ ID NO: 362411 - DNA, 536 bp, Homo sapiens
ctagggacatacactcttctaccaagttctcctttcgcctttcccctcttccctgagttcacacagaaattaattccataaaactctgagcaacatggatttgtatttttttcattctgcattagattctagttctcttaacccttctgttggtcttgcccatgaaacagagagagcaagaatttcatcctactataattattctgagtgtctcctccctctctcctcaccaacctacccagcactggccctggaggacgagaaacatacccatgacagggcaagacaaaagcattactttattattcacatattttttccacacaccttaaacctatgttcagtatttgattttcttgtgttgttagaggaaggcctaacgagcctaaaaaatagaagtacaaattttctttgaytggggagagagccatgatggttaactagccacagccaggaggagcttctcccatgaagagaccagatcatcaagagaccaacacacactgaacagatcttcggaaagaaggcatccagag

SEQ ID NO: 362412 - DNA, 553 bp, Homo sapiens
ttgctttttaaaaagtaattttcttcttacatgtcttcattccctaatcatccattggagttgagttatgccatggcctgtccactaactgtttactctccagttaaagtccacatatcattctttttaaatctgttaagtgtgcacctgcctgtgtggcctgggttgtgtyttcttggcatggtttttcagaggatttctttctttgtggctttctctgtgaatttgctgacagccttcagctatccctcttctgctcaggcatgtgcttaagcttgttgtctgggttgctcactgcaggacacgagcccatatttcagccaactatgctgccaagcaaccactgccactgaagtggacttgccagcccatcaatcaacaacctctgttaggcttcgatttggagtgttgattagctgcctctagtcattcaatcctctctgtagtcatgcccaatgatgacagcatgtgacttttctataaaacatttttctttgtactaaacttctgaattccatgtgttgtatggtttctatttttgttccattttaca

SEQ ID NO: 362413 - DNA, 475 bp, Homo sapiens
agttgtgcacaatttaaaaatcctcaaacctcacttttacataggttttctatagaaagaacaatattcattcaaataccctcatggtctgccagccactttcagataaagctgccagagactgctttagcagtgaaagacacatgggtgatcacacagcaggggttgagaacttgcctctgttctgtcccacacagatccacagacatgagattctgtcactgaataggagacaccttgcsagtctggaatctcaggcctgtgagcagaaagagagctgaaagaccattaacctcgattcagcagatgctgacattctccttccagaactttcatgaagagttatccagtctttgcttgaacaccttcactgcccagaagcttattatttcattgtgattttagaaaagtgtttcttacatgaaccccagactgtcaccctgtgatctccacctatggctcagcacctgtcata

SEQ ID NO: 362414 - DNA, 659 bp, Homo sapiens
atagttgtgcacaatttaaaaatcctcaaacctcacttttacataggttttctatagaaagaacaatattcattcaaataccctcatggtctgccagccactttcagataaagctgccagagactgctttagcagtgaaagacacatgggtgatcacacagcaggggttgagaacttgcctctgttctgtcccacacagatccacagacatgagattctgtcactgaataggagacaccttgcgagtctggaatctcaggcctgtgagcagaaagagagctgaaagaccattaacctcgattcagcagatgctgacattctcyttccagaactttcatgaagagttatccagtctttgcttgaacaccttcactgcccagaagcttattatttcattgtgattttagaaaagtgtttcttacatgaaccccagactgtcaccctgtgatctccacctatggctcagcacctgtcatactgatcccaacccgtctctactgcagtctcctctggtcaaaatgaagcatcactcattccttcagtgtccttaatgtgacttaattccctttactttttgcgtgtgatgcagtcagtttaactcctatttagaatagagaaccaaaaactgaaggtacttcagttacagcctaagtagtata

SEQ ID NO: 362415 - DNA, 508 bp, Homo sapiens
aaaatatttattaagcatctgttakgtatttgaccctgtgctagtatgggttatctagtgataacagacaaacaaaaacagtcaatatcatccattcttcttagaatttatggtctggtagggatacagacattagataattacacaagtacatacatgtttacaaattaacataagtgttctgcaagaaaataacatattccatgagcaatattcagttaatacttgatgaagattattatgtctctgagtctgcaacattatctataatgtagagaaagcacgtttaagaccaatgtgagaaagcacttcatatccatgagatctgtccaggatagtggtttagggatgcgataaactccccatcactgggaatgctgatgctgagcatgggtgacaattgtataaagatggacattctctcagtgggtacaagattggactcttgattcagattctagagagcctattaagtttatcactgaatatatagccttttgagatgggg

SEQ ID NO: 362416 - DNA, 708 bp, Homo sapiens
ctgaggtggaatggggatacatggagatgatctttactaggggttcttcccttctaaggttcacgttgtcaaagctaaaactcagttctttctgatgactccaacctagatcagaccacagtttactctcatctccatagtgaaattggtaaccttactacaagagaagatcatgaatctaaactgtaatctaggctctgcagaaactgacttttaagctgtggcctgttattcawtttttctctctgggtcctagtgtctctctaagaataaaatatcttactcaatatcccatgtaatatcttgcttatcctacaaaaaatctaaaaagcaagtgtattttaatccccagtttacaggtagagatactgagaaaattaatgtcacatgttcagtaatttgaagctctgcaaatggattctgaaagactttagttcaaaatactgaatatgtgacattaattttctcattttttcttacaaccagaaagaatagtattattacattcatgtcacaagttaaaactcaaaccaagccaaacaaaaacaaaataaaattttggatcagagtataaataagttgaacacatcacacatctagtaactggctgagtatggattttggctcaggtctgatttatttattccaaagtttctgctcttaatttttaagctatgctgtctttcacaagattgagcagtctgaaat

SEQ ID NO: 362417 - DNA, 517 bp, Homo sapiens
ctataggcagaacagtcctgaggactgctggttgcccatttttatggttatttattgatgatatgctaaacaaggggtggattattcatgcctccccttttcagaccgcwtagcgtaacttcctgatgttgccatggcatttctaaacagtcatagtgctggtgggagagtagcagtgaggactaccagaggtcactctcatcacaatcttggtttggtgggttcagccagcttctttactgcaacctgttttttcagcaaggtctttatgactgtatcttgtgccaacctcttatctcatcctgtgactgagaatgcctaactttctgggaatacagcccagtaggtctcagccttattgtacccagctcctatttaagatggagttgctctggttcaaatgcctctgacaaaaggaacaaaaatgttgtttctggtatgctagcacccagaatagaggcacttgcacaatatatgcattcaaaaatgtattttttttcacttgtgcttactgcct

SEQ ID NO: 362418 - DNA, 517 bp, Homo sapiens
ctataggcagaacagtcctgaggactgctggttgcccatttttatggttatttattgatgatatgctaaacaaggggtggattattcatgcctccccttttcagaccgcttagcgtaacttcctgatgttgccatggcatttctaaacagtcatagtgctggtgggagagtagcagtgaggactaccagaggtsactctcatcacaatcttggtttggtgggttcagccagcttctttactgcaacctgttttttcagcaaggtctttatgactgtatcttgtgccaacctcttatctcatcctgtgactgagaatgcctaactttctgggaatacagcccagtaggtctcagccttattgtacccagctcctatttaagatggagttgctctggttcaaatgcctctgacaaaaggaacaaaaatgttgtttctggtatgctagcacccagaatagaggcacttgcacaatatatgcattcaaaaatgtattttttttcacttgtgcttactgcct

SEQ ID NO: 362419 - DNA, 517 bp, Homo sapiens
ctataggcagaacagtcctgaggactgctggttgcccatttttatggttatttattgatgatatgctaaacaaggggtggattattcatgcctccccttttcagaccgcttagcgtaacttcctgatgttgccatggcatttctaaacagtcatagtgctggtgggagagtagcagtgaggactaccagaggtcactctcatcacaatcttggtttggtgggttcagccagcttctttactgcaacctgttttttcagcaaggtctttatgactgtatcttgtgccaacctcttatctcatcctgtgactgagaatgsctaactttctgggaatacagcccagtaggtctcagccttattgtacccagctcctatttaagatggagttgctctggttcaaatgcctctgacaaaaggaacaaaaatgttgtttctggtatgctagcacccagaatagaggcacttgcacaatatatgcattcaaaaatgtattttttttcacttgtgcttactgcct

SEQ ID NO: 362420 - DNA, 401 bp, Homo sapiens
ccctgttcttacactctatcagccatggcccaagatcaaatctgagttgtggaaggacatgacaagggggttayacaggtggcgaagagaagatagagtcacagagttttggtcatgctgggcctactgcatggccctttccaaagaaattgtactctttcttcagaccaagagatttgctagaaagcagaaaaacaagccgtgttaaagtctgcaatactgagagctgatgtggataacaattagctaggaaagtagacggcagttaaggagaaagttatccaaaccataaaaagtgcttttaagcatcagtgttatttcttttttttctttaaaaaaacaaaactaatatcttcatcataaacacatgcccatattttttttctatatgttttagggct

SEQ ID NO: 362421 - DNA, 500 bp, Homo sapiens
agcatgggtggtacaaacaggtagacattggacatcatgacatgaacaacaggtggagcacttttccagaagcggtgaatcatggagacagcaattatgggcacataaaaggmcagcactgcacagatgtgtgacatgcaggtgttgagtgccttgagccgctgttcctgggatatgatgaccagcatggctctcaggatcaatgcgtaggaaagcaggatgaaagttgagtccataccataggtaaaaatgatcaccaagagcccataaatgttgttaacatggatgtctccacatgctactttcatgagatctggatggagacagtaggagtgatgcaaaacattgcctttgcagaagggcagtcgtttcaccacaaaagggaaagggaagagagtggtgaaactcttggtaaggatgcccagacccatagccaatatacggttgtgagtgagcacagtgacatagcgtaatggataacaaatagccacaaagcgatc

SEQ ID NO: 362422 - DNA, 566 bp, Homo sapiens
agtagtacatgggctgatgcagagcaggctcccaaaacaccagagtgagaatgctgaggttacctacaatggagatcatgtagaggatgcagaaaatcagggcaacccaggtgaggcctgtttgtatcccaggaatgcctgtcagctggagtgttgctggctggaagggggtgccattgagacccagcatggtgggagaatatagatagggaatggacccaagagggtgtgttgggaaacttcttcactttctttcagatatcctgtctccaacaaaaggtcatagattgaaaatgattgcctgtattcctgccttcccagtaagacactcatctctttaaggaagcaacygggttctaatcgtttgtgtaccaccagggccctgctcactatctaggccatagtagaaactctgtggtttgatgatcaaatgagtgcccataacatagcaaggcataataggagacaacattaacaattgcttctggtagaccagaaagaggaaatgcatcctaggctttggaaagtctttggtagatagcatagatggaacatctactactata

SEQ ID NO: 362423 - DNA, 572 bp, Homo sapiens
ttatgggaataaaaaaagagaaaattattacttaamcattaccaaaattttaaacttatacacacctttattcattcttaacctctattttctgagaaagagatttctctccttctccaaggacaggctctccaccttcaggatttcatttcttgtcactccttcagagcctttttcactaatccagtggatattcattctctccctttctgcctcttttccttcagacaataagtatgtgcaagactattccatcataaagatgcgataacattcttctctacccaccactctatgaccctttcccaattcttaaccaaatttcttgaaaaattgtctctccaggtacctgaaaatagaagcttgtattttatcattattattttttagttatttgcctgcttctccagcttgtttctgagatcttcgatgtcgggattcaatcttacttacattaccttctatcactgctcaattcattatatcgtggcttccacactcccctcctctgagttgaaacaaatttctctatggtcacctagtgacctctttgtctctgaatctaatgaaaa

SEQ ID NO: 362424 - DNA, 498 bp, Homo sapiens
actgctcaattcattatatcgtggcttccacactcccctcctctgagttgaaacaaatttctctatggtcacctagtgacctctttgtctctgaatctaatgaaaacattctctctcctaattcacttgatcttyttgctacagttaacactgtctttaactcacctgtttagaaccaccttctccattcaagggtactatttgtccacaattgtatttcttccttggcttctccttctctgccttctttactgaattatcttttctgtcttttttttaagcagcctcagcctaacttcaggcaaaataaacaatagtcagaatgatgcaaactgagaagtcacaccataagagacttcatctcaacctttatttaaaatagctcttctactatattttcatggtatttgatatctcaaaattaaacctccattctggaatttcagcataatgtctcttttattatttttctcattttagagttcccattttattcct

SEQ ID NO: 362425 - DNA, 470 bp, Homo sapiens
tattcactgtgaaattctttcaagttttctgtgtttgaaatttttcataataaaatgttgggaaatttttaatgaaaaaaggatgaagcaagacatagtctattatgccatgttcaaaacaccagtgaaaattcaaactaatacaagtgatatcaatgtcctttaaactaaccccaagcatcttttatatcaactcagtatttagcatgttatgggataaattttaygtatttgacataattgatatttttatatgactaaagaaaagaatcaaatttttcagttgaagctattttgccaaagattaactacttatgttcaacaaataaacattccctgccatgcctatatcccattctagggacatctatttcttcccccacaggactctctgtccagtggatgccacagaaacatgcagagccaactataatagagtgtgatcactgccttcatggcagaactgaaca

SEQ ID NO: 362426 - DNA, 484 bp, Homo sapiens
aaaatattcatggtagaatttaggtcataagtatactggtattcactgtgaaattctttcaagttttctgtgtttgaaatttttcataataaaatgttgggaaatttttaatgaaaaaaggatgaagcaagacatagtctattatgccatgttcaaaacaccagtgaaaattcaaactaatacaagtgatatcaatgtcctttaaactaaccccaagcatcttttatatcaactcagtatttagcatgttatgggataaattttacgtatttgacataattgatatttttatatgactaaagaaaagaatcaaatttttcagytgaagctattttgccaaagattaactacttatgttcaacaaataaacattccctgccatgcctatatcccattctagggacatctatttcttcccccacaggactctctgtccagtggatgccacagaaacatgcagagccaactataatagagtgtgatc

SEQ ID NO: 362427 - DNA, 484 bp, Homo sapiens
aaaatattcatggtagaatttaggtcataagtatactggtattcactgtgaaattctttcaagttttctgtgtttgaaatttttcataataaaatgttgggaaatttttaatgaaaaaaggatgaagcaagacatagtctattatgccatgttcaaaacaccagtgaaaattcaaactaatacaagtgatatcaatgtcctttaaactaaccccaagcatcttttatatcaactcagtatttagcatgttatgggataaattttacgtatttgacataattgatatttttatatgactaaagaaaagaatcaaatttttcagttgaagctattttgccaaagattaactacttatgttcaacaaataaacattccctgccatgcctatatcccattctagggacatctatttcttcccccacaggactctctgtccagtggatgccrcagaaacatgcagagccaactataatagagtgtgatc

SEQ ID NO: 362428 - DNA, 660 bp, Homo sapiens
actccactcccctgcctcagacagagtctctagtgtgagctgcatctcttctatggttccagcttccactggttgggctcactttggctgtagttctagtaaccccacctttggctttccagtctataggtggtagtagcttcctgctgttacaaatctctggactatgttactatctgctggtcagttcctcatttcttttgaaatctgtataaataatttccaggattaaatatattcagtttttttgtacttattattatgttatcaccgctcagtctcaatcccatatcttctataccattttttgtgatattgggattgagcctctgcaaactgcattcctcctttgccaaccagctccyaagatctacaaatatggggcattaggaagctggggcaggaagaaggaacttgtaccctacttcctttctgtggctctttccccagtggcacttcttcacccaagtactagtggttcaattccagtggccttggttggttatattttgaagctttccaacacttctagaaccagccttaccatgccctcttaaagacctcagaattagccagataagtctcccctcaacccccatctcagaagagtaagtcctagtcatagggaacctctcttctgaattcttgagaccccagaat

SEQ ID NO: 362429 - DNA, 660 bp, Homo sapiens
actccactcccctgcctcagacagagtctctagtgtgagctgcatctcttctatggttccagcttccactggttgggctcactttggctgtagttctagtaaccccacctttggctttccagtctataggtggtagtagcttcctgctgttacaaatctctggactatgttactatctgctggtcagttcctcatttcttttgaaatctgtataaataatttccaggattaaatatattcagtttttttgtacttattattatgttatcaccgctcagtctcaatcccatatcttctataccattttttgtgatattgggattgagcctctgcaaactgcattcctcctttgccaaccagctcccaagatctacaaatatggggcattaggaagctggggcaggaagaaggmacttgtaccctacttcctttctgtggctctttccccagtggcacttcttcacccaagtactagtggttcaattccagtggccttggttggttatattttgaagctttccaacacttctagaaccagccttaccatgccctcttaaagacctcagaattagccagataagtctcccctcaacccccatctcagaagagtaagtcctagtcatagggaacctctcttctgaattcttgagaccccagaat

SEQ ID NO: 362430 - DNA, 257 bp, Homo sapiens
ctctatcacctgtcatggttagcagtgccattggcatagtccaggaactaccactgctgttcactcagytaatcccaaggatcgccaaagatagctaaggggtttagggaagggtgacctcctccagcaccatggcatttggcaaggaactgagaacaggggaagctacctcttctgctggtggaatatcctatagggctcaagtttggttccatactgtcttagggaggcctcactagctgtgccaaggttgtgaa

SEQ ID NO: 362431 - DNA, 257 bp, Homo sapiens
ctctatcacctgtcatggttagcagtgccattggcatagtccaggaactaccactgctgttcactcagctaatcccaaggatcrccaaagatagctaaggggtttagggaagggtgacctcctccagcaccatggcatttggcaaggaactgagaacaggggaagctacctcttctgctggtggaatatcctatagggctcaagtttggttccatactgtcttagggaggcctcactagctgtgccaaggttgtgaa

SEQ ID NO: 362432 - DNA, 603 bp, Homo sapiens
tatgaaagccggttaggtagcatattaaggacaattatttatttacacctaccaactctataaccagctgaactctaagtagatagatgcactatggcacaatgaacaatgtaccattttatgtgtatgcaattatgaatatttcccttatctatcaaatagtttcaatgctttctaggacttaatgcagccagactgcctgggctggaataccaactccattatttactagccatataaccttgtctaaggtatcagtatccaaccttcctggcaccagcggccagtttcatggaatawaattttttccatagactttgggggcagggtgggaaggggggctcaggatgaaactgttgcacctcagatcatcaagcattctcataaggaatgctcaacctagatcctttgcacgtgcagttcactttagggttcgcgctcctatgagaatctaatgccacggctgctctgacagtaggaaagctcaggtggttaatgcttgctcactaggctgccactcacctcctgctgtgcggcccagtccctaacaggccacgttctggtacccctggtctaaggtatttaaacttctttgtacctcat

SEQ ID NO: 362433 - DNA, 586 bp, Homo sapiens
gtattgttttgagctgaagaaactgtgtatttgcagatccagaaacaagtatctgattgcagcctctttmtaatgaattatcaagtagtgtttggaatcccaagtaatgaaaacaaagaggactcgtgcacccaatttcttacctgtccattcacagtaactaccacactactaatcccttgtcctctccccttcccgcatgcttcagggttctccttttttggttcaagtcagagtttgggtggttagaacgtttccaccaaaaagaccgagataatgtttaaaggccaattcttaccataacactctatgaatctcggtagaaaaggtctgatgatgaatgaaagtacaaaatcttaattagcaatttagtattgagtatgggatgaagacgaactcaagttctttccaaacagagtgcctgactagaaagcacccaaacacttgagattctttttgttttgtacagactaggttataagtagattctcttactagaacattaaattagctccattacatggagcccttctttaccaattttatactataaataattctaataagagaatctcaacacaagaga

SEQ ID NO: 362434 - DNA, 583 bp, Homo sapiens
attcgggcttacctcttcctcctggctggcttaccaaatatatattaccaaatatattaacagtggagggggtccaggttcttggtgtgttggagaaagtattggataaaatgcacaaacagagcaaggaagggacgaagggacttattgaaagtgaaagtgcrctccacagcgtgggagtgggcctgagcatagtggctcaaaggccctgttacagagttttgtgagtttaaatgccctctacttggggtatgccctatgtaaatgaagaggatgaagtaaagtttcaaagtcatttggcctacgccctatggagagggtatttcctgtcattgttgaagtgtgaatcggccttatgttccctgcctccagaccctattttcctgcctcactgggataaagcctacttgattgtggtgaataagctttttgatgtgctgctggattcagtttgcctgtattttgttgaggatttttgcatcgatgttcatcaaggatattggcctgaagttttcttttattgctgtgtctctgccaggtttaggtgtcaggatgctgctggcctcatagaatgagttaggga

SEQ ID NO: 362435 - DNA, 528 bp, Homo sapiens
tttgcctctctttgcctcaagttaggcaaagatctattagatatgactccaaaaagcatgaacaatagaagaaaattgaacttcatgaaaattactaactcttcaaaagataagactagaaaaatgaaaaggagagccacagactagaagaaaatatttgcaaatcacatatctgataagaggcatgtattcagaatatataattaactctcaaaactcaatcataagaaaacaaacaacccagtttaaaaatcggcagcaaggatgaataagttctagagatctgctgtacaacatagtgcttatagtttacaagacagtattgtgcacttaaaaactcaagatggtagatctcatgttaagcattcttaccacaaaaaaaggggggaaatgcaagaaaatttttggtggtgatggatatgtttattascttgattgtggtgatagtatcatgagagtatgcatatgtccaaactcatcaagttgtatacattaaacgtgtgcagtttttatatgtctattatacct

SEQ ID NO: 362436 - DNA, 541 bp, Homo sapiens
ctactaaaaaacacaaaaatgaggtcaggtgcgccgactcacgcctgtaattctagcactttggaaagccaaggtgggcagattgcctgagctcaggagttcaagaccagcctgggcaacatgaccaaaccctgtctctactaaaaatacaaaaaattagctgggcgtggtggcacacctgtaatcccagctacttggcaggctgaggcacgagaatcgcttgagcctgtaagatagaggttgcaatgagccgagattgcgcaaccgcactccagcctgagtgacagagcgagactccatctcaaaatcaatcaatcaatcaatcaatcaaacggtgattgtaaaaatgtcattatacaaaataggaatttcagaaatggtaaatattattgaagctactagcaaaatatgctctttaaagatattgatcaacatatatcctttcttaatrcctcattgtcaacattatgaacagataagttctatgatgtcttgttaaaatagccatagatccatgtggtgtcaaatctgagctcaaata

SEQ ID NO: 362437 - DNA, 459 bp, Homo sapiens
ccctttcagaaatacatgttttgtatattgactcacctagatttataaatacttttcgagtgaggtaggagagatcagaggatccataatcataaaactccctaataaagttcctccaatgcctagtattaaaatacagtttttccgcagcactgtgatctttgaagtaggaaatggaaccaacsattacatggaacaccacagttcctagggttaaattttgagacccactggattagttttcatactttgattaaaaattaacaaaaatgtttaggtatttgtattttagattattatttttgtagctgcttatgtaatcttgtgtgtttggtaacgtgctatagtatgatgttttggggaaacatcttaattacttataatgctaatatgaagttttgtaatgagttaaccaagcctttcttttagaaaatatggcaaaaattagaaactcaatat

SEQ ID NO: 362438 - DNA, 606 bp, Homo sapiens
tctctgcgtccatcttccctctgcgtctctgggtgtcttttctatctctgatgaggacrctctcattggacttagggcccaccctcatccaatatgatcacatctcaattcttacctgcattgtacctgcaaagaccttgtgtccaaataagatcacattctgaggtcctcggtggacatacattttcagcaaacactgttaacacataacacgtggcaagctggagaacaggaccctgcctctcaagagagtccttgatgatccataaagacaagctgaagacaaagcagtggctgtccccattcggactcaggggagccactgtcacctctgaggcaaccccaacatttcagcccctggtggccaggggtccctgttgggccccctcaggaggttactgtgccccaccccttgcgtctcagctacgtgttgttggcaagggccctctgtcaaagcacacactgtaagaaagccattgcagtttggggactggtggtagagtgaaggaaataggaagagaattaaacaaacaaaggcaaaatcttcaccatccacagaacaatatgcaaaaaccagggcattcctccagaccatcaataaataat

SEQ ID NO: 362439 - DNA, 606 bp, Homo sapiens
tctctgcgtccatcttccctctgcgtctctgggtgtcttttctatctctgatgaggacgctctcattggacttagggcccaccctcatccaatatgatcacatctcaattcttacctgcattgtacctgcaaagaccttgtgtccaaataagatcacattctgaggtcctcrgtggacatacattttcagcaaacactgttaacacataacacgtggcaagctggagaacaggaccctgcctctcaagagagtccttgatgatccataaagacaagctgaagacaaagcagtggctgtccccattcggactcaggggagccactgtcacctctgaggcaaccccaacatttcagcccctggtggccaggggtccctgttgggccccctcaggaggttactgtgccccaccccttgcgtctcagctacgtgttgttggcaagggccctctgtcaaagcacacactgtaagaaagccattgcagtttggggactggtggtagagtgaaggaaataggaagagaattaaacaaacaaaggcaaaatcttcaccatccacagaacaatatgcaaaaaccagggcattcctccagaccatcaataaataat

SEQ ID NO: 362440 - DNA, 598 bp, Homo sapiens
tattttgtacaatggtccctaactgcatttctgtgatttaaaagctttccgaggcgtgagatgataatattacatgcatatagaattgtgtgtttgccatgcctcattactccccacagagacccaaaatcatttggtattcaactcctacctaaaatatttccttttacatacaaatattttttctgctttaaatggcttctctatgttaactttttttttttctttctggggctgtgaagcaagatcgcttcctacatgggattctattttggtccagtattgatctttagtggtagttgctaagtgggttgttggctttttcacccttcttttcctgtagccaattccttcccaatacaaagcaggtgcaggttttcgtgggggtgattttgaattttctgctcattctttcccttccatttcagatttctgcttcctggtttatttttactaatgtcttcctcagcaactaggaatgtttctctctcgctcatgtcttaataacaaagcttcataataattattataacgctttgccaggagaggcaarcttaacagccagtagaggatttggaaggcagtgtggtttggggaa

SEQ ID NO: 362441 - DNA, 618 bp, Homo sapiens
gagtttgtgagcctgtgcatgtgtgtgtgagcatgtgcgagcatgtgcatgagtgcatgtgtgagtgtgagcatgtgagcatgtgcatgagtgtgtatgtgtgagagtgtgcgtgagtgtgcatgtgtgagtgcattctcttcccatcaggactgtgagctcctctaggyctagaactagactttctacctttctgttgcttgcaccaccaaagtgtttcctgatgaacggatccagacttctctctcttcccagcctgaagggctgcctctttggtgggcactcactgccgtgcttctatcctaagagtttgtttctttgagtttgtgctggattgctctttggagtccttgtagacaacaggaaggaagagagctgttcagctacaatccagcacagtgactaacaaaacaaacaaaacactgcctggctgcaccccgagctcgccacccccacctgtggtcctgacgccaagaggagggatcagaccctccttccctaggatgacctcgcagtccttggggatgcggactgtttaattagaacaccttcagtcggaaacgctcatccatttatagggaaaacagcaacaggcttttaaggacatgccataagttt

SEQ ID NO: 362442 - DNA, 618 bp, Homo sapiens
gagtttgtgagcctgtgcatgtgtgtgtgagcatgtgcgagcatgtgcatgagtgcatgtgtgagtgtgagcatgtgagcatgtgcatgagtgtgtatgtgtgagagtgtgcgtgagtgtgcatgtgtgagtgcattctcttcccatcaggactgtgagctcctctaggcctagaactagactttctacctttctgttgcttgcaccaccaaagtgtttcctgatgaacggatccagacttctctctcttcccagcctgaagggctgcctctttggtgggcactcactgccgtgcttctatcstaagagtttgtttctttgagtttgtgctggattgctctttggagtccttgtagacaacaggaaggaagagagctgttcagctacaatccagcacagtgactaacaaaacaaacaaaacactgcctggctgcaccccgagctcgccacccccacctgtggtcctgacgccaagaggagggatcagaccctccttccctaggatgacctcgcagtccttggggatgcggactgtttaattagaacaccttcagtcggaaacgctcatccatttatagggaaaacagcaacaggcttttaaggacatgccataagttt

SEQ ID NO: 362443 - DNA, 618 bp, Homo sapiens
gagtttgtgagcctgtgcatgtgtgtgtgagcatgtgcgagcatgtgcatgagtgcatgtgtgagtgtgagcatgtgagcatgtgcatgagtgtgtatgtgtgagagtgtgcgtgagtgtgcatgtgtgagtgcattctcttcccatcaggactgtgagctcctctaggcctagaactagactttctacctttctgttgcttgcaccaccaaagtgtttcctgatgaacggatccagacttctctctcttcccagcctgaagggctgcctctttggtgggcactcactgccgtgcttctatcctaagagtttgtttctttgagtttgtgctggattgctctttggagtccttgtagacaacaggaaggaagagagctgttcagctacaatccagcacagtgactaacaaaacaaacaaaacactgcctggctgcaccccgagctcgccacccccacctgtggtcctgasgccaagaggagggatcagaccctccttccctaggatgacctcgcagtccttggggatgcggactgtttaattagaacaccttcagtcggaaacgctcatccatttatagggaaaacagcaacaggcttttaaggacatgccataagttt

SEQ ID NO: 362444 - DNA, 618 bp, Homo sapiens
gagtttgtgagcctgtgcatgtgtgtgtgagcatgtgcgagcatgtgcatgagtgcatgtgtgagtgtgagcatgtgagcatgtgcatgagtgtgtatgtgtgagagtgtgcgtgagtgtgcatgtgtgagtgcattctcttcccatcaggactgtgagctcctctaggcctagaactagactttctacctttctgttgcttgcaccaccaaagtgtttcctgatgaacggatccagacttctctctcttcccagcctgaagggctgcctctttggtgggcactcactgccgtgcttctatcctaagagtttgtttctttgagtttgtgctggattgctctttggagtccttgtagacaacaggaaggaagagagctgttcagctacaatccagcacagtgactaacaaaacaaacaaaacactgcctggctgcaccccgagctcgccacccccacctgtggtcctgacgccaagaggagggatcagaccctccttccctaggatgacctcgcagtccytggggatgcggactgtttaattagaacaccttcagtcggaaacgctcatccatttatagggaaaacagcaacaggcttttaaggacatgccataagttt

SEQ ID NO: 362445 - DNA, 533 bp, Homo sapiens
ataatacacttattcatgcatggggttttcactcttctcaaaatatgtccatatacaggactctacatgaataactgagctaagcagggttaagctttgagtcctcagttgaaaactgaggaaaccaagactgttttaaattctcctttgaactagcttttaacaccttactggttccttccctaattagtgagttatgaccacacagccataactcttgcaaatcagaggctataagaaggaaagctgtaaagctgggtatgggagcagatagcagaaagaacaggaggtttggacttagtctgtagcttttacaagctatgactctgggcaaggtacttaaatactaaggtttttttttttyttttaagggagtctcgctatgttgtccaggttgacctcaaactctggagctcaaggaatccttttgcctcagcttcttgagtagcttggagtataggcatgagccactgcacctggcttaaattttaagttttgacatctatgttaaaggataattgtgtctgcaccca

SEQ ID NO: 362446 - DNA, 571 bp, Homo sapiens
taactctgaggtgtcaccattttttttttyttttcaactggacatttgaaaatagtaatgctttttgggtgtgtgttttttaaaggtctgtttttacgctgtcactgctcaaaaatgccaaaaggcattttttccttaaaaaatcacctctgggctaagcccaaatgtggagtaatgaatccagaaaggactttttgagtagttacaagtggctgaaagcaggcactggtgatggaaattgggtttttccttttgcttcaaatcttcctggttgtaaactttttcttacccttattgaagtcagactcaaggtgggtctaatttctcccagcccatgggaaggcagagtgaattactgcttgttgtgccaaccctttacattttgtgtgtggctgtttgtctctacccagacaggttcttcacatattacctggggagcaggagagggggaggacaggaagagcacagttgggcagaaagagcaaagcctctcaagtctgatgggtttgggtttgagtctgacagttattagctatgtggtgaccttgggtactttgcttcaacttattga

SEQ ID NO: 362447 - DNA, 571 bp, Homo sapiens
taactctgaggtgtcaccattttttttttcttttcaactggacatttgaaaatagtaatgctttttgggtgtgtgttttttaaaggtctgtttttacgctgtcactgctcaaaaatgccaaaaggcattttttccttaaaaaatcacctctgggctaagcccaaatgtggagtaatgaatccagaaaggactttttgagtagttacaagtggctgaaagcaggcactggtgatggaaattgggtttttccttttgcttcaaatcttcctggttgtaaactttttcttacccttattgamgtcagactcaaggtgggtctaatttctcccagcccatgggaaggcagagtgaattactgcttgttgtgccaaccctttacattttgtgtgtggctgtttgtctctacccagacaggttcttcacatattacctggggagcaggagagggggaggacaggaagagcacagttgggcagaaagagcaaagcctctcaagtctgatgggtttgggtttgagtctgacagttattagctatgtggtgaccttgggtactttgcttcaacttattga

SEQ ID NO: 362448 - DNA, 571 bp, Homo sapiens
taactctgaggtgtcaccattttttttttcttttcaactggacatttgaaaatagtaatgctttttgggtgtgtgttttttaaaggtctgtttttacgctgtcactgctcaaaaatgccaaaaggcattttttccttaaaaaatcacctctgggctaagcccaaatgtggagtaatgaatccagaaaggactttttgagtagttacaagtggctgaaagcaggcactggtgatggaaattgggtttttccttttgcttcaaatcttcctggttgtaaactttttcttacccttattgaagtcagactcaaggtgggtctaatttctcccagcccatgggaaggcagagtgaattactgcttgttgtgccamccctttacattttgtgtgtggctgtttgtctctacccagacaggttcttcacatattacctggggagcaggagagggggaggacaggaagagcacagttgggcagaaagagcaaagcctctcaagtctgatgggtttgggtttgagtctgacagttattagctatgtggtgaccttgggtactttgcttcaacttattga

SEQ ID NO: 362449 - DNA, 515 bp, Homo sapiens
agggggtaaagcacggatgaaatgaccaactgctattccaaatccacagaaaagrtagggcaaatgagtccaaaggcctgaaagaacaagccccagggcagaatgtgttgaccagaaaagtaattttgtactaagggaaggcctagagatcctttagaacaaagaagaagaacaattgccgtagtatgttctaagacgaagatgtgaaagtcttgagtattggagggcactttgcaagggcagggttgtcagtttcagtgtggtcctcatggcaggagatggccagaggagaagactcacagaacacagagcaagcgccatgcaggcacggagactgcacacactacagccccccacggaggacatctcccttgcttcctagctgggacatgattcctgcagactggaaatattttcaagaaacttaaggagtaacatatgaatgttgaaaaggctgcatctttgaatagctccaggtgacatgtgcagttgcaacttacattttctggtaagtt

SEQ ID NO: 362450 - DNA, 439 bp, Homo sapiens
cccagggcagaatgtgttgaccagaaaagtaattttgtactaagggaaggcctagagatcctttagaacaaagaagaagaacaattgccgtagtatgttctaagacgaagatgtgaaagtcttgagtattggagggcactttgcaagggcagggttgtcagtttcagtgtggtcctcatggcaggagatggccagaggagaagactcacagaacacagagcaagcsccatgcaggcacggagactgcacacactacagccccccacggaggacatctcccttgcttcctagctgggacatgattcctgcagactggaaatattttcaagaaacttaaggagtaacatatgaatgttgaaaaggctgcatctttgaatagctccaggtgacatgtgcagttgcaacttacattttctggtaagttacaggaacccagatt

SEQ ID NO: 362451 - DNA, 488 bp, Homo sapiens
ctatctgccaggtttgacagctaggtaatttcaaattggaatttcagatttggccttcacttgtctttcctttgaaatttccattgcatttcccagacatttattgagtccacttgtcagcttgggtgaaaaatactgcctacccatcactttctgatttttcctttcagccaagactgaatgccactaatgggccattacctgaaggtaccgtgaagggcgagcttgtccttgggaaataaacctctggtgtgaattattccacttgcatctgaccagcgtcaacactgatggcctgtggagtgggtaggtttgtatccactcaacagcctaattacattccataaatgttggtawcctttcctttgctatctccgcaaatgtaagtatctgtagttcctgtttctcttttcagcctacagaatattattattttttccctttctttacaagcaagagcacaaatgaatttactagagctgactggc

SEQ ID NO: 362452 - DNA, 589 bp, Homo sapiens
tttttgctgtgcatagaattttgtgttgacatatttttttcctaatactccaaaggtgtcaccctagcacctcctggcttgcatagtctgacaagttttccataattatcatctgtgtttttctgtatgtaatgtggtggttattttttctgtctttggttttcagaagtttgtgtatggcataccttggtttggttttgatttgtttgcttgttggcatttattctgcttgatgttttctgtgctatttagatttgtggtttgatatcattaattttgacaaattcttggctattttttctgcccatttctctctctctctctctctctctgtctctctctttctgcttcttagattctgattacacatgytggatgttttgatgttattccacaattcatgaaagctctgctggttgtttttttctgttcatgtttcagtttgggcaatttttattgttctattttcaagttcactaattactttctgagatttgttaggcctatagtgagccggtcaaaggcattctttttgttaatatggttttcatttctagcatttcatttgatgttttgttcttcccatctc

SEQ ID NO: 362453 - DNA, 607 bp, Homo sapiens
ccctctcagcatgtggagggcctggttgttttagggaaacatttcctttaatggaattgagcatgtagggatcagacacattaaaaaatctctttgagagaactctgctttcagtcatgctcaccctaactctactttaaccctttctttcactaaggacacatttttgttatggtaagaacttttaacatgagatctaccctcttagatttttgagtgtacaatacagtattgtcatctataggtataattctttacagcaggtctctagaatttattcaaagcatatcagtataaacaaaagcacaaggaaacacaaggcaagatggcaagagagaaaaagagggacaaaaaagctataagacaaacagaaaacagtgaacaaagtggcaatagtaaatccttccctatcagtaattactttaaatgtaaatggtttaaattccccaatcaaaagacataaagtggatgaatggattcaaaaaagcaagatccagcaatgtgttgtctataagagattcactttaaatttaaggacacrtataggctgaaagtaaaaggatagaaaaagatattctgtgcaaatggtaactaaaccagaaaaggg

SEQ ID NO: 362454 - DNA, 422 bp, Homo sapiens
agtgctttttgtgtcctaagtaaggaatatttgctcacctcccaaaacatggtaatttcccattagctcttgtagaaattctactgtttgccttttatgtttagctccacaatccagctagtcttattatttttacgtatggtgtgagtaggagtcaagatagcatttttttggtatggatattcagttgacttttcatttaaaagactatctcttctctttctgktctagaacagactattctgttctattgacatattttgctatcctcaaaccgacactccctgttttaataactgcagttttatgatgtgtccagatatgctgaggtgtaagccttccaactttgtccttcattctcaagattgtactatttgcctttttcattttcataaataaatatattttgaatgtttcttatg

SEQ ID NO: 362455 - DNA, 595 bp, Homo sapiens
gtacacttatagttatttttattattttattttttaattagcagatctaattttatatttatcatgtacagtatgatgctacaaactatatgtacattgtggattgactaaacctcactaattaccatatgtattaccttacatagttatcatttatgtggtgagaacacccaatgtccattctttttaccagtgagttttatactttcagatgttttcttgttactcattagcatccttttctttcagcttaaataactcctttgagcatttcttgaaagataggtctggtattgaactccctcagcttttgtctgggaaagtatctcacctcacctctatttctgaaagacagttttgctgtgtacaagattcttggttggcaggttttttgttttgtttttttgtttttttgttttgtttttytccttcagtacttttaatatagcatcttactgtcttggcctgtaaggtttctgctgagaaatctgctgctagccatattgtaactccttttattttatttgcttctttactcttgctactttcaggatcttgtctttgttttggtttttgacagtttgattataatatg

SEQ ID NO: 362456 - DNA, 578 bp, Homo sapiens
tctttcttctgtttggtcaattccaacgttgatgctctctattgcattttttgtgtcattcattgtatttttcacctccaggatttctgcttgatttttaaaattatttcaatctgactgttaaatttctcattctggccacttaatattttcttcatttcactgatttttttttctcctgtattttcttgaagttcacaaagcttccttagtagttaattttaattctttgttaggtagttcatatatcttcatttttttaggctcagtcattggcactttattttgtccctttgatgatgtcatgtttccmtgattgctcttcatccttgtggtcatatgttgatgtttgtgcatttcaagaagtaggagcttatttcagactttgcagacttactttctctggaaaagccgttcagcagtcaacctgtttagagattttgagctggttgtctggcatggttctgaagcctggggcagctagggccaatgtggtgtgggggtggacctgacttttggtgccactgtggccagtgtggtgccaggagacaatggaagcctaaggctgcaatggctgt

SEQ ID NO: 362457 - DNA, 597 bp, Homo sapiens
ttttcaaatgacttgtcttccagtttgaagattctttcttctgtttggtcaattccaacgttgatgctctctattgcattttttgtgtcattcattgtatttttcacctccaggatttctgcttgatttttaaaattatttcaatctgactgttaaatttctcattctggccacttaatattttcttcatttcactgatttttttttctcctgtattttcttgaagttcacaaagcttccttagtagttaattttaattctttgttaggtagttcatatatcttcatttttttaggctcagtcattggcactttattttgtccctttgatgatgtcatgtttccatgattgctcttcatccttgtggtcatatgttgatgtttgtgcatttcaagaagtaggagcttatttcagwctttgcagacttactttctctggaaaagccgttcagcagtcaacctgtttagagattttgagctggttgtctggcatggttctgaagcctggggcagctagggccaatgtggtgtgggggtggacctgacttttggtgccactgtggccagtgtggtgccaggagacaatggaagcctaagg

SEQ ID NO: 362458 - DNA, 597 bp, Homo sapiens
ttttcaaatgacttgtcttccagtttgaagattctttcttctgtttggtcaattccaacgttgatgctctctattgcattttttgtgtcattcattgtatttttcacctccaggatttctgcttgatttttaaaattatttcaatctgactgttaaatttctcattctggccacttaatattttcttcatttcactgatttttttttctcctgtattttcttgaagttcacaaagcttccttagtagttaattttaattctttgttaggtagttcatatatcttcatttttttaggctcagtcattggcactttattttgtccctttgatgatgtcatgtttccatgattgctcttcatccttgtggtcatatgttgatgtttgtgcatttcaagaagtaggagcttatttcagactttgcagacttactttctctggwaaagccgttcagcagtcaacctgtttagagattttgagctggttgtctggcatggttctgaagcctggggcagctagggccaatgtggtgtgggggtggacctgacttttggtgccactgtggccagtgtggtgccaggagacaatggaagcctaagg

SEQ ID NO: 362459 - DNA, 447 bp, Homo sapiens
aggtcctgtgctcactttcctctcattcccccaagaagacattatctcactccatcctgygctgattgaggttgggaaaggcatgatgtgggtaatgtaaaactgtccttcctacccttttcaatgcattctttcttatgactgtgctacaaccaggtatcatgatctctcattttttttttttttttttttttgctcttgaaaaggtatttttgtgcatggatagttgttcaaattgatgtttctgcaatcactggagagtgattgcactattctgccattctgccatttggctccacttctctcatataatttttttttttttttttgagacagagcctcactctatctggagtgcagtggtgtaagcttggcccactgcgacctctgcctgccaggctcaagcaattctcctgcatcagcctcctgagtagctgggattacagt

SEQ ID NO: 362460 - DNA, 447 bp, Homo sapiens
aggtcctgtgctcactttcctctcattcccccaagaagacattatctcactccatcctgtrctgattgaggttgggaaaggcatgatgtgggtaatgtaaaactgtccttcctacccttttcaatgcattctttcttatgactgtgctacaaccaggtatcatgatctctcattttttttttttttttttttttgctcttgaaaaggtatttttgtgcatggatagttgttcaaattgatgtttctgcaatcactggagagtgattgcactattctgccattctgccatttggctccacttctctcatataatttttttttttttttttgagacagagcctcactctatctggagtgcagtggtgtaagcttggcccactgcgacctctgcctgccaggctcaagcaattctcctgcatcagcctcctgagtagctgggattacagt

SEQ ID NO: 362461 - DNA, 447 bp, Homo sapiens
aggtcctgtgctcactttcctctcattcccccaagaagacattatctcactccatcctgtgctgattgaggttgggaaaggcatgatgtgggtaatgtaaaactgtccttcctacccttttcaatgcattctttcttatgactgtgctacaaccaggtatcatgatctctcattttttttttttttttttttttgctcttgraaaggtatttttgtgcatggatagttgttcaaattgatgtttctgcaatcactggagagtgattgcactattctgccattctgccatttggctccacttctctcatataatttttttttttttttttgagacagagcctcactctatctggagtgcagtggtgtaagcttggcccactgcgacctctgcctgccaggctcaagcaattctcctgcatcagcctcctgagtagctgggattacagt

SEQ ID NO: 362462 - DNA, 562 bp, Homo sapiens
atcatctttaaatatgccctcagaattctctgcatctatttaaaggagattccttttttctctcctgtgaacacacggcacctgatgcctaaaccctgcctcattctcagaactgactgaagcccattcagctgaggtaatttaagtacacccccagggtcactgatggagcaggtacaagagagtgaagaatgaaagtataatgtttctgtaactcttcatacctcattaaatcaaagaaagatgtagttcaccatttctatctacaaatagcttaacattaacatcacaatgtattcatttcctttgaattctttttctccttttacatccaggctgaggccaaatcccacatatgagaaatctctacamctgccacaaaacaaaataccatcaacatttcattctccaaaagagatatgtaatttgaaatatatatatatgtcacagctaaaatggctgttcttgcttaatagtatttttatacaggtaattttctcactgagaactaataagtactataaattcgagatccattataattttatgacaaagtatatga

SEQ ID NO: 362463 - DNA, 369 bp, Homo sapiens
gccattctgcttactatgtggctacatttaggatgactttggctgcaagtaatagaaaacttaactttgatggatttcagaaataaaaaaaatttttaactcacttagggaaaatgctgagaaaacacaggctttagaattagttgatccatgcatagctgaaaaacagtctaaaactcactctgttgctcatcctgtgtgtcagtattctgctgcgtttaggcttggattgtttttggtgttgcccatcagttcagttctcaaagctcctgtgatataatttraaaaaaaaacatatatatatatatatatatatatatatatatatatatatatatatttggtctttttctctggttcctggcatat

SEQ ID NO: 362464 - DNA, 563 bp, Homo sapiens
agcctgtgacacagggttaagtcataggaactgagaatgccattctgcttactatgtggctacatttaggatgactttggctgcaagtaatagaaaacttaactttgatggatttcagaaataaaaaaaatttttaactcacttagggaaaatgctgagaaaacacaggctttagaattagttgatccatgcatagctgaaaaacagtctaaaactcactctgttgctcatcctgtgtgtcagtattctgctgcgtttaggcttggattgtttttggtgttgcccatcagttcagttctcaaagctcctgtgatataatttgaaaaaaaaacatatatatatatatatatatatatatatatatatatatatatatatttggtctttttctctggttcctggcatatagctcctaaaactcttgtaatctggagagtgttaacagtgytttttgcatgctaatgaggcaaatggtgacggagaccctagatagctgtaggatggaggctggctgccagcaacaccaaggcgtgattagagggttggagcttttagtccagccc

SEQ ID NO: 362465 - DNA, 563 bp, Homo sapiens
agcctgtgacacagggttaagtcataggaactgagaatgccattctgcttactatgtggctacatttaggatgactttggctgcaagtaatagaaaacttaactttgatggatttcagaaataaaaaaaatttttaactcacttagggaaaatgctgagaaaacacaggctttagaattagttgatccatgcatagctgaaaaacagtctaaaactcactctgttgctcatcctgtgtgtcagtattctgctgcgtttaggcttggattgtttttggtgttgcccatcagttcagttctcaaagctcctgtgatataatttgaaaaaaaaacatatatatatatatatatatatatatatatatatatatatatatatttggtctttttctctggttcctggcatatagctcctaaaactcttgtaatctggagagtgttaacagtgttttttgcatgctaatgaggcaaatggtgackgagaccctagatagctgtaggatggaggctggctgccagcaacaccaaggcgtgattagagggttggagcttttagtccagccc

SEQ ID NO: 362466 - DNA, 610 bp, Homo sapiens
catgtatgcacagtataccatttggtcaattgtgacatgtgtgtacacctgtgaaatgtcaccatcgtcaagatagcaaacaggtctgtcagcccccaaagcttccttgtgtcctcaggcaaccaaccactggtctaattttgycaccagaattttatattaataaaatgataagtatgcattcattttttgctcagcctagtggttttgagatccatctatgtttatatatatgtatatatataaaaacatacatatgtagatgaatatatttatacagcttcttcatagatgaatctatacataaacatataaaaatgcatatatatataaacagatgaatttcaaaattactaggctgagcaaaaaataaatgcatatatataacataatatataaacatatatattatatttttttttctctgaggcttgttagagctgcctgaggtctcccgcgagtgcgaagtccctccctgtctcccacccctgttctgtctctctcccctaagtagtatctaatgaatgatagatcacaatttgcttattcattcactcttaatggacgtttggatttttatcttgtttcagactattacaaaggaggatgc

SEQ ID NO: 362467 - DNA, 610 bp, Homo sapiens
catgtatgcacagtataccatttggtcaattgtgacatgtgtgtacacctgtgaaatgtcaccatcgtcaagatagcaaacaggtctgtcagcccccaaagcttccttgtgtcctcaggcaaccaaccactggtctaattttgccaccagaattttatattaataaaatgataagtatgcattcattttttgctcagcctagtggttttgagatccatctatgtttatatatatgtatatatataaaaacatacatatgtagatgaatatatttatacagcttcttcatagatgaatctatacataaacatataaaaatgcatatatatataaacagatgaatttcaaaattamtaggctgagcaaaaaataaatgcatatatataacataatatataaacatatatattatatttttttttctctgaggcttgttagagctgcctgaggtctcccgcgagtgcgaagtccctccctgtctcccacccctgttctgtctctctcccctaagtagtatctaatgaatgatagatcacaatttgcttattcattcactcttaatggacgtttggatttttatcttgtttcagactattacaaaggaggatgc

SEQ ID NO: 362468 - DNA, 596 bp, Homo sapiens
attttcacttggcgccctccacctagcaacctctatttggcccagaaccaagggcctggatccccagggtagcctgcctgtgttcaagggatggctgggaggtaggtgccctcctgggaagcagggctgctgggctgggaggagactgtgcctcagggaaaaggcgaggctgccttggtactgggtaggagtgagtggtgaggacctagccaaaggtaggtgagaggacaccctctgtgtccatttaacaaagcagagtttcagacagggtgtgaggcttccagagagacatttaacattcactgagcttcaggagagctgaccaccccaagccaaggccaacactgcctagtgtcctcactaagcaamccctcaggacacaggttccaactcagccactgagggagagagagacaaggcggtgtcagtgtccttcatagagaaggagcgaatgtctgggttggctgctcccagattccttagctgggaactctgagcacacattcttttcagagatgaccatagggtccttctcagggcatgcttcagtgccatgagtagaacatccatactggatttttttatttaaaaaatgt

SEQ ID NO: 362469 - DNA, 623 bp, Homo sapiens
tttcaagttgaatgagaaaagccaatcaacagaagccaatactgaggtgatacagatgtcgaaattatctgaaaaggatttcaaagcagctaccataaaaattcttcaacaagcaatgacaaacacacttgaaataagtgaaaaaaaatggaaagtctcagacaagaaattraaactataaaggaggaccacatggaaatttttcagttcaactgaagtaaaactctaacggaatgggcacaataatataatggagagtataaaggaaagaatcggtgaacttgaagatacaacaacagaaattgttcatctgaaaaatgaaaaaagactaaaaaaacaaaaggaaccaaccctcagggatctgtgggacatgaacaaaagatctaacatttgtatcatcggagaaagagggcagggatgaaaaagtattcaaagaaataatgattaaaaaattggtaaaagatataaacctagagatttaagaagctgggaaaatcctaaaaaggctaggcaccccccaaaatctatgccaagacacaacaatcaacaaatcaaactcgtgaaaactaaagaaagataaaatttcttgaaagcagtcagagataaatgacaatttacctata

SEQ ID NO: 362470 - DNA, 256 bp, Homo sapiens
gacacgccacagtatcaggcttatcagtaccagctcacattcctttccttatttggaaagaagactagctctctaggtcattgcagacatcccttcccctctcccctctctcccttatatgcccaccttatctgaagaaaagttcaagtatttagccaaccaagattagtttagattgtacggcccaaccccagccaatgaggraaaagtacagaggcaggacttgcatcaagaatgaaggctcttatgccccttt

SEQ ID NO: 362471 - DNA, 597 bp, Homo sapiens
atacggctctcgtgctctctcagactgtccaggactctctggccttcaggagcctcagacagccctgcgatgctcctagctctcagctcctgccccactcattgtaacctttctcagggccactgattagaagggttcaatatacaaatctacccacatggcattatcctaaggctgaagattttacgtcgaggtgcaaaccaacaggagaggttctttgagtttacattaagggagggaaaagggcagggggtgagtggctttaagttttccttcagacacggaggatcagcctgctttgagaagcctaaggcccatttctgctctaaccagatgagagctgcaagaaaaatagcctgtttttctctttcttttcttktcttgtcttttctttcttctctttccttccttctttcctttctttctttcttctttagcaaatataacatgtggatgagactaactttgaaatttacgttcagaaaatattgatctcacattcatgatttttaaccctcaggggaaaagaaagtatttgactttggttcagtgagtttacagcactgtgatcaatacagagattaacctttgaaaagg

SEQ ID NO: 362472 - DNA, 387 bp, Homo sapiens
agcactgggggctgtgcaaaaacaacctgaatccaaaacccaaatgctgagagcagaaaacgacaaaaccatgaagactaaaatgaaaagccaaagaaaaayaccaaatcatgtaagaaatgaagattaaattataaggtgttccaggaagactataatcaaatgaaaatgtaatcaggggcattaaagaaagaaggcaaacaggaggccaaaaacagctgagtagtaaaaacaagccagaaagaaagtggttgaaatggaagccaggccagtgagactcaacataaagagatccgtgaaatcgtaaaatataacaaatactcaaaactctgatccaagaaacctttctggactcaaaagaagatacaatgctacatgttaggccca

SEQ ID NO: 362473 - DNA, 630 bp, Homo sapiens
  misc_feature (1)...(630): n = A,T,C or G
ataaattacattaaatatcatctctatcctcaagaattttacagtctaatagtataggaaacagaagacataaaagaaggcaaaatgtgatgaatgccacaaaagagttgtcatgccatagaaattaacaaaccctggagagtcttgagaggcttctgaacatgggattaacagaagcagatgtttaagcaggagcacctgcctggtgctccaggaaggtgaatcaggtgtgaggatgcagctgggcaaaactgaatggaaagtctctgagagaccatggaggaggctgttgggagaaaacactctactgagctcttgcatttctgwacatcttctaagcagaagaactgattgtctttgttccagactatcttttccaagatgcatgcacagcccatcagccttgaaatacagagatatgtccctctgtagcaaaaggcagggatgctttttgtcctgtaaaatggatttgtgtttcctaagtgccaaattcctctcctgacacaaattactgcatgtgcaggtgtcgccagaccnaggtaggcttcggctcatgctgcctactgtggcctggggaacaaagtcctgaggctcatgtctcttgtcagcatccatgacactttgccactt

SEQ ID NO: 362474 - DNA, 593 bp, Homo sapiens
gatctttacacattacatgaatgtgtcaaattaccacatatactctgaaaatatgtacatctattatgtatcaataaaatagtaattaaaaaagaaaaaatgtaattttctcctgtcttcatcttttctctatagattttataagatgcaggacagggtgattgttttcctcttggctctagttttaagaggtttctttagatcagtgctttctgaagatgcaytggatttgctatttccagccttttgagtgtgaaatatgtgtgagaagcctctttcatctaaatcatgaatttcagagtcccactaggcgccactgtaattatgaactgagtgatccgatggatacttcctcctagtggaaaagccttgaatggagatgaaaggtcccttttaatgagctttaatgtctcatggcttttattcctttttactctgctttgaaagtaaaggtttgtggggacctagaagactatgaacatttcctcccatttctatgtcacttgagctggctaaggccactcttccctcataggctgtgagtgtgtatctgtgtgtgtgtgtgtatgtgtgaatgtggatgcatatgtgtg

SEQ ID NO: 362475 - DNA, 617 bp, Homo sapiens
cggagaattctctattcatgtcctttgcccactttctgatgggattatttgtttttttcttgcagatttgttttttccctatggattctggatactagtcctttgtcrgatgcatagtttgcaaatattttctcccactctgtgggttgtctgtttgatgatttttattaatactctgatgattacttcttttgctgtacagaagttttttaacttaattaggtcccatttatttactttcatttttgtcacatttgcttttggggtcttagtcatgaattctttgcccaggccaatgtccagaagagctttcccaaggttatcttctagaatgtttatgatttcacatcttagatttaagtctttgatccatcttgagttgatttttgtacaaggtgagagatagagatacagtttcattcttcttcatttggctagccaattttcccaatgccatttagtaaatagggtgtccttttccactttatgtttctgtttgctttgtcaaagatcaattggctgtaagtatttggctttatttctgactttcattggtctatgtgcctacttttataccagtaccatgctgtgttggtaactatagccttgtagcatga

SEQ ID NO: 362476 - DNA, 617 bp, Homo sapiens
cggagaattctctattcatgtcctttgcccactttctgatgggattatttgtttttttcttgcagatttgttttttccctatggattctggatactagtcctttgtcggatgcatagtttgcaaatattttctcccactctgtgggttgtctgtttgatgatttttattaatactctgatgattacttcttttgctgtacagaagttttttaacttaattaggtcccatttatttactttcatttttgtcacatttgcttttgrggtcttagtcatgaattctttgcccaggccaatgtccagaagagctttcccaaggttatcttctagaatgtttatgatttcacatcttagatttaagtctttgatccatcttgagttgatttttgtacaaggtgagagatagagatacagtttcattcttcttcatttggctagccaattttcccaatgccatttagtaaatagggtgtccttttccactttatgtttctgtttgctttgtcaaagatcaattggctgtaagtatttggctttatttctgactttcattggtctatgtgcctacttttataccagtaccatgctgtgttggtaactatagccttgtagcatga

SEQ ID NO: 362477 - DNA, 617 bp, Homo sapiens
cggagaattctctattcatgtcctttgcccactttctgatgggattatttgtttttttcttgcagatttgttttttccctatggattctggatactagtcctttgtcggatgcatagtttgcaaatattttctcccactctgtgggttgtctgtttgatgatttttattaatactctgatgattacttcttttgctgtacagaagttttttaacttaattaggtcccatttatttactttcatttttgtcacatttgcttttggggtcttagtcatgaattctttgcccaggccaatgtccagaagagctttcccaaggttatcttctagaatgtttatgatttcacrtcttagatttaagtctttgatccatcttgagttgatttttgtacaaggtgagagatagagatacagtttcattcttcttcatttggctagccaattttcccaatgccatttagtaaatagggtgtccttttccactttatgtttctgtttgctttgtcaaagatcaattggctgtaagtatttggctttatttctgactttcattggtctatgtgcctacttttataccagtaccatgctgtgttggtaactatagccttgtagcatga

SEQ ID NO: 362478 - DNA, 541 bp, Homo sapiens
ctcaaacatttatcttttgtttgtgttgggaacattacatttctactcttctagctatttgaaataaacaacaaattatcattaactgtaatttccctactgtactatctaatacaagaacttatgtcttctacctaactgtatttttgtacttcttaaaaacaatacagctcaagggttttaagaggcatttgctgtctttttcctctgcctctagtttaaagcagacaatgataagttgcaaataaagcacaatatggacaaagcctaggttrctcaatcattatgtagatgagagtcacctgtcaatgagaaattcctgctttcaaaaattccatgaatgagaaaaataaattttactgtatgtaagctattctgtatttggagatccatttattagagcaggttagcctacactaactcaaactagatgtgacttattggtcatagatatgtgcaacattaagtaaatttagtaatgatttatattttggtttacaaagtatgtatatctgcttactgtctgcaaatgtacttgaga

SEQ ID NO: 362479 - DNA, 594 bp, Homo sapiens
tatcatgaactgggtgctcttacccatctagccataaagtgtgtcatgcacagcagcattccaccatcaaatggaagtgktatatatgtgatcaggcttgagcaggtcctgaaggcacaagtaagttacatgaggaagtggcttaaatgcccatggtgtccactcttgccaccctgccttttctcccccagcctgcaccaatggcctcatggcgagttccctatgatcagttgacagaggaagagaagactaggacctggttcaaagatggttctgcacgatatgcaggcaccatccaaaaatggacagctgcagcactacagcccctttctaggacatccttgaaggagagtggggaagggacatcttcccagtgggcagagcttcaagcagtgcactggttgtgcactttgcatggaagaagaaatgtccagatgagctattatatactgattcatgggctgtagctggtggtttggctggatggtcagcgacttggaagaagcatgattggaaaattggtgacaaagaaatataggaaagaggtatgtggatggacctctctgggtggtaaaaaactgaatatatttgtat

SEQ ID NO: 362480 - DNA, 594 bp, Homo sapiens
tatcatgaactgggtgctcttacccatctagccataaagtgtgtcatgcacagcagcattccaccatcaaatggaagtgttatatatgtgatcaggcttgagcaggtcctgaaggcacaagtaagttacatgaggaagtggcttaaatgcccatggtgtccactcttgccaccctgccttttctcccccagcctgcaccaatggcctcatggcgagttccctatgatcagttgacagaggaagagaagactaggacctggttcamagatggttctgcacgatatgcaggcaccatccaaaaatggacagctgcagcactacagcccctttctaggacatccttgaaggagagtggggaagggacatcttcccagtgggcagagcttcaagcagtgcactggttgtgcactttgcatggaagaagaaatgtccagatgagctattatatactgattcatgggctgtagctggtggtttggctggatggtcagcgacttggaagaagcatgattggaaaattggtgacaaagaaatataggaaagaggtatgtggatggacctctctgggtggtaaaaaactgaatatatttgtat

SEQ ID NO: 362481 - DNA, 594 bp, Homo sapiens
tatcatgaactgggtgctcttacccatctagccataaagtgtgtcatgcacagcagcattccaccatcaaatggaagtgttatatatgtgatcaggcttgagcaggtcctgaaggcacaagtaagttacatgaggaagtggcttaaatgcccatggtgtccactcttgccaccctgccttttctcccccagcctgcaccaatggcctcatggcgagttccctatgatcagttgacagaggaagagaagactaggacctggttcaaagatggttctgcacgatatgcaggcaccatccaaaaatggacagctgcagcactacagcccctttctaggacatccytgaaggagagtggggaagggacatcttcccagtgggcagagcttcaagcagtgcactggttgtgcactttgcatggaagaagaaatgtccagatgagctattatatactgattcatgggctgtagctggtggtttggctggatggtcagcgacttggaagaagcatgattggaaaattggtgacaaagaaatataggaaagaggtatgtggatggacctctctgggtggtaaaaaactgaatatatttgtat

SEQ ID NO: 362482 - DNA, 594 bp, Homo sapiens
tatcatgaactgggtgctcttacccatctagccataaagtgtgtcatgcacagcagcattccaccatcaaatggaagtgttatatatgtgatcaggcttgagcaggtcctgaaggcacaagtaagttacatgaggaagtggcttaaatgcccatggtgtccactcttgccaccctgccttttctcccccagcctgcaccaatggcctcatggcgagttccctatgatcagttgacagaggaagagaagactaggacctggttcaaagatggttctgcacgatatgcaggcaccatccaaaaatggacagctgcagcactacagcccctttctaggacatccttgaaggagagtggggaagggacatcttcccagtgggcagagcttcaagcagtgcactggttgtgcactttgcatggaagaagaaatgtccagatgagctattatatactgattcatgggctgtagcyggtggtttggctggatggtcagcgacttggaagaagcatgattggaaaattggtgacaaagaaatataggaaagaggtatgtggatggacctctctgggtggtaaaaaactgaatatatttgtat

SEQ ID NO: 362483 - DNA, 487 bp, Homo sapiens
acattaaattaaattaaatttgatcagaggtatatatgtataaggttactgcatccacattttggaatgtatctcttgtggttaagggaaaactagtctacagttataagtgttttgtcagataattctggcatttatgcctcctctttgtgagttttgatggtttkctggattgcgagtctttattttcatgttacttcaattgccagttattctctgattagatggctgacattgggaattttatctttttggatgattgatattttggcgttcctattcctgaacattgtgatggaattcagttaagttacttggtaaactttgattctctaggaccttgcttttaagaattttttaggagacacctgaatagaatttagtctctggttaatttttcttcattattgggaaatatccttttttgttttctacccaatgcttctctatgaattttgaggcaaacagtattctttgcactgcatga

SEQ ID NO: 362484 - DNA, 585 bp, Homo sapiens
ttgcctttaattttcatctcaaaatagctcatgttctgtttgttgttgtgtaggctttggatataatctttctcttggattactatgtaaaagtagcagtccagtttctgttttatgtaattatttggaattttattataggcaaaatttattacacaaatttatacttgttcttagggtgcaaaatggatgcctcttttctacttttatgatagtcttcattcaacttcaagtcgcatttgttacagtttttggttatcatcactgttattatgaatatagttgatttgtatttgacctattagcgtttgttaaaactctttaccttgtatttctaccagtttctccttaagtattcaatactttaaatttayatatggtggtcctatatgaatcaaggttacagttatatcgctatttattgtctaatatggatttatcttttataaccctactagtttttaaatgtatcctcaaattcaaattaaaagaataaaggaaaaacatggcaatgatttatttctgcaatcaagtgggtttagcagattggaagcagaactacatacatcaatgataagaaatctt

SEQ ID NO: 362485 - DNA, 585 bp, Homo sapiens
ttgcctttaattttcatctcaaaatagctcatgttctgtttgttgttgtgtaggctttggatataatctttctcttggattactatgtaaaagtagcagtccagtttctgttttatgtaattatttggaattttattataggcaaaatttattacacaaatttatacttgttcttagggtgcaaaatggatgcctcttttctacttttatgatagtcttcattcaacttcaagtcgcatttgttacagtttttggttatcatcactgttattatgaatatagttgatttgtatttgacctattagcgtttgttaaaactctttaccttgtatttctaccagtttctccttaagtattcaatactttaaatttacatatggtggtcctatatgaatcaaggttacagttatatcgctatttattgtctaatatggattwatcttttataaccctactagtttttaaatgtatcctcaaattcaaattaaaagaataaaggaaaaacatggcaatgatttatttctgcaatcaagtgggtttagcagattggaagcagaactacatacatcaatgataagaaatctt

SEQ ID NO: 362486 - DNA, 368 bp, Homo sapiens
aggccctcacttcaccacaatgcagcaacatttcatttgtccccactctatgaagacagacaaatgaaagataatcctaaaaggaaaaggcatgaaatccttgcaatttagtgattatggaagaatgatgattagtgtaataataactttgagaagtaaaagtcttgaaacattggtatttgtcaaattctaagaaaatcccttccactatagatattagatatcttacttttctttttttttattatactttaagttttagggtacttgtgcacagcatgcaggtttgttacacatatatayatgtgccatgttggtatgctgcacccattaactcgtcatttaacattaggtatatctcctaatgc

SEQ ID NO: 362487 - DNA, 507 bp, Homo sapiens
atccatataactattaaagaggcacaaacataattccaggtactccagagtatgttctttgagaatataaccagaagctgcattcagaaataaagctaaaaaacttgtttgtttaataagggaatgtctttttcttgttgtttgtttctctttctctttattgcttaccaggttaattactaagttgtctaaattttaatgtttctaaatgtcaaaaagtaggtgtccatccttcataaatcttaaaccccatattaacagcacatgcaatgttttgaagaaagaactttagaatcaatttctaattttcttaaccagccacagaatttattataaaggatttttagaagtttgttgccatgattttatataactcttaattttatttaaagcagtaattgtcttcttagcatcacacacaaaaatcgygctgggtaaaagacttctacaaagtcctgctaattgattaaaatgatagttttgaaaggccatattccacacagagtt

SEQ ID NO: 362488 - DNA, 552 bp, Homo sapiens
gaacagtatgacatcatcttaacgtaactagttacatctgcaacaaacctatcttcaagcaaggtcacattttgaggtactggagtttaggactccaacatatgaattttgagggggcataatacaacctataacacttatcatatttgcaaatatcattaaaaatatgccactgctaatatctaatgttgacagtagtatgaagaaagagtcactcttatagatactgacagaattttacattaacaaattatatttatggaagaatttttggctgaatgtatcaaaaacttaaaatgtgctcaacttgtgcttccacttctagaaatgtatttttttttacaaacacaagggtgaacagaaattattacacaaatataatcactgcagcaatatattaaaaaaacagaattatctcttcttgaattcatttacaagtcatattttgtaagccattataaataatattaaaatgttttaatgtctaygttttcattattaaaaagagaagtgcagttggtcattctatgttcaccttttatcctgcagcct

SEQ ID NO: 362489 - DNA, 557 bp, Homo sapiens
aaacaaaaaatgaaatgaaagatttaagccctgacatatcaataaacacactagtaagtggtctcaatataccaattaaaagacagagattgacagagaggatgcaaaacwtgaagtaactatatgctatttacaagaaactcacttcaaattaaatgacacaggtaggttgaaagtaaaattatataaaaatatgtatcatgaaaacatgaattaaaataatataaatgactatgtttatatcagacaaaataggtccctaaaatatagagcaatattatacaatgataaaagggtcaatgcaccaagatgatgtagtaattctaagtgtgtatccactaaatagaatattaaaatatataaagcaaaaactcataaaactgaaatagaagcatacaaatcaacagtgatagttagaaacaggagcatccctctctcagcaaatgataagacatacaaagagaaaaccagcaaggatacagaacatattaatactaccaaacaacagtatttaactgacacttacagaatactctgctcaacaacagtagaacaga

SEQ ID NO: 362490 - DNA, 586 bp, Homo sapiens
tagtattccattgtgtatattttgcaaattttctttctccattcatccattgctggacacttgggttgattccatatattgactattgtgactaacaatgcaaggaacatgggagtgcaggtatttctacagcatgctaacttcatttcctctgtatctatacccacaagtggatttgctggatcgtaaaatagatgatatattttacaattttgagaaaccttcatactgttttccataacggtkgtaccaatttacattcccataaaaaaggttcctttttaccagcatcctcaccaacgcttattatcttatatcttttttggtaatatcctgtccaataagtgtgaggtgatatttcactgtggttttgatttgcatatcactgatgattagtgatactgaacacgttttcatgtgcctcttggccatttgtatgtcttcttatgagcgatgtaaatttgggtcctttacatattattgttatttacatatttattatttttctgttgatgttgctttggttggtagattatcttttcactctcatgattgtttcctttgctgtgcagaagctttttagttt

SEQ ID NO: 362491 - DNA, 565 bp, Homo sapiens
aagtgtcatgccacaagctttgctatttttgctcacaattgcyttggcatcatctgtggtttcatgttaatttaaaattgtttaatcaatttctgtaaacagtgtcactgggattttgatagagcttgcattgaattgctagattgctttgcgtagtaatatgatttggctttgtgttcacaccgaagtctcatctcaaagtgtaatcaccacacgttgaggaagagacctggtgggaaatgattggatcatgggggtggttcccccgtgctgttcttatgctagtgagtgagttctcatgagatctgatgattttgaagtggcagtttcccctgctcttgctctctctcctgctgccatgccttgcttcctgttaccttctgccataattggaagtttcctgaggccttcccagccatgcagagctgtgagtcaattaaatctcttttttaaaaaaaaaaatataatataaaataaaataatccagtctcaggcagtctttacagcagtgtgaaaatggactaatacagaaaactggtactgggagtggggccctgttataaag

SEQ ID NO: 362492 - DNA, 565 bp, Homo sapiens
aagtgtcatgccacaagctttgctatttttgctcacaattgctttggcatcatctgtggtttcatgttaatttaaaattgtttaatcaatttctgtaaacagtgtcactgggattttgatagagcttgcattgaattgctagattgctttgygtagtaatatgatttggctttgtgttcacaccgaagtctcatctcaaagtgtaatcaccacacgttgaggaagagacctggtgggaaatgattggatcatgggggtggttcccccgtgctgttcttatgctagtgagtgagttctcatgagatctgatgattttgaagtggcagtttcccctgctcttgctctctctcctgctgccatgccttgcttcctgttaccttctgccataattggaagtttcctgaggccttcccagccatgcagagctgtgagtcaattaaatctcttttttaaaaaaaaaaatataatataaaataaaataatccagtctcaggcagtctttacagcagtgtgaaaatggactaatacagaaaactggtactgggagtggggccctgttataaag

SEQ ID NO: 362493 - DNA, 642 bp, Homo sapiens
tgcatacagtgcctctttctcattcatatgacgatacctatcgtgctgtagtggcactttgtgctggtgctatacaaataacaagattccttgacatcaaggaccttgtattataaataagtaagtggtgatgattaatagcaaatccttatcaaattcaaatgcctgtaaacatgaaagtagtttatggggcacaaattacttgccagttttaagttataattctgatcctattgtgtcatcacctggttcttctcagggatccattgayacatgtttatctcaaaacctcacagatggaattcatgttttatccaggatacaggttacctgcaaaaccactgcatgaaacaataaatgaaagtacaagaaaagagtgtacaagcatgaattctagtgagaagctaaattgaatttggtactgatatgtgtttatgcacatagagaatatggttattttttaaatcaatgaacaagacatttctgtttgttaacactatttgtattagtaccatattgcttctagcaagtgcgttttgtgataacagcatgaaatgcatttcattaagttaaagtgtgctggcattaaggtagtggctgatgacatttctaatttgaaatgcctgcagagttagttttatg

SEQ ID NO: 362494 - DNA, 565 bp, Homo sapiens
aagtgtcatgccacaagctttgctatttttgctcacaattgctttggcatcatctgtggtttcatgttaatttaaaattgtttaatcaatttctgtaaacagtgtcactgggattttgatagagcttgcattgaattgctagattgctttgcgtagtaatatgatttggctttgtgttcacaccgaagtctcatctcaaagtgtaatcaccacacgttgaggaagagacctggtgggaaatgattggatcatgggggtggttcccccgtgctgttcttatgctagtgagtgagttctcatgagatctgatgattttgaagtggcagtttcccctgctcttgctctctctcctgctgccatgccttgcttcctgttaccttctgccataattggaagtttcctgaggccttcccagccatgcagagctgtgagtcaattaaatctcttttttaaaaaaaawaatataatataaaataaaataatccagtctcaggcagtctttacagcagtgtgaaaatggactaatacagaaaactggtactgggagtggggccctgttataaag

SEQ ID NO: 362495 - DNA, 578 bp, Homo sapiens
ttctgttgaggtatttttaaaattctcttttgatttcctttttgaccaatggtaaayttgacataaatattcattcaaatttaagttgaagctttctttttaatgttactttacataatttgtgaatatattttacactgatcatgtctcagtatgagacacaatgttttaaagaataaacagatgagataaaatggcatattagtaaaataatagtgtcaaatgtaggtgtatatcatataatctgtatcacaaacagacataaagatagatatatccacacttctaaaatttgcatctgcatatttttgcctaggttgctgaaataaaatgtactcttgatgattttggtaaacaactagttttattatcacagtttggaaagtggtacgaaatagcaattattaataattgtccttggtttttggataaaaatgctattacctgtggaacacagagttattgtgaaatggtgacattgtcttttacttcttatggattaataaatctttattccaaaggaatatgttataataatagcttacttttaaagtgctctatataatgctgcatatact

SEQ ID NO: 362496 - DNA, 578 bp, Homo sapiens
ttctgttgaggtatttttaaaattctcttttgatttcctttttgaccaatggtaaacttgacataaatattcattcaaatttaagttgaakctttctttttaatgttactttacataatttgtgaatatattttacactgatcatgtctcagtatgagacacaatgttttaaagaataaacagatgagataaaatggcatattagtaaaataatagtgtcaaatgtaggtgtatatcatataatctgtatcacaaacagacataaagatagatatatccacacttctaaaatttgcatctgcatatttttgcctaggttgctgaaataaaatgtactcttgatgattttggtaaacaactagttttattatcacagtttggaaagtggtacgaaatagcaattattaataattgtccttggtttttggataaaaatgctattacctgtggaacacagagttattgtgaaatggtgacattgtcttttacttcttatggattaataaatctttattccaaaggaatatgttataataatagcttacttttaaagtgctctatataatgctgcatatact

SEQ ID NO: 362497 - DNA, 510 bp, Homo sapiens
taaactttgaagtttagttaacagtactttaccaaagataatatactaacttgacttatataagatgttaacgttaggggaaactgggggtaaggactttacacaatcttcgcaactttcctcaaaatctaaaattattccaaaaaagattcattaaaaattagaatattaacgagtcctcctcatgttcagaagaagggaaaataaaaggaaatttacatctctaaatttttacaaatagtaatgctattaccaaaattttagtggaacatctaagtcgttatcaaactttgctttaaattatatattgttcccattttcctagcaagtgaacagcagagaattagtactcagaatataatgccatattgtaataagtgtttattttctaagtcctagctaagaaaaacataaagccaaacatgcttgtaatcccagcactttgggaagccgaggcgggcagatcrcttgatcccaggagctggagaccaacctgggcaacatggagaa

SEQ ID NO: 362498 - DNA, 553 bp, Homo sapiens
agatggaacttgagggaaggggttaaatataggaagaactgtaattttctgccttgcataactcagcaaagatttatgctcttaaaaataagtggatagaacgtgcaaaatgtatttaaacatttcccgtggaattgattgctccaaattggattgtaagcctaatggaagtttaaaccaaatattatattgttttatgtggattaaaacttacattaacaaaaaacttgaaactttctgtaacttcacattctgktatatactaggttgccaattcaaagagtatattatatagtatttataagtgtttaagagaatgggcttaagaataatatgaacttagattcatataggttaagtcttgatttcttcatctgtgaattgatgacaatagtcactacttcttataatatttgggcggattaaatgagaaaacagatgtaaaattatagtaaccactcaaaatattatttaatataagtattaatgagtaataatatttatattagtataatattaatatttatcaataatgtataatagaaatatttac

SEQ ID NO: 362499 - DNA, 441 bp, Homo sapiens
gaagcccactagctagattaaccaaaaaaaaaaaaaaaaaaaaaaaaaaaaaragagaaagagagaaggttcaaataagtatagtcagaaataataaagatgacattataactgataaaacagaaatacaaaagattctcagagactataaatatctctatgcacatacactagaaaacctagaggaagtggataagttcctgaaaacacaccaccttcaaaacgtgaactaggaagaaactgaaatcctaaacagaccaataatgatttatgaaattgaatcagtaataaaaaacctaccaaccaaaaaagccctgaactagatgaaatcaaagccaaatttaccaaaagcacaaaaaagagttggtatcaatcttaccgcactattgcaaaaaatttaggagaagggattccttcctaacacatttcacaaaactagtt

SEQ ID NO: 362500 - DNA, 441 bp, Homo sapiens
gaagcccactagctagattaaccaaaaaaaaaaaaaaaaaaaaaaaaaaaaagaragaaagagagaaggttcaaataagtatagtcagaaataataaagatgacattataactgataaaacagaaatacaaaagattctcagagactataaatatctctatgcacatacactagaaaacctagaggaagtggataagttcctgaaaacacaccaccttcaaaacgtgaactaggaagaaactgaaatcctaaacagaccaataatgatttatgaaattgaatcagtaataaaaaacctaccaaccaaaaaagccctgaactagatgaaatcaaagccaaatttaccaaaagcacaaaaaagagttggtatcaatcttaccgcactattgcaaaaaatttaggagaagggattccttcctaacacatttcacaaaactagtt

SEQ ID NO: 362501 - DNA, 535 bp, Homo sapiens
atttccagtaacagaaataggtatctgagagtgtcaggggagacctctcagagagagacttggttaaagtaatccaagatcagcgtcaagattgactcttaaggttcaaactcagacaytcaaaaaaaaaaaaagaataaaaagagagaatattagtgtcacaactaagacagtaaacaaaggaggttggtatatttgtaagacaaccaagagaatgcctagtatttcattggatatagatatagatacctcaaactcaagagagaaagctgggagttaccattatatagataacaatgaaagccatggtgaatgtaatcactgattgtcatagagtcacagagtgagaaataaccacagggaattcaaagtctccaaaaaaagagcagggaaagaatccacaaaataaatggataggtattcaatgagaagggagaaatctaagtaaacatggaatcaagtaagtaaaaagaactctcaagaagaaagttagagtcaacactcttaaattttatagaaaaatcaagaaagatta

SEQ ID NO: 362502 - DNA, 634 bp, Homo sapiens
tctatgtttttgcaaaagtaagatcttaggtaacatccagtgggaccagttaaaacattccttaattaagactcttcagataaatcctcttttctgtctacataatgtgtaaactagaagtctactagtacacacatataggagatatcagagattgagctatagggacaaaatttatttggtggagatataagagtccttatgccctcaacaaaacaactatagatcattttgatttttttccattaaggatcacctaatattacttgtttattctctttgtatcataatcagcttgtaggtaaaataatataatgcatttcacatttatttcaacatcattccatgtagtctatttacaattatagtttgagccatgttttttgaggattgccactttgaacatttactccaactaaccaattgaatgttgcatccaattttatgcaaataagaaagtctrtgtcacaaccttttaaaaagttatctccaaatattaatgcattgtaaatgacctctgttaaaccaggggccctacatcatggttcacttgctatgcacattctcgatttatttatctttctttatgatgtaagacttttggcataggctttgaatattgtgtgcaatttca

SEQ ID NO: 362503 - DNA, 634 bp, Homo sapiens
tctatgtttttgcaaaagtaagatcttaggtaacatccagtgggaccagttaaaacattccttaattaagactcttcagataaatcctcttttctgtctacataatgtgtaaactagaagtctactagtacacacatataggagatatcagagattgagctatagggacaaaatttatttggtggagatataagagtccttatgccctcaacaaaacaactatagatcattttgatttttttccattaaggatcacctaatattacttgtttattctctttgtatcataatcagcttgtaggtaaaataatataatgcatttcacatttatttcaacatcattccatgtagtctatttacaattatagtttgagccatgttttttgaggattgccactttgaacatttactccaactaaccaattgaatgttgcatccaattttatgcaaataagaaagtctatgtcacaaccttttaaaaagttatctccaaatattaatgcattgtaaatgacctctrttaaaccaggggccctacatcatggttcacttgctatgcacattctcgatttatttatctttctttatgatgtaagacttttggcataggctttgaatattgtgtgcaatttca

SEQ ID NO: 362504 - DNA, 601 bp, Homo sapiens
actaatatgcagtaaatacttactatgtggaaggtattccacaaaacaaagaatttaattaaagtttttaaattaaaataaaatcattgaaattttagttttaggcaacataaagtaagcactccttatcctgactctttcactgaatactgttataaaatctggatagatgcatggagcaagtackagaagactccaaaacctaaatattagcagatggattagaaaagaaagtcaaaatacaaagtaacactgaaatgactgtgaacttatcatttatatctacctgtgtggtatctgccaacctgatctcagagctgcttaaaacctggaagtgagtaccaatgaagaaagagagagctgcaggagatgtcttctggttccagtttgaggagtgggaaagaggactttggatggtaatgatggctgtagcatgggcctgcagttacctaaaactcttaaggaggggaaagttcttagatcagagaagttgtggtattaagatgaggtaaacgttcattgcttttactatttttgtccttctgccatttggcctcaacaatggttgcaatggaattaagaatttaacaaatagggttaa

SEQ ID NO: 362505 - DNA, 459 bp, Homo sapiens
aggttctttgggattttctaggtataagaccatgacatctataaatagagatggttttaacctgatttttttttcaacataaatgctttttctctctctctttttttttttcttttgtagtagctctggtagggccttccagtaccatgcttaatagcgtggtgaaagcgggcattcttgtcttcttcctactcttaggggtaaagccttccatttcaccaytgaatattatatttgctatgtgtttttcataagagccctttatcatatggctgaattattctattctaagttttctgagagtttttatcatgaaattctcctcaattttgttaaatactgcttctgcatctattgaaatgttcatgtgtttcttttttacctatattctatttatgtgatgtattacatggattgattttcctatattgacgcacccttggttttctctgttaatcc

SEQ ID NO: 362506 - DNA, 473 bp, Homo sapiens
ctctacagttgttgttgttgctgttttgggtttttttttgtttttttttcaagacagagtctcactttgccaccccaagctggagagcagtggcatgatcatagctcactgcagcctaraattcctgggcttaaggaatcctcccaccttaagctcccaagtagctgagattataggcacaagctacgttgcctggctcttgggataccttttataatcccattcataaggattccatcctcataagctaattattggtaaaaagcttcacctcctaattttatcacaatgggggctggaatttcaatgtatgcatttcagggtgacaaaaagtttcagtccatagcaacgcctataatctattgcagcaaatcaggtgtgaaacttgtttcccttcatagaaggattaaccatgatgcatataatatgagctaataataggtatgtaaatagtggttaaaaatgtggactct

SEQ ID NO: 362507 - DNA, 490 bp, Homo sapiens
aaggttgagagtgtgacccatgaggtagtgtgctacactaaaaaagaactgcttgagttttctaatttatataagcagaaatatggagaacaggcatgggaatggatattaagagtgtgggataatggtggaaggaacagagtccctctaagtagggactctgcatttaatgttgcagctggggagttaaaaaaggttctcatagtttatttgcttggttagctgaaatatggatttagagaaggcccacggtaagcaagctgtagacgaagggatccaaaggcttagggagattgggatggtggagttgatttgtcattttagacctactyatcccatctgggaggcttcagaagatatacccttgaccaatgccttgcaaaatagatctgtgaggacagcacctgaatctttgaagagctctgtaattgctcttctctgtatatcaaatctaacagtggaaactgcagtcactcaactacaaaattga

SEQ ID NO: 362508 - DNA, 580 bp, Homo sapiens
caaaatttaatatgctgctatcagcatatctttttagcaaaatattatctttaattccaatcttgttaacttttctatcctcagaaagtatatttcatatattattgtacaatgttatgtatatattttaaaagtttttttatatttttagtttatccctataaaaatttaaatgtgggaagatcatcatattttggaagaaactgcatgcatgtagcatagctatttatatataatttacattaaaatgtagaatgctttttctattcgttggtttcattttacatttgataatgttgaagtcatcattttggcctgttttttatataggaagaaggccccaatgagaattccagmtaactcaaactgttaaacagatgtattgattttcaaggtttcactccacaggaagtagacttaatctcattgccaagaaaaagcaatttaaaaagtagaaataggaattttttttagctttctagaaactttaagacaacactaaataatctttgagtgcttaatgcaagaaaaaatctggttgtcttgctctctaaaacttacttccatcatctataagaca

SEQ ID NO: 362509 - DNA, 603 bp, Homo sapiens
actgaaaccaaaacaaagcaaagcaaaacaaacaaaacatataaagattttggctggtattgtgttgactccttagatcaattttaggataatataaaaatattgtgttttccaatttatgaagttggtatatctcaccatttgttctcctcttttgcaatttcttacarcagaatatcatatgtttcattgtacaggtcttgtatatattttgctaaattcattcctaagtatgtcatgtttttagtgctattgtaaatggcattttaaaattttgtttgcaggtattatttgccagtatatagaaatataattgcattcacatggccctttgcaactttactaaattcataattttgtgtctatttaatgattccttggaattctctccataaaagattatgtcctctgtaagtaaatttgttttatttttcctttctaatatctatgacttttcgttcctttttgctttattgcactaacataaaatccaatcaattattgactagcagttgtaaatgcaaacttctttgcctttttactaattttaggatgaaaacattcagtgtttcttcttatgattttaactgtaaggttttcata

SEQ ID NO: 362510 - DNA, 603 bp, Homo sapiens
actgaaaccaaaacaaagcaaagcaaaacaaacaaaacatataaagattttggctggtattgtgttgactccttagatcaattttaggataatataaaaatattgtgttttccaatttatgaagttggtatatctcaccatttgttctcctcttttgcaatttcttacaacagaatatcatatgtttcattgtacaggtcttgtatatattttgctraattcattcctaagtatgtcatgtttttagtgctattgtaaatggcattttaaaattttgtttgcaggtattatttgccagtatatagaaatataattgcattcacatggccctttgcaactttactaaattcataattttgtgtctatttaatgattccttggaattctctccataaaagattatgtcctctgtaagtaaatttgttttatttttcctttctaatatctatgacttttcgttcctttttgctttattgcactaacataaaatccaatcaattattgactagcagttgtaaatgcaaacttctttgcctttttactaattttaggatgaaaacattcagtgtttcttcttatgattttaactgtaaggttttcata

SEQ ID NO: 362511 - DNA, 557 bp, Homo sapiens
aagtggcacatttttaaagctgggtatacagctaaatctaaagtgaaattcatagattaggtgtgttctatggactgttggaatcaactcatccccaagttcatgtattatctacaatgaatgttaagagtctttgaagaagtggtttttgtacagatgcctacgaaaggaaatgtctgcttctattcctggccaatttaactaggttggagtcttacacagtttgaagaagcaggccacaggttaagagtgtgtagacagacaagattttctaagacatacataattcagctttgggtctcaaccagacmtagggacacacagagtaagtcaggaaagccgtcatatggcttcctggatagctgaaattgcctcagcaaaggtatacaaataaagaaatttaaaaaaaaaaagaaatggtatgtaattgaggaagaaaagtatgggttagaaattcgatatcctttgatagcaagaggagaaaaaagtctctggaaatattgtttactgcatccaagacttaatttatatcttgctacctggattaacatggatga

SEQ ID NO: 362512 - DNA, 557 bp, Homo sapiens
aagtggcacatttttaaagctgggtatacagctaaatctaaagtgaaattcatagattaggtgtgttctatggactgttggaatcaactcatccccaagttcatgtattatctacaatgaatgttaagagtctttgaagaagtggtttttgtacagatgcctacgaaaggaaatgtctgcttctattcctggccaatttaactaggttggagtcttacacagtttgaagaagcaggccacaggttaagagtgtgtagacagacaagattttctaagacatacataattcagctttgggtctcaaccagacatagggacacacagagtaagtcaggaaagccgtcatatggcttcctggatagctgaaattgcctcagcaaaggtatacaaataaagaaattwaaaaaaaaaaagaaatggtatgtaattgaggaagaaaagtatgggttagaaattcgatatcctttgatagcaagaggagaaaaaagtctctggaaatattgtttactgcatccaagacttaatttatatcttgctacctggattaacatggatga

SEQ ID NO: 362513 - DNA, 588 bp, Homo sapiens
tttgtgtcataatcttatttggagagaacttgatcacttttcacttctgcaagatatcacactggtccacttaattgatgacattatactgattggatccagtaagcaagaagtagataacaccctggacttattggtgagacatttgcatgccagaggatgggaaataaatctgactaaaattcagggaactgctacttcagtaaaatttctagtggtccagtggtgtggtgcctgttaagatattccttctaaggtgaaggataagttgttgcatttggcctctcctacaatcaagaaagagacacaaggactagtgggcctatttggattttggaggcaacacattcctcagttgggtatgttacttcagcccatttattgagtgwcctggaagcctgccaattttgagtggggtccagaacaggagaaggctctgcaacaggtccagactgctgtgcaagctgctctgccacttcagccatatgactctgcagatccaatggtgctgcaggtgtcagtggcagataggaacgctgtttgaagcctttggcaggctcccataggtgagtcacagcagaggcctct

SEQ ID NO: 362514 - DNA, 541 bp, Homo sapiens
ctcaaacatttatcttttgtttgtgttgggaacattacatttctactcttctagctatttgaaatawacaacaaattatcattaactgtaatttccctactgtactatctaatacaagaacttatgtcttctacctaactgtatttttgtacttcttaaaaacaatacagctcaagggttttaagaggcatttgctgtctttttcctctgcctctagtttaaagcagacaatgataagttgcaaataaagcacaatatggacaaagcctaggttgctcaatcattatgtagatgagagtcacctgtcaatgagaaattcctgctttcaaaaattccatgaatgagaaaaataaattttactgtatgtaagctattctgtatttggagatccatttattagagcaggttagcctacactaactcaaactagatgtgacttattggtcatagatatgtgcaacattaagtaaatttagtaatgatttatattttggtttacaaagtatgtatatctgcttactgtctgcaaatgtacttgaga

SEQ ID NO: 362515 - DNA, 523 bp, Homo sapiens
atatgtttgtgtcctttgcccactttggaatggtgttatttgtgttcttgttgagttgcttgagttccttgtagatgatggatttactcctttgttagatgcatactttgccaatattttctcccattctgtaggttgtcagcttactctcttgattgtttcttttgctttgcagaagctttttagtttaattatgcctcattcatctatttttgttttgattgcatttcctttcaacaacttactcrtaaattctttgcctaaatctccagaagaatttttcctaggttttcttctaggatatttatagttttagatcttatgattaagtctttaacctatcttaaattagttttggcatataatgagagatagaggttcaggctcattcttctacctacagctatccaattgttcagcaccatttattgaatagtgtgacctttccccagtgtttattttagtgactttgtcgaagatcagttggtcataagtatgtggcttcatttctgaatactctatt

SEQ ID NO: 362516 - DNA, 523 bp, Homo sapiens
atatgtttgtgtcctttgcccactttggaatggtgttatttgtgttcttgttgagttgcttgagttccttgtagatgatggatttactcctttgttagatgcatactttgccaatattttctcccattctgtaggttgtcagcttactctcttgattgtttcttttgctttgcagaagctttttagtttaattatgcctcattcatctatttttgttttgattgcatttcctttcaacaacttactcgtaaattctttgcctaaatctccagaagaatttttcctaggttttcttctaggatayttatagttttagatcttatgattaagtctttaacctatcttaaattagttttggcatataatgagagatagaggttcaggctcattcttctacctacagctatccaattgttcagcaccatttattgaatagtgtgacctttccccagtgtttattttagtgactttgtcgaagatcagttggtcataagtatgtggcttcatttctgaatactctatt

SEQ ID NO: 362517 - DNA, 585 bp, Homo sapiens
tatgcttgatattatttcagtttttaagtttatagagactggcctagcatttgagcaatttttgagactgtttcatgtgccaacagaaatatacagaaatgtatgttctgtggttgttgggcagaatgttctgtatatgtctgtttagcatttaatctagagggcaatttaagttcagaaggtttttttggttgatttttttgccacagtgatctgtctagggtggtcactggtgtattgtagtcccctcctgttattgtattgtttctaccactttacttaggtccaatagtatttgttttgtgaagctggttgctctgatgttggatgcatatatgttcagaattgtcacattktattcttgaattgatttctttaacattgcacaatgtctttctttgtcttatttcactgttgtttatataaagtctggcttatataagtatagctaactactcctgcttgctattgttttccatttgtgtgaaacatctttttatacctttttgctttgagcctgtgaatgtctgtgctcattgggtgcattttaataggcagcacatggttgaatattgtttttaatcc

SEQ ID NO: 362518 - DNA, 563 bp, Homo sapiens
tcatctacctgtttttcagctcctccattcctgcwttcttgtgattgcagatgttaggcgtcacccttgttggctgcctattaatttgctcttaaggacaccatttccataattccctacaggtgaagcctctttggcagctagtttacccttgctggtttttaagtaattgctgtcccctggcttctggcagttatttgcctcaacttgctatctgttacttcaaaggtctgtcacccccacaactactagacaatccagctctttgactgtctctcctatcctcacacctgctctgaaaaggagagccatagctgaacattttagtaatactggtgcccccactcatttgtgcattcattggtgaatgttgtgttttctggggcgttccatagaacatacttctctggtgactcttttggcctcatataatatgtcgatttcagcatccccagctgcttcatctttgcattgcccaagtgcaatgcaatgcccaactgccagggcaactcaggcattaccacttgactcatcatcgtccatcacattctccaggcttctaa

SEQ ID NO: 362519 - DNA, 563 bp, Homo sapiens
tcatctacctgtttttcagctcctccattcctgctttcttgtgattgcagatgttaggcgtcacccttgttggctgcctattaatttgctcttaaggacaccatttccataaytccctacaggtgaagcctctttggcagctagtttacccttgctggtttttaagtaattgctgtcccctggcttctggcagttatttgcctcaacttgctatctgttacttcaaaggtctgtcacccccacaactactagacaatccagctctttgactgtctctcctatcctcacacctgctctgaaaaggagagccatagctgaacattttagtaatactggtgcccccactcatttgtgcattcattggtgaatgttgtgttttctggggcgttccatagaacatacttctctggtgactcttttggcctcatataatatgtcgatttcagcatccccagctgcttcatctttgcattgcccaagtgcaatgcaatgcccaactgccagggcaactcaggcattaccacttgactcatcatcgtccatcacattctccaggcttctaa

SEQ ID NO: 362520 - DNA, 563 bp, Homo sapiens
tcatctacctgtttttcagctcctccattcctgctttcttgtgattgcagatgttaggcgtcacccttgttggctgcctattaatttgctcttaaggacaccatttccataattccctacaggtgaagcctctttggcagctagtttacccttgctggtttttaagtaattgctgtcccctggcttctggcagttatttgcctcaacttgctatctgttacttcaaaggtctrtcacccccacaactactagacaatccagctctttgactgtctctcctatcctcacacctgctctgaaaaggagagccatagctgaacattttagtaatactggtgcccccactcatttgtgcattcattggtgaatgttgtgttttctggggcgttccatagaacatacttctctggtgactcttttggcctcatataatatgtcgatttcagcatccccagctgcttcatctttgcattgcccaagtgcaatgcaatgcccaactgccagggcaactcaggcattaccacttgactcatcatcgtccatcacattctccaggcttctaa

SEQ ID NO: 362521 - DNA, 563 bp, Homo sapiens
tcatctacctgtttttcagctcctccattcctgctttcttgtgattgcagatgttaggcgtcacccttgttggctgcctattaatttgctcttaaggacaccatttccataattccctacaggtgaagcctctttggcagctagtttacccttgctggtttttaagtaattgctgtcccctggcttctggcagttatttgcctcaacttgctatctgttacttcaaaggtctgtcacccccacaactactagacaatccagctctttgactgtctctcctatcctcacacctgctctgaaaaggagagccatagctgaacattttagtaatactggtrcccccactcatttgtgcattcattggtgaatgttgtgttttctggggcgttccatagaacatacttctctggtgactcttttggcctcatataatatgtcgatttcagcatccccagctgcttcatctttgcattgcccaagtgcaatgcaatgcccaactgccagggcaactcaggcattaccacttgactcatcatcgtccatcacattctccaggcttctaa

SEQ ID NO: 362522 - DNA, 585 bp, Homo sapiens
aagaattatttgtccataatgttgaaggaattgccattcaatgctcaaaaatcatggttaaaattagactcattatcttttctacaactttgttgttatccatttactttttattctgcatggtggctcgaccagacaagcttgaatctagaaaactaaccttcccttactgcaaataattgcttatcatattgttgatttcttttctttacttcattcatatgcactcttttttttcagtatgctttctgcaacctgcctggagcaaatgtttctcattttccataattctttctttctgctagcaatctgatctttcagacactggtattcctttgcttaaaataattcatggtttcacattttctttcaaatacaatactwtattattacaatcctttatttatttaccatttattatttatttactattacaatcctttattttgcataaaacactctcagatatgactcaaaccgaagtgaatataatctcttgctttgaacttctttgtattctacactgcagatacatataatacttactctatgctaaaattagtaatttttcaaggcattttattt

SEQ ID NO: 362523 - DNA, 686 bp, Homo sapiens
actttacatcctaatatcacataacattttatctttgatgttttctctattaaaatttttttctgatttgtatatgtgtgatacaattaagagaagtagtatgtttgagctcacagaaaaagaattgtttttaattttttttacaattatattctagcatgacatagaatacgattctgctatataaaacagttaatatattaaccctgaagataatctggcagtgttgttttttgattacagacaaggtaacttctagtgcaccatgtgagccttaatattttctaattctgacttcaaccttttttggaaaggccctcyaatcctctatatgctactaaaacagagagaaatgtcaatctttttgcagaatgttgacaaaacaacataatgtttaggataagccattgaactctctggaatttagccaaagtgaccatgagaagattttatcacttaccttgcttatgaacacagactcacagtctgggatcctaggcgtggcagaagttttctactgggcaaagacagaactttatgagaaagatgctttaacacaagataaaaatgtgttgtcagctaagatgtggcacagaaattataaacttctgaaatttatggagagtagtaaagcagctcagtgacctaagcataatagatctcatttgcagacatgacgaaagacc

SEQ ID NO: 362524 - DNA, 617 bp, Homo sapiens
ttctctcagctgcaattaatacttcatgagataaatcagaccaggatgaaagttcacttcagatgttcaaagccagaygagaataaaaggatggctatgagatctatggaagtgctgagaagggaagaaataatggacagagaacaggtctctggataaatgagttcattcactttgtccattgtggttgacactcggactccactctgtgcactccagaaaaaacacattcactcactgagcgctcactcccctacaaatgtcaacaagatattctattcaaacatggaatatacctaaaattacatctcttgcttatttatcttcaagaagaaataagaaaatttcacgcctgtcttagtcaaggttcatcatagcaatagaaccactaaactatgaatttatttggaaagaaacttgagaaatgtctcaggtgattctggagactggcaaatccaaagtctgcaaggtaggccaagaggctctggatccaagaaggagtcaacgttatagctcacgcctgaggtttgcctgctggtaatattccctcttctcggggagaagtcagttttttcttctattctggctttcagctgattgaataaggtcctcataga

SEQ ID NO: 362525 - DNA, 617 bp, Homo sapiens
ttctctcagctgcaattaatacttcatgagataaatcagaccaggatgaaagttcacttcagatgttcaaagccagatgagaataaaaggatggctatgagatctatggaagtgctgagaagggaagaaataatggacagagaacaggtctctggataaatgagttcattcactttgtccattgtggttgacactcggactccactctgtgcactccagaaaaaacacattcactcactgagcgctcactcccctacaaatgtcaacaagatattctattcaaacatggaatatacctaaaattacatctcttgcttatttatcttcaagaagaaataagaaaatttcacgcctgtcttagtcaaggttcatcatagcaatagaaccactaaactatgaatttatttggaaagaaacttgagaaatgtctcaggtgattctggagactggcaaatccaaagtctgcaaggtaggccaagaggctctggatccaagaaggagtcaacrttatagctcacgcctgaggtttgcctgctggtaatattccctcttctcggggagaagtcagttttttcttctattctggctttcagctgattgaataaggtcctcataga

SEQ ID NO: 362526 - DNA, 594 bp, Homo sapiens
gagctaaggcaaggagttggtaatttctcctgagtcttatctcgatcttatckctgagcattttgtaccttgatgcctatgtcacccatattctgatgtgtccttttctttgtttcacttttcagaggtccaggtaactgtctccttatgtgtctgtaccgcacatcttgtcaaggtccatatctagtatttattcattgtcaagtctagtataggacccaataaataaaactgtacttttaatttttgaaaaatatttttgactaaattcacaaaacaaaagcatacaggtatagtaaaaaaacaaaaacaaaaacaaaaaaactatctattcgatatataatcaacattaaataccggtaagagattatgctctggactagggaaaaggaagtaaacacgcagtcaaaaaaaggaagtaaaccagcagttttaatgtagcaaaaaggtagcagttactagaggataaatgtaaaaccaataaaacaaaagcaacaaactaaaagggctgcaataggatgtggtatctgtagtgctcttgtcaagggctttgcaactttaaatagatttcacattaggtctcactgtgagaca

SEQ ID NO: 362527 - DNA, 594 bp, Homo sapiens
gagctaaggcaaggagttggtaatttctcctgagtcttatctcgatcttatctctgagcattttgtaccttgatgcctatgtcacccatattctgatgtgtccttttctttgtttcacttttcagaggtccaggtaactgtctccttatgtgtctgtaccgcacatcttgtcaaggtccatatctagtatttattcattgtcaagtctagtayaggacccaataaataaaactgtacttttaatttttgaaaaatatttttgactaaattcacaaaacaaaagcatacaggtatagtaaaaaaacaaaaacaaaaacaaaaaaactatctattcgatatataatcaacattaaataccggtaagagattatgctctggactagggaaaaggaagtaaacacgcagtcaaaaaaaggaagtaaaccagcagttttaatgtagcaaaaaggtagcagttactagaggataaatgtaaaaccaataaaacaaaagcaacaaactaaaagggctgcaataggatgtggtatctgtagtgctcttgtcaagggctttgcaactttaaatagatttcacattaggtctcactgtgagaca

SEQ ID NO: 362528 - DNA, 584 bp, Homo sapiens
ttgcccactcccctcaaatgtagctaatccctatacattcttcaagcagaaccatcatcaggaggtctcaaatgtgctttggacatgatagcgacccatcctttaaattattttaagataatgtagctaccaatagccttgactaggggtaagaaattgatttgttcaaacaattattctctttaatwatatttccctcatgatattatgaaaatcaacttatatttaggaattctccaaaattcagtgaaatcaccgatgtaaggacagtgtctggtaaagcatcctcagagccgagcaaatcaaatctctcatattagatactcaataaatgtcaattttaaaataaataaacaaataagtaaatgaaaaagtgaatgactcacccgaaacactttattttgataattattaaattattatctaagtattattagattggtgcaaacataattgcggtttttaccattaaaagtaatggcaaagccacaattccttttgcaccaacctaatattacttggaatgtataaaagaaaccactagaaggaaaaaaaagagaaagttttacttaagattactagaa

SEQ ID NO: 362529 - DNA, 584 bp, Homo sapiens
ttgcccactcccctcaaatgtagctaatccctatacattcttcaagcagaaccatcatcaggaggtctcaaatgtgctttggacatgatagcgacccatcctttaaattattttaagataatgtagctaccaatagccttgactaggggtaagaaattgatttgttcaaacaattattctctttaattatatttccctcatgatattatgaaaatcaacttatatttaggaattctccaaaattcagtgaaatcaccgatgtaaggacagtgtctggtaaagcatcctcagagccgagcaaatcaaatctctcatattagatactcaataaatgtcaattttaaaataaataaacaaataagtaaatgaaaaagtgaatgactcacccgaaacactttattttgataattattaaattatwatctaagtattattagattggtgcaaacataattgcggtttttaccattaaaagtaatggcaaagccacaattccttttgcaccaacctaatattacttggaatgtataaaagaaaccactagaaggaaaaaaaagagaaagttttacttaagattactagaa

SEQ ID NO: 362530 - DNA, 550 bp, Homo sapiens
ttgtctatgactggggtataggctcagtatatattcacaagaaatgcctcatttattaggtttaccgattttttgtattccttttttaattgttgtataaattgtagatgtttatcatgtacaacacratgttttgaaatataatatatatatacatatatatacacatacattgtggaaaggctaaatcaaactaattaacatatatgttaactcaattgtcatttttgtggtgaggacatttgaaatctcccttattgcccaagaatacactacatttctatgacctgtagatatgatgctgtacaataaatttcttgaacttattcctcctatataactgcatttttgttttattttattttatttatttttttagataggaggtctgtctattttgcaaaggctggttggccttgaagtcctggtcacaagcgattccttcccctcggaattccaaatagctggaactaattttgttacctttgaccaatgtatttcaaatcctctctctcaccactaactcagcttccccaatagctgggactac

SEQ ID NO: 362531 - DNA, 550 bp, Homo sapiens
ttgtctatgactggggtataggctcagtatatattcacaagaaatgcctcatttattaggtttaccgattttttgtattccttttttaattgttgtataaattgtagatgtttatcatgtacaacacgatgttttgaaatataatatatatatacatatatatacacatacattgtggaaaggctaaatcaaactaattaacatatatgttaactcaattgtcatttttgtggtgaggacatttgaaatctcccttwttgcccaagaatacactacatttctatgacctgtagatatgatgctgtacaataaatttcttgaacttattcctcctatataactgcatttttgttttattttattttatttatttttttagataggaggtctgtctattttgcaaaggctggttggccttgaagtcctggtcacaagcgattccttcccctcggaattccaaatagctggaactaattttgttacctttgaccaatgtatttcaaatcctctctctcaccactaactcagcttccccaatagctgggactac

SEQ ID NO: 362532 - DNA, 585 bp, Homo sapiens
gaccttcaagttatgaatgagygtcttaaacctctcagaaaagtagctcctgccatgatctggattccacgttatgcagggagagtttggagaattgtcaatgtagaactgtagtctttttccacagtttatggcagttggactccttatcatctttacttaagtcggtctccttattctctttccaaaagctcccctggttattttctccttcagccacaccctatctaaagagatctatccttaccatgaacagtgcccacacctggactggatctgaattctggtgatcatactctatcttagctcctgagaggctctctaagccagtggtttgaaaatgttcttgtacttctaaactacttaccgctcctgttaagcagattgctagtccacatccccagagtttctaattcagtgagtttggagcacgacctcaaaatttcctttactaacaaatttccaattaaagggaatgctgttggtcaagagatcatactttaaagaaacaccacccccaaaaaaaattttttttaagttttttgattgagtttttctccccaaactgctatctggtctgcactc

SEQ ID NO: 362533 - DNA, 442 bp, Homo sapiens
cctgtggagtgtcaacttgcacaggcaaaactatattccctggaattcactttctattatcttttcagataagtggactactagaaataatctcttgtgagacttaagatggaagggaaataacagccattgcattgcacacacaccactctcagttattcaaacacgaatacaggtgttgctgcaaagttgttgcsgagatataccagaataccctaatcagttggctttaagttaggtgaattatctggggtgggcctgacttaatcggttaaaagaccttaaaaggggcttagggcttccttggaaaaagaaagactcatacctctagaaaccagcttcatcccatgcctgggcagattccagcatgctcgtgatttttactttctctgactgtccactctgtgaactttggacttgcctagccagcctccacagttat

SEQ ID NO: 362534 - DNA, 644 bp, Homo sapiens
cctcgtctctacaaacaataataataagtattagccaagcgcggtggcgcatgtctgtggtcccagctactgaagaggctgagatgaggcgtgagatgcatgagcccaggcagtcgaggctgctatgagccatgactgtgccagtgcactccagcctgggcaacagagcaagactctgtctcaaaaaaagagacaagtcaagtgacttgttcaagggcacacagccagctactagmagaatctgggataagagacatgaactcccctaacccagggccagtgcttctgctacatgagtggttttcaaacatttatttttgtaagcagggggttccttccctctccttcccccgccaccttgcaagtgaaacatacatgacgtcaaacagatcaaggtggtcccactatgtggtgaagtggggtgagggttccagaaccccatctgctttgcctttttcgatgcagttcttggggtacctctgggaggtcctaagccttcaggaaactgaagactacagcactaaccctaacaataataagccctcaatacagtttccataagacctaggtattattctgaattttatatgtagtagctccttcaatttccagaaaccctgtgagacccccacaccagtggggct

SEQ ID NO: 362535 - DNA, 584 bp, Homo sapiens
ggaactttgttccctaaggaatctcggattggacttttttaaagccttgaagggatctatctgtgcctgcaaatacttgtacagattgcttgaaattctctcttcttcagctccaaagataatttgggaatcatagrcatgtcagaatgtgacatttttttactaaccacaggtcaggaaccctgtacaaggcctgtgtaggcagttatgaggtcactttcttaaggggattttatgatctctgttagtcaactttaattcctcaagcctgtctgtttgtatctgaaagtaggccattccactggtaaaataaccatgtctttgataaaataatcagtgtctccaattgtgttctgttacaaaagaaatcagattcttattgtacttagtcaataactatatttccatagtatagaatactcataaatagttttcaaattctggagaaatcaagtagagaaaatgaaatatccttcatcttttgttcacaggaatacactttactgaatcatgaaaagctgtaaatagctgaaaagaaaaatgtggtcttgactctgaaaaacaacaaaaaggatcagcaacat

SEQ ID NO: 362536 - DNA, 531 bp, Homo sapiens
gattaatgctccatgaaaactctgttgatcatacctaagggggcagattctgggcctgtatcactgtgatttttacattaatgatcattctgtagaaaaactaagtaacctgcttcaagttttggcaagttgctcacactcacacacagaactttctttactagaccaatcttttacaaaccttttataacctgcttaaaccttctgttttctcctattattttttaacttaagacaatttttaaaacctctaatttagacgagattacttttctaaacaaagacaatatcttaggtcttttttataactttttacaaaagcacattttataatttttatataccttgaatgtcagtcttttctcagcastgtcaatcacatgtgttacaatgttaaatcttcacaacttttatttttagtgaaagcaattttaatttcgtatcaagtgcagagcctaggacacgggacaaaaatgaagataatgtatgattctttccaacatagctcaggggcgtggctaactcaacatg

SEQ ID NO: 362537 - DNA, 599 bp, Homo sapiens
ccaggaagaacaaaatgctgccccttccctgatgaaagctgcccagttaatcaacctaccacaaggaaattggcagatcttcctggggaatggtgccatataggggctcagtgttagtttctgctgctgacagttggaacactcagaggggtctgtaacctggttggccatggtgaaaggaattccagattgctgtgtgtatgcaaacctcagtccctaccactgtggccactttattcataagcccggtgattgatgacataggtgcctgggaaaagaggctgactactgtcagagaatgyatgatcacatccaccggatgattagagtccagaagagctatggtaagagagtgagtcagttttcctctgtttcccagcacagtttagccaacgttctctttaagctttaagtggctttttctgcttctgaggactggggtctccttgctgtgtggagttttcagggaatttctaggccttgggtaccttttgagtaatttaagttataaaacctctcccactggccgggcacggtggctcatgcctatactttgggaggccaaagctggctcatgctagcactttgggagaccaagg

SEQ ID NO: 362538 - DNA, 300 bp, Homo sapiens
ggaagcaaaatgggaaggtgtacacctccctcccccacaatgtattgttaatgtgagaaaatataatcttcctggtagaatacaagaagtcacagccaccatggagaaactggcgaaagttaatattatccagccagcccagagtcctttcaaccatcctgtatgacaactaagaaaatctgatggcacttggatatgacagtaracaactggacactactaatctttccaagatacatgctactgtgtgtaatataactcaagtgattgaggaattaatacaaaacataggcacttatc

SEQ ID NO: 362539 - DNA, 594 bp, Homo sapiens
caggtaatgtaattcctctagttttgttctttctgcttaagatagctatggctaytctgggtcttttgttgttccatatccttaacacaattttgattactattgcttttgtagtatgttttgaaatcagaaagtagcattttactacacaaactttgttctttttcaaaattattttgtctgttctggaattctattgcattatatatgaattttagagtaaaattgtcaattaggggagaaaatgtcacctaggatttagctagggattgcattagatatatttgggaagtaccagcaagctaatgatactaagctttctaatcagtgaaagctcaatgtatttaatttataatagtattaatttgtttgatatgttttgtagtcctcagtatatgtgtcttatacttattttattaaattaattcataggtatttaacttttatgccattttacatgaaatggttttgaaattttgtttttagattgttaattgctaataaataaaaatacagttgattttgtatattgacctgtactaagctgtactacaagcttgcttatcccttttttcatattttgttatgttttat

SEQ ID NO: 362540 - DNA, 594 bp, Homo sapiens
caggtaatgtaattcctctagttttgttctttctgcttaagatagctatggctactctgggtcttttgttgttccatatccttaacacaattttgattactattgcttttgtagtatgttttgaaatcagaaagtagcattttactacacaaactttgttctttttcaaaattattttgtctgttctggaattctattgcattatatatgaattttagagtaaaattgtcaattaggggagaaaatgtcacctaggatttagctagggattgcattagatatatttggraagtaccagcaagctaatgatactaagctttctaatcagtgaaagctcaatgtatttaatttataatagtattaatttgtttgatatgttttgtagtcctcagtatatgtgtcttatacttattttattaaattaattcataggtatttaacttttatgccattttacatgaaatggttttgaaattttgtttttagattgttaattgctaataaataaaaatacagttgattttgtatattgacctgtactaagctgtactacaagcttgcttatcccttttttcatattttgttatgttttat

SEQ ID NO: 362541 - DNA, 574 bp, Homo sapiens
ttagttttctaaagataattctgccttcaagcctggttgsaattctgtgataatttcttttcactccacgttctccatcaggaattttatggaaccttgtattctgttgaataccagaattatatcagcaatccccaagtcaccaaatgggcatcatcatgacagcaggtgggtggaatacaaaagaaaaaaatatatatatatgtatgtatgtgtgtctatatatatatgtatgtgtatatatatgtgtgtgtttgtgtgtatatatatgtacatatgtgtatatatgtacatatgtgtatatatatgtatatatatgtatatatatgtgtgtgtatatgtgtgtgtgtgtgtgtgtgtatatatatatgtatatatatatatggtggttggtggttttggcagtttctacttatctggacctggacaaaaaaatcttttcacaccagatttttggcagctgagattccaaataggttttgcacaggcatggaaaacttgatagaggctaaacaacagtccaggtgtggtggctcatgcctgtaatgccagcatattgggaggtcaaagtggg

SEQ ID NO: 362542 - DNA, 553 bp, Homo sapiens
tccactgctaggtagagggtaaatggagttggtcagcttatgtgaaagtataagtctatttcttcaataatataccacaatacagaaaatgakgtacccttgtttccaagtagtcattggcagtcagagagaaaagtgccatattccattcctcctatgatacacatgtaactgagtgcaggtccagctgttctatgcattcaaaagcaatgacaaggaggactttcagggtgaaaggaaagtgactttatttttcaaatccagcagtagggaaatggctggattacacctctataaaccagttcaaaagtttgggctgagggcaggggtttaaagaaagggaagcatgatgcatgacgtgggaggcatgcaggtgttgtgcagattcagggagtctgtgtcttactccagtgtgtatcttgagttatggtccacctggagccacagactgataccatcttgatagtgccaggccataggtatccatcctgaggcaatctttaagagagagacaattccacagctgggcctttgtgtttggttcattttaaat

SEQ ID NO: 362543 - DNA, 499 bp, Homo sapiens
tagcaggacctgcagccgtagttgtttctctgggagaaattacttgagtatttaatttgcataataggtcttttcccagcaagggaattgggcattcttacatatagaaatagcagtgccttaggtccaaactttctagtttgcattctaaastttgtaggaaagccttttgttgcattattcttgcaactcctatcacaggtatgatcattttggtgctttttgctcataaagtgttaaaactgaatagtttgcccagtatcaaccaggaaatcaattaactttttcctcactgtcagttgtacccagggttcctgtggggaaattttaattgtctctgagtgattaaggactctccttggtccttactctctgtggcatcactctctgtggtcagagcagtgaccctgctccatgatttgactgtgagctttttcctagtcatattcctcctttttctggccccttggtcctttcttttgggacagtcatcctttca

SEQ ID NO: 362544 - DNA, 534 bp, Homo sapiens
ggattatttcacttccgggggtacttctatctcgatttttcaggttcattcccttctagggagataccatccccactggtgtcccatagctgcaccactcatgtacataaggctttctcttggcagctgtttaaaagtttttgctawatccagtaatcctaaccatgcctgtgtgtattggaattttgctttccactgcatgaacagtttcaacctcaaatggggaggataatgatcttcctcctctgagttaaactctatgtcatcatctggctcactggttggttcccaagaattgcaggtatttgcatcccagcctggcttggcaaggacagtccacacattcagctggcacagctttctctctctcagccacacaaagtggcaaggtacgatttccaactgtgcctcttgagtttcaagtttatccaaaaaaccagacattagcacagacatggaagttctcatccctttctcactgcgattcttttcctagcttccctacacttgcctcagctgctacctgtgcttttg

SEQ ID NO: 362545 - DNA, 656 bp, Homo sapiens
tgagtcatactttttagtagcattttactaacaagctttctacaccctctgtcacttttgaggtgctctcaaacacacatagtggccaaaagacgtggagcatatgggcaacgccacccacgtggatgaggagggccgcttgtaaaacttcctccacagatgcttctttccccttgtccatactttggtttcctggctggccatttgctctgttaaagggccgtatacacaaaacaactctcaaatgccaaaggatcggaaaattaaagaaggctgaaaatccatttagtcagtactggttaatttattgatggaacttacacacagaagcataaccttggatggctgcaggtaggtagctgttcacactgttactctccagacccagggttaatactccacagggaaagggtatacttgctttggcaaggcaattaaaagcaaccctccasaatggaaaaggaggctacatgcatcatagcctctaatttttgtggtaacacccaggttgacatgattttacactaaggacagtaaataattgagagatcagaaggcattcatggaactggggcaaatcagaagtaacatggtggactagcatccaagatgggtcattttgtctccacaggttctatgacctgctgttttttcga

SEQ ID NO: 362546 - DNA, 656 bp, Homo sapiens
tgagtcatactttttagtagcattttactaacaagctttctacaccctctgtcacttttgaggtgctctcaaacacacatagtggccaaaagacgtggagcatatgggcaacgccacccacgtggatgaggagggccgcttgtaaaacttcctccacagatgcttctttccccttgtccatactttggtttcctggctggccatttgctctgttaaagggccgtatacacaaaacaactctcaaatgccaaaggatcggaaaattaaagaaggctgaaaatccatttagtcagtactggttaatttattgatggaacttacacacagaagcataaccttggatggctgcaggtaggtagctgttcacactgttactctccagacccagggttaatactccacagggaaagggtatacttgctttggcaaggcaattaaaagcaaccctccacaatggamaaggaggctacatgcatcatagcctctaatttttgtggtaacacccaggttgacatgattttacactaaggacagtaaataattgagagatcagaaggcattcatggaactggggcaaatcagaagtaacatggtggactagcatccaagatgggtcattttgtctccacaggttctatgacctgctgttttttcga

SEQ ID NO: 362547 - DNA, 621 bp, Homo sapiens
ctctgtacctgatacataaggaaaatttcttacttcctagattttttcactaaaaataagagttactgaggggtaacattacaattaacatatataattaaatctactagatgcatccaaagtgtataataaaattgagatgtgtttttagaaaaaaaattgctatagaaaggtatgagaaatgtgttttccttacaaagcgaaagtcattttgtctactgtagaggttttcaaattgtctttaaattgaagacaaattgatggataaagctaaatggatacagaaagttggggcttcgtgtggtggttctttcctgtaatcccagcayttttggaggccaaaatgggaggactacatgaagccagcagtttgtgaccagcctgggcaacaaagtgagacaccatatctacaaaaaaaacagaaaaaaaaatgagccaggcacagtagtgtgtgcctgttgtctcagctactcaagaggctgaggtgggaggactgcttgaggctaggaatttgaagctatagtaagctatgattgtgtcactgcattccagcccaggtgatagagggagaccttgtctcaaaaaaaaaaaaggtaaaggaaacttggaaagaaatttttt

SEQ ID NO: 362548 - DNA, 576 bp, Homo sapiens
aataccacaccatgcaaaggtaaagttggttttcttttttgaaccaggattttgcttaatattaagagagactgaaagatttttgtttgccttttgggcaaattgcaaaaaaagaagaggggagtaagttcagttggtctcacactgtatttattagttcttactggattttcattttttcagggtagttttgtttgtttttctgagacagggtctcactctgtcacccaggctggagtgcagtggtgtgatcttggctcactgcaacctccacttcatgggttcaagtgaccctctttcctcagactctgtagtagctaggaccacaggcacacaccaatacaaccagataatttacagatttcttttttgtagagaygaggtctcactatattgcccaggctcgtcttgaactcctgggctcaaatgatcttcccatgttggcctcccaaagcaatggaattacaggcacaagcagtgcactcagcctgatattagaccttattatttgagaaactgaatctcctttctctatatcaaagaaaaaggttttttgctttttagaaatatttaaaa

SEQ ID NO: 362549 - DNA, 600 bp, Homo sapiens
attttgtaacatcaagtgtttcaaacctttgatatttgacaaactttccaaatcaaattctaattcagccttagtgacctaattttttgaatattaggtcacctgaagtccaacagggacacattagccatatttaatatgttaaaatcatacaggaagcatggatgaatatttaactttctttgagttgtatttacctaaatattagcatgtgctccaaaatcatatgagatgccaataattctgacatgccttactatatgttatcagtaataattatgattattatgtcaaattgttgtatgacactgaaatatccaaatttcttgttgactgtacctgtaactatgactgtcctaagagtttttcattcacaattgttgttttcctttgagtattctcaatacatagtttataaaaaaccagtggcgcaaaacwtgcttctttaggggagttcatgaaaatgattctgataggttttcttgaatttaggtttctgataactttggagattgtgccattgtactaatgaaaacaacaacaataaaaacaacaaaactcccaggattctaattaacaggctgatgtgttcatgaggat

SEQ ID NO: 362550 - DNA, 546 bp, Homo sapiens
ttagtagaaattaaaactgtgctttttgtaaagccctgcacactgaaactagaaaacttaaactttgggagaaayaacagcatctcatttatttacataaaacatttcatgactgtctagttatatatggactgctctgtaatacagtctatcggttttcaaggattggtttctaccttgttgctataatccagctgtgtctcttttttcttatcttttccctttatttcttattccccctatttcttcacaaccttctagaatgagtctccttaaaaatgtggatcctaactttctaggaataaaccatcctaatgtttaagattagggaaaaaatataaccaaacactcattttcttctaaaatgctttctctgaaatattttgaagaacaaggaaaacaaaattttggaaccccaaattcactatgacaaaggaaatgttgggaactgagtcatgctaatactaccttccttttgttcccaaagagtcagctgtaatttcacaaggttgcctatcttatgtaaaatgtatatctaccacgcac

SEQ ID NO: 362551 - DNA, 546 bp, Homo sapiens
ttagtagaaattaaaactgtgctttttgtaaagccctgcacactgaaactagaaaacttaaactttgggagaaataacagcatctyatttatttacataaaacatttcatgactgtctagttatatatggactgctctgtaatacagtctatcggttttcaaggattggtttctaccttgttgctataatccagctgtgtctcttttttcttatcttttccctttatttcttattccccctatttcttcacaaccttctagaatgagtctccttaaaaatgtggatcctaactttctaggaataaaccatcctaatgtttaagattagggaaaaaatataaccaaacactcattttcttctaaaatgctttctctgaaatattttgaagaacaaggaaaacaaaattttggaaccccaaattcactatgacaaaggaaatgttgggaactgagtcatgctaatactaccttccttttgttcccaaagagtcagctgtaatttcacaaggttgcctatcttatgtaaaatgtatatctaccacgcac

SEQ ID NO: 362552 - DNA, 546 bp, Homo sapiens
ttagtagaaattaaaactgtgctttttgtaaagccctgcacactgaaactagaaaacttaaactttgggagaaataacagcatctcatttatttacataaaacatttcatgactgtctagttatatatggactgctctgtaatayagtctatcggttttcaaggattggtttctaccttgttgctataatccagctgtgtctcttttttcttatcttttccctttatttcttattccccctatttcttcacaaccttctagaatgagtctccttaaaaatgtggatcctaactttctaggaataaaccatcctaatgtttaagattagggaaaaaatataaccaaacactcattttcttctaaaatgctttctctgaaatattttgaagaacaaggaaaacaaaattttggaaccccaaattcactatgacaaaggaaatgttgggaactgagtcatgctaatactaccttccttttgttcccaaagagtcagctgtaatttcacaaggttgcctatcttatgtaaaatgtatatctaccacgcac

SEQ ID NO: 362553 - DNA, 546 bp, Homo sapiens
ttagtagaaattaaaactgtgctttttgtaaagccctgcacactgaaactagaaaacttaaactttgggagaaataacagcatctcatttatttacataaaacatttcatgactgtctagttatatatggactgctctgtaatacagtctatcggttttcaaggattggtttctaccttgttgctataatccagctgtgtctcttttttcttatcttttccctttatttcttattccccctatttcttcacaaccttctagaatgagtctccttaaaaatgtggatcctaactttctaggaataaaccatcctaatgtttaagattagggaaaaaatataaccaaacactcattttcttctaaaatgctttctctgaaatattttgaagaacaaggaaaacaaaattttggaaccccaaattcactatgmcaaaggaaatgttgggaactgagtcatgctaatactaccttccttttgttcccaaagagtcagctgtaatttcacaaggttgcctatcttatgtaaaatgtatatctaccacgcac

SEQ ID NO: 362554 - DNA, 526 bp, Homo sapiens
acccagtttgaaagacactttcatattttcaggtattcattttcagcaacaacctacttgtcattaccagttttctgtattagtcccttctttgttgcttaaaacagaatacaaaatattgggtaatttataaagaaaataaatgtatttcttacacttaaggcacaaatgatggcttggcagcctccacaaatttcaaagtattttttttgacagcctgggagtccagagagagagttgtcacacggctagatccactgcagagagmccccagtagaaggatgccaaacacaaatgtggggttggagctgctgcaaagagtccccaccagggcaatgccaagtgaagccacagcagtgaaatcactgcagagagttccacatgggtaatgcctagtggtgccaataccaggatcccaggattgtgaagtcccctgtggcattcaatgcctgcctgggaaaatttcaaccagtacaagcacccacaggtgacttcaccaaggggaaccgtaggggtgacactgcct

SEQ ID NO: 362555 - DNA, 553 bp, Homo sapiens
ttgggctggccctgcagacttgttagttacaaaatttgctacacctccctgaaacaaaaaagttgaagtttccctcttatcttgttttatgtycttgaaaacttgacttagtaaccatgtgaggatgctgtcccttgttctcccacatacacagggttggaatttctggattcagttcaggcagccagtctgaaaggatacataataatgtcacagctagctttaaggattctcttgagcagttacaatccttgaagcttggagctgactgacctacattatttctgaccaacagcaactgccccatgctgtagctcagtaactaaggtttttcccttttactgcagcagcctgggtttgattttcaactcaagcactaagccctttctagtgtgatatttggagactgtttgccattcattcgatgattttcttctccatggacatcttctcactttctgtcttaaattttcctttctaagctatctttggggaaattctcaatcttgcaaaaactgcttgccatctctgtgagacacctcatgcatccatg

SEQ ID NO: 362556 - DNA, 553 bp, Homo sapiens
ttgggctggccctgcagacttgttagttacaaaatttgctacacctccctgaaacaaaaaagttgaagtttccctcttatcttgttttatgtccttgaaaacttgacttagtaaccatgtgaggatgctgtcccttgttctcccacatacacagggttggaatttctggattcagttcaggcagccagtctgaaaggatacataataatgtcacagctagctttaaggattctcttgagcagttacaatccttgaagcttggagctgactgacctacattatttctgaccaacagcaactgccccatgctgtagctcagtaactaaggtttttcccttttactgcagcagcctgggtttgattytcaactcaagcactaagccctttctagtgtgatatttggagactgtttgccattcattcgatgattttcttctccatggacatcttctcactttctgtcttaaattttcctttctaagctatctttggggaaattctcaatcttgcaaaaactgcttgccatctctgtgagacacctcatgcatccatg

SEQ ID NO: 362557 - DNA, 553 bp, Homo sapiens
ttgggctggccctgcagacttgttagttacaaaatttgctacacctccctgaaacaaaaaagttgaagtttccctcttatcttgttttatgtccttgaaaacttgacttagtaaccatgtgaggatgctgtcccttgttctcccacatacacagggttggaatttctggattcagttcaggcagccagtctgaaaggatacataataatgtcacagctagctttaaggattctcttgagcagttacaatccttgaagcttggagctgactgacctacattatttctgaccaacagcaactgccccatgctgtagctcagtaactaaggtttttcccttttactgcagcagcctgggtttgattttcaactcaagcactaagccctttctagtgtgatatttggagactktttgccattcattcgatgattttcttctccatggacatcttctcactttctgtcttaaattttcctttctaagctatctttggggaaattctcaatcttgcaaaaactgcttgccatctctgtgagacacctcatgcatccatg

SEQ ID NO: 362558 - DNA, 287 bp, Homo sapiens
aaaaaacaaaaccaaacaaacaaacctccaggactgtcagagatagctggtatgtttatggggactgcaggyccaatgtcagacaaagttcactgcatggactgaactaatagaagaccacaataatcattttatgacttgttgcttgaaatgctgctgatcctttttgttgtttttcagagtcaagaccacatttttcttttttcttttttatttttgtttttgagattgagtctcgatgtcacccaggctggagtgcagtggcgcgatctgggctcactgcaggc

SEQ ID NO: 362559 - DNA, 287 bp, Homo sapiens
aaaaaacaaaaccaaacaaacaaacctccaggactgtcagagatagctggtatgtttatggggactgcaggtccaatgtcagacaaagttcactgcatggactgaactaatagaagaccacaataatcattttatgacttgttgctkgaaatgctgctgatcctttttgttgtttttcagagtcaagaccacatttttcttttttcttttttatttttgtttttgagattgagtctcgatgtcacccaggctggagtgcagtggcgcgatctgggctcactgcaggc

SEQ ID NO: 362560 - DNA, 634 bp, Homo sapiens
tactatttttttgaaaggcacctgtctgctattgaatataattattttaaataagctgttatatgtaagatcaattaagaatatggaaattaaaagtttttattatcttgagaaaccaataaaaaagtattaaaaagtctgagatgctaagaaagaagattgaattttttaaatgctgaataaaaaccacaaaaaaaggaaaatgaatggaagacaaaaatggaaacagaggcagcgcaaaaactaaaagatagtaacaagcatggtggatattcatcyaactatatcaatcatcactttgaaaaagtgtcaacacctaattcagaacaatcataatcagaataccaagatacgtgtgaatttatgaattaatttcaatattgctttcatttttatatgaataaagtgtaaatttaaaattctagaaggactttttcaataagggtaaataagtctattatgtgtataagggttgagagagagatattattctttctttgagattcttcttaagtctttgattcattgacatactgtggatgtccccaacaagactactacagacattacatatttaccaatctgagcttccctttagtgatataaaggccagctcgcttgtctttctctgtga

SEQ ID NO: 362561 - DNA, 634 bp, Homo sapiens
tactatttttttgaaaggcacctgtctgctattgaatataattattttaaataagctgttatatgtaagatcaattaagaatatggaaattaaaagtttttattatcttgagaaaccaataaaaaagtattaaaaagtctgagatgctaagaaagaagattgaattttttaaatgctgaataaaaaccacaaaaaaaggaaaatgaatggaagacaaaaatggaaacagaggcagcgcaaaaactaaaagatagtaacaagcatggtggatattcatccaactatatcaatcatcactttgaaaaagtgtcaacacctaattcagaacaatcataatcagaataccaagatacgtgtgaatttatgaattaatttcaatattgctttcatttttatatgaataaagtgtaaatttaaaattctagaaggactttttcaataagggtaaataagtctattatgtgtataagggttgagagagagatattattctttctttgagattcttcttaagtctttgattcattgacatactgtggatgtccccaacaagactactacagacattacatatttaccaatctgagcttccctttagtgatayaaaggccagctcgcttgtctttctctgtga

SEQ ID NO: 362562 - DNA, 469 bp, Homo sapiens
taagttgtaacccagtatactattttcctaaaaattacctttgcattttttctttttctcagtgttcacctcttgcttagctcctcagaaatgcaaatgtaaccttttccttccttcgtttccaccagtgaaacaacctgcaagtattgccagcttatctaagtatatgtttccttagaaattctaaggaccaaatgttgaaccaaagcaggcamcatccagaattctccctcacagggagactgtctcaagacaatagttaatccacattccgactctttcctcaatgacactggtcagactaacagatgaccccttagctaagttttacagcaagtcacatagaccccgcacctccatgttccttctgcataccctgcacaagaaagtttctcttcttaaaaccctgctttcttcccggaaaactgaagcggctcctttagatatgaacctggttcttctccattgc

SEQ ID NO: 362563 - DNA, 469 bp, Homo sapiens
taagttgtaacccagtatactattttcctaaaaattacctttgcattttttctttttctcagtgttcacctcttgcttagctcctcagaaatgcaaatgtaaccttttccttccttcgtttccaccagtgaaacaacctgcaagtattgccagcttatctaagtatatgtttccttagaaattctaaggaccaaatgttgaaccaaagcaggcaacatccagaattcyccctcacagggagactgtctcaagacaatagttaatccacattccgactctttcctcaatgacactggtcagactaacagatgaccccttagctaagttttacagcaagtcacatagaccccgcacctccatgttccttctgcataccctgcacaagaaagtttctcttcttaaaaccctgctttcttcccggaaaactgaagcggctcctttagatatgaacctggttcttctccattgc

SEQ ID NO: 362564 - DNA, 589 bp, Homo sapiens
ctatgcagtttgcatgaagtatagggttgctctttagacacagtgaaattaagttaagttgtaacccagtatactattttcctaaaaattacctttgcattttttctttttctcagtgttcacctcttgcttagctcctcagaaatgcaaatgtaaccttttccttccttcgtttccaccagtgaaacaacctgcaagtattgccagcttatctaagtatatgtttccttagaaattctaaggaccaaatgttgaaccaaagcaggcaacatccagaattctccctcacarggagactgtctcaagacaatagttaatccacattccgactctttcctcaatgacactggtcagactaacagatgaccccttagctaagttttacagcaagtcacatagaccccgcacctccatgttccttctgcataccctgcacaagaaagtttctcttcttaaaaccctgctttcttcccggaaaactgaagcggctcctttagatatgaacctggttcttctccattgctaagctgtgaaataaagtcactttctttttaccaccctcttgcttgttatttgatacggtaagtga

SEQ ID NO: 362565 - DNA, 589 bp, Homo sapiens
ctatgcagtttgcatgaagtatagggttgctctttagacacagtgaaattaagttaagttgtaacccagtatactattttcctaaaaattacctttgcattttttctttttctcagtgttcacctcttgcttagctcctcagaaatgcaaatgtaaccttttccttccttcgtttccaccagtgaaacaacctgcaagtattgccagcttatctaagtatatgtttccttagaaattctaaggaccaaatgttgaaccaaagcaggcaacatccagaattctccctcacagggagactgtctcaagacaatagttaatccacattcygactctttcctcaatgacactggtcagactaacagatgaccccttagctaagttttacagcaagtcacatagaccccgcacctccatgttccttctgcataccctgcacaagaaagtttctcttcttaaaaccctgctttcttcccggaaaactgaagcggctcctttagatatgaacctggttcttctccattgctaagctgtgaaataaagtcactttctttttaccaccctcttgcttgttatttgatacggtaagtga

SEQ ID NO: 362566 - DNA, 589 bp, Homo sapiens
ctatgcagtttgcatgaagtatagggttgctctttagacacagtgaaattaagttaagttgtaacccagtatactattttcctaaaaattacctttgcattttttctttttctcagtgttcacctcttgcttagctcctcagaaatgcaaatgtaaccttttccttccttcgtttccaccagtgaaacaacctgcaagtattgccagcttatctaagtatatgtttccttagaaattctaaggaccaaatgttgaaccaaagcaggcaacatccagaattctccctcacagggagactgtctcaagacaatagttaatccacattccgactctttcctcaatgacactggtcagactaacagatgaccccttagctaagttttacagcaagtcacatagaccccrcacctccatgttccttctgcataccctgcacaagaaagtttctcttcttaaaaccctgctttcttcccggaaaactgaagcggctcctttagatatgaacctggttcttctccattgctaagctgtgaaataaagtcactttctttttaccaccctcttgcttgttatttgatacggtaagtga

SEQ ID NO: 362567 - DNA, 575 bp, Homo sapiens
gcacaaaaatattttctgatcacagcacatgaggtacacattttctaactggtattttttctatcactgagaactaaaatcgaatttaatcatcagtcatcaaaaataagaaaataattcatatctaatagaatgggtgatccatacagagaactgtcatgtacaygtacacggaggtgaggtggaaggaattatggagtccagtcaatgtctacatcttttgtacaaggagaatatgaaacaacatcatgaagttcacaccagcatggttaagaagacgttgctccttgcattcagatgtgaagtctaactttcctgccacacaaatcaataccttgttaacctttcacatgtacagcaaactaagccatagaatagaaagtttgacagatctttttaagcataagaagatctttttaatgtgggacaattttgccttgtggcttacagaatagtttctgtccttctatttaaccagagctatttaaggggaaatttctggaaaatcataaaacagaatgtgtaacgtctgtcgcttctaataaaaatgatattaacgttcaatttatgaaagg

SEQ ID NO: 362568 - DNA, 528 bp, Homo sapiens
ctgacctatgacctgacattacacacaaaattaattatacttggttcatagacataaatataaaaatatttagtagagtatacagaacacaattcaggaaaataacttcaagaccacgaggtaggctaagctgtctgaaactagacctgaaaagcatttaccatgtaagacaaaacataatctatgtagttgatgtgagcaaagactgtggggcatatagaatcaaactcaaggttcctttaggcctctcctttcgagagttagctcagacttggaaatggaccagaggagygggaatagtgcttacttcctgagatggcaggtggattgtatgaaatgataacatatcaaccacgtagtatcttactaagcctacactaaccccaaaaaacaaatattctaataaattgtgagatgtatcaattgcatcagttgtaatgtgtcattatttcctatatcagaatgaaagaacaaaatcactaacaatgaaactaatacttttatcatgtggaaatacactgtataata

SEQ ID NO: 362569 - DNA, 589 bp, Homo sapiens
actttcttcatttcaaagggcatctatgaaaagctcacatatcatcataagtaatctgaaaggttcactaatttctctgatattagaaacaagtcacctatttccactgttcacacttgtttgcaacattgtactggagaatgtagacagggcaaatcatttagaaaaatataatatttctaatatggaaaggaagtcaaactctcactgtttgcaaatgacatgatctcatgtataaaaagtccaaaggactctaatcaaacatgtttagaatttaaagatgagttcaaagaagtttgcagtatataaaatatataaaatattttaaatttctctatactagcaattaacaatctaaaaacaaaactcagaaaaycgttgcaattgagatcacatcaaaaatacttaggaataagcttatcaaattaagtataagatatgtacactaaaaacgatagaacgcatattgaacaaaattaatagaaaatctttgaatgctcattgtttagaagggttaatattgttaggtaggcaatattttccaaacggatctatagaattaatgcaacttctctcaaaaccccaggtg

SEQ ID NO: 362570 - DNA, 589 bp, Homo sapiens
actttcttcatttcaaagggcatctatgaaaagctcacatatcatcataagtaatctgaaaggttcactaatttctctgatattagaaacaagtcacctatttccactgttcacacttgtttgcaacattgtactggagaatgtagacagggcaaatcatttagaaaaatataatatttctaatatggaaaggaagtcaaactctcactgtttgcaaatgacatgatctcatgtataaaaagtccaaaggactctaatcaaacatgtttagaatttaaagatgagttcaaagaagtttgcagtatataaaatatataaaatattttaaatttctctatactagcaattaacaatctaaaaacaaaactcagaaaatcgttgcaattgagatcacatcaaaaatacttaggaataagcttatcaaattaagtataagatatgtacactaaaaacgatagaacgcatattgaacaaaattaatagaaaatmtttgaatgctcattgtttagaagggttaatattgttaggtaggcaatattttccaaacggatctatagaattaatgcaacttctctcaaaaccccaggtg

SEQ ID NO: 362571 - DNA, 615 bp, Homo sapiens
aatattgcagtctaacatcacccacttgcccttaaattctttcctggacaaagctaataacaaagtaattgtccatcaacgatagactgtataaagaaaatgtggcacatatacaccatggaatacaacgcagctataaagaagaaccagatgatgtcctttgcagggacaggaatggagctgccagtccattattcttagcaagctaacacaggaacagaaaaccaaatacctccatgttcacttataagtgggagctaaatgatgagaacacatggacacatagaggggaacaacacactcagagttcctgaaaccattggtctggattccgatgaatggggcaatcagacacacaagcacaccaaggcttaaccattctggccactggaagggaaagaaactacccaggaatgccacctgcttccaactagctggtcccatgattggggctctagggaatttctctttacctgctgagatgtttctgtcttggggaacttcctttctcttcttgccactgcaccaggtgctgactacacttccttaccacagggcaagtgacatstgaagaggctgacagacttcagagctgggtaaggcaaccagaatacc

SEQ ID NO: 362572 - DNA, 346 bp, Homo sapiens
tgggtcaaacttgtaatcccaatgctttggtaggttgaggcaggaggattacttgaggctaggggttcaggaccagcttgggcaacatacttagaacctgtttctaccacacaaaaaaaaggaaggaagaaaagaagaaaaaagattagccagayatggtggcatgtgcctgtggccccagctactcaagtggctgaggcaaaaggattgcttgaccccaggagttcaagtctgcagtgagctacattcatgccactgtgctccagcctggatgcagagtgagaccctgtttgtgaaaaaaaaaaaatttcctgacttggtcaagaagacatcaccagtgaatgat

SEQ ID NO: 362573 - DNA, 346 bp, Homo sapiens
tgggtcaaacttgtaatcccaatgctttggtaggttgaggcaggaggattacttgaggctaggggttcaggaccagcttgggcaacatacttagaacctgtttctaccacacaaaaaaaaggaaggaagaaaagaagaaaaaagattagccagacatggtggcatgtgcctgtggccccagctactcaagtggctgaggcaaaaggattgcttgaccccaggagttcaagtctgcagtgagctacattcatgccactgtgctccagcctggatgcagagtgagaccmtgtttgtgaaaaaaaaaaaatttcctgacttggtcaagaagacatcaccagtgaatgat

SEQ ID NO: 362574 - DNA, 346 bp, Homo sapiens
tgggtcaaacttgtaatcccaatgctttggtaggttgaggcaggaggattacttgaggctaggggttcaggaccagcttgggcaacatacttagaacctgtttctaccacacaaaaaaaaggaaggaagaaaagaagaaaaaagattagccagacatggtggcatgtgcctgtggccccagctactcaagtggctgaggcaaaaggattgcttgaccccaggagttcaagtctgcagtgagctacattcatgccactgtgctccagcctggatgcagagtgagaccctgtytgtgaaaaaaaaaaaatttcctgacttggtcaagaagacatcaccagtgaatgat

SEQ ID NO: 362575 - DNA, 582 bp, Homo sapiens
ggcagccacatgtgcagcacagcagtgtcagctccagcaacaccgcagtccccagggtgtgcctgcggcttcacggatgtcacctgctgcactggtttgccaactgtttgtttttctaagtcctcatcttggaataggtaacaactttaataataatatttaaatccttgttttgctcaacttttaagtttttaaaaactgtgatattccattttttatagatatttatgaaggctcacaaaatgtgtcacttcaaatgtctacatgttaggtctcctgagcatacaaactaaattgaccttaatgaaataccagaattaaatctgatatttcttttaaataatgaggacctgttaacccayattttcatctttgtctatacttgtaggtaatgtatttaaagaaagaaatatgcaaaacaatgaaatcatattaaaaagagtaatttatcacccacctttctctctccctttctagtgttttctaaatctccatctatgtagcccaattacatctttttactactctgatttggttttattcacttatacaatataattgtttgcaaagtctgaaaattat

SEQ ID NO: 362576 - DNA, 582 bp, Homo sapiens
ggcagccacatgtgcagcacagcagtgtcagctccagcaacaccgcagtccccagggtgtgcctgcggcttcacggatgtcacctgctgcactggtttgccaactgtttgtttttctaagtcctcatcttggaataggtaacaactttaataataatatttaaatccttgttttgctcaacttttaagtttttaaaaactgtgatattccattttttatagatatttatgaaggctcacaaaatgtgtcacttcaaatgtctacatgttaggtctcctgagcatacaaactaaattgaccttaatgaaataccagaattaaatctgatatttcttttaaataatgaggacctgttaacccacattttcatctttgtctatacttgtaggtaatgtatttaaagaaagaaatatgcaaaacaatgaaatcatattaaaaagagtaatttatcacccacctttctctctccctttctagtgttttctaaatctccatctatgwagcccaattacatctttttactactctgatttggttttattcacttatacaatataattgtttgcaaagtctgaaaattat

SEQ ID NO: 362577 - DNA, 562 bp, Homo sapiens
agcaggcttgtagtacagcttagtacaggtcaatatacaaaatcaactgtatttttatttattagcaattaacaatctaaaaacaaaatttcaaaaaccatttcatgtaaaatggcataaaagttaaatacctatgaattaatttaataaaataagtataagayacatatactgaggactacaaaacatatcaaacaaattaatactattataaattaaatacattgagctttcactgattagaaagcttagtatcattagcttgctggtactttccaaatatatctaatgcaatccctagctaaatcctaggtgacattttctcccctaattgacaattttactctaaaattcatatataatgcaatagaattccagaacagacaaaataattttgaaaaagaacaaagtttgtgtagtaaaatgctactttctgatttcaaaacataccacaaaagcaatagtaatcaaaattgtgttaaggatatggaacaacaaaagacccagaatagccatagctatcctaagcagaaagaacaaaactagaggaattacattacct

SEQ ID NO: 362578 - DNA, 562 bp, Homo sapiens
agcaggcttgtagtacagcttagtacaggtcaatatacaaaatcaactgtatttttatttattagcaattaacaatctaaaaacaaaatttcaaaaaccatttcatgtaaaatggcataaaagttaaatacctatgaattaatttaataaaataagtataagatacatatactgaggactacaaaacatatcaaacaaattaatactattataaattaaatacattgagctttcactgattagaaagcttagtatcattagcttgctggtactttccaaatatatctaatgcaatccctagctaaatcctaggtgacattttctcccctaattgacaattttactctaaaattcatatataatgcaatagaattccagaacagacaaaataattttgaaaaagaacaaagtttgtgtagtaaaatgctactttctgatttcaaaacatacyacaaaagcaatagtaatcaaaattgtgttaaggatatggaacaacaaaagacccagaatagccatagctatcctaagcagaaagaacaaaactagaggaattacattacct

SEQ ID NO: 362579 - DNA, 588 bp, Homo sapiens
tgtaggcctctaaaatggccacttcgggggcagccatcttttatggtcaaagatgtatggatgaaataagccctagtctcccatagcgctcctaggcttattaggatgaagaaattcccgcctaataaattttggacagactggttgtctgctctcaaatgctgtttcctgataagatgttatcaatgacaatgcatgcctgaaacttcattagcaattttaattttgcctcagtcctgtggtcctgtgatctcgccctgcctccatttgccttgtgatattctattaccttgtgaagcacgtgatctctgtgacccacaccctattcgtacactccctccccttttgaaaatcactaataaaaacttgctggttttacggctcggggggcatcacggaatctgccracctgtgatgtctcccccagacacccagctttaaaatttctctcttttgtactctgtccctttatttctcagacccgccgacactcagggaatctagaaaagaacgtacgtgaaatatcgggggtgaatttcgcctgatatctggctgaatttcccccaatagtgagacatatatatcaat

SEQ ID NO: 362580 - DNA, 606 bp, Homo sapiens
tgtcagtctctaattttctgatattcatttttcctgtatgtttgtatatataaatattatattgttttgtctcatctttaaatttaaataaatataaatattgaaaatattgaatttaatccatatccctagtctaattatgagaagacatctgacaaattcatactgtgggaaattttacaatagaactgaccagtccttgtcaaaagggtcaaggtaatagaaaataagtgaagactgaaaaactatctcatattggagaagatcagatgtggtaggtagaacctaagatggcacccaacgactcccacctctaagtataagtgaagttgataagtaacttcatattttaattccttctaatgaatgtagtcagaaactgtgagttgcttaaaatcaacagaatactacaatggtgatgggacattagcaggatgattatattatgttagattgtgattcttgtcttgctagcaaagtccctcccttgatggctttgatggaacatttgccatatgggagaagccaacatgggaggaaactaaattcagaaacaggccaaagcmagcaaagaactgaggcccttggtccaaaacccttacccag

SEQ ID NO: 362581 - DNA, 561 bp, Homo sapiens
ataatcttcctcctctgagttaaactctatgtcatcatctggctcactggttgtttgccaagaattacaagtatttgcatcccagcctccactggcaaagacagtccacacattcagctrgcacatttttctctctctcagccacacaaagtggcaaggtacaatttccaactgtgcctcttgagtttcaagtttatcataaaaccagacattaacacagacatggaagttctcatccctttctcactgcgattcttttcctagcttccctacccttgcctcagctgctacctgtgcttttgtgaccactcacatagataataacagcagcaaacttactgttgtcactgttttcccacctttttcaccacagtgagtcatagtttttagtaacgttttactaaaaagctttaaacacacatagtggcccacagacatgtagcatatgggaacgccacccacatggatgaggagggtcgcttgtaaaacttcctccacagatgcttctttccccttgtccatactttggtttcctggctggccatttgctccattaaaggg

SEQ ID NO: 362582 - DNA, 578 bp, Homo sapiens
ccagttacaaattcttaggttcaaagatctcaacttacgtaaactgtgcaatcactttttctwactgttttggtaaaaatcactgtttgtctcctctacaaagttttgactggagatacataaaaaagattttagagatctcatattcttaataatcgattagagaatcaaattttacaaatgacttacaatagcgtcatgactatccttgagaattctggctctgtacattaaaatctattagcattgctttaaattcagaagacatacccttgattaaagtccatggtcaaatatttaactttctttgggttcagtgcacatacatgtgttagtgtgtgttccaaaattgtacaccaaaactctgtgaccacaattttcctgtattacaaacctgcaaatgtacccctgagcctaaaacaacacaattggtaaaataaaatagaaatatcttcagaatttaatttagatatttggtctgaactggtcaggcaagtcagatactgtttttgctggatgttttagggccataaactgctctgtgatattttaaataattgtttgatttgtctttctta

SEQ ID NO: 362583 - DNA, 481 bp, Homo sapiens
aacaacaatacaaacaacaaaactcccaggactctaattaacaggctgatgtgttcatgaggattgctaagccaatataaagtagaacaagttaattatgtgggactgacgtaacagaagaacgaaacagatttctcggactcttttatcagatacattgatgactattactgtctatcagagtacagaaaggtttctccatagctatctatagcttatgacaattgaatatggtacactctttagagaaaaagttcaagtatacttctctctctctacctgatttccccagaatgtgaaaactatgtctgaatattcttaatytatggtaacataagttatttgcatatgatcaataacaattttttcttgtaatgggacacaattggagacactggttaccttgccaaggctttggctggaattgcatattttcatcaatgagcagattgctttaagaaatttaggttgaataacagaa

SEQ ID NO: 362584 - DNA, 588 bp, Homo sapiens
gcataggaactatcttgataaaatgtaaaatcttgtttcttaagccagttaccaaaaagtcaaaggaaaaccttttttagtgtgtctgcctctctttagaagaaagcccatttagataatctggaagtacaacttaagataaaaagtgcttgaatttaatgaaacatgggaagagtgtgtacaaggttttgaatagaactggggaatacatgactcttagtagctgcatgataaatttcctgattacagtgaaaatttagacacaccaaaaacaacaacaacaaaaaaacccaagagcatagtatcaggttatcctggaggaaaacatttcttttatagacctctaagataaaatatttcagcatcagccacaacaacatttagaagtaaggagaaaagttacaggagctgacaagaagctgaaggatagagttatcatcccaggccayatcaaagggagaaaaagctgatagcagcaagacaacaattgaacatttgagatatgaatctcagaagttttcaaaaaaagtatattatagaatagaaaattaaaatttattgtaattttattaagagtaaattgatgag

SEQ ID NO: 362585 - DNA, 589 bp, Homo sapiens
aatataaagacaaataaaagtaaatgaatggaacaaaatgtacaatgctaactctaatcaaagtaaacaagaggagctatatgaattacaggcagagcagacttcaaagcaagaaaagttatcaggaataaagaagggcattacatagagatgaagagccattcttccaagaagatgtcctaattcttaaagcctatgagcctgataacagagcataaactatgaggcagaaatcaacagaaccacaaggaaaaagatgaattcrgtattatagttggaaacattaacaccctatatcagatacggacagatctagcaggcagtaattcaggagcgaaaagctgaactcaacagcaccaacaagcaactgggcataactgacacctacagtctccttccctcaactactccagaggacacattcttcttaagctcacatggaatattcagcaaaatgtgccacattctgggacaaaaaataccccaacaatttttaaaaagtaaatcatacaatgtcagctctaagaccacagtggaattaaaatagaaatcaaaggatgactggaatgataactgtaatatcccaaaa

SEQ ID NO: 362586 - DNA, 589 bp, Homo sapiens
aatataaagacaaataaaagtaaatgaatggaacaaaatgtacaatgctaactctaatcaaagtaaacaagaggagctatatgaattacaggcagagcagacttcaaagcaagaaaagttatcaggaataaagaagggcattacatagagatgaagagccattcttccaagaagatgtcctaattcttaaagcctatgagcctgataacagagcataaactatgaggcagaaatcaacagaaccacaaggaaaaagatgaattcggtattatagttggaaacrttaacaccctatatcagatacggacagatctagcaggcagtaattcaggagcgaaaagctgaactcaacagcaccaacaagcaactgggcataactgacacctacagtctccttccctcaactactccagaggacacattcttcttaagctcacatggaatattcagcaaaatgtgccacattctgggacaaaaaataccccaacaatttttaaaaagtaaatcatacaatgtcagctctaagaccacagtggaattaaaatagaaatcaaaggatgactggaatgataactgtaatatcccaaaa

SEQ ID NO: 362587 - DNA, 589 bp, Homo sapiens
aatataaagacaaataaaagtaaatgaatggaacaaaatgtacaatgctaactctaatcaaagtaaacaagaggagctatatgaattacaggcagagcagacttcaaagcaagaaaagttatcaggaataaagaagggcattacatagagatgaagagccattcttccaagaagatgtcctaattcttaaagcctatgagcctgataacagagcataaactatgaggcagaaatcaacagaaccacaaggaaaaagatgaattcggtattatagttggaaacattaacaccctatatcagatacggacagatctagcaggcagtaattcaggagsgaaaagctgaactcaacagcaccaacaagcaactgggcataactgacacctacagtctccttccctcaactactccagaggacacattcttcttaagctcacatggaatattcagcaaaatgtgccacattctgggacaaaaaataccccaacaatttttaaaaagtaaatcatacaatgtcagctctaagaccacagtggaattaaaatagaaatcaaaggatgactggaatgataactgtaatatcccaaaa

SEQ ID NO: 362588 - DNA, 561 bp, Homo sapiens
gtgtcaaaggcctttgcacaccaaaacaaacactgtttcatttgttgaaaacaaatactgtktcatttgttgaaaacaaatactgtgtcatttgttttcagacagcaaacagaatgattctttgacacactcagtctttccaagaaataactgagttccccaaccaacaccagaagtagagcaagaaaatgttcgtgtttcccatgaagacaccacagagacaggctcaactctcctgcctctacttaggcactgtcttggataggcgtggtctggaggaggtaaaccttgtctagtgagttgtctgtgtttgtgcaggaagcacccagggatgtttgttttgtaaaaatacaaaagtatacatttggttgtacatgatggctatgtgaccaagaagagagtgttttctttgtgcttaatacacaagttttaaacacacttgtacacaaaaccaaaaaccaagatgtaacattacagtgccaggactcaaggggaaatgtgccattggtcagaaagaagaatgattatttaacaaattcatgcttatataaaataactgaa

SEQ ID NO: 362589 - DNA, 610 bp, Homo sapiens
tgagtgctctggacttgaactacactgatgggagcagcttaatgaaagatgtgcacagagccggatatgccaccgtgactgccaaaagggtaatagtagtccatacccttcctgcagctacctccgcacaaagtgctgagttaattgctcttacctgagtctttagaactgtcccaggaaaagggagtaaacatttattcttattccataaatgcattcctggaaatgcacgccaattgggtgatctggaaacatagaggaggttacttataatcagaaaatacagatattaaacactcaggagaaattctggccttagtaaaggcaattgccttgcctgcccaggcttccatcattcacttccccaacaccagagagacaattcacaaccaaaagtaagcaggcagctggcaaagctgcataatgagctgcttgggaggcacaggtyctgggacatgaatactccatttggaattactagattttaaacctcattacactgaacaagatcccaaatgtgcccgagccaggggtttgagaaaagagattccaattcccctggaaaactgacacctacaggatgatgaaaccacaaggccttggtttatcc

SEQ ID NO: 362590 - DNA, 438 bp, Homo sapiens
gtttcattgttggtggttttgttctttcattctgatacagaaaataatgacatgttacaactgatgcaattgatacatctcacaatttactagaatattgatttctcggggttagtgtaggcttagtaatatactgcatggtttatatgttaccatttcatacaatccacctgccatctcagaaagtaaggactattccygctcctctggtccatttctaagtctgagctaaatctccacaggagaggcctaacggaaccttgagtttgattctatatgccctagagtctttgctgacatcaactacatagaatatgttttgtcttatatgttaaatgcttttcaggtctagtttcagacagcttagcctacctcatggtcttgaagttattttcctgaattgtgttctgtatactctactacatatttttgtattta

SEQ ID NO: 362591 - DNA, 594 bp, Homo sapiens
atctgtcacatgcttggactgtatacttgtcctgtagtacctgtttcttttttaattttttttcaattttctttttctagattaactttgtaataagaatctgttgcttaaataaccagtcattttactttaggagaataatttcccatagaagattctttctcatagaaaattactctttttcctttataaccttccttaccaaaagtatatgttcctttctrtatctttcttcacaactctcttcaccacttactgcttccttcccagcttgtttcataaataaccttttcaaacccgtaatttgaataaacttttatataactttggaattagacaaaataattctttttctcaataaggacacctcttctttggcacatttgatagaaacctaggaaaaaagaaatcctgaactatcagatattagtattgtatagatgagaaccatttcacaatttttagaatagttttctctatataataaccctttcttaattggaaatgacctagacatctagtaagcatccaaaatgattttaagttttaaattatataaaaatttcacttagaaacattgatctcatttatgtg

SEQ ID NO: 362592 - DNA, 594 bp, Homo sapiens
atctgtcacatgcttggactgtatacttgtcctgtagtacctgtttcttttttaattttttttcaattttctttttctagattaactttgtaataagaatctgttgcttaaataaccagtcattttactttaggagaataatttcccatagaagattctttctcatagaaaattactctttttcctttataaccttccttaccaaaagtatatgttcctttctgtatctttcttcacawctctcttcaccacttactgcttccttcccagcttgtttcataaataaccttttcaaacccgtaatttgaataaacttttatataactttggaattagacaaaataattctttttctcaataaggacacctcttctttggcacatttgatagaaacctaggaaaaaagaaatcctgaactatcagatattagtattgtatagatgagaaccatttcacaatttttagaatagttttctctatataataaccctttcttaattggaaatgacctagacatctagtaagcatccaaaatgattttaagttttaaattatataaaaatttcacttagaaacattgatctcatttatgtg

SEQ ID NO: 362593 - DNA, 594 bp, Homo sapiens
atctgtcacatgcttggactgtatacttgtcctgtagtacctgtttcttttttaattttttttcaattttctttttctagattaactttgtaataagaatctgttgcttaaataaccagtcattttactttaggagaataatttcccatagaagattctttctcatagaaaattactctttttcctttataaccttccttaccaaaagtatatgttcctttctgtatctttcttcacaactctcttcaccacttactgcttccttcccagcttgtttcataaataaccttttcaaacccgtaatttgaataaasttttatataactttggaattagacaaaataattctttttctcaataaggacacctcttctttggcacatttgatagaaacctaggaaaaaagaaatcctgaactatcagatattagtattgtatagatgagaaccatttcacaatttttagaatagttttctctatataataaccctttcttaattggaaatgacctagacatctagtaagcatccaaaatgattttaagttttaaattatataaaaatttcacttagaaacattgatctcatttatgtg

SEQ ID NO: 362594 - DNA, 594 bp, Homo sapiens
atctgtcacatgcttggactgtatacttgtcctgtagtacctgtttcttttttaattttttttcaattttctttttctagattaactttgtaataagaatctgttgcttaaataaccagtcattttactttaggagaataatttcccatagaagattctttctcatagaaaattactctttttcctttataaccttccttaccaaaagtatatgttcctttctgtatctttcttcacaactctcttcaccacttactgcttccttcccagcttgtttcataaataaccttttcaaacccgtaatttgaataaacttttatataactttggaattagacaaaataattctttttctcaataaggacacctcttctttrgcacatttgatagaaacctaggaaaaaagaaatcctgaactatcagatattagtattgtatagatgagaaccatttcacaatttttagaatagttttctctatataataaccctttcttaattggaaatgacctagacatctagtaagcatccaaaatgattttaagttttaaattatataaaaatttcacttagaaacattgatctcatttatgtg

SEQ ID NO: 362595 - DNA, 551 bp, Homo sapiens
tcatatcctgacacctgatgatatagacagagataaatacaaaatcatttgttcagtaaactcagataaaaatatatgctgatcattttgaagatatttccaatattacgtcacgaataatcttaaaaccaattttatttgtcaaggattactamatttatgtgaacttgaaaagcatcctgacttaatttatgagcacttatttacttgtaagtcaatttggtaacaggctagacataacacataatacacatacatacacacaaacatatctaactaaatatgtatatacacacaagcaaaggtctaatagcttttaccttgggattctatccataaaataacagtacacactcagtattttataaaaatagctggatacacattattgtctgacaaaactgaaacctgtttccatggttaaattttgttttctccaatatataatacaatgaaagctgtgaaccaaaatttgggtaaagcaatgtttatggcagttttgtttttaaaaaagcatctttttcctttctttccttcagttttaaacaagt

SEQ ID NO: 362596 - DNA, 449 bp, Homo sapiens
atttaagaaagtaaaatttgtcagaaaatttgggatcagcagaaaataatggcacttctggctcatagacataacatcccgtaggcccctcaggaagaaattgagaataaagaatggcagagttcatttcatagatcccctttatctgaggtctatgtgccagtggatccatttagtagaggggcagctttctgaacaacaactcagggacatatgctaagctttgatttttagtttccatagggaaccccatattcccatgactctcaattccttgctactgttttaccttcttgcttctcaagtggctcgtgtacttctcagaggtagagaggtgcctggaatttctgtgaagggactcaagattttcctttatttccatgcttsgggtggtacacaggcccctatgaggggtccctgcaccttctcaggccctaaataaattctca

SEQ ID NO: 362597 - DNA, 449 bp, Homo sapiens
gaagaggctgacagacttcagagctgggtaaggcaaccagaataccccctgaacggcctctgcctgttctgtgatgtcacctgagctctgctctgtttacatatagctgcttgtgacatcatctgggtgtgtctcgtatctgtatctacgtcaasacctgggctttgctccacttggagtcagctgattggcgggagggcatctgcaattgagaggaggtttcaggacgtttacccagccctttagtggggatctgtctgggactgtgcagtctgaatctgcaactgtaaaagtgtacaatatctacatttaggccctcatctctgtctctctctcctcctccttctttcctctgcagggtgatctgcataagccccactccatccaggatccagccctggagggaaacagcctccactgccctagcagggtcactctttttagggccc

SEQ ID NO: 362598 - DNA, 449 bp, Homo sapiens
gaagaggctgacagacttcagagctgggtaaggcaaccagaataccccctgaacggcctctgcctgttctgtgatgtcacctgagctctgctctgtttacatatagctgcttgtgacatcatctgggtgtgtctcgtatctgtatctacgtcaagacctgggctttgctccacttggagtcagctgattggcgggagggcatctgcaattgagaggaggtttcaggacgtttacccagccctttagtggggatctgtctgggactgtgcagtctgaatctgcaactgtaaaagtgtacaatatctacatttaggccctcatctctgtctctctctcctcctccttctttcctctgcarggtgatctgcataagccccactccatccaggatccagccctggagggaaacagcctccactgccctagcagggtcactctttttagggccc

SEQ ID NO: 362599 - DNA, 597 bp, Homo sapiens
ccgatgtcttctttgccagcagacctgaccccctactgacaccctcttggccagtagcctcttcacccacactggtawaggtggttccacctcctctgaggggattacgccagcattgcctgagggaaaggtaatggactgcaatgcagattctcctaaggccccacacccaccactcctttttgcttctaggcctataagtagactcaaatctcaaaatgcccttaaaaatgatatacaaagtttggcccatgggaggttcatgacagttcaagaaaactatttgactttataatttatacaaggagaaatctggagaacatgtgtggaaaagggtattaagagttaggataatagtggaggaaacaaagttggatcacccagatttattgatatggactcattaaaaaagatactggttttagttttgcagcatgggaaattagaaagggccctaacagtttggttggttggctgaactataaatcaaaagatggcccttatttagccagttggatatgcctgatctcccttggcctcatgtagaggaagagattcaaaggcttagaacgaatggaactccagagtgcatttgtc

SEQ ID NO: 362600 - DNA, 597 bp, Homo sapiens
ccgatgtcttctttgccagcagacctgaccccctactgacaccctcttggccagtagcctcttcacccacactggtaaaggtggttccacctcctctgaggggattacgccagcattgcctgagggaaaggtaatggactgcaatgcagattctcctaaggccccacacccaccactcctttttgcttctaggcctataagtagactcaaatctcaaaatgcccttaaaaatgatatacaaagtttggcccatgggaggttcatgacagttcaagaaaactatttgastttataatttatacaaggagaaatctggagaacatgtgtggaaaagggtattaagagttaggataatagtggaggaaacaaagttggatcacccagatttattgatatggactcattaaaaaagatactggttttagttttgcagcatgggaaattagaaagggccctaacagtttggttggttggctgaactataaatcaaaagatggcccttatttagccagttggatatgcctgatctcccttggcctcatgtagaggaagagattcaaaggcttagaacgaatggaactccagagtgcatttgtc

SEQ ID NO: 362601 - DNA, 597 bp, Homo sapiens
ccgatgtcttctttgccagcagacctgaccccctactgacaccctcttggccagtagcctcttcacccacactggtaaaggtggttccacctcctctgaggggattacgccagcattgcctgagggaaaggtaatggactgcaatgcagattctcctaaggccccacacccaccactcctttttgcttctaggcctataagtagactcaaatctcaaaatgcccttaaaaatgatatacaaagtttggcccatgggaggttcatgacagttcaagaaaactatttgactttataatttatacaaggagaaatctggagaacatgtgtggaaaagggtattaagagttaggataatagtggaggaaacaaagttggatcacccagatttattgatatggactcattaaaaaagatactggttttagttttgcagcatgggaaattagaaagggcyctaacagtttggttggttggctgaactataaatcaaaagatggcccttatttagccagttggatatgcctgatctcccttggcctcatgtagaggaagagattcaaaggcttagaacgaatggaactccagagtgcatttgtc

SEQ ID NO: 362602 - DNA, 612 bp, Homo sapiens
ggcaaagtagcttgccttattatcccccgttcctacacagggcacctgcttcagaaagacaccatcaagctccagggacactcatccactttcttctttcccatcacacttcccattacccagttatcaattgtgttcataaycactttttcaaggaaagacgcctttctcacatatgttagaaggccctgtattcaggcactttctggcagtgtctttgtaggatctcactataaagacattttagaagatatgacttccagacattagaagagaagattgagaaacgccagtgatggtgaacataaatagttctgaattaagagtgttttcttagtacagggattccttttattccccaagttttaaaggaaaaggatgccttaagcctttgagaaaacactgtaataattcagttttcttcgtcatgcacactccataacgattttatgggaccagacattctcttgacactcacatcatggatctatattgtcctgtggtatattgatctgttctcatgatgctaataaagacatatctaagactgggtaatttataaaagaaagaggtttaactggctcacagttgcacatggctggggaggcctca

SEQ ID NO: 362603 - DNA, 612 bp, Homo sapiens
ggcaaagtagcttgccttattatcccccgttcctacacagggcacctgcttcagaaagacaccatcaagctccagggacactcatccactttcttctttcccatcacacttcccattacccagttatcaattgtgttcataaccactttttcaaggaaagacgcctttctcacatatgttagaaggccctgtwttcaggcactttctggcagtgtctttgtaggatctcactataaagacattttagaagatatgacttccagacattagaagagaagattgagaaacgccagtgatggtgaacataaatagttctgaattaagagtgttttcttagtacagggattccttttattccccaagttttaaaggaaaaggatgccttaagcctttgagaaaacactgtaataattcagttttcttcgtcatgcacactccataacgattttatgggaccagacattctcttgacactcacatcatggatctatattgtcctgtggtatattgatctgttctcatgatgctaataaagacatatctaagactgggtaatttataaaagaaagaggtttaactggctcacagttgcacatggctggggaggcctca

SEQ ID NO: 362604 - DNA, 223 bp, Homo sapiens
tattccccaagttttaaaggaaaaggatgccttaagcctttgagaaaacactgtrataattcagttttcttcgtcatgcacactccataacgattttatgggaccagacattctcttgacactcacatcatggatctatattgtcctgtggtatattgatctgttctcatgatgctaataaagacatatctaagactgggtaatttataaaagaaagaggttt

SEQ ID NO: 362605 - DNA, 491 bp, Homo sapiens
acctcaggtgatctgcccgccttagtctcctaaagtgctgggattatagatgtgagccactatgcccagccttggaaaaccattctttaaaacttgtttttttkttgttgttgttgttgttaatgtcactcccaagcttaaaaaaaaatcattagcaatattgttgatacctcctttgtgcatctccttaatttctcagttttccttaagcactgaacttaattatattgtgaattgtcattccatactttaaaaatagtttttcctctttgagtatttcttaatactatattctttaggtctttttcgtcttcagatttaagtgaaggtgtttaattcattgatattcctagtttaatcatgagaaaacatcagctaaaaccatatcgtgggacatcctattaaatacctgactggtacttttcaaaagggtcaaggtcaagaaaaagaagtgaaggccaggaaactgtttcataaacgagaatacctga

SEQ ID NO: 362606 - DNA, 665 bp, Homo sapiens
cagtttatagtcaagaaatccttgaaaaaaggagcagccaggtccccttgatgaaggacccaggtataccacaaaaactttatactgttcatctttctcctgtccttcccaaaagggaacctataaccttttaacagctgtgttttggggaaaggaatatagtaagaacttttcaggactagtagacactggctctgaccttacattgattccagaagactcaacccaactcaaaacatcactatagaatgccagtcagagtggggatttatggaggtcaggtgattaaattttagtcacatgaaatcaccatgggtccagtggccccaaacacatactctggtcatttctctagttgtagatgcaaagctttaatagacmtagttagcacctggcacatttcccacattggttccctgacctgtggagtgggcgctagtatggtgggaatatctaaatggaaggcactagagctgcctctacctaggaaaatagaaaatcaaattcataaccacacctctggagtgactgtagagattaccaccaccatcaaggactggaaggatgcaggggtggagattccaacacatccctgtctaatttggcctgtgcaaaagacagatggatcctggagagtgacagtggattcccacaagctaaaccaa

SEQ ID NO: 362607 - DNA, 665 bp, Homo sapiens
cagtttatagtcaagaaatccttgaaaaaaggagcagccaggtccccttgatgaaggacccaggtataccacaaaaactttatactgttcatctttctcctgtccttcccaaaagggaacctataaccttttaacagctgtgttttggggaaaggaatatagtaagaacttttcaggactagtagacactggctctgaccttacattgattccagaagactcaacccaactcaaaacatcactatagaatgccagtcagagtggggatttatggaggtcaggtgattaaattttagtcacatgaaatcaccatgggtccagtggccccaaacacatactctggtcatttctctagttgtagatgcaaagctttaatagacctagttagcacctggcacatttcccacattggttccctgacctgtggagtgggcgctagtatggtgggaatatctaaatggaaggcactagagctgcctctacctaggaaaatagaaaatcaaattcataaccacacctctggagtgactgtagagattaccaccaccatcaaggactggaaggatgcaggggtggagattcyaacacatccctgtctaatttggcctgtgcaaaagacagatggatcctggagagtgacagtggattcccacaagctaaaccaa

SEQ ID NO: 362608 - DNA, 665 bp, Homo sapiens
cagtttatagtcaagaaatccttgaaaaaaggagcagccaggtccccttgatgaaggacccaggtataccacaaaaactttatactgttcatctttctcctgtccttcccaaaagggaacctataaccttttaacagctgtgttttggggaaaggaatatagtaagaacttttcaggactagtagacactggctctgaccttacattgattccagaagactcaacccaactcaaaacatcactatagaatgccagtcagagtggggatttatggaggtcaggtgattaaattttagtcacatgaaatcaccatgggtccagtggccccaaacacatactctggtcatttctctagttgtagatgcaaagctttaatagacctagttagcacctggcacatttcccacattggttccctgacctgtggagtgggcgctagtatggtgggaatatctaaatggaaggcactagagctgcctctacctaggaaaatagaaaatcaaattcataaccacacctctggagtgactgtagagattaccaccaccatcaaggactggaaggatgcaggggtggagattccaacacatccctgtctaayttggcctgtgcaaaagacagatggatcctggagagtgacagtggattcccacaagctaaaccaa

SEQ ID NO: 362609 - DNA, 636 bp, Homo sapiens
tttttttttgttccaaccttattttagtggatttttwaggattttctatacattagattatgtcactggccaatagatgtttgacttcttccctttcaatttggaagtcttatatttatttttccagcctaattttataaattacatcctcaagaatatttagttgaattagtgggaatagataaccttttgtgtttgtaattttgggaaaattactgagacctacttgataccatgtgttgtcatgtgaatttttcatgggtgtctgtgttaggtaagaacattccctttctgcaaaatttgtttagtgtttttactgtgagtgggtttttgaattggaaagtgcttattccatatctttagatgtcataatgaaaattttgttatttattatattaatatagttattacactaattcttcttctgtgttttaccaaacttgtgaccctgagtaaataaataaataaattagtgtttaattctgttttacaatcctggtttgtgttcagactatttccttgagaattattgcctgggtacccataaagcatattagtttatagttttccttgtttggactgcgtttgtttggttgtggcctcagaggaaactgcctcatagaatgtattgcacac

SEQ ID NO: 362610 - DNA, 636 bp, Homo sapiens
tttttttttgttccaaccttattttagtggattttttaggattttctatacattagattatgtcactggccaatagatgtttgacttcttccctttcaatttggaagtcttatatttatttttccagcctaattttataaattacatcctcaagaatatttagttgaattagtgggaatagataaccttttgtgtttrtaattttgggaaaattactgagacctacttgataccatgtgttgtcatgtgaatttttcatgggtgtctgtgttaggtaagaacattccctttctgcaaaatttgtttagtgtttttactgtgagtgggtttttgaattggaaagtgcttattccatatctttagatgtcataatgaaaattttgttatttattatattaatatagttattacactaattcttcttctgtgttttaccaaacttgtgaccctgagtaaataaataaataaattagtgtttaattctgttttacaatcctggtttgtgttcagactatttccttgagaattattgcctgggtacccataaagcatattagtttatagttttccttgtttggactgcgtttgtttggttgtggcctcagaggaaactgcctcatagaatgtattgcacac

SEQ ID NO: 362611 - DNA, 636 bp, Homo sapiens
tttttttttgttccaaccttattttagtggattttttaggattttctatacattagattatgtcactggccaatagatgtttgacttcttccctttcaatttggaagtcttatatttatttttccagcctaattttataaattacatcctcaagaatatttagttgaattagtgggaatagataaccttttgtgtttgtaattttgggaaaattactgagacctacttgataccatgtgttgtcatgtgaatttttcatgggtgyctgtgttaggtaagaacattccctttctgcaaaatttgtttagtgtttttactgtgagtgggtttttgaattggaaagtgcttattccatatctttagatgtcataatgaaaattttgttatttattatattaatatagttattacactaattcttcttctgtgttttaccaaacttgtgaccctgagtaaataaataaataaattagtgtttaattctgttttacaatcctggtttgtgttcagactatttccttgagaattattgcctgggtacccataaagcatattagtttatagttttccttgtttggactgcgtttgtttggttgtggcctcagaggaaactgcctcatagaatgtattgcacac

SEQ ID NO: 362612 - DNA, 636 bp, Homo sapiens
tttttttttgttccaaccttattttagtggattttttaggattttctatacattagattatgtcactggccaatagatgtttgacttcttccctttcaatttggaagtcttatatttatttttccagcctaattttataaattacatcctcaagaatatttagttgaattagtgggaatagataaccttttgtgtttgtaattttgggaaaattactgagacctacttgataccatgtgttgtcatgtgaatttttcatgggtgtctgtgttaggtaagaacattccctttctgcaaaatttgtttagtgtttttactgtgagtgggtttttgaattggaaagtgcttattccatatctttagatgtsataatgaaaattttgttatttattatattaatatagttattacactaattcttcttctgtgttttaccaaacttgtgaccctgagtaaataaataaataaattagtgtttaattctgttttacaatcctggtttgtgttcagactatttccttgagaattattgcctgggtacccataaagcatattagtttatagttttccttgtttggactgcgtttgtttggttgtggcctcagaggaaactgcctcatagaatgtattgcacac

SEQ ID NO: 362613 - DNA, 344 bp, Homo sapiens
gaactacagggaggtagttttttaggtagatagatacatagatggagagttgatagatagatagacaatmgttagatgaacagcattttgtttggggatttactcatgtaacattatagagacggagaattcccaagacagccatctgcgagtttaaggaccttggatgctgtaacgtggtggctcattccaaagctgaagtcttcagaatcacagaagctcttggtgtaattcttagtttgggaccaatggcctgagaatccagggcatttactggtataaattctggagtttgaaggccatagatcatggagttctgttttccaagggcaggaaaaggaata

SEQ ID NO: 362614 - DNA, 344 bp, Homo sapiens
gaactacagggaggtagttttttaggtagatagatacatagatggagagttgatagatagatagacaatagttagatgaacagcattttgtttggggatttactcatgtaacattatagagayggagaattcccaagacagccatctgcgagtttaaggaccttggatgctgtaacgtggtggctcattccaaagctgaagtcttcagaatcacagaagctcttggtgtaattcttagtttgggaccaatggcctgagaatccagggcatttactggtataaattctggagtttgaaggccatagatcatggagttctgttttccaagggcaggaaaaggaata

SEQ ID NO: 362615 - DNA, 492 bp, Homo sapiens
ctgccatgttagggatgaaatttcagcataaatttgggagggaagcagtattccaaccacagggctccacttctgactctaaaaatcacgccctgtcacttaaaaaagtttatttcattcctatcgttcaaaggcttaaattgttccagcaccaacagaaagttcccaaatctaaagtctcctctgtcagcccatgaaatcaaaacaagttatcttcatacaaaattcagcagttgggttgttaatggccaatgggttcatgttggctgctgcccagttagagccactttaccaagataggggaattgctgtagagaaaattttatacatgtagagctggctaaaggagagagcagagttttcctattactcaaaactgcttccccaaatattcagaggctagagtttttatagatagttttgtgggcaggggttagagaaagggacatsctgattggttgggtcagggatgaaatcttaggaagtcaaagc

SEQ ID NO: 362616 - DNA, 586 bp, Homo sapiens
ggagcaatcagggaggttattaatcttgtggcctctgatggtatgacttctgagccatactttctaatattgtggttaatttgttagttttacaaagttgatgttgtccccaaacaatgaggggttttgtttcagggaggagctgttattatctttgtttcaaaattcaactacaaagtaaatttctcccaaagttagttttgtttttacccaggaataagcaagggctgcttggaggttaaatgcaagatgaagtctcttaggtcatatctctctccctgtcataattttctcactgttactgtctttgcaaatgtgatttcaatttmcccttccaagtttcattgcatcttattcttaatgggtgaggtacagagttgggaaaaggccaaagaccattctaacttcttcctgctgacaaggggtatacttgagatagggtttggccccagagtaaatggaatgaaactgctttgcagctgcttgagtatattcacaggtgcctggttggggttcctagaattgcatgaccaagatgttagtactctcatccacagttttagtacagcacttaagtgaacagctg

SEQ ID NO: 362617 - DNA, 538 bp, Homo sapiens
gtgatatgttaattcttatgcagtctgggaccttgctgagcatcatttttttctaatacataaaatggaaggaattacacatagtccacaagatttttgtgaggtttaaatgacataacatagataatgtgcgtagaaggtacgcttcacaataaatgttmtctcgcttaactgcaatttttttaatcctccctttccttactgagtttttgtcatttccatggtttcacaagctatctctaagtaagcgatcccgacatctctatgtatcacctcatccctattttacagacaagtaaacaaagtctcaccttttcctgtgtccacggacctgttagacatcacaaataaatgtcattggcctctccattgcaacagatccaaaccagtctttcttcgccactgattcccaatttttctgaccccttgtccctctcatttctgtgaatgatgctacttacccattcttcaaacctcacagccctcttcaattctttcctctcccattgctcatctttccattcatttgccaagccca

SEQ ID NO: 362618 - DNA, 439 bp, Homo sapiens
aaaccaacccttaaaaacaaaacaaaacatgaagtaccacaaatggtatggtagtggtggtgtcattgagggtagatgagaagttagcccaccaagaattctatgtggcttatttggagttttttaaaaataccttatgattgcaygttgctctgaaagcacattatggtaatgactattttgtattactagctaatcattttgacaatttcatagatattggactttctgctccttcagaaagttgctacaaaatgtaccctcccaattccaagaaaaaggaaaagtatgttctaatcttccttctggtaggtcagttggtccagaagcttagactaaacttccttctgattcatactgggcaaatgatgcacaagagctcaatatgttcagagtgcaatgtttgagctacatgtggttctttaagacttatttcagg

SEQ ID NO: 362619 - DNA, 600 bp, Homo sapiens
tggtaggtcagttggtccagaagcttagactaaacttccttctgattcatactgggcaaatgatgcacaagagctcaatatgttcagagtgcaatgtttgagctacatgtggttctttaagacttatttcaggatacaagtttattaagctaggagatgcagggcatatagtagtggtggggctctctttgttcacagtatttgcaaaaatcaattaaggcagggatggtattccaagatgattcacaaactgtgascattgcagcattagctttaaggaatgaaggaagcagcctggtaggttagaaagagcatcagaccaagaggtaaaagaaaaaaacaaacaaaatactggttttgagattcagcaaagtgcaagatgcaaacaagaacaaatcagcaaattcctatgagctttagtttcctcagtcataacatgaagttaatatatattgactcccaaatcaagtgagttaataggtataaaatatatttgaaatcccaggagctatacatatataagttgctgttattactaaaggtaactcaattttaccatgtaagaccatgttcatcatgtaggactccctgaaccaggac

SEQ ID NO: 362620 - DNA, 601 bp, Homo sapiens
tgactacctgctctgtgtggaatggcatgttaagccttgtggaatttcaaaaaaattaatgaaaaaagatatatcattgaattaaaagtactgagcagacacacgaacaagataaagaatgcttagaaaaaatatcaagtcaaaggaagctatctaggtgttcgtagattactaaaccgtatcaataaaggaggtgttgttgaggaagaaacttgttaaaaggtcctagacctagagtagcagagtacaaggggtaaagatattttcagggaaaaataatggtatggtacagcaagaacctatttcatggcttccttcactggcctgtttagtcttgcagtcatatattctccccttgcttctcctccagacatctgttcaataaataactatagctttagtactgcagagatcaaatatatatatatatatatgtgtgtgtgtgtgtgtgtgtgtgtgtgtgtgtrtatatatatgtgtgtgtgtgtatatatatatatatatatatatatacccactctctcacagcatacgcccacacataaaattcacgcacaaatggtctcttattagaaagattttagaatcttccacatatgca

SEQ ID NO: 362621 - DNA, 597 bp, Homo sapiens
ctaagggtaatctcagttcaaaaaatacagaactaccaaaaagcacagttagctgaaagttcacatccaatgctggcctaaaattaaagtacctyatgaaaataaaggccattgttttcaatctgctccttcacctctccacccacacacctccagagaaggctgcttgtgtttaaatttagcagcaatgtgagttacataattgtcatgcgcccagcagttgtcccagtctcccaatttgtcatgcctgaccttcctatcacactctgataaacttcatgctattacagctgcttattttgtttatgttagagactgaaatgatagtttatcattcatttaactttacctactttcttggccacttacttcagtaaaaacttgtttttctttctacagaaaaattttcttccgtgggtaaaatgctggaccctctcccactaacccttaaagtgccatctctttctcagcttctgaacctttggtgaccttggaaactagattcaaatcaatgcttcatgtagttcctgagcttatcacttttagataactttaacttctggtttccaggccaggcctcactggaaatcctgaaac

SEQ ID NO: 362622 - DNA, 386 bp, Homo sapiens
tattctttcatcagacaaaatctcaatttagtgatcagctctattaactcattttcataccatcctagattcatttttttcctaaaatgattttaaatatatacacataataattatcttcttaaaatgaaacaaacaagattccaatcttcttcccaaccccccaactccaccctacaagtygcttctcttttaaaatataactgatttcaggaatttgccatgattttttacatgagtaagaaaaataagcaggtataatatttgaaagtaatcattcgaaagtaacaaacatatttaatattaaacattatctctaaaatttaagtccttctttgagtgtctaaataggggatacccactggaatctgatctaggatcttttg

SEQ ID NO: 362623 - DNA, 574 bp, Homo sapiens
gcagcagactttgccactgagttcaccgatagcttgagatgccctaatatctcattcagggccaagcacacttgagacacaaagaagcacggctcgactccatccatttgatttctttgggcacagcctctcagacaatcaggtacagcaccctcccttgcatagttgatggcctttcctgacggctatcaaacatatctgctgagactgcactaaataaaatggctgtcaccaagccatctggtgcatttgtgctttttcccccctcyaagatgcaagttttcagtttgcacagcacttcaaattcttaatacacttgactaagtcattaatatttcactttcattaccatgtattaataacatgagaatttagaatgatcttgttcatctaactcctggaaaacaaataattacattcgtgcatattgattgtcagataactaaagatgtttagcctggggccgtgagaaatccaccagcaggcccagttttggttcttagccatgttcaaagtatatcaagctgatgtctatgaaacaccagagacagcagtagcgtagttctgggagtta

SEQ ID NO: 362624 - DNA, 637 bp, Homo sapiens
ggcttcttcaattctcctcacagcagccagagtcatcttttgacaatgtgaaacagttcacaaaactaccctatataaagccctctaatagtttatctgtacttctttctggtacctgcaggatgggttccatcttgtcttttggattttactcacatgccaccggctaaatgagtccatccatcatggcttactcgagcaagtgatatctactcactatagcacatcatatacactccttttaactctctgtgtatggcatatctgcatctcctggacataagctttttgaggaggaatccacactgtcttagtcactgtgtctccatcacttagaacagtgcctagcacatagcagacattcaattaagctgaaaggattggagtagtacacagaggtcaaatcgtctatggattttttgaccactgtaaaaagctgggagctttattcaaaatktaatagaaaacttctggaaaattctgagcaggatcagaagatcatgctggttattgctgtttgaagagtggattgaagaatagcaagagcagaagcaagacagattagaagaccaattcagaaatccaagtaagaaacggttttggcttggagtagggtggcagtattggcaatagagga

SEQ ID NO: 362625 - DNA, 646 bp, Homo sapiens
aaagcaacaggggtggaagtaggccaggagagatcagagttatgaatgaaaatggagaagagtttggaagagggagacgtaaaatgattatttcatatagcttgtccagtaagaaaggagataggacaatagcagaaaaaatatgcaaactcccaacagtgtgttttgttattaagagagaaatttggtggttttggctttgatgaggaagcaactgggagggagagaatgcaaagacagtgattttgtaccactaaatccatgtataaagcactctcaaaatttcctagcatgctttgttaaaagtaggctcaggcactggctatacaaaaatgtaagactccatccagtcctgccccataagatactcatagtctagtaaagagggtaggcaagtagactcaatttattaattacattaaccatcttaaattggctgcatcagcactgagtsgtagattgtaaactagttggtggaattttattcctggaagggaccttagcaagtatctactttcttttttatgtgattaaactgagtcataaaatgtttaaatagcttgtctaaggcacagctcattaatagaagattcccgattaggaaggaacactgtccagactcccagggtctggacagtttttttaa

SEQ ID NO: 362626 - DNA, 646 bp, Homo sapiens
aaagcaacaggggtggaagtaggccaggagagatcagagttatgaatgaaaatggagaagagtttggaagagggagacgtaaaatgattatttcatatagcttgtccagtaagaaaggagataggacaatagcagaaaaaatatgcaaactcccaacagtgtgttttgttattaagagagaaatttggtggttttggctttgatgaggaagcaactgggagggagagaatgcaaagacagtgattttgtaccactaaatccatgtataaagcactctcaaaatttcctagcatgctttgttaaaagtaggctcaggcactggctatacaaaaatgtaagactccatccagtcctgccccataagatactcatagtctagtaaagagggtaggcaagtagactcaatttattaattacattaaccatcttaaattggctgcatcagcactgagtcstagattgtaaactagttggtggaattttattcctggaagggaccttagcaagtatctactttcttttttatgtgattaaactgagtcataaaatgtttaaatagcttgtctaaggcacagctcattaatagaagattcccgattaggaaggaacactgtccagactcccagggtctggacagtttttttaa

SEQ ID NO: 362627 - DNA, 519 bp, Homo sapiens
gtatttaatataaatgatatctaaattacattaaaatctagttcaacataacgtgctttaacattaacaagttatggcaagatctcttcaaatatattcaaatgggtaggtggcagatagcatttcttctattaggagggtctggtggactttacaaccatgtggagttatattcagttattcaggtatatctccattcttcagctttatctatgcctaaatggcttcattataaataaacacatatatttacytgaggtgcagaacaggaaccacttcattttattgtgttttaagagagaatacatcattagaaatcatgtctcctttcttgaaggggttgaaggacactaggaatcctagaacactctatatactatttttgctatgtgaaaaatgagtcaggttaatattggtagagcctattttttattttctttggtttagggtgaaaatcacacctttctccaggttaatgagacacttttctgagaatctcctgatgcttgaaggcattgc

SEQ ID NO: 362628 - DNA, 602 bp, Homo sapiens
agcttactcaactgcaaagtgaagctgcagcatgatcagggctgtttatttattttcaaatagtgtatagctctttcttctgctgcttgttatcctgctctgacctaagtaaccttgtcaagccacctcccaggttgcccagatcgccacaaccagcagactaatcattctgaatgataagaaggagcatgagttttttagtgatcagtgtgtcagtatctatcttggctccccagaatcactcttcgtgtgtgtatgtgtgtgtgtgtgtgtgtgtgtgtgccgcgcgtgttacagctactaggtttagagaggaggctgccgaatggcgccatgctttattgtattttctgctctgcaactcagttcagaatcatcccctgtgtttctactgtagagcaagcactacagcactcactgtaaaatcatcattatccattaatttcctcaaattgggctcatgaattaagcaaaratttgtgacttgcatagccggctataaccacctgggaagaaaacaatttactcctcaaactatgcatagtgtaaagacatgactgtcaggaatattgagaatcttcgattcacattcagcaggttaa

SEQ ID NO: 362629 - DNA, 525 bp, Homo sapiens
gtgaatgccttcctcctatggccacaaaagcaaaaactggaatctcatgatgctgtcactggaactgaagctgtagggccacccaagggatgactaatcttattaaaaagacggttggtactgaaaactaatccttcttggttgggaaataaacygcctttgccagaaattacttgaaaaaaatatcttgaatgaggtttcagtatttgcttcattacttttcatgtggcaaagaatgaaaataagatacccacggaaaaaacaatttagatgccactggatcctgagatgtctaaagattcttctccctgcctgcatccctctccacccacccacccaaagccagcatgacataattttctcccaaatctctatgagtaacatgtggtaatgttaaaaccaacactctattagttactctatgacttctgtcttgccatcactgcatttatcatttcctgccctctttcaaacagaatagagtggtgcagttaaggaggaaaaagaacacatagtttgagaaag

SEQ ID NO: 362630 - DNA, 525 bp, Homo sapiens
gtgaatgccttcctcctatggccacaaaagcaaaaactggaatctcatgatgctgtcactggaactgaagctgtagggccacccaagggatgactaatcttattaaaaagacggttggtactgaaaactaatccttcttggttgggaaataaaccgcctttgccagaaattacttgaaaaaaatatcttgaatgaggtttcagtatttgcttcattacttttcatgtggcaaagaatgaaaataagatacccacggaaaaaacaatttagatgccactggatcctgagatgwctaaagattcttctccctgcctgcatccctctccacccacccacccaaagccagcatgacataattttctcccaaatctctatgagtaacatgtggtaatgttaaaaccaacactctattagttactctatgacttctgtcttgccatcactgcatttatcatttcctgccctctttcaaacagaatagagtggtgcagttaaggaggaaaaagaacacatagtttgagaaag

SEQ ID NO: 362631 - DNA, 525 bp, Homo sapiens
gtgaatgccttcctcctatggccacaaaagcaaaaactggaatctcatgatgctgtcactggaactgaagctgtagggccacccaagggatgactaatcttattaaaaagacggttggtactgaaaactaatccttcttggttgggaaataaaccgcctttgccagaaattacttgaaaaaaatatcttgaatgaggtttcagtatttgcttcattacttttcatgtggcaaagaatgaaaataagatacccacggaaaaaacaatttagatgccactggatcctgagatgtctaaagattcttctccctgccygcatccctctccacccacccacccaaagccagcatgacataattttctcccaaatctctatgagtaacatgtggtaatgttaaaaccaacactctattagttactctatgacttctgtcttgccatcactgcatttatcatttcctgccctctttcaaacagaatagagtggtgcagttaaggaggaaaaagaacacatagtttgagaaag

SEQ ID NO: 362632 - DNA, 583 bp, Homo sapiens
agttaaattttcactctaactcctctaatatttaacagaaagatttaaaacatgcatgaaagcttagaaactacaatctaatgacagattaaaagaagcttattaaagaaaagttgagtcttttctcttctccaagcatagaaaagatgactaggaagatgttggtcatctttattttggaaaaataaagctgctttatttttccaatacacagcaaatttaaaaaatcctattattayatgtgaaagaatttactaccaacgaggattttggagtcctggaatgggtgacttctttggaaaactgtaagataatcttagagaagaatgtatttgaattaatttaggcaacttttttgagtaaggttacatgacatgatctcttgaggtcccattcaattcgatgactctctggttatgtgatgctaaattttggaatgattgactagaatgccttaagactaaattctactcatttatttcagtattacttatgaaaaaaaaagccctagaaattaccactttatgcactggttatagcagccagcattttccccaagctttgtagtgatgcattttggaga

SEQ ID NO: 362633 - DNA, 583 bp, Homo sapiens
agttaaattttcactctaactcctctaatatttaacagaaagatttaaaacatgcatgaaagcttagaaactacaatctaatgacagattaaaagaagcttattaaagaaaagttgagtcttttctcttctccaagcatagaaaagatgactaggaagatgttggtcatctttattttggaaaaataaagctgctttatttttccaatacacagcaaatttaaaaaatcctattattacatgtgaaagaatttactaccaacgaggattttggagtcctggaatgggtgacttctttggaaaactgtaagataatcttagagaagaatgtatttgaattaatttaggcaacttttttgagtaaggttacatgacatgatctcttgaggtcccattcaattcgatgactctctggttatgtgatgctaaattttggaatgattgactagaatgccttaagactaaattctactcatttatttcagtattacttatgaaaaaaaaagccctagaaattaccactttatgcactggttatagcagccagcatttyccccaagctttgtagtgatgcattttggaga

SEQ ID NO: 362634 - DNA, 581 bp, Homo sapiens
attccaacatttcttatttgtaatagtgtctgtttattttmttttatcaaacgtagggcttttctccattagtcttacttagctttctttgagttaaaagtatagccctataaaaacggatgaaatcatctgctcattgactttctactcagcaaacatttttttattttcttcaactacaactctcataattttcctagtcaccattcttctcatctatttttacattccttagttagcatgtcagcccaaaatgcctcaacccatcagttaaattagttctgtttctacaacagctcacaaaagggtttactggtgaaactcttcctctaatctagcttttcttgctgcatgtactattcctttattgaccttagtttggagagctttaaaataatacgtatcagcaagggttgtatgctttctaatcatatgttttctcctgctaatcattcagttacctgattagaaacagatgcaacctatttgaaatgtgaacttcagtgaactgctagtaatggttgcatattttttagatactctatgtatacgttatgaaatgccctagaaggttttcaata

SEQ ID NO: 362635 - DNA, 581 bp, Homo sapiens
attccaacatttcttatttgtaatagtgtctgtttattttattttatcaaacgtagggcttttctccattagtcttacttagctttctttgagttaaaagtatagccctataaaaacggatgaaatcatctgctcattgactttctactcagcaaacatttttttattttcttcaactacaactctcataattttcctagtcaccattcttctcatctatttttacattccttagttwgcatgtcagcccaaaatgcctcaacccatcagttaaattagttctgtttctacaacagctcacaaaagggtttactggtgaaactcttcctctaatctagcttttcttgctgcatgtactattcctttattgaccttagtttggagagctttaaaataatacgtatcagcaagggttgtatgctttctaatcatatgttttctcctgctaatcattcagttacctgattagaaacagatgcaacctatttgaaatgtgaacttcagtgaactgctagtaatggttgcatattttttagatactctatgtatacgttatgaaatgccctagaaggttttcaata

SEQ ID NO: 362636 - DNA, 455 bp, Homo sapiens
tttgttaatcatatgtattaaaattacattttcaaatcaagctaccagaaatttttcaaactagtggaagcttagagttaatttttaaatgtttagttggaggaataagtattacccttaataaaagagcatcctaataaaaattgcagtacaaagatgcaaataaataaatgtcagtgctagaaaatacattacatttagttgaggatctctacaacttggagtagactgattgattgattataaaatccccggtatttccatatgtattaagacaattgaaattagaatggacaatggaacttccaataaawactgtgggaaattcttcactaacttatagatgaaagataacaggcaaaactcattttacagtattatagtctacttattatttgcaacagaaaaaaaaattctgaattttaagggcacacacaaacattatattggagtca

SEQ ID NO: 362637 - DNA, 577 bp, Homo sapiens
atacctacaacaatttttcagagggttcaagttaatttcttcttctcttgaaaaaccagcactttataggccataactgtgtcacatgggtgcctagtagtgtagttatctactgcttttatcttttttaaatgttttataacctatatataagagtaagtttaatcttctataaacattatttagggaatgccaattctatgtgctttctacctactacatcttctagctattttgtaagccaaatctaaatgcyctgcaggactacatttctgttgcttggttttggtgtaccttttctttctttctttttttttttactactcaacattcgtttctctgggtgacatcatctcaatttgggtacaggggaatctgcttgttctattgcatgatctactgggactgtctaccaaggtatcttgcccttgctatagcctatgctgaagtctatgattcagtccttttctctggaatttgacaagtgcagagtgacaggaagcctgaaagtggcaacaagaaagaggcagaaactcacttatccctgaggaggttgtccatctttccctgcactctg

SEQ ID NO: 362638 - DNA, 595 bp, Homo sapiens
tttctagcttttccagttggagaaatacacaggtagtgtctacactcctgacctgtgaatctatttagattgtgattgagaagtgtaattggggcattaattaatatttttctacaattcttcagtatttactacttttagcaatgactacaatccagaatcaagcaatttggtaaataatgagtaattgtaggtgctttcttattagcaacttacttcttctaataagcagtttagcattctggaaggtttcaaaattttggaaaatactatgagcaaaaaaaaaatggttaaagtaatgatatccatattcaataaaatgaattttttttaatttaaattcatctgcaaactccctgcttcccaaccagaaatatttaagttcaatcaaaaaggaaaggatcagggcttattctcaaggagtcatcttattctaaagataagtaataggaacaattaatcttcggagaagcatatcaaaaagtattgaattaaatcctkaaaggaaataataaaatgactaacagaaaacattgcagcatactaaaatgttggtagaagagacttttaaaaatggatcaagagactgaaaaat

SEQ ID NO: 362639 - DNA, 603 bp, Homo sapiens
acatactaatttgatgtgcaacctcagagaaggtacttgacatttctgggcctcattttcttctttgtaaaggagaggggttgccctgaacgacctgyagtttctttccaccttggaagtccctgggattcagaacctcccgcctgtgaggagtttggcaaagatcattggtctggcccttgtgatctgcccatgaacacagtgtatctgtgtccaggccaccacagccagctgggagccaaaatttattctgtacacagccaacagagcagaacttgaagagccaagtccaagggccaggcctgacctcatttgtccttaagtggcatctcttctgttttgacctctttaaaggtagctgcttttgcaggctttgtggaaatcagagggagcatggaggtattttgcttcaatttacagaactgaggaaaatgagtgagctaaatatacttaagatgagtggagtgaagcattagccagaatgctggaggtacaaagacttaaattaataggaaacttaccaggagattattcaacaatgcaatcaaccaaccatgcaggttttgtttgtgcgttgactaaaaacaagcctgcttgatggtt

SEQ ID NO: 362640 - DNA, 624 bp, Homo sapiens
gatgcacttagtatcattacttaaatgatcttgatgtgttgccagtatggaatgggccacttgattcccaatctgcttcctcagtttcatcccatccggttacccctgggccttaataaatctataagtcaaatggatgctttcaaacttaataatctccatcctgtctcagatgggayaagagaaagatcaaggatcatggtagtgaaaactaaggttaataaccctacctttttagctcctaggaatgccagacttcactgagaagttgggaaggaaattataggctcatgatcctctgggtcagtccccttcaattggtgtcaaaaaatgagaggtcatagatcagagaatcaagctatcactttcaagaatgctcttttctttttcctactcaatgaatatattggattttatcaaagaagtctgaaaggtcctttgaatagacatcatatgcaaaattttgttcttctcttcagatgggcagaagatcatgggttttgtcagatttcagaagagcgtagaggaatctattttcaacaactctctgttgttgaaacaacaattgtattcgtcagggttctccagagaaacagaaccaacagaatatgcatgtgtgtgtat

SEQ ID NO: 362641 - DNA, 341 bp, Homo sapiens
ctggtaaactaatttagtaaaattgtaggacaaaatatcagcatgcaaaagccagtagtgtttttatataccaataatgaaatacgtaaaaagaacaggaaagcaattctatttacactaactacaaaaaaatagcaataacaacaacatgtctaggaataaatttaaccaaggaggtaaaagacctttacaagaaaaacttcaaaacttgatgaaagaaatcgaagaggacaccaacaaatggaaagacaccccatgctcatggatcagaagatttaatattgttaaaattatcatactacccaaaacgatgtacagwttcaatgcaatccctatcaaaa

SEQ ID NO: 362642 - DNA, 515 bp, Homo sapiens
tattgagaacatgtgacaggcaaaactcagtagtaggcactatagagatatataaatacaattccatttctgctcaaaacatgtacaatcaagtaaggcatttacatatgtactacacagtaaacattagcatgttatacatttcataaaaaagctttgaaatgctgtaactttaatcctttaaacccatctttttcaacttacaaaacacacagaacttttaaaagaaactattgcagcattcacttgagttatttttatcatgctattattcaaataagaacaaacataaagcttatggttatagcatgtgatacctataaaatcaagacacacttataaattgtaaccaagcaaaattattctttattgtgtcaactgtttcgggctacaagatgccttgaacaagctaggaggagcttgatggagagtgatctggggtcagggagactattggttgggagcmcccattcctgggaagtagagctttaggctagggtatatatcagagtctg

SEQ ID NO: 362643 - DNA, 583 bp, Homo sapiens
agcccagcatctaaatcattttttgactgaaatgagtacaggcaagctctgaggcagctctatccagggctatgacaagaatgaagtgaacacattttaccctacatggaaatgtccattccaacaagtgctaatttgacaatggtaatgattactatgggttgaattggattatcccaaaagatatgttaaagtcctaacccctggttcctgtaaatgtgattgtatttggaaataggatggatgcagatatcattagttaacatactggagtagggtggatctttaattaaataaaactgatgtctttrtaagaagagaagagacacagacacagagggaagatgaccatgtgaagatggaggcagagattgaaattatgctgccacaagccaaggaactcttggggctaccagaagctggacgagggcaagggagaattgcctgtagagcttcgaaggggacatagctcttctatcagcttgatttcagaattcctgcctccagaactgcgagacaaaaaagctctgttgttttaagccacctagtttgtgttactttgttatggcagcccttggaaatt

SEQ ID NO: 362644 - DNA, 549 bp, Homo sapiens
ttacactggtcttccttaagtagaaaaaaaattaaagaggaagtgaamgattttcttctagctttctgtagggctaagggaacacttaggcttgaatggggcagagaagtcaagaactagaagaaaacaacaataataaaagttaacattttttgcattcttactttgtgctggacgctattctaagcttctcctatgaattatctcagttactgtccccaacagccccatgaggtaggtattactactctccctggtttacagatgtgaaaaccaatgcgcaagaagtatcctgtccaagggcacacatttggggattggcaaagctaggatttaagctctggaattttggccctcaaacctgaacttttaactccttgtccacacagggaaggaaattaaaaagagaaactttcatgctcaagcttctacgtgtcctatgtgaccaaacttgagatcttaagctgcaggttcgctgggatttccatcatcccaggctggctcttcatccacagactagggtgcttggagaatgaaaagagactcaca

SEQ ID NO: 362645 - DNA, 487 bp, Homo sapiens
ccccaacagccccatgaggtaggtattactactctccctggtttacagatgtgmaaaccaatgcgcaagaagtatcctgtccaagggcacacatttggggattggcaaagctaggatttaagctctggaattttggccctcaaacctgaacttttaactccttgtccacacagggaaggaaattaaaaagagaaactttcatgctcaagcttctacgtgtcctatgtgaccaaacttgagatcttaagctgcaggttcgctgggatttccatcatcccaggctggctcttcatccacagactagggtgcttggagaatgaaaagagactcacaagaagcaaagccatgaaactgataaaggcatctgtttttctaatgctttttcataaacatactcattcctctataatttcaaatatacagctttctccaaaactccctctacagctcaaagtctgctgaagcccagattttggtgaagctgcaa

SEQ ID NO: 362646 - DNA, 523 bp, Homo sapiens
caacttccacaagagaaattccacagaattcaaattcttatttcatgtccaaatcagcacatagtaattgatttttttgccatctagtaagttttacaaataataatggaccaggggacactgatatataaaaacacattgtcttagtccattttgcattgctataaaggaatgcctsatactgggtaacttataaggaaaaaaaagctcataattgagatgatttggttcataattcttatgtctggaaaagttaaagattaggcatctgatgagagcctcaggctgcttccattcatggcagaaggtaaaggggagccagcttgcgcagacatcacattctgagagaggaagcaagagagagaggagaggtgccaggctctttttaacaaccagctcccttgggaactaatagagaacttactcctcaccctaacctccacctccaccctcagggaaggtgttaatctattcatgagtgatctgaccccatgacccaaactcctcccattagaccccatct

SEQ ID NO: 362647 - DNA, 523 bp, Homo sapiens
caacttccacaagagaaattccacagaattcaaattcttatttcatgtccaaatcagcacatagtaattgatttttttgccatctagtaagttttacaaataataatggaccaggggacactgatatataaaaacacattgtcttagtccattttgcattgctataaaggaatgcctgatactgggtaayttataaggaaaaaaaagctcataattgagatgatttggttcataattcttatgtctggaaaagttaaagattaggcatctgatgagagcctcaggctgcttccattcatggcagaaggtaaaggggagccagcttgcgcagacatcacattctgagagaggaagcaagagagagaggagaggtgccaggctctttttaacaaccagctcccttgggaactaatagagaacttactcctcaccctaacctccacctccaccctcagggaaggtgttaatctattcatgagtgatctgaccccatgacccaaactcctcccattagaccccatct

SEQ ID NO: 362648 - DNA, 615 bp, Homo sapiens
tctgacctctattgtcccttcccctgtattgactttctaatgggaatctccatttgtgatggggtggttgggatcacccgttccaggctgttgctggtttcctttcagtccagtggcatggggaaggggagagggggtacatgatctgttaaagtaagagtggccttgagattctatttggatttgctttcatggctcctttccaaaaaagaacacatttgttcctctctgaactttaatatcytcatctgtaaagtagggtaagccaattcatttattattttttgagacagggtctcgctcttttgcccaggctggagtgcagtggtgctatcttcactcactgcagccttgacctcctgggctcaagagattctctcacctcagcttcctgagtagcagggactacaggcatgcactaccataccaggctaatttttgtagagacggggttttgccatgttgcccaggctgatcttgaactcctgagctcaagtgagccacctgcctcagtctctcaaagtgctgggattacaggcatgagccactgtgcccagcctgagcaaggcaatttaactcatagaattgttataaagattaaatgacacatcatat

SEQ ID NO: 362649 - DNA, 462 bp, Homo sapiens
ctgctcttacagtaatggagattaacttggccagggagacattgtgaaggaacaagtgttaccaaattgattgaagtgaatctcctctgtatttctgaagctccatgtgcatgactctgtcattaccttcatcacactcccttctcatttcctgttgagttgcctttcttctctccttggctgtgaactctttgagggcaggcaccatgttcaactcatcttaaccctacacagtgcctggtccaaggcaggmactccatatgtacttattaaatggaaggtttgatgggtaaaaatgaaaagaagtgagaaaaattgtttcctaaaatccaaattgtgagtaggtaggtgtctttgctacacaaatacttacttttaaaactatctccctgttcaagaacagattctccttcatttagaaagcctgtttaaggcctctattaagcctagccatgtagctat

SEQ ID NO: 362650 - DNA, 556 bp, Homo sapiens
acactgtgtcctcacatggcctctcctttattacagctctctggtgtctcttctcatttggacaataatcccattaaatcagggccccacctttatgacctcatttagtcttaattacttccttccttactcttattacagccacaaatggrggagttagtttttcaacatatgaatacttgggaggacacaacattcagtccataacaccaagctgcggatcctcacacaggacttgggctcttctactgccagggcttggctccacccatttccttgacctggaatggcttttgcccggtgaattcgtattccaactctctctgctacagatgccatctcctccacaaagtgttctccatctccttccccattcctcccccagttggaagcgaaagttctcctggcttttttcaggtttacataggatttcttttctctatttctctccttgtattcttgtcctggcccactatctaggctgtggctttcacttctggctgtgcagagttattttagagattttaaaagttccaatgctaagcccaattccaga

SEQ ID NO: 362651 - DNA, 588 bp, Homo sapiens
ggaaagaggtgggagaggtaatttcttttaactcaactgcatctggtggattaaggtagacaatattaccattttgctgacagaaggcagacatggcactaaagagggagaatgagcaaccacagagctgatttaatttccagtggggtttatggaagcrccaaaacatgatgtagccaaatgttcctaaaagtatgaagtaatttaatttgttccatcattacaagaaattaaagccaagcacaattacatcccagtagtaaaaggaacccgctgaattgccattgttattgactaaatgaagtgagatttctgattaccttgtccagcacattttaatttctgtctgtccatttattccaaatcacattacagggccttaactgatcttgacaaaataagctacattattaaggtgcagtttaacctgagaagctttaattactagattagagttttcaaatgggcatgtcttctagacttcagtacatttagggatgtaattattagagattctttgtttctgatgtgcaaaagagacccaagtttaaaaggaagacttaaacttacggaagtgatttttttttt

SEQ ID NO: 362652 - DNA, 572 bp, Homo sapiens
gtcctatttaaataattttcagaatcatactgtgatataggtactgctttctccattttataaattagaaaacaagctaggttaattcacttttataaggtgccaagctagtcartcagtggcaaagctcagatttggaaacaaggactgccttactccaaaaactgttctcttaaatttcagtgtttgtaaggtccctcactgccccagcataacccagcatttggtccattcaaggattaagaggaacagggatctgccagccttgtttctgcagaaaaaaatgggggaggcagagctggatctaaccaaacaggttaaatttaagtgccaggtttccgtgaaggagaattatgccagcaatggtttctcaccttaatgaattcatttctaaccattctttgccctgcaaagacagcaggatcctgggtccacagggcccagttcatggagaggagaaagaggcacataatgggagcaaaaagtgaagaattcaagctgcaaaatgtaacggaattctcaaagtgctgggttctcttcactcccttatctggcagctcctgttttttctc

SEQ ID NO: 362653 - DNA, 572 bp, Homo sapiens
gtcctatttaaataattttcagaatcatactgtgatataggtactgctttctccattttataaattagaaaacaagctaggttaattcacttttataaggtgccaagctagtcaatcagtggcaaagctcagatttggaaacaaggactgccttactccaaaaactgttctcttaaatttcagtgtttgtaaggtccctcactgccccagcataacccagcatttggtccattcaaggattaagaggaacagggatctgccagccttgtttctgcagaaaraaatgggggaggcagagctggatctaaccaaacaggttaaatttaagtgccaggtttccgtgaaggagaattatgccagcaatggtttctcaccttaatgaattcatttctaaccattctttgccctgcaaagacagcaggatcctgggtccacagggcccagttcatggagaggagaaagaggcacataatgggagcaaaaagtgaagaattcaagctgcaaaatgtaacggaattctcaaagtgctgggttctcttcactcccttatctggcagctcctgttttttctc

SEQ ID NO: 362654 - DNA, 608 bp, Homo sapiens
tattaaatttcacattcagttttaaatccaaacatagatctcaacattaagaatatggattttagggaaagyaactagctgctcaaattcatttagctgaaaaactactgtcgaatcaccttgaaaacatacactaatgcttgcacattgctaagtggcttttgattctgctcttcattttcttacacagaatcaaccacacaatagaattaagaactcaggcccatggcaaagtgctcccatttagcagttaggacactggacatattcagcatatgtctactgctattgagaatcaaattatgaaaacaaactatattttataaaactaagaatttgttactcagatgagaataaaggtgcctaatgccacagcagggggtaaaagtcccagtaagagagcaataattggtcattctgatgaggagctgtgccaaatttagaaatgaggcacaaatgacaaaaaaattgatcatcagtgtggacatgggtaggtcagtgtgcatatgggtaggttagtatctgctggccgtgtctacagagccccttttatttatttgaagccaacttttcacttgacaatgctacctacaaaagcactgttaata

SEQ ID NO: 362655 - DNA, 628 bp, Homo sapiens
ggctaggaaaaaatatcctaatttttcagccacaagacataaacattgctagaatgactacattttgaaaaaattatcttctcactttacctagatttcattttaaccaaacagaccaacctctcctattaaacctgtaaattaactcaaagtctaatctggggccttcataataaagattttttttttaaatccctgtcttatctggtgcctttaaaagaaaggaatcattttaggcaattattatgacctaaaaaatttttaaatcttaacgtatagattaattccttgacagctgaagtcatttacaatacattattaaatttcacattcagttttaaatccaaacatagatctcaacattaagaatatggattttagggaaagtaactagctgctcaaattcatttagctgaaaaactactgtcgaatcaccttgaaaacatacactaatgcttgcacattgctaagkggcttttgattctgctcttcattttcttacacagaatcaaccacacaatagaattaagaactcaggcccatggcaaagtgctcccatttagcagttaggacactggacatattcagcatatgtctactgctattgagaatcaaattatgaaaacaa

SEQ ID NO: 362656 - DNA, 628 bp, Homo sapiens
ggctaggaaaaaatatcctaatttttcagccacaagacataaacattgctagaatgactacattttgaaaaaattatcttctcactttacctagatttcattttaaccaaacagaccaacctctcctattaaacctgtaaattaactcaaagtctaatctggggccttcataataaagattttttttttaaatccctgtcttatctggtgcctttaaaagaaaggaatcattttaggcaattattatgacctaaaaaatttttaaatcttaacgtatagattaattccttgacagctgaagtcatttacaatacattattaaatttcacattcagttttaaatccaaacatagatctcaacattaagaatatggattttagggaaagtaactagctgctcaaattcatttagctgaaaaactactgtcgaatcaccttgaaaacatacactaatgcttgcacattgctaagtggcttttgattctgctcttcattttcttacacagmatcaaccacacaatagaattaagaactcaggcccatggcaaagtgctcccatttagcagttaggacactggacatattcagcatatgtctactgctattgagaatcaaattatgaaaacaa

SEQ ID NO: 362657 - DNA, 550 bp, Homo sapiens
tgaaaaactactgtcgaatcaccttgaaaacatacactaatgcttgcacattgctaagtggcttttgattctgctcttcattttcttacacagaatcaaccacacaatagaattaagaactcaggcccatggcaaagtgctcccatttagcagttaggacactggacatattcagcatatgtctactgctattgagaatcaaattatgaaaacaaactatattttataaaactaagaatttgttactcaratgagaataaaggtgcctaatgccacagcagggggtaaaagtcccagtaagagagcaataattggtcattctgatgaggagctgtgccaaatttagaaatgaggcacaaatgacaaaaaaattgatcatcagtgtggacatgggtaggtcagtgtgcatatgggtaggttagtatctgctggccgtgtctacagagccccttttatttatttgaagccaacttttcacttgacaatgctacctacaaaagcactgttaatagataagacaatcaagtggctgttatgccgtggccttttt

SEQ ID NO: 362658 - DNA, 605 bp, Homo sapiens
tgttcagtgccatcttttcaatcattggttacaatgaagctgggagtcccctctgaggttcggcgttctgtggctcctctcccctgcactccaactttctcaaagcctgagcctcaagtgatttcccagtagytaagtaaactgcccccttcctccatcttcaccaagttcccaaagcttttcagactcaggcttcaaatctaacaggatgtggctccacacattatatttcagttgttattttttaatgtggaaaataattcaggaaagttttggctaatgcttcaagacatcatgcactttatacacaggatttgttcttaagaaggtagtatagtgacaggaggaacaatttacttcagaatatccattttatgtccaagccatgcaccagccacttttgacagacaggatttgagtatgatgataaaatggggtaagcatatattttaagttctaacatctgtataaataagaaaaatgaaaaatcactggaacacatctacatgctagtgagaaaataattactaacagagtaaagtttgctctgtgaaactgttgctcaaataaagaattattcttgatattagcatagagctgagaat

SEQ ID NO: 362659 - DNA, 473 bp, Homo sapiens
ccacaccaagcaacacacctaaatgtcgacagctagcaggacaaaaacagtgagccagtttaattttggcttttaccaagaacacatactgcattcattaataaaatacttcccctcaacccctgccagagtagtatacactgtggctctccttaaaaatacatgaaaactctttaactgcaccaaatcttgctaagtcaaggaactaaacagagaaaaacacccamgcaaaaactattggctaaactccctaaaggctgggagagggctatggaacagcaactgagaaataaattgagccttgaaggcccctgctacaacagcatcagttttcttcaaggcacctttgaactatgtaacacccgcattctgctgaggctcttctgtgaacaaacagtcctcaattcttgcgggccagcacttggcttctgtcacagtgatatgcttagaggttcccctgacacatggcctga

SEQ ID NO: 362660 - DNA, 400 bp, Homo sapiens
ttttgctgacttaattttttttcctctatacattttatctgatgggaaatacatgaaggctttggattctctttcaatgtgtacatgtaataggtttaagcagagtttgctagtggcaagctgctctcatctccaagtgtatttctggcatcaaattattgttttgaagtattttaaaattgtayaaaatatataaaactttatttagtacttcataaagcttccaaaggaaagatgtgtgcaattttgtgacggttttctttttcttttatcttctcactaactacaattgtttttccgaatgttgcctatgcctctagtagaatttttatatgaaataaacatgaggttggctttcattgacttttagtcccaccagtaactcaacatttatttagca

SEQ ID NO: 362661 - DNA, 590 bp, Homo sapiens
ttctagggccttatttcacctatagattggagataataacaagagccttgtaagttattttagttcaagtgagaggttgtgagttaaataatcttgcattgattgcctaatagattcttttcccttcctcctccattgtatcttcactttctcctggactcaagtctctaacttaaatgcaaacattctattaattttagtgagcctatcaactaatacctaggtataacctcggggtccagaaacttaatagwtacctggaacagtttttagggtagttagaaagaaaaaagaatttcaaggaatgaacagggattcattctgaagaagttcacttagagaacacaggccattcaggaagctacaaacaggtagggatataaagtttagatcagacagtggacaaagataaagatggagaactagtcttggaggacttgtatactattctaagacaatattttcttctaaagaggccattaaaaatcttctaagtgaggaagtcacatggtcagatttgcttttcaaaaagattactctgggaatagtataaaggcagatcagaaaagtaaagaccagttaagaggtgg

SEQ ID NO: 362662 - DNA, 383 bp, Homo sapiens
gttgttcattatagttagcctggatggggtcagctatgtttgtagagggaattcctaaactgaccagttacttgtcaaggatcccatccaataccatgatcctggaattctgtgagtttagctcaactgttcttcaggggtacatgttttctatttgaaattgaggtatyctcagaaataaagctattaataaatagaaagttctggagtatatttacactcactctgcttatctccactcctacccctaccatattcccatccaatactttgccagttgacttaccaatttcttcttaatttctgtaactgtcaccttcagtcaaattctcatctgtgtatttctagattcatataatggtctactactggatctccttgga

SEQ ID NO: 362663 - DNA, 595 bp, Homo sapiens
aataaaacattataatagtcctctttggttagtatcaatattattaggtcactttatcaaaaggatagaaatcaggatggcagacacccttctctaaccctcaccccccaaaataataaaataaaaactaatgttattccttcacatatggaaatgaatgagttctactgagtatctagtatgattcctgactcagtcgagacaattcccatcttttaattcattaaatcaccacagcaactatttaacagatgagaaaactgaagcacagaaggcaacrtggcccaatttacgtttggtaaaaggcagagaatgaatccaattcaggcaggctgtctatagtagggtgctctaaatccacggaccattctgcctaaggaatgaatattttatgaattggaatatttctgctgaacgaatttgccattttctcctctagtggagaaatccaactgagggtaaagaaggaaaaatgttgattgtttaaaacaataaattagtctctaaattgttcttgcagctgatttagactagtgtgtccaaaagtatgcccagtgttagtaaatggtaggcaaaatgctttaaggtggtgcaa

SEQ ID NO: 362664 - DNA, 477 bp, Homo sapiens
cacagtgatattctctattctattttaattcacggttagtgctcatggcaaccatcttttgactttattatctactctgggtcacaagcttagtgtttgaaaaattttatctaaagtttacactgagtttacatttataaattcatttgctctaatactgtgaagaatgtagagaagattccaatattataattcccctatttaaaatgaaagaaagtagagatgaattaacatgcctaaggtcacccagctaatttggggtcaaatttccaacatttccactgtgccaggtacctttctcccccaytcccagcccagactcaccagcacattgttggaacaaagagtgggtgtatgatatagtttggatatttgtattctccaagtctcatgttgaaattgatcccccaatattcaaggtggggcctattgggaagtgtttgggtcacgatccttcatgatccacttggtgctgtc

SEQ ID NO: 362665 - DNA, 351 bp, Homo sapiens
tgtctgttggcttgggatttgtaagcagctggcaaacaccctgctaaaacagccatgatggttgaaggggctccagcctaagccggatgctgcccgtgctccattcctttcattgaggcatacatcctgcaagaagttcagctaagatctgtcttgcctcatgttgtgagtctctgccgggcagaggcacrctcccatctctgctcttatctctgctccttactttcttgacagcttctttcattttctataattttttagggggtcaggggctctttaactccaagttccccagtcaatctggagaattctgaccatatagcaaggctatgcagacatagggtgagttaa

SEQ ID NO: 362666 - DNA, 586 bp, Homo sapiens
tggtaaccggcccttgactgttatcatgcacaccatttttcaggtaaggtggttgagttstattacatttattttatttaggaacttaatgtccagtctgtagcttatgcatacattttgtcttttttaatattccccaccttttgcttatttttatacttttatccttatttgctcctttgccaagggacaagtaaagatacagaaaggtggagtgtggataaaccacaaataacatcaattttgttattttttttgcatttaagaaaaagatgtgatatagccaaattgaagcaatttattaaaataataatttagacatcatcttagtcatctgaacctgactgcatagagaatggagtactaacttaaaaaaaatgaataaagcccctgctggctactaaccttagaatatagttttttcagtcactttcttgtgtcctgcttctttcttcatatccatttctctctcttattgaccctttgctccagcttagggtgggatttaaatgagaagttgaggctgctgtagatatctcgggaccgaaatgggaaacttcagccctagagaggacgttgattttta

SEQ ID NO: 362667 - DNA, 586 bp, Homo sapiens
tggtaaccggcccttgactgttatcatgcacaccatttttcaggtaaggtggttgagttgtattacatttattttatttaggaacttaatgtccagtctgtagcttatgcatacattttgtcttttttaatattccccaccttttgcttatttttatacttttatccttatttgctcctttgccaagggacaagtaaagatacagaaaggtggagtgtggataaaccacaaataacatcaattttgttattttttttgcatttaagaaaaagatgtgatatagccaaattgaagcaatttattaaaataataatttagacatcatcttagtcatctgaacctgactgcatagagaatggagtactaacttaaaaaaaatgaataaagcccctgctgkctactaaccttagaatatagttttttcagtcactttcttgtgtcctgcttctttcttcatatccatttctctctcttattgaccctttgctccagcttagggtgggatttaaatgagaagttgaggctgctgtagatatctcgggaccgaaatgggaaacttcagccctagagaggacgttgattttta

SEQ ID NO: 362668 - DNA, 586 bp, Homo sapiens
tggtaaccggcccttgactgttatcatgcacaccatttttcaggtaaggtggttgagttgtattacatttattttatttaggaacttaatgtccagtctgtagcttatgcatacattttgtcttttttaatattccccaccttttgcttatttttatacttttatccttatttgctcctttgccaagggacaagtaaagatacagaaaggtggagtgtggataaaccacaaataacatcaattttgttattttttttgcatttaagaaaaagatgtgatatagccaaattgaagcaatttattaaaataataatttagacatcatcttagtcatctgaacctgactgcatagagaatggagtactaacttaaaaaaaatgaataaagcccctgctggctactaaccttagaatatagttttttcagtcaytttcttgtgtcctgcttctttcttcatatccatttctctctcttattgaccctttgctccagcttagggtgggatttaaatgagaagttgaggctgctgtagatatctcgggaccgaaatgggaaacttcagccctagagaggacgttgattttta

SEQ ID NO: 362669 - DNA, 600 bp, Homo sapiens
tggcctgtcaggaactgggctgcacagcaggaggtgagcagcaggcaagcccgcatcagtactgcctgagctcygcctcctgtcagatcagcagggacattagattctcctaggagcgtgaaccctactgtgaactgctcatgcaagggatctaggttgtgcgttccttatgagaatctaactaatgcctgatgatctgagatggaacagtttcatcccaaaaccattctctccctgcgcccccagtttatggaaaaattgtcttccataaaacctggtgcctggtgccaaaaacattggagactgctgctttaagggctcaaaagaatgaagaatagagcaggtcctcattacccttaaaaaatgtatcagagtacttggaagacagtgacctttctatcagttgttttaatttgtcttctaaatctactcttaattctaagggaacatataatatgctatataacagaatgcaaagaaaacataccagtttgaatgtttggtgtttaagatagatatatatatatacctttaacacaaaaattttatgtaaaaatacattttatgtatttactaaaaattgataaaattcagaatatc

SEQ ID NO: 362670 - DNA, 600 bp, Homo sapiens
tggcctgtcaggaactgggctgcacagcaggaggtgagcagcaggcaagcccgcatcagtactgcctgagctccgcctcctgtcagatcagcagggacattagattctcctaggagcgtgaaccctactgtgaactgctcatgcaagggatctaggttgtgcgttccttatgagaatctaactaatgcctgatgatctgagatggaacagtttcatcccaaaaccattctctccctgcgcccccagtttatggaaaaattgtcttccataaaacctggtscctggtgccaaaaacattggagactgctgctttaagggctcaaaagaatgaagaatagagcaggtcctcattacccttaaaaaatgtatcagagtacttggaagacagtgacctttctatcagttgttttaatttgtcttctaaatctactcttaattctaagggaacatataatatgctatataacagaatgcaaagaaaacataccagtttgaatgtttggtgtttaagatagatatatatatatacctttaacacaaaaattttatgtaaaaatacattttatgtatttactaaaaattgataaaattcagaatatc

SEQ ID NO: 362671 - DNA, 417 bp, Homo sapiens
ccactggggtatgaaaaatactcttgcagctagcttggtgtctgcccaaacagctgcccagttttgtgcttgatacccagggccctggtggcatagtcacccaagggaacttcctggtctgtgggttgcgaagactgtgggaaaagtgtagtctgggccgaagtgyactgttcttcaaggcacagtcccacatggcttcccttggctaggggagggaattccttgaccccttgcacttcctgggtgaggcaatggcccaccctccttcggctcgccctccatgcgctgcacccactgtctaaccagtcccaatgagataagctgggtacctcagttggaaatgcaaaaatcacccaccttttgcattgatcttgctgggagctgcagactggagctgttccttttggccatctggtc

SEQ ID NO: 362672 - DNA, 486 bp, Homo sapiens
tgagtttttatatgtgtgtgtcaaatggctccttaagtgtcttgtgcctcaatggtcaccaggaaaggaatcaaaggtttatttggtcagaagtaaggcaaggtactattgtctcaactgataagtatcacgagggcagaggggcaggcagctcttctgagttgtctccagagacatcacttagcagcacttattttcctctgtgatggtgagaacacgtggatgacatttctaacgctgctctgaccagagcctaaaacagatatgcttagctgttgtggttcatgtaatgaatctggttacacccacagttaactggaaagttttggattccagcttgaaagatgagaaaaacatcctctcatttgtcttcatgattattttgtttgtttgtattttatggtttaatggcaataaatagcaacattatcrttatatttcttaggtcagaaaactatgtctttttagatatctgcactctcatgt

SEQ ID NO: 362673 - DNA, 574 bp, Homo sapiens
ctagttttctcattctggagtcattcctgaagggatttggaacctttgaatcactttgcaatgaatgtggagtcacaacaactggattctaatccttactcttttgcttattcttgctctgtctcctcagaataatcatttaacctctttagcctcactgtcttcaactacagaattgtgacaattgtgttacagagcagctactgtaatcatgtgtttgaatatccttcaaatttgtccacttttcgtctccctccagcactcactctatcccagaatagatcgtttcttctctgaaccattgttaatagcgtttaaactgattgacctgtatctatactgccacttatcccatccattcctcaccctgtgatataagctatctatctaaaacataagtctaataattccatctttctcattcaaaccttccaagcctttccatggcttctgaaataaatacattccttaaattgcctgaagaccctacaagcttaaatttatttctctgttcwtctccaggccctttatgtaccatgctcctccaagccaccttaactccagccacagcatt

SEQ ID NO: 362674 - DNA, 315 bp, Homo sapiens
tgtttcccctttgccttctgccatgattgtaattttcctgaggccttgcccaaagcagaaactgccatgcttcctgtagagcctacagaaccataagccaattaaacctcttttcttcaaaaattacccagtcttaagtattcatttacagcagtggaagaayggactaatccagagatgaaaagttttattattcacataatgaagcattctataggagtgcacagcagttggtccaaaaatgaattgagagagccaggaaagctgactagcttagctcatatgttggtacattgattatgttggttatgaatt

SEQ ID NO: 362675 - DNA, 541 bp, Homo sapiens
aatttaaaggaatagtggagtttatacaaagttaatttgtaaaaataagtcttttcacgttttattaatatcatctgaaaaatgtttgcttcttgtttcacccaattttacattggattggaaaaaaatgtattatctaggtaaagagaaatatgcaagaaatgaactgtaggtgtctctagctatatattaagattctcaattctaataatgacgtcactgagacagaatgcaacttgcccaaagttacgcagcatttatgacaaataaagtacagtattgcatgcctttatcttttaaaatatgaatagctatgttagcttgaattattttttctcataaaatgcttgccagtgtatttagataaaaatcagtatgtttcctttctccatgcttgcagtaaatatcttttcaaaagccataatggtattataataagacagatcattacagcagcttcattataccaccytttcccatatttccaaattcttaatatctttctttctgactaaaggtaagatggctgaatcaattccta

SEQ ID NO: 362676 - DNA, 523 bp, Homo sapiens
aaagttgttttcactaacctcatctttattttaataatcatcatttgataactcatcccaatatttctgacagaaaatgttacatgtaatttgaatcccttaggttagaatttaggactgtactacaaatttagaagctaggccttcaaaaataaacaagagggaatcaaagcaggtttggtatgcccttatcagtgataagcgcatatcattgatttttgattccatatgcattcttctaaaacaacttgttaactctgaaagttttcttggaaggaaacctatgtctttctgcaactttcctgctatgaacagtgtcagatacaggccagttggtaaagtctagcaatgatccccaaactaaaaaaaaaaaaaaaaaaacttgattatgtgctatcaatatatgaattagtattaattttaaatttaaatttaaaattatactatttacagtattacatttgtatsaaatgtaaactggaaaagtacaagctaaaatacaaatataaatcttaaaagtttt

SEQ ID NO: 362677 - DNA, 616 bp, Homo sapiens
agctacaattcaagctgagatttgggtggggacatagccaaaccatatcaagctgaagaatttattttccacttctgctgttgttttaataaagggatatgttttaataaaggggcaacacagtaacctagaaaaacttaagagtttaattttgtggtggatgttgaaaatatattgtactattgccgatggctcttggtcgtttatgaacaacctttgaaacatgttgaaattattgtagtagtgaagattgtgcaagaccttgggtttatctgatgaaagttgggactagcagtcagccatcagtatatatttctactctttgatttgtgagagaagcggggatctttagttacctattcatttgacaaatatttactgaatgcctactytttgtcaagtactgggaaaaaatgaacaagacagactgtttccttccttcaaagaccttgcaacacgacaaagaagacatgtaaactggataatttaacattgcatgctataaactatgatggggcagggaagagtgcaagctataaaacacatttaagtagcatctaattctgtcttaaagattcatggaaatcttcctggataaatggctgccaaaactgat

SEQ ID NO: 362678 - DNA, 600 bp, Homo sapiens
ccttcaactcaattttgttgtaattgtaaaaagctctaaaatagtctatttaaaagttactgtagtttgtactaggcaactaatagtttttataaggaaaataaatactttcaaatacatttaagagaaaatatttggcaatttgttaattgagctgaataaagagagaaaagattatggaaaaacactccacctctgacttgaactaggggctaggggaaaatgctattcattgacaagaggaacatagaagtaaaaacacacttcaagtagagatgatgtgttaagctttaatatatgatttcatggttcatgagacattcgattgaagtaggatgtttagctagagctcagacacagttgagctggagttatatagagattgtataatctgtagacagacacacttgaaaactggggtggagtcaaaataaactaaaacagggtccttaaaatatcaaaattaaagaaaattttacaaaaatatacaaagtagccagaaaggtcagagaaaatccatttgtcatataccaggattcaggataaattcataatatggcatagtayggatcagggatgaaggaaagtaacctaagttga

SEQ ID NO: 362679 - DNA, 521 bp, Homo sapiens
gtcataaaactttatggtggttagataatgtgataaatttgccccaggatgaaaatttctaccttacagtctcattaggtagaagaaagaaagcctttgggaggtgtgaaaggaaaatatcttgggtttctaaaatcactaagctaaagggaaaatttgagctggaaactgcttagggaaagcctgcctcccattctgttcaaagtcatccttctgctcactgagataaatgcatatgtgattgcctcctttggaaagggtaatcagaaactcaaaakaatgcaacaacttgtctctcatttacctgtgacctcgaagccccctccccactttgagttgtcccgcttttgcttggagttgtcccactttttcagactgaaccagtgttcattttacatatgttgattgatgtctcatgtctccctgaaatatataaaacagagctgtgctgtgaccaccttgggtacatgtcatcaggacctcctgaactgtgtcactggtgtatgtcctcaaccttggaa

SEQ ID NO: 362680 - DNA, 647 bp, Homo sapiens
taaaactttatggtggttagataatgtgataaatttgccccaggatgaaaatttctaccttacagtctcattaggtagaagaaagaaagcctttgggaggtgtgaaaggaaaatatcttgggtttctaaaatcactaagctaaagggaaaatttgagctggaaactgcttagggaaagcctgcctcccattctgttcaaagtcatccttctgctcactgagataaatgcatatgtgattgcctcctttggaaagggtaatcagaaactcaaaataatgcaacaacttgtctctcatttacctgtgacctckaagccccctccccactttgagttgtcccgcttttgcttggagttgtcccactttttcagactgaaccagtgttcattttacatatgttgattgatgtctcatgtctccctgaaatatataaaacagagctgtgctgtgaccaccttgggtacatgtcatcaggacctcctgaactgtgtcactggtgtatgtcctcaaccttggaagaataaactttctaaattaactgagacctgtctcaaattttcagagttcacagaggacagatgaaagcaaagatcaaaattgtgaaaatcagaaaaaaaataaattataaaatgtattaaatttttaatt

SEQ ID NO: 362681 - DNA, 521 bp, Homo sapiens
gtcataaaactttatggtggttagataatgtgataaatttgccccaggatgaaaatttctaccttacagtctcattaggtagaagaaagaaagcctttgggaggtgtgaaaggaaaatatcttgggtttctaaaatcactaagctaaagggaaaatttgagctggaaactgcttagggaaagcctgcctcccattctgttcaaagtcatccttctgctcactgagataaatgcatatgtgattgcctcctttggaaagggtaatcagaaactcaaaataatgcaacaacttgtctctcatttacctgtgacctcgaagccccctccccactttgagttgtcccrcttttgcttggagttgtcccactttttcagactgaaccagtgttcattttacatatgttgattgatgtctcatgtctccctgaaatatataaaacagagctgtgctgtgaccaccttgggtacatgtcatcaggacctcctgaactgtgtcactggtgtatgtcctcaaccttggaa

SEQ ID NO: 362682 - DNA, 606 bp, Homo sapiens
ttcaagacagcaatggcatgttggaggaaaatataggggtgcaaattggagaacacagacaatgaattctacacaagttcaagaacagaaggaaatgtcagggaagaggcggatgagttgtggtacttcaaggagctgccgygaaagttcctgcccaggcaatcagacggtgcactgcaaattggttttgagttggtgagtttgcacagcactgtgttcttggcacccagcacagctgctggctcatagtaggagcttattaagcattttggaaggatgggaggaggggcttgtgatataagtagccatctactcaacatttcctctgtgccatgcatggtaaacatttccacataatttaactctggttttattactgtcatttcacagatgacatggagactccaagagttcccccccacccagcaaccaggcggcaatctccaagacactgctaaaaaaaagcagcagatgaagcaattactctgatcagtaatgaaatacaacattcttctgacactgaagtaacttatagggtgcttttcataatgattccttttatctttgcatttgaggctaagataaacctgtatgcatttaacttac

SEQ ID NO: 362683 - DNA, 606 bp, Homo sapiens
ttcaagacagcaatggcatgttggaggaaaatataggggtgcaaattggagaacacagacaatgaattctacacaagttcaagaacagaaggaaatgtcagggaagaggcggatgagttgtggtacttcaaggagctgccgcgaaagttcctgcccaggcaatcagwcggtgcactgcaaattggttttgagttggtgagtttgcacagcactgtgttcttggcacccagcacagctgctggctcatagtaggagcttattaagcattttggaaggatgggaggaggggcttgtgatataagtagccatctactcaacatttcctctgtgccatgcatggtaaacatttccacataatttaactctggttttattactgtcatttcacagatgacatggagactccaagagttcccccccacccagcaaccaggcggcaatctccaagacactgctaaaaaaaagcagcagatgaagcaattactctgatcagtaatgaaatacaacattcttctgacactgaagtaacttatagggtgcttttcataatgattccttttatctttgcatttgaggctaagataaacctgtatgcatttaacttac

SEQ ID NO: 362684 - DNA, 487 bp, Homo sapiens
cacactgactatatcacagtttgtgtggtcagaggctgggcataactgcagttggtctctgctcaggttctcgaggctgaaatcaatgagtcagctgggggctttcttcctggagctctgagtcttctctcaagttcatgtggttcctcctggtttagcaggaaggcctcattctcttgctggctgttggctgggtactctcagttcccagaggcagctcacagttcccygccacacagcccctccacaccccttcatgctgcacatccctgacttcaggagggtcctcatcccttccaagggctcacttggttaagtcagggccactgaataatctcctttttcactaactcaaagtcaagtgattccttcgtaactcaatcataggaagatagcccatcataccctctccatactggagaggagggaattgtataaagcatgttccctagggagcaggaatgttggagaccatcttagaactctg

SEQ ID NO: 362685 - DNA, 394 bp, Homo sapiens
gaggagaaggggcgcaggacaggaaggaagcggggaccaggcccaccttcacttgctccgagttttgccaggcatatgtgtcctcagagaaactcacatacaccaggtgttcggaatatgaccgtagccacaactacttcacaatcttccaagcgagcaagtcaatccattgattcctctagtagcgatggataaaaacccaactsaaattggcctggacagtgatgtcgagaggggctcggtcacgaagccgcagtgcttttggcagtccctcaataccccttcagactgtgtttctccttgcgcagcaagtcgatgctgggagctccaacttacagccgttgggggtgattttgcgaaggtagttttttcaagcaaagttcagttccctaaa

SEQ ID NO: 362686 - DNA, 607 bp, Homo sapiens
tattgattggctggacgatcttggtgctgcccacttgccgttccagaagagccaccgaaggaaaagatccaggagtatagaggatgatgaggagggtcacctgatctgtcaaagtggagacgttctaagagcaagatgtatagaatatttttcaacactttttaaactttgcagaaagaataatctttttaagaatagtttgtcagcggggggctaaagaactcttcattgcttttttattttgctttttgtgggtttgtttgttcttttatatttcttcttttctgtagaatttaaatatttctattctaaagttccaaaataatcagtggaatttgagattagagcaagaaagatagctctatctaattgtttttgtagcagctgaaactaaaataatttgagtgctgaaacyttagttatgctttgttagagatcatttgaaaatattccacacttaagcattcattgtttgaagaactagacagtttgtactcaggtacttacacctctttttccctcctcactctagatgaaatcgtggacactttgggtgaaggagcctttggcaaagttgtagagtgcattgatcatggcatgtaagttt

SEQ ID NO: 362687 - DNA, 646 bp, Homo sapiens
cctttttccacatccagtggtttccagttcattgctttcaacaaggccccaacgaatgtgaactgataagtcactaaaaaaattttttaatgcttggcatatacctcaagacttaaaagaactctaataagattactgtgacaaagcttctactcctatctatttaattatatgaccaaaaagttttctcagtgcttgtatccacgaaaatgaaaaaagaaaacatacaatgctagacagtcagatatttatctatggctatatgtactcatttttttagaggcctcaactgccccaataaagraaacattccaggccagatgtggtacaggtgtgtgccacacgtgactacaggctcacacctgtaatcccagcactatgggaggctgaggcagaaggatcacttgaggccaggagttccacaccagccagagcaacacagtgagactccatctcattaaaaaaaaattttttttaagatacatttcattaaatacaccaagacttagactttcaagaaattctaaaaggacattaatgggatgactggtgaaatctgaataaagtctgcagattagttggcaaaatttgaaaacaaatgtatgtataatgataaagcaaatcttataaaatgtaaacatttgga

SEQ ID NO: 362688 - DNA, 596 bp, Homo sapiens
ttattaagctaaaagatattttcacaaaaccacaatagagaggaaggagaagaaaatacttattgaaagactgttcagcagaaaagcaaggagaasaggagtctcattttcatgagcatccaaagtgcagtaggcataaaatcatacagttaaattacggaataccaacactttaaaccatgcatacatacctacaaacaagatgtttaaaaaaaataaatgtaaccttatttcaaatcgtcagtgcttccctctagaataaatttaacaatttagtccttacaaccttggcatagtttctacaaaagtataagcaattttagtctcaattgtcagatactaaatatacaaactatatttaaaatgtctgtattttaaacattaaagtgcttcttacactcacaaatcaaataaatgtgaaattatacctcaaaacaggctattgtgaacccactagtcatgcttgtgttagattggccagatttaacatttctgatttaactatctcacaaaactaagttttaaaaaatattcagaaagcttgaaattatctgcaacaacctggccaactgacacacaaactagcttttgcctaa

SEQ ID NO: 362689 - DNA, 596 bp, Homo sapiens
ttattaagctaaaagatattttcacaaaaccacaatagagaggaaggagaagaaaatacttattgaaagactgttcagcagaaaagcaaggagaagaggagtctcattttcatgagcatccaaagtgcagtaggcataaaatcatacagttaaattacggaataccaacactttaaaccatgcatacatacmtacaaacaagatgtttaaaaaaaataaatgtaaccttatttcaaatcgtcagtgcttccctctagaataaatttaacaatttagtccttacaaccttggcatagtttctacaaaagtataagcaattttagtctcaattgtcagatactaaatatacaaactatatttaaaatgtctgtattttaaacattaaagtgcttcttacactcacaaatcaaataaatgtgaaattatacctcaaaacaggctattgtgaacccactagtcatgcttgtgttagattggccagatttaacatttctgatttaactatctcacaaaactaagttttaaaaaatattcagaaagcttgaaattatctgcaacaacctggccaactgacacacaaactagcttttgcctaa

SEQ ID NO: 362690 - DNA, 596 bp, Homo sapiens
ttattaagctaaaagatattttcacaaaaccacaatagagaggaaggagaagaaaatacttattgaaagactgttcagcagaaaagcaaggagaagaggagtctcattttcatgagcatccaaagtgcagtaggcataaaatcatacagttaaattacggaataccaacactttaaaccatgcatacatacctacaaacaagatgtttaaaaaaaataaatgtaaccttatttcaaatcgtcagtgcttccctctagaataaatttaacaatttagtccttacaaccttggcatagtttctacaaaagtataagcaattttagtctcaattgtcagatactaaatatacaaactatatttaaaatgtctgtattttaaacattaaagtgcttcttacwctcacaaatcaaataaatgtgaaattatacctcaaaacaggctattgtgaacccactagtcatgcttgtgttagattggccagatttaacatttctgatttaactatctcacaaaactaagttttaaaaaatattcagaaagcttgaaattatctgcaacaacctggccaactgacacacaaactagcttttgcctaa

SEQ ID NO: 362691 - DNA, 596 bp, Homo sapiens
ttattaagctaaaagatattttcacaaaaccacaatagagaggaaggagaagaaaatacttattgaaagactgttcagcagaaaagcaaggagaagaggagtctcattttcatgagcatccaaagtgcagtaggcataaaatcatacagttaaattacggaataccaacactttaaaccatgcatacatacctacaaacaagatgtttaaaaaaaataaatgtaaccttatttcaaatcgtcagtgcttccctctagaataaatttaacaatttagtccttacaaccttggcatagtttctacaaaagtataagcaattttagtctcaattgtcagatactaaatatacaaactatatttaaaatgtctgtattttaaacattaaagtgcttcttacactcacaaatcaaataaatgtgaaattatayctcaaaacaggctattgtgaacccactagtcatgcttgtgttagattggccagatttaacatttctgatttaactatctcacaaaactaagttttaaaaaatattcagaaagcttgaaattatctgcaacaacctggccaactgacacacaaactagcttttgcctaa

SEQ ID NO: 362692 - DNA, 478 bp, Homo sapiens
attggccactatactgtggccaaaattgggtaataaggcatttaaaggattttcttaaagagcactcagcttaattaaaagtggacatctaagttatagatacacttaaaaggcctttatgtttttctcttcttggatcttgttttgctggaaaaagtttttttctcagtcaactgaattactcttctccaccttgtcttgccactcttaatgcatgcatgagatgccctaagataacttgtgatgccctgggactctttgggaaaaacagaaaatgtagcaaggattccattttggcagaaacctctgttttcctcatggaaccccaggaattgaaggtggataaatacctctcaaaatctctttttgtcttcctgctatacctgtttatcaggccccagaaacagcatgttttcctagccctgttyttaaagggccccatccaaaggacaataatccaattagaacattggcaaat

SEQ ID NO: 362693 - DNA, 536 bp, Homo sapiens
gttatattttagtgaataatattaagttccaaaattgtctgtgatttctaaaattctaatgtctaattttgatattaatcacaatgaaatgtgttatgttaaattattgtaaaccacagagataaccaaatttttttgtcaatcgtgttttagactgtagttaccctgagcattttgttattcacaattggtgtcttgttttgaccatcttcaaaagatggtttataagcagctatagaactttgtcaggtgctctcaaatgcagttagctgataactttgtagactgtgacattggaataaagaaaaaatgtaccagactcatgaaaagctkaaatgttcatgaatatcaagcagaacaagagttaactgaatggactgaactaatagaaaactgaagtaatctttttttaacttttgcttaaaacattgctggtctttgttttgtttttttcagagtcaaggaaactttcattttgagatatttatagtctttgataattgagtaaggtagactcctgtgaacaaaatttggag

SEQ ID NO: 362694 - DNA, 587 bp, Homo sapiens
ccctccggttgattacagctaatggtgggagtgagagaaagagaaataactaaggctgaagggtggtgagatgaacccagcttgggcaaaagactaaggctgtgctcttacccctgagttactgagcttctccctgaaatgttcttcctcttctgcccatcaaggaccacaggatatttacaggtcagttttgaccaccaagaagatacctggatgtgtaagtacttaatagtctgtaaaattctagatagcaagtcatattaattatgatactagatggaataggagtcatgtgctcactgaaagcacatgctatatgctgtgagaacccagagggtggacagtgggagcagaattcgcrttgttgttgttgttgttgttattgttgttgttgttgttttgagacaggctctcactctgtcaccgagactggagtgcagtggtgcaatcacagttcactacagactcgacatcctaggctcaagcgatactctcacctcagcctcccaagtagctgggaccacaggtgcatgctactaaacctggctgatttttgtactttcgtagagatggagtcctgctaggtt

SEQ ID NO: 362695 - DNA, 587 bp, Homo sapiens
ccctccggttgattacagctaatggtgggagtgagagaaagagaaataactaaggctgaagggtggtgagatgaacccagcttgggcaaaagactaaggctgtgctcttacccctgagttactgagcttctccctgaaatgttcttcctcttctgcccatcaaggaccacaggatatttacaggtcagttttgaccaccaagaagatacctggatgtgtaagtacttaatagtctgtaaaattctagatagcaagtcatattaattatgatactagatggaataggagtcatgtgctcactgaaagcacatgctatatgctgtgagaacccagagggtggacagtgggagcagaattcgcgttgttgttgttgttgttgttattgttgttgttgttgttttgagacaggctctcactctgtcaccgagactggagtgcagtggtgcaatcacagttcactacagactcgacatcctaggctcaagcgatactctcacctcagcctcccaagtagctgggaccacaggtgcatgctactaaacctggctgatttttgtactttygtagagatggagtcctgctaggtt

SEQ ID NO: 362696 - DNA, 577 bp, Homo sapiens
ttgtctgtgacataggaggcacatgcccatatgactgggagaaacaaatgagataatttagggaaaattcttggttggtccagtgttagttccatagaagggctcaggatttgtagccactgctataattctattactacccacatttcatccatgacaaatcatctactttagttgggagagtacatgtatactttcctaactattgatagatcataatgataagaaaatatctatgtttctttgctttcatccatcacaatatctaacacaatgtcatggcacttaataaataattcttaattaactgtttcttccgtgagtaccttgaatggcttattcactgaaaaaagaaaaaacatatccagtcattctcttttctcacccaacttgtgagcttgcggctgtgcaygtgcaggggagggggagaaaagtatgtgtacactctcataggcttagctggcaaacatctctggagtggggtgccagctaacgttgtattcctgtggtgggaaaaaaaaaatgcttctaaaaattggtaattctcatcaatacacagaatgtaattaaatatgcc

SEQ ID NO: 362697 - DNA, 522 bp, Homo sapiens
ggacaataataaattatttgtgacatattccaataatggaaarctccactgcagtttgaatgaatgacgtgaaagaagatgcatcaaaacaaatagaaataaaaatgtattgtgttggataaaaggcaagttacatcatcattatataaagtgtttgatgttaattttgtacattttaatttatatacactacacagagtataaattttaatgtatgtatatacatatataaatgttagtttatatgtatgtaaatatataatttatttttgattaattataattaagaataaagaatacagcatataaacataattttctatagtgtgttatatatagtacttatattaagtataaaatttaatttaaatacagtatgaacttatatcttttaagtttatgcgttatgtgcatatgaatatgtaataaaactgtgaaatacatgtagaagagtaagaaaaaaagaaaaccccatcgtctcagcccaaaaatcccttaagcaaataagcaacttcagcaaag

SEQ ID NO: 362698 - DNA, 555 bp, Homo sapiens
ctcctcatttcatttttttagttttctaaactaaagtttacaatgtgaaactgatattctttctaaatatttggatataggagattgcagtgaaatacttatcataatttcatattcttttctttgaaagttttttctaagattgtgtgaacagaggtaactgttcttcaatagttacctgtggaatccatcaattatttgtttacgcattagtttatatttttgcaaacagaacctgaaaaattatgtaggcagatacatatttaagatttttactcttctactttttgattgctttttcccattacatttgaatgttatagataatcaattttcataaatatttttaagtcatattyctcttatgcatcttttaatgtgtgcataaatgtaatatgagaaaacccgataaaaattatcaactgtcttgagaagctgaatttcattggtcatttattgtggtagtttcagtctctctcctgtcatgtctattttcactgtctatatttaaaaatctgtaaataggcagatcaaattaaattattattttataat

SEQ ID NO: 362699 - DNA, 579 bp, Homo sapiens
aaaaccctgcaccctggcttcatttgaatcaccgttttgttgacttatactttaagatttactgagactccttgtcactaagatttgtaccagtgagataaatactactgagttaaaattctcttccttttcggttaacttccttatcttgaaagaatatcttactaatmtggaaaaaggttatctcttaaagctttcagaggagttttgtaattttattggattgaaagcttgcattgtgtcactattttttttatgttacctggcacagtcataagcaaaaatgttgtgatggtctcatcagaaattccatggttaaattattttcagaaaaataatgtaaaagataacaaactttcttttcatccatgaggatacaattttagagatataattaaaagactttggaaggtgtgggggaaaatcctgtccatttatactcagaataatgctcttaggtacaatatagcacacctgtgaaaaacagagaaatatgctcccttggtatttatccattgcattccaaataaaatggaaatacatgacctgaagtggtgtgtgtacatgtatttcattccc

SEQ ID NO: 362700 - DNA, 592 bp, Homo sapiens
aatatttattttccaaataacttgttgttttaatatggcttattcatatttgaaatgggacttcctgytccaccccactaattaccacatctccctaaaactcagctgggatcatctaagggaaggaggtctgtacccagctgtctctatcctaaggggtaggaagagtcacttatggcaacatctccagggagatttttttgactgaagctcttctaatttccttggtaaaagagcctgtctatgttctccttgtaatactgccaacaacttacatgtgtatggcaagaagctgatttttcctgtgttgggaaaaagaggctccagcagtctggattcaccagctattaaacatatagattagaattagacctgagtgaagattcttgtgcaagccaacatttttcatacagctctaatgagcccctattgtattggcaagccttgacctctaaagctctcgagtttgccctggtgctctgtctatagaagacatggagaaaattgtgaattcaggttaactctcctgtaaacacaagtgaactataggagcagcccccgctaaatctaggaaaacgactagggaattctt

SEQ ID NO: 362701 - DNA, 699 bp, Homo sapiens
cactttagtttgacatgtaagaaacatatcactagggctctgcctwgcatagggcactaagctagatgctgaggacttaaggacaaaaaatgtctgccctggatttgaggaggtcaccgtctactagcaggagggccagatgtgcaaacaactaacgatgtgacatgctccctaataacagtagttataaaatgctgcaggaatgcagatcagagagcaatgtattctgcctaaagagattttgaaaataaaaagcatcactaaagagctaactattgagctaggtaaggagagaacggaagagctctttgcaagaataaaagcaaaacaagaaaagtttgtggtatttggagagacaggcaagcatttgtcctaggatggagggtagattgagtggcagggatgaaacattcaaaggccaaacaaacaacatcaataagtaaagcaagcctgtggggactcaaggaaactggagaatgtgtgtccgtctggagaggctgttaactgcacaggtctgacaaatgcatgctgacagtcaaaatgctggcccagactcaccagaatttgggagtctttaaaaagacagaaatctaggtttagtatgtgaaatctactgctttttaacttttgaaaactgatttagaaattgtaatactatataacagtcaaacaaaacacatgtgtgggttaagtacaacc

SEQ ID NO: 362702 - DNA, 699 bp, Homo sapiens
cactttagtttgacatgtaagaaacatatcactagggctctgcctagcatagggcactaagctagatgctgaggacttaaggacaaaaaatgtctgccctggatttgaggaggtcaccgtctactagcaggagggccagatgtgcaaacaactaacgatgtgacatgctccctaataacagtagttataaaatgctgcaggaatgcagatcagagagcaatgtattctgcctaaagagattttgaaaataaaaagcatcactaaagagctaactattgagctaggtaaggagagaacggaagagctctttgcaagaataaaagcaaaacaagaaaagtttgtggtatttggagagacaggcaagcatttgtcctaggatggagggtagattgagtggcagggatgaaacattcaaaggccaaacaaacaacatcaataagtaaagcaagcctgtggggactcaaggaaactrgagaatgtgtgtccgtctggagaggctgttaactgcacaggtctgacaaatgcatgctgacagtcaaaatgctggcccagactcaccagaatttgggagtctttaaaaagacagaaatctaggtttagtatgtgaaatctactgctttttaacttttgaaaactgatttagaaattgtaatactatataacagtcaaacaaaacacatgtgtgggttaagtacaacc

SEQ ID NO: 362703 - DNA, 598 bp, Homo sapiens
aatggctgaataaatgagttaattaatgaagatacagtactaggagatgttactagttaagacttccaatgactaatttctatacatgtayattttcctgatagcaagttctcaaaactcacttaagtactctagtgattcttttattcaagagccatttttttcctcttcttgttaatagctacaatgaactgaggcttttgggcaatatctctacaagattttatttctatttagatgtggaatgacttggaaatgttacagttgtttttggctgaatattcctgatgtacggtaattttggtaagcagtgtttagtctgtacgttattctggaagttcttataacattctgtggctgaggaatccagaaccaggaagggacaagggtctggggaaacttaccaagttctggggccagcaattggaggccaatgcgtttgtccaaaggcacttggagagctcaggcttaatttgggcaggaataggggttacagcaagaatggaagcagcctgggatgctcaaaattaagcatgggatggtgatgtgatctctggattcaggcctaggtgggatgttgcaagagaaaggctggtcc

SEQ ID NO: 362704 - DNA, 604 bp, Homo sapiens
ctattttctccaacctagtgtatattatattttatgcataatcacagttgatttgcctggcctaccaaagccgtgtatcagattctttttattaccaccatctctaactcttcattttattatagactatgttttaatggccaggttctgaaagaaaatagccttttgtgaatatttgagattatacggatctgttagtgcctgttctataaattaataactgttatgcccaaagcagcctatatttttctcaacaagacattgtttctcccacatagggatcaagccacaaatgatcaaagccattttgaaaaagtagatatagatacagtttatattttcacatatttaaaaatgaaacagatactttgatatttagaaagaaaatggtagctattgcaagatgtttaacattrtggccattgtctttctttatataccctccaatatagcatattgatttgaaaataatgtgtttaataagtatcaatcaaatttgtttgtagaaatattaagacaattcaatgcaagatgttttataaaaatgccatttagacatagtaatgtggagctgtggcacaatatattcttttaaatcacattt

SEQ ID NO: 362705 - DNA, 635 bp, Homo sapiens
cttaagttgatgctataatgggttgagacttctagagacctttaggtgaagtgaatgtattttgcatgttgtatgaatattaatctttgggggccaaagggagggactgtggttggcaaaataatgacacctgaaagttatccatgccctaatcctcccaacttgtaaatgttatcttacaaggcaaaagggactttgcagatgtaattaaggatatagtgtgtgccatatttgcatttcctcctaaactgcatttctatggggcttagagaataattttgctaataattgctaataaattgaagtccctaaatttttcatattggtttttattttttaacaaatttttataatttatttggggttgaattcttgatcaaaagcaaagctaaaaaacttttttgttttaggagagacagagggttatccttttggtaaatacaatattctatatgttgactcaatcatgaaagaaaygtagctgaaaatttaagagttgtcagtattgttacttgtaagtttaaaagtctgttttaagaactttttagaagtttaaaatatgtatatatctttgtatacacacatatatattaatctatatacacatatacatatattaatatatgtacacacat

SEQ ID NO: 362706 - DNA, 539 bp, Homo sapiens
tgaataacccggggtgaagtggagaggtccaactgatgcctgcacactgtaggttgcattacagaagaagcacccagagattaggtaacacaaatcttttaaaacagacaagcatgcacaccttttatttcaaggtaaatattctctctaccatccaaggttataaacaaacctccctggatctgaatggagacactattctctattttctgagactgttttctatataaacatccttgaaaagatagttcaaaaccaaagcagtcagggcctctgctctcatgacgtaggagayatgagaggcccatggagaattgtttcccaattcacagtgagtgaaactttgtctctgaatttacgtttattgttttcatcctaatattttggtatatacctttctatgaaattaatcattgtatggtttggtaaaacatgtcattacttataaaatcgtttaataccagcaaattctggatggcttcttctgagtccttctttaaataagtcagagtcctgctttaaataaatcatcataggtc

SEQ ID NO: 362707 - DNA, 693 bp, Homo sapiens
gctatattcatatcaggcaatgtaaatttcagagcaaataatattgctgatgatcatttcatgatgacaagagtttattaattaagaggtacatgttttatgtaccaagtaacagagctttaaaatattaatacatgaagcaacactgataggactgaaaaaaataaatgaacctacagttacagccaaagttttcagcattttttccatcaataattgatcggccaatgaatagaaaatccaaggatataaaagactaataatattagcaaacagctgacctaactgatatttatagaaccctataaccaccagcagcaaaattatcaagtatagacaatatttaccaagataggctatattctgagtaataaaaaactctcaataaattgtaaagaattgaagttataaaaagtatgttttctgaccataataggattaaattagaacatagtaacaggaagatatctcgaaatttctgaagcatctgaaaaatataacacactcccaaataacccacaagtgaaagaatattagaaagcattttgaattgagtgaaaattgaaatattacacaaaaaattgtgaaagacrcagctattcagagtccagagggattttataatattaaatgtttatattaaaaataaataaataccttaaatctgttatcttaccttctactttaggaaac

SEQ ID NO: 362708 - DNA, 623 bp, Homo sapiens
agacatgaacagaaccatgaaagaaccagaactatgtgtctggttttgtatcagtgacatgctgttttggttagtgtagctttatagtacagttttaagtcaggtaatgtgatgcctgtggctttgttctttttgctatttgggctcttttttggttccatatgaatttagaatagctttttctaattctgtgaaaaattacattagaagtgtgataggattagcgttgaactatagattcttttgggcagtatggccactttaattatattgattcttctaatccatgagtatggaatgtttttcaatttatttatgtcacmtatgatttctttcagcagtattgtgtagttttccttgtagagatcttttacctccttggttacacagcaagagaaaatagaaaaacaagaacaaactaaccccaaagctagcagaaaaaaataaataactaaaattggaacaaaaatgaatgaaattgagaaccagaaatccatacaaagaatcaacaaaaccaaaaattggctctttgaaaggaaaaacaagattgatagactgctagatagattaacaaaggaaaaaggacagaatatccaaataagcacaattagaaattacaaagg

SEQ ID NO: 362709 - DNA, 629 bp, Homo sapiens
aagctaatactgccacacagccactttgaactctttatgcctttgaatcaacagacaaagaagggagttactgtgctagttgtgctgactgatcctggctaccaaaggaaaactggagtgcaactccacaatggaggtaagaaagaggatgtctggaacataggagatcctttagggcatctcttgatatcactatgtcctgtgcataaagtcaatgaaagagtacaccaactcaatccaagcagcactacaaatagtccagacccttcaggaatgaaagtttgagtcactccaccagtaaagaaccacagctagctgaggtgcttgctgaaggcaaagggaatacagaatgcatagtwgaagaaagtagccataaataccagctacaactatataaccagttacagaaactagggttgtaattgttatgagtagttcttctttattttattataaatatatttacacacacacaaacacacacacacacacacacacactaagcaaatacctttttttcttcccttcttgtcatgtaacgtaagatgtactgactttatatcacagtatttaagttatggaatgtcaaggagaaaagttaacattactcgaggactttacctccttgt

SEQ ID NO: 362710 - DNA, 541 bp, Homo sapiens
acagcaatttttcctttttttgagacaggtcctcgctctgtcacccaggctggagtgcagtggtgcaatcatagctcaaggcaaccttgacatcctaggcttaagcaatcctcctactcagcctccctagtagctaggactacaggcacgtgcaccaggctggactaattgttaaattataagaaggggactcattatattgcccaagctggtcttgaataggctcaaatgatcctcctgcttcagcctccctaaattctgtgattacaggcataagycactgtacccagccaaaaataaaagtctttaaataaaaacacatccatatatttagaaattaagaacaccctcctaaaaacaaattagaaaaagaagaaggaaattataaggtaatttagaaaatattttaactaaatgataataaaagcatacaatattgaaatttgtgatttgcagctaaagcagtgcttagagagaaactgacagctagaatcaataagttagaaaaagaagagcatatatagccaaggaatgtgtgctt

SEQ ID NO: 362711 - DNA, 478 bp, Homo sapiens
tcagttgtgcgaagaaaaacttttggaaattgctgtagagtacttgaaaattaggttgaataaaacatgatgatggacttttaagacctcaccacaggttctctgagttaggtgtcaaaacagtgcatttttaacaccaaaaggaacttgcaaagactcattcatgctgtggcccactatgatgctgcagaagagtcagcattatatacactttacagaaatgggtttgtgtagctgaatcttcgataaatgctagagttctggaacaggaattggattggtctaagcytgtcttttgtatattaatgtgctttcacagcaaaggtatgtgaattaacacagactaaagtattttcaaggaaagacatttatctccttatagccttctgtgatggattgttcagagctaaagacacactaggccagaaccaaatctcctgctgccctatatagtttttacaatctccttttaagtaac

SEQ ID NO: 362712 - DNA, 604 bp, Homo sapiens
taaaataatttttaagttaagacctaattctttgtttactataatcctattcatttggtatctatgaaatgataccactaaagcaatttaagcatagctcataattttcatgaaagcctgtaaaatgttgcaaaaatcagatttaagcaatgacgaaaagaaaataaaaggatctggagtcattgtaaccataattatcatttttaaaagtagaaaaatctgattaatgaacagtggtcctaattttttggtccccattgcaggaatgaaggagggagtcttcactttccttttcttcttcttcttttttttttcttgaggcaaagatctttggagtagttattccacttaaaaaaaaaaaaaaagaccatatcatctcctagtcttagaagcatataaaaacatctgccttttcatcttacaaaagtgctcacattttcttttctccaaaaggtttggggctcctcttctagagtcttctttctgagttcccctaattggaaagtgaaagaaggawgagcaggggtagagggataagtatgagcaggggcagggggataagtatgaacaggacaggttgacactaggacaagtaatgtaaccc

SEQ ID NO: 362713 - DNA, 604 bp, Homo sapiens
taaaataatttttaagttaagacctaattctttgtttactataatcctattcatttggtatctatgaaatgataccactaaagcaatttaagcatagctcataattttcatgaaagcctgtaaaatgttgcaaaaatcagatttaagcaatgacgaaaagaaaataaaaggatctggagtcattgtaaccataattatcatttttaaaagtagaaaaatctgattaatgaacagtggtcctaattttttggtccccattgcaggaatgaaggagggagtcttcactttccttttcttcttcttcttttttttttcttgaggcaaagatctttggagtagttattccacttaaaaaaaaaaaaaaagaccatatcatctcctagtcttagaagcatataaaaacatctgccttttcatcttacaaaagtgctcacattttcttttctccaaaaggtttggggctcctcttctagagtcttctttctgagttcccctaattggaaagtgaaagaaggaagagcaggggyagagggataagtatgagcaggggcagggggataagtatgaacaggacaggttgacactaggacaagtaatgtaaccc

SEQ ID NO: 362714 - DNA, 604 bp, Homo sapiens
taaaataatttttaagttaagacctaattctttgtttactataatcctattcatttggtatctatgaaatgataccactaaagcaatttaagcatagctcataattttcatgaaagcctgtaaaatgttgcaaaaatcagatttaagcaatgacgaaaagaaaataaaaggatctggagtcattgtaaccataattatcatttttaaaagtagaaaaatctgattaatgaacagtggtcctaattttttggtccccattgcaggaatgaaggagggagtcttcactttccttttcttcttcttcttttttttttcttgaggcaaagatctttggagtagttattccacttaaaaaaaaaaaaaaagaccatatcatctcctagtcttagaagcatataaaaacatctgccttttcatcttacaaaagtgctcacattttcttttctccaaaaggtttggggctcctcttctagagtcttctttctgagttcccctaattggaaagtgaaagaaggaagagcaggggtagrgggataagtatgagcaggggcagggggataagtatgaacaggacaggttgacactaggacaagtaatgtaaccc

SEQ ID NO: 362715 - DNA, 604 bp, Homo sapiens
taaaataatttttaagttaagacctaattctttgtttactataatcctattcatttggtatctatgaaatgataccactaaagcaatttaagcatagctcataattttcatgaaagcctgtaaaatgttgcaaaaatcagatttaagcaatgacgaaaagaaaataaaaggatctggagtcattgtaaccataattatcatttttaaaagtagaaaaatctgattaatgaacagtggtcctaattttttggtccccattgcaggaatgaaggagggagtcttcactttccttttcttcttcttcttttttttttcttgaggcaaagatctttggagtagttattccacttaaaaaaaaaaaaaaagaccatatcatctcctagtcttagaagcatataaaaacatctgccttttcatcttacaaaagtgctcacattttcttttctccaaaaggtttggggctcctcttctagagtcttctttctgagttcccctaattggaaagtgaaagaaggaagagcaggggtagagggataagtatgarcaggggcagggggataagtatgaacaggacaggttgacactaggacaagtaatgtaaccc

SEQ ID NO: 362716 - DNA, 540 bp, Homo sapiens
aaatcttaattaagaatcccaagaatgcttaagacagagcccactgtgaaatgctctcttggcagcgtgcgaaagcacctgcacctgttctaacttgagggctcttcaggtgcacaatgagatgttccatatttatctacttttgcctttttttgtattttttataccttctatttcccaaaaaggatctgttgcttaaatacgcttttaaagaattttgaaaatctatatattcccctcacatatatttaaatagacatttacatttcttcatcataaattttgaaattactcaaatattgatgatttcagataaaacatattgttcctttaagtgtatccagtgaatctaaatatacacattatgcatttaaagatacctgaacaagctttttaaaaatcagaaattttatatcattctttktttaaaaaaaactactatctccattttatttacttcatataattttatcactccatcatgtacctttgtaagaaaaatgtgtaagcatagaaattaacttttttattttctataat

SEQ ID NO: 362717 - DNA, 540 bp, Homo sapiens
aaatcttaattaagaatcccaagaatgcttaagacagagcccactgtgaaatgctctcttggcagcgtgcgaaagcacctgcacctgttctaacttgagggctcttcaggtgcacaatgagatgttccatatttatctacttttgcctttttttgtattttttataccttctatttcccaaaaaggatctgttgcttaaatacgcttttaaagaattttgaaaatctatatattcccctcacatatatttaaatagacatttacatttcttcatcataaattttgaaattactcaaatattgatgatttcagataaaacatattgttcctttaagtgtatccagtgaatctaaatatacacattatgcatttaaagatacctgaacaagctttttaaaaatcagaaattttatatcattctttttttaaaaaaaactactatctccattttatttacttcatataattttatcactccatcatgtayctttgtaagaaaaatgtgtaagcatagaaattaacttttttattttctataat

SEQ ID NO: 362718 - DNA, 575 bp, Homo sapiens
ggtttctatgctatgattttaaacatggaaaaatcatgtagtttcatgaatcaggattagacgtgagcttggaaaaacaaaagcataactggattctaggtatctttttccacataaaaatccattattgctattgttatttgtatcataaattatctagaaaaaattgaacttgccatttataatcctttccaaataagaatctggtcaaarctctccaccttatcactccattctccttgtcattctagaagcatggcctcttgataacatggacgtttttctcagtcaagctttactgtgaaccagtgcacactgaaactcagctaactgttccaaataatgtaggcaaaattttaaaaactttttgtaggcttattatttttctttagaaaaatacaaaatgaagcaaaaatgttctattaggctatatacatggatgcaaatccaaggaataaggtaaagtagtgggaaaatcaattggtccaatttttcatcacgaagaaaaccttcataattcttgatccaatctttatttccaggctctggatgtttttgaaaagtcttagagaaaa

SEQ ID NO: 362719 - DNA, 568 bp, Homo sapiens
aagcattaacagcaagaagacacatttaatttaagaaaatatgctataaaattttaagaaacttcttaccagccccttacaacttttattagaactccatttggaaaagaccatgatgtagcatcaggaatattacagtagacttcttgtttatatgtactttcatggagatcatagataaccatctgcaacacagtaaatagcagtaagtagttacaataactaatttttagaatgtattttaaattctaaaatgtcctagaacatagaaataaatatcctaaatatacaaaagcaaatgttactttagatgttaaatccttgaataaaatcattatctaagtcacttatattaaattcctcaagcctgaaagttacctaatgtttaacctttatcttagtttgagaaagtyatccttaccttcccaggtcttgggttacatctcagagtttgtttgtcaacattctgaaataataaaagtggaaaagtaagctttaagaaacatcggtgaaaagatgcataattcattttcttagcagtcttgtatccaatttatcacatatttag

SEQ ID NO: 362720 - DNA, 605 bp, Homo sapiens
tcctttctttattcataattttctgaagaacagttgtcctttttttttttttttggtggggtgggggcagggtggagtaaccaggaagtcaaactgtggctctgtcttgyggttttagactaggggtggtattttagttgaacctgcaggtcatggggagtccatttccctatcaggaaaggtggtgctgccttggaacgttgtgaagccttcattttgggtagtacaataaaaagtctgattctatttttgatgtttgactgctaaaagctctcaagcccaacttctccttctgccctacatctgagcaagttaataaaaagcctaggtctctttttggcacctgtgaaaagttcaaaccatgcatcttgtcctacgacaggcagccttcaccctagctgcaccccctagctaccataaaaacccaagccagtagccccttcctgttttctcaagccatttttcatttcagacctgcttgggagcctgcccatctctctctagaaagcctcattatgtaagtaataaatcacttcatacccttttgtcatgtgtatggcatcatcagttttggcatctgaactaaattttggatggggacgggt

SEQ ID NO: 362721 - DNA, 605 bp, Homo sapiens
tcctttctttattcataattttctgaagaacagttgtcctttttttttttttttggtggggtgggggcagggtggagtaaccaggaagtcaaactgtggctctgtcttgtggttttagacyaggggtggtattttagttgaacctgcaggtcatggggagtccatttccctatcaggaaaggtggtgctgccttggaacgttgtgaagccttcattttgggtagtacaataaaaagtctgattctatttttgatgtttgactgctaaaagctctcaagcccaacttctccttctgccctacatctgagcaagttaataaaaagcctaggtctctttttggcacctgtgaaaagttcaaaccatgcatcttgtcctacgacaggcagccttcaccctagctgcaccccctagctaccataaaaacccaagccagtagccccttcctgttttctcaagccatttttcatttcagacctgcttgggagcctgcccatctctctctagaaagcctcattatgtaagtaataaatcacttcatacccttttgtcatgtgtatggcatcatcagttttggcatctgaactaaattttggatggggacgggt

SEQ ID NO: 362722 - DNA, 479 bp, Homo sapiens
aatgcatcccttaggggcaggagtcatttcttttttctttgtaaatttatagtgcatgattttgagaattttgagaaagggatcaggaggcagaagccctcatctgcttgttaatattgccaggtcgtggtgatttttgaacagtggcaacggtagtggtgaaggccaagaaaaaaaaaaaaacaccctgttgttcagctrtaaaatggaaactaaggtcctataactatatttctgactcttatagccagagtcagatgtatagtttttctatacacctgggagtggtggttgtggctggtagttgtaaggataggagtgaagaaaacaaatcaaaaattatttttgaggaagctaaaatatttaaacaggaaactagtctgaaaaagacacttgagtttgtcagaagattatgtttaatgattcgtggataatgtgaggcagagctatcacatgctcatgaactaaaataagtttct

SEQ ID NO: 362723 - DNA, 632 bp, Homo sapiens
ttcagtatttaaggacttgtttccgtgtttccagtatagcattaggtcatcctcattgtaggcwtctaaaacatgaaaatatcagtcttgtaagtgtaataagctcttgtaagctcaatgagttctataaccatgtcttatgtggctctgtatccttagtgcctactccaatgacatgtacatattaggtgataaaaatatgtttgccaatggactgatcatacacacacttttaggaggaggaaaaagaatctctaaaagttagaccctgatgactagtatagtatggatcttgtgcccacacaatgaattgaaactccccagatagctgctcccatatttgtgtacattctcttagagtgttaagccaggcctcagagtgacaccatagcatcccctcactgtcacaggcctgactccaggctgttagtccccatttgtttttagtttccttggatgaaattccaaaatgggccaatcttacaagaaattttctaaagtcaaatagtggtatggaaaatttctaatggagttagggcggagcatctgtggagtagacatctggtgagattcccagcattttagacacatttgcaaaaactgcagtcagcttttaagatcttctatcaaaa

SEQ ID NO: 362724 - DNA, 599 bp, Homo sapiens
tttcttcacttttttttaaagccagggtaaaagcaatgtattatgcatatggaaaaatctttcttgagtattttctcaagagaatactctcttgagtattctcaagagtctaagtaataaaagtaaggaggtcaaagtttgcctactcatgaaagggccagatagaatatatacacaatgtaggtaagaaaaaaaattagcttaatatatttaactgacagttgatcaagcacacctgctggttcaggcaggtgtcaatgccagaaaacactattcaggtaggatatgtgtgtcaggaatgmagtgctcagtaggactactcaataaattaaaaagtaaaagttttagaagaactcagaaattttctaactatattgcagaaatttgaattacttttagtatttttgttgttacatttacatatctttcaatggaggcaatgaaacatgttacttttcaaaattgcttttaaaccaaatggaaatcttagttttaaatgttttaagaggatatgtgttgtcatatttggcctaacagtattatttttattaacattctgatatattattataaatatctgctaaagagaaagtttgaaa

SEQ ID NO: 362725 - DNA, 605 bp, Homo sapiens
gcacatggctctgggactggatatggtacttactgcatgatttttaaaaagtttcttaaacttcctggacttcaatttcctcttctgtattcattaagcacatgtatgtaggtgacttttgagacccctgaggaagcaataaaacacagtggttaagaagagacaatagcgataatctttattgggatatttggtgtcagtttttgtgggtacaaacatctattcttccatttactacttgtctgaacattgaaaatgacctaagattttttgttgagtcagttactttatatatagttaagaggaataatactaggacctatcttttaagrttaaagtcagaatttatgagactgtatgtttagcacaatgtttgatacattgaagataccataattgacaaaattaatatcagctatcaatctcatgcatctttattaatgtagtatgatcttccaatgttatgaatttcattaagattaccaataaggtccctgttttccaggattgagattttgagtcatctttaattactccctttcaaaatctttcttcgttttttgcttcagagctacttttgcattttcctgccctttgtatttcca

SEQ ID NO: 362726 - DNA, 605 bp, Homo sapiens
gcacatggctctgggactggatatggtacttactgcatgatttttaaaaagtttcttaaacttcctggacttcaatttcctcttctgtattcattaagcacatgtatgtaggtgacttttgagacccctgaggaagcaataaaacacagtggttaagaagagacaatagcgataatctttattgggatatttggtgtcagtttttgtgggtacaaacatctattcttccatttactacttgtctgaacattgaaaatgacctaagattttttgttgagtcagttactttatatatagttaagaggaataatactaggacctatcttttaaggttaaagtcagaatttatgagactgtatgtttagcacaatgtttgatacattgaagataccataattgacaaaattaatatcagctatcaatctcatgcatctttattaatgtagtatgatcttccaatgttaygaatttcattaagattaccaataaggtccctgttttccaggattgagattttgagtcatctttaattactccctttcaaaatctttcttcgttttttgcttcagagctacttttgcattttcctgccctttgtatttcca

SEQ ID NO: 362727 - DNA, 597 bp, Homo sapiens
tttttgtgatatagaggagttgttaagaaatcatcaactacatctgtcaaataagctagttatgctactcactctgtttatcccatgaaatagcagttgctctctcttaggtgaaaaacccagggaaatgagggcatatgtccactgaaagacaaattcatacttrttcaaaataaccaaatactggaaacaacccaaatgcccatgatctggagggtggataaactgtggtgttttcacaaaatggactacagcatgatagtaaattcattaaactaatggtacacaatgacatggataaatctcaaaaacattatacagagtctaataagccagccgcaaacacctactataaagtttcatttacaaaaacaggcaacactactatgacaaaaaaatctacatttacaaatgattttctgtaaaatagcttgatttacttttgatcgaccttatcctcttatgaatatattcagctcatagcatttttttcttccagatacagctaaaaataaaaaagccaaagaataaatctggtttccattgacctctgagtatgtgaatggctacatgattcctcttatagagcagcctgat

SEQ ID NO: 362728 - DNA, 597 bp, Homo sapiens
tttttgtgatatagaggagttgttaagaaatcatcaactacatctgtcaaataagctagttatgctactcactctgtttatcccatgaaatagcagttgctctctcttaggtgaaaaacccagggaaatgagggcatatgtccactgaaagacaaattcatacttgttcaaaataaccaaatactggaaacaacccaaatgcccatgatmtggagggtggataaactgtggtgttttcacaaaatggactacagcatgatagtaaattcattaaactaatggtacacaatgacatggataaatctcaaaaacattatacagagtctaataagccagccgcaaacacctactataaagtttcatttacaaaaacaggcaacactactatgacaaaaaaatctacatttacaaatgattttctgtaaaatagcttgatttacttttgatcgaccttatcctcttatgaatatattcagctcatagcatttttttcttccagatacagctaaaaataaaaaagccaaagaataaatctggtttccattgacctctgagtatgtgaatggctacatgattcctcttatagagcagcctgat

SEQ ID NO: 362729 - DNA, 608 bp, Homo sapiens
tggagggtggataaactgtggtgttttcacaaaatggactacagcatgatagtaaattcattaaactaatggtacacaatgacatggataaatctcaaaaacattatacagagtctaataagccagccgcaaacacctactataaagtttcatttacaaaaacaggcaacactactatgacaaaaaaatctacatttacaaatgattttctgtaaaatagcttgatttacttttgatcgaccttatcctcttatgaatatattcagctcatagcatttttttcttccagatacagctaaaaataaaaaagccaaagaataaatctggtttccattgacctctgagtatgtgaatggctacatgattcctcttatagagcagcctgatccacccatatgccccctaagacatattccttaaaatattcttatggccatcccatataaattttgctctcttaatctatccattcttccgtccatgatagtttgcatttacacaaacttctaccttcctcctctcttgcttcttctattctcttcctsccctccttcctccttaatttctcaaatattaatcttttatattttaggactttttgaccattc

SEQ ID NO: 362730 - DNA, 558 bp, Homo sapiens
tgaatgtattttgggatttaaagtttttcaaattttaaacagtaatatgattcatgtatggcctaaaaggaaacacacccagcagggttctggactgtacccctaattaaacatatttctgttcctatagtgaaatttatgcacagctacacaaattgggtagtattataaatagacttcaatttattcaggtagagttatgttgactaggaaaaaaatttttkattttaaagctttttggatttcagaacaatgaataaggtattgcgcatatatatctatggatggatacagatataggtatataacttagaacaataattcccagcacatattaagtgctatatatgttagtttctactgttattatcacttaaattatttaaattattattttagttgatgggatgaggaggaacaatgagttttcttcttttgtattgaaattttcatttatacaatttggtcgagtattctttttctttgacaactacatcttccttttagaaactgtatcctctttgcatgatttagacttaatccggcaggaatgtcctg

SEQ ID NO: 362731 - DNA, 480 bp, Homo sapiens
ggcaacagaataaatatggaatggaatggcaccctaatttctaggaggtcacaggagcagtcactaggaatgtaagactctgtggtggtaagctcttaaaaatattcctaggaggaagaataaaggcatttttaatttaaaaaaagctgaaatgcacaagaatggtggtgatttctgcattaaaagtatttcttcaacccatcatgtcagacaagaatagactcagtattgctttttcattcattaatgtatgcaagacaccatgttaagagacttttggggggatgataaaacaaggcaccatctatccttgtgtctggggaattactaacaaatagttaaattaaaactgtacagatattgtaatgtaatccagtgcagaaaaagatatgctgtgtcagagtcctcagtagaaagctagattatttttagcagaagggagcagkaatcaagcttcatggatgtggtggcttgtgagct

SEQ ID NO: 362732 - DNA, 567 bp, Homo sapiens
cctggcttctttacatctgtgttcaccttatttgtaaaactagggtataattgtactttcttaataggtttttgtggttattctgacaaataacataatggcacagaatgcatttagcatgctgcttacacatactacgtgttcaataaatattagctattctccttagaggcaagtcccaggtttaatattttaaaactttttgtatgtatcttaaaacttccaggccaaggggatgaagtcctttgttacacaatttttgagtacctaagtatagtcattaaacatacatggtctctacttttgaagaaataaaggtcttatataaacaaataatcacagctactagtgccctcagctatctgggtttttcaagacctyccagggccaacttatggcatttagtcatagctccacagtatgtctttctgaagtttttagaaaatccttgtaggtaataactcccctacctccctcagcacagctgggacacactattgaatgaaactcatcaagtccctaattctttaccaccccactcctcaccacatggaattctagtgaaag

SEQ ID NO: 362733 - DNA, 572 bp, Homo sapiens
agacccaaatacaagaccaagggcacatttccagccctctagacacaatgagraaagcactcagtctataaacgtttatgaacatgattttcagtcatatttctgaagttgactgctctgctcttatactgtgaaaatgacagcaataagagctacttccatggaagggtggagtgaattgggaacactaaaacacttttaagacatccttgaaattctctgcttcttgcaaccacatctgatcccttagggttaggaaattgctatgcagatttatgtaaaatgcatgcaaatcagaagtgtccctctcccactttttaaaaaaattattttaagagaacagtagtattcctataaaactgttaccttctcaggatttgcttcctaccaccctcacttttttttcaaagataatttgccctcttcttccctagctctttgcaaatgcttagctgcccaattctctggaaggtccctatgaatacctattcatctgtcccaattaccttttctcttctgcctccttccttcaccttctccacagcatttgacattattaggcatcctctcca

SEQ ID NO: 362734 - DNA, 599 bp, Homo sapiens
accagcgtgtcagccaagatctgtttgtttaagtaagcataaacaagaagaatgtctgaaaattggtccactgaaaataacaagacctttgatactgggtaaagcaagaatgttttgttcatgtgttaccaaatatccagctatcatatacctgtcagaaatgcttatttcacaaggcaataacttagccatacccagaaaaatgaagtggagctgatttcactgggcgttttctgctgcttcctctcttcaagttagactggaaatactatcaagaaaatcctcccagcaatctgccccaaacaaggaagtccataaaaaaagaacaaggaggtaggagcaggagaaacagagatttaaaaaatgaggctttttatctgtacttagaactcaaaaaatgkgcagtttgaaataacttctctttcttctatctactcatgttattttgattcatgtgaaaaaatactttaaaaatccacagttgggagttttcaaaatttcaacataaaaatctggcaggaagtgtctctaaatacaacaactcaattatattcagaaaggaaatgttcccaataggcctgagctaatcagaaaataat

SEQ ID NO: 362735 - DNA, 565 bp, Homo sapiens
tgttacttgatggaatattaaatataattaagagtttttaacaaactaacagaataaagtccagggtaagccctatgagattactagattactaccatcgctgcttttctacacaattaagtaacttccaaagtcacctagatttaaatgtagctcttctgcttgagaataaggaacaatgatgaacaaccttaaaaactgtattccattttatattttaaagcacttgcataagttagtagaatctcaggtacagtactccctactactaagagaacaccactgagcaattgcttcaggcccaaagataagtcttaaggatcagtaatttgattacttttaaattccataaaatctctcaactgagtccctgcattacaatctccagagggcaatgtgatatgagacatyggtggagatcttatgtatccattaatttaggataaacaatggtctccgctgcataccaactcaatgtcaaagatctgaaaagaggcgtaaagtctgaaaatcgcaacaaaagcaaatataaaattaatctagtatagaactaaggaaaaacaag

SEQ ID NO: 362736 - DNA, 635 bp, Homo sapiens
  misc_feature (1)...(635): n = A,T,C or G
tcaatgtttacttccttcaagagtttttataaaattcctaggaaaaaaacttattcccttgtgttagatttatttataagtacccttaatttctatggtttaattgctatttatcttatactctgcaacttttaaaaatgtgctttagccctaataatttatcatttacaccatagatgctcttgccagtttgttttctccttttttgttntaatcttattttattttttagattttyttttattagatagaacttcagaataccgaatagtagtggtaatagggagacctttgcctgctgcctgaattaaaagagcgctgtttcagatatctcactgggaagtgtgatgtttactgtaagtttttgttggcctgcattttcaaaatgtgcataatagttaataccattaactatatatataggttcagctaaaaagtttaatagtaaccaaattcttctacacttttttttattattattatactttaagttctaaggtacatgtgcacaacatgcaggtttgttacatatgtatacatgtgtcatggtggtgtgctgcacccattaacttgtcatttacattaggtattcctcctaatgctatccctcctgactcccccaaccccatgacagg

SEQ ID NO: 362737 - DNA, 594 bp, Homo sapiens
tgaatcagagaagcagaataggtagtgtatctagcactgtccagggaaatgagacagaatctggagggtgtgagcaactgggacctagagagtaaaaggactctcttttaggaggaacattagcytacaggctaatctcaaggtatctaccttattttacccaaatcttatgctcaacaaataacctcctgatgactaattcagtttcccttgttcttccagagagggggaaaaagtgcccaggacagaattttcgagcattccagtcactagaatccacttattacaaaacactaaattgaccttctggtttacatagcaatctccctaggtctgatcaacttaaggctttgggacccctgttgaggtgtcttcatggtcactttgcagatctttgtaggatatccaaactccctcatgttcctcccacaaacctgctgctataacacatcttcgcaaaagatattttaaatattttcagtatattatgaatggcattaaaataactaacatgctacccttacataaactgaatatattctttaaccaattcttgaagtgaaaagtctatagatttcaagtacttcccaatag

SEQ ID NO: 362738 - DNA, 594 bp, Homo sapiens
tgaatcagagaagcagaataggtagtgtatctagcactgtccagggaaatgagacagaatctggagggtgtgagcaactgggacctagagagtaaaaggactctcttttaggaggaacattagcctacaggctaatctcaaggtatctaccttattttacccaaatcttatgctcaacaaataacctcctgatgactaattcagtttcccttgttcttccagagagggggaaaaagtgcccaggacagaattttcgagcattccagtcactagaatccacttattacaaaacactaaattgaccttctggtttacatagcaatctccctaggtctgatcaacttaaggctttgggacccctgttgaggtgtcttcatggtcactttgcagatctttgtaggatatccaaactccctcatgttcctcccacaaacctgctgctataacacatcttcgcaaaagatrttttaaatattttcagtatattatgaatggcattaaaataactaacatgctacccttacataaactgaatatattctttaaccaattcttgaagtgaaaagtctatagatttcaagtacttcccaatag

SEQ ID NO: 362739 - DNA, 594 bp, Homo sapiens
tgaatcagagaagcagaataggtagtgtatctagcactgtccagggaaatgagacagaatctggagggtgtgagcaactgggacctagagagtaaaaggactctcttttaggaggaacattagcctacaggctaatctcaaggtatctaccttattttacccaaatcttatgctcaacaaataacctcctgatgactaattcagtttcccttgttcttccagagagggggaaaaagtgcccaggacagaattttcgagcattccagtcactagaatccacttattacaaaacactaaattgaccttctggtttacatagcaatctccctaggtctgatcaacttaaggctttgggacccctgttgaggtgtcttcatggtcactttgcagatctttgtaggatatccaaactccctcatgttcctcccacaaacctgctgctataacacatcttcgcaaaagatattttaaatattttcagtatattatgaatggcattaarataactaacatgctacccttacataaactgaatatattctttaaccaattcttgaagtgaaaagtctatagatttcaagtacttcccaatag

SEQ ID NO: 362740 - DNA, 594 bp, Homo sapiens
tgaatcagagaagcagaataggtagtgtatctagcactgtccagggaaatgagacagaatctggagggtgtgagcaactgggacctagagagtaaaaggactctcttttaggaggaacattagcctacaggctaatctcaaggtatctaccttattttacccaaatcttatgctcaacaaataacctcctgatgactaattcagtttcccttgttcttccagagagggggaaaaagtgcccaggacagaattttcgagcattccagtcactagaatccacttattacaaaacactaaattgaccttctggtttacatagcaatctccctaggtctgatcaacttaaggctttgggacccctgttgaggtgtcttcatggtcactttgcagatctttgtaggatatccaaactccctcatgttcctcccacaaacctgctgctataacacatcttcgcaaaagatattttaaatattttcagtatattatgaatggcattaaaataactaacatgctaccyttacataaactgaatatattctttaaccaattcttgaagtgaaaagtctatagatttcaagtacttcccaatag

SEQ ID NO: 362741 - DNA, 515 bp, Homo sapiens
tggttcctgttatttcattttggttggcagcaaatgttccctcagtatgccttggataagacttggatgttttctaaattcccaacytgatctcagttaagcaagaaaatgacaaagttttcatctttgggactcctcaatatatgacagtttggttgaaaatcatgctgttatataagcccccattctgctttgcatatctgtgaaggcatcaatatctagaagctctgtaaagtgactcctcatatgatcttcataaaaaggtatgctttctgctttttgtccagcccaccccaccccacacagaggcatggtatattcaaacgacactgggactgagcatacggagtcacaggttctagttccagtgctgcctttaatatacagtctgaccttggacaattttctttgcctttctcagcctcaaatttcccatttataaaatggtttggggcgagtagagtaatgacgtttaattccccttccagcactaagatcctttgtttctaatttgt

SEQ ID NO: 362742 - DNA, 474 bp, Homo sapiens
caaacaaaacccatctgtgcttctttcatgatacttaccattttttgttgtgttatgagtgttcttgcatttgtataatctttatgcttagatccccrgttctttgggggaaagaattcatgttcttacatatacatttcctagagagcataataaaatagcttgtttagttagtgatggttgaagaaagtgcatcacttttcttcttgaagggttcacaataatttttggtagaacagaatgatataaaggcttaggaaattggactatcatattacattagttaaggctttggagtctcaaagacctctgctgaaatggcagctccacatttagttgccacaatgcctcaggcaagttactgaactctatgagcttcaatgacctaatctgtacactagaggaagtaatacatatctcatggggtcataactgttttaaatgaagcaatatatgtaattagcacacttattt

SEQ ID NO: 362743 - DNA, 579 bp, Homo sapiens
agaacaagtgccttatggaaggtggcaaaaagggagttaagaagaaagtagttggtccattctctaagaaagatcagtatgatgtgaaagcacctgctatgttcaatataagaaatattggaaagacttcgtcaccaggacccaaggaacccaaattgcatctgatggtctcaagggtcttgtgtttgaaatgagtcttgckgatttgcagaatgatgaagttgcatttagaaaattcaagctgattactgaagatgttcagggcaaaaactgcctgactaacttctatggcatgggtcttacctgtgacaaaatatgttccaaggttgaaaaatgttcaacaatgattgaagctcatgttgatgtcaggactaccgatggttacttctttcttctgttttgtgttggttttactaaaaaacacaacaatctgataccgaagacctcttatgcttagcaccaacagtctgccaaatccagaagaggatgatggaaatcatgacctgagaggtgcagacaaatgacttgaaagaaatggttaataaattgattccagacaacattggaaaagatgtagaa

SEQ ID NO: 362744 - DNA, 579 bp, Homo sapiens
agaacaagtgccttatggaaggtggcaaaaagggagttaagaagaaagtagttggtccattctctaagaaagatcagtatgatgtgaaagcacctgctatgttcaatataagaaatattggaaagacttcgtcaccaggacccaaggaacccaaattgcatctgatggtctcaagggtcttgtgtttgaaatgagtcttgctgatttgcagaatgatgaagttgcatttagaaaattcaagctgattactgaagatgttcagggcaaaaactgcctgactaacttctatggcatgggtcttacctgtgacaaaatatgttccaaggttgaaaaatgttcaacaatgattgaagctcatgttgatgtcargactaccgatggttacttctttcttctgttttgtgttggttttactaaaaaacacaacaatctgataccgaagacctcttatgcttagcaccaacagtctgccaaatccagaagaggatgatggaaatcatgacctgagaggtgcagacaaatgacttgaaagaaatggttaataaattgattccagacaacattggaaaagatgtagaa

SEQ ID NO: 362745 - DNA, 479 bp, Homo sapiens
gtctaacactgcacctctgcccccagcctcttggccagtactagccacatcccctcccccaccacagggcaaygcatgaagacaggagaattggatacattacaaatttctaccccatggcatttcataaaagagaaaaaaatgcaaatacaaaaatattttaatagaatagaatatatacatttttagaataaagaacagtcctccaaaaaggacagctggtggtctttcaccaatgggcacatttctgtgacattttctctgtttttccattttatccttgacctatgaacattttataaagatggtccaaagaacaccatttgggaaccactgctctaatcaggtgatgaaaacggccccaagaacagagcacagtctctttagcaaagacccagcagggccagggtgaccatgttctcaccatcaatgtgcagacatccacctgcagcatcctaacatcccaacatcaaacagtg

SEQ ID NO: 362746 - DNA, 479 bp, Homo sapiens
gtctaacactgcacctctgcccccagcctcttggccagtactagccacatcccctcccccaccacagggcaacgcatgaagacaggagaattggatacattacaaatttctaccccatggcatttcataaaagagaaaaaaatgcaaatacaaaaatattttaatagaatagaatatatacatttttagaataaagaacartcctccaaaaaggacagctggtggtctttcaccaatgggcacatttctgtgacattttctctgtttttccattttatccttgacctatgaacattttataaagatggtccaaagaacaccatttgggaaccactgctctaatcaggtgatgaaaacggccccaagaacagagcacagtctctttagcaaagacccagcagggccagggtgaccatgttctcaccatcaatgtgcagacatccacctgcagcatcctaacatcccaacatcaaacagtg

SEQ ID NO: 362747 - DNA, 350 bp, Homo sapiens
tcaaatataatcaggtaaaaagagcaaattctctgtgactctacctttttgttttgttcaggccttcagtggattggatgaggctcacccmcattggggaggacaatctgctttattcagtctaccaattaaatgttatcctcatccagaatatctcagagacacacccagaataatgtgtagccaaatatctgggcaccccacaaccaagtccaattgatacataacactaaccatcatgtcttgcttctactctctccccattactgcatgtccaaatccttcccttatttcaaggcttagttcaaatgttacctcttaactaagccttccctgctaaccccaaatat

SEQ ID NO: 362748 - DNA, 350 bp, Homo sapiens
tcaaatataatcaggtaaaaagagcaaattctctgtgactctacctttttgttttgttcaggccttcagtggattggatgaggctcacccacattkgggaggacaatctgctttattcagtctaccaattaaatgttatcctcatccagaatatctcagagacacacccagaataatgtgtagccaaatatctgggcaccccacaaccaagtccaattgatacataacactaaccatcatgtcttgcttctactctctccccattactgcatgtccaaatccttcccttatttcaaggcttagttcaaatgttacctcttaactaagccttccctgctaaccccaaatat

SEQ ID NO: 362749 - DNA, 496 bp, Homo sapiens
  misc_feature (1)...(496): n = A,T,C or G
tgtgaattcccacaaccaccctgggataatggaagttttgacaagaatccttttgactggcttttttactggacacatccagttacwaagcttttctgatttccagcttattgctctaatttttaaaacaatactttggggtattaactgcttaaaggctaatccaattaaatttgagtttctttgaaggcatagtcctcatgaacagtgtttgaaatttgaacctaggagggttcttccaaatttttcttttccaggtgtctcttgtaaacaagacggcatactgtttaacttgcatctccaatcagattgccaacccctccaaattgtctttcaccataacctgcactctntttgaaagtgcccttaggcttgaacttctccatgttttgttacaaataattcttttaggagaataggagctatcagttttatagcctgctttcccaccaggcaaagtcactgagcaatcactctggagctggggacagaaaga

SEQ ID NO: 362750 - DNA, 599 bp, Homo sapiens
caaacccttctttcattgtttacagactggtttcagcaagggaaaataatctgtttggtctctgggctgatgggattgcctgtgggatagcagttaagtgggattgcatctgggtctcatggctgatgctgcatctgcaatggagaatgcagtgagcaggtctgttaccaggggctctattgcatgtgggtcctatctggtccctgggtagactggactttctccagtcctttggtctatggatctgtgctataattaagtctcatttcagggtttgcaaatggcaggtctgttaccacatgcatgatggatgtggttttcaccaggtctctggaagggctcctgttatatcactggatgaatccttgggctggctgtacttttcaagttgatggctaaaatgrgctggaactgaggcacgagtttatatgaggccacagctgagaccgaaatctttaggcctgtctctgaggccattaatagggtgtctcccagtagttttccgagtgagcaggcctgctttcatactgcagttgagaagtgattgatagagccaatttccagggccactttaggattcacagtgggactgaggtcag

SEQ ID NO: 362751 - DNA, 525 bp, Homo sapiens
acaaacagggctgaaacatgccccttgcttgccacattgcaggcgacaaggaggaggtaagagggaaagagagaagagctgcggccattcagggagcccagacctgggagctccctgagccagggctgtgacaccytctttggggctctgtggttcccggtgtctctaaggttctgggcgcaaccatgtcccctcgtggcagccatagaagctgcttgtgcctggtccagctgcagccttgcagggagccagcccccatgctggcacctggagctgcccaccctttccagctggcatgcctagctgtacacagtgaccataccccatgctcactctctcacaccccctcactgctccacacttgactcgcccttgacaggcatgggaaacaggccagtagcataagccaaggtcagcctgccaggctgagtgagtagaacgagcctagtggctcgtgagttttgctcaggcaaaggtgccatcctctgtggccccaaggatcctgtcacaatgttactagaaata

SEQ ID NO: 362752 - DNA, 525 bp, Homo sapiens
acaaacagggctgaaacatgccccttgcttgccacattgcaggcgacaaggaggaggtaagagggaaagagagaagagctgcggccattcagggagcccagacctgggagctccctgagccagggctgtgacaccctctttggggctctgtggttcccggtgtctctaaggttctgggcgcaaccatgtcccctcgtggcagccatagaagctgcttgtgcctggtccagctgcagccttgcagggagccagcccccaygctggcacctggagctgcccaccctttccagctggcatgcctagctgtacacagtgaccataccccatgctcactctctcacaccccctcactgctccacacttgactcgcccttgacaggcatgggaaacaggccagtagcataagccaaggtcagcctgccaggctgagtgagtagaacgagcctagtggctcgtgagttttgctcaggcaaaggtgccatcctctgtggccccaaggatcctgtcacaatgttactagaaata

SEQ ID NO: 362753 - DNA, 646 bp, Homo sapiens
aaaacaataatatttcagtatagtgtaattacacaactgttttttacttcatgaactccctgaaagtttctccaggaaccacaggagtttttagaccataatttgagacaagatcttttattaaaaaaatagaaacaaatttgaatcaagaaaaaatagaaaacattactaaatctgtcaccattaaagtacaaagtcagcaattaaaaccttgggccaatcccactcacaaaaggaatgggaacagggaatacactgcatctagasaaattttaccaatctatcaagaacaggtaatccaaaacttgcagcaaatagaaaaaaaaggaaagtaaggaccctatgtgcttcatcctaactcaggcaagttatttttaaagaaagcaaatttcagctatctcactactagacctggtaattcattggggttgctgaatacaagatcatcatataaaaatgaaaagctttcacatataccaccgattttctctatttcagtattgaacaggaaaaaagaataccatttataaaggcaatataaaatttaggctatctgggtagaaacctaacaaagagtgcccttttataaagaaaattaaaacacattgttaaaggatataaatatctgaaaaaagtactatgttct

SEQ ID NO: 362754 - DNA, 646 bp, Homo sapiens
aaaacaataatatttcagtatagtgtaattacacaactgttttttacttcatgaactccctgaaagtttctccaggaaccacaggagtttttagaccataatttgagacaagatcttttattaaaaaaatagaaacaaatttgaatcaagaaaaaatagaaaacattactaaatctgtcaccattaaagtacaaagtcagcaattaaaaccttgggccaatcccactcacaaaaggaatgggaacagggaatacactgcatctagagaaattttaccaatctatcwagaacaggtaatccaaaacttgcagcaaatagaaaaaaaaggaaagtaaggaccctatgtgcttcatcctaactcaggcaagttatttttaaagaaagcaaatttcagctatctcactactagacctggtaattcattggggttgctgaatacaagatcatcatataaaaatgaaaagctttcacatataccaccgattttctctatttcagtattgaacaggaaaaaagaataccatttataaaggcaatataaaatttaggctatctgggtagaaacctaacaaagagtgcccttttataaagaaaattaaaacacattgttaaaggatataaatatctgaaaaaagtactatgttct

SEQ ID NO: 362755 - DNA, 574 bp, Homo sapiens
aagttactgatctctaaatatccgtgagtctttataagaattctgaagtaataatcaaaaaaagaggtatagggctgggcacagtggctcamgcctataatcccagcactttgggaggtcaaggtggggagattacctgaggtcaggagtttgagatgagcctggccaacatggtgaaaccctgtctctactaaaaatacaaaagttagcccgacgtggtggcacacgcttgtaatcccagctactcgggaggctgaggcaggagaattgcttgagcccgggagatggaatggatgttgcagtgagctgagattgtgccactgcactccagcctggccgacagaatgagactgtgtctccaaaataaaaaaaaaaaaaagaggtgtagttaaaacaatggataagaaaatgtgcagcagtctggtttgtgtctataaagtggcagttatttaagtggttattcagaatctgaataaaaaagcatagtcataatcccgttgattaaaataaaagtgaacaatctcatgctccaaatggtaaatacgaggaatgacttttagttttaagaacacag

SEQ ID NO: 362756 - DNA, 609 bp, Homo sapiens
tattagcaactgaaaaacatcacgttattttgaaatctttcaataagtgattaatggagtcaacacttattgattgggaatatatataatatcatttcgtgtgtgtgtatacacacacacacacacacacacacacatatatatatatatgaatgaaacagcaagaaaacatgtctaacacttaactcctttaagacttgactgtttgaaggccaggcgtggtgactcatgcctgtaaccccagcactttgggaggccaaggcaggcggctcacctgaggcaggagttcaggaccagcctgactaacatgktgaaatcccatctctactcaaaatatcaaaattagccgggcgtggtggtgggcgcctgtaatcccagctacttgggatgctgagacaggagaatcgcttgatcccaggaggtggaggttgcagtgagccaagatcacgccattgcactccagtctgggcaacagagcaagactctcaaaaaaaaaaaaaaaaaaaaagacttggctgtttgaattctagagcatatttttccttaaaagtgatgtaagttcttcataatcttgttacacactctctctgggaaaatgcattccatata

SEQ ID NO: 362757 - DNA, 574 bp, Homo sapiens
atcctcccacctcagcctcccaagtagctggtaccacaggtgcacctgaatgaggtttktttttttttttttgtggagactgggtcttgctatgttgctcaggctggtcttgaactcctaatctcaagtgatccacctgcattggcctcccaaagtgctgggattataggcatgagccatggcacccggcatcaaaaaaaaaaaaaagaaagaaaaaattcttaatagtcccttctttattaatgtcagtttggtttcccattcctgctttcactggcaccctcttataggctattcatagtcactgtaccttacaatttgcttcctactgaacatttacactccatcttttatttttactgactgcgtgtaacataatttgtcaacattcaccttttcaaaaaggcatataatgactattagtacaccatagcagaccacttaaatatagaaactcaataatctatagcatttttatgtaattaattaatttatttatttatttatgtattgagacagagtctcactctgtcgcccaggctggagtggagtagagtgatcctgattcactgca

SEQ ID NO: 362758 - DNA, 505 bp, Homo sapiens
gcaccagctatgtgctctctaattcagtttcaatactatctacccaaagatagtgtcagatcccacaggttgagggctcagtcccmaagactgccccctcatacacacatgcaccagtcgcaagtccgggcctccagaacttctgactgaccaacttcatgtcagggttcccatgaccccttctttgcattcaattaatttgctatgagcaaattagattcaggttcacataacttgggaaaacacttatgtacatttattggtttatataaagaacattgcaaaggatacagatgaagagacacatagggtgagttatgacgaaggggcacagagcttccatatcctccctgggcgtaccacccttcagagtcctccatgtgttcagctatctggaagctcactgaaccctgtcctcttgggtttgtatggaagcttcatgatatcagtgttcctttcccaaaggtataggggtgggaccctctcatgggaggatcgtaagaac

SEQ ID NO: 362759 - DNA, 615 bp, Homo sapiens
gcataaatgtaaagtgcatatacctgtcagagatgtttttatctgcccagactccctttctcctagacatcatctttccttcccaccctcctccgtcccattcatatggtttttccatggccagaggtgactggtttagggatggccacctgatctctgagctgagccaattagggcccttctrtgaaaaatgaaagaaagaaaaaggcagcagaaggcaagaaggggaagagagggagagacaaagaggagaagagtacatatttgtgagaagagtacatgttggaaatagaatctcaacagagtccctagttctaggtgttcccaagacccatttgtctttggaatatctgggtaaccccaatattctctaataaatttcccttgaatggctgtcaattgcaagctagagtatagcaagacccaactctcaatacaccctcactatactatcattattaaactgcaagggccgtgaaggtaggggtagaaacttatttaattctgtattctcagagattagcatagtgcctgatatactgcaggcagtcaagtacctactaaatgaaaggtttgttgacttcaggggagaaattataattcagggttaaaatt

SEQ ID NO: 362760 - DNA, 441 bp, Homo sapiens
gcattagaccagggccttaataatcatccagagctacagagatgtaagttggtgttctcttattctttctcctaaatatgagagcataaagtccacagaaagaaaatacagctaggcagttaaattttacagccgtttagagaaaackgagtcagaaatagtataacaaaggaagcactatggattcatgtttcagaggacccagctggtctgaccacaccagaaaaagagcagctgagcgggtactctgctttccctaagctgttagtggacaatctctacttcagaagtatggaaaacacagtgatgtcttgattcatcatgagcacttttcaggtaacacattctgaagtctattgaaagagtactcttcagggagcattcctgcctggccaccagctgaaaagaggagtgattcaagttttaggcagatttcctaat

SEQ ID NO: 362761 - DNA, 601 bp, Homo sapiens
aagataaagacaaagagatacacacctagacaacatcctagtcaaattattcagagagaataataaagagaaaagcaacaaatctattcataaaagggaaagaaatacaattagaagctaatttattatcataaaaaatggattccagaaggcagtgaaaggtatgtctcaaaatccctgaagtgatatattcagagtgctgaatactttcarctattatttctttaattgttttttcataggtttccaaggctctatttatttctctttactcttcttttttctctgttcttcatattgaataatttttactgatctaactaaaagttcactgattcttttttcctgccatctgaaatctgctattgaggccctctagggaatttttcattttagttattgtgtttttttgtttgtttgttttttggtttttttttttagatggagtctcgctctgtcccccaggctggagttcagtggtgcaatctcggctcactgcaagctcctccttccgggttcacgctattctcctgcctcagcctcccaagtagctgggactacaggaacccgccatcatgcccggctaattttttgtagtttt

SEQ ID NO: 362762 - DNA, 601 bp, Homo sapiens
aagataaagacaaagagatacacacctagacaacatcctagtcaaattattcagagagaataataaagagaaaagcaacaaatctattcataaaagggaaagaaatacaattagaagctaatttattatcataaaaaatggattccagaaggcagtgaaaggtatgtctcaaaatccctgaagtgatatattcagagtgctgaatactttcagstattatttctttaattgttttttcataggtttccaaggctctatttatttctctttactcttcttttttctctgttcttcatattgaataatttttactgatctaactaaaagttcactgattcttttttcctgccatctgaaatctgctattgaggccctctagggaatttttcattttagttattgtgtttttttgtttgtttgttttttggtttttttttttagatggagtctcgctctgtcccccaggctggagttcagtggtgcaatctcggctcactgcaagctcctccttccgggttcacgctattctcctgcctcagcctcccaagtagctgggactacaggaacccgccatcatgcccggctaattttttgtagtttt

SEQ ID NO: 362763 - DNA, 617 bp, Homo sapiens
gcaaggtacctggagttggatcatctagtggtagcactacagaggaagacccatgggctctttcctgttgctgctgcaggagaagagctgcttcctgtggtagcagagttgtccagcacttccttctattccattccttagaaataaccactatcaattctttctttataaaaaatccataatcctttcagaatttccaggcataaaccagtgtatgtgyctttataaattatgtaaatttcctcatcccacagacactattctacatcttgtttgttcccttagtgtaagtcgtaattccttgtggagagttcagaatcttgcattttagagctgtaatacagtgcacacagcgaatgtcatacaatactactagtggggtctagggcagcaccttataattaaacacattaaattttttttggaactagaagatatgagtattctattcacaccaagttagataaattaagactttacatattcttgtgtcaggtcagtatttgatgccaagtgagtgtaggattggccatgttttgccaccaattaagtttctaaaaaaaaacaaaactaatttctagagtattttggattttggaattgtgtataagaaatta

SEQ ID NO: 362764 - DNA, 623 bp, Homo sapiens
atttctgcctttcaaagtctcaaacaaatagttattcagctctatgatgttgggagctctttgtatcctttgtaactggaagactgagactggaggatctccctctctgtctttcccrcccctccctctctctttgttccacctctttctctgtcttttcccttcatcctgttgcaagacatgggcctccacaagtcacattctcagtcaggaactatttttttttgagatggagtcttgctttgttgcccaggctacagtgcagtggcatgatctgcagcctctgccttccagacgcaagcaatcctcccacctcagcctcccaagtagctgggactacaagtgtgtgcccaccacatccagctactttttgtattttttgtagagatggggtttcaccgcattacctagcctggtttcgacctcctgtgcttaagtaatctggccacctcagcctttcaaggtgcggggattacaggtgtgagccactgtgcccgactcagtgaggaacttctttattttcctgagaatctcgttttttcttccctctatctaaattgaacttatttttcaaaattcacatcaaattttgctttcacactgaagtttcttttgaccaatcc

SEQ ID NO: 362765 - DNA, 575 bp, Homo sapiens
gacccaacatcattgggttaatgtgttacatttggggctgattccttggatccctgggatttcaagttgtatgaatccaatcttccggtaatcagtagaaagttcaagactttttcatctaaagcacccatgttattccaggtctctgggcctgtgaatgaactgtcaagtgaagagtcaacaactgagtccaattttcatgcttctttgcatgtctggcaatttttaattagattcctgacactgattttgagcttattgggtactggatatttttgtatatccataaatattcttgagctgtgttctcaaacaaagggacatagttactttgaaagagtttgatcctttcaggttttccctttaagatgtgttatgtgggatgagactgtgttaagtgtacagctaattatccactactatttaaggcaagacccttccaratgcactgtgaatgaggttttcccatttggttgatggaagaggcactattcttggctctgtgcaagcactgggtactgttccctctaatgcatttggatggcttcttctccagctggtttcctcatgtgaat

SEQ ID NO: 362766 - DNA, 603 bp, Homo sapiens
ttcaggttttccctttaagatgtgttatgtgggatgagactgtgttaagtgtacagctaattatccactactatttaaggcaagacccttccaaatgcactgtgaatgaggttttcccatttggttgatggaagaggcactattcttggctctgtgcaagcactgggtactgttccctctaatgcatttggatggcttcttctccagctggtttcctcatgtgaatgtgctgatcagaaccttggtgaatacttgaggtagactctctgcagatctccagaactctccctctgtacaactatgtcttctccaggacactgttctgtgaaatctagctttcttggtctcctcagactctcaactcctcttcaactcagagggtttgcttggttctgcctgggtgggggcctctcwaatgagcataagttaaagagggggcaatctctcaaagtggggacaatcacagggctcaccccatttccttcccatctttcagagatcactatcttttgttgcctgatgcccagtgtcccacaaaccattgtttcatgtatttgttgtctcttttttttattttgtcagatgagatggtacatccaatgt

SEQ ID NO: 362767 - DNA, 608 bp, Homo sapiens
aatttcataattttcaactctgtgagacatacacttatatgatatacatttaacagacactctcaaagtagcttttgtttctacttatgtccaggggtacttttataagaaataggaaaaaaaatttatagttatagctataaccgaagtaaaattagctatacttaatgtattctttctgtacaagtaaacaaatgtatcactgataaaaacctgaatatgatgcattaacatacacaatattgttgctcaaaaccacaacacattctttggcattccctacgtctgtagtttcaggcacaaattccatgcctgctggcatctctaagaccaactgtttcatcaacaggataaaaatygggcaaacaggtaaaaaaagaaaaaaagccaaaatgggttcccaacccattataaaaatgaaccaacctccacttgggtggtatttgagagaaaggaagtagctgccgcctggtctctgggtcagactgttgctccccaagggctttatcaaatgagcaaaccaaacaggctcagccactgatttcaaagccaaacttaaaacttgctaatgcatgtttttagaaagattttagcttagtagatgttat

SEQ ID NO: 362768 - DNA, 633 bp, Homo sapiens
cacatgaaaaagttaatataaagcacacaatgaggtgttatcatacaaaagaaaggaagagagtatccattccactttattttaataaatggaagagtgctaggtgttttgtttcttctattaaatatttatccgtttaagtagagaagaatgaacatcaggaacttagtaatactagtcctcggtaagacagagtagaccaataacaggaaggctttaacatacttaaaaaccagggggaaagaaaatcgaagtgtgtcaagatgatgaattcgctaaatgttctaagaggtgyattaaccacagacttcatccctcatatcctaggagataataccccttccatgtcttactaatggagatagtaatagatcatatggtagcttccatatgatgatgcaaagaaccaggcaaagattaggaggacaggacaatggactatgagatgccagccaagcaaaacttggaaaagaaaacattctgggagaagcaccatgcttcaaaaaaactagaacttgtgtggaaagtataactccaaaatcttactgctgtaacaaattgtggacaaatataaaatggagcctagccagatgaccagtggcttggatttgatgaagctagagatggccaaaa

SEQ ID NO: 362769 - DNA, 565 bp, Homo sapiens
gaatcatatgggcggttacctccatgccattcttgtgatagtgagtgagtcctcttgagatctgatggttttataaggggcttttccccctttgcttggcacttctccttcctgctgccatgcaaagaaggacgtgyttgcttccccttctaccatgattgtaagcttcctgagatctccccagccctgtggaactgtgagtcagttaagcctctttcctttgtaaattacgcagtctcaagcagttctttatagcagtgtgagaatggactaatacacagactgaaaaactagatcaatctgatgttaatctaggggtgcaatgggaattaacaatctgtgagtctgttgacactctggagttgaaaccaaaaagcactaatgcaatcaaatttcctacctataaaatgatgcctcattaatgtcatagtactttctatctctcctacagaaataccacttagtcaatgattggttacaaggtgacacacccgtggtgcttgctgagcaaatcttaagctaactttgtgattaatggctaaatatattatttgctccattttaa

SEQ ID NO: 362770 - DNA, 565 bp, Homo sapiens
gaatcatatgggcggttacctccatgccattcttgtgatagtgagtgagtcctcttgagatctgatggttttataaggggcttttccccctttgcttggcacttctccttcctgctgccatgcaaagaaggacgtgcttgcttccccttcyaccatgattgtaagcttcctgagatctccccagccctgtggaactgtgagtcagttaagcctctttcctttgtaaattacgcagtctcaagcagttctttatagcagtgtgagaatggactaatacacagactgaaaaactagatcaatctgatgttaatctaggggtgcaatgggaattaacaatctgtgagtctgttgacactctggagttgaaaccaaaaagcactaatgcaatcaaatttcctacctataaaatgatgcctcattaatgtcatagtactttctatctctcctacagaaataccacttagtcaatgattggttacaaggtgacacacccgtggtgcttgctgagcaaatcttaagctaactttgtgattaatggctaaatatattatttgctccattttaa

SEQ ID NO: 362771 - DNA, 596 bp, Homo sapiens
aaagataggaaaatttgaggatttatcttggaggaccaatagcttaccactagtagtcataggaagcaaaaacagaaaaaagtaggggagaaaattaaatgacaaaaaagtttccaaaaaactctcaagggcatccaaatcaagattggtagggcataccaaatgccaaaracaataaatttttaaaagggttatatcaattttatatcatgtgaaatttcagagaaacaagaataaggtgaagatcataaaagctttcaataaaataaaccagctatgtacaaataaattagaatggctttagatttctcaatatcaatactggaaattggaaaataataaggccaagtcttcaaaatttttaaagaaaatattttccaagcttgaattttatatttagtggagctgttaatcaagtataatgagggaaaataaagaaatatttatatatgttaaaactccaagtttaactcatatcgccctactctcagggagttcctagattagacgctttagcaaaatgagagcgtaaactaagcaataggaagacttgggatgaagaaaacagagaattctgcacaggaaaacaacaacga

SEQ ID NO: 362772 - DNA, 578 bp, Homo sapiens
acccatttattttaatccctatcaaagctttatactgtaaacattatttgtctccacttttctgatggaaatgtcaactcatatatggtaactgttttagttagggtaagtaatactacctttctgataaagcccaaaattcctgtagcttaacacaataaaaatttatatttcatagcatagtccaatgtaggaatattggttaagcaatcttcaacaaggtcatgcaaggattcaggctctttccctcttataatattgacatatcctagggccttagagtctataaatcacatcacatccactcrtgttcctttggccaaaactcagctatatagtcacatctaattaacaagggagtctaggcaacaaaagcaccctgcccaaaagagaataaaagggaaggagctcaaatttggcatcaaacaacttgtccatggttacagaattagtgggtttcagaggtgtgacttgaacagtacaaaataaccacaacaatgaaaaagaacagcaagactttcccctcatgaaacttatagtctataaagacaagcattatttacacacaaaagtaagat

SEQ ID NO: 362773 - DNA, 578 bp, Homo sapiens
acccatttattttaatccctatcaaagctttatactgtaaacattatttgtctccacttttctgatggaaatgtcaactcatatatggtaactgttttagttagggtaagtaatactacctttctgataaagcccaaaattcctgtagcttaacacaataaaaatttatatttcatagcatagtccaatgtaggaatattggttaagcaatcttcaacaaggtcatgcaaggattcaggctctttccctcttataatattgacatatcctagggccttagagtctataaatcacatcacatccactcgtgttcctttggccaaaactcagctatatagtcacatctaattaacaagggagtctaggcaacaaaagcaccctgcccaaaagagaataaaagggaaggagctcaaatttggcatcaaacaacttgtccatggttacagaattagtgggtttcagaggtgtgacttgaacagtacaaaataaccacaayaatgaaaaagaacagcaagactttcccctcatgaaacttatagtctataaagacaagcattatttacacacaaaagtaagat

SEQ ID NO: 362774 - DNA, 378 bp, Homo sapiens
aatatctgattttgagaaatttgtgtttatgtccttcacctactttttttttcatgttttaaaaaagtgacattgtattattactatccacaggtggggcctgcatgwtgtggtaggtatgctgggctcaggggacatgtgggctgtgaggaggagatgatgacagaaaggctggatggaaagtgggtgggtttgaaggccaggcccaaggggtcctcagttccacttctgggaagggacagccttgaggaaggagtcatggcaagccgcagctaggccaccaatcagattaagaaattttgggaaatctaactacccatcgctgctgacagccagtttcttcatgcggtcaaggacaccggggtccttctggttctt

SEQ ID NO: 362775 - DNA, 378 bp, Homo sapiens
aatatctgattttgagaaatttgtgtttatgtccttcacctactttttttttcatgttttaaaaaagtgacattgtattattactatccacaggtggggcctgcatgatgtggtaggtatgctgggctcaggggacatgtgggctgtgaggaggagatgatgacagaaaggctggatggaaagtgggtgggtttgaaggccaggcccaaggggtcctcagttccacttctgggaagggacagccttgaggaaggagtcatggcaarccgcagctaggccaccaatcagattaagaaattttgggaaatctaactacccatcgctgctgacagccagtttcttcatgcggtcaaggacaccggggtccttctggttctt

SEQ ID NO: 362776 - DNA, 709 bp, Homo sapiens
gcatttttttcttatgaaatctgttgacatccctacgctttcgtctgtaaataatatgttacttctctagctattcctagctagagataagattttctctttaccactgattttgagcagtttgtttatataatgtgccttactatagctttctttatgtttcttgtatttaggattaattgaaattcttagatctttaggtttacaatttttatcaaatttggaaaaattttggtcattatttcttcaaatatttttctgcctccccacttcactttcatttagggactctcactacatgcatatggggctgcttgaaattgttcagtggttcatggagcctatgtttatttttgttcttaatttaattttggatagttactattgctgtgtcttcaagagttcactggttgtttttctgcagtatctaacctgttgttaatcacatccagtgtatttctcttttaagtcattgtagttttcatatctaaaagttcattttggatctttgaagtatttttgtgtctctagttaacatgttctttctctgttaccacttcttcaccatgtgtaatacagttatactaactgcctcagtgcytccacctgctaattctgtcatctgtgtcggtttcaattaattgtttcttcttctcatatcggggctgtgttttcttaagtgtttgcaggcttggcaatgtttactttg

SEQ ID NO: 362777 - DNA, 709 bp, Homo sapiens
gcatttttttcttatgaaatctgttgacatccctacgctttcgtctgtaaataatatgttacttctctagctattcctagctagagataagattttctctttaccactgattttgagcagtttgtttatataatgtgccttactatagctttctttatgtttcttgtatttaggattaattgaaattcttagatctttaggtttacaatttttatcaaatttggaaaaattttggtcattatttcttcaaatatttttctgcctccccacttcactttcatttagggactctcactacatgcatatggggctgcttgaaattgttcagtggttcatggagcctatgtttatttttgttcttaatttaattttggatagttactattgctgtgtcttcaagagttcactggttgtttttctgcagtatctaacctgttgttaatcacatccagtgtatttctcttttaagtcattgtagttttcatatctaaaagttcattttggatctttgaagtatttttgtgtctctagttaacatgttctttctctgttaccacttcttcaccatgtgtaatacagttatactaactgcctcagtgcttccacctgctaattctgtcatctgtgtcggtttcaattaattgtttcttcttctcatatcggggctgtgttttcttaagtgtttgcakgcttggcaatgtttactttg

SEQ ID NO: 362778 - DNA, 686 bp, Homo sapiens
actcagaggagttccaaaaatgttctgggcaatggcagtgtcactgcaatgagtacttaacctcctcaagtgacttaggagaaaagaagtcatttttatcataaaatgggatatgattaaagtaagtcttattactttatgatcatttttaaatatttacttgggcactgtcttaaaaagaaaaacttcctactatagtatttttcaaggataagacagataaaaagctttgcttgggaagaattttgtcatgttgagtgataatcaggaaagggcctatttattctcttatacctgttttagacaggaaaacatgctatttggcaggttaaaaaaaaccarctttatgaactaaacacttacccacgtcattaacaaagatgaagaataataagaagataagtacattgaatttccaaacatcaaaatgaaactaagggtaactgaaatctgaaaaaaatgaaaaaaatacattttatggttattacatatattggcataatgcatattttgtaggtatatagccatttctaatgcaaatttatttgcataaagatgaatgactcttggccaaatgataacagaatttcaagtcactgctagattctaagtattaaaattcaagaccataaactctatctggcagaatttaactttttctccatctgctacttggaacaatgaaa

SEQ ID NO: 362779 - DNA, 617 bp, Homo sapiens
tctgtatcttttcaaaggattgggagatcctgcttgcttttatgttggtgtaatctttattttaaatggactaatgatgggattgttcttcatgtatggagcatacctgaggtaagactactactgaattaagagacctttcagtgggcttttacagactggctgatatttgttgattaaatgaaaaggaaaattaatgagaatagattcatatcaggtaagtttgtggatctacttgatttttcagaagcttaaccaatatcatgtaaccagaaactggagatgtcactaaaattctatctcaaagtcrtcccttttattctgttgtttaaacagatttcctaacaaaggctttaatggaatatctcctagttcatgtgtaaaattaataaaacattggaggagatctttggttagcagtagtagcagcttatttctaattgtattctctaaggatgaaattaagaaagcagtaggaaaaattgtgaatcacatgtggcaggcacttacatctgctagcatgtctatcttgataagagtaccacgatgaagcagcagcgagaccagtctcaggtgataagttgaaattaatttcaacggtcgtgtgttttgccccc

SEQ ID NO: 362780 - DNA, 617 bp, Homo sapiens
tctgtatcttttcaaaggattgggagatcctgcttgcttttatgttggtgtaatctttattttaaatggactaatgatgggattgttcttcatgtatggagcatacctgaggtaagactactactgaattaagagacctttcagtgggcttttacagactggctgatatttgttgattaaatgaaaaggaaaattaatgagaatagattcatatcaggtaagtttgtggatctacttgatttttcagaagcttaaccaatatcatgtaaccagaaactggagatgtcactaaaattctatctcaaagtcatcccttttattctgttgtttaaacagatttcctaacaaagkctttaatggaatatctcctagttcatgtgtaaaattaataaaacattggaggagatctttggttagcagtagtagcagcttatttctaattgtattctctaaggatgaaattaagaaagcagtaggaaaaattgtgaatcacatgtggcaggcacttacatctgctagcatgtctatcttgataagagtaccacgatgaagcagcagcgagaccagtctcaggtgataagttgaaattaatttcaacggtcgtgtgttttgccccc

SEQ ID NO: 362781 - DNA, 617 bp, Homo sapiens
tctgtatcttttcaaaggattgggagatcctgcttgcttttatgttggtgtaatctttattttaaatggactaatgatgggattgttcttcatgtatggagcatacctgaggtaagactactactgaattaagagacctttcagtgggcttttacagactggctgatatttgttgattaaatgaaaaggaaaattaatgagaatagattcatatcaggtaagtttgtggatctacttgatttttcagaagcttaaccaatatcatgtaaccagaaactggagatgtcactaaaattctatctcaaagtcatcccttttattctgttgtttaaacagatttcctaacaaaggctttaatggaatatctcctagttcatgtgtaaaattaataaaacattggaggagatctttggttagcagtagtagcagcttatttctaattgtattctctaaggatgaaattaagaaagcagtaggaaaaaytgtgaatcacatgtggcaggcacttacatctgctagcatgtctatcttgataagagtaccacgatgaagcagcagcgagaccagtctcaggtgataagttgaaattaatttcaacggtcgtgtgttttgccccc

SEQ ID NO: 362782 - DNA, 487 bp, Homo sapiens
ctatttggaatagcattaaaagcatgatattcctcagaataaatccaacaaaagatacatatgacagctatgggaaaatgattaaaacattcctgagatatgtctaggaaaatctaagtggagagatattccacgttcattgattgaagacttgatattaaaaagctttatagattcaatgctctaccagtcaaaattccaacatattttttgttgactttgatgagctgatttaaaagttattcaraaatgcaaagggccaaatacagtcaaggtattcttgaaaaaggaggatttgcactatcaattgttgctgtattatgaagctaatgtaaaaagacactatgatattggcacagcaatagacaaatagataactgcaatagagtagagcccagaagcagaaatgtacatttaaaggcatttgatatatggaagagtgggtatcgcagattggtgagtaaggacaggcattttaataaatagt

SEQ ID NO: 362783 - DNA, 612 bp, Homo sapiens
gtcccttttgcatactactgtattcccagcacctacgagagaacagggaacatagtaggagatgagaaagaagcactggataaataactgaatcatgagtgaacrtatgacttaggaagggacatagaaagtctaactccccatcttctctgtatgctggatctctgccttttcagatggtgtcttctgtttctttccttcctctgttttgttacttttaacttttgatttttgtaggtacataggtgtacatatttatggggtacatgagatattttgacacaggcatgcaatgtgtaataatcacatcagggaaatggagtacccatcccctgaagcatttatcctttgtgttacaatccagttttactcttttatttttaaatgtacaataaattattattgactatagtcaccctgttgtgctatcgaatgctagatcttcttcattctaataatattttgtaccctttttcaaaattttggttagtgtggataacaaatatttctctgggcattatttcagctcccaatttatacttaacatttttacataacatcatctggcaacattttagagaattcacatatataaacccatgtaattataat

SEQ ID NO: 362784 - DNA, 412 bp, Homo sapiens
tatcatctttaagcctgttatgagcccctcatgtcacatggtacacagcaatcctgtaatcaaattcatcccaggccacaytcagcatcaatgattaacatgctgcccctgatgctacttcatttcctgaaggctgccagaaagaggtggtacaaacaagagtttcctgacataactccatgtgcataggaatgtaaatttaaagctaatcactgagaaataaaaattttgaaattgttcaatttttaaaaattcactctgttcctagcaccaccagccaaataatcctaccttaattctaccctaatcctgttttacagcctggactcagctagaccctgctactaaaacattaaaccaaaggatattgaggattcctttccgctctgtatcatacggttatatactaaag

SEQ ID NO: 362785 - DNA, 412 bp, Homo sapiens
tatcatctttaagcctgttatgagcccctcatgtcacatggtacacagcaatcctgtaatcaaattcatcccaggccacactcakcatcaatgattaacatgctgcccctgatgctacttcatttcctgaaggctgccagaaagaggtggtacaaacaagagtttcctgacataactccatgtgcataggaatgtaaatttaaagctaatcactgagaaataaaaattttgaaattgttcaatttttaaaaattcactctgttcctagcaccaccagccaaataatcctaccttaattctaccctaatcctgttttacagcctggactcagctagaccctgctactaaaacattaaaccaaaggatattgaggattcctttccgctctgtatcatacggttatatactaaag

SEQ ID NO: 362786 - DNA, 412 bp, Homo sapiens
tatcatctttaagcctgttatgagcccctcatgtcacatggtacacagcaatcctgtaatcaaattcatcccaggccacactcagcatcaatgattaacatgctgcccmtgatgctacttcatttcctgaaggctgccagaaagaggtggtacaaacaagagtttcctgacataactccatgtgcataggaatgtaaatttaaagctaatcactgagaaataaaaattttgaaattgttcaatttttaaaaattcactctgttcctagcaccaccagccaaataatcctaccttaattctaccctaatcctgttttacagcctggactcagctagaccctgctactaaaacattaaaccaaaggatattgaggattcctttccgctctgtatcatacggttatatactaaag

SEQ ID NO: 362787 - DNA, 412 bp, Homo sapiens
tatcatctttaagcctgttatgagcccctcatgtcacatggtacacagcaatcctgtaatcaaattcatcccaggccacactcagcatcaatgattaacatgctgcccctgatgctacttcatttcctgmaggctgccagaaagaggtggtacaaacaagagtttcctgacataactccatgtgcataggaatgtaaatttaaagctaatcactgagaaataaaaattttgaaattgttcaatttttaaaaattcactctgttcctagcaccaccagccaaataatcctaccttaattctaccctaatcctgttttacagcctggactcagctagaccctgctactaaaacattaaaccaaaggatattgaggattcctttccgctctgtatcatacggttatatactaaag

SEQ ID NO: 362788 - DNA, 613 bp, Homo sapiens
actatcctgttcaactatatttgtatcctatttctaattctcccaacaattatatacactggcaaaaactcttcagatgatatataaggaaaaggtcaaatatactaccaaattcatccagctttccaaagatgctcaaaatctttctgtgtctctcactccctcccttaacccacataccacatctgaaaaaaaatgatatggtgtaacgatgccagtattctaaatgcttgaagggcttatcacatgccctttccaagctgtgacagaagaatgtcccctggaccacggcatcctatcaatctcacctctgaaggtgacccagcctcatacttcactgaaacaaagaccattagacaccaacactcccaacttcttttatttccactttaacatttctccatatagtaatcctcacttttctactccctgccatctcagaaaaggaattctctctcctcttttccacagttagcttctcaaatttgtrcctttaattctacccctcccaaatattgcaagacttgctccactaattatttcctctcttggaatcttaatctcatcatcttctcttgatccttcccctcagcctttaaaactcctagacctt

SEQ ID NO: 362789 - DNA, 488 bp, Homo sapiens
ctatatactctttcagtttttgaaatattagcttcccagggaagaaaatcaaattcataagatatgttaggacaatttaactcaagatgttcaaaactgaaatgacatgttctacaatatgtgataaaaccaacccctaacaacttaaagcaaaacagggattgaccttaaagacctgccttttcctcatgccccagccaatcagttttcaaatcttgcattttattttgaaaggtccttatccccctggtctcttgtttctagacttcgcacatatttaagtttgttacctctactgtctttyctcttttcaaacagtatctatgcctgccaaatgtgaacatacaaaaaacaaatcagaatatgccattctgatttaaactgcttattagttaataccctcaagataacatctgggttcttagctgcaatgagtcaagcttacatctttttttgtctttggctgcacatttcctatcacatcacac

SEQ ID NO: 362790 - DNA, 488 bp, Homo sapiens
ctatatactctttcagtttttgaaatattagcttcccagggaagaaaatcaaattcataagatatgttaggacaatttaactcaagatgttcaaaactgaaatgacatgttctacaatatgtgataaaaccaacccctaacaacttaaagcaaaacagggattgaccttaaagacctgccttttcctcatgccccagccaatcagttttcaaatcttgcattttattttgaaaggtccttatccccctggtctcttgtttctagacttcgcacatatttaagtttgttacctctactgtctttcctctyttcaaacagtatctatgcctgccaaatgtgaacatacaaaaaacaaatcagaatatgccattctgatttaaactgcttattagttaataccctcaagataacatctgggttcttagctgcaatgagtcaagcttacatctttttttgtctttggctgcacatttcctatcacatcacac

SEQ ID NO: 362791 - DNA, 488 bp, Homo sapiens
ctatatactctttcagtttttgaaatattagcttcccagggaagaaaatcaaattcataagatatgttaggacaatttaactcaagatgttcaaaactgaaatgacatgttctacaatatgtgataaaaccaacccctaacaacttaaagcaaaacagggattgaccttaaagacctgccttttcctcatgccccagccaatcagttttcaaatcttgcattttattttgaaaggtccttatccccctggtctcttgtttctagacttcgcacatatttaagtttgttacctctactgtctttcctcttttcaaacagtatctatgcctgccaaatgtgaacatacaaaaaacaaatcagaatatgccattctgatttaaactgcttattagttaataccctcaagataacatctgggttcttagctgcaatgagtcaagcttacatctttttttstctttggctgcacatttcctatcacatcacac

SEQ ID NO: 362792 - DNA, 479 bp, Homo sapiens
ttattttcgctatcacaagtagaaaaagcctataagttgctatgccaaaaacctgcctctagatggcaaacaaaccccrcaatacacaaaagagagccaaattcttagaaaccctgggaaaggaagagggctactgtcccattaacaacttggagcccttaaggcaagaatgaggtggaacatctggaacatctgggaggagacacaagggtgcggagtagtggggaacctgctctgtgctctgagactgaaagcccagccttgcctctcaccgctgccttgactgtgtccccatctgctgtgaagtgaatggtgtcttctaaattcgtgctgagccctaattgctgaaaagtgttaagacatgcaatggggggattatgtgcatcttcccgacaccaacatgatgctcaggaaggagacttcttgttttctcttaggattcttttactaaccaagattttgcctctactgcatatttc

SEQ ID NO: 362793 - DNA, 479 bp, Homo sapiens
ttattttcgctatcacaagtagaaaaagcctataagttgctatgccaaaaacctgcctctagatggcaaacaaaccccgcaatacacaaaagagagccaaattcttagaaaccctgggaaaggaagagggctactgtcccattaacaacttggagcccttaaggcaagaatgaggtggaacatctggaacatctgggaggagacacmagggtgcggagtagtggggaacctgctctgtgctctgagactgaaagcccagccttgcctctcaccgctgccttgactgtgtccccatctgctgtgaagtgaatggtgtcttctaaattcgtgctgagccctaattgctgaaaagtgttaagacatgcaatggggggattatgtgcatcttcccgacaccaacatgatgctcaggaaggagacttcttgttttctcttaggattcttttactaaccaagattttgcctctactgcatatttc

SEQ ID NO: 362794 - DNA, 604 bp, Homo sapiens
acatctgggaggagacacaagggtgcggagtagtggggaacctgctctgtgctctgagactgaaagcccagccttgcctctcaccgctgccttgactgtgtccccatctgctgtgaagtgaatggtgtcttctaaattcrtgctgagccctaattgctgaaaagtgttaagacatgcaatggggggattatgtgcatcttcccgacaccaacatgatgctcaggaaggagacttcttgttttctcttaggattcttttactaaccaagattttgcctctactgcatatttccctttgctgattgtccctcccttttgacagaagatggcccagggcattcactactaagtctcaacctcttacccaaagccctcagtctagtgttgctctttccttcatgctatttttgtttctttcttttcttgtaatcatcttggcaataaaataatcagttttttctttctacctattaaagatgttaccttagttaattacagtggtttccttcagaatgataagtggtctttcaaaatgatgtaaagagatctaaatccgtgtgctccagaagttgaatgaagctctgtctagcacgggtgccagtgac

SEQ ID NO: 362795 - DNA, 604 bp, Homo sapiens
acatctgggaggagacacaagggtgcggagtagtggggaacctgctctgtgctctgagactgaaagcccagccttgcctctcaccgctgccttgactgtgtccccatctgctgtgaagtgaatggtgtcttctaaattcgtgctgagccctaattgctgaaaagtgttaagacatgcaatggggggattatgtgcatcttcccgacaccaacatgatgctcaggaaggagacttcttgttttctcttaggattcttttactaaccaagattttgcctctactgcatatttccctttgctgattgtccctcccttttgacagaagatggcccagggcattcactactaagtctcaacctcttacccaaagccctcagtctagtgttgctctttccttcatgctatttttgtttctttcttttcttgtaatcatcttggcaataaaataatcasttttttctttctacctattaaagatgttaccttagttaattacagtggtttccttcagaatgataagtggtctttcaaaatgatgtaaagagatctaaatccgtgtgctccagaagttgaatgaagctctgtctagcacgggtgccagtgac

SEQ ID NO: 362796 - DNA, 626 bp, Homo sapiens
ttcttttactaaccaagattttgcctctactgcatatttccctttgctgattgtccctcccttttgacagaagatggcccagggcattcactactaagtctcaacctcttacccaaagccctcagtctagtgttgctctttccttcatgctatttttgtttctttcttttcttgtaatcatcttggcaataaaataatcagttttttctttctacctattaaagatgttaccttagttaattacagkggtttccttcagaatgataagtggtctttcaaaatgatgtaaagagatctaaatccgtgtgctccagaagttgaatgaagctctgtctagcacgggtgccagtgactctcccagagtgctccatgcagctggacccacagagtccctctgtgctgtcataccacccactgccttctgtgaatgagatattctgattagaatcctggtggatgctatttgagccagtgcccccacaactcctatgaaagccgaggaccacaggcccctgaagacaatcacaggtctctagactcacagctcatgaccgtcctctgcagacacagcttctcctcggatggctgagggttgtcattggctgtgtccttccttgtgcatgaca

SEQ ID NO: 362797 - DNA, 542 bp, Homo sapiens
ttatgtgcatcttcccgacaccaacatgatgctcaggaaggagacttcttgttttctcttaggattcttttactaaccaagattttgcctctactgcatatttccctttgctgattgtccctcccttttgacagaagatggcccagggcattcactactaagtctcaacctcttacccaaagccctcagtctagtgttgctctttccttcatgctatttttgtttctttcttttcttgtaatcatcttggcaataaaataatcagttttttctttctacctattaaagatgttaccttagttaattacagtggtttccttcagaatgataagtggtctttcaaaatgatgtaaagagatctaaatccgtgtgctccagaagttgaatgaagctctgtctagcacgggtgccagtgactctcccagagtgctccatgcagctggacccacagagtccctctgtgctgtcataycacccactgccttctgtgaatgagatattctgattagaatcctggtggatgctatttgagccagtgcccc

SEQ ID NO: 362798 - DNA, 583 bp, Homo sapiens
aaatcaaagtattttccccaagatattgttatttaatgtatttaaaaatgcctctgcaaagctggttcttgtgggaaaaatctacattctgtagagactcctttttaagtctctttcctgacccagagagatttaactaagagtttggcaccttttaagtctgctaagaaacaattacaatctattctctctgaagcctgctacctggaggctccatctgcrtgatgcaaccttggctccaaaaccctttttctaaacccagaaactcccttgtgttgattacaggtcattagatcaactctttcaaccacctatgaaatctttgaatccacctaggacctggaagtccccaacatcccccctccttcgggctgtcctgccttttcatatcaaagcaatgtacaacttacacgtattgattgatatcttatgtctccctaaaacgtgtaaaaccaacctgtagcccgacgacctttgacacacgttctcaagacctcctgaggctgtttcactgatatttctttaactttgaccaaataaatttctaaactgattgagacttttctcagatacttatttgttt

SEQ ID NO: 362799 - DNA, 261 bp, Homo sapiens
attccatgaagactatgcatgtatctcatttgggaaaacagcttttgcaggtgtaaattaaggagcttgaaacagggagatggtcttagattaatcaactgggacttaaatgcaaactcaagtgtcctaaaaaaaacaagaggtagagagasatttagcatagactgaagtggagaaggcagtgtgaacacagagacagagattgcagtgatgtgtccacatcccgggagagagaagccaccagaagctggaagagctaaa

SEQ ID NO: 362800 - DNA, 483 bp, Homo sapiens
ctaccacatttttgagaactttttacagtagcccgaggacactaacacaaatggggctccgggaaaatccagactaaaggtgttgtgttggtttgcaatctccttgcttaactttctgatactagacgtaaatagattggtgaaamattttgtgattgaaaaaatgtacatgaaacctacagtgtacagagaagcatctgttagttataagataaatattgataattttagttgaaaatgacatatgactgttaatatctcacataacattctgagttactcaagaatgcataaaagaggcactagatactcttctcatgtatgtgtgtgtgtctgtctatacatgtatgtacacttcatggtgcatcagctggcggaaccctcaggacaccccttcacatcctcagtgccccatttcacacatgaggaaactgttcatgacagcacatggctgatttgcataaaagtcacttggtcagcagt

SEQ ID NO: 362801 - DNA, 493 bp, Homo sapiens
gttgtgtgaagctaccacatttttgagaactttttacagtagcccgaggacactaacacaaatggggctccgggaaaatccagactaaaggtgttgtgttggtttgcaatctccttgcttaactttctgatactagacgtaaatagattggtgaaacattttgtgattgaaaaaatgtacatgaaacctacagtgtacagagaagcatctgttagttataagataaatattgataattttagttgaaaatgacatatgactgttaatatctcacataacattctgagttactcaagaatgcataaaagaggcactagatactcttctcatgtatgtgtgtgtgtctgtctatacatgtatgtacacttcatggtgcatcagctggcggaaccctcargacaccccttcacatcctcagtgccccatttcacacatgaggaaactgttcatgacagcacatggctgatttgcataaaagtcacttggtcagcag

SEQ ID NO: 362802 - DNA, 602 bp, Homo sapiens
aatcctgggagattctgagcctctgctctatgtggactctatgttgtgtagccatttgtggaaggcttctgtgattttgtgacctagagaaaatgaatctctgctaaaatcaaatctaagaaagattggcaaagggaatttaaagatttcctaaatttttggaatttccctaggcattaaaacatgagaagtggcaataattcaaaccaacgatgccctccaagaatgaggatttttccaatgcattaggttgggtcccctcagtgagaaggatgccaaagattcgcatgcaggcagtatatttacaaagtgcgggaaacaagcaagtgagcaagggaggggaggagggaaagggaaagtgaaaagtgcctcagaaggagccacctctgaggatgacgagmgctcaagcccacatagaaacacaggaaaaatgtctctgttattccacctgagaggtgagggagctgggggatgtgtacacctcccttgtcatcactgattgacaaccgtcctaggggatgctaattccaggccatgaggtctgcctcatttgcagcctgagctgcctccccaggttcagatagagcagtgaaggggagaaa

SEQ ID NO: 362803 - DNA, 601 bp, Homo sapiens
ttttggaatttccctaggcattaaaacatgagaagtggcaataattcaaaccaacgatgccctccaagaatgaggatttttccaatgcattaggttgggtcccctcagtgagaaggatgccaaagattcgcatgcaggcagtatatttacaaagtgcgggaaacaagcaagtgagcaagggaggggaggagggaaagggaaagtgaaaagtgcctcagaaggagccacctctgaggatgacgagagctcaagcccacatagaaacacaggaaaaatgtctctgttattccacctgagaggtgagggagctgggggatgtgtacacctcccttgtcatcactgattgacaaccgtcctaggggatgctaattccaggccatgaggtctgcctcatttgcagcctgagctgcytccccaggttcagatagagcagtgaaggggagaaagggccatagagagtcagctgaagtataatgtctagaatccccaaggcatagtaacaatgactgctaaaattatgcacaaagaaaaagtgcatttgaatccagagatgtatctctctgaatctggatatatggatcctggcagcctgttcggtagc

SEQ ID NO: 362804 - DNA, 526 bp, Homo sapiens
tgtgcataggctgcactaccttggtctggccatgggtagtcgtgcatgagaactactccctggagtatttctcagtccactgacactgatgtaattggctccacttcccctgctgttgagccaggccracacgccctgggcaaaggcatctgtgtgaagtattgaggtgcaaatcagtgcttaagatatgtttggatgcaaaacactttttcatctacatgggcagtgtcttggcagaagatggagattctctctaaatgcatgtgagacagggtggctggcatctgggtcaggatgatgccctggtgcatggcaagaacatgccttgtgcagcagctgccctcgctaaggagagaggctcactgacctggcttttccccctcacctgctctccagaaagccagactctagggcagatgctcctgagaccccaggaacaggctggtggggagcgcagctcagagcattactcaggggatgtggcctttgtcatcctactttgaaacaattgactatttgagcctag

SEQ ID NO: 362805 - DNA, 526 bp, Homo sapiens
tgtgcataggctgcactaccttggtctggccatgggtagtcgtgcatgagaactactccctggagtatttctcagtccactgacactgatgtaattggctccacttcccctgctgttgagccaggccgacaygccctgggcaaaggcatctgtgtgaagtattgaggtgcaaatcagtgcttaagatatgtttggatgcaaaacactttttcatctacatgggcagtgtcttggcagaagatggagattctctctaaatgcatgtgagacagggtggctggcatctgggtcaggatgatgccctggtgcatggcaagaacatgccttgtgcagcagctgccctcgctaaggagagaggctcactgacctggcttttccccctcacctgctctccagaaagccagactctagggcagatgctcctgagaccccaggaacaggctggtggggagcgcagctcagagcattactcaggggatgtggcctttgtcatcctactttgaaacaattgactatttgagcctag

SEQ ID NO: 362806 - DNA, 526 bp, Homo sapiens
tgtgcataggctgcactaccttggtctggccatgggtagtcgtgcatgagaactactccctggagtatttctcagtccactgacactgatgtaattggctccacttcccctgctgttgagccaggccgacacgccctgggcaaaggcatctgtgtgaagtattgaggtgcaaatcagtgcttaagatatgtttggatgcaaaacactttttcatctacatgggcagtgtcttggcagaagatggagattctctctaaatgcatgtgagacagggtggctggcatctgggtcaggatgatgccctggtgcatggcaagaacatgcmttgtgcagcagctgccctcgctaaggagagaggctcactgacctggcttttccccctcacctgctctccagaaagccagactctagggcagatgctcctgagaccccaggaacaggctggtggggagcgcagctcagagcattactcaggggatgtggcctttgtcatcctactttgaaacaattgactatttgagcctag

SEQ ID NO: 362807 - DNA, 586 bp, Homo sapiens
ccctgtgctgagttactgagatgagccagccctgcagctgtgctcagcctgccccatcccctgctgatttgcctgttcctagagcacagccccctgccctgaagactttttataggctggtcacacccggwgcaggagtcagccccagtcaggacacagcacagacatgagggcccccactcagctcctggggctcctggtgctctggctgccaggtaaggaaggagaacactaggattatactcggtcagtgtgctcagtactgtctggaacttcagggaagtcctctgataacatgattaattgcaacaatatttgtttttatgtttccaacttcaggtgccagatgtgacatccagatgacccagtctccatcctccctgtctgcatctgtaggagacagagtcaccatcacttgccgggcgagtcagggcattagcaataatttaaattggtatcagcagaaaccagggaaaactcctaagctcctgatctatgctgcacccagtctgcaaagtgggattccctctcggttcagtgacagtggatctggggcagattacactctcaccatccgcagcctgca

SEQ ID NO: 362808 - DNA, 586 bp, Homo sapiens
ccctgtgctgagttactgagatgagccagccctgcagctgtgctcagcctgccccatcccctgctgatttgcctgttcctagagcacagccccctgccctgaagactttttataggctggtcacacccggagcaggagtcagccccagtcaggacacagcacagacatgagggcccccactcagctcctggggctcctggtgctctggctgccaggtaaggaaggagaacactaggattatactcggtcagtgtgctcagtactgtctggaacttcagggaagtcctctgataacatgattaattgcracaatatttgtttttatgtttccaacttcaggtgccagatgtgacatccagatgacccagtctccatcctccctgtctgcatctgtaggagacagagtcaccatcacttgccgggcgagtcagggcattagcaataatttaaattggtatcagcagaaaccagggaaaactcctaagctcctgatctatgctgcacccagtctgcaaagtgggattccctctcggttcagtgacagtggatctggggcagattacactctcaccatccgcagcctgca

SEQ ID NO: 362809 - DNA, 545 bp, Homo sapiens
tgccagatgtgacatccagatgacccagtctccatcctccctgtctgcatctgtaggagacagagtcaccatcacttgccgggcgagtcagggcattagcaataatttaaattggtatcagcagaaaccagggaaaactcctaagctcctgatctatgctgcayccagtctgcaaagtgggattccctctcggttcagtgacagtggatctggggcagattacactctcaccatccgcagcctgcagcctgaagattttgcaacttattactgtcaacagagtgacagtacccctcccacagcgttacaagtcataacataatccccaaggaagcagatgtgtgaggctgggctgccccaatgctccttctggtgcctctatctgctgagggaagttctcaaactcagtcaggtttggaaagtcattgggagattttcctagaggaggccagggaggttcctctgaaccctaagcctctttcaccctcatccccagcagaaaagatgtgacaatgcctgtcctgactgaataaagaagagagata

SEQ ID NO: 362810 - DNA, 559 bp, Homo sapiens
gtaggagacagagtcaccatcacttgccgggcgagtcagggcattagcaataatttaaattggtatcagcagaaaccagggaaaactcctaagctcctgatctatgctgcacccagtctgcaaagtgggattccctctcggttcagtgacagtggatctggggcagaytacactctcaccatccgcagcctgcagcctgaagattttgcaacttattactgtcaacagagtgacagtacccctcccacagcgttacaagtcataacataatccccaaggaagcagatgtgtgaggctgggctgccccaatgctccttctggtgcctctatctgctgagggaagttctcaaactcagtcaggtttggaaagtcattgggagattttcctagaggaggccagggaggttcctctgaaccctaagcctctttcaccctcatccccagcagaaaagatgtgacaatgcctgtcctgactgaataaagaagagagataagtccaactgaggagtctgtgttatgggataatcggaatttgtacagcaaaagagaagctattctc

SEQ ID NO: 362811 - DNA, 559 bp, Homo sapiens
gtaggagacagagtcaccatcacttgccgggcgagtcagggcattagcaataatttaaattggtatcagcagaaaccagggaaaactcctaagctcctgatctatgctgcacccagtctgcaaagtgggattccctctcggttcagtgacagtggatctggggcagattacactctcaccatccgcagcctgcagcctgaagattttgcaacttattactgtcaacagagtgacagtacccctcccacagcgttacaagtcataacataatccccaaggaagcagatgtgtgaggctgggctgccccaatgctccttcyggtgcctctatctgctgagggaagttctcaaactcagtcaggtttggaaagtcattgggagattttcctagaggaggccagggaggttcctctgaaccctaagcctctttcaccctcatccccagcagaaaagatgtgacaatgcctgtcctgactgaataaagaagagagataagtccaactgaggagtctgtgttatgggataatcggaatttgtacagcaaaagagaagctattctc

SEQ ID NO: 362812 - DNA, 662 bp, Homo sapiens
tcttaaccagcctggccaatatggtaaaacccccatctctactaaaaatataaaaaaattagccaggtgtggtcgcaagcacctgtaatcccagctactcaggaggctcaggcaggagaactgcttgaacctgaggtagaggttgtggtgagtcgaaatcatgccactgcactccagcctgaatgacagagcaaaactgtctcaaaaaaaaaaaaaaagaagaagaagcaaagaatagtcccagaaccctctttttttccccaaagtgttgggattacaggtgtgagctaccgygtccagccccagaaccctaccctttttactccacagaagtatggagtcttatacaggccttcaagctgacagatgagtacatactagctttttgattctcttccaaattccttatttatgactatacttttggcagtctcctgataaaatgaaatctaccaatgtatttcagttcaatcacgtgtttgggaaatacctacttcccatcaggtctaaactgctgtaaaggagaatataggaaaaacaaataaaaccaagtttctacccacaatgtacttccaatctagttagggtaaaaaagcagcacacatatgttcacaaaaacagctaagaaaagatagtgcagtactaataaatgaggattcaag

SEQ ID NO: 362813 - DNA, 584 bp, Homo sapiens
cagattagattcccaggacaatcctctctaatatgacaagctgatagaggctgacaggtaactaggttgttcaggatggcaagccagtcccagaaattctgattaaattaaaatattaatggtaccgccgggagaggaagattgagttgaggtgggcaaattctgtatgaggaccgaggagcaaacaccacgtcgcagtcgctgtgctggaagcagaagcctgggggtgccagggggagttacctttgctaaacccgaaagcagggcctgcattgcaatgaactgtgcggtgctggagacagggtggggacaacacacctgccaggctcagaagggaacacggagattccctaatcacctcctctctcctgcagctgcaaaggtgayggccggagaccctcatctctgcagctcttaattccccagtaacctctcccatggcctctgcaaatgctggtttgcagggcactttaacccaatctgaaattgagactccaacatcatgactgtgtacagattctctaggaaactgtcttgtgccggctggatgaaagcttattgctgtgtgtgtgtgtagtgtgtgt

SEQ ID NO: 362814 - DNA, 584 bp, Homo sapiens
cagattagattcccaggacaatcctctctaatatgacaagctgatagaggctgacaggtaactaggttgttcaggatggcaagccagtcccagaaattctgattaaattaaaatattaatggtaccgccgggagaggaagattgagttgaggtgggcaaattctgtatgaggaccgaggagcaaacaccacgtcgcagtcgctgtgctggaagcagaagcctgggggtgccagggggagttacctttgctaaacccgaaagcagggcctgcattgcaatgaactgtgcggtgctggagacagggtggggacaacacacctgccaggctcagaagggaacacggagattccctaatcacctcctctctcctgcagctgcaaaggtgacggccggagaccctcatctctgcagctcttaattccccagtaacctctcccatggcctctgcaaatgctggtttgcagggcactttaacccaatctgaaattgagactccarcatcatgactgtgtacagattctctaggaaactgtcttgtgccggctggatgaaagcttattgctgtgtgtgtgtgtagtgtgtgt

SEQ ID NO: 362815 - DNA, 584 bp, Homo sapiens
cagattagattcccaggacaatcctctctaatatgacaagctgatagaggctgacaggtaactaggttgttcaggatggcaagccagtcccagaaattctgattaaattaaaatattaatggtaccgccgggagaggaagattgagttgaggtgggcaaattctgtatgaggaccgaggagcaaacaccacgtcgcagtcgctgtgctggaagcagaagcctgggggtgccagggggagttacctttgctaaacccgaaagcagggcctgcattgcaatgaactgtgcggtgctggagacagggtggggacaacacacctgccaggctcagaagggaacacggagattccctaatcacctcctctctcctgcagctgcaaaggtgacggccggagaccctcatctctgcagctcttaattccccagtaacctctcccatggcctctgcaaatgctggtttgcagggcactttaacccaatctgaaattgagactccaacaycatgactgtgtacagattctctaggaaactgtcttgtgccggctggatgaaagcttattgctgtgtgtgtgtgtagtgtgtgt

SEQ ID NO: 362816 - DNA, 511 bp, Homo sapiens
tgtgaaagtattttgtagttttgatttgcatctctctaataattagtgatggtgaacatcttttcatgtacttgctggccatctttatgtcttctttggagatatgtttattcaagtcctttgccaatttttaaattggcttttgtcattgttgattgatcgatttttggagacagagtttcgctcttgttgcccaggagtgccatggcatgatctcggctcactgcaacctctgcctccctggttcaagggattctcctgcctcagcatcccaagtagctgggaatataggcatgcaccaccataccaggctaatttttgtattattagtagagacaggtttcaccacrttggccggactggtctccaatttctgccctcaagttattcaccctcctcggcctcccaaagtgctgggattacaggtgcgagccactgtgcccagcccattgctgtcaatgtataagaattctctataaattctctcatagcagcattattttcagtatcc

SEQ ID NO: 362817 - DNA, 511 bp, Homo sapiens
tgtgaaagtattttgtagttttgatttgcatctctctaataattagtgatggtgaacatcttttcatgtacttgctggccatctttatgtcttctttggagatatgtttattcaagtcctttgccaatttttaaattggcttttgtcattgttgattgatcgatttttggagacagagtttcgctcttgttgcccaggagtgccatggcatgatctcggctcactgcaacctctgcctccctggttcaagggattctcctgcctcagcatcccaagtagctgggaatataggcatgcaccaccataccaggctaatttttgtattattagtagagacaggtttcaccacattggccggactggtctccaayttctgccctcaagttattcaccctcctcggcctcccaaagtgctgggattacaggtgcgagccactgtgcccagcccattgctgtcaatgtataagaattctctataaattctctcatagcagcattattttcagtatcc

SEQ ID NO: 362818 - DNA, 557 bp, Homo sapiens
acatgttagcaataaacttttagtatagtagtcaaagtattaatttctcacattgcaatttccttcaaagacatgaatacaacctttctaatgactccttgttcatcaagatacctcttcaaattattctatttgtttcattcagtatattatctgtgtataccgatattacactcttttctttttttgagatggaatctcattctgttactgatgctggagtgaggtggcatgatctcggttcactgcaacctccacctcccaggttcaagcgattctcctgtctcagcctcccaagtagctaggactacaggtgcataccacgatgcctggataatttttgtawttttagtacagtcagagtttcatcttgttgtccaggctggtcttgaactcctgacctcaggtgatccacccaccatggcctcccaaagtgctgggattacaggcataagccaccgcacccagcctgatattgcactcttggattttgaacactgaatatctttttgaaagattacacctctttacttctttgtgcttcagaaattattttc

SEQ ID NO: 362819 - DNA, 556 bp, Homo sapiens
tatattatatataacataaatacctaacaacatctgtatatatagtataaacttaaagtacaaaaatattagtatattactatatgtaatataaatatatcagtgtaagatattagctattaaaatatacatatgtgtgtatrtatgtgtatatgtgtatataaatattatatatatatatatagtaaccgctgatttgtgtggaagactttggtcagaagacagtgtattaagaagacagtgggtcctcacaggaaaataagaatatacatcatgtttatattatatataacataaacaactaattacatctgtatatacagcataaacataaagtacaaaaatatttgtatataatcgtatgaaatataaatataccagtgtaagatattagctattaaaatatacatgtgtgtatgtgtatatgtgtacatataatatatatacatatataacatatataatatataagatatagcataataatataatatattatatataatatgtaatatgtaacatatattatataattaatatataatatataatatat

SEQ ID NO: 362820 - DNA, 556 bp, Homo sapiens
tatattatatataacataaatacctaacaacatctgtatatatagtataaacttaaagtacaaaaatattagtatattactatatgtaatataaatatatcagtgtaagatattagctattaaaatatacatatgtgtgtatatatgtgtatatgtgtatataaatattatatatatatatatagtaaccgctgatttgtgtggaagactttggtcagaagacagtgtattaagaagacagtgggtcctcacaggaaaataagaatatacatcatgtttatattatatataacataaacaactaattacatctgtatatacarcataaacataaagtacaaaaatatttgtatataatcgtatgaaatataaatataccagtgtaagatattagctattaaaatatacatgtgtgtatgtgtatatgtgtacatataatatatatacatatataacatatataatatataagatatagcataataatataatatattatatataatatgtaatatgtaacatatattatataattaatatataatatataatatat

SEQ ID NO: 362821 - DNA, 556 bp, Homo sapiens
tatattatatataacataaatacctaacaacatctgtatatatagtataaacttaaagtacaaaaatattagtatattactatatgtaatataaatatatcagtgtaagatattagctattaaaatatacatatgtgtgtatatatgtgtatatgtgtatataaatattatatatatatatatagtaaccgctgatttgtgtggaagactttggtcagaagacagtgtattaagaagacagtgggtcctcacaggaaaataagaatatacatcatgtttatattatatataacataaacaactaattacatctgtatatacagcataaacataaagtacaaaaatatttgtatataatcgtatgwaatataaatataccagtgtaagatattagctattaaaatatacatgtgtgtatgtgtatatgtgtacatataatatatatacatatataacatatataatatataagatatagcataataatataatatattatatataatatgtaatatgtaacatatattatataattaatatataatatataatatat

SEQ ID NO: 362822 - DNA, 494 bp, Homo sapiens
agccaagccagccaagccagccaaccagccaagccagccagctagccaagctacccagccagccagctagccaaaccagccaagccacccagccagccaagccaccaagccagccaagccagccaagccaatcagccagccaggcagccagccacccaagccagccaagccagccaagccagccaagccagccagccacccagccagccaagcctcccagccagccaagccagccaagcctcccagccagccaagccagccaagccacccagmcagccaagccagccaagccacctagccagccaggcccgccagccagccagccagctagccaagccagccattccagccaggcagccaagccagccaagccagtcaagcccgccagccagccaagacaggcatgccagccaagccagccaggcagccaagccagccaagccaggcagcaagcaaagccaggcaggccagccaagccagccaggcagccaagc

SEQ ID NO: 362823 - DNA, 494 bp, Homo sapiens
agccaagccagccaagccagccaaccagccaagccagccagctagccaagctacccagccagccagctagccaaaccagccaagccacccagccagccaagccaccaagccagccaagccagccaagccaatcagccagccaggcagccagccacccaagccagccaagccagccaagccagccaagccagccagccacccagccagccaagcctcccagccagccaagccagccaagcctcccagccagccaagccagccaagccacccagacagccaagccagccaagccacctagccagccaggcccgccagccagccagccagctagccaagccagccawtccagccaggcagccaagccagccaagccagtcaagcccgccagccagccaagacaggcatgccagccaagccagccaggcagccaagccagccaagccaggcagcaagcaaagccaggcaggccagccaagccagccaggcagccaagc

SEQ ID NO: 362824 - DNA, 494 bp, Homo sapiens
agccaagccagccaagccagccaaccagccaagccagccagctagccaagctacccagccagccagctagccaaaccagccaagccacccagccagccaagccaccaagccagccaagccagccaagccaatcagccagccaggcagccagccacccaagccagccaagccagccaagccagccaagccagccagccacccagccagccaagcctcccagccagccaagccagccaagcctcccagccagccaagccagccaagccacccagacagccaagccagccaagccacctagccagccaggcccgccagccagccagccagctagccaagccagccatkccagccaggcagccaagccagccaagccagtcaagcccgccagccagccaagacaggcatgccagccaagccagccaggcagccaagccagccaagccaggcagcaagcaaagccaggcaggccagccaagccagccaggcagccaagc

SEQ ID NO: 362825 - DNA, 494 bp, Homo sapiens
agccaagccagccaagccagccaaccagccaagccagccagctagccaagctacccagccagccagctagccaaaccagccaagccacccagccagccaagccaccaagccagccaagccagccaagccaatcagccagccaggcagccagccacccaagccagccaagccagccaagccagccaagccagccagccacccagccagccaagcctcccagccagccaagccagccaagcctcccagccagccaagccagccaagccacccagacagccaagccagccaagccacctagccagccaggcccgccagccagccagccagctagccaagccagccattccagccaggcagccaagccagccaagccagtcaagcccgccagccagccaagacaggcatgccagccaagccagccaggcagccaagccagccaagccagscagcaagcaaagccaggcaggccagccaagccagccaggcagccaagc

SEQ ID NO: 362826 - DNA, 330 bp, Homo sapiens
ttcaaacccttcccttggagacaaaacaaacatgacaaggaattctgaggtcaggggacaagaatcacaaagtgggagactgaggaggcagtgtccttcctgcccttggtctactggctaagaaccttcctcagcctgacctttgcacattgcactttcagctctgtttgcaattttcctcctttagtgctgagggaatcccagtgttccatyctgaaatctataggttcctaatgtgtggttaaaaaaaacctcagcgagagaagcagaaaatgtttcctcttcctgaaaaactgtagaaaggcaggcaccattctgggtgaggacatg

SEQ ID NO: 362827 - DNA, 330 bp, Homo sapiens
ttcaaacccttcccttggagacaaaacaaacatgacaaggaattctgaggtcaggggacaagaatcacaaagtgggagactgaggaggcagtgtccttcctgcccttggtctactggctaagaaccttcctcagcctgacctttgcacattgcactttcagctctgtttgcaattttcctcctttagtgctgagggaatcccagtgttccattctgaaatctataggttcctaatgkgtggttaaaaaaaacctcagcgagagaagcagaaaatgtttcctcttcctgaaaaactgtagaaaggcaggcaccattctgggtgaggacatg

SEQ ID NO: 362828 - DNA, 560 bp, Homo sapiens
ttgttataccagtttaatgtaaatattgcctttaaaagataatatagttttcaggtgtctacagtgattttgtaatatttgtgcacatataaaataatatttccaaaaatgtaatccagtggggaaatatactttctaaattctagatttataatttagggtttaaattataaaatcattaaataagacacaagtgaaatgtagtcaaatatccccttggaaaaaaattaagtggcctctaaagtgagrtattcatatatgtaaattttacaatcctctagtgatagaattaattaaatacaccaccaaattgattaattcctactgtgttaaaagagaagcactaacaatgccagttaccatgtaacatggatttaagctacaagtcatagaaatgtgatgagaagcctcagcgctgtaaaacagagggtggaggaaagcttttcctctctcaaatgagctttgcgaggtatacttcttgaaggataggaagttgaagtgttcaggacttttatgtctattctactttggcttagtttacatgattcgtagtttgttag

SEQ ID NO: 362829 - DNA, 584 bp, Homo sapiens
tgataaaaaaaaaaaattggactaactacacagagaaagagttgactgataacaactttctcaaatgaaacaacgaaagccaacaagtgaggtactgatatctttcaagtcctgaaataaaataagtgctgacctagaactgtttacttggtggacatatccctccaaacaaagattcaataaagaattttttcccagccgacacacaggaaaagaaatactaaacattattyttcaggtagaagagccatgatccctgatgaaaatttgcatttagaagaacaatttttttaatgaaagaaataaacatagagagaaatttaattggatatcgactgtataacagaatgttatctcataaagtttaaaatatatcttccgtacaatggcagaagcatataagttgtgagttggataaattaattttaaaatattgtcaaggtttttttttttttttttttttttttgcaaatagacaaatggaccaattacattagaccctgaatccaagaatacacgttgtataagtcaggtaaaatataaccagaccagattttttaaatggactctcttaaagtttttat

SEQ ID NO: 362830 - DNA, 572 bp, Homo sapiens
agtgaggtactgatatctttcaagtcctgaaataaaataagtgctgacctagaactgtttacttggtggacatatccctccaaacaaagattcaataaagaattttttcccagccgacacacaggaaaagaaatactaaacattattcttcaggkagaagagccatgatccctgatgaaaatttgcatttagaagaacaatttttttaatgaaagaaataaacatagagagaaatttaattggatatcgactgtataacagaatgttatctcataaagtttaaaatatatcttccgtacaatggcagaagcatataagttgtgagttggataaattaattttaaaatattgtcaaggtttttttttttttttttttttttttgcaaatagacaaatggaccaattacattagaccctgaatccaagaatacacgttgtataagtcaggtaaaatataaccagaccagattttttaaatggactctcttaaagtttttataatttatattcatatttcacatatgttgaaagtaaataatggaaaagcatgcaatgcaaatattaaccaaaat

SEQ ID NO: 362831 - DNA, 572 bp, Homo sapiens
agtgaggtactgatatctttcaagtcctgaaataaaataagtgctgacctagaactgtttacttggtggacatatccctccaaacaaagattcaataaagaattttttcccagccgacacacaggaaaagaaatactaaacattattcttcaggtagaagagccatgatccctgatgaaaatttgcatttagaagaacaatttttttaatgaaagaaataaacatagagagaaatttaattggatatcgactgtataacagaatgytatctcataaagtttaaaatatatcttccgtacaatggcagaagcatataagttgtgagttggataaattaattttaaaatattgtcaaggtttttttttttttttttttttttttgcaaatagacaaatggaccaattacattagaccctgaatccaagaatacacgttgtataagtcaggtaaaatataaccagaccagattttttaaatggactctcttaaagtttttataatttatattcatatttcacatatgttgaaagtaaataatggaaaagcatgcaatgcaaatattaaccaaaat

SEQ ID NO: 362832 - DNA, 572 bp, Homo sapiens
agtgaggtactgatatctttcaagtcctgaaataaaataagtgctgacctagaactgtttacttggtggacatatccctccaaacaaagattcaataaagaattttttcccagccgacacacaggaaaagaaatactaaacattattcttcaggtagaagagccatgatccctgatgaaaatttgcatttagaagaacaatttttttaatgaaagaaataaacatagagagaaatttaattggatatcgactgtataacagaatgttatctcataaagtttaaaatatrtcttccgtacaatggcagaagcatataagttgtgagttggataaattaattttaaaatattgtcaaggtttttttttttttttttttttttttgcaaatagacaaatggaccaattacattagaccctgaatccaagaatacacgttgtataagtcaggtaaaatataaccagaccagattttttaaatggactctcttaaagtttttataatttatattcatatttcacatatgttgaaagtaaataatggaaaagcatgcaatgcaaatattaaccaaaat

SEQ ID NO: 362833 - DNA, 572 bp, Homo sapiens
agtgaggtactgatatctttcaagtcctgaaataaaataagtgctgacctagaactgtttacttggtggacatatccctccaaacaaagattcaataaagaattttttcccagccgacacacaggaaaagaaatactaaacattattcttcaggtagaagagccatgatccctgatgaaaatttgcatttagaagaacaatttttttaatgaaagaaataaacatagagagaaatttaattggatatcgactgtataacagaatgttatctcataaagtttaaaatatatcttccgtacaatggcagaagcatataagttgtgagttggataaattaattttaaaatattgtcaaggttttttttttttttttttttttttkgcaaatagacaaatggaccaattacattagaccctgaatccaagaatacacgttgtataagtcaggtaaaatataaccagaccagattttttaaatggactctcttaaagtttttataatttatattcatatttcacatatgttgaaagtaaataatggaaaagcatgcaatgcaaatattaaccaaaat

SEQ ID NO: 362834 - DNA, 496 bp, Homo sapiens
tgtcattgcactgaggaaccagataaaaatcaaaaaaggttaagtagctggaatgtgtagtagaagagaacgtttacagaaaaaggaaccaagaatcagcctaaggattctcccaagtccctaagccaaatgtacataggatgaaattctaaggagctcagcaaaagactctaccagggagttggaagaagaacayttccctggcatcacatgacaggaagacacgttagttgtgaccagccagagatgggaatcccctctgtacctccaggatattcagtaaagaccactggaggttcatgccctagtgacagtgctcatttagctccaatttacagatggctctagactaactcaacaaattttaaagaggagatttaaagcaaccacagaaaaatactcatcctgaagttactgacctgcctgccacaacattgttcaaaggtagccaatcaaatctagatattcaatagcataacaccaaaatacccccccc

SEQ ID NO: 362835 - DNA, 584 bp, Homo sapiens
actatttgtatcaccatattcatgaagctggaatattttccattactggtatcacatccgaatggaagatgttaaaaggtctctcatcttgtaagatggatatgaaagaacattttctgagaaatgaaattattaacacacctgcgaggtggatggaagagaaaaaaaagaataagcagcttgagttcttctccttgataagacaactcactaaaaacataaagagaaaaatacaagtttaaaacaattaaccagaagaagacgactctagagtttttaaattgttgataagattttaatttgctccaagttgaaaataattatattccttgtgttttaaggcacatgatgagcaattacatcacacatgatagtttcagcagtaaaatagtatccgttaacagctggaactcataaaagcatagcacaatgtgaagatggaatttgctaaaataaaccatctgctgaaaactactatkctgcacatttaaaagtaaagtctaaatgttatttgtctcatttaataggtctgtgaaaaaatgcgctatttgaaaagtaggtgctaccttaattaattctttata

SEQ ID NO: 362836 - DNA, 583 bp, Homo sapiens
ccttggatatgaactccctttggagctttgcaacaagcagtttcttaaaggcaaaaaagggtccagaagtgggatgatccaaagaggtttgtcacaaattctcattggcttatggaaataacatttattagtgactggctatacactgttacactattattgggtgtggattatagtgtctggtgtggcgttattggttaatttatagctactgtggcaacagcaagcagcctagatgaacacacagctcaaagaggagcaggacagaactgcygtctcatttgaatatctctctgggcctgattatttaaaaggacttgcatttctcacatgaaagttattttcttttctccatgtccataaatgagaataaatagacgtaaaatagatcttttcgaggatgaagtaaatggaatgaaaaacaaaacccaagctgaccagaaatcatagagggaagaaaaggttataaatatatggatttttcaaagtgattttaagctattaggaatcagttaaatgttgggggattttgtctgagaatgggctaaaggagaatgtcccttttgccttctgaagtttccct

SEQ ID NO: 362837 - DNA, 590 bp, Homo sapiens
aaaatattcaatgctaaaataagatagtatgtctaaacaccagtattaaaactagtataaatatttgcttgtttatacaaggaaaattcaagcttgacctaaaattatataggaaagaaaagaaaaattttaagggagctctttaacaacataaacatatatatatacacacacacatataacatgtatatatgttatatgggatagatatagatttaacatgttatatctatatttgtatctgtaactacagctgtatgtatctacatttctatatatttactctgatataaatatwgactggaataaatataaaggcacatatgattcttggattaaaaggatttagtatcataaagacaaattctttccaaattcacctatgaattcacaacaatatacagtttcattagtataatttaaaatttttaaataaattccaagattcatttaaaggaatatacatatatacaagcagtcaagaaagaagcaagagtgcactaaactaacttgcttttaaaatacacttttaaacttagcaactaaaactgagcagtactgatttggagtactggaatttaggtatatgg

SEQ ID NO: 362838 - DNA, 332 bp, Homo sapiens
ggcaacagtcaccaggcatctcctagtctcaacagatgttctgtgagarggaggcctggtcgtgggatgcgaacctggccactgctggggcaaggaagtgccctatgaaaggcacatgttaagcatccacaaccccctgaccagaaccccagaaaggcagggctccaattgacagtcactctccagagacaaacctcaagccctaactgcagtaaaagaaaacaatgtaaaatgttgaatttatcttactatttcaatgatccagtaaagacattctatgcctgtacaccacatattttcttcagttgtggatatattttagatagaatttt

SEQ ID NO: 362839 - DNA, 332 bp, Homo sapiens
ggcaacagtcaccaggcatctcctagtctcaacagatgttctgtgagagggaggcctggtcgtgggatgcraacctggccactgctggggcaaggaagtgccctatgaaaggcacatgttaagcatccacaaccccctgaccagaaccccagaaaggcagggctccaattgacagtcactctccagagacaaacctcaagccctaactgcagtaaaagaaaacaatgtaaaatgttgaatttatcttactatttcaatgatccagtaaagacattctatgcctgtacaccacatattttcttcagttgtggatatattttagatagaatttt

SEQ ID NO: 362840 - DNA, 332 bp, Homo sapiens
ggcaacagtcaccaggcatctcctagtctcaacagatgttctgtgagagggaggcctggtcgtgggatgcgaacctggccactgctggggcaaggaagtgccctatgaaaggcacatgttaagcatccacaaccccctgaccagaaccccagaaaggcagggctccaattgacagtcactctccagagacaaacctcaagccctaactgcagtaaaagaaaacaatgtaaaatgttgaatttatcttactatttcaatgatccagtaaagacattctatgcctgtacaccacatattttcttcagttgtgsatatattttagatagaatttt

SEQ ID NO: 362841 - DNA, 631 bp, Homo sapiens
atataatttatctagaacaagaaagtagaattgaatctatattcattaatgagactaaccagtcaattacacagataggcactttagattttgaagatcatatggacccattgtcagaaatattattatttatgtctatatggacatcatctgtgcatatttacatagaaatcaatgagaactgatkttcatttttattatatattttttgagatagggtcttgctttgttgcccaggctggaatgcagtggtgcaatcactgctcactgcagcctcagcctcccaagctcaagcgatccttccaccttggcctccaaaatagctaggacaacaggtgcacatcaccatgcccactttttttttttaacttttgatagagactgggtcttgctaggttgcccaggttgcttttgaactcctgggctccaggaatcctctcatttaagcctcttcaactgctggtattacaagcatgaaccaccacatgggctggaagctgatttttaaaatactgagatcatatagatgacagcacctgaaaaatagacaacaccaagctttatgttaaaaggtgtgagggtatcaatattgttgtggctattggggaggaaaacattagtaaaaccagta

SEQ ID NO: 362842 - DNA, 375 bp, Homo sapiens
actttggctttaatttaacaaatgttctatggagtgacagtatgtacgtaaccatgctatgcccattcacagatgcagtagagggaagaatttctcaaagacaactgttctaagactcaaattaatccgtactgggtttgaaaagagaaagtccaggaattaccmaatattttagatatcagataaaagagaatgccaggtatgcgatgataatcagcaatggttgttcacacaatacatcaaatcagtatttgaattagcttttgaattacaaggacaaatggatcaagtctagactctttagtagataaatcttattaggctgagatgtgttttcccctgtttttccacaaggagattacaaatttgcaaacc

SEQ ID NO: 362843 - DNA, 533 bp, Homo sapiens
agaaagaagaaaagaaggaaggaaggagaaaaaagaaaagaaaggaaaagcaaaaaggaaagaaaaggaagaggaaaagaagaaaggaaggaagaagcaagggaagggaagagaaaggaagacggaaagaaggaagcaagaacgcaaatattagaaattctgcgtttgttaaagaatatgccatactgttttttttttttttcacttgaaagagtatctgccattgaagattggrtgtcttgttggtgatattgttgttcttatcttccacatgattactgagtttgtgcctagtctttccattactaagacaaaagtgttgaagtctgtaaatataattttggatttttctagttcacctttgatttctttcatgttttacctcatgtatttggaggttctgttgttagctgcataccctaattagtaggatgtttacatcttcttgagaacggattattctattatctattatctctcatctctgatactattgcttgttccgaactctgttgtgtctaatatcaatgtag

SEQ ID NO: 362844 - DNA, 533 bp, Homo sapiens
agaaagaagaaaagaaggaaggaaggagaaaaaagaaaagaaaggaaaagcaaaaaggaaagaaaaggaagaggaaaagaagaaaggaaggaagaagcaagggaagggaagagaaaggaagacggaaagaaggaagcaagaacgcaaatattagaaattctgcgtttgttaaagaatatgccatactgttttttttttttttcacttgaaagagtatctgccattgaagattggatgtcttgttggtgatattgttgttcttatcttccacatgattactgagtttgtgcctagtctttccattactaagacaaaagtgttgaagtctgyaaatataattttggatttttctagttcacctttgatttctttcatgttttacctcatgtatttggaggttctgttgttagctgcataccctaattagtaggatgtttacatcttcttgagaacggattattctattatctattatctctcatctctgatactattgcttgttccgaactctgttgtgtctaatatcaatgtag

SEQ ID NO: 362845 - DNA, 349 bp, Homo sapiens
ccaatttcctggttcatagatggtgccttctttctatgtcctcacatattggaaggcacacaagaactccattgagcttcttttataaagrcactaatcccattcataagggctcggcccccaagacctggtcacctcctaagtgttctgctctccctgatctgtgtcatatacagactctcttggattccttaccaattgcttgagagatcgcagtgggtttgtggggaaaaagttttcaagatgatggatctttcccaacttctgcagctgtcagcggtctcccaatctcaccagccccactttgctttaggaatttattgattattccagctttacttgtcatagt

SEQ ID NO: 362846 - DNA, 349 bp, Homo sapiens
ccaatttcctggttcatagatggtgccttctttctatgtcctcacatattggaaggcacacaagaactccattgagcttcttttataaaggcactaatcccattcataagggctcggcccccaagacctggtcacctcctaagtgttctgctctccctgatctgtgtcatatacagactctcttggattccttaccaattgcttgagagatcgcagtgggtttgtggggaaaaarttttcaagatgatggatctttcccaacttctgcagctgtcagcggtctcccaatctcaccagccccactttgctttaggaatttattgattattccagctttacttgtcatagt

SEQ ID NO: 362847 - DNA, 635 bp, Homo sapiens
ctgtcctatgtaagtgcatctgtcctctttctccttgcaggtgcttgttttccctcacattttgactcagttcttggcaacctcgttgctataaaaataaagtgatgactttgaagttagtttggttctttcattgttgtcaggttaggaaccctattccwtcccagatctccaaaacccagactttttgggggtttgaaattttaggctttgtctttgaattgtagttttatcttctttcagctaccatttgcattttcataatgattaatgagactaagctttttttgtgtagttgactgtacctttggatttttttcccaaatacctttttatttcttcttttctttatggttttagaaaatgtagtttacataattgcagcttgattttttactcagttaatggcatgcttaatggaaagaaaaaatattaaatatatttccctttttaattactgtgctttttccttttttaaggaaatgcttcattatgttaaatttcagtgttattctacttagctattccttaaatattatagtattttggatttcacatgtaaatttgtaacatatcttgagtttattatgtatagagtaaggctattttctcttttttgttttttaaggtaaaaa

SEQ ID NO: 362848 - DNA, 635 bp, Homo sapiens
ctgtcctatgtaagtgcatctgtcctctttctccttgcaggtgcttgttttccctcacattttgactcagttcttggcaacctcgttgctataaaaataaagtgatgactttgaagttagtttggttctttcattgttgtcaggttaggaaccctattccttcccagatctccaaaacccagactttttgggggtttgaaattttaggctttgtctttgaattgtagttttatcttctttcagctaccatttgcattttcataatgattaatgagactaagctttttttgtgtagttgactgtacctttggatttttttcccaaatacctttttatttcttcttttctttatggttttagaaaatgtagtttacataattgcagcttgattttttactcagttaatggcatgcttaatggaragaaaaaatattaaatatatttccctttttaattactgtgctttttccttttttaaggaaatgcttcattatgttaaatttcagtgttattctacttagctattccttaaatattatagtattttggatttcacatgtaaatttgtaacatatcttgagtttattatgtatagagtaaggctattttctcttttttgttttttaaggtaaaaa

SEQ ID NO: 362849 - DNA, 544 bp, Homo sapiens
tttccttttttaaggaaatgcttcattatgttaaatttcagtgttattctacttagctattccttaaatattatagtattttggatttcacatgtaaatttgtaacatatcttgagtttattatgtatagagtaaggctattttctcttttttgttttttaaggtaaaaatcacataatacaaaagtaataacaaccattttaaagcatacaatgcacttgcttttagtatattcaccatgttccagggcaatttcatcatgtcccttacaaaaacccattatgcataaagtggttacaccctattctgcttccctgagccctaatgaccactaatctgatttatatcccaattgatttgccaattcctgatgtttcatgtgaatcaaatcaagtaatatttgtccttttgtgcacttaacataatgctttcaaatttcaccaatattatacyatatataagtacttcattcttcgttatagctgaaaattgggtgtccctttatgagtcaacaagcatatggattgtttccactttttgactg

SEQ ID NO: 362850 - DNA, 567 bp, Homo sapiens
ttgtgataaggtaatcactctagatggtaaagtaataattactaaaatgtattgttkgctttgtaactttaatagatgtaatgtgtaaagtgataatactttaaaatggaggaaataaaaatgatttatataagaatgatgtttctatgtattactaaaagtttaatagtataaattggaagatgatttgaataattaattttccatacacctatatggtaaacttacaacaataaaaagtctcaaaaatatataataaaataattcattagtaatctaaagttccctattttaaaaaatattcttgcattgcaaaataaagcaataaagaaaaatatttggaaatatataaaacaaacggtaaaatggcagacataaatagaattataccaattataatcttaaatgtgagcagattaaaatccattccagaggcagagattgtcagaccggattaaaacaagtgatcccaatatacgctgagatgcaaggatactaacggattgaaagtaaaaagatgacaaaaaatatcctacaaagagcaatcataagaacactgaactcatt

SEQ ID NO: 362851 - DNA, 478 bp, Homo sapiens
caaggcagggcagggctagggtagcacagggcatggccaaaaacagrgcagggccataacagtggcaggactagcaacagggccagggcaagcgctggaccagagcatggtggggacaatacagggccaggacagacgatggcaaggcaggtccagggccatttcatggactcggtaggcctggggtcaggccagggcagggcaaaggcaagaccagggagaaggcagggccggggccaaggcagtgccagggcagggcaggaccagtgcagggccaatgcagggtgagggcaaggccagggcatggaagggcagggcaggaccaaggaagggccaggagagggccacggcagggtcaccggccagaagaagggtatggctggggtcaggaatatggtaggacaagggctgggcccaggctgggacacgcagggcagagcatgatctatgcaaggcacagccagagccaggccataga

SEQ ID NO: 362852 - DNA, 478 bp, Homo sapiens
caaggcagggcagggctagggtagcacagggcatggccaaaaacagggcagggccatarcagtggcaggactagcaacagggccagggcaagcgctggaccagagcatggtggggacaatacagggccaggacagacgatggcaaggcaggtccagggccatttcatggactcggtaggcctggggtcaggccagggcagggcaaaggcaagaccagggagaaggcagggccggggccaaggcagtgccagggcagggcaggaccagtgcagggccaatgcagggtgagggcaaggccagggcatggaagggcagggcaggaccaaggaagggccaggagagggccacggcagggtcaccggccagaagaagggtatggctggggtcaggaatatggtaggacaagggctgggcccaggctgggacacgcagggcagagcatgatctatgcaaggcacagccagagccaggccataga

SEQ ID NO: 362853 - DNA, 478 bp, Homo sapiens
caaggcagggcagggctagggtagcacagggcatggccaaaaacagggcagggccataacagtggcaggactagcaacagggccagggcaagcgctggaccagagcatggtggggacaatacagggccaggacagasgatggcaaggcaggtccagggccatttcatggactcggtaggcctggggtcaggccagggcagggcaaaggcaagaccagggagaaggcagggccggggccaaggcagtgccagggcagggcaggaccagtgcagggccaatgcagggtgagggcaaggccagggcatggaagggcagggcaggaccaaggaagggccaggagagggccacggcagggtcaccggccagaagaagggtatggctggggtcaggaatatggtaggacaagggctgggcccaggctgggacacgcagggcagagcatgatctatgcaaggcacagccagagccaggccataga

SEQ ID NO: 362854 - DNA, 478 bp, Homo sapiens
caaggcagggcagggctagggtagcacagggcatggccaaaaacagggcagggccataacagtggcaggactagcaacagggccagggcaagcgctggaccagagcatggtggggacaatacagggccaggacagacgatggcaaggcaggtccagggccatttcatggactcggtaggcctggggtcaggccagggcagggcaaaggcaagrccagggagaaggcagggccggggccaaggcagtgccagggcagggcaggaccagtgcagggccaatgcagggtgagggcaaggccagggcatggaagggcagggcaggaccaaggaagggccaggagagggccacggcagggtcaccggccagaagaagggtatggctggggtcaggaatatggtaggacaagggctgggcccaggctgggacacgcagggcagagcatgatctatgcaaggcacagccagagccaggccataga

SEQ ID NO: 362855 - DNA, 594 bp, Homo sapiens
tattctttctatgacttattttctgtagttgaagttcaagggtgtttgacagtgtgatgtggttattgttaacctgtatgtgggggcatacagatatgttgttttactttttcccataaggctaagatcatctccagaaatattaattttttagacagcgtgattatagttatttaatactcatatttatcaaaatattatatgttaaaaccaataaccatctgaacttatttgaatatagtttttcctattctgttcttagaaatttcagtcattaacaayctttacacttagaaagtgttttaattttactttgatgacaggaatagtgtttttctcaatgaaatatataatagcagcttataagtgataaccgttttcattctgtttttaagagaaaatactttggtcttttttaccatgatagtttagtgtgtgatgtcataaaaatgggctgtagccatttaaattcttgttcaagtgcagaaactaagagacttcagtttctattaagccatgtcaactcctattaggagacctttagtggttccagttccagggccttcttgaagaaattgtgatacttgtgtaagt

SEQ ID NO: 362856 - DNA, 463 bp, Homo sapiens
cagtttctattaagccatgtcaactcctattaggagacctttagtggttccagttccagggccttcttgaagaaattgtgatacttgtgtaagtatatctagagttttctttccagcattggctaagtcacatagctgagaaatatgatacatggagaaggttgctgactggatgaacttttctacattgaatactttaaatctggattctagaataaaatatattgatgcatatttgagttgtcaactgtttatgtcttgttcttttcagcttcaacattgctttatggcatgtgtggtcgtttttcactccattgttgttgtttacccagtttatgggggttgtaatgtttatcacactccttggatgatttccgaaggtaagatatctggaatggtttttctaaaaatgaactcattkaaaaaatgtcttttatgacaattttcagtggatggagctgta

SEQ ID NO: 362857 - DNA, 463 bp, Homo sapiens
cagtttctattaagccatgtcaactcctattaggagacctttagtggttccagttccagggccttcttgaagaaattgtgatacttgtgtaagtatatctagagttttctttccagcattggctaagtcacatagctgagaaatatgatacatggagaaggttgctgactggatgaacttttctacattgaatactttaaatctggattctagaataaaatatattgatgcatatttgagttgtcaactgtttatgtcttgttcttttcagcttcaacattgctttatggcatgtgtggtcgtttttcactccattgttgttgtttacccagtttatgggggttgtaatgtttatcacactccttggatgatttccgaaggtaagatatctggaatggtttttctaaaaatgaactcattgraaaaatgtcttttatgacaattttcagtggatggagctgta

SEQ ID NO: 362858 - DNA, 486 bp, Homo sapiens
gtgcctcctgtcaggtcacttacatcagaacttgcaggaaacctgctttatacagcagttgacaggtgtggaaattgaagctcatggaaatgaaagttaatacactaaattttcaaggagttaatgaaaactgacatttctgctaaaaacagcatgttctccctgtgggattttaaaggaaggtcaatggtaactgtacaaagaagaaatggacayagtctcattgttagcagtctgaaaatagttgctagcacctccatgcccacgccaatgtctccagcctccttcaagcaccttgctgtgtcttggaaccattgggagccctcacaggaggcccttcgttcctgtatgcatgtggtgccacaagctgctttgggcccggaggaatcctacacatctcagaacacttcctcacctgaccctgtcacccatctctccccttctcatgtgctcagccccttctttgactcttgaattttgagtttt

SEQ ID NO: 362859 - DNA, 486 bp, Homo sapiens
gtgcctcctgtcaggtcacttacatcagaacttgcaggaaacctgctttatacagcagttgacaggtgtggaaattgaagctcatggaaatgaaagttaatacactaaattttcaaggagttaatgaaaactgacatttctgctaaaaacagcatgttctccctgtgggattttaaaggaaggtcaatggtaactgtacaaagaagaaatggacatagtctcattgttagcagtctgaaaatagttgctagcacctccatgcccacgccaatgtctccagcctcyttcaagcaccttgctgtgtcttggaaccattgggagccctcacaggaggcccttcgttcctgtatgcatgtggtgccacaagctgctttgggcccggaggaatcctacacatctcagaacacttcctcacctgaccctgtcacccatctctccccttctcatgtgctcagccccttctttgactcttgaattttgagtttt

SEQ ID NO: 362860 - DNA, 486 bp, Homo sapiens
gtgcctcctgtcaggtcacttacatcagaacttgcaggaaacctgctttatacagcagttgacaggtgtggaaattgaagctcatggaaatgaaagttaatacactaaattttcaaggagttaatgaaaactgacatttctgctaaaaacagcatgttctccctgtgggattttaaaggaaggtcaatggtaactgtacaaagaagaaatggacatagtctcattgttagcagtctgaaaatagttgctagcacctccatgcccacgccaatgtctccagcctccttcargcaccttgctgtgtcttggaaccattgggagccctcacaggaggcccttcgttcctgtatgcatgtggtgccacaagctgctttgggcccggaggaatcctacacatctcagaacacttcctcacctgaccctgtcacccatctctccccttctcatgtgctcagccccttctttgactcttgaattttgagtttt

SEQ ID NO: 362861 - DNA, 522 bp, Homo sapiens
ttgttagcagtctgaaaatagttgctagcacctccatgcccacgccaatgtctccagcctccttcaagcaccttgctgtgtcttggaaccaytgggagccctcacaggaggcccttcgttcctgtatgcatgtggtgccacaagctgctttgggcccggaggaatcctacacatctcagaacacttcctcacctgaccctgtcacccatctctccccttctcatgtgctcagccccttctttgactcttgaattttgagtttttacagatgtttgggagctcttactctgacatgaatttataattgtaatggagactcagacaacgttgtagatcacagagtgaactatgctttttagtgttaaatgcaatagcttaagatagaatgttttacttgttacataaatgctggttttctttcagatttaaggacatatactttatttttttaagagatagggtcttctatgttgtccaggctggctttgaactcctgggatcaagtgatcctcctgcctcagc

SEQ ID NO: 362862 - DNA, 522 bp, Homo sapiens
ttgttagcagtctgaaaatagttgctagcacctccatgcccacgccaatgtctccagcctccttcaagcaccttgctgtgtcttggaaccattgggagccctcacaggaggcccttcgttcctgtatgcatgtggtgccacaagctgctttgggcccggaggaatcctacacatcycagaacacttcctcacctgaccctgtcacccatctctccccttctcatgtgctcagccccttctttgactcttgaattttgagtttttacagatgtttgggagctcttactctgacatgaatttataattgtaatggagactcagacaacgttgtagatcacagagtgaactatgctttttagtgttaaatgcaatagcttaagatagaatgttttacttgttacataaatgctggttttctttcagatttaaggacatatactttatttttttaagagatagggtcttctatgttgtccaggctggctttgaactcctgggatcaagtgatcctcctgcctcagc

SEQ ID NO: 362863 - DNA, 570 bp, Homo sapiens
gaactatgctttttagtgttaaatgcaatagcttaagatagaatgttttacttgttacataaatgctggttttctttcagatttaaggacatatactttatttttttaagagatagggtcttctatgttgyccaggctggctttgaactcctgggatcaagtgatcctcctgcctcagccttcgaagtagttgggactacaggcccacgccaccgtgcatggctggacacgtaaatttgaattgaatggttaaacatccagctagctgaaagcatggcagaccctaacagaaaagctacagtgtgtttttgcaactatgaagtgaatggtttcctggggaaaattgtgactttgtataactatttttgaaaccagaataaattatatttcacttgcatattcttaaattattaaaattttcagaagtcagtgatacagaaatactattttgcaatgttaatctgtttgagtctttggagaaagtggtttcattgtaggtacatgatgcactcttaatattttaaacaaatagttcactcttccatttaagggatatcagttccttgtata

SEQ ID NO: 362864 - DNA, 581 bp, Homo sapiens
gttgtcatgtgcctttaaccagctttagtaattactataatctcatatttatgatmgttttgttaggtgacaggaccaaatgaaaatattttatgttttcccatcactttagattttatcattgtgtaaattactgggtttttagcatttcctaatgtgaagttttaatcatttttaagtatacatattttttttctgtaccatttaaataaaatatttttataactttcttgtgagttttgttcatgcaaactttggaatgacttctggtttttagctattagcactttgaattaaccatagaaataacaagggctaactctgttcttcaaagactttataaagacagtatttgcactttcaaatgcaaatatatctacattaaatctaaacagcataagcattgtgacagaatgtacctcatgttgattgttttctctgtaaggtgacttctagtaatgatttgacttaatcaccacttgtgtctggttcagatcataccctgccatttactagctgcaagaccttcagtagtacaggtttagtatccctaatttcaaaatctgaaactttttgattgc

SEQ ID NO: 362865 - DNA, 605 bp, Homo sapiens
ttatatttcacttgcatattcttaaattattaaaattttcagaagtcagtgatacagaaatactattttgcaatgttaatctgtttgagtctttggagaaagtggtttcattgtaggtacatgatgcactcttaatattttaaacaaatagttcactcttccatttaagggatatcagttccttgtataaaatgactggatatgtataaagcaattatgttgtcatgtgcctttaaccagctttagtaattactataatctcatatttatgatagttttgttaggtgacaggaccaaatgaaaatattttatgttttcccatcactttagattttatcattgtgtaaattactgggtttttagcatttcctaatgtgaagttttaatcatttttaagtatacatattttttttctgtaccatttaaataaaatatttttataactttcttgtgagttttgttcatgcaaactttggaatgacttctggtttttagctattagcactttgaattaaccatagaaataacaagggctaactctgttcttcaaagacttyataaagacagtatttgcactttcaaatgcaaatatatctacattaaat

SEQ ID NO: 362866 - DNA, 509 bp, Homo sapiens
agtagtacaggtttagtatccctaatttcaaaatctgaaactttttgattgctgatatggcactcaaaggaaatgctcattggagcatttcgggttttggaatacaatgcaaatattccaaaatccaaaacacttctggtcccaagcatttcagagaaggggtagtcarcctgtaatcttttttcagctgtgaagtgggaacaatatctgtcttgtagggttgtgggtaatagtaataatgtttgtaaaacaccaattacagtgcctgacacagtaggtgtccactcaataaatggtaatggagagggaaagaaagggaaagcagaatctaggatcaggaatatcacatcccgtcatgatgtttgcaaaggggaaagtcaggcatgatgagtagacagaagtaaacccagtttgttgtcatgggtatgtgaaggtgtggcgagagtgtcatttaaaatagggagcaaggccaggcaaaggccacaatcaggcagccgaatcaggcagtg

SEQ ID NO: 362867 - DNA, 602 bp, Homo sapiens
gacatcagtttgaaaagagaccacatcagtgcaacattaattctgctaaaatcgaagcaagaacaaacatcaatttattatgaagcttgggtgaaaaatggtaaaatcactaatgcttcatgaaaagtttatgggaacaatgccccaaagaaatcaacagcttacaaatgaataacttgttttaagaaggtatgagatgatgttgaagaggaagccctcagtgagagaccctacacacgaatctttgaggaaaaaattcatcttgtttwtgccctaatcaaagaggactgatgattaatagcagttaacaatagcagaaacaatagacagtgtcatagacgtcaaattggttcaggttacacaattctgactgaaagccaactttgcacttgatgggtgccaaaactgttgtgcccagatcagttgcaaacaacagcagagctttcaatggaaatttaaacagtgggatcaagatcctgaagcatttgttcgaaaagttgcaacaagttatgaaacatggattttgtagtactatcctgaagacagcacaatcaaagcaatggctaccaagaagtggaagtgggtcagtcaaagcaaaagca

SEQ ID NO: 362868 - DNA, 630 bp, Homo sapiens
ggaaatttaaacagtgggatcaagatcctgaagcatttgttcgaaaagttgcaacaagttatgaaacatggatttygtagtactatcctgaagacagcacaatcaaagcaatggctaccaagaagtggaagtgggtcagtcaaagcaaaagcagaccagtcaagagcacaactcatagcaacagtattttggggctcaaggcactttccttgttgactttcaggaggaccaaagaatggtaacatctgcttattatgagagggttttgagaaagttacccaaagctttagcagaaaattcttgggaaaacttcagcagagtcctcctccaccatgacaatgcttctggttattcctgtcatcaagggcaattttgggagaattttgatgggaaatcattacagtcctgatttggctcctcctaacttctttttgtttcataatcttaatctgtaaaggatactcttttcagttaatgtgtaaaagactgcattgatatggttaaattctcaggaccttcagttccttagggatgggctaaatggctgtagcatgacttatagaagaagtgtcttgaacttgatggagcttatgttgagacataaagtttatattttcaattcattttttc

SEQ ID NO: 362869 - DNA, 630 bp, Homo sapiens
ggaaatttaaacagtgggatcaagatcctgaagcatttgttcgaaaagttgcaacaagttatgaaacatggattttgtagtactatcctgaagacagcacaatcaaagcaatggctaccaagaagtggaagtgggtcagtcaaagcaaaagcagaccagtcaagagcacaactcatagcaacagtattttggggctcaaggcactttccttgttgactttcaggaggaccaaagaatggtaacatctgcttattatgagagggttttgagaaagttacccaaagctttagcagaaaattcttgggaaaayttcagcagagtcctcctccaccatgacaatgcttctggttattcctgtcatcaagggcaattttgggagaattttgatgggaaatcattacagtcctgatttggctcctcctaacttctttttgtttcataatcttaatctgtaaaggatactcttttcagttaatgtgtaaaagactgcattgatatggttaaattctcaggaccttcagttccttagggatgggctaaatggctgtagcatgacttatagaagaagtgtcttgaacttgatggagcttatgttgagacataaagtttatattttcaattcattttttc

SEQ ID NO: 362870 - DNA, 518 bp, Homo sapiens
gttattcctgtcatcaagggcaattttgggagaattttgatgggaaatcattacagtcctgatttgrctcctcctaacttctttttgtttcataatcttaatctgtaaaggatactcttttcagttaatgtgtaaaagactgcattgatatggttaaattctcaggaccttcagttccttagggatgggctaaatggctgtagcatgacttatagaagaagtgtcttgaacttgatggagcttatgttgagacataaagtttatattttcaattcattttttccaagttttgaagtccaagggtacatgtggaatggctagatggagttcattaatatatgcattactttgcatacttattttttgtggtgagatttcttaaaatctactcttcacaatttttaaaatgctataaattgttattaactataattactaagctgtacaatagatctcttgaacttactcttcttacttaaatgaaattttgtaccctttgaccaacatctcccaacccc

SEQ ID NO: 362871 - DNA, 630 bp, Homo sapiens
ggaaatttaaacagtgggatcaagatcctgaagcatttgttcgaaaagttgcaacaagttatgaaacatggattttgtagtactatcctgaagacagcacaatcaaagcaatggctaccaagaagtggaagtgggtcagtcaaagcaaaagcagaccagtcaagagcacaactcatagcaacagtattttggggctcaaggcactttccttgttgactttcaggaggaccaaagaatggtaacatctgcttattatgagagggttttgagaaagttacccaaagctttagcagaaaattcttgggaaaacttcagcagagtcctcctccaccatgacaatgcttctggttattcctgtcatcaagggcaattttgggagaattttgatgggaaatcattacagtcctgatttggctcctcctaacttctttttgtttcrtaatcttaatctgtaaaggatactcttttcagttaatgtgtaaaagactgcattgatatggttaaattctcaggaccttcagttccttagggatgggctaaatggctgtagcatgacttatagaagaagtgtcttgaacttgatggagcttatgttgagacataaagtttatattttcaattcattttttc

SEQ ID NO: 362872 - DNA, 518 bp, Homo sapiens
gttattcctgtcatcaagggcaattttgggagaattttgatgggaaatcattacagtcctgatttggctcctcctaacttctttttgtttcataatyttaatctgtaaaggatactcttttcagttaatgtgtaaaagactgcattgatatggttaaattctcaggaccttcagttccttagggatgggctaaatggctgtagcatgacttatagaagaagtgtcttgaacttgatggagcttatgttgagacataaagtttatattttcaattcattttttccaagttttgaagtccaagggtacatgtggaatggctagatggagttcattaatatatgcattactttgcatacttattttttgtggtgagatttcttaaaatctactcttcacaatttttaaaatgctataaattgttattaactataattactaagctgtacaatagatctcttgaacttactcttcttacttaaatgaaattttgtaccctttgaccaacatctcccaacccc

SEQ ID NO: 362873 - DNA, 630 bp, Homo sapiens
ggaaatttaaacagtgggatcaagatcctgaagcatttgttcgaaaagttgcaacaagttatgaaacatggattttgtagtactatcctgaagacagcacaatcaaagcaatggctaccaagaagtggaagtgggtcagtcaaagcaaaagcagaccagtcaagagcacaactcatagcaacagtattttggggctcaaggcactttccttgttgactttcaggaggaccaaagaatggtaacatctgcttattatgagagggttttgagaaagttacccaaagctttagcagaaaattcttgggaaaacttcagcagagtcctcctccaccatgacaatgcttctggttattcctgtcatcaagggcaattttgggagaattttgatgggaaatcattacagtcctgatttggctcctcctaacttctttttgtttcataatcttaatctgtaaaggatacycttttcagttaatgtgtaaaagactgcattgatatggttaaattctcaggaccttcagttccttagggatgggctaaatggctgtagcatgacttatagaagaagtgtcttgaacttgatggagcttatgttgagacataaagtttatattttcaattcattttttc

SEQ ID NO: 362874 - DNA, 518 bp, Homo sapiens
gttattcctgtcatcaagggcaattttgggagaattttgatgggaaatcattacagtcctgatttggctcctcctaacttctttttgtttcataatcttaatctgtaaaggatactcttttcagttaatgtgtaaaagactgcattgatatggttaaattctcaggaccttcagttccttagggatgggctaaatggctgtagcatgacttatagaagaagtgtcttgaacttgatggagyttatgttgagacataaagtttatattttcaattcattttttccaagttttgaagtccaagggtacatgtggaatggctagatggagttcattaatatatgcattactttgcatacttattttttgtggtgagatttcttaaaatctactcttcacaatttttaaaatgctataaattgttattaactataattactaagctgtacaatagatctcttgaacttactcttcttacttaaatgaaattttgtaccctttgaccaacatctcccaacccc

SEQ ID NO: 362875 - DNA, 471 bp, Homo sapiens
ccaggctcaaatgatcctcctacctcagcctcccaagtagctgggactacaggtgcacaccactgggtttagctaatttttttttttgagagagagtttcactcttgttgcccaggctggagtgcaatggtgtgatcttgtctcacccacaacctctgcctcctgggttcaagtgattatcctgcctcagcctcctgagtagttgggattacaggcatttttagtagagaaggggtttctccatgttggtcaggctggtctcaaattcctgacctcaggtgatccacctgcctcagtctcccaaagtgctgggattacaggcatgagccaccacactcagmcttttttttttttttttttgtagagttgaggttttgccatgttgcccagttggtcttgaactcctgggcataagcagtccacccaccatggcctcccaaagtgttgggtttacaagcgtgagccattgtg

SEQ ID NO: 362876 - DNA, 443 bp, Homo sapiens
tgtgcccggccatttccttctttttaaggttgaataatattctgttgtgtatgtatacaatgtgtatacatacacacattttctttgtccattcattcatccattgatggatgcacaggttaattccatatcttgactatcatttgtgtgttatagatttaatttttctcaccagaagatctgttgaaatcttaacccctggtacctctgattgtggccctatttggaaatggagtctttgtagatttaattaagatgtaaattacaatgaagtcatactggagtaggttgggcccttaacccattatgactggtgtctttataagaagaggaaaagagacacagatacaaaggaaagatggtcaagtsacaacagaggcaaagattggagtgatacagccacaagccaaggaatgctaggggttgccagcaaccagtagaaa

SEQ ID NO: 362877 - DNA, 230 bp, Homo sapiens
tctaactcttttgttcttaaaaatactgggattacatagctaccaccaaaggtgactgggggcaaaatgtgctaattgccccttgggaccttctattatctctggyagttgagagtgccagtgggcctctggccttgtgaaatcctgtcaacttcactggaagaagggagctcatgtgatcattaaaaaggaaacaataggtgctggagaggatgtggagaaataggaac

SEQ ID NO: 362878 - DNA, 230 bp, Homo sapiens
tctaactcttttgttcttaaaaatactgggattacatagctaccaccaaaggtgactgggggcaaaatgtgctaattgccccttgggaccttctattatctctggcagttgagagtgccagtgggcctctggccttgtgaaatcctgtcaacttcactggaagaagggagctcatgtgatcattaaaaaggaaacaayaggtgctggagaggatgtggagaaataggaac

SEQ ID NO: 362879 - DNA, 536 bp, Homo sapiens
tccataaccgggtaaacaatccaaaacactgtgggccttggtgatacgctgagacttgctggcttcaggtgagactcagcacattctcagctgtggtggctgtggggcaaggatctttctgcttgagaaaagtggagagaaatgtacaggtgactttgtcttgcaccttaggtaccagctctggccacagtggggtggagcaccaagtgggcttttggggtccccaatcccagcatttggctcttggatggtatttctgaacctgctttgggccagaggggagctcactgccctgaagggtgagtcccagaccaggcagcattcaacataaactgactgaagagcccttgggccttaagggtacattggtggcagtctggcagtactcactgtgggcttgtggtggcagtggccacgggggaggcttctctgcctttggaaagtgtaggggagagtgggaaggactgcatcttgtggtttgagtgtcagctcagctgcagtacaayagaacaccaggtagacttctaaggtttttg

SEQ ID NO: 362880 - DNA, 450 bp, Homo sapiens
aagcagaaattctggagctgaaaaatgcaattgacaaactgaagaatgcatcagagtctgttgatagcagaagaaataattagtaagcttgaagacaggcttttgaaactacacagacgagacaaaagaaaaaagaaaaaaccaatgaaacatgtctgtaggatctagaaaatagtctcaaatggcaaatctaaggtaattgaccttaaagaggaggtagagaaagagatagggataaaaaatttattcaaatagataataatagagaactttccaaacctaaagatatcgatatgcaagtacaagaaggttatagaacactaagcrgatttaacccaaagaagactacctaaaggcatttcataatcaaactcccaaaggtcaagaataaagaaaagatcctaaaagcagcaagagaaaataaaccaaacacatacaatggagctctaa

SEQ ID NO: 362881 - DNA, 450 bp, Homo sapiens
aagcagaaattctggagctgaaaaatgcaattgacaaactgaagaatgcatcagagtctgttgatagcagaagaaataattagtaagcttgaagacaggcttttgaaactacacagacgagacaaaagaaaaaagaaaaaaccaatgaaacatgtctgtaggatctagaaaatagtctcaaatggcaaatctaaggtaattgaccttaaagaggaggtagagaaagagatagggataaaaaatttattcaaatagataataatagagaactttccaaacctaaagatatcgatatgcaagtacaagaaggttatagaacactaagcggatttaacccaaagaagactacytaaaggcatttcataatcaaactcccaaaggtcaagaataaagaaaagatcctaaaagcagcaagagaaaataaaccaaacacatacaatggagctctaa

SEQ ID NO: 362882 - DNA, 399 bp, Homo sapiens
aatgtattacttcttaataaaggataaaattaatttaaaaacatgtggagagactgtagtatgctattgaacagtttgttagccattgcaaaaggcactaactaaaagtgagaagtgtaattcagaagaagagaagacgaggtatgtgcaagtcaattgagtctccatgggatatggaacaatcatccgcccaattcatctgaccagcgtctacctgggcatcawcctgtcttcctctcttgccttcatctcttaactccaatccatcaacgaagccttggattccatatctgaggtatctcttaaatatgccatctttttgtttccattgctatttccgtggtccaggtaccaacatctcctgccaagaccgttccaatagcatcctaactcatatct

SEQ ID NO: 362883 - DNA, 536 bp, Homo sapiens
ttgggacaagttgtaaaggggcaggaaatgcctggccgtgtgtatagaatgatgaagagtatagttcgaggcaaagggtgtgtgaagaaaactagtaggaaagaaggttggtgacaggttgagaccttgaattccaggttaaggagtctgtgtttgactgtgaaatcatgtggataggtaatgtgaacagagtaggtttcaagtaaattaatctggttggaacatcagtaaggaaagagactgggatcagggagacagggtaaatatgtgtcatttaacagctctttatgctctgactcaagctgtccattttgtatatttttatataacaccagtgcctcttaaagcaaactgttcagaggtgaaccaggatgattattaggcaattatgtatacaaattaaaacaagaacatgtttgtgtgacttggctcagtcgcctatgagtgaatttacatataactgacatttcatatgtcccatctttttttttttwaaaaaagaaagaattatataagaaataacatttctgtgtttg

SEQ ID NO: 362884 - DNA, 631 bp, Homo sapiens
cagatttattgtagtaaatgctgagatcagaaagcatgtgtaactgtgtcataaagtgattgcatccaggcattattgccagccaagattgataaatatacccagtaagtataattgttctctgtgtcagcccttattgaaggaatactcacwgcagtggtgataactgctatcatagctaccattaaattattcattgtgactggttgtcccgctttcctcaggttttcttccgccatctaagacagcttcttgatctgtccccaggtgggtggctgtgttctatgggtgttgctcatgacagttggggtcctcctcagtgtcagtctcaacatggctgcaactggggggtcctggggatcctcccagagtctcttccttggcatctggctcatgttaagggttcaggtgtcttgatggtatccaaatcggctgttgattcggtcctggagaaacacaagcataacctctaccccaggttattattttacctatttcccaactttttgttatcagatctctccaccaaatcagttgttctgcttctgtctttgcaactggtttctgtagatgctgttcaactgctgataatatctgacctttgggcaggctcaaaaaatttaaagttaat

SEQ ID NO: 362885 - DNA, 611 bp, Homo sapiens
tcatggcataggtaggaatgtctagagcaggtcatatccaattaatgtaccctagtaacttctgaaagtcatttaacgtttttggttgatccttacgtatggttactttctgtggcacaatggtagtgtyatttactaagactactactcccaagtaggagtaaggagtaatagtctgagttttgtcagaagctataattaaatcagcatgataaatcgaattttgcaagtgatcataacactggagtaatatttctcaagtgggggcagcacaaagtatatcatccatatagtgaatatgtaacactgtgaaaattttttacgagtaggttcaattgcttgccccacatacatctggcaaattgtgggactgtttaacatgccctatggcaacacttcccaatgataacgcttagcaggctgcaggttgtttactgcaggaattgtaaatgcaaaccattcacagtcttgctcagctaaagggatagtaaagaaacagtctttaaaatctacgactattaaaggccaattttttggaattatagcaggagaaggcaatcctggctgtaatgctcccataggttgtataactgaattgatggctcttaagt

SEQ ID NO: 362886 - DNA, 609 bp, Homo sapiens
taggagtaaggagtaatagtctgagttttgtcagaagctataattaaatcagcatgataaatcgaattttgcaagtgatcataacactggagtaatatttctcaagtgggggcagcacaaagtatatcatccatatagtgaatatgtaacactgtgaaaattttttacgagtaggttcaattgcttgccccacatacatctggcaaattgtgggactgtttaacatgccctatggcaacacttcccaatgataacgcttagcaggctgcaggttgtttactgcaggaattgtaaatgcaaaccattcacagtcttgctcagctaaagggatagtaaagaaacagtctttaaaatctacgactattaaaggccaattttttggaattatagcaggagaaggcaatcctggctgtaatgctcccataggttgtataactgaattgatggctcttaagtcagttaacattctccatttacctgattttttcttaattatgaaaactggagaattccaaggagaaaattttggagctatktgcccattttctaattgttcagtaactaatttctctaaagcctccagtttctctttacttaacggacattgtt

SEQ ID NO: 362887 - DNA, 444 bp, Homo sapiens
  misc_feature (1)...(444): n = A,T,C or G
tcatctgcccaccaggttttaaattgtaagaactaagcaggagttagacaagctcgagtaagagtgtcccagtcagtaggaaccatcctactggaaacagcaaaattctttaacagtcccattataaaaggagaacctggtccatactgatttatagcttgttgaaattctttgaggaatttaaaaggaaaaggatcaaatgtagctataatattaccctgttgatctgggggatgtattctaacagggaactgccaagcctataaataaccctcttgtctagctgnctgaattcctgcctgaayagaactaagagtggtcattcgaggtgctgcttgaacagtcactggggcaactacttttctcccagtgtcctctggtaaagaaaaatctggagggtctttttcttcaaaataataagaagggggtgtagaagggttggga

SEQ ID NO: 362888 - DNA, 569 bp, Homo sapiens
aaggataacttgggggtggggggaagccagtgagccaggagtgctgattggtcaggggtgaaatcatagggagttgaagttatcttcttgtgctgagtcagttcctggggagggggccacaagatcagatgagtcagtttattaatctgggtggtgccagctgctccatcacatgcagagtctgcaaagtatctcaagcactgatcttaggagcagtttagggagggtcagaatcttgcagcctccagctgcatgactcctaaaccattatttctaatcttgtcattaatgttagtcctaaaaaggcaatctagtccccaggcaagaaggaggtctgctttgagaaagggctgttaccatctttgtttaaactataaactataaaactaagtttctccaaaagttagttcagcctatgcccaggaatgaacaaagacaggttggtggttagaagcamaatggagtcagttaagttagatctctttcaatgtatcagtcatacttttgcaaaggtggtttcatgaccgtggtttaataatatcatcttctgtaaagagaatagaaaaaat

SEQ ID NO: 362889 - DNA, 621 bp, Homo sapiens
agcaaaatttagatacactcctgttttcatggagcttccagcctgctagagagaaacaggtgataatcaattaaacaccccaaaaacatgtgagataagtgtttgggaagaaaaccattgctgtttaagagcacataagttaggagcstcactaataaatattttataatgggtaatggagtaagtatgaaacagaggcccaggtaatgtgactttgagtcagaggaaacctgtctaacaccatcttaaagccctcaattgaataacagagccatttcctcattcctgaatcttatttcccactgtgtactttgtacttagttttgggctttctgcttagtccttgttctcaggttcttttcacgactactgtgtcctactctttattgttttcctggaaagtatgttgggaaactttcagagaaagagttcagtaatccttgagtctcaagagactttattgaactcaagcttcctcttagtatcttagagcctattatacataggttgggcttctttacaaattgaacaatctttcacaaccaccttctgattttacaccctatcccatcagcataacaattctctcctcatggtatacagtgagggagatcattattg

SEQ ID NO: 362890 - DNA, 621 bp, Homo sapiens
agcaaaatttagatacactcctgttttcatggagcttccagcctgctagagagaaacaggtgataatcaattaaacaccccaaaaacatgtgagataagtgtttgggaagaaaaccattgctgtttaagagcacataagttaggagcctcactaataaatattttataatgggtaatggagtaagtatgaaacagaggcccaggtaatgtgactttgagtcagaggaaacctgtctaacaccatcttaaagccctcaattgaataacagagccatttcctcattcctgaatcttatttcccactgtgtactttgtacttagttttgggctttctgcttagtccttgttctcaggttcttttcacgactactgtgwcctactctttattgttttcctggaaagtatgttgggaaactttcagagaaagagttcagtaatccttgagtctcaagagactttattgaactcaagcttcctcttagtatcttagagcctattatacataggttgggcttctttacaaattgaacaatctttcacaaccaccttctgattttacaccctatcccatcagcataacaattctctcctcatggtatacagtgagggagatcattattg

SEQ ID NO: 362891 - DNA, 586 bp, Homo sapiens
ggcagcccatctggtgagagcctcaagctgctcataacagaaaatggaaggagagtgggtgtgtgcaaaaagggaccaaacaggaggccaagaagcctcacaaatgagcacaaatgctttgcaaatatcactagtaagcagtttctgggtaaaaccgtatttcactttggcaatttgtgggggcaggctttataacaacccactctcttgggaactaatccattcccaagagaagaagagctcactcatccctgtgagacagcattaatctattcatgaggaatccacccccatgacccaaacacctcccactaggccccacctcccaaaactgctgcaytggcaattaaacttcatcatgggttttggcagagacaaatcacttccgaactaacagcttcttaaactttctgagcctcagtttcctcacgtgttaaaaatgagatgataatcttcaccacttagtatcatagtgagaactaaatgaaatgtgatgacatatatatatatatatatttatatatatatatatatataaaaccaatcacagtttctgatacacagcaagctctcaattaatgatagg

SEQ ID NO: 362892 - DNA, 434 bp, Homo sapiens
  misc_feature (1)...(434): n = A,T,C or G
attgttgaatggacagataaagtaaatattgaagtgaagctatgtttgttatgggattatggattaaaccagttatttttaaaaatctgccaggaaaaaataactactgggtaagaggcttagtacctgggtgatgaaataatctgtacaacaaacccccatgacacragtttacctatttaacaaacctacacatgtgctcctgaacctaaaataaaagttaaaaagaaaaagtctgccaggtaacctcctcatttactttacattaagttgaggtcctgatacatacatctcaaccttataattcaagactactgtgaaatacttctagttcacttgaaatagcatggtaataggacaattaaaatccttatatgttcttaaaaagtacatgcttaacattntctggcattacttctgagctcagataaagc

SEQ ID NO: 362893 - DNA, 579 bp, Homo sapiens
taaatagttttttaaaattctgggcttgagtcttgagtcccacctaccttgatcactgggctctctctttacctgagagtccccagcagcatcactgcaacatctccaaactgactgatggcaacaggagagcacctaattaaattagtaygttctgccttgattatttacaacttgatagttaccccataaaatagattcaaaattcagcttgccaaatgatccctcagtcaaaatatcttcaggaaacttgcatacacttacctacataagccactttctcattctgcttgaatttaattaattaattaataaaagacttccctaagtgatctgggacaatccacaaagcatgggaattaaaaatgggtatagggtcacaattgtagaataccaagcccagggccacttcattcattcattcacacatttattactaagtacttcactgagcacttattatgaatcaagcccactactaagtgctgagagactcagatggataaggtgtaatctttgtaacaacataaattttgtaacaactcatgcatttacatggagacatgcaagcaaacatta

SEQ ID NO: 362894 - DNA, 613 bp, Homo sapiens
ctgctagcaactggtgcctactgctctaagtttgtaagacattgaggtccaagggaagaagaaggacayagatgtagctttactaccagaaattttaacagccattcaaacttggtgtctggatagctgaagactccaagagcaccacagcgcaattactctactcagtcactagcatacctgcttcttttaattgggatttaggagaccgatcgagcccattgttatggagggatgaatacagagaaagacagaacactcaaagaattctagcgatgggcatgagtgctgcggataatattgtagattggcttactgtctatttccccatcctcccttttaattatcctttcggtccattagaagttaaaaaaagaaattacctcatctattccaggcttctggttgcagcttatgggaagggccatgtggcatagtcatggatggtgaaataaagcagaagtgcctaggaagacatatttttttcctggaaaaaaaaaaaaaaaacagacaaagcctcactgggataaagtccttttgaccttcaccctttttcatatctagaatgtacacattatgcctagaggcacacacccatcttgtgaaactgaga

SEQ ID NO: 362895 - DNA, 581 bp, Homo sapiens
caccttgcctttggtacttgagtgctgccacttggtccctgccattccaggatccagttactctccttgcatttaggtttaccaattcagggattgccattcccactgtaaggtctctgtgattgcagaaaagggcaatcacagagctcttggatgtgggactcctctgacaaatttatttcttaggcwtgatgaaaggtgtgttctctggaccctttcagggtggttgagtaagtctcccaatctccctaagcccccgaatcccttcctctacattaagctaaagcaagcctggcatttctaacttgctcaacatgggtcaccttttggtctatgttttagattacccatcaaactgttagagttctttctaactccctgagctgcaacagtaaatgctaaatttctgcttagtgagcccatatcaatcagtctgattcaaccttatttttccaccaccattatcccacacctttaatatctataaccctacatattctcagatatttgtttgtattaatttaaaaaactccaacagttattttggaaagtgctatgcctcttcatgtgtcatgctctat

SEQ ID NO: 362896 - DNA, 544 bp, Homo sapiens
ttaatagcagcccaaaactaagacacgtgattcaaagtgattagcttatgattctaaaagtcattctgggaaatggagctgcctcatggcctcaccaaaattctaataatggtcaagttcccataaaaaattaagttaaagccttccttaaatgtagtagtcattattgctattaatagttttggaatgtagtcagattgcaaacatacttccacatggtttggcagggaacatgtgactagctctgtccagtgaattgtaagttaaaggatcacatatgacttccaggccagaacattctattgctggttcaaaacctacagctcwcttttcctctatccagtgataagcaaaattcaagatggcagcttctttgtcggcctgggttccaatgggaggaagtatggaggagagctcccaactgacctcagtgcataagagatagaccactcagatttagaggttgtgtttactgcagcacaacccaggttaccttgactgacacattgggtcattcatttatttatttaaatgaatgagaacc

SEQ ID NO: 362897 - DNA, 483 bp, Homo sapiens
ctgaccatttgtccatgagactcagctatggacagcctcctgacttagggttcctctgactcttaaaaaaaaaaaaaaaaamaaaaaaaaaacctccaaaataaagtgtaataaaaggaaagtacaatatctcctgacagaattcaaactgtacatgctgaacaaaagacttattttttccactcaaccttgctgttttgaatttccttgaacttacttcaaaataaagtttgggaagaagaaaacattgtctgtgtcacagaaatggtccaagatggctggaggaatctacctactgaagagggctccaatcacccaaggtgagataggatgactgtttaatacatgtggcaataaaaacaaataaaacacatatacaccataaaaaaaaagccttcgaggacttgggttctacctgccaaacacattttccctattaaataaaggttgaatttttgtcaacaaccaattgtttgacaatat

SEQ ID NO: 362898 - DNA, 483 bp, Homo sapiens
ctgaccatttgtccatgagactcagctatggacagcctcctgacttagggttcctctgactcttaaaaaaaaaaaaaaaaacmaaaaaaaaacctccaaaataaagtgtaataaaaggaaagtacaatatctcctgacagaattcaaactgtacatgctgaacaaaagacttattttttccactcaaccttgctgttttgaatttccttgaacttacttcaaaataaagtttgggaagaagaaaacattgtctgtgtcacagaaatggtccaagatggctggaggaatctacctactgaagagggctccaatcacccaaggtgagataggatgactgtttaatacatgtggcaataaaaacaaataaaacacatatacaccataaaaaaaaagccttcgaggacttgggttctacctgccaaacacattttccctattaaataaaggttgaatttttgtcaacaaccaattgtttgacaatat

SEQ ID NO: 362899 - DNA, 483 bp, Homo sapiens
ctgaccatttgtccatgagactcagctatggacagcctcctgacttagggttcctctgactcttaaaaaaaaaaaaaaaaacaaaaaaaaaacctccaaaataaagtgtaataaaaggaaagtacaatatctcctgacagaattcaaactgtacatgctgaacaaaagacttattttttccactcaaccttgctgttttgaatttccttgaacttacttcaaaataaagtttgggaaraagaaaacattgtctgtgtcacagaaatggtccaagatggctggaggaatctacctactgaagagggctccaatcacccaaggtgagataggatgactgtttaatacatgtggcaataaaaacaaataaaacacatatacaccataaaaaaaaagccttcgaggacttgggttctacctgccaaacacattttccctattaaataaaggttgaatttttgtcaacaaccaattgtttgacaatat

SEQ ID NO: 362900 - DNA, 483 bp, Homo sapiens
ctgaccatttgtccatgagactcagctatggacagcctcctgacttagggttcctctgactcttaaaaaaaaaaaaaaaaacaaaaaaaaaacctccaaaataaagtgtaataaaaggaaagtacaatatctcctgacagaattcaaactgtacatgctgaacaaaagacttattttttccactcaaccttgctgttttgaatttccttgaacttacttcaaaataaagtttgggaagaaraaaacattgtctgtgtcacagaaatggtccaagatggctggaggaatctacctactgaagagggctccaatcacccaaggtgagataggatgactgtttaatacatgtggcaataaaaacaaataaaacacatatacaccataaaaaaaaagccttcgaggacttgggttctacctgccaaacacattttccctattaaataaaggttgaatttttgtcaacaaccaattgtttgacaatat

SEQ ID NO: 362901 - DNA, 623 bp, Homo sapiens
tcaacaaccaattgtttgacaatattgggtgtgttttgctctgagccaatgcatgctctagacacaggttttctctacacacgttgtcagacttctgagttgagggataggagagtttccagaaagcatctcgtaaatgtaagtcaataatctataatcaaactatgaggattgattggtcattcactatgtactcagatttaatcctgtgggagaaataaacaagttattgagacatggtccatgtatcaaataaccaagtgattttttttgttagttattgagggtgtttttaaatatatatttttatttaatttgaagatccaacattcaagtagctggctgagtttaaaaaaaaaaaaaaaagcttttcttctggaygtgtagggtaatgaaaaaacttgtgaaggtctagaagaggcccctcttaaagttctatagccaattatagcaccttctgctatttgtccttccccaaatcctctcatgggtgcaatgtaggcaaagagggttgggtgtttagaaagagtataggagactttgtgcttagtgtctcaaatgtctcactattacaaagcgttgaccattttgggttttgcttatttgtttgtttttttgtttta

SEQ ID NO: 362902 - DNA, 374 bp, Homo sapiens
agataatcagagcatgcattgttctttgaagaacatagtgctgtgttggttggctggcaaatgatggtgaatactactcagttatgtgtaattaaaagcagagtgagatactaacactaggagataataaagctgttttcagaaaacagattcaatttgaataaatacatgaacacgttatcagtgaaatatctttgtgaaagaattatttatcctactctatcaacctccttcaaaatcaaaggatagattacaagtgccttggttttttgttttgttttgtcttattagtttgagtttgcaaaccccaagaaattcaaamgtggtacatctttagaaacaacttaagagaatcataagccatgcttaagctt

SEQ ID NO: 362903 - DNA, 490 bp, Homo sapiens
gactataaggaggatatccatggaaggttaattattaaaacttatcttttgtgatttttagcttgatgtcccccatctatttacattggaactttgggtgctcttctgggttgatggcgataactctgtcaacttcccaggtctttatttgggtataataaatttaagaatctattccagtgacctactgtaaaagaccgtggtgaccactttgaggaggttctctaaagtactatctggtctcagggcctttttctgcagcttccccctgatatcaggggcttcctgagtaatacattyatcttttaggattagatgttcctcaactgaagcaggagatagagatgtgtgccttatgaaggcctctcttatcctctccaggaaggcagtaggattctcatcaaatccctggactgtcctggatagcttggtataattgagaggcttagttctaatcctgcgtaagccctctattatgcacacctgaaag

SEQ ID NO: 362904 - DNA, 578 bp, Homo sapiens
ttctctcattatgaagcacacactaatgaacccttttatttcagttactttcaagattcgtgaaacattgttagacaattaatgaggattcacaaattgttatagctgagtgagataaagcatcatggagtttcctggctacttttctttagagctattgttctcagagctacagaatgctcattgtaactcctggtggtcaatatgaaaattttcatcctttctctttttgatacagcagagtctacttaataaaagtgattccaggagttcttctgaattctaaacacaattcaaatttctttygttttaataagctttttcactttaggaaataaaaaaggaaggactatgcacaaataaatagaatattgtgatgagggcaactacgtaacaacagaatacggtcatcccttggtgtctgtggtggattggttccaggaacccctggaataccaaagtccacaggtgctgatatactacaatccctgatataaaatggcatagtatttgcatataacctatatacatccccccttctactttaaatcatctctagattacttataatacttaat

SEQ ID NO: 362905 - DNA, 616 bp, Homo sapiens
ttaatacaaggtaaatgatatataaatagctgttatatcattcagggaataatgacaagaaaaaaatctgtccatgttcagtacagatgtaattttttttcggatatgttcaatctgaaattggttgaatccatggatgtggaacccatggctatggagggccaactctgtgcaaaagttccagagaaaagtgattaatctgtgtaaagtgggatcaaagaaggcctcctggaggaagtgatgactgagacaccagagaaacaaagaggacatatgcaaagacaccaagatgagacaaagcagaatgtgtgcagagaggacaarcaatttggcattgctgggggataaaggtcaacagggtggctggagatctgggtgggactgaagacagaggctaggtcatcaaatctcttatcaagcatccattagaacagaagttccaggtgagtagccagcacgtctgccatactcggcatcacatcaactttgcctaccatagtactggcacattgtaagagctccatgaacatttgtggggtgaaaaaagtaactgcaatcatgggcaatgggggaaaccatagaagtgttttaaaagatcactttggtggcagtggtg

SEQ ID NO: 362906 - DNA, 462 bp, Homo sapiens
gatgacaccatgttgggaaatctgaccctactgttcagaaaacttaaaagttcagacaattaaggaggatgaaaagtattggaagcaaatgcccagctcatgggtgggacccacaaattcattaaaaatggcacttggagtaaaatctacagtagacagagcccaagtckctccgaaaccccatacccactgtgcccctcttccttactcacagaatcccccttgcattttaagcagtgacattcctggcttaaaaagtaaaactctagccacattttagaagacagcagctttcagctggcctgctctttttctctttatccttccccttcttgcctagaaagcagacattatctggagatggggcagtcatcctgggaccataaggcaacaggttaaacactaaggatggctgggtggaaagctagtcagcacctgtgaccctgaaagcactgagagcca

SEQ ID NO: 362907 - DNA, 593 bp, Homo sapiens
gggcatctcggggaaggcaataaaggcttgaacttttcaaaaacaatttcacgatttgtctaatatttaatttatgcataaaagatggcagcataaaaccttgctaatcaggattcaaacagaagatataggcaaggtgaaatgaatcaccaatttttctaaggattcaccagaaaccactttcttctcctatcctttaagaaagcctttctaaagggggattggtcacaagtaaataaaactatagaaacagagttcataatggtgaaaagttggcttgtctttctggatcttcttttgactgcatactgggcrccccgtctcctcctcctcctctatcttattcactgacaagagataatggtatcttgcaagtatgtgggctatctgggttcaaattctggttctgctactcactacctttggatatattaattggccattctgaagttggtattctgtgtttaaaataaagataattttacctggcagcttaatgagagtttaaaaaagcaaaagcacccaacaatttttgtctgcacctaataatttttgtcttcattaatatatattcagtaggtactccttatact

SEQ ID NO: 362908 - DNA, 593 bp, Homo sapiens
gggcatctcggggaaggcaataaaggcttgaacttttcaaaaacaatttcacgatttgtctaatatttaatttatgcataaaagatggcagcataaaaccttgctaatcaggattcaaacagaagatataggcaaggtgaaatgaatcaccaatttttctaaggattcaccagaaaccactttcttctcctatcctttaagaaagcctttctaaagggggattggtcacaagtaaataaaactatagaaacagagttcataatggtgaaaagttggcttgtctttctggatcttcttttgactgcatactgggcgccccgtctcctcctcctcctctatcttattcaytgacaagagataatggtatcttgcaagtatgtgggctatctgggttcaaattctggttctgctactcactacctttggatatattaattggccattctgaagttggtattctgtgtttaaaataaagataattttacctggcagcttaatgagagtttaaaaaagcaaaagcacccaacaatttttgtctgcacctaataatttttgtcttcattaatatatattcagtaggtactccttatact

SEQ ID NO: 362909 - DNA, 487 bp, Homo sapiens
tttaactctggaagacgtgctggctacccgttctttgttgggttttgtaagatgcattttgcgctcggctttccgcttggctggagacacgcaaactgaatctgcaagtaatgcaggcggcgagcgaggagccggcgagaggccgagtaggattctaatcacgtccttgctaactgacaagaagcaagccagccaaaaacccaccaatttctttttgaatcttggtaattgggtacttttacacgcagctcacgctattcggatagagtcacaagcttagatagaccagtgtctcaaagcgaccacacatttctaatgcgtttttttaattaaaatctcaatccgtttggaatgaattcatatcatatatgcctcttacttaaaatcaatatagcaagtaggwgtattggagaaaatgagtagaaaatgtatgcctggaagtgagggaagagaaacatactcaccactaggagcttgtctgtggaga

SEQ ID NO: 362910 - DNA, 589 bp, Homo sapiens
tgattgtagcactgacctcaaataagcgcaatactttggccaatgcaccaacttcttctttgagtgagaagatcagtgatatggcaccattttgattgcagttgtcttcaatatagcttgtttcctacaggataagatgcatttgtttaaaacattttccacagtttagcaattcattcctgttaaacctccatggacaaagcaagcatgaactctttcttctagttaaatcttgcaatacaatgagctatatatattctatacagaaatatgtagtgtggtggaaaataagtaagtccagggcaattaaatgatcaatgatgctactgggtcagttatcagcttaaggaatcttcaattattcattgatgtcaccattcaatcctgtaaattcaataccttttattgagcaactactaggttccaggcactatttgggctctgagaaatttaaagatgaataagacartgctttatcttttaggagctcacaatctaacttaatagacacatatataacaaactgaaagatccttagaggtgatataatatgatttataaaatgtcccagaaagacattgagaaatac

SEQ ID NO: 362911 - DNA, 556 bp, Homo sapiens
ttattacacattgcatgcctgtatcaaaatattgcacatactccatgaatgcatacatctactatgttcccacaaaaattaaacattagaaaaaagagttgcattttcagctgttatggggagaagaaagaaaagctatcattttgttgtcctaaaaattatgttgtcctcatttcaaacaggaaagcaaaagtatttgagagccagtgcagtgcyttggtgttgggtgaaacatagattgaatttgggccatttgtttaaacttcctaggcctcagtttcttgcctattaaaagggagtgcatagttcatgggattgttaagaggaagaagtgaaaccatgcacgtggagagcgtggcacagtgtctaagacagagtgtgcatgcaaataagtagataatattctttgcttttctttattgcatgcctgtaatatttttggagttgtcacattcattgccctcaagtagcatcaagggatgaaattatgtttgtaagaaaatcctgaggctgaggaatacaacatgttttatgtctactacactgaaaaatgccg

SEQ ID NO: 362912 - DNA, 556 bp, Homo sapiens
ttattacacattgcatgcctgtatcaaaatattgcacatactccatgaatgcatacatctactatgttcccacaaaaattaaacattagaaaaaagagttgcattttcagctgttatggggagaagaaagaaaagctatcattttgttgtcctaaaaattatgttgtcctcatttcaaacaggaaagcaaaagtatttgagagccagtgcagtgccttggtgttgggtgaaacatagattgaatttgggccatttgtttaaacttcctaggcctcagtttcttgcctattaaaagggagtgcatagttcatgggattgttaagaggaagaagtgaaaccatgcacgtggagagcgtggcacagtgtmtaagacagagtgtgcatgcaaataagtagataatattctttgcttttctttattgcatgcctgtaatatttttggagttgtcacattcattgccctcaagtagcatcaagggatgaaattatgtttgtaagaaaatcctgaggctgaggaatacaacatgttttatgtctactacactgaaaaatgccg

SEQ ID NO: 362913 - DNA, 556 bp, Homo sapiens
ttattacacattgcatgcctgtatcaaaatattgcacatactccatgaatgcatacatctactatgttcccacaaaaattaaacattagaaaaaagagttgcattttcagctgttatggggagaagaaagaaaagctatcattttgttgtcctaaaaattatgttgtcctcatttcaaacaggaaagcaaaagtatttgagagccagtgcagtgccttggtgttgggtgaaacatagattgaatttgggccatttgtttaaacttcctaggcctcagtttcttgcctattaaaagggagtgcatagttcatgggattgttaagaggaagaagtgaaaccatgcacgtggagagcgtggcacagtgtctaagacagagtgtgcatgcaaataagtagataatattctttgcttttctttattgcatgcctgtaatatttttggagytgtcacattcattgccctcaagtagcatcaagggatgaaattatgtttgtaagaaaatcctgaggctgaggaatacaacatgttttatgtctactacactgaaaaatgccg

SEQ ID NO: 362914 - DNA, 551 bp, Homo sapiens
atattaataacaaacaaagtagtgtcgtgttatatagtaaatgtgaatttgcagacacatttagggaaaagttataattaaaaaaataggctgtatatatatcaatggttccaaaattttctatggttaagaatcacctgggatggttttgaaatggcagattctaagacaacttgattcaacaggtttaggtaaagcccagggaactgcattataagaaggaatcacctgtaattttggagtcaagatccaaggaacactcattgagaaacactgatttacaaagtgcatggagagaaatggagcaagtgaagggggatcagcatggtgaaatataggctgttaggagtgctattgactawctgtctggtgactggaccagagtaaatcttttactttgcaagaaacaggactaaattcccatattatgtccatagcaaagggaattatgtagaaaaattgataattaggagcctgagttcttgaccagcctccactacctatgtggcctcaggtgagttattttctccctttggctctaagttttcccc

SEQ ID NO: 362915 - DNA, 531 bp, Homo sapiens
aaaaaaaactggataactgagatattccttgtggaaatacaagatagtacagacactctcaaaaaataacgtgtcaatttctaacaaagctaaacatgcagggccatacaatctagtaagtgcattttggggcatttatcctagagaagtgaaaatttacttccacacaaaacctgtacacaaatgttcatagcagctttatttgtaacagcaaaaaactggaatcaacccaaatgtccttcaacaggtaatgattaaacaaagtgtggtacatacacactattaaatattactcagcaataaaaagtaacaaactagtggtacacaaaacaacttggataaatctccaaggaattatgctgagtaggggaaaaatggcaggcccaaaaggttacacactacttactttcatttatataacgttgtttgaaattacaaagtttcagaaattaagaacagagtagtagctkccaggagttaaagatccagggaggggcagtggggagagtaacaatagagaaaaaggtagca

SEQ ID NO: 362916 - DNA, 411 bp, Homo sapiens
ctcagcaataaaaagtaacaaactagtggtacacaaaacaacttggataaatctccaaggaattatgctgagtaggggaaaaatggcaggcccaaaaggttacacactacttactttcatttatataacgttgtttgaaattacaaagtttcagaaattaagaacagagtagtagcttccaggagttaaagatccagggaggggcagtggggagagtaacaatagagaaaaaggtagcaatasagtttcttactgtgatgtaactagtcagtatctccactgtgatggtaaatgcaaaaacctacacatgtgataagactgtaaagaactacacacatgcacacacacacacacacacacacaaattgcttataagaataagtgtacctacaaattagtattctgaataag

SEQ ID NO: 362917 - DNA, 610 bp, Homo sapiens
ggagtgaggttacagttaaacttgactcattgcagaggcaaaactcagaaggaccttgcttcctggattcccagagacatctttcttcagctacwtttttattccaagagccttcccatgtctttccaatacatttcccatttcctcaagttgacaagagttagtttttgttgctagctgtctaagaatgaaatagcacagtctacattactttttgggatgcctcagcaacttaagtctctggtgacttcatgaccatattagtaacaatctccttagacagtccccactcacaatttccccacatgtggaactcattccctttctgtctcctttcaggcacttctgtctccacaggctttgcctctgcctcctagcttctgcttcttagtggcctctcactgacttcactcggtgagacttcactgtcttcatattcctttatgggtgtcttcaggccaacctcctcaagggagaaaagctgtctgtgggcactgtggtcagtgcaaggcatagccttgccagtcagaagtcttaagccactacctcttgcactgcaaatagcctccattgggggctgacactgctccttagtctaaacagctgtggt

SEQ ID NO: 362918 - DNA, 516 bp, Homo sapiens
tacaaaacagtttgcagattcctgatctaaaagatagttgtattttcttgtttgttgttttgttttatttttggctgcccagtgtctgagtacacttcccttgggtattcttaagcattttgagaaaagtttaaaagcagacaaggccactcactttcctggccttccttgcatctacggctcaaccattctgaagctctcaccatagttgtggacctgacgactagtgacacaaagaagcagggacagaagataatctgttttggtcccygtagtacctggggctacagcaaaccaatttccaggctgtggcaccatctgcaccagcagtacatccaatgtctagacctggggatggcgtcagtacaaacagtgggaaccagagatcagaagcagtggtggttgcagccttatccaactattctgggaaatggttttaatgatggttttggctgcttctcagccgtacattttctagtccatgttctgattctggaattagcctttttagtaatt

SEQ ID NO: 362919 - DNA, 559 bp, Homo sapiens
cactgctatcaagcttgggatgagcagccccaataactgcataaaggggatactgcggtcactgctttagacttcaggggctggtgcgaatcagattaacctgcagaaaagcagaatcagaatctcaaatagttatgttcaagctaaatggaagactccagagtgaagcaccgaggcctcatctcctcaggttttcatttagatgtcaccttctcagccatgccctctctacaccctatgtaaaattgaaaccccactctgaaactccctatacctttgccccttttttctctatagcatttgtcatcatctaacggagttgtgttggctttctgtctgccyctactagaaatgtggactccatgagggcaggggtaattgactgttttgtcacagtgctcaattaacatttgttgaatgaatgaatgaatccaagagaccatataaaagtaaagattcaaaatggtgaattggaggcagagccaggaattgtgtctagaatcatctagaaggctgctacagcaggttttgatgatattactggagtggaagttgggct

SEQ ID NO: 362920 - DNA, 600 bp, Homo sapiens
ctcttgttatcactccacaggttcctgaggtactgctcaatttttttcagttcagtttctcttcattcatataattttttatataattataaatagtatatattttttaaatatcagtttcctattgttcattgytagtatatagtaatacaattgatttttctatttggtcttatattctgcaatctagattccatttaattttctacatggattttttttcatgaatgattatgtcatctttaaataatggcagttttactttattcttgccaatattaatgtcgtattttttatttttcttgccttagtgcatttgctaaaacccctagtacaatgttaaatataatgtcttttttcctgttcttagcaaaaaatcatttagtctttccccattaagtatgatgttagttgtaagtttttcataggtgccatttattaggtttaggaatgtcgttatattcctagttttctgagagtttttctttttaaatcaggaattaacattaagttttgttaaatattttttgtgccactaccaatattatcatatgttttcctgtccactgttatgctaaataaatgggcagtgagttacca

SEQ ID NO: 362921 - DNA, 515 bp, Homo sapiens
acagtttgcatataggagggaagaagaaaaaatcctgcttccccccccacgcacaaacttgattgctccttctcaaattcatgtccccaaatcccttcccccattcctcggacttccctcttctcacatgcccccacttcagccacaacacacacactatccgtttttgacccttcctttgcctttcaccgggtcagacggcattgtgacgtcacaaaacccctgggtgcctatatctgacctgcgcggaaagttcattctgagtgcgtcctggcgagtctcagcccccaagcgggtggaacgcaccaagggtctcatccgcgaggaagggctttaacgctcagggtcaggaacctctgagagctcttggggacttgcgcgcccttggatgctcttgcgttcaacagggctaggagactaccggctggggcgaggaatgcaggcgcctagagccttggagctcctgaaacgttcctgmcgcctccggaaagcaagggcagtttaccgaagtgact

SEQ ID NO: 362922 - DNA, 628 bp, Homo sapiens
ctcacttctgccctacctctctccaacctcctttcctgagctctatttcttccaatctggtctccccccaactcaggaaagtttgattgattaactcataaacctgtaacttataaaatgcgtaccttcccatcctaaaaaaaaggctgatacactctytgaccttgtgaccaccttcagccctctgacaaattttttgaacattagtcaacacccacagtttcatttatttcttgctcttccctctggagtacccagagtgtgtctgtgggaatctttctggatgaggggggctgagtaaagattgtgggtagggctcatccaatctgttgagggactgaggatgagtgagggagaacttactctctctacctgtcttggagctggggcactagtcttctcctaactttggactcagactcatactggaactgtagtctgggtccacagtttgtcaactgcagatcttgggactcagcctccataaccacacgagctaatttcttgaaatacatgtccatctacatctaatttcttactggttcttttttctggagaacccagactaatacagtcaccccgactctattttgctacacataaaagataaatcaggtcctactttatt

SEQ ID NO: 362923 - DNA, 628 bp, Homo sapiens
ctcacttctgccctacctctctccaacctcctttcctgagctctatttcttccaatctggtctccccccaactcaggaaagtttgattgattaactcataaacctgtaacttataaaatgcgtaccttcccatcctaaaaaaaaggctgatacactctctgaccttgtgaccaccttcagccctctgacaaattttttgaacattagtcaacacccacagtttcatttatttcttgctcttccctctggagtacccagagtgtgtctgtgggaatctttctggatgaggggggctgagtaaagattgtgggtagggctcatccaatctgttgagggactgaggatgagtgagggagaacttactctctctasctgtcttggagctggggcactagtcttctcctaactttggactcagactcatactggaactgtagtctgggtccacagtttgtcaactgcagatcttgggactcagcctccataaccacacgagctaatttcttgaaatacatgtccatctacatctaatttcttactggttcttttttctggagaacccagactaatacagtcaccccgactctattttgctacacataaaagataaatcaggtcctactttatt

SEQ ID NO: 362924 - DNA, 608 bp, Homo sapiens
acatttgttgaataaataactaaactaattaatattcatattttaagtagaaaagtgaaagatctgatgctattttataaaaataaatagatgaaagatagatgatagatagataactaaatgttgactaatactctctggttaatagaattatatgtgatggctattttcttcttttcatttatgtatatcacagatatatttctatggtaataaacrtaaatctgcatcaccatttaaaattctgcacaatatactattatatgagcttgcaaatattaatctatttatctatttatatatttattgagacaaggtctctagctctgccacccagcctggaattcagtagcaccatagtggcttgctgtagcctcaacatcctaggcttaagtgatcctcccacctcagcttcctgagtagctgggaccacaggtatgcaccagcaccttcagctaatttttgtagagacagggtctcgccatctttcccaggctagtctcaaactcccgcactcaagcaaccctcctgcctcagcctcctaaagtgctgagatctcaagcatgagctgctgtgacctgcctgcaaatatagtatttatttgaacc

SEQ ID NO: 362925 - DNA, 608 bp, Homo sapiens
acatttgttgaataaataactaaactaattaatattcatattttaagtagaaaagtgaaagatctgatgctattttataaaaataaatagatgaaagatagatgatagatagataactaaatgttgactaatactctctggttaatagaattatatgtgatggctattttcttcttttcatttatgtatatcacagatatatttctatggtaataaacgtaaatctgcatcaccatttaaaattctgcacaatatactattatatgagcttgcaaatattaatctatttatctatttatatatttattgagacaaggtctctagctctgccacccagcctggaattcagtagcaccatagtggcttgctgtagcctcaacatcctaggcttaagtgatcctcccacctcagcttcctgagtagctgggaccacaggtatgcaccagcaccttcagctaatttttgtagagacagggtctcgccatctttcccaggctrgtctcaaactcccgcactcaagcaaccctcctgcctcagcctcctaaagtgctgagatctcaagcatgagctgctgtgacctgcctgcaaatatagtatttatttgaacc

SEQ ID NO: 362926 - DNA, 598 bp, Homo sapiens
cccacgtcatctattgaccacyttacttgaaagtaattggaatgaattactcctttctcccttggctgtaggttttagatgagctatgaagggtagaacctagtatgtgcaaagtaatttggctcacagcatttgggctgtgatgtagaaggaatcggggtgagatgagagaaggggcacaaatggcctatgggatgcagcagggaatactgatcctgatttaacagtgataataacttttcacttggggcctacagtactgcttatcagagaagccaaagcttctccccctggagctggagaagacagccatccaaaattacactgtcacggagttccagcccctctattacgtggcagagagttttaatgatgccaaggagaaagtaaggtgaggtggtgacaaaggtgagccactagctctgggggcctcctgactggtgccactcatctgtgggtggttggccaggagagtggactccaatgtctacagcaactttgtaccatagacagtttctctcccatgttctccaccctccttttcttccgttctctgttggaaggttgggcatgctgacctttgcacacacccctgcca

SEQ ID NO: 362927 - DNA, 598 bp, Homo sapiens
cccacgtcatctattgaccaccttacttgaaagtaattggaatgaattactcctttctcccttggctgtaggttttagatgagctatgaagggtagaacctagtatgtgcaaagtaatttggctcacagcatttgggctgtgatgtagaaggaatcggggtgagatgagagaaggggcacaaatggcctatgggatgcagcagggaatactgatcctgatttaacagtgataataacttttcacttggggcctacagtactgcttatcagagaagccaaagcttctccccctggagctggagaagacagccatccaaaattacactgtcacggagttccagcccctstattacgtggcagagagttttaatgatgccaaggagaaagtaaggtgaggtggtgacaaaggtgagccactagctctgggggcctcctgactggtgccactcatctgtgggtggttggccaggagagtggactccaatgtctacagcaactttgtaccatagacagtttctctcccatgttctccaccctccttttcttccgttctctgttggaaggttgggcatgctgacctttgcacacacccctgcca

SEQ ID NO: 362928 - DNA, 509 bp, Homo sapiens
ggtgcctgatgcacattatgtgttcaatgcttactagtataatcagaaatgtagaaaaatatgcacaagtatgttcagggcaacatgattccagatagtgtggggagaaatgaaatcttcagctcagggaaaataattaattacagtttattcaaataatagctgcagccacaaaaaaaaattaagattataaaagtgtgatattttacaatttacacaattaagctatgaataattactgataaaagatacaaagccttgtattcctcattatgtaggtacgtcaagaagcatacaccccaaccctatgccaaaaaacaaacaaacaaaaaccaaaaaacaaaacctagaaagaggcagtgttttgtttagattgtggaatcaggagtgatattttgtttgtcacatttrttctttcccacttacatgtatgtaagggagtacagttgcaagggaaaatatagtttgcctaaaactatattggatttctagttgaacataaatgaaat

SEQ ID NO: 362929 - DNA, 505 bp, Homo sapiens
cctagtgacgcttgctgttgcacgagaagcaaacattaaacaaatactcatacatgtcaatataaagccacagtcttggtaagtgctaggacatcaagmacacagagctgggaatgcctatgataaggggctttaccttaatgttgccagcgtttagatctgaaggatgagtcaaggttaacaggaagagagggagggaagcatgttctgggcagagggaagaacatatacatagaggctgaaattcagagttaagggaaggggcaagtgtgcaggacgcctccagagaagtggtcaggaccatgtggggccttaggtttgagtcttcatcctaaaaacaatgggtctttagactatcaaaggccctatgatttggtgagtatttacctgagagaaacgaaaactcatatccacaaaggacttgaagacaaatattcatagcaggcttaaaatagctccaagctagaaccaacccaaatgtcaatcaacaggagagtggataaat

SEQ ID NO: 362930 - DNA, 505 bp, Homo sapiens
cctagtgacgcttgctgttgcacgagaagcaaacattaaacaaatactcatacatgtcaatataaagccacagtcttggtaagtgctaggacatcaagcacacagagctgggaatgcctatgataaggggctttaccttaatgttgccagcrtttagatctgaaggatgagtcaaggttaacaggaagagagggagggaagcatgttctgggcagagggaagaacatatacatagaggctgaaattcagagttaagggaaggggcaagtgtgcaggacgcctccagagaagtggtcaggaccatgtggggccttaggtttgagtcttcatcctaaaaacaatgggtctttagactatcaaaggccctatgatttggtgagtatttacctgagagaaacgaaaactcatatccacaaaggacttgaagacaaatattcatagcaggcttaaaatagctccaagctagaaccaacccaaatgtcaatcaacaggagagtggataaat

SEQ ID NO: 362931 - DNA, 505 bp, Homo sapiens
cctagtgacgcttgctgttgcacgagaagcaaacattaaacaaatactcatacatgtcaatataaagccacagtcttggtaagtgctaggacatcaagcacacagagctgggaatgcctatgataaggggctttaccttaatgttgccagcgtttagatctgaaggatgagtcaaggttaacaggaagagagggagggaagcatgttctgggcagagggaagaacatatacatagaggctgaaattcagagttaagggaaggggcaagtgtgcaggacgcctccagagaagtggtcaggaccatgtggggccttaggtttgrgtcttcatcctaaaaacaatgggtctttagactatcaaaggccctatgatttggtgagtatttacctgagagaaacgaaaactcatatccacaaaggacttgaagacaaatattcatagcaggcttaaaatagctccaagctagaaccaacccaaatgtcaatcaacaggagagtggataaat

SEQ ID NO: 362932 - DNA, 505 bp, Homo sapiens
cctagtgacgcttgctgttgcacgagaagcaaacattaaacaaatactcatacatgtcaatataaagccacagtcttggtaagtgctaggacatcaagcacacagagctgggaatgcctatgataaggggctttaccttaatgttgccagcgtttagatctgaaggatgagtcaaggttaacaggaagagagggagggaagcatgttctgggcagagggaagaacatatacatagaggctgaaattcagagttaagggaaggggcaagtgtgcaggacgcctccagagaagtggtcaggaccatgtggggccttaggtttgagtcttcatcctaaaaacaatgggtctttagactatcaaaggccctatgatttggtgagtatttacctgagagaaacgaaaactyatatccacaaaggacttgaagacaaatattcatagcaggcttaaaatagctccaagctagaaccaacccaaatgtcaatcaacaggagagtggataaat

SEQ ID NO: 362933 - DNA, 543 bp, Homo sapiens
cagtgaactcatacaactcacagccaggttgtcatctgggtcctttccatctttgtagttttctaggtgaagtagctgacaaagggcctggcctagagagcgctgctgggcctgctttactgggttgtccaaacttccctggagtgaggtccattcaagatgtgggctcaactaagagaaagttaccagactatttagtccactgccgaaccttggtccgagaccaagtcgtagctgttccccgaagctatgagagtaaacactgcctcctatttttagtagttaattgcttgcaaaaaatagctggaaatccagacctttaagtctcagcagcctttagcttcacagaccrtcctgtggcaacaacaatcttaacaacaacagtaaaaaaaccactaacacttacctggggtcactgtgtgcagggccttgtgctatatgcattgttttgtttaatcctcagactgagtggtcattgttattatccctatttttttaggtgggaaaaagaagactcaaaaaggttaggccctctgcctcaag

SEQ ID NO: 362934 - DNA, 543 bp, Homo sapiens
cagtgaactcatacaactcacagccaggttgtcatctgggtcctttccatctttgtagttttctaggtgaagtagctgacaaagggcctggcctagagagcgctgctgggcctgctttactgggttgtccaaacttccctggagtgaggtccattcaagatgtgggctcaactaagagaaagttaccagactatttagtccactgccgaaccttggtccgagaccaagtcgtagctgttccccgaagctatgagagtaaacactgcctcctatttttagtagttaattgcttgcaaaaaatagctggaaatccagacctttaagtctcagcagcctttagcttcacagaccgtcctgtggcaacaacaatcttaacaacaacagtaaaaaaaccactaacacttacctggggtcactgtgtgcagggccttgtgctatatgcattgttttgtttaatcctcagactgagtggtcattgttattatccctatttttttagrtgggaaaaagaagactcaaaaaggttaggccctctgcctcaag

SEQ ID NO: 362935 - DNA, 508 bp, Homo sapiens
tgattttgtttgctgaaatgtaccttataaattatgattttacgattgaagagtatatgtagatttatatttttttctctctcttttcagaattatgttgaatttctcaatcaggcagatttctaaatgtgagataattgctataaaattgtcagaaagttccaaagcagtctgaaacacagtagtgggttcaatcaatgattagtttcatttcttttcaaaggcatcactagattttccttatggctctggagttgttttcaaactaagacatctgaatcacctgaagtacttgatatggtaggaatatttctgtcccctcaaatttcatatgttgaaatcttaacttggtattaggtgttatacctcctataacaatggtattagggagtggtgttttgggaggtggggcttttgctcataggggtggarcccttctgaatgttttttttttctttataaaagagacctccgagagctcctttgccccttccactatgcgaagaca

SEQ ID NO: 362936 - DNA, 576 bp, Homo sapiens
gaggcggtccccttgatcaggtcctggaaggcagcgagcgggagagcagcgcctccttaagcggcgccggccgtccttagtcccctccccctggcgctccggctccttgtcacccgcacccacccggctcctcccttcctcctcccctctgctccaacgtctccggtagacccggcggcccgcccgggtcacctgcgccggctgctaagggggcgcccttacctgcgcgcccrgaaggggcttggtgactggcctcggttccctcagtccggagagtgtctctgccattccctgcagggctgacgccccagggctgggattcggaaggatctcggcacctctaccctacctgggattctcacctccaaccccgttggaggccccctggccttagtggaaactcatctccttgtctgcgcacccgcccccgaaatatgacctacttgaaatgtgacctactttttaaaagaaacccttaacaatcacgggaaaaccggatccaaaatttcgataagcatttttctttgaaatactattctattgcatcactgctcgaaagcttgaaaggtcaatggc

SEQ ID NO: 362937 - DNA, 576 bp, Homo sapiens
gcatcctcaaaacttccataaagtatggtttcaaagaggaactgaacaccttaaagaagctgtgaagacaattaggtgagatagtattccatcagacaatcatttaatacccatacattgtattaaggatactgtgttagaattattgtggaaaattacamaacagatgtttgggttttttgtttttgtttttgtttgacacggagtcttgctttgtcacctaggctggagcgcagttgcacaatctcagctaactgcagccaccacctcctgagttcaagcaattctcctgcctcagcctcccgagtacctgggattacaggcagttaccacaacacccggctaatttttgtatttttagtaaaggcagggtttcgccatgttggccaggctggtcttgaactcctgacctcaagcgatccacccacctcgggctcccaaagtgctaagattacaagcatgagccaccacgcccagacaacatccttaacaaagagaaaatactccagagaagatttaaccaaaaaaagtcacctaaaaatgtaaatataacattaatagatacctaataaacta

SEQ ID NO: 362938 - DNA, 576 bp, Homo sapiens
gcatcctcaaaacttccataaagtatggtttcaaagaggaactgaacaccttaaagaagctgtgaagacaattaggtgagatagtattccatcagacaatcatttaatacccatacattgtattaaggatactgtgttagaattattgtggaaaattacacaacagatgtttgggttttttgtttttgtttttgtttgacacggagtcttgctttgtcacctaggctggagcgcagttgcacaatctcagctaactgcagccaccacctcctgagttcaagcaattctcctgcctcagcctcccgagtacctgggattacaggcagttaccacmacacccggctaatttttgtatttttagtaaaggcagggtttcgccatgttggccaggctggtcttgaactcctgacctcaagcgatccacccacctcgggctcccaaagtgctaagattacaagcatgagccaccacgcccagacaacatccttaacaaagagaaaatactccagagaagatttaaccaaaaaaagtcacctaaaaatgtaaatataacattaatagatacctaataaacta

SEQ ID NO: 362939 - DNA, 614 bp, Homo sapiens
tttaactcttgtattaattaatagtgtctgcaaggttcccaatctggatgatagaataaggtcatcgtaaaattaaggtgcttgcttttggctagtgattgtagtgcacattaaaattcatgcatgataagatatgtgtaaatgctatttgacatttattgagcatattttagaacttgactttgttcagtttagggctatcagagtctcaaacattttcagtcttgagtagtaaatataattgaacagtgtatgctgaatgacacttttaatggayagttcttagcattctgaaggtctcatacttcattgagagtctgataaaagttttgaatccactgcccagaaaaacacctattcaaaatttttacaaataatttcaagaggttaatgacttcccaaaccccttctagaaccagaatctgtaaggaacttaaatcaacaagcaaaaataagtaattccattaaaaagtgggctagggaacatgaacagacacttctcaaaagaagacatacaagcagccaacaaacatatgaaaaaatgctcaacatcactaatcatcagagaaatgcaaatttaaaaaaatcacagtgtgataccagctgatactagt

SEQ ID NO: 362940 - DNA, 614 bp, Homo sapiens
tttaactcttgtattaattaatagtgtctgcaaggttcccaatctggatgatagaataaggtcatcgtaaaattaaggtgcttgcttttggctagtgattgtagtgcacattaaaattcatgcatgataagatatgtgtaaatgctatttgacatttattgagcatattttagaacttgactttgttcagtttagggctatcagagtctcaaacattttcagtcttgagtagtaaatataattgaacagtgtatgctgaatgacacttttaatggatagttcttagcattctgaaggtctcatacttcattgagagtctgataaaagttttgaatccactgcccagaaaaacacctattcaaaatttttacaaataatttcaagaggttaatgacttcccaaaccccttctagaaccagaatctgtaaggaacttaaatcaacaagcaaaaataagtaattccattaaaaagtgggctagggaacatgaacagacacttctcaaaagaagacatacaagcagccaacaaacatatgaaaaaatgctcaacatcactmatcatcagagaaatgcaaatttaaaaaaatcacagtgtgataccagctgatactagt

SEQ ID NO: 362941 - DNA, 551 bp, Homo sapiens
tatatgagggggtgaaatgtggaatgagtaaaggtccagtaattaagatgatataaatgttgaggctatgctcttaattatctatgtattttgtatttcccaggaaattggcagaaattgggattgagagaaagactaaatcaggtctcaagtcttcagtgaatgaggtagggatttaatagatgatagcagcaaaaagtagagagtagaataagtaaatggcatactccccagagcagcacgaagctttcacatgagagagagagtaatggcagtgaaataccaggaaaaggtaaccctcctctacttgcccagtggaatagacattaccgaccagggcagggtgargggtgagggagaattggcatctgtaaagggagaatcaaatttcagttaaggtttgaaaacagtgtgactttacatatatatatgtgtgtgtgtgtgtatatatatatatatatatactttaagctctgggatacttgtgcagaatgagcaggtttgttacatagttacacatgtaccatggtggttttctgcatccatcaacc

SEQ ID NO: 362942 - DNA, 549 bp, Homo sapiens
tttttcaataacaccaactgtctaacttgatacattttttatttatttatttttgagacagggtctcactctatcatcccagctggaatgcagtggcagaatcatgattaacttgcggcctcgaactgctgggctcaagcgatcctcccaccttagcctcccgagtagctgagaatacaggtgcatgccaccactcctggctaattttcttttttattttttgtagagatggcatctccctatgttgtccaggctggtcttaggcgatcctcccaccwcagcctcccaaagtgctgagattacaggcgtgagccaccatgcctggccaatacatgtttagtatgtttttatttttgcctatttccacccacttgaatgtaagctccaccaggataaatactttttagtttatcctaacaaatgggtaaaagggagctctttaacccatcccaccacgtgaggacacagggataagaccctatctatgaaccgggaaatgggccctcatcagacatcaaatctgccagcaccttgatcttggacttctca

SEQ ID NO: 362943 - DNA, 601 bp, Homo sapiens
tatgtcattttcaacagtaatgatgaaagttataaaaaatgctgggatatatacaaaatgtatactatatagagaactcatgtttcagatgtcactatccacattacaagaggactgtaacttgatctaccactctgggcacagtatctgattaaaaataaagttatctttaacaacatttggagcgactgtttgaattgaggcctcaggaaaagataacctcccctccttaccagcatcggggtgctatgtccaagacaagtccctaatcttccctttgttagtgcctggtttagaaatagtcatgaggccaattctggccaatgaaatatcaaaggaagtcatcttgaagagttccagaaaagtttttcccaagaaagagacacagggagagaaggtcccaacttttcttctgcctgacaaaatgtctttatgtcatagctgaaatggtgacatgtatgaatctgaggatgtargcaaaacagagagaggagcagagggaggggaatcggagacatggaaactttatattagggaagggcactaactgcagagaatttataatgtcttgattatgagtctatttttctatctgattctg

SEQ ID NO: 362944 - DNA, 597 bp, Homo sapiens
aatgatttcctcccctcttctgagcaagctgatgttacaggcaaaccagctggcagcttgagcagaaagctcattttggcccctttaaatacgtgggtgttttccaaatgttcaatctggctccccactacattaatgagccatttgccttgctgasataatcactaccctgtggtcatgaaggggaagaaaggaatgagagctggatgggctgaaacatgtacccagttgaggacctcccagagggcagcctgggctttagtgacagctccaagatgtggcactgcacacaccacccacttcctgtttggctgcattttaaccccgctcttggtccaagtgggtacaggcacactgtgataaggaactgctgaatgaaacatgcttaaatctacgaactccattttcaaaagcatcctagggaagtagtgaagggtgcccatgggctataacttttattcaaaatgttcataatgaacagagttgtttaacactttttcaaatctaacctgtgaatgtcgccaccatttgccttctttgagcatcacaccattgagttaatggtatgatgaaccttcttgtcccagagtttgatta

SEQ ID NO: 362945 - DNA, 619 bp, Homo sapiens
taaaactttctcctaccactaaagtatgtgtgaacttgggcatgttatttaacctttccaatgtcaacttttttactgctaagctgtaaataccaactattccgtaagtttgttctaagcataggttttcaaataaaatactatgtccagtcaaatttaaatttcataaaaacagaagaatttttagtataattatgccccatgtatatttgtcatttatctgaaattccagtttaactgagcatggtaggctcaataatagccccaaatatgtctatgtctaatccccagaacctgtaaatgttactttatatggccaaagggacttgcagaaatgattaagctaaggatcttgcagtggggayattattcaaaattgtctggtgggcccagtataatcacaagtgtccttatgagacggaagttgcgggaggagtcatagaagatgatgtgatgatagaagcagagattacaatgatactctttgaagatggggcaaggagccacaagccaaagaatacaggtggcccctagaagctggaaaaggcaaggagatgaattctcctctcagcacctcctaaagaaaccagcattgcaaatacctcagcttgagtccagt

SEQ ID NO: 362946 - DNA, 561 bp, Homo sapiens
ttgcataaaatgtttgtcaacatttcccatctgtattagcattgtcaccagaatgttgtgtataaacgattttgaaacacagtggcttcgcaaacaggcatttatatttatcctcaagagtctgcagattgaggtttggctgactgagaaaggaatcagccaggttatttatttatttatttatttatttatttttgagacagggtctcactctgtcacccaggctggaacgcagtagtgcaatcttggctcactgcagcctcgacttcctgggctcaggtgatccttctacctcagcctcccaagtagctgggactacaggtgcaggccaacacgcctggccaaattttgtattttttgtagagacagggtttcactgtgttgcccaggctggtctcgaactcctgggctcaagtgatctgcccaccttggcctccctaagtgctggcattaccagtgtgagccaccatgcccagcctgccatgatcttttcatggaagmttataggagaatgcaaacaagtaagatcacataacatgtaaatatttgactcctgtcagg

SEQ ID NO: 362947 - DNA, 559 bp, Homo sapiens
gactgtaccttatttgcacagagtcaaacagattttgaggtccctacatgtataatagatcatttctttgacttgcagatcagagtgaaaacaatttcaagagcaagtaaaaggagaaagtctggctcttcaaagcatggtcttattccctcacacataaggtggctcttatgttcctccagagaacttgtacagagcatggcatggcggtggggctcgtcagaaggaaaagtgtgggtggctgggtgtgaggctcctctccttgcccagaccctctaatcctctccgaggtcargcacaggaaggaaaaataataaagtagacatttattccttccaaaagacttgctaaaaggaaactctctgagaaaccccttggctatttttatgaatgaaatttttttaaaaaaggtttttagatgaattttccaaatatctattagtctgagagaaagagggggaaaaaaaagactcaatgctaataccctttgcatgagctctagtttgctcttgcctccagctgttgaatgagttagggtcatatttggaagaacagctca

SEQ ID NO: 362948 - DNA, 587 bp, Homo sapiens
tctacctgtgcctcagatttctctgtctaaaaatacagctttggatcccattgactataaaattcctagtacctcyaaaaatatttcattttcctcctggggattttttttttttattatacagcatacttttcccatctctaacccaacacacagattttaacatttttgaaattagattgtttcacaattagaacacaaattaaatttaatcattttttctcttttttcccttcttctcctcctcttcccctttctcttcctccccttctttctcctcctccttttttatcctgcaaagttgtcattaaattgataatgtatctcagaattaaagaaaaacacaaaactcaaacataaacaacacaaccactaccaccacaaacaataactaacctgtcccaaaggcttggttgatgtgtaaatagatttgcatactgaaattggagaaagagaattttcaagtgttattactacttaatttcttttgagttcaggccctcttccaaggaataaatcataatttatctgtagcagctatgatccctgggtttccctggccaagggtgacagcactgtatcagaaa

SEQ ID NO: 362949 - DNA, 599 bp, Homo sapiens
tagtagccggagggagaattagcagaatgggagtcaagcttgatattcaagcttgagtatcatgagacacagcagtgctccatctgctctgtgaatctgtatcttctggggtcatagcatgtgctaagtgctttatatatgttatcccatttaatatgaagaattaggtttatgaaataggctttattatttccagtttcacagatgaggacactgagattctggggagttgagtaagcctcctaagtcacctaattataattgataaatgtcaccttctaaatggccagtagggattactgacctgacaaccctgtatggaggagatgtatgggagaagatgaagagataggttggaggtccaatatctctatcaagaagagggctttcccygccaagtcctgccaatggactaggagacagcagatgaaggaacctttatggatagttgcctttaattttagaaagctcctacttgtttgggccaggaaccactacgtgaccttgaacagtgaaaacacgatactctccacttctggactcccagtgaatgtgtttgtggaggcacttactctttctcagagaaggagacatgaaca

SEQ ID NO: 362950 - DNA, 558 bp, Homo sapiens
attttagaaagctcctacttgtttgggccaggaaccactacgtgaccttgaacagtgaaaacacgatactctccacttctggactcccagtgaatgtgtttgtggaggcacttactctttctcagagaaggagacatgaacaagaacacttcgaattcagtcatgctataagatagaagaacgtgtataaatattggattgccattttttaaaagaatgagttctttttatttcataacacaaaaacttcttataktccatctaatatgtcattaaaatttaaatatttgatctgccatgttaaggggaattcccttttcctcgacctccctcttgactattcatagtctattcatagtctatgtttaggaaatcttgtcttctcgcgtgtcttaatagacatttagtttccaaaacaaagtctgatcttattagtctagccaatcagttttgtctgtctgcattaaggagtgatgaagatgcctgcagattttagtctgctaaaagatatcttctcttttcaatcacctgtgatgactagttttcctggaatagttc

SEQ ID NO: 362951 - DNA, 579 bp, Homo sapiens
atcacttattgtttagtttaatattttcaaaaataaggagtaacaagatctactaaattagatttgttagaagataaaggattaccaacagtggaatgttttcagttgattgcagcataaagaagcgaaatctaaggtcatcatgaaggaaaagcatgtaaatactgcccttggatttcatagtgacaatatttaaggggtcctggcctaattcaagtttgtttcccactaagtgctagactttcttatcatagctttcattccttagctgagaaatgattatgaaagcagatattttcttgggaactgagtgaatttcaaatatatggtgacttgatatcagtggattaggattgttgcagctgtgtgggatgaagggtagccaacacactccctggagtcytgtagaatgcacttgttatgaaccgaatgtttgtgtccctccgaagtttatatgtggaaaccctaaccttcagtgtgatggtatttggagttggagcctttaagaagtaactaggtttagatgaggtcatgagcatgaggcctccataatgggattattgtcctttaagaaaagaa

SEQ ID NO: 362952 - DNA, 602 bp, Homo sapiens
taactgaaaccatagagagtgaaattgcagataaggggggaactactgtattggttacaattaatgagccaatattgatacattattcttaatgaatgtccatactttgttcagattttcttagtctttatctaaggcttttttctgttccaggattccatagaagataccacactacatttagtagtcatgtcgctttaggctcctcttggctatgacagttactcagactttattttcatgacatttgcagctttagagagcactggtcgggtattttggagaatgtccctcaactgggatgtgtctratgtttttcttatgattatactgggattatggattttgagaggaaggctgcagagataaaatgtcattttcatcacatcatatcaaaattacatgctatagacatggcattcttgatgttaaccctgattacctggctaaggtggtatttgtcagttatttccattatacatttactcctttttctccctttccaaaccttgctttttggaaagcagtcactatgcaccacccacacttaaggaggaggaaattatgctccacttccttaaaggcagaataactacataaat

SEQ ID NO: 362953 - DNA, 589 bp, Homo sapiens
gtattatatagtcatattcactatgccactattatttttgtttaacaaagatttatatggtatttactatgggatagaccttagtcatttcatttctatagcaaccttattagacagataccattatcacataatctctgcttcaggtacaaaaattaaagcatagagaggttaagtaacctccttaagatcacaaagctagcatgggtagacctggttgaaaacctagggcatttgtcctcctaaccattgtattgtcccacttcccgggagtcatgattatttcttctcctactttactctcatggttttcttctattcattttttccctcctgaaaaaatgtttcttttgctacacactgaatttaactcttacctgctacaattctttactagccttctcaattattagtgatttcagaaattttaggagtgaagacagataggagcaccatgctgaaatcacccgacaaaagctgacagttactctgaagctactagcatgctgttcatgtaagtggatgcagctgactygccttttctgttttggaatcaaaggcgattaagtatcaaacttgaaatctagag

SEQ ID NO: 362954 - DNA, 638 bp, Homo sapiens
aagtattgggacaacacgcacaaagcacaagactgtaacaaatctaaggaagtcacttttaaaatgccagtcctttaaacatcaacgtttaacctgtaagagttttaatgctttcagttttaatcttaacctattactttattctttcagcmactgtatagttcaaacatttttactatttggtttcaaaaatggtcacaggaaaacattttaaatagcctccttacctcgacatcaatattttcatttctttgaaactcttgaatagagagattatctggaggtatgctaaaaaaaaaaaacacttgatttttaaagataaaatattccctgcaaatacaaacaaaatagaaaaacagtattcaaatgtcaaaaaattatgtcttccaacccaggttggggcattattatttatttaaaagagtaatgttgtaaattaaagtcattagtttaaatgactaagctaattacaaacatgatactctaactacaaaaacactaggtccaatcttgaactaaataaaatctgtagaactaaacttatttcaatattatgaatgaaaaaacaacgaaaggtaaagagctatcatctgcagcagagcaaaagttaccattgtggtgttacctgaattcactta

SEQ ID NO: 362955 - DNA, 527 bp, Homo sapiens
tcccaaaacttagtagctgtagtagctgacacaattttttttttttggtagtttcaatagaaatgcaagattctattattgaaattagtcacaggcmagaccagattccagggggaaagaagactccatctctcaatgcgggagtggcatgtgtatacagaagagaagaaattgatggcagccatcctaggagacaagctactacagataggcaggcagaggaatcaacccacggcataaagatgcaagagctagatgagaaccaagaggagatctgaaagcttgtataaaagaaaatcagaggagttgaaaactgaaatgaagagtcttggcctgatctaataaaccactgaggaatcactgtacattcttaggtagcaaattagctttcaatcactccacacacctgcgtgtactgtttgcttcctggcacttgggttaagtggtttacatgcaaatgtacacaagacaggcatgggccagccaccatggatcagaattcagtgggagatgcagatgagtaaata

SEQ ID NO: 362956 - DNA, 492 bp, Homo sapiens
tgttttagcacaaagaaatgataaatgcttgaggtgatgtgtagcccatttcccctgatgtgatgattatgcattatatgcctgtatcagaatatttcatttactctataaatgttacatacctactatatactcataaaaattaaaaaaaaatatttttaagtaaacaaaatagtggaaatgaaaataattacwatatagtaatatcagtcaccatggaaagtcaacaggataggagggatttttaaaaaggagaagaactttaagggccaatgtagttgccatagttgctattaaatcaggtggccaggtcatatggtggtccaaatgtttagaaagtttttgttcctgtcactaggccaactaaataccacttcctcacttgttccctaaatattagcagggctgtcttagaagggttcctcctcctcctttctttagaatgtttcttaactacattaagttaagactataggaagagaaaacagttcc

SEQ ID NO: 362957 - DNA, 628 bp, Homo sapiens
agcagaacaaaattttaagttaattattaaatcttctgcatgaatggaattgttctttgaaaaatgaaatcagtgaattatataacttatactctcttaggaaattttctctcctcagctacctattttaaactatttgcttgagtttgtatagcttgttttcttttctttcttttttctttttctttttcttttttttttttctgtgtgagatagggtcttgctccattgcccagattggagtacartggtgtgatcatggctcactgcagcctcaacctccctgggctcaagtgatcctcccactttagtcacccaagtagctgggaccgcaggaggcaccactatatccagctaatttttgttgttgttgttgttgagacagggtctccctgtgttgctcaggctggtcgtgaactcctggatgccagcaatcctcccatctcagcctcccaaagtgctaagattccaggcctgagccaccatgcctggctgtattttctttcttctgtttatgtttttaattaccagtgtccagctaaaattgaagtttctgttaatcaccaattacttacttctaaaatcattaaatgttccttttagaacttagtattctttcaaaaacttg

SEQ ID NO: 362958 - DNA, 686 bp, Homo sapiens
aaatggaaagatatccagtgttcatgattaaaagacttaaaattgttaaaatgtccatataatctaaaagagatctatgaattaaatgcagttcctatcaaaattccaacagcaatttttgcagaagtagaagaaaccatcttaaaattcatattgaatctcaagggaccccaaattgccaaactatcttgagaaaaaagaacgaagttggaagtctcacactccctgatttcaaaacatattacaaagctacagtaatcagaatagcataaagtggtactggcataaagacacacacaaaaacccatggaacagaatggagagcccaaaaataaactctcatatatatggtcaagtgatctttgaaaagggtgccaagaccagtcagtggagaaaggatagtctctttaaccattatgctgggaaaaccggatattcacatgcaaaagaatgaggttagacccttaccttatgccatgtacaaaaaataattcaaaatggattcatgacctaaacacaagatttaaaactaaaaaattcctaaaagaaaacataggggaaaatctttatgacattggatttcacagtgatttcctgactrtgatactaaaagcacaggcaacaaaagcaacaatagacaaatggaactgcatcaaacttaaaatcttctacacctcaaagaaaga

SEQ ID NO: 362959 - DNA, 540 bp, Homo sapiens
ggggtcaagtgatcctctcacctcagcttcccaagtagctaggactaaggcatattccaccatgcccagctaataaactttgcattattttaagtgtattttattagtagcacatggctaattaaaacaaaatcyatatagtcactaagatgataattttgtttattgcaaaaactggtagacctgtacctatattttgcagtcatatatacacacacatatgaaaacttattttgtgtttttaatttattatgtgcttctttccttctttcttgttttctgtcaggtggatagctttaatattcccctcccccaactggattggaagtgttatttctattatcagttatgttaaatttttagtatataagttaatcgtatttctgtcctcctgaaaataaaaggaccttagaatgccttctttcattttccatgttactgcctattattttaattcacctttttttgagcctgccttaatcattatcatttacaatctacacttacataaataaaccaacatactaacttctttgcttt

SEQ ID NO: 362960 - DNA, 540 bp, Homo sapiens
ggggtcaagtgatcctctcacctcagcttcccaagtagctaggactaaggcatattccaccatgcccagctaataaactttgcattattttaagtgtattttattagtagcacatggctaattaaaacaaaatccatatagtcactaagatgataattttgtttattgcaaaaactggtagacctgtacctatattttgcagtcatatatacacacacatatgaaaacttattttgtgtttttaatttattatgtgcttctttccttctttcttgttttctgtcaggtggatagctttaatattcccctcccccaactggwttggaagtgttatttctattatcagttatgttaaatttttagtatataagttaatcgtatttctgtcctcctgaaaataaaaggaccttagaatgccttctttcattttccatgttactgcctattattttaattcacctttttttgagcctgccttaatcattatcatttacaatctacacttacataaataaaccaacatactaacttctttgcttt

SEQ ID NO: 362961 - DNA, 569 bp, Homo sapiens
gatttgatatacctcctagttccccttgtctctcatgagatctctcttctggtgacccactaataacagtgagaagcgtcatatccctacttgtgttggggtggaaagaaagattaagagtagtttctgcaactaaaggaaccactcttcttattccatttgttccagtatagtagttttgtgaattagtttgtaaaagagtagctctacgtccagttcagccctgagggaatatgatttggtatacagaacacagatatttggaattctaagacacaggtcaatggtaatctacaacataaatacccagctgaccttctccttctgtcttaaatacagctgactgcttttcctcaccattggttcctctggtccaaaaaacagraattgattttagactggtccttaggaaacctgaatcaggaaataaaatgtcatgccaaaagatccatatggtgcattccagaccaaacaaaattatagagaattagtcactatttcatattcaatgtcagtactatccttcttaagcaaaactaatttaaggttaatctttttttttcgcaaac

SEQ ID NO: 362962 - DNA, 615 bp, Homo sapiens
ttccagacacagaaatggcttagaaaattaaaaaaaaaaatacattctgacttgatattattgttagctccctgactccccaggcccatcactgaagttcctctctgtaagtgcagtcttgagctggagttctggtttaccataacaatgtcttaataacagaatccaatctgttacatagtggggttcagaattcatcttgctgccataacttatttcttgtgtgttcaggatgatatccaggttcctgaggtctccaggacccagacttctctcctctttcttcacttctctggaacagccaggatagtggagtagaaactgtccagytggacttcttggttgactccctgacagtagcctgcttctttttttgattgacagctgtcttgccagttctttatttggagcctggggcttgctcccacatcaccctgggtgaagaacttgtcttccagacctatgacactgtcctattctcagctacaaatacaagccaaagtgctgcttgacctagtgaatacctgtctaacatagatcaagacatacaccatccacctggcgtgcagatgttagcttctgtgacaaggttaatcccccaattattgtattgat

SEQ ID NO: 362963 - DNA, 598 bp, Homo sapiens
ctcagggccagctgaccaaggttccccatattcatgctccagcccttccccttcttactggactggagatctggcttggatgcctcctttcctgcttggatttaactctatctgatccagagggttatgatctataggttccaaaatgtattcaactgtggtccaacataatcttcaaggagttgggtctccagcgaytttgcattgagtactacatgatgcatttagaggcaaggcagcttcttcctatatacattcctgtaagttcccaagtgagttattgctttaagaggagaaaataaattacaaaatgtgtaacattcctgctgtacatgcctcttgtgcaggccactcatgtgatggctgttttcttttccatacccctcacatgattaggccaggaagacaggtaggtgtctatctttctttttagtattgcctccagaccattatctttcccctctttataaaaacatacaactttaaatttcatgtcataagagtatactacctatgacctctccctgttgcagtcaagaatgtaccatcccctaggtcacttcccctcatcccttgaatatttaacttcaagatcatc

SEQ ID NO: 362964 - DNA, 612 bp, Homo sapiens
agtcaagaatgtaccatcccctaggtcacttcccctcatcccttgaatatttaacttcaagatcatcatctcatcttcagcactgcttctcctgtcttaactattgatgatttaaaaattttttaaaaattgttaaacwttttttgagacagggttttgctctgttgcgccaggctagtgtgcagtggcatgatcttggctcactgcagcctctgcctcccaggttcaagcgattctcatgtcttcacctcccaagtagcagggattacagcttgtgccaccatgcctggctaagttttgtattttttagtagagatggggtttcgccatggttggccagggtggtctccaactcctggcctcaagtgatccgcccgcctcggcctcctaaagtgctgggattacaggtgtgagacaccacacctggtcctcttggtgattttaatatatgcaaagatgattcttctatcactttgactggataggccctagactacctgccctccaatgatcttttgttcctctctctctcagtctgtcactgatggtcatcacagatcctggcattaccaataactacaacacctccataatctcaatttaaaacaccgc

SEQ ID NO: 362965 - DNA, 450 bp, Homo sapiens
ttcacggcacaaggggacccgctcatttagtgtggcatgttaaggttggcagcttttaaaatagtgagttggtttaaacggttatgttagtacaagaggtacggaaatgtggcataaatcgtggactgaaattggagaaccctgaactaacggctccatgcacacaaatgagggatagaaagaaataaggacggtttcttaggaacactttaatcatggagatacttgaagacagtacatttaggcttataatgtggtttttcttacgtcccttacgacatcaggagagtaaagatgagtatgatgtcagagacaggtcgtcttttacagtttcagcaccgtacgctgatatgcacagagtagttttccctgagccttatgtctggttaaacttrttaaaagaatttattattttaataaagcagtattgtagggtagatgccctgtatt

SEQ ID NO: 362966 - DNA, 629 bp, Homo sapiens
accccatttctcctccagaggaccccctctccttcatgctcagtaccactctgttcctgaagcagttgttcccttccccctgctctaccacgggaatgtagtctggactggccaatcagagcatcgcgtttaaactctgatgtgagcctcgtgctctggggacaaccaagtgggaggctagaatgaacccaacacaaaggaaggctgagccaaagactgggagaaccagcctctgaactttgactgtcctggcgcatggacttttcakttagatgagcccttaagttcccctgttgacttaaaccaatttgatttggattttcagtcatttcttaatgagaatatcctaatggatataagtgtatctgagggcttctgaggatctggaaagttcaccagggagaacagctgaggtgatgttatcctggggaagagaagactctaagactacaagctaactctcctcaaatatcatgctaatgaatgttactggaagataaattcaataggtagatgagttttctaataactaaagttgttcaacaaaggaaccgccttcttcagaaggagatgaactccccagccaaggatgaacaaccacctgacaaggacattggcactgagattca

SEQ ID NO: 362967 - DNA, 618 bp, Homo sapiens
ggtgctataaaactctgcaaaaccctggtttaaccaatgagaagttttggtgtagttttttgaatccgacttgatctatagccccctgctgtttagcaagagagttaacgtggaagtcagagataacactgcgaagagaaaaggcctaaacacttctctctcatataacatgaactgtttaaatggggattctgtagctgtggtggaatgccaagtgcaaaaccagtgttggaggagagacctggtgggaggtgtttggatgagtgcaaaaccactcagccaccatgataatgaaatattatggaagggaccagccagaagcttggcaggaatgaagaattctagatacacctgcatatatgtgtgattgtggaagtgaccaacactgtctcagatcccacagcctayagtcaatcagcaatttctacataaacaggcccctggtgttaagtgcctagagattgagagaggcatagaactgatgatgttttcattagttaatgagtttggttatcatcatgtaatctggccccttctacttctctgtcctgtcctctccccaagtccattgtacttcaatcacttggaccttcctttgattcctcaaacacgtgtagc

SEQ ID NO: 362968 - DNA, 470 bp, Homo sapiens
agggaagccagcacatcttcacatggctggcaaaagagacagagtgaagtgggaagtgctacacactttcaaacaatgagatctcgtgagaactcactcactgtaataagaacagcaagggggaaatccgccccatgatccaaacacctcctaccaggtccctcctccaacactggggattacaattcaacatgagatttgggtgggtacataaacctaaaccatatcacccagcaagtcttgaatggacttaactcttgagcttgaccattgtttttcttctcagtattgacaaatggttacttgtgggcttgccccatgcgtgtaaaaagtgacagaggacggtttttatgtgtgactgtacctcrctgacagtgggcttggaccactttccaagggactctggcccatggggaagttttttcagaaccttgggaagaagagcctgtaattatttatatgaaagaaga

SEQ ID NO: 362969 - DNA, 577 bp, Homo sapiens
tgctctttggaatgtcatctcacaggctttcctggagttaggagtaatctcagacaccctaaataagttacccaacacagatagggctggctttagcctcctgggggaagtctgggtgcaggggatgtggaaacaggtttcacatggggaaaaaagaaaatgatcttgaagacaagatgacagctctaaaacaggaaccacagggaatgtgcccattacatttacaaaaatatatgtgggacatatattttttggctagaatactcaactgttgggataatcagcatcccaactgttggracaaaccaaaatataattcttggtttgtttttaaagctgctggaagaataagaatatggtctaccctgcattcacccactcatttattcatcaagcaatatttttgagtacctgttatgttttagacaacattttggttctagggaatcaactctgaataggacagtcagggttcccctaatcatggggcttatattctgagggtgaagatagacattgacaagatatttgcacaaataagtagcaacagatatgaattcagtgtaggaaattcagc

SEQ ID NO: 362970 - DNA, 580 bp, Homo sapiens
  misc_feature (1)...(580): n = A,T,C or G
aagcactccacatattataaacacaaaaccttacattcattttctcaattagcaccagttacggaccaggaaaactcatctctggagcttttgctctgtgtcctcaaaacaaaaccaactgtctgaatgctgtgawgttgtaacattggagaggaacagcgtgcgtagttggagttggaagtgcttagatcaagaaaagacaaattaacttgcccagtccttcctgtcagcatgaatgcaataggtggcctggcatgacattaacagaatatactttcccagtcatgctgagcactcgtttcctaacttctcttcatgttccagtgtgtgcctccagaggctttcattatatagtgctgtgttcataatagttgtatatggagtgaggaagattttcaaattaaataattcgcattgctcctgaagttggttgtgggctgaatttatgatgttaaagtatgtgggcctctatttgcattcttgatgtaggccccacaaatgttagggaaaggcctggacagtggcactctggtaaccaagcagaagtcaacaaaaagttcgacgtanattgggccacagt

SEQ ID NO: 362971 - DNA, 580 bp, Homo sapiens
  misc_feature (1)...(580): n = A,T,C or G
aagcactccacatattataaacacaaaaccttacattcattttctcaattagcaccagttacggaccaggaaaactcatctctggagcttttgctctgtgtcctcaaaacaaaaccaactgtctgaatgctgtgatgktgtaacattggagaggaacagcgtgcgtagttggagttggaagtgcttagatcaagaaaagacaaattaacttgcccagtccttcctgtcagcatgaatgcaataggtggcctggcatgacattaacagaatatactttcccagtcatgctgagcactcgtttcctaacttctcttcatgttccagtgtgtgcctccagaggctttcattatatagtgctgtgttcataatagttgtatatggagtgaggaagattttcaaattaaataattcgcattgctcctgaagttggttgtgggctgaatttatgatgttaaagtatgtgggcctctatttgcattcttgatgtaggccccacaaatgttagggaaaggcctggacagtggcactctggtaaccaagcagaagtcaacaaaaagttcgacgtanattgggccacagt

SEQ ID NO: 362972 - DNA, 580 bp, Homo sapiens
  misc_feature (1)...(580): n = A,T,C or G
aagcactccacatattataaacacaaaaccttacattcattttctcaattagcaccagttacggaccaggaaaactcatctctggagcttttgctctgtgtcctcaaaacaaaaccaactgtctgaatgctgtgatgttgtaacattggagaggaacagcgtgcgtmgttggagttggaagtgcttagatcaagaaaagacaaattaacttgcccagtccttcctgtcagcatgaatgcaataggtggcctggcatgacattaacagaatatactttcccagtcatgctgagcactcgtttcctaacttctcttcatgttccagtgtgtgcctccagaggctttcattatatagtgctgtgttcataatagttgtatatggagtgaggaagattttcaaattaaataattcgcattgctcctgaagttggttgtgggctgaatttatgatgttaaagtatgtgggcctctatttgcattcttgatgtaggccccacaaatgttagggaaaggcctggacagtggcactctggtaaccaagcagaagtcaacaaaaagttcgacgtanattgggccacagt

SEQ ID NO: 362973 - DNA, 580 bp, Homo sapiens
  misc_feature (1)...(580): n = A,T,C or G
aagcactccacatattataaacacaaaaccttacattcattttctcaattagcaccagttacggaccaggaaaactcatctctggagcttttgctctgtgtcctcaaaacaaaaccaactgtctgaatgctgtgatgttgtaacattggagaggaacagcgtgcgtagttggagttggaagtgcttagatcaagaaaagacaaattaacttgcccagtccttcctgtcagcatgaatgcaataggtggcctggcatgacattaacagaatatactttcccagtcatgctgagcactcgtttcctaacttctcttcatgttccagtgtgtgcctccagaggctttcattatatagtgctgtgttcataatagttgtatatggmgtgaggaagattttcaaattaaataattcgcattgctcctgaagttggttgtgggctgaatttatgatgttaaagtatgtgggcctctatttgcattcttgatgtaggccccacaaatgttagggaaaggcctggacagtggcactctggtaaccaagcagaagtcaacaaaaagttcgacgtanattgggccacagt

SEQ ID NO: 362974 - DNA, 560 bp, Homo sapiens
tttcgcctttaacttgctaatgtaataaattatgttgaatggagttcctgacatttttgcttagaaaaaaatctgtttggtcaaaatacttttttaaatattttgctggtatttatttgytactttctttgctagtgacaaatatttgtggactgcttactatattgtaggcattgtttatatccacaacagtgaaaaaaatataaaatttctgacctcatgaagcttaccttttagcaagctgctgttaaaaaaattcagtgactttcaacaacaaaccatttagttcttactcacaggtctgtgggtcacctgtcagttgtctgggcttagatttaattttctagtgtactttttagactttttgttgaatatcatacttacagaaaaagcacaaatcataagtgaggaaacaattatgtaaccactactcaggtcaagatagagaacatttctattatttgataacatatttatttagagtttttgcaattacattaaaaagtaaagtttggtcttctggttagacaggctactaaataggattattgtacagttac

SEQ ID NO: 362975 - DNA, 606 bp, Homo sapiens
tttgcagaggagtgaactgaggcctgggaaagcagtaaagcaaaatagctaagagctacagaatcaaagcaatcctacctaaaagcccagcaggattttttttttaaataaattgacaagttgatcctaaaatccatatggaaataggaaggacctagaatacccaaaaamaaccctgaagaagaggttagaagtcagaggactaacatctgatttcaaaaattattataaggctaccataatcaaaacagcatggcattggtgcaaagataaacaaataaatcagtggaacagatatattcaatatatagcgattttctttcttttggatatatacccaatagtggaattgctgggtcacatggtagctctattttcagtttttttagaaacctccctactgctcttcataatggctatactaatttacattcccaccaatagtgtattacattcccaccaatagtgtatgagggttccccctttctctacatcctggccagcatctcttattccttgtctttttgataaaagccattctaaatggggtgagatggtatcttattatggttttgatttacatttctctgataattagttatgttg

SEQ ID NO: 362976 - DNA, 521 bp, Homo sapiens
ttcccaatcgccttgcaatgcagaaattaacatctccactttgcagaggagtgaactgaggcctgggaaagcagtaaagcaaaatagctaagagctacagaatcaaagcaatcctacctaaaagcccagcaggattttttttttaaataaattgacaagttgatcctaaaatccatatggaaataggaaggacctagaatacccaaaaacaaccctgaagaagaggttagaagtcagaggactaacatctgatttcaaaaattattataaggctaccataatcaaaacagcatggcattggtgcaaagataaacaaataaatcagtggaacagatatattcaatatatagcgattttctttcttttggatatatacccaatagtggaattgctggrtcacatggtagctctattttcagtttttttagaaacctccctactgctcttcataatggctatactaatttacattcccaccaatagtgtattacattcccaccaatagtgtatgagggttcccc

SEQ ID NO: 362977 - DNA, 509 bp, Homo sapiens
gcatagaagcttccaaatgcatcccctcaatttctgtatgtgtgtcctcttgcagtgctggtccacactgtgtgccaaggtgacaagagctttgggggaaaaaagggaaggacaagagggatgaggagtttgaagcarggtggtggggctgcgggagagttgcagttttaaagaggcgttattaagaaggtgacatttgagcaaagatttgaaggaggtaagggagtgagccatgtgtgtaactgagaaatgcgcattccagatagaagctttaataaaaggaaagagaatttataaacttggacttcaactggttgaagccccgctgaggggcgaagggcaggggcaggaagcaagggagcattgtaggagggacacctgtgaaggaaaggccccccaaatcatcccaggcccaccagcatcctgagtggggccacagttacattctacctggtctcctctcctttcagaaccttctttctttacaagccagctctcaacacctgata

SEQ ID NO: 362978 - DNA, 580 bp, Homo sapiens
cccaccagcatcctgagtggggccacagttacattctacctggtctcctctcctttcagaaccttctttctttacaagccagctctcaacacctgatatgagggtcactcacaacacaggccattcttttaataaaatgacattgttttctgtgctcagtgcatctacctccagctttgaacacaagaggtgctttaacccaggacgtggtctgagccctgcttctgcatctataggcacagggccatgactgtgaggaagtttctatccatctgactggcttctgcatctgagcccrggttatatggcacaggagacatgtggcaagatgaagattccttcctccattgtatgcacttccacgcctgctcatgcacaccacatgcatacatacactttcacaccaaacacacaggcatgaaatacactcatgggcttgtccacatgcacacctgccacaaacacccatcataagcctccaggtaaacaatatgggcatgcgcacttatacacacacttgcacacacatacacatttttggaggcttgaatgcacacccacgcccaacacacaccccctc

SEQ ID NO: 362979 - DNA, 580 bp, Homo sapiens
cccaccagcatcctgagtggggccacagttacattctacctggtctcctctcctttcagaaccttctttctttacaagccagctctcaacacctgatatgagggtcactcacaacacaggccattcttttaataaaatgacattgttttctgtgctcagtgcatctacctccagctttgaacacaagaggtgctttaacccaggacgtggtctgagccctgcttctgcatctataggcacagggccatgactgtgaggaagtttctatccatctgactggcttctgcatctgagcccgggttatatggcacaggagacatgtggcaagatgaagattccttcctccattgtatgcacttccacgcctgctcatgcacaccacatgcatacatacactttcacaccraacacacaggcatgaaatacactcatgggcttgtccacatgcacacctgccacaaacacccatcataagcctccaggtaaacaatatgggcatgcgcacttatacacacacttgcacacacatacacatttttggaggcttgaatgcacacccacgcccaacacacaccccctc

SEQ ID NO: 362980 - DNA, 604 bp, Homo sapiens
tcagactttctcaacatcttcatgttgaagctaaaacttgcattttaaactatcaaaagcaagagggayctaaggagacatggcaactaaaggtactgtggtatcccggatgggatcctgggacagaaaataaacatgaactttagttaatgacaattttaattgtgatacatgtactttactaatgcaaaagtgttaataatagaggaaactgggtgcagggtatacaggaactatttatactatcttaatgattcttcaaatctaaaactgtcctaaaataaaagacttattttttaaactttgcatttttgccagcagcaggaagcagtagataaccaacattccaaggtgcagcctgtgtataaggcctgaagaggccagggcccctggaaagtttctcaaaataagaggccattctggactttgtaccactgagttcccatcacctacataacttgaaatagagacattaattgcagggctgtgatcacagccaacaccaccttcctaaatggggcaaaagggcgctgaagtcgggcagagcagctgcaaactggcatgaattcccaaggctgtgacagagaattcttgctgggtgtgc

SEQ ID NO: 362981 - DNA, 654 bp, Homo sapiens
ggatgcactgagaaaggcatgtcacttctgtggtatccatcccaataaggcataacctcaatctaatcatgagaaaacatcagacaaacccaaactgaggggcattctacaaaacaactgcccagtactcagaaaagccttaaggtcatgaaagacaaggaaagactgaggaactgtcacagattggaggagattaaggaaacacgacaatcaaattcaaagtgagacacaggatcagatcccagaacaggaaaaaaaaagtagaaaagaaagtctgtgctgaatggcattatgccaatattaatttcttagttttcataattgtcatactgtatagttatgtgagatattaatctccggggaagccttgtgaagggtatgtggaagctctctgcatcatttctgcaactcttctgtaagtctgaaatcatctcaaaattgaaaaaagtcaaaaaggtatgtgtgtaattatttgctagatgcctgtgtcccctcctgggagcctataaacttcatgaggatgtggacagggactgtgaatgcactatctttattcatgattgmatcctggtattatggaaagtgctttacacatagtgggtattcaattaatatgcgctgaataaacagattcatagttattgacacagaaaa

SEQ ID NO: 362982 - DNA, 494 bp, Homo sapiens
aacattttttatggcattttaagaaacatctattaggcccacatgtgaagctactcacaactccttgtaacatacatttcagaaatgttgctgtcccttgatctgcctttcttatcttcatcaggtgggtcccccatccctagccctgcttatggcctcctcaggagggccagcgaggacgatggctgaggtgggagggcagggagccaggaggatcactataaatagagtccaccttctccattcttctcactgagccacttctgagctttccaaaacaactgcagcagcagcagctgccgyttcagcagccacagaagtgttggtgtcaccaggacacagcctcaggtaagagaaggggcatggctgcagaggggcaaagtctgaggggctgtgttggtgctgagcttcagggcagccttatgagaaatacctacagaggtctcataataaaagagaaaatgtaacaatttcttggaaatttttttttaaaa

SEQ ID NO: 362983 - DNA, 494 bp, Homo sapiens
aacattttttatggcattttaagaaacatctattaggcccacatgtgaagctactcacaactccttgtaacatacatttcagaaatgttgctgtcccttgatctgcctttcttatcttcatcaggtgggtcccccatccctagccctgcttatggcctcctcaggagggccagcgaggacgatggctgaggtgggagggcagggagccaggaggatcactataaatagagtccaccttctccattcttctcactgagccacttctgagctttccaaaacaactgcagcagcagcagctgccgcttcagcagccacagaagtgttggtgtcaccaggacacagcctcaggtaagagaaggggcatggctgcagaggggcaaagtctgaggggctgtgttggtgctgagcttcagggcagccttatgagaaatacytacagaggtctcataataaaagagaaaatgtaacaatttcttggaaatttttttttaaaa

SEQ ID NO: 362984 - DNA, 561 bp, Homo sapiens
tccttattattccaagagaaacaaatttatttaaggggaaacggctccaacctggaaaatgagtttttttcagaaaaaggtgaagtccacataaatagcttcattattaatcatcataagcagacctcacaggcatcaatctgccacagtctggtcctcagcacccccaaaagagatctatattacaagcctttaaaaaatgtccttgagaagtttaagaaaagcctttgcaattaatttggaagtctttctggaattttgtgtaaattcagtcaattttttgtttggttgttcccagaatttttggttgagatgatcccaagataaacagaatcacttatagaaagctgtttgtcagatggatgccctgaaacaattgcattaaattggtttagctctatttaaatacaaagtagattattttctattgctttatgwgcatacatttgcttaatctttttataaactacatatttattaggcatgggaacattagtattcagcttctggagagaaaccactcaaaattgttctgtgtccattgcctaaaaggatattact

SEQ ID NO: 362985 - DNA, 600 bp, Homo sapiens
tcattttatatccaaacttacgttttgatttttttttaaacatgtggatgtattattattatcataggccrggcaccacggctcacacctgtaatcccagctctttgcattgaggccaaggcaagaggatcacttgagcctaggagttcaagaccagcctggacaacatagggagacctcatttctataaaaaaaattaaaaaattagccaggtatagtggtacacacatgtagtctcagctactcaagaggctgaggtgggaggatccctctagcccaggaggttgaggctgcagtgagctgtgattgtgccactgtacttccatctgggtgacagagaccctgtctcgcaaaaaggaaaaattatcataaaaacagtttaatttgcaagtgacatgaatatatgattgcaaattgtgtatatacatagatcctatgtaccacatcttttctcctttcacagactctcaaattataaaatacagtaaactcagttgcccttcaaccattttggactttgggacttttttcaaatgaataatatatgtaaatctcatgacattataatgagaggcagagcatactaaattgtaagtttct

SEQ ID NO: 362986 - DNA, 600 bp, Homo sapiens
tcattttatatccaaacttacgttttgatttttttttaaacatgtggatgtattattattatcataggccaggcaccacggctcacacctgtaatcccagctctttscattgaggccaaggcaagaggatcacttgagcctaggagttcaagaccagcctggacaacatagggagacctcatttctataaaaaaaattaaaaaattagccaggtatagtggtacacacatgtagtctcagctactcaagaggctgaggtgggaggatccctctagcccaggaggttgaggctgcagtgagctgtgattgtgccactgtacttccatctgggtgacagagaccctgtctcgcaaaaaggaaaaattatcataaaaacagtttaatttgcaagtgacatgaatatatgattgcaaattgtgtatatacatagatcctatgtaccacatcttttctcctttcacagactctcaaattataaaatacagtaaactcagttgcccttcaaccattttggactttgggacttttttcaaatgaataatatatgtaaatctcatgacattataatgagaggcagagcatactaaattgtaagtttct

SEQ ID NO: 362987 - DNA, 600 bp, Homo sapiens
tcattttatatccaaacttacgttttgatttttttttaaacatgtggatgtattattattatcataggccaggcaccacggctcacacctgtaatcccagctctttgcrttgaggccaaggcaagaggatcacttgagcctaggagttcaagaccagcctggacaacatagggagacctcatttctataaaaaaaattaaaaaattagccaggtatagtggtacacacatgtagtctcagctactcaagaggctgaggtgggaggatccctctagcccaggaggttgaggctgcagtgagctgtgattgtgccactgtacttccatctgggtgacagagaccctgtctcgcaaaaaggaaaaattatcataaaaacagtttaatttgcaagtgacatgaatatatgattgcaaattgtgtatatacatagatcctatgtaccacatcttttctcctttcacagactctcaaattataaaatacagtaaactcagttgcccttcaaccattttggactttgggacttttttcaaatgaataatatatgtaaatctcatgacattataatgagaggcagagcatactaaattgtaagtttct

SEQ ID NO: 362988 - DNA, 600 bp, Homo sapiens
tcattttatatccaaacttacgttttgatttttttttaaacatgtggatgtattattattatcataggccaggcaccacggctcacacctgtaatcccagctctttgcattgaggccaaggcaagaggatcacttgagcctaggagttcaagaccagcctggacaacatagggagacctcatttctataaaaaaaattaaaaaattagccaggtatagtggtacacacatgtagtctcagctactcaagaggctgaggtgggaggatccctctagcccaggaggttgaggctgcagtgagctgtgattgtgccactgtacttccatctgggtgacagagaccctgtctcgmaaaaaggaaaaattatcataaaaacagtttaatttgcaagtgacatgaatatatgattgcaaattgtgtatatacatagatcctatgtaccacatcttttctcctttcacagactctcaaattataaaatacagtaaactcagttgcccttcaaccattttggactttgggacttttttcaaatgaataatatatgtaaatctcatgacattataatgagaggcagagcatactaaattgtaagtttct

SEQ ID NO: 362989 - DNA, 579 bp, Homo sapiens
ccttggtataatgtgatgaaaatggcactttactccatggtcttcctttcaaaacatgtaatcccagtcctatcatgagaaaacattaggtaaattccaactgaggagcattttataaactacttgacagtactcctcaaaactgccatcagaactgaggaagtctgataaactgttacaaccaagaggaagctaaagagacacagcagggaaatgcaatgtggcgtcttggatgggatcattgaacagaaaaagaatattagataaaaaactaaggaaatygaaataaagtatggactttagttaatactaatgtatcaatatcggttcattatttgtaacaaacatgccatagtaatgtgagatgttaataataggggaacttaggtgcagagtatataggaattttctgagctctctctacagtttttctataaatctaaaactgttatgaaataaaatggtaattttaaagaaaattttatttacacagtacacatgttagtggttttgaagtcatagacaccggcttataatttaatttctgtttataaaccttgtaacccttaataacgcttg

SEQ ID NO: 362990 - DNA, 587 bp, Homo sapiens
tttattttccactttctgcatccaccaatctaatacagcaaatatggacccagaacaagataactaaaataaaaactcttatttggacaggggaagactggaagacctatggcagcaactggtccatagccatgagaaatccaactgggtagacattatgaagtctctctgcccttggatagagcagatttcttcattagagcatggtcctgctttgtaggaggaaacttccttttccctgttctctatgttcctcrcctgtgctctctgtgatgttctttgtttgtccattatacttcctggcagtatctgagattggcatcaaggaacatgacttccttggagcttgcacagctttcacacctgcttcttactggtagatatttgaaatcctggggaaatttttacagccacaggtgttcaagacagagtttactgtttctgtgaatttttgggaaacacgattcccttgatttccattcagttcagtgtgacagtaaccatatccaaagttctttcccagaaatgatgcttaaagactgctctgtttctttccttgtatttgcttgtccctacacttttctctc

SEQ ID NO: 362991 - DNA, 537 bp, Homo sapiens
agggtctacaatgtgctaggtactgttataaagtggatcaaaacaaaactagtccttgccttattagaacttatataatggagggaaaagaagtaaatactgataaagatgaaatttcagattgkgaaagatctttgaaaaaaaagtaggatgctatgagagagaaccaggggctggcagtgaaccagttttaggttatctggttaggaaagtctctctgaggtagtgacatttgagcagggacttgagctggcaatttcaagagaagaaaatgagaaggccatgccaggcccaggaaacaacacttacagagaccctagtgaaaggatgtggcaagtattaatatgaggaacctagaggaggctgatatgagtgtagctttggaaataaagaggagagtggtcatgggttagaataagttttgagaagctagatcagcacagggcttcttacaccttagtcatgttaagggcattggatttttattgtaaggacaggggacgcctttgagttttagttgaggaatgacaggagcct

SEQ ID NO: 362992 - DNA, 529 bp, Homo sapiens
agttattgcttaatggttacacagtttctgcactgggtgacaaaaaattttggaaatggtggtgatggttgcccaacattgtggatatagtaacaccactgaaagaacatttggaatattggttgcttctctctttttccttgaaaaaaaaaaaaaaaggttaaaatggcaagtttatgttatgtatattttaccacaaattttttttaaaaagatggcaaattaacaatttacctgaagaaagaatgagaaaatagaggaaagcacaataaagtaccagcaagatgatagaaacaatatcaggtaacaatgtctgtaagtcagctgaactcaccagctaaaatatagagatcattagatataaaaatgcaaaatccacttgcatgtttgtaagggacatacctgaaacataaggaagaaggaaggttaaaagtaaaagaataaaaaaaagacacaccaggaaaatgccaaaaaaagttaagatttttgtagcaatrttagctaaactttaagataaaaagtactctta

SEQ ID NO: 362993 - DNA, 610 bp, Homo sapiens
ttaggatatttactgtgtctacattttgataaactccattcacaatcatatattttactagtttgggccagctccaatgttatctttaagcttcaagaatagaatttgaattgcactattcgacataagaaataagtgtataggaacatcagtatctagatccttttgtggttcataagcatgatgattgggtttccacattcttgtgagatgggcctccctccaaccttgttatgatgtcagcacattacccttgacgtgtgaaaagaaaaaagaatgtaagtatctactctgagtataaataaagtatatattgttatacatcactggcataatataggatataagaatagagtctataamtttactcaggaacaaaattttatatattatatataaaaggtatacaaattatcctatgaattatttggtttaaaaatttctaaatgtaaaagtgaatgatttaataatatcaaatacagataagagataataatttaaaagttcttagagagcaggttcaaaactaaagttatataattataaaaagaagctagagaatgagttcatagtctttagttctttgattggatttaaaacatataagtca

SEQ ID NO: 362994 - DNA, 617 bp, Homo sapiens
ttatactgttaatcaaatcttataaaatgtatttctcttatttttgctctttcagaacctcccatgaattatcatctaagttgagacatagttttaggaagccattgttgctgaggcttgaagaattaatgctctttgaggcagaatgggggcatctatttgcctgctccaactgtttaagataactcagcattcccatgcacacacatatagaactaaatttgctttgatgatatctcctttttcatcactgtcatgcttgcttctacttacattacttactgctttttcatgctagatttggtgttgctttggtttggcttttctgaacaggtttcagcttgatttgtccctttatctccatgcggcccttaagtgcaactccgttgtccacagctttgacttgtgrtctttaggagggacctctccctttgacccttcagtgattcatccatccttccttggtcatgggttggaagttggggagttggatattctccagcttttaaggactttggctatcatcaggatggccagctctcaacatttatttctattaacacacaggaaggatgactttcacataaacaacacattcccactggtgtagctgggtt

SEQ ID NO: 362995 - DNA, 569 bp, Homo sapiens
ctcagtttcctcatttgtaaagtggatatcttaatgtaatccagatcaatgataccyagattataggaaggcaaagttaattgtatgattaatgcagaattcctagcacagggtgttactcaaaatgaactttcaatgactaggaggcattacaatcaattcagaggagagacgtcaggaaattttacagcttataggtcttacctgacccagagatgtactaagttttgattgtactgtgttttttattcttttaaggtgaattggttaccaacattaacaaactggggggatattatataaaatacatattttagttttcttttgaaacacttgaagatgtggtaatactaactgatagtggtcaagaactctataaagttaatcctagtcactgctctatctattactttataccaaaggtgcgttattctttcactaccagtctgtttccacctcctggtctgaataattttggtggatctgtcctgttactttagggattaatacatttgatttaaattacatcaacttttgcaaatgatagtactctctcttcaaagagcaag

SEQ ID NO: 362996 - DNA, 569 bp, Homo sapiens
ctcagtttcctcatttgtaaagtggatatcttaatgtaatccagatcaatgatacccagattataggaaggcaaagttaattgtatgattaatgcagaattcctagcacagggtgttactcaaaatgaactttcaatgactaggaggcattacaatcaatycagaggagagacgtcaggaaattttacagcttataggtcttacctgacccagagatgtactaagttttgattgtactgtgttttttattcttttaaggtgaattggttaccaacattaacaaactggggggatattatataaaatacatattttagttttcttttgaaacacttgaagatgtggtaatactaactgatagtggtcaagaactctataaagttaatcctagtcactgctctatctattactttataccaaaggtgcgttattctttcactaccagtctgtttccacctcctggtctgaataattttggtggatctgtcctgttactttagggattaatacatttgatttaaattacatcaacttttgcaaatgatagtactctctcttcaaagagcaag

SEQ ID NO: 362997 - DNA, 587 bp, Homo sapiens
atcatgcccaaccctaactacgggttttttaaaaggccaacataaaaagaattccaacaaacacttgaacttaacttattaagatgtgttagaacagataaggctacatagatttcttctatgaatgattttgtctcaaactttcctataaggaactattttatgtatatttttatcctctgctgagtctagcaaggaactgaacrtaacctaggaggttcaataaatatttgttagttgatctttatctgcatgaaatttgtatatacaaagaacaaagattgcctctgaatattgtgttaaaatagtaatatgtgttttgtgttagctgagcattttgtgtcacccatcactttgacaaagactgttcacacaaaacagcaggtaagtgaatcatggcgagtgagaccatccacttgccacataaaatacatctattgctctctctgcaatatgcaatcttctttagctgtcaagtgattaaattgccaagcttaagttctaattgtttaaatttgttggtgctagaaactgataataaagtgcatttcagggacactactcatgagcagagcagtggtgtagca

SEQ ID NO: 362998 - DNA, 587 bp, Homo sapiens
atcatgcccaaccctaactacgggttttttaaaaggccaacataaaaagaattccaacaaacacttgaacttaacttattaagatgtgttagaacagataaggctacatagatttcttctatgaatgattttgtctcaaactttcctataaggaactattttatgtatatttttatcctctgctgagtctagcaaggaactgaacataacctaggaggttcaataaatatttgttagttgatctttatctgcatgaaatttgtatatacaaagaacaaagattgcctctgaatattgtgttaaaatagtaatatgtgttttgtgttagctgagcattttgtgtcacccatcactttgacaaagactgttcacacaaaacagcaggtaagtgaatcatggcgagtgagaccatccacttgccacataaaatacatctattgctctctctgcaatatgcaatcttctttagctgtcaagtrattaaattgccaagcttaagttctaattgtttaaatttgttggtgctagaaactgataataaagtgcatttcagggacactactcatgagcagagcagtggtgtagca

SEQ ID NO: 362999 - DNA, 516 bp, Homo sapiens
gcattgcccctctttcagctgccatarctggctcttctgtgattttctccccctctaagtatgttgtgtttaatagaacttacattttcaacctttttcctgatgtattctctctgacattatttcaactttgtcttttttccaaagaatttttattgccagtagccccagagtttacaccaaatcaatcaacccattaaaactctgcaaaattaacacctataattctactttgtttttattgaaataaaaatggggctggttttgtcctctatcttcaatcccttcttggggaatcagccctgcccgctcttgtcagattaaggtactggaaacaaagataggatgttagtgaagacatacttattttggaggcagtggggaagttatgattcacataccacacaattcaacgatttaaagagtataattcaataacttttaatatagtcacaaagttgtgcatctgtcagcacaactaatttcagaagatttctgtcacccccccccaaaaaa

SEQ ID NO: 363000 - DNA, 571 bp, Homo sapiens
gtgtctgctcctgctgcttggcctctccttgctccctgtgcctgctccaatcttggagcaagattggggttgagcctgggtgctgtgtccctgccttagagatmagtgaaatttggaacttgagagagatgatttagggtatctggtagaagaaatttctaagcagcaaagcattcaagaggaggcagagcatagaagtttgaaaaatgttcagcctgataatgcagtagaaaataaaaacccattttctggggagaaattcaagctggcagcagaaatttgcataaataacgaggagccaaatgctaatcaccaagacaatggggaaaatgtcttcagggcatgtcagagaacttcgtggcagcccctcccatcataggctcagaggcctaggagggaaaatggtttcctgggccaggtccagggccccgctgctgtacatagttcttttaactgattccctgcatcccagccactctagctgtggctaaaaagggccaaggtacagcttaggccatggcttcagacggtgcaagccccaagccttggcagcttccatgtggtgttagtc

SEQ ID NO: 363001 - DNA, 577 bp, Homo sapiens
attttaaatatgtaatatatgcacccaacacagaagcacccagatagataaagggaatactattagagttaaagagagaaataggtcccaatgcaataatagctggagactccaacactccactttcagcattggacagatcttccagacagaagartcaacagggaaacatcagaatgaatctgcactgtagaccaaatggatccaatagatatttacagaacatctcttccaatggctgcagaatacacattcttttcctcagcacatggatcattctcaaagatagaccccatgttagatcacaaaagaagtcttaaaacattgaaaaaaatgaaataatatcaaacatcttctctgaccacaatagaatgaaactggaaataagaataataattttggaaactacacaaatacatagaaattttaaaatatgctcctgagagaccagtgtgggtcaatgaagaaattaagaagaaaattgaaaaatttctaaaaacaaatgataatagaaacccagcataccaaaacctatgtgatacaacaaaagcagaactaagagggaaatttatcgcta

SEQ ID NO: 363002 - DNA, 612 bp, Homo sapiens
gtcaaaaataaattttctgaagacacaaaaatttactaaggggaaactggctaggtaatattttgagataataatttacactttttcattcctccctgtttttttttatttccccttcttccattcaaatagatagccaatttggtacttctttacctagggtgagatgtttgatgggataaaacacataaatttcctgcactttttccagctttagtttcccccaaccctgatatatttagaaaaattatagagttktgggaaagaagtaaaacagaatgtgacttatgggtgtaccaaatgactcagagaaaaagagactttcccctatgacaaagagattcactctgatgagataagaagttgatgtttggggttcccaggacaggagggaccagggcccactttctagagcaccttgggggcacaccatggggaggtgacaagactcaagagagtcacagctacattgtatgtttaggcagattcgacttcagatgacctcacaggagactcatgtgtcccaccatggcaggaaggtagtagaaatttgctagatataaagggcatgtagactggaacagcagacactaaagtggtaacctttagaag

SEQ ID NO: 363003 - DNA, 543 bp, Homo sapiens
ggcccagaaaaggcaccataagttcccactccggtctgcatgactggcagcccatggggcacaggaaatgcgggtcacatgggtcccccccaccaccactgctgctcctgcagccactcctgccactacttcttgcacttccccactgtagctggcacagtggcagtggctgctccagatagcccgctgctgccatcactaggtgcccatcaatggtggattgtgtaaagaaaatgtggtacatatacactgtggaatactacacagccataaaagagaatgaaatcatatcctttgcagcaacatggatagagctggaggccattatcctaagtgaattaacacaaaacagaaaatcaaatactgcatgttctcacttataagtgggagctaaacattggatacttatgaagtatgtcaacaatagygcctggggactaataggggactaatacagtggggagggagagagtgggacaatacttgaaaaagtaaatgttgggtctcacttcccgggtgacaggttcaatcataccccaaacc

SEQ ID NO: 363004 - DNA, 601 bp, Homo sapiens
ggccttggccaattttctcatttctatctactgctaaatccatacttttttgtttccttaactgattatccaatgataataaggtcaatcccaaattagccttaaaaataccatttaacctggccctttcctacraacactgtctttggatttaactggctaagcaggcatcggccttaaaggaatattcttatgtgactgtggattggacagattgctgtccagcagtgggaaaggaaaaaggaagagaacttagatttattctaccaaacatcctttaaggaagtttctaaaagtatagctggagaggaaaaagaaaaatggaagctcttcctgccccactataccgttgtaagaaagaaacttaaatgttttaagtaatctgagtcccataaactaagtgggagagacagagaacaggcatatttcaatcacactgaaattctgcctaaggttgctcaatctgtcactgaaaatcatgcttctgtgcacaaatttaaaggtggggaatgcattaaaatgctggaaccattagatagaatatatggtcatgaatcagctcacctctatcccagaaagatcagtatactgtactcatgta

SEQ ID NO: 363005 - DNA, 601 bp, Homo sapiens
ggccttggccaattttctcatttctatctactgctaaatccatacttttttgtttccttaactgattatccaatgataataaggtcaatcccaaattagccttaaaaataccatttaacctggccctttcctacaaacactgtctttggatttaactggctaagcaggcatcggccttaaaggaatattcttatgtgactgtggattggacagattgctgtccagcagtgggaaaggaaaaaggaagagaacttagatttattctaccaaacatcctttaaggaagtttctaaaagtatagctggagaggaaaaagaaaaatggaagctcttcctgccccactataccgttgtaagaaagaaacttaaatgttttaagtaatctgagtcccataaactaagtgggagagacagagaacaggcatatttcaatcacactgaaattctgcctaaggtkgctcaatctgtcactgaaaatcatgcttctgtgcacaaatttaaaggtggggaatgcattaaaatgctggaaccattagatagaatatatggtcatgaatcagctcacctctatcccagaaagatcagtatactgtactcatgta

SEQ ID NO: 363006 - DNA, 537 bp, Homo sapiens
ttacctctctaggaatggaaataaccttaatatttaccaatatgcactagtggaataaattatggtacaagcacacaatataatgcaatgcagcttttttctttttttcttttttttttttttttgagacggagtctcactgtgtcacccaggctggagcgcagtggcgcaatcttgactcattgcaaccactgcttcccaggttcaagcaattttcctgcctcagcctcccaagtagctgggattacaggcgtgcgccaccacacccagctaatttttttttttgtatttttactagaggaaggttttcatcatattggccaggctggtcttgaactcctgacctcaggtgatccacccacctcggcctcctaaagtgctgggattacaggcatgagccaccatgcccggccaatgcaatgccattttataaaagaatgaagggctcttccataagaataaggaatagtcttcaagaaaatctaatrtaagaaaagaaaaaaaatgaaatattgtgtataagaagccaccatatgt

SEQ ID NO: 363007 - DNA, 563 bp, Homo sapiens
tttaaacagtggagaaccctgctagggagaatttatgtcaggaatcacttcctttccagatgaactacataggcggtcatttgtaaattctgtgtttttgttcatgtcattgatatgatatcatgtcatgatatccatatggtacatggataatgataacaatagcaatactactatcactatcattgctatggctactgctattagctaagagtcatcttagctaatgcctggcatgatattaagcatgtctacgtttaattctcaaaacatttttataatctagctactaccattatgcctactttatataataattaaaaaaatcagaggatgggtacaagaaaagtgggaagaatgaattatacctactatttgatagcacaacagcrtgactatagtcaagaataacttaattgtacatttaaaaaaaataaaagagcataattgaactgtttgtaacacaaaggataaatgcttgaggggatgagtaccccattctccatgatatgattatttcactctgcatgcttgtatcaaaacatctcatgtaccccataaat

SEQ ID NO: 363008 - DNA, 605 bp, Homo sapiens
ttgttttaaggtgctaagtttctatgacttgctgttttcaaaatcagtgtagtgtgatcatctcttattgcaaataaatataattttatagcatcattctcaatgggtccccagggaggcagttggaaatatgtgttgtgtgtaggtgggggtgttttaggtagtgacaataactggcagacactctggaattgggtaggagccaggtaagagagctgtgataaacattaactatttctgctcacctctatttccaattttcttcttctttagaggatatgaggtgattacatttcccctatcatttaaaattaattatgamcatgtgacttgcttggccagtgacatgtgagaagtgaaagatgtaactttgaagtggaagtacttaactgccagtgcacatctctacagctctttcttctcttaccagaatggtcatggaagcacatgtctgcacggtgcctttgtcagcatgagccactgaacaatgacaagcagacactcctgttgagggtcttgcatgtagcatgaacaaggaaggaacttttgttgttctgggtcactgaaattaggggtgtttttgttattgcagtttaacctcactc

SEQ ID NO: 363009 - DNA, 512 bp, Homo sapiens
agcaacatgggtagttccaagggtgaagatgtgagttctttccagtggatcagggaaggctacttgaagagggaggatcctggctgggtgaaatgtgactgtcaatgcaragagctacaaaatgaaggttggcaaaacacaaggtctgttacccttttccacatccatatcagtttggctgttctttgttgtcatgttccttggtaatttcagccctggatgacagaaagctatgatcacctatcccccagaatttattgaagatccccttgactgggctttgaagctaagatctgttgagaacagaatggacaaaccatctacttttgagtcccagttctgctacctactagcctagttacttttggcaagtgatgacatcaccttttcaagtctcagtttcctcacctgtaaaatggtctactaaatgcaccttctgtgtagggctgttgcgaagcctcaagacatgatgggcacacatttagtacaattcctgttgaatatgaaatgct

SEQ ID NO: 363010 - DNA, 512 bp, Homo sapiens
agcaacatgggtagttccaagggtgaagatgtgagttctttccagtggatcagggaaggctacttgaagagggaggatcctggctgggtgaaatgtgactgtcaatgcagagagctacaaaatgaaggttggcaaaacacaaggtctgttacccttttccacatccatatcagtttggctgttctttgttgtcatgttccttggtaatttcagccctggatgacagaaagctatgatcacctatcccccagaatttattgaagatccccttgactgggctttgaagctaagatctgttgagaacagaatggacaaaccatctacttttgagtcccagttctgctacctactagcctagttacttttggcaagtgatgacatcaccttttcaagtctcagtttcctcacctgtaaaatggtctactaaatgcaccttctgtgtagggctgttgcgaagcctcaagacatgatgggcacrcatttagtacaattcctgttgaatatgaaatgct

SEQ ID NO: 363011 - DNA, 559 bp, Homo sapiens
accgttgtgcaattgtcatctctatcttgttccaaaacgctttcatcaccccaaaggaaaatcctgcacccatgaagcagccactcccattccctcctgctccctgcccttggcaaccaccagtctattttatatccttatggattggtccattctggaaatttcataaaaatgggatcatacaatatgtgacttttttgtaactggcttctttcgcttagcgtaaagtttccggattcatccaccttgtagcattatcagtacttccctcctttttatgaatgaataatatgtcattgtatttatagaccatrttttatcttttcttccagtgatgggcatgtgagttgttgtcacctatctgctattatgaataatgttgttatgaacatttatgtacaagcatttgtttgagtatctgttttcactcttttggggatacacatcagggttgcagggtcatatggtaattctacatttaactttttgaggaactagctaatctgtttatacacacatgtggtacactgctggtggactctcagaaaaacctggggtg

SEQ ID NO: 363012 - DNA, 501 bp, Homo sapiens
ctccaataaagtcacctgctcaaagtcacacttattcactatgtgaattaattgcttggagattacactattgagcaagctcaacatggctttttcycccaggaagctcactgtctcctggtggaaacagacaagccaccaggtgattacaatggagctctgcttggagctgtgttcagccagagcggtgtgccctgcggactgcttagaaacatgactggagacacagggaacctaaaaccactcctatgaggaagataaaacctctctggctctcttgtccttccatgtgtatcacacctcaacaccctggccaggaaggcaaaccttaaagctaattaatattaacatcacgcagcaggcgccaagtgcatgctaactgcttcaccccatcaattctcacagcaggttttttaggaaactgaggctcagagaggagaggtgacttgtccaagggccacagtgaatagggagaagagccgggatttgagtctgggtctg

SEQ ID NO: 363013 - DNA, 501 bp, Homo sapiens
ctccaataaagtcacctgctcaaagtcacacttattcactatgtgaattaattgcttggagattacactattgagcaagctcaacatggctttttcccccaggaagctcactgtctcctggtggaaacagacaagccaccaggtgattacaatggagctctgcttggagctgtgttcagccagagcggtgtgccctgcggactgcttagaaacatgactggagacacagggaacctaaaaccactcctatgaggaagataaaacctctctggctctcttgtccttccatgtgtatcacacctcaacaccctggccaggaaggcaaaycttaaagctaattaatattaacatcacgcagcaggcgccaagtgcatgctaactgcttcaccccatcaattctcacagcaggttttttaggaaactgaggctcagagaggagaggtgacttgtccaagggccacagtgaatagggagaagagccgggatttgagtctgggtctg

SEQ ID NO: 363014 - DNA, 616 bp, Homo sapiens
gacctctgatgcactctgcccatccccttgccttggctgtctttgattccagctgctgtttggtgtctggttctatgcagggtctgaccagatttcacrcaggggcaatacacagagttccacctcaggttcactctgtatacctcttgctcctggccccaggtttttgcttttgttgtcacagtctggaactcagcagagaaccaagtcttcacccacctgtgtgtaacctggaaatggcgggaatttaatgcctgtttggatgagcctttgatgaataagggatgtgagcaggagatgaaaacttgcttttccttctcccaaggcagacgagctgaggcacattcccagtggcttcttggatagttctgtcctttcatggtggcatactcaataacaacacattcttgtattagctctcttccccctgcaacccctccccagcaactctgctcctccagctctcatttgttccctgggatcacatctgctaacaaagtaaaaacacatatatctctgtttcagcctgttttctggggaacccaggcttaaataatgttgactctagaatttggatctttgactattcctcctgtcacccatgcatctatccctc

SEQ ID NO: 363015 - DNA, 616 bp, Homo sapiens
gacctctgatgcactctgcccatccccttgccttggctgtctttgattccagctgctgtttggtgtctggttctatgcagggtctgaccagatttcacgcaggggcaatrcacagagttccacctcaggttcactctgtatacctcttgctcctggccccaggtttttgcttttgttgtcacagtctggaactcagcagagaaccaagtcttcacccacctgtgtgtaacctggaaatggcgggaatttaatgcctgtttggatgagcctttgatgaataagggatgtgagcaggagatgaaaacttgcttttccttctcccaaggcagacgagctgaggcacattcccagtggcttcttggatagttctgtcctttcatggtggcatactcaataacaacacattcttgtattagctctcttccccctgcaacccctccccagcaactctgctcctccagctctcatttgttccctgggatcacatctgctaacaaagtaaaaacacatatatctctgtttcagcctgttttctggggaacccaggcttaaataatgttgactctagaatttggatctttgactattcctcctgtcacccatgcatctatccctc

SEQ ID NO: 363016 - DNA, 616 bp, Homo sapiens
gacctctgatgcactctgcccatccccttgccttggctgtctttgattccagctgctgtttggtgtctggttctatgcagggtctgaccagatttcacgcaggggcaatacacagagttccacctcaggttcactctgtatacctcttgctcctggccccaggtttttgcttttgttgtcacagtctggaactcagcagagaaccaagtcttcacccacctgtgtgtaacctggaaatggcgggaatttaatgcctgtttggatgagcctttgatgaataagggatgtgagcaggagatgaaaacttgcttttccttctcccaaggcagacgagctgaggcacattcccagtggcttcttggatagttctgtcctttcatggtggcatactcaataacaacacattcttgtattagctctcttccccctgcaacccctccccmgcaactctgctcctccagctctcatttgttccctgggatcacatctgctaacaaagtaaaaacacatatatctctgtttcagcctgttttctggggaacccaggcttaaataatgttgactctagaatttggatctttgactattcctcctgtcacccatgcatctatccctc

SEQ ID NO: 363017 - DNA, 519 bp, Homo sapiens
agcgactggtagctattgtattggatgaataaagcagatgtagaccatttccatcattctggaaagttctatggaacaactttgatctcagtaatagtgtacccttctggactaatccttacatgttccagagcaaagagaaactattcattcattcagcaaatatttactccttgccagaattgttctgggtgcctaggatttcgctgggacagacatacttctgcccttgtgaagtttatgtgctggtacatcataggtgttacatagatacaaatggaacatgactatggggaaaaagaaagcaggtgaaggaaaatagagaaggctgggtgctggggtagtggagagggttctatttgataaagggtattcagagaaggctcactgagraggtgacagatggcagagcggtggcctgaaggaagggaatgagggagtatgccttgcagatttctgtagcagagaattccaagcagacggggctgtagtgcaaatgtcatgaggttggagcatgct

SEQ ID NO: 363018 - DNA, 519 bp, Homo sapiens
agcgactggtagctattgtattggatgaataaagcagatgtagaccatttccatcattctggaaagttctatggaacaactttgatctcagtaatagtgtacccttctggactaatccttacatgttccagagcaaagagaaactattcattcattcagcaaatatttactccttgccagaattgttctgggtgcctaggatttcgctgggacagacatacttctgcccttgtgaagtttatgtgctggtacatcataggtgttacatagatacaaatggaacatgactatggggaaaaagaaagcaggtgaaggaaaatagagaaggctgggtgctggggtagtggagagggttctatttgataaagggtattcagagaaggctcactgaggaggtgacagatggcagagcrgtggcctgaaggaagggaatgagggagtatgccttgcagatttctgtagcagagaattccaagcagacggggctgtagtgcaaatgtcatgaggttggagcatgct

SEQ ID NO: 363019 - DNA, 597 bp, Homo sapiens
ccgcacccttcaatatggttgctaccagactaatactgctctttgagcacttgaaatgtggccagtgggactagggaattgcattttaaattttaagtatagrtggtccttggtgtacaatgaagttatatcccaataaaataattataagttgaaagtattctataagtcaaaaatgcatttaatgctcctgacctaccaaacagcatagcttagcctaacctactttaaacatgctcagaatacttacattagcctacagttgggcaatattctaacacaaagcctattttaaaataaagcattgaatatttcatggaatttgttgaatatgacactaaaagtgaaaaacaaaatgattggtattcaaagtatggtttctactgaatgtatatcactttcatattatcgtaaagtcaacaaatcttaaaccattgtaagacaaagaccatctgtactgtagttccaaattaaagagtcacatgtgcctagtggctcccgtattagacagcacaaccctagagtttgtcgatttcaagagtcctgactctaccactttgtaactgtggttttcctaaggtattaggaaagctgtgt

SEQ ID NO: 363020 - DNA, 558 bp, Homo sapiens
ttggtttaccattgccagtggcatattgataaatgtttaccaactagttctctcttgagaaaggtgaaaaaaaaaaagaccatgatttatagtgtctgcccatttctgtggtgtaaatacccctaccactgtgaccactttcaagctaccaatgtaatagcactgaacacaaatttggggagagatgtgcaggaacacagtgttactctgtatttctactatgcagatataatagaggaaaataactgtaatagaaaagtgtataaaatgatcagaaaatgctgattttgactaataattattacrtttgtctttaatatactttattgcaatgtaagtatatataatttaaattttaccagtggtgatgataaacaactggcttgtatatttcctgaatatggaataattgactcttgtgagactttcaagctggccccagtgcacccctggacatttgcgactcagaatatccatcatactagcagcatgcttttttttttttctttaactcctgtttcctcctttttccacctccccatacccagacaaaagtca

SEQ ID NO: 363021 - DNA, 561 bp, Homo sapiens
caatttgttgggttaatccctgacacttcagttgctcttgagtgtctctgcctgatttgactccccaaagaaagcgctatgttgacttttgcattatctcttgttgcataacaaatcccccctaatttagtgactcaaaacaacatgtacttattatctcagttcctgttggtcaggaatttgggcagggcttatctgagtgatctatcttaaggtttctcacaaggctccaatcaaggtrtcatccaaggccagggtcttatctgaaggctcaactggggaaaggtctgctttcaagcccatgtgatggtgggaagacccagttccttgtgagctataaggctgagggtctcacttcctcaccagctgttggttggaggctatcttcagctcctggccacatggacctcttcaactgtcatcttgttgtatcaaaaaatgcaaactgagaaggtgtgcacattgagagttggccagcgtgactatagtcccaacttattgtaacctaatcatggaactgacatcccttcaacaaagttgtattctattggaacattttac

SEQ ID NO: 363022 - DNA, 472 bp, Homo sapiens
gcaccttccccctttctcttgctcctgctgcgtaagatggcctgcccccactttgccttctgccattagtrtaagctctctgaggcctcccagaagcagatgtcaccatgcttcttgtacaggctgcagaaccatgatccaattaaacctcttttctttataaattagccagccacaagtatttctttacagcagtgtgagaacaggagaacagactaacacactcctccactagtctaacatctccatgggcagagaccatgtctcttttgttatcttttactggatatttcttggttaccacttcaaaatccccccagtcccgcctcttattccagttagggtaactagttccaggtggccttgacaggcttagagcaactgcaactgaatattctctatccttgtggtttgtgctttgaacatggggggaaagggacagctaacttttgagaaggagtttcccaggctc

SEQ ID NO: 363023 - DNA, 472 bp, Homo sapiens
gcaccttccccctttctcttgctcctgctgcgtaagatggcctgcccccactttgccttctgccattagtataagctctctgaggcctcccagaagcagatgtcaccatgcttcttgtacagsctgcagaaccatgatccaattaaacctcttttctttataaattagccagccacaagtatttctttacagcagtgtgagaacaggagaacagactaacacactcctccactagtctaacatctccatgggcagagaccatgtctcttttgttatcttttactggatatttcttggttaccacttcaaaatccccccagtcccgcctcttattccagttagggtaactagttccaggtggccttgacaggcttagagcaactgcaactgaatattctctatccttgtggtttgtgctttgaacatggggggaaagggacagctaacttttgagaaggagtttcccaggctc

SEQ ID NO: 363024 - DNA, 577 bp, Homo sapiens
gtctcaggacatagatccatagaatatttcataataaaagggatcttttattatggtcaattaagtttggaaaaaattgcagactatacaatgaatatttagtgtactaaaggctccaaaagatcctacagaagagaaacctgtaactttgttcaatccaatgtttctaatctcaccatggtatcatctttggggtaatatctattagcattttgtagaactaatttttttcttgggtaaatactccttggattgttgcaagactttgattacgttccagagatcttaaaactactgattttaacaattttgacagtattctcattgcttttataaagaaggagatttttggattcccaccattctggaagtcttgcctcatagcaataatatatatttttattattattttttaaaacttttcctttaggttcaggggtacwtgtacaggtttgttatataggtaaactgaagtcacaggtgtttgtcgtacagattgttttgtcaccaggtactgagcctagcactcagcagttattttttctgctcctctccctcctcccaccctccaccctca

SEQ ID NO: 363025 - DNA, 410 bp, Homo sapiens
ctcatagcaataatatatatttttattattattttttaaaacttttcctttaggttcaggggtacatgtacaggtttgttatataggtaaactgaagtcacaggtgtttgtcgtacagattgttttgtcaccaggtactgagcctagcactcagcagttattttttctgctcctctccctcctcccaccctccaccctcaagtaggccccagtgtctgttgttccctccttttgctcatttgttctcatcatttagctcccacttataagtgagaacacaaggtatttggttttctgttcctgygttagtttactaaagataataggttctactccatccatgttcctgcaaaggatgtgatctcattcttttttatggctgcgtagtattccataatgtatatgtgcca

SEQ ID NO: 363026 - DNA, 410 bp, Homo sapiens
ctcatagcaataatatatatttttattattattttttaaaacttttcctttaggttcaggggtacatgtacaggtttgttatataggtaaactgaagtcacaggtgtttgtcgtacagattgttttgtcaccaggtactgagcctagcactcagcagttattttttctgctcctctccctcctcccaccctccaccctcaagtaggccccagtgtctgttgttccctccttttgctcatttgttctcatcatttagctcccacttataagtgagaacacaaggtatttggttttctgttcctgcgttagtttactaaagayaataggttctactccatccatgttcctgcaaaggatgtgatctcattcttttttatggctgcgtagtattccataatgtatatgtgcca

SEQ ID NO: 363027 - DNA, 595 bp, Homo sapiens
ataaaaagggggtaaggggtgttagatttcaattccttctaagttgccttcaagctcaaaattcaaataaaattaaaggactatgagtggctatctagggcattctattgcctctgggaaagactagcctatattatccagaatatatctcagtcagaggagagtctcaatgaagagcaatcaggcaatgtgtttttcttccagtcagaataaaggaaaagaaaaagaaaaaaacaacaccacctccagcatctaaacttgggggtgggaaaacaagaagtcaatcactagtttggagtggggacagtgttttcaggattcactaaatatgggagagttctctgccaatgtttctctgtcatgtctacatttatttttgcaacacaaatggatgttttaggcaacagagtttaaaaggaaagacagctttcacctacacacgtatgtgcagagtctctttttcctgaaactttctgtgctcagaatcatgtttgaagacatcttcacacaaaaattaagaagygtgtttttaaacatttttaaggcataccttttatatttttggtcagttattgtcagaattgtgtacatgcat

SEQ ID NO: 363028 - DNA, 477 bp, Homo sapiens
ggtcttaacttcatttttttttctattagctaatattattctagtactatgtatggaacattttttcctttctttttcttttttttttcttggtttgcttttgatatggttgctgcttttactatatattgcatgctagtatttattagaatctgtttttagaatattctactttttcatatctctctctgttctcctgccaatcccagactatctaaattattttggcattatcatctacttaagcttgttgaagatagtggttaygtatttttatcaaagcactcgcctgggccaagagacatgctttctatatggtagattctgagaaaatgtgtgttcttggtatattttacttcttggaaacattagtccttcaggggaccttgatgttttaagggatgtaccaagtactcattgaacccaaatatttagtaacaattctctagaatttgggccctaaaagtaatatttgga

SEQ ID NO: 363029 - DNA, 571 bp, Homo sapiens
tttgattgcagccttattactgaccttactgagaggtcagtaaagggcccacctccaggcatcctactattatctgagagggcacagccctcataagcactttacagacactttcaaaactaattgtgagggcaatgcaatgagaaagtacttttattattcttgatggtaaattacatttgagggcccaattcttcactgctcacttcatccacatttttgccatagcctcattttgggcagaacttcctttcatatctcttgactttactttagcttttggccagcaacacataattaaaagtacacagtgccagttctgagccgtgrccttcaaaggccacatttcttcctgcctttttgcagctctgctctcaccttgagaagaaccagctagtctgctggttccaggaggatgatgagaaacacatatagcagagtcacctctactaacccacagactgcagtgagaagcaaagcctccacagccaaccctcagatacgtgagaataaataactgctgttttaaggctctgagttttggggtggtttgttatagtacaatagctaa

SEQ ID NO: 363030 - DNA, 571 bp, Homo sapiens
tttgattgcagccttattactgaccttactgagaggtcagtaaagggcccacctccaggcatcctactattatctgagagggcacagccctcataagcactttacagacactttcaaaactaattgtgagggcaatgcaatgagaaagtacttttattattcttgatggtaaattacatttgagggcccaattcttcactgctcacttcatccacatttttgccatagcctcattttgggcagaacttcctttcatatctcttgactttactttagcttttggccagcaacacataattaaaagtacacagtgccagttctgagccgtggccttcaaaggccacatttcttcctgcctttttgcagctctgctctcaccttgagaagaaccagctagtctgctggttccaggaggatgatgagaaacacatatagcagagtcacctctactaacccacagactgcagtgagaagcaaagcctccacagccaaccctcagatrcgtgagaataaataactgctgttttaaggctctgagttttggggtggtttgttatagtacaatagctaa

SEQ ID NO: 363031 - DNA, 550 bp, Homo sapiens
atgtaattgcaagtaaatgtctaaagttaatgaaaaaaattaagaaaaaaggatttctttataagaattaataaaacatttccacaaacctctttgaaatcatgattatgaaggcttacaacgcttctttgaagctgcatacccagagcaaagaggcttgagctctgctctttctgtggcatgaaggatgaaaacattctattacgattgtgccagctatggaaatcaacacacacaaggattctaaccttaaccctcccattatgtccrttctgttgtaactgtttttcattctttcagagccacctttcatttatgggaggtcacaagagctctccctcttgtactttggctgctgttgtaaccatttaatattgttatattcacataccgcaacaaaaagtgatgctttcacttccaaaagagagaaatgaaagaaaagaagtgaaagaaagatgagaaattaaaaacaaaggtgtatggaaacatacagggattggatctctgaattaagctggcatttagcttcaaagcagagaactgaaataat

SEQ ID NO: 363032 - DNA, 600 bp, Homo sapiens
gatgtaagacagaccctgcagtctgtaaagcctagaatattcactatctgatcctttgacagaaagtttgccaatccctgttcttattgggcatttcatgacttagacaatgtggcagctgtggcagtcttattttctaaactttatttattggtgacatctttttaagcaaatctcattcgtcaggctgggcaattttgtgtctgtgcatggtaaaatggtacaatacacgtaatataaagtttactattttaagcatttttaagtgtaaaattcagtggcagtaagtacatttacaaagttgtgcagtcatcaccattatccatttccagaactttattatcatccctaacagaaattctgcacccattaaacaataactctctatgcacttgccctcggcccctgataacttccattctgctttccatctctatgaatttgcctgttctagawgcatcagaccagtaggatcatacatgtggccttttgtgctggcttctttcacttagcatcatgttttcaagattcattcatgttgtagctggatgaggactgtatccttttttaagactgaatactgttccattatgtttctgt

SEQ ID NO: 363033 - DNA, 635 bp, Homo sapiens
tttttgtagacaagatagagtttctggcatccaggaagaatgaggtacatagacaagtgaagggtgaagaagatgaagaggagctttatttagtgttagaacagctcagaggagacctgcagtgggtagctcctctctgtaggcaggtcgtcctgtcaagtgttcagctctcagcagagaggaggccctggagagggtagctcctctctgmaggctggtcatcctgtcatctctctgtcctctgtcctctgccctgctctggctgaacctggggcttttatggacctcagaggggaggaagtgcatacagattgatccacaggtgacaacgggcaggcagcaggaggcactacaactccctattctggtctgtggactggcagtcaagcccccagccttcagcctctccctggcctgaaggtgaggccttaccctggactattgttttccacccagggatctagctgactcctgctgccattcatggcccctggcgcacattgccaaccctgctccaagactggagctggcacagggaaaggagagaggccagacaacaggagcagacacctctgagcctacagggattgggaaacccttcctgggccctgaggacacaggctgcagagatgccc

SEQ ID NO: 363034 - DNA, 560 bp, Homo sapiens
taataggagagatgggacaagaccatctttcaaactttgccatcataagttaactaggggtctaacgacatggaatttattgcggatatccagcagttggggaaacatacttatagaatttatggaattcttccaggaaggaagagatggaatggagagcctcattgttctccacccaaattaaacattattgtaatctttcagaatattgggctctattccaaacccaaaaatagggaggaagtagaagtgtcctaaattaacttttgaagaggttgaaacagaaggctggtggtgaaaggagagctttgccatacatgaggctctgggtgccagaccctaccctgccatcctgggcattgtacttggagactttgtaggaacaaagatacctactttgagtgttggttctctggcagaatttggaaggaatgccctgattgttgggctccactgtccattgaaggacttaccaccagggtcaggatctgaactggaggatgtggtggccattggaatgcacagcttgcscagagcccctcatctcaggcccagcaggc

SEQ ID NO: 363035 - DNA, 489 bp, Homo sapiens
ttgacattttgaccaagattctggttgaatcttgyaagaaaaatggccatggatgatttttaagtaaacatattttcaaggctttgtttgcttctaaatcaagttttgtaagaatgcaatagcaatgcgtgattacaaagcggctagttagttttctctttgtcagtcactagaagacaaaaattaaagctcacgaaattttgcatcttatcaaatttgctcgtttaaattaataagaaatacctatgtaatatttatactagaggttgcttaagctttcaagacacctttaaaatgtgataatttggaagttggttgattaatgtgctcatttgacagcttcagttttttttaaagaaatttaagaaattagatttgctcttatattcagatatattaatactttcaagcagggctctggggggtgccttatttaagcacactcccaaaaaatgcaacaaacttaaaatgacactacaggttagtgca

SEQ ID NO: 363036 - DNA, 568 bp, Homo sapiens
actttgagtttggccatgggatttactttggccaatggaacattggtagatatgacaagcatagaagtttgacatgtgtcagtatgtttggcttgtggtcttaactcctgccaccaccatgagaagagcgtgtctcaggtacctgccaacttcgggagagtagagaaatggagaacatacctgaatctaatttgccgccccggaccaggcccagctaggttcagacaagatcagctcaactccaatcaaactacagatggatgaatgagaaataaagcttattattaagtgccattgagactttrtggctctttgttacatcgtaatagccaacaaagatgccttctcactcacatctagccatgtagaggaatgaggaattggaacatactagattgtttctgtctgctagtggcatttactggaaaaccatccatcttccttctcctttgtcagtctggacaccatccacgaagtgagtaaaactgatttctaatttggttgagtaatttctcaccattattcccccaaattagattttacttcattgtctccttttctataaact

SEQ ID NO: 363037 - DNA, 602 bp, Homo sapiens
atatggggaagaaaaggaacttggtgctatgcatgtaataagatctgacaaacaaacaaataaaaagatttgacctcagcaggatggtcagaggagtcttctgtgagaaattaatgattgaggtgaattctagagaatataagtataagggaattagatacctaaagaagaaccaggaaggagttctgggctgaagaacaaatgtgcgcaaggaatgatgtgttctataatctgaaaacttgctgtgaggatatggagtgggcaggtgtttttgaatccacctggtaaggttggtagggcccacacctgcaggataacctaggaagcttatgtttattctaagcacaattggaagccatcacagaagattaagyagggttgggatgtgggagggatctgatttgtgttttttgataatattgctctttctaccctgcagagagtggactgggattatatttgaaagagcacatgtgtcatatacagatttttgtgttctctctgggatcagggcagtgcattctctcattgtggcacatgctgactctccctcatggtggtttgtttcttcatcagtttgtaggcattttcatcatgaggtc

SEQ ID NO: 363038 - DNA, 467 bp, Homo sapiens
tttatttaaaacatattaatgggttatttactctgtggtaggctacactagctatgatgcctgtgaattgacagagagagagatgatagtgtcctatgctgggattatagattaagcaacartacagaggcatttctgatgtagataccagaaaaagtagcagcaaattacctgatatgcttgtcagtagcaggtacagaagatgcctcatccgtacgaccttgacacttaccattcctactaaagatgtctttctggtagtatgcctctagaaatgggagcagctgagccagagtccagggcagactggaattgctgggcagttaccatccatgggagcatccctcagccaccgatgaatgggagttggtgcataccccagcttccctacttcttgggtaggccaactctgaaacatgttttcccatatggacactgactcctgcttgtctacagtggaaacctcc

SEQ ID NO: 363039 - DNA, 620 bp, Homo sapiens
cagtagccccagtcgggggcttatagataaaactcctgtctccctgggacagaacacctgggagaaggggcggcttgtgggtgcagcttcagcagacttaaacgttcctgccagccagctctgaagagagcagtggatctcctagcacagtgcctgagctctgctaagggacagactgcctcctcaagtgggtccctgacctccatgcctcctgactgggagacacctcccagcagggrctgacagacacctcacacaggagagctccagctggcatctggcaggtgcccctctgggacgaagcttccagaggaaggaacaggcagcaatctttgctgttctgcagcctctgctggtgatacccaggcaaacagagtctggagtggacttccagcacactccagcagacctgcagaagagaggcctgactgttagaaggaaaactaacaaacagaaaggaatagcatcaacatcaacaaaaaggatgcccacacagaaaccccatccgaaggtcaccaacatcaaagaccaaaggtaggtaaatccacgaagatgaggaaaaaccagtgcaaaaaagctgaaaattccaaaaaccagaatgtgtcttctcctccaaaggg

SEQ ID NO: 363040 - DNA, 620 bp, Homo sapiens
attggtgatgcaataacaaataaaattttaatctcgggctggacatggtggctcacactgtaatcccagcactttgggaggccaaggcgggcagatcaccagaggtcaggagtttaagaccagcctgtccaacattaggaaaccccatctctactaaaaataaaaaaaaaataaaaaaaattagtcgggcatggtggcgggtgcctataatcccagctactcaggaggctgagcaggagaattgcttgaacccaggagtcagaggttgcagtgagatgagatcgcaccattgcaccgcagcttgaatgagagggtgagtctccatttcaaaamataaaaaacaaaataaaataaaattacaatctccgtggcttatgaaataaatgcttattgcttatttgggcaaagcctcctgtgggcttgggctgactctgggaggtcactgcaaaaggcgaagagagaggtgcttccagctgagacttttttgtccggaggtgacccaggtcacttttgcttacagtgtattggtcagaactagtcatctaatccgaagccagctacataagagtctgggatgtgggggaccaagtgagcatctgtgaacattatctgtcagccac

SEQ ID NO: 363041 - DNA, 620 bp, Homo sapiens
attggtgatgcaataacaaataaaattttaatctcgggctggacatggtggctcacactgtaatcccagcactttgggaggccaaggcgggcagatcaccagaggtcaggagtttaagaccagcctgtccaacattaggaaaccccatctctactaaaaataaaaaaaaaataaaaaaaattagtcgggcatggtggcgggtgcctataatcccagctactcaggaggctgagcaggagaattgcttgaacccaggagtcagaggttgcagtgagatgagatcgcaccattgcaccgcagcttgaatgagagggtgagtctccatttcaaaaaataaaaaacaaaataaaataaaattacaatctccgtggcttatgaaataaatgcttattgcttatttgggcaaagcctcctgtgggcttgggctgactctgggaggtcactgcaaaaggcgaagagagaggtgcttccagctgagactttyttgtccggaggtgacccaggtcacttttgcttacagtgtattggtcagaactagtcatctaatccgaagccagctacataagagtctgggatgtgggggaccaagtgagcatctgtgaacattatctgtcagccac

SEQ ID NO: 363042 - DNA, 522 bp, Homo sapiens
aaaacccttaaatagacctttaatatggatgaattcttagtgtatgatgagaagcagccttacagggcacctgtaccactgtttacaccattattaaaataaattacaggtggattaaatggaaaacaaaattgttggttgaaaaatgatcctgatttaaataattacctataagtctttcttttcttaaaagaaaatgtaggtgattattttaaaatgggcaaggaattccttagcataaaagcaatggaagaaatcataaaagaaagatgaataatatatctgagaagtaatgtatctgagacttttcaaaaatgttagttggtaagcaataaaaatgarattaaaaggcaaacaacaaactcaaaaggatgattaaataactgccaaagaattaataaccttaatttaaataactcttccaaacttgtgatgccacttacatgccaattttcaaaggcaaaagatgattcacactaaaaatacaaatagctaagaaagaagatggcatgcaattaaaat

SEQ ID NO: 363043 - DNA, 605 bp, Homo sapiens
ttaaagtcagcatttttactcccattttgcaaataaaggagtgaaaagaggaaacttctattgctaaacccagcctcttaaccatcacaccatcttgcatccatgtgaatttagtagcattcaagcagtatttaaaacaatgtatgagtttaattgtaggaaagaatgagattcaaggttctctttttttctgtctaaaattatgcatgcatttcaggaaagrgttgtttgttgtatttttttttggatgcagtgtttggctctcatgggaaaatggcatcttcttaataaagggacagataagagaataatctgttaaatgtaatcatagaaagacattttatgattgtgcctgttatgatttggcttcccatgcattgttgtcattcaattccataaacattcctttgttcaggagatgacagcacctactctaaaggtattgttaatatgctgagtaaaaacacacttaccctttgcaagctatggttttgctttgaaatctctgtaattaacacattcacatttcaggcaccgggtattattgagttcaaagaaacaaagatgtatttcatttttttttctacagatgattcatcagttcc

SEQ ID NO: 363044 - DNA, 571 bp, Homo sapiens
ttcacacccatgataaccagataataccctggtttgtgtttgctgggccacaagacagcacaaacatcattgtgtccacttaaaacacacacacacgaaataatgcatttaagaggaaacactgacatgccttggctaactttctagatgcatccgtactaatttgaaatatcacccctcgcaatctccaggtgatgagtttagaaactctgtcatttatgtattctttatttgttcaagtaaatatattaagcattcaaatattcactacggatctgcttaaagagctactgtatactttttttttcaatgtattaagactgcccctggctatcaacttgagtcttgaccagttgggctagctaattaggttgaatattccagataaatgaaastccctgcagagagagataattcaagccattccctattttataacgaacattgtaaaaagtgatttcttcattaggagaagacggggctgctgcaaggcggtggaaatctgcaggaagctctcctccaattttgcaaagggaatattttcaacaggcatatcctcaacatttaaaaa

SEQ ID NO: 363045 - DNA, 425 bp, Homo sapiens
tggctggagaagaaagatgagggaatagatggggacctgtttaaggaatagaactggcaggatttgaggagcaactgtgcgtggccagtgattaacaaaaactagggtagttaaaatatctgtgtcctaaaaagtcacttagttggtaattatcattcaaattatactagcttgagtaccattttaatatttagactccaaattcaagtaatagttccatgctttctgcttcaaatgctacaatacaccttggccaaatttaaacacaaattagtagatggtgcttccattaattctttagtcctcaacttaaycgcacataaaattttccaatggtttcaaaatccaagtcagtaaggtctaagccttttagagagttaattttactgctgtttcctcttgttcatgaggctaattttaaacat

SEQ ID NO: 363046 - DNA, 578 bp, Homo sapiens
acaggccatagcttactcctgttaacccagcactttgggaagcctcagtagaaggatcacttgaacctgggagttccagaccagcttgggaaacatagtgagaccttgtctctaaaaaaaataaaaataaattagccgggcatggtggtgcgcgccttgtagtcccagctacttgggaagctgaggtgggaggatggcttargctggggaggtcaaggctatggtaagccgtgattgcgctgctggactctagcctgggtgatagtgagaccttgtctcaaaacaaacaaacaatcaccccaaacaaataagaatacttcacagaaatacatatggctctgttttaaaataaagtttgaaatatttactctctgggcctttacataaaaaatttgctggccctgagctggaaaattaaataatcctcagatgagccttttaaccagcactccattgtgactttgaaaagacaagcatctatccttttgccttacttccaaggttttgggcattttttaaaaatagcctttgcagttataacctttctgtgtagaatgtctttccctccctcttcccca

SEQ ID NO: 363047 - DNA, 539 bp, Homo sapiens
ggagtttgagacaagcttgggcaacatagcaagaccttgtctctacagaaaaaaaaaaagtagccaggcatggtggcatgtgcctctagtcctagctactcagaaggctgaggcaagaggattgcttgaacccaggagttcaaggatgaaatgacatgattaagccagtgcacttcagcctgggtaacagagcaagaccttgtgtctaaaacagataagttaataatttttaaaaataaattgaaaacaaaactttttattttgaaatgacttaagttaacagagcactacaaacattgtatagagagtcccatacaccatttatctggcatcttctaacattaacatcctacataaccaaggtacatttgtcaaatatgagaaaytaacatcagtacaatactattaactaatttacagggttgatttggatttttttttttttgaagattttcctctcatgtcattttctgttccaggattcagttcaagatcctacgttgcacttaattttcctcattttcttctccaatctgtta

SEQ ID NO: 363048 - DNA, 592 bp, Homo sapiens
caatgttttgtttttaagtttgatagacaccaaaaaaatacagacakcataaagataaacctctttgcattaactactagaaacctcatagcaaaaagtatgacttgcttatcttcagcaagtggtccacctggtagtattttgctggggtcatgaacctggttctgaccaaggagttgtgagtgggtagtatgctacctctgaaagaaagcatttaattgcggatttgagaccctccagagctgtcttcccctctgaaagcaacacgtgagaaggtggttgctccatcatcctgaattctggtacaaggctgtgagaagaagagcacctaaccacccctcagtggacataggcatagatgagaaataaacttttgttgtcttaaatcactgagatctcagggttctttgatactgcagcaaaacttaacctaattgaactcgtgatctgccctcctcggcctaattgaaatttagggtatggattcagtgttgcctttcttcagagcccttagccactgcctaatatatcataataatcattaattaccatccactgcacagataaggtcaaatgtaagaagacacacaga

SEQ ID NO: 363049 - DNA, 588 bp, Homo sapiens
atcagactgtaaagctcttccctcccatcattcagtgtcacttactcagagatcctgtccctaataaccctatctgaaattgctgcctatctactgcctctccccttacctgctttactttcttcctagcacatagtgccatctgaaattataatacatgatacttccttctaagttatttttgtgtctgccttggtagaatgtaagttccgtgaaggcagaggcttctgtctgtcttgtctctttgtccccagccccttgaatagaatgtggtacatactaggcattcagttaatatttgttcataaatgaatggtataattagaaacaattagataattgtttctataattaaacaatttatgtatttagacatttatatatttagatatataaacaacttatatgtggacaatttatataaataattacataaaggtataatttgaaacaatttatatgcccacaaaaaagataaatatttcttcagtatgataatattcaattttaaaaatcatgtttaaactagtttatcataagygaaaaagctaagaacgtaatttcagtggaaaaagaacaaggtgcaaa

SEQ ID NO: 363050 - DNA, 573 bp, Homo sapiens
ataaattggaattataacagaaattgtaaactctgctacctccagggatcagttaggtaattaggacaatgggaataaatgaccactagagagaggtgaagactgcagtgagctagagtgtacaggccctttctaaaggagggtggtaccaggcgtgatggcgcacacctgtaatctcgactatttaggaggctgaggcaggaggatcacttgagcccagcctgagcaacataggaagaacctgtcttcaacaaaattaaatcaaaggtaaaataaagagtgtggctactactcagctccagctgattctagccaatgctatgctgtttttttattttattttatgtggaasgggaaaacagtaatctgggtttttatgtgagatcatccaaaatttaaaattggcaacagatattgaaagtttacaaaaaaatgattgggtccatccaataagccatatctgtggacttccatctgaagaactctactttgcaaactccagagtaggaggactcagtttttcatttagaacaaggctctgtctgcttggggctgatgcctttggatggcaga

SEQ ID NO: 363051 - DNA, 463 bp, Homo sapiens
aaatattgactgcttttgacactacagttgtcccagagggtcaggcttgctttttcaagcttcttgaatctctttcagttccttggagtctctttttggtatgttggaaatttcaaaaaaaatggaactattagggcatgcctgataggttttttttttttttttttttttttttaatgcaggttgaaaaagaaaagaaaggcctggtaatttggaataatcatacacaagttaaatcttgggtcttgagttagcaagaatggttgcatgagtggtaaaaattactgaaaattacttcctattcaatcagtttggtcagtgtatatgctgatatatctccaaaatwtcatatagacatcattagtgcttttaacaaaccaaagagatatgttcttttaaaagagaattttactaaaagagattcctagtgtcccaaccccaaacccttcacccaggcctgagt

SEQ ID NO: 363052 - DNA, 539 bp, Homo sapiens
tttgttatttctgccaggtacatcttctgactctttcaagttctggcaggttcatgctyatttgagctacaggtgcaaaccaggtaaataactgtccccaaatgcaaggttgcagtcctctagcctcctgcaaacccaatccttcactccagggacaaagaagacagctttccctataaagttaccccacgggattgcagagtttttctgtgggttcacctaagctctgtttatatccctgcaaacaaaggcgcagaaagtcaccggagcagcaaggtgtgtccggtgctgaacgtttctccaggagtgctgcctgcactaagtgtaatgtgactctttcccatccccttctcccccacttttaaaacccagctgattacaagtgttgttaaaggttactgaactagaaaaacaaaccgtgccatggttggtgcattcctaattacagaggggagtgcattgggaacaattgtttttgtacctcgacatttctcggagccccagtcaggaagtatgctgtttctctttggccactcata

SEQ ID NO: 363053 - DNA, 539 bp, Homo sapiens
tttgttatttctgccaggtacatcttctgactctttcaagttctggcaggttcatgctcatttgagctacaggtgcaaaccaggtaaataactgtccccaaatgcaaggttgcagtcctctagcctcctgcaaacccaatccttcactccagggacaaagaagacagctttccctataaagttaccccacgggattgcagagtttttctgtgggttcacctaagctctgtttatatccctgcaaacaaaggcgcagaaagtcaccggagcagcaaggtgtgtccggtgctgaacgtttctccaggagtgctgcctgcactaagtgtaatgtgactctttcccatccccttctcccccacttttaaaacccagctgattacaagtgttgttaaaggttactgaactagaaaaacaaaccgtgccatggttggtgcattcctaattacagasgggagtgcattgggaacaattgtttttgtacctcgacatttctcggagccccagtcaggaagtatgctgtttctctttggccactcata

SEQ ID NO: 363054 - DNA, 578 bp, Homo sapiens
gagacttgagtatataaaatgcctagctcagtgcctgatgattatagtagcttcccaataaattcaatttctgtgttttctaattaaatcagtgccactctagcgagtaatctctaataacatgccacagaaattttgyttaaggttgtttattgtctttattttcaattttgacctagatgagaacattaatgacagtaaaatttatggatagtgtaatagctaatagactggacagttaaaggatcagaattcaaaaagatcttgactaaggaggagttatgattatagggctcagtgttatgggatggacgaatgtcagggtgcaggcaaaaaaagggattggattgaggctaaaggagacatagaataaaatattccatgaagaaaggcatagtgagaatccaaagcaagcaaactattccttataaaataattgaatgggttttcacttctagtagtaggactatcttatcccattcagtgtttctttcctgttttctttttgttaggtagttaaacctctgagatttgatctctgagaggtaataccgtagatctgtgttatgattggtcat

SEQ ID NO: 363055 - DNA, 407 bp, Homo sapiens
aatctcatattttttaatcccaacttactaaattgtttacctcaaggaagcaacttaacctcaacatgtctcaatatttctgtctgcaaaaatagggctaataccactctaaacggtagtgttatgaggatgaaatgaggtacctcttgagtayatggcagcagcattattcctggcgcgtattaggaactcagtaaacataatttcctttttattcaacggagagggttgtagtaatcaagactatagtactttttctggcattgatgaagctgctattctaggagaccatagtatgccctcaagtttctatttgttcagcatgtgcatagtacacagtatctgcaaaggcattgagatatgtggcgatattgcagtcttgttgggggtgggggtgaggagtagaa

SEQ ID NO: 363056 - DNA, 407 bp, Homo sapiens
aatctcatattttttaatcccaacttactaaattgtttacctcaaggaagcaacttaacctcaacatgtctcaatatttctgtctgcaaaaatagggctaataccactctaaacggtagtgttatgaggatgaaatgaggtacctcttgagtacatggcascagcattattcctggcgcgtattaggaactcagtaaacataatttcctttttattcaacggagagggttgtagtaatcaagactatagtactttttctggcattgatgaagctgctattctaggagaccatagtatgccctcaagtttctatttgttcagcatgtgcatagtacacagtatctgcaaaggcattgagatatgtggcgatattgcagtcttgttgggggtgggggtgaggagtagaa

SEQ ID NO: 363057 - DNA, 407 bp, Homo sapiens
aatctcatattttttaatcccaacttactaaattgtttacctcaaggaagcaacttaacctcaacatgtctcaatatttctgtctgcaaaaatagggctaataccactctaaacggtagtgttatgaggatgaaatgaggtacctcttgagtacatggcagcagcattattcctggcgcgtattaggaactcagtaaacataatttcctttttattcaacggagagggttgtagtaatcaagactatagtactttttctggcattgatgaagctgctattctaggagaccatastatgccctcaagtttctatttgttcagcatgtgcatagtacacagtatctgcaaaggcattgagatatgtggcgatattgcagtcttgttgggggtgggggtgaggagtagaa

SEQ ID NO: 363058 - DNA, 608 bp, Homo sapiens
ttttatagtgtgatgcatccagctttgtccttttgctcaggattgctttgactgttcatagttccatatgaactttagaattgttttcttctacttatgtgaagaatgtcagtggtattgtaatagggattgcattgaatctatacatagattatttttggtagtgtagttttcataatcttctaattgtgaacatgggatgtctttttatggtgttttatggtttttttttagatatcttttaccttcttggttaaatttaattgtaggtattttattcatttatttatttttgtagctattgtaagtagaactgctttmttaatttctttctctgctagttttttgttggtatatgttactgattttgagtattgattttctgtcctgcaagtttatttaatttatttatcagttctaagaggtttttggtggaacttttagagtgttccacattaacatcatgtcatctgcacataggaacaatttttctcctttccaatttggatgccctttatttctttttcttgcctaattgctctggctaggacttctaatactatgttaaataagaatggtgagaatgggcactgttgtcttgttccatt

SEQ ID NO: 363059 - DNA, 609 bp, Homo sapiens
agggcccaggaatttgcattttcaacaggttccagatatttctggtgctgctgatcacaacactacatttggagaagcacagcattaaagccacagttctcctgggacggtctcgattcctcagctgagactttctctgtgttccagtgaccctatagcctccgctttctccttcagatacaggtgcaggtaagggcttctttgacaatccctaagtgtttcaccgttccttgttgattcctttataatcctgtccacacctcttgtaatcagtcccttcatttaattcacttgaattgaacactttgaacaygtgccattagtttcctgctaaaaccctggctgatgtagaaatttgtcctggggaaataatcaaagatgaagacatagacttatgtgtaaggatgtgtttttgcagcataatttgcaatagcaaaaacattagaaacaaggtatatgttcaacaacaggggaaacttagaatattatacacttatgagtgactaactacataactatactgactaacctgtggaatactcatgatgtttaaatgagaataagatataaaactatacttagagaacattcccaattttttaattatgt

SEQ ID NO: 363060 - DNA, 584 bp, Homo sapiens
ctggattctgtggcatagcctgtttgccggtcttcaagcaaggaaatctctactgaatattttctttgctcatactcaaaagatgccatgcctggctatagaatcacagaacttttgcctaaaatggtgataaagaacacaataaaaattctcttctaaattcccaccraactaaccaggaaaatatatgaaatgagggaaattgtctatgaacataaggtaaaataaaagatagagtcagattctgttaagaaacaaaattatccttcttacctacctgtgaagtaggattgaaatatggcaatctttcttcctgaacattactcagtgccacagtgactatgactcagtaactaaagttatcaaagttctacttattcttagttacctaggtcatttattatcacatagggaagtaatagggtggcattttcaggtatccaaggactcagaaaccagattgtcttcccaggtaaaaatcctgaaggcctactttaggaccccaagatattaatcaaaatttagattcaagaagaaaaaagtggtggcctaaatgaattggagtgatcaataagatgagttaa

SEQ ID NO: 363061 - DNA, 542 bp, Homo sapiens
tatgtcctgctttaaatcttcaatcagtcttttccatctgtcaaaattttatagctactgcaagataaagactctgttgctatggtaattattccattacctaggtgacagtgttcgaatgatgtccttactaaagtgatctaactcatgaaacatttttagtttttgttatggataggcagagagaaaactgattagtgatacaaattcaagaaggctagaagaatgccacttttctcaatacattgggtactcacaaatgagaattagaaggtaaatgctgaaatgcatttccccaattatctctgcttacagttgggtcaatatcttcatcagcatttcacaaaactgaaagaagaggaagaaagattgcatgtgcaaggaaaaataaaaagatagcaacgtgttctactggaagaatggtagaaaagatgtcctatttaaawttttttttcccctacctcttcagttgaatctcatgtgtgcagttataaaaaaaatgcacttttatttttgtaccatgatctaattcttaaacagag

SEQ ID NO: 363062 - DNA, 475 bp, Homo sapiens
ttgttcttcatgtagctttatcatttcttgatagcaagcgaagaattaatcagcagtctgccagattcaggcaagtaattatgattcttgactgcaaatggctttgcctgcatggaaartgaagtgaattgaagcaaatgacaatttatagaatacctttaaaaataaaagagatggcccataattcccatttgaaaggataaatcctggtttcaaatagagtgctgataaaatagattagaataaaaagacctgcaaaagcaccacagagaatccagatggaatctcatcccttgcttctttataatctacaaatacctaacagcagtaggacagtatcattgtattttctatgcaaaaagtataattttctattttattctcaaaatgtcaggaaacaggcagaggaactcatggagatttgcaatctcaatatatgaaaaaagacaattattatagatatgcagccttcaac

SEQ ID NO: 363063 - DNA, 533 bp, Homo sapiens
ttttttaagttttaaatgacagtgggagaaacataggtatccactgaaggtttgggacgctgcaagatttggtgtcgttcccatctttaccattctttagctttgtgagaagtcacagacaagtcatttaacctttatgttcccctgttcgagaaaagaaaaatatctcattcttgggagtacccaagcaatcaaatagctcccatgccacctgccaccctccaaaaaagccacaacagaaaattcaaaaggcaaacacacacatcrttgttgttttaaaaacaagaacttccatttccaaccttgattttttaaaacctgtaggaaaaaataaagttagggccactggaattgagaatctatcaaatatttttgtttgtttattagaataaagtcaaatatatagaaaactgggaagatttttaatgccgttaacacacgttaacccattaatagtagcaatgtcgtgttgttttccatttattgacactttcactagaaatattttgggcaccctttttccttcagtttga

SEQ ID NO: 363064 - DNA, 602 bp, Homo sapiens
gattgtctcttctgatgcaagttgattgtctcacatttctttatatgctggaatattttgaatattatatcaagagactctgagtcttgtttaaatcctacagaaaaagttggtatttagttttagccttctatggccatcagtcccaatatgagtttaatttttcatgtatttacactattattcagatctgtcccatgtgtgtactacttagtggtaagtctgggacccatcttctcatttctaaacatttttatgctaaatagaattagatttatgtatgtgcagtttggggatgagcccaaagttttataaacaaatttatggtgtcactttccctcttgctctccatggcagccccagtaatttttctcgtgcttctttttgattgtccagctagaaaccacctactttcataattctaccatgcctggggctaattagttggaggatcaaaagtgagaaagaaaggcaattgagtttggatacattatattgacgcaacagatccactacatggagatgaatgttttctacattcagagctttggctccaacaggcctmcattgctgactgatgtcaatgtcactgatctcttcac

SEQ ID NO: 363065 - DNA, 585 bp, Homo sapiens
ccatagttctacaaaccatcttttttaatacccacaagaaattgtatgagcaaggccattttatgagctagcctatatggtacctttgtgattttcagaaacgcttttttttttttaactccaggcagagaaagwcttgtgcctggatgcatgtcttggtgaatatacagcaggctggatttcagtccacaaaaacccctcagcaggtactttgtgcagtgcacagcctgcacaagtgtatagtggctataagcaaagttaggtatattatttccattttatggatgagaaaattgaggttcttctatgttacgtaacgcttcttaaaaatgcagagagttttaaaaaaatgcttgttcccatagttagtaacagagctagacacttacctgaaccaaaggtttgtgtacctctcatcttatctaaatgtttgcttatctgtgcttattattgtgcttgctctcttcctcccttctctctcttactctctctctctctctttgcaggtatatgtatacatctactctcaactccactctcattcctccaatggtccatggtagaggcacagtcagaaaacaccct

SEQ ID NO: 363066 - DNA, 544 bp, Homo sapiens
agtttgtaatcaaagcataaagcagrgcctacttttcagaagcactggagcactaggcacattttcaggaaataattatgcccagtgataaaatgtagatatccagttaccaaactgagaaaggctgtagatacttcacttcagaaatgagaaaaaaaaaaaaaaacttgaacttttaaactggtggaataaaggcagagcagggaaatttgatatatatgcacaagatgtggtccacagcccagggcaggactgagtttacaggaaagatgtcttaagaacattgatatgaggagcaggctaccaggctggtagctctaattgaacaaagacctgacctcaaggaattttcattccctggggaagccagacatatacataattaactgcattgtgtaattgaaatgtgttgtatcagtacttctcaaaatttaatgcacataaaaatgttgggaatttgtagattctgatccaataggtcagggatggttacaagagcctgcatgtctaattatcccagctgatgtagacactgctggtctgt

SEQ ID NO: 363067 - DNA, 550 bp, Homo sapiens
taatcataatccatacacatctgatttcctaattccatactgattaataagatttttgtcaagtctgccttaaaaatgctcgagaatattcttttctattctcatatttatgcagtcttagtcccaaagtttcaatatcccttaaagatttcaaagttttccctgataatctctctgtcttcagtctgtcttccaatccatcctctctatgtctatcaaggtcttattttaaaatataatgatcatttctcattttacataccccaatttcaaactcaaatttatctctccattgaaattacattaacaagaacatgcctaatactttttctagtttaattttctacacttttctccatattcagtgtccacaccaacctctccaaggaatttgctcttaaacaactagccatttttccgatcactactgataacgaaattaaactaaatgaatcttygaaagctgtgaattccaacagggcatgggtcctatctcagtcattgttatacatgttcagagcctagcacagcatctggcacatagtaggaa

SEQ ID NO: 363068 - DNA, 518 bp, Homo sapiens
gtgagagtggggaagaattgctatggcaacaaagtgtgctctaataatgaaaatggcatctaacgagcagaagcagctagaactttaagggaaagagaaaagaagtgtgccttgaagaagcaggaagaacaaatgtaaaaagtttaacgtattcccttctccagcctacatatattggcccatttagaaaagttagatttgtatcttaacttcctctaaggaatattctaacaagataaggttttataatttactgggrgaaacaggaggttgggggtgggggcaggggtagaaattaccgagtcattcctaaaagtggaaggagaaatcacttcctttgatctagaaatataggacaatgtacagtcacttaggggatccacagaggtatgtgtgtccagactctctggttctaggcccagctttccagcttcctgatttctttgacaacataattctcttctccacaagaattatttatcaaaacagcttccaagttgtagaggggcctggaaaca

SEQ ID NO: 363069 - DNA, 604 bp, Homo sapiens
tcaggtgttaagcatttgaatcaggacctgtctgtggagtagctgtgtaatatcaaatgcttttggagaacactcttgaatatttgcatttgcagacmagttctgcaaaaggggtattcttcactcattctatcacaacttttcctgaagaaaatgccattgttttataggagcagaatttaaagcgtaaaaccttttgtatccattacattgtcattgatccccacaagcctccggatgtttatctgtgtgctctatcaagacaggaagacatgggtaaaattaaaattggcgataaataatgtacccacatttaaatattttctatttctggaattattgctaagatgtaatattaatggagaaacattaccaagacacacaaggagcatgtgtgtacatatgtaggtagtgggtatgtttgtagggtcagtagcgcgacacctataagagataagagcattctgtccacaaattctaactgaacactcacagaaggacttcataaatttttacaaatgcaactcaactattaaacacaaagtaaaaacaggagcatcactcttgctcacaccagctatatgcctaatttgcagctttgcag

SEQ ID NO: 363070 - DNA, 618 bp, Homo sapiens
ggcaaacattctcaacatttaacttccaactatctcatgagagagtcaaagctaaagaacagagaccatgcctagaagagctttgtaagatttctttagcttgactttrtgggtttttgttctgttttgttttgcctcctggctagttcatcatagtaattaatatggaaatgtgggatacctcttttgttatctgatagcaacatcatggagtcaaaagctggggtgccaattcctttccacaatcttcagggaagagtgatttaaagggcagtgatgcaaagcaggctgagcccctagagtcttttaaaagtgtatgtgaagatccaccttgagtctgatgtgtgaccttggaggtttgagcagacaactcgcatatggaacttttatattgaagaaaaacagtcttagctgtccaggaaattataaaggacactcaagagccttgcttagtaccatcatggccccattgcctatggaatatagtcctagtctacctcttcaaagatatctcctttcaaacgcactatattttatgtaacctaaattatttgcagttccatgtacaaacccaaggcattcctgccacagggatatcacttaatttcttcctcacat

SEQ ID NO: 363071 - DNA, 596 bp, Homo sapiens
tctcatgagagagtcaaagctaaagaacagagaccatgcctagaagagctttgtaagatttctttagcttgactttgtgggtttttgttctgttttgttttgcctcctggctagttcatcatagtaattaatatggaaatgtgggatacctcttttgttatctgatagcaacatcatggagtcaaaagctggggtgccaattcctttccacaatcttcagggaagagtgatttaaagggcagtgatgcaaagcaggctgagccccyagagtcttttaaaagtgtatgtgaagatccaccttgagtctgatgtgtgaccttggaggtttgagcagacaactcgcatatggaacttttatattgaagaaaaacagtcttagctgtccaggaaattataaaggacactcaagagccttgcttagtaccatcatggccccattgcctatggaatatagtcctagtctacctcttcaaagatatctcctttcaaacgcactatattttatgtaacctaaattatttgcagttccatgtacaaacccaaggcattcctgccacagggatatcacttaatttcttcctcacattcaaactcat

SEQ ID NO: 363072 - DNA, 618 bp, Homo sapiens
ggcaaacattctcaacatttaacttccaactatctcatgagagagtcaaagctaaagaacagagaccatgcctagaagagctttgtaagatttctttagcttgactttgtgggtttttgttctgttttgttttgcctcctggctagttcatcatagtaattaatatggaaatgtgggatacctcttttgttatctgatagcaacatcatggagtcaaaagctggggtgccaattcctttccacaatcttcagggaagagtgatttaaagggcagtgatgcaaagcaggctgagcccctagagtcttttaaaagtgtatgtgaagatccaccttgagtytgatgtgtgaccttggaggtttgagcagacaactcgcatatggaacttttatattgaagaaaaacagtcttagctgtccaggaaattataaaggacactcaagagccttgcttagtaccatcatggccccattgcctatggaatatagtcctagtctacctcttcaaagatatctcctttcaaacgcactatattttatgtaacctaaattatttgcagttccatgtacaaacccaaggcattcctgccacagggatatcacttaatttcttcctcacat

SEQ ID NO: 363073 - DNA, 596 bp, Homo sapiens
tctcatgagagagtcaaagctaaagaacagagaccatgcctagaagagctttgtaagatttctttagcttgactttgtgggtttttgttctgttttgttttgcctcctggctagttcatcatagtaattaatatggaaatgtgggatacctcttttgttatctgatagcaacatcatggagtcaaaagctggggtgccaattcctttccacaatcttcagggaagagtgatttaaagggcagtgatgcaaagcaggctgagcccctagagtcttttaaaagtgtatgtgaagatccaccttgagtctgatgtgtgaccttggaggtttgagcagacaactcgcatatggaacttttatattgaagaaaaacagtcttagctgtccaggaaattataaaggacactcaagagccttgcttagtaccatcatggccccattgcctatggaatatagtcctagtctacctcttcaaasatatctcctttcaaacgcactatattttatgtaacctaaattatttgcagttccatgtacaaacccaaggcattcctgccacagggatatcacttaatttcttcctcacattcaaactcat

SEQ ID NO: 363074 - DNA, 427 bp, Homo sapiens
aagattttaatagtcaaagatgttcaggaagagcatgtcaggaagaagatggcaagaagtgaaygtaaagttggaaaaattcagaatacagtaaaataatccactggggtgaagcacagggaagtgacagtaagaagggcaaaaagacagatggagtcaatatttcagacaatccttgaatatcaggccataactttgtacttaacttacgggaaatggtgacctcagaagactttggagcatgggtaggaacatgataaaagttcctaaaatggtaagattcttttaggagttatcagaagaattgtgaaagtgctgctctctttcttccttccttagtctctctccatctctcttggtcattgggttccagagtctctttggaaataatcaaaccctttctaagtaatttacacatcaaagttaa

SEQ ID NO: 363075 - DNA, 511 bp, Homo sapiens
cctaatggcctcccacttatgtgtttttattgctgttgttgtttttaacagaaccaaacctagaatgaaagacaaagtttctagctacacccaaaaggattttactaacgctttatccctgaattaggcagacttacctaaccagctcctggctctgctggacagctgcatgatgctttctgcatttcggagagcagactagagataattcatcagggactgagccacacaatcccagtgaccactgccaaacytactcatcagatatgtgctttacgtctcttctccaaggaagaggaaatgtggaggggatactgggagtatggttgggtgtgctgtgtttcttcccaaggaaacatgatgaatggggaatacgtagttttctcaacaatacaaagaatacaaggagtcagcagatgaggggctagaaataaaaagggacaatggagatagtgctcttaacggacttagtcctccccacatatggtataaataactgagggtatagacc

SEQ ID NO: 363076 - DNA, 520 bp, Homo sapiens
actataaaaatttccaaactttgtatgcatacttgagggtaatsatatttttcccctatgttcttaccataaagttaaaaaataccacatgtataaacagtaagttgtaaccaaaaataatagtaataattaaaatagctaccaataatgccatgtttatgtgccacgcactgtcctaggtgacttgcatttattacataatcttcacactcatcctgtaaggtgggtactattattactaagaaacagacataggttgagaggaattcaaatcctcacagtaaagtcaattccaatactaagcaaaaagcttataaggaaaatacaaaataatcaaagacaaatgaaaaccccacaccctcaaagttttttttttaattaaagaaaatgacagaaaaaaataataaagaaaattatgtaaattccagatctcaacagtttgactttacagagcaaagctaatgacacagggattcaacaggtttctcagatcaagttctgacaaaatgatcaagcatgt

SEQ ID NO: 363077 - DNA, 611 bp, Homo sapiens
catttcaccttgtaaacagatgatgtaaactcagggtaacaataaacacggtacaatactgtaaatgcattttctcttccttatgactttcttaatattttcttttttctagcttactttattgtaagaatacagcatatatacatataacatgcaaaatatgtattaattgaaatgtttatgttatgagtaaggcttcttgtcaaaagtagggtattattagtagttaaatttggagaaagtcaaacattatacatgaatttttgatggcacagggggctggtacctctaaaccctgagttgttcaagggtcaactgtacacctattttacaacatagcaactatactcccagktatacactacagagaaacttttacatgtgtgtatcaccagaagacattgagaataatgtttattgaagcactatttataatagcaaaattggaaacaacacaaatggctactgacagaaaaatgggtaaatccacccaaaggaatactatatagcagtggcaatatacagattaacatgaatgaatcttaaaaatacatttaataaaaaattaagactaaaaagaatctatacagtaggatactatttctacaaag

SEQ ID NO: 363078 - DNA, 611 bp, Homo sapiens
catttcaccttgtaaacagatgatgtaaactcagggtaacaataaacacggtacaatactgtaaatgcattttctcttccttatgactttcttaatattttcttttttctagcttactttattgtaagaatacagcatatatacatataacatgcaaaatatgtattaattgaaatgtttatgttatgagtaaggcttcttgtcaaaagtagggtattattagtagttaaatttggagaaagtcaaacattatacatgaatttttgatggcacagggggctggtacctctaaaccctgagttgttcaagggtcaactgtacacctattttacaacatagcaactatactcccaggtatacactacagagaaacttttacatgtgtgtaycaccagaagacattgagaataatgtttattgaagcactatttataatagcaaaattggaaacaacacaaatggctactgacagaaaaatgggtaaatccacccaaaggaatactatatagcagtggcaatatacagattaacatgaatgaatcttaaaaatacatttaataaaaaattaagactaaaaagaatctatacagtaggatactatttctacaaag

SEQ ID NO: 363079 - DNA, 611 bp, Homo sapiens
catttcaccttgtaaacagatgatgtaaactcagggtaacaataaacacggtacaatactgtaaatgcattttctcttccttatgactttcttaatattttcttttttctagcttactttattgtaagaatacagcatatatacatataacatgcaaaatatgtattaattgaaatgtttatgttatgagtaaggcttcttgtcaaaagtagggtattattagtagttaaatttggagaaagtcaaacattatacatgaatttttgatggcacagggggctggtacctctaaaccctgagttgttcaagggtcaactgtacacctattttacaacatagcaactatactcccaggtatacactacagagaaacttttacatgtgtgtatcaccagaagacattgagaataatgtttattgaagcactatttataatagcaaaattggaaacaacacaaatggctactgacagaaaaatgggtaaatccacccaaaggaatactatatagcagtggcaatatacagattaacatgaatgartcttaaaaatacatttaataaaaaattaagactaaaaagaatctatacagtaggatactatttctacaaag

SEQ ID NO: 363080 - DNA, 578 bp, Homo sapiens
agaaggaacaaccaagaatacaccgcaaagttctgtcttaaagaagtaagtaagtgctggtccacttcagtttgccattggctccatcttagtgactcccatagagggttaggcttccagcttgaaggtggagtcaaatcaaagcctgaggtgaaggtggggtttgtgcatgtgtatgtactggaaatggaaaacatgtacaatagataaattgtttttatattacaaacaccagaaagtaaagcaaaatgcaacagagtccctgggctgataggaacaagacaaagaggagtaagaaaaatgtgtaaaaggagtaagaaaaataatgaaacagctttatatgatgttctagttgtgaaagatggtgtaggttataattkctgtaacctctgacgtgattcattttctttctcttagttgctttttctattaggattcctgaaagaggcagtctttagaaggcagtcatgagtaagctgatgtgagaacatatgtatataaaagccagtagttcacactgatttggctatttctctgcaggcaggcagaggagagagtctaatgctaaccttaagagt

SEQ ID NO: 363081 - DNA, 529 bp, Homo sapiens
tactttcaagtgatattactccacttcatatagagtgtaaaaaccttgcaatagtatacatccatttgtttcgtcctaacttttatgcttttatactaaattttatgctgtcatgcagtatgcttttaattaggttataactctcatctacattactattattttttgaacaattgtcttttaaagaaatttaagcaagacaaaatttctatatttacccacatagttatcatttcccatgttcttctttctttatatatatcctttttccagctggtcccatcttccttccgcctgaaggacttcctgtaatatttcttgtagtgcaggtctgcagctgatgaattctttcagcttttataattcttaaawagtctatattctacctttgtttttgttttttgttttgctggatatagaattctggtttagcaggattttttttacttcttcttttctttcttaatttaaagctgctgctggtccactatcttctcacttgcatttttttctgaaaggacagctgctg

SEQ ID NO: 363082 - DNA, 565 bp, Homo sapiens
agaatgagctttgagcaggaaacaaggagcccttgggatttatgccttagtataatagaaaccatgaaggattatcattccaaattttattaagcatgtttataatttttttcttttcgatattttggccaaagaaaaacytgatctatcatcttcatctcttttgatgaagaagtagcctacattccttccaggctcaattttattaaacttcagcactttccttctctcctctgtggagtcgcatctgttaggacccagtggcaagcatcttcacaagccagttttctgccaaatgcagatgggagtctcctggccatggggtctgcatttactgatctgattctatcatccaggggggttcttcttgttgtcagagtggaactgtagcctcttcttctgctgcttggaatgaaaggttatggtatgaaaagagtctgtcaatgggaataaattatttgtgaaatcagactttagcattttaacttctgagcatcttgctggattggattgctgaaaaatgacagcatctctgagtcgtggaatgaaaggcatatcaaagtgc

SEQ ID NO: 363083 - DNA, 565 bp, Homo sapiens
agaatgagctttgagcaggaaacaaggagcccttgggatttatgccttagtataatagaaaccatgaaggattatcattccaaattttattaagcatgtttataatttttttcttttcgatattttggccaaagaaaaacctgatctatcatcttcatctcttttgatgaagaagtagcctacattccttccaggctcaattttattaaacttcagcactttccttctctcctctgtggagtcgcatctgttaggacccagtggcaagcatcttcacaagccagttttctgccaaatgcagatgggagtctcctsgccatggggtctgcatttactgatctgattctatcatccaggggggttcttcttgttgtcagagtggaactgtagcctcttcttctgctgcttggaatgaaaggttatggtatgaaaagagtctgtcaatgggaataaattatttgtgaaatcagactttagcattttaacttctgagcatcttgctggattggattgctgaaaaatgacagcatctctgagtcgtggaatgaaaggcatatcaaagtgc

SEQ ID NO: 363084 - DNA, 570 bp, Homo sapiens
tcacacatggagggtgaaggagtcagaagcaacactgcaatttgccttcactgtacctccctctacctccaagtccctatgtatctacaccttccttctcctcctctcctcctcatcttatctacctgtttgctctgccccagttgtccccactctctctctccctcactctattgtctctcattctttctctattgaggaataaattacagatcttatatggggaacttgatgagctttgacataggcatgcatcctcattaccaccacccagccatgacatggcatccctggcacctagaaggctccactgtggattttcccagctagttgcctctttgggggcgaccattattttggcctctatcatcataggttatttgtagctatttttaaacttcgtataaatgcaatcgtgcaatagmaactcttttgtgtttaaactattttagttttgtacttcttttactcagcatcatgtctttgtgattcatccatgttattcataaaatatcattattttgttttttctttgctgtgtaacatttgttgtatgaatgaatatgtcat

SEQ ID NO: 363085 - DNA, 364 bp, Homo sapiens
cgggcttttctgttagacaagaaacgtttctggagctgctttaaaaggaacaaaaactttccaaggactccttttaccctttttatttgcctaaaataattttttataacttttatacactaatattacctcctttcttccctcacctgggaatcatcccacccccgctgcttgtcgttcgagcctcttactgcatttacccctctccacctcccattatagttccttggaagtatgtcmcactttgtacctggcctggagtctctgacagtgtaacctgtgtttaagttgtccctgatttatcccagcacctagcacagtgatggcactgagaagatgttattaaatgaccacttcctcactt

SEQ ID NO: 363086 - DNA, 566 bp, Homo sapiens
aggtgggtatgatgtcatttttggatgccaaacactaaattttgttaccatagaataaccctgtagaactctgcccagcagccatggaaatcatgtcctgtaggggaacacagccttctttgtaacacctatgtgaaggcattttcattccctccgtgggccatccttaagagactggctgtgaattaccctctcctttccaatgaacactaccaaaagggcaacattctcagtttgtccagaacaaacatttcggaagaagggttagtttaacgacttcttagtttcaccttttaatccagaaatattttttattccatgatctgaatatcaaccttggtttttatcgtcaagagagaaaagaaaaggtgataaaaatctgtttgagacacctccaagatgagacttgycattaggaatccctgacatttctgggaggaaaaataaagatgattaagcttttacaaatataaagagactttattttttagagtagttttaggttcacagcacttttgagcagaaagtagagttcctacatattccctaaacccctcaccacacac

SEQ ID NO: 363087 - DNA, 663 bp, Homo sapiens
gcatagttttgtggttaaatgtgggtgttggcctcacagagatttggattaaagttctagttttctcacttattagttgagtaactttgagaaaattatataatctttaaagcctcagtttataaaacaagagttataattttaccttcctcattgaattgctttgggaataaaatgagatcttgtgtgtagagggattggcacaaagtaaaaacttaatagatkgtagctcttatcattatttggctttgctcactttggcattagaatttgggcaataattgtgaggcaaagtccacctaagtaaagcaactataactatccctgaagtggttctttaatttaaggacgttatgaagctgacaaaaattttgttgaaaattgttaatgtttaaaagatgcaccgtctccacttgcccctcaccaaggaacaaacaacccctccaaaaactggttttaggacagcctggattgccagtttgggggacatgctggcagatcccactttgtctcaggccatgtatcattaggatgtctttgcctaatatcggttttaaatactgattccagaaagttcttagactttgagtttaggtttgttaaacacgcaatgctttaagtactaaggtttatttattgatttatttatttcttagagacagg

SEQ ID NO: 363088 - DNA, 599 bp, Homo sapiens
catctcccatcctcctcagaacatcaaagtcatcttcatcttttcttctacccctagataatgtaaataccaaagcaaagttcttttgttcttcttccccaggaatgttcaggccaggaggcctcattataagtctggaaaaaaagcaactgttacatgagaccttgaaaaatattatctttagaagtcaatcactcttgggttttttgtacattgtgagtacttgtttagttaacacttactggaaattaaaattaaacctgatagcataattgtgatatataaatcacaaacactttggaattctctggtatttgtatttgggatgagttttttgcagccttgtttatttaccatgtagtaaacaagaaatgcttcttaaattttttttaacctaaacatgtgaaaaatkgtccacggatgcatttggcaaccaagaggttattgtgttgtttgaccctcagaaagagatgtttgtcactcttggtatctttcccttgaggaatcatctcttgcaatcaagaagagactcagctcttgaaaagggccagggagaaatcagatagcatctcattccatgccgtaagaacaaggactca

SEQ ID NO: 363089 - DNA, 473 bp, Homo sapiens
tagttcctctagtcagaggacaggtgcatagcttagagtagaaggaactagctctgtatttttgtagtgcagaggcctagacttggcaacttcacacttcatctcagaagcagcaagtggcggagtcccctttcctaccggggtggatgtatgctccactggggagtgaggattctggtcttcgttcccagcagacagcttcggtttaccacctaaagtggtaatggcttaggctagtaagagggattatgctcttagtttttctaccctgagatttaaaaagctaaagtcaaagaaaaaagaargcagctgcccaaagtcatccaagtgaaaatgatgatgaagaggaggagcaaaaatgccatttttaccaactttgctaatgtgaggaaactgatgtgcaaatactattcctaatcctcataaccaacctatgaagtacatgttatcactcttctatggttgagaaaact

SEQ ID NO: 363090 - DNA, 473 bp, Homo sapiens
tagttcctctagtcagaggacaggtgcatagcttagagtagaaggaactagctctgtatttttgtagtgcagaggcctagacttggcaacttcacacttcatctcagaagcagcaagtggcggagtcccctttcctaccggggtggatgtatgctccactggggagtgaggattctggtcttcgttcccagcagacagcttcggtttaccacctaaagtggtaatggcttaggctagtaagagggattatgctcttagtttttctaccctgagatttaaaaagctaaagtcaaagaaaaaagaaggcagctgcccaaagtcatccaagtgaaaatgatgatgaagaggaggagcaaaaatrccatttttaccaactttgctaatgtgaggaaactgatgtgcaaatactattcctaatcctcataaccaacctatgaagtacatgttatcactcttctatggttgagaaaact

SEQ ID NO: 363091 - DNA, 527 bp, Homo sapiens
tagtaagagggattatgctcttagtttttctaccctgagatttaaaaagctaaagtcaaagaaaaaagaaggcagctgcccaaagtcatccaagtgaaaatgatgatgaagaggaggagcaaaaatgccatttttaccaactttgctaatgtgaggaaactgatgtgcaaatactattcctaatcctcataaccaacctatgaagtacatgttatcactcttctatggttgagaaaactgagtctcagaaaaatygattgatttgatcctagtcacacagacaaagtttctagtggttgagatcagacttgaactcatatctatttaattccaaagtcttcaggcctcccattttggaatattttttctccccaccctgttcccctgcctttataataataagcaagatagctaagccaatctgattgtgcagcagccagtctctcttccatggagctccagactacattatccctatgttccttactagttagtgcagcattttttataagcttctgtttttgttg

SEQ ID NO: 363092 - DNA, 499 bp, Homo sapiens
ataccattacattttatgaatgtgacataatacaaataggcgttgtccctctattgttggaaatttagattgtttctaggttttacttttctattgtgtatatttaaggtgtacaacatgatgttttgatatactacatagtaaaatggttatcatagttaagcaaattagcatatcctcatctcatatagttacttactttttctsgtgctaagaagcacctaaaatttactctgttagcaaattttcagtatacacttcaatattattaactacagtcctcatgctttgcattagatctctagactttttcatcctacctaacttcaactttgtacctcatgtcctcccctttactcctggtaaccaccaatctactctttgttaccatgtgtccaactctttttttaaagattccacatatgaatgagatcatacagtatttgtctttctgtgtctggcttatttcacttaccgtaatgtcgtccaggttcatcca

SEQ ID NO: 363093 - DNA, 601 bp, Homo sapiens
tcaggtcctttgcgcattttttaattaggtcttttttttttttttttttttgctattgaggtgcacgggctccttatatattttggatattaacccctgaacagatagatacatgatttataaatattttttcccaattcataggttgctttttaatgtggttgtttcmtatgctgtaagaaacttttagtttgatgtagccccacttgtttatttttgcttttgttgtctgagtttttggtatgatgttcaaaaaaccattgctgaagccaatgtcaaggagcttttcctttatgttttcttctaggacttttatgatatcaggtcttacatttacatcttcaatccattttgagccgacttttgagtatgctataagacaaggatctaatttcatttcattcttttgcatatgaagatccagttttcccagcaccatttattgaagagactatcctgtcccaaggggtcttcttgatgcccttgtcaaaaattagttgaccatatttgcctgaatttattctgagctccctattctgttcctagcacccttgttttttcgaccaactacatatgggcttccatggtactgcatctcttt

SEQ ID NO: 363094 - DNA, 525 bp, Homo sapiens
cacctgaaatgttgaaaggcatgtgtggcatggattagcagtttgcctgagaaaggcgggtgcttgcaaagtttgggatgggcaggtcaaccacgcatttatgtttcccaggccaaatgtggactctaaggaaggaagctggtggtggatcatctctagagggatcttgcacaagaaggcctcctggaagagtgaggtgaccccaacagagaatcaacaagaagccagagactggggctttgcmgggggcaattgcagccaggcgaaggaggcattgcctcaaaggaatcttaggtgggaaatcctcagtgctggggggcttccaaggaacccagaaggagaatgagctttcaggcatgcagcatagagaagcccctaatgctaaactgtgatgacacatttgcccttttcctctaattccttcaaattcctcactccccacaccccatccggccccgtaggagaaaacagtacctagaagtggacaaaatatggagaggaagggagaagaaaatgaccatgtcc

SEQ ID NO: 363095 - DNA, 479 bp, Homo sapiens
acatggttcaaaaatgatgtcatattataatagctgtaggagaaaggcaggtctacccagaatgaagcaaatactaagattacttcttgggttctctggagaaagatcatggccatatgtcaagaatctgtcattaaagagtcaacacatgacaagtacacagaagatggggggatgatacttgggaatagaaacccaggctgaaaactcagtgtgatcaatgtggggccaagtgtccattttgtaatagatgatcaattatgtcatgatctttagtggacattttgtgggttctcatggtgtccttagaaccatcagaacatacaagtagtgtttcaaataataagcgtttccatcacctgagtggaatttcttacactctcataaaatatgatcaggttgccttctcttaaaagattatyctccacagaatagatattttttgtagtcacagggcccaaattttctaacagagcctg

SEQ ID NO: 363096 - DNA, 613 bp, Homo sapiens
caaaaattgacggaaaatggtgcagtgtacatttaacaatacagctaggtgacacaagaaagacagcaaattggctacatagttcaattgaacgctaactatgggaaaattatatgttataataatagctaatatgctttttacacattaccactaaccctctctgcaaattagttgtcttttgtccccttgagagaagagaaggcctaagtttacagtagttacttgacttatccaaatgataaagtcaggttggtaaatgattgagtcaggctaggagccaggtcttttgactccaaaatccacaatatttccaccacaccgcctcccttaatacaagactgaactccttggcatctgctatcagtgtcccccaccccactctccacctctccatcccttgtagaatcatctaggcccaactctgttccagaatcagaccagatacccatatttaggtaatatgcttaaacacatacacacacagaagcaagracatcagatgagttgctatattgaggtggtgagatcatttgcacttcacttaaaacttttaatttttataaaagtctaaaatggacttaatcatatcaaaacttaaaacttaaaaaaa

SEQ ID NO: 363097 - DNA, 505 bp, Homo sapiens
gtttccaaacggccccatcaaaggggatgttcaactcggtgacttgaatgcaatcatcacaaagcagcttctgagaatgcttccatgtagctttgatgagaagatatttccttttccaccccaggcctcgaagccctccaaatgtccccttgccgatgctagaaagagggggtttcaaagctgctctatcaaamggaaagtacaactctgtgagttgaatgcaaacatcacaaggaagttcctgagcatgcttccgtttagcttttacgggaagattatcccttttccatcgaaatgttcaaataggtccacatatccgcttgcagattccaccgaaagagtgtttccaaactgctgcatcaaaaggaatcctcagctccgtgagttgaatgcaatcatcaccaagaagtttctgacaatgcttctctctagtttttatgtgaagatatttccttttccacctaaggcctgaaagcgctccaaatgtccacttggaggctctacg

SEQ ID NO: 363098 - DNA, 505 bp, Homo sapiens
gtttccaaacggccccatcaaaggggatgttcaactcggtgacttgaatgcaatcatcacaaagcagcttctgagaatgcttccatgtagctttgatgagaagatatttccttttccaccccaggcctcgaagccctccaaatgtccccttgccgatgctagaaagagggggtttcaaagctgctctatcaaaaggaaagtacaactctgtgagttgaatgcaaacatcacaaggaagttcctgagcatgmttccgtttagcttttacgggaagattatcccttttccatcgaaatgttcaaataggtccacatatccgcttgcagattccaccgaaagagtgtttccaaactgctgcatcaaaaggaatcctcagctccgtgagttgaatgcaatcatcaccaagaagtttctgacaatgcttctctctagtttttatgtgaagatatttccttttccacctaaggcctgaaagcgctccaaatgtccacttggaggctctacg

SEQ ID NO: 363099 - DNA, 505 bp, Homo sapiens
gtttccaaacggccccatcaaaggggatgttcaactcggtgacttgaatgcaatcatcacaaagcagcttctgagaatgcttccatgtagctttgatgagaagatatttccttttccaccccaggcctcgaagccctccaaatgtccccttgccgatgctagaaagagggggtttcaaagctgctctatcaaaaggaaagtacaactctgtgagttgaatgcaaacatcacaaggaagttcctgagcatgcttccgtttagcttttacgggaagattatcccttttccatcgaaatgttcaaakaggtccacatatccgcttgcagattccaccgaaagagtgtttccaaactgctgcatcaaaaggaatcctcagctccgtgagttgaatgcaatcatcaccaagaagtttctgacaatgcttctctctagtttttatgtgaagatatttccttttccacctaaggcctgaaagcgctccaaatgtccacttggaggctctacg

SEQ ID NO: 363100 - DNA, 505 bp, Homo sapiens
gtttccaaacggccccatcaaaggggatgttcaactcggtgacttgaatgcaatcatcacaaagcagcttctgagaatgcttccatgtagctttgatgagaagatatttccttttccaccccaggcctcgaagccctccaaatgtccccttgccgatgctagaaagagggggtttcaaagctgctctatcaaaaggaaagtacaactctgtgagttgaatgcaaacatcacaaggaagttcctgagcatgcttccgtttagcttttacgggaagattatcccttttccatcgaaatgttcaaatagktccacatatccgcttgcagattccaccgaaagagtgtttccaaactgctgcatcaaaaggaatcctcagctccgtgagttgaatgcaatcatcaccaagaagtttctgacaatgcttctctctagtttttatgtgaagatatttccttttccacctaaggcctgaaagcgctccaaatgtccacttggaggctctacg

SEQ ID NO: 363101 - DNA, 556 bp, Homo sapiens
agaacttaagtgagttccttcattatttgcatttgtttgtttagttataagcagcagaagactctggttaacttaaccaaaaataaataaataaataaagtgagatggaagawaagaagatattggagggattctaagtggctcatgaaatcaaagaacggctgactagtttaacaaatgaggcctctgaaaggactgcaaagaaggcagccatggagatttcagtagcaggactcatgaatggtctctttaggatgcttctaaggaatatattcactgcaaacattttccattcttgtgtcaccccaataaaaatttccatccccaggaaagataatctgattggaataggtccggtcacaggggaagatcttgctcaggctataggtgtggcacgtgggatgaaggaatgaagcaatcctaaaagaaaaggcaagaaagagaaatggatactgggcaggcaagaacggcagctgcccactcgatacccagtgtcttctgcagcagatccccagcatggctgtcccatccctgtttaacacaccagccagatcca

SEQ ID NO: 363102 - DNA, 548 bp, Homo sapiens
acctgatcttaccagatatgagggagaggctttgctcattgccatttctgttcttgtattccagaagcaactttgctttaagctgctactctaaggcagccttgggtttcccatacacacctatctttcccatatctccctgtttagagattcaccaatttgcccagttggtgtcagaaaattcatagaagcaagcaggttaggacaaggagaaggtcaacactaccaggagcaataaggtgtgtaaatcagttgccccagtgctgtgaatctagaacttaagtgagttccttcattatttgcatttgtttgtttagttataagcagcagaagactctggttaacttaaccaaaaataaataaataaataaagtgagatggaagaaaagaagatattggagggattctaagtggctcatgaaatcaaagaayggctgactagtttaacaaatgaggcctctgaaaggactgcaaagaaggcagccatggagatttcagtagcaggactcatgaatggtctctttaggatgcttctaaggaatatattc

SEQ ID NO: 363103 - DNA, 601 bp, Homo sapiens
cttgcctactgcatgtgaaaagccttttttccttaacattgatatagtgagccagccttagttcagcctcagaattatttgtctaggcataaagatgaaaagcctcctttttgagcaagcttgcttatcactgctcagagactctctcaaactcaggaggagccaagcacagatccccgtcattaaatcagaatcctctctgtgcagagcaaatggatgtttcagttctgtcttcctgagggatttgtagaagcatcccagaaaggagcagaagtactattccttttcccagaagagggagagagagatgctagagaaaagcctccattaacctaggcagtttaacattccttttctttcttttttatcgttatatttcccatttaagttcatttgtgataaactagaaactacaaatgggcaaaaaagaaaatcwctgttaacatttcttgaatattcctcaaagcctttatatataaaaccaaatgggagattacactaacctcttatttatattttaaattttctcacttaatgatgcatgcaatgaaagtgtcataatatatttaactaattctcaattggacagcttggttatttc

SEQ ID NO: 363104 - DNA, 569 bp, Homo sapiens
aatttttaccacctgagtaatattgttttaaatgacagcttcttattagctctgaacaccttagcaataatgtcaagagtggaaggagtactggtttgggagtctgggttgtagtcctacctccactcactactttcacatccttgggctaatcgctttatctgtgtgggctcacttttctcatctgtgaaagaggttattggaagagaggaattctaaatgtccctttgaaggccataagtcttgtctctgtgataacattgtatcaacacttcaagttaatctgaggttctggctccaactgccacctccacaacccagtgacaaacaacactgatttatcttaaaagttgaaaactaaaaggtccataatatrcttttagaaactagaagatagaacaaaaactctgtaaaacattgctaggatgtagatttctccagaagtgtattaatgaggtgagtaatatattaatacattaactatggtaactattgtatagattagtcataaatattttgttttaaaaaggtctgccactccagttttgctgagctaaagtaaacgaaga

SEQ ID NO: 363105 - DNA, 561 bp, Homo sapiens
gcacaccaattgtgcctcttaatcagtgtcttggtctgtcaccaagattctatcctaagcatagcatccctgtggtttggggactcattcgagtcttcttcattgcagctcaggagtcagacaaacacagggtcaaatgctggctctgtcacttattagtaagattgtaactttgtaaatatatttctgtatatagatataggtgcacaggaaaaaaaaacactgtaaatcattaaaggagggagcattacccttctgggaatcaaggtggagatggcatctgtaatagtgatcaaaccctagggagaagataatcccatcctaacaacagcagctgacattcaatgagcacttgttacaccctgcatgtgtctacacttcaatacactagcttcaggcctcctgctgtcgcaccctaaagaayacattattaacctattttactaatgaggaattggggctcaggggacttagatactttctttaataaccctacacagctctgaagtaaaggagttaggatttgaatctaaatcagccagatcctagaacatgaattct

SEQ ID NO: 363106 - DNA, 528 bp, Homo sapiens
tctatatctgcctctttcttggtttattcctttgttttgatgaagtacctttgagaaggaagtacataggaggtaagttttttgagaatttggattctgaaaatgtctttgatttacccaarggggattccatttatctcagatattcaacatagaatcctacgttgaaatttatttttcttcagaatttttaaggaattgctcccatgccttctagcttccagtgttgagaaggctgatgccattctgattcttgatcctttgtataacatctttttttctgtttggaaacttttagaatcttttctctcctattgccttaggttgggttttctagaaataatctgagacagaaatttgagtgcatgtgattaattgaggcattaatcttgggagagaagataagctaaggaagcaccctgggtctagggaatgagctaaggatgcggtctccactggagcttccatctgatccagtggaatgccctggagcaagagttgaaccacagaattcgtaccctttttgag

SEQ ID NO: 363107 - DNA, 549 bp, Homo sapiens
tttctgagatcttatttctaatttctaagacctcttctttgctctgaatattctttatgttaatagttttctgcccatttcatggttgcaatttcttcttttctgataatagtagttcccccctacccctagtgtttcttctcctttcatagtctgtgtttcctctaacttgytttgtctctatttttttatattgaggcgttcccctactatgtctatttcactgcatgatcatatttgatagtgggacactggaacacagattggaaactctggccggtggggtcattgactgtgaacttcatggtggggtgagctggataggctattttctgggggaactctaagagtgttaggtcttttcttgggaattgatcagggtctacagagaagcctttactagtgttttgcatgcaggatataaatctgattttcaatgttttgagagccaagtagggggagatgactggttgagtttcaacattcagtaaacattcattttatctccgtatttttattacatcatctccatcctcagctgtgactgac

SEQ ID NO: 363108 - DNA, 468 bp, Homo sapiens
aaaattttgttgctattatctcctcttgaaaattctttatttttatatgtttatgccttttttcatccttttactattatttcagtggaatttaaggaggcagtaaacattgaggcatgtgtttagtctgatatctttaataaaaatcctcaatagaatcttctaagctccttaaaaaattctcagcctcttattactcatttttactgkgctgggtctgccttgctcattggtaaggactgccctcatcacctacatgctctttctagtatgtacctcccactgggtatctagcaataatttctttgctaaacatttacacaacattattcactcaacattgtatttgatcctcaaagagcatatctagttggaggagaaaaaacacacagcacaacaaagggttattccaatgtgttaaagaataaaaaactcacagattcgtagtacccccaatttttgaatagt

SEQ ID NO: 363109 - DNA, 592 bp, Homo sapiens
tatattgtgggatattatctttttcgccattggtcccaatgaactcccatgagtacattttcagaatgcacaaaaacactgtttccaaactactaatccaaagtaaggtttaaatctgtgagatgagcgcacacataacaaagcagtttctcagaaagctttcttcttgttttcatcttaagatgttttgtatttcaccataggctgcaacgctctccaaaatatccctttgaagattctacaaaaatagagtttttaaattgctgaatgaagagaaaggtttaactctgtgagatgaatgcacacatcamaaagcggtttctcagatagcttccttctaattattctcctgtgatatttccttttttgtcattggcctcaatgacctcccaaatgtccattcacagaatggacaaaaaccatgttttcaaacctgaatccaaagaaaaaatacctctgtgagataaatgcacacatcacagtgcagtttctcataatgcttctttctagtttttatctgaagatgtttcctttctcaccttaggtctcaatgctctccaaaatatccctttgcagagtctacaaagacaca

SEQ ID NO: 363110 - DNA, 568 bp, Homo sapiens
tccctttgcagagtctacaaagacacattttccaagctgctgaatccaaagaaagttttatctctgtgacataaaggcacacatcacaaagctgtttctcagaaagctccttttcagtttttatctgaaaatgtttcctttttacaccataggccacaatgctctccgacatatcccattatggattccacaaaaacattgtttccaaactgctgaatgaaaagaaatgtataactctgtgaaatgaatgcacacatcaaaagtggcttttcagttagcttccttctaggtttttgtctgggatgttcactttttcacctttggccccaatgagtttgcaaatgtccatctgcagaatggacaaaaaccctctttccaaacycttgaatccaaagaaagttttatctctgtgagatgaatgcacacatcacaaagcagtttctcagaaagattctttccatttttatctgaagatatttcctttcttcacattaatctctgaaatattactttgcagattctaaaaaaaaattgtttttccaaactgctgaatgaaaagaaatgttta

SEQ ID NO: 363111 - DNA, 605 bp, Homo sapiens
gtttaagtctgtgagatgaatgcaaacatcacaaagcaatttctcagaaaacttctttctagtttttatctgaagatatttcctttttcaccataggcctcaattctctcctaaatatccctttgcagattctacaaaaacagtgtttccagacgctgaaggaaaagaaaggtttaactctgttagatgaatgcacacatcacatagcattttctcagatagcttctgcctacattttattctgggatattcactttttcaccattggcctgaatgtgctcccaaatgtctattctcagaatggacaaaagcagtgtttccaaactgctgaatccaaaggaaggttaaactagtgagatgattgcacacataacaaagcagtttcccagaaagcttctttctagtttctattgatagatgtttcctttttcaccataggccacaatgctctccaaattttccctttgcagtttctacaaaaacagtgtttccaaactgctgaattaaagagacaaataactctgttagatgaatgcacacatyccatagcagtttctcagatagcttccaactactttttatcctaggatattcactttttcccc

SEQ ID NO: 363112 - DNA, 515 bp, Homo sapiens
gaattaaaggacaggtttaattctgcaagaagaatgcaagcataacaaagaggtttctcagaaagcatccctgaagtttttatttgaagatatttcattttctaccataggtctcagtgctctctgaattatccctttgcagattctacaaaaacagtgtttccaaactgctgaatgaaaagaaagttttaactctgtgaaaggaatgctcacaacacaaagcgttttttttcagatagcttccttgtagttttaatcctgggatattccctatttcaccattggtgtcagtgamctcccaaatgtccattcacagaatggacaaaaacagtgtttccaatctgctgaatccgaagaaaagtttaattctgttagaacaatgcacacatctcaatttcgtttttcagagagcttccttcttgtttttatcctgggatatttgctttttccccattgtcctcaatgagttctcaaatgtccatttgcagagtggacaaaaaaagtgtttgcacact

SEQ ID NO: 363113 - DNA, 517 bp, Homo sapiens
tgctacaaaaacagtgtttccaaactactgagtgaaaagaaaggcttaacacagcgagatgaatgcacacattacaaagcggtttctcakattgcttccttctaattcttatcctgggatatttgctttttcacattggtctcagtaagttctctaatatccattcacagaatggacaaaaacagtgcttccaaatggctgaatccaaagaaatgttttactctgtgagatgaatgcacacatcacaaagcagtttctcagaaaccatctttctactttgtatctgaagatgttacctttttcaccacagggctccgtatgctcccaaatatccctttgcagattctacaaaaaccatgtttccaaactgctgaaagacaagatagtttatctctgtgagatgattgcaagcatgacaatatggcttctcagagagcttccttctattttttatcctgggatgttcatctttttgctattggccccagggagcttccaaatgtccttttgcagaatg

SEQ ID NO: 363114 - DNA, 600 bp, Homo sapiens
agaatggacaaaaaaagtgtttccaaactactgaatccatagaaagttttaactctgcgaaatgaatgcacccatcacaatgtcgtttctcagagtgattcttctagtttttatcctgggatattcgctttttcaaaatttgtctcaatgagctcccaactgtccattcacagaatggacaaaaacagtgtttccaagttgtcaaatccaaagaaaagtttaactgtgagrtgaatgcagtcatcacaaagcagtttctcagaaagcatctttccagatttatctgaagatgtttctttttcacaattggcctcaatgtgctcccaaaaatccctttgccgattctatgaaaacagtgtttccatactgctgaatgaacaaagagacttaagtctgcgagatgaatgtccacatcacaaagtggtttctgagatagattccctctagtttttatcctggtatattcactttttcttcattggcctcaattagctcccaaatatccattcgcagaatgtacaaaacagtgtttccaaactgcaaaatccaaagacaagtttaactgtaagataaattcatacatcacaaagcattttctca

SEQ ID NO: 363115 - DNA, 600 bp, Homo sapiens
agaatggacaaaaaaagtgtttccaaactactgaatccatagaaagttttaactctgcgaaatgaatgcacccatcacaatgtcgtttctcagagtgattcttctagtttttatcctgggatattcgctttttcaaaatttgtctcaatgagctcccaactgtccattcacagaatggacaaaaacagtgtttccaagttgtcaaatccaaagaaaagtttaactgtgagatgaatgcagtcatcacaaagcagtttctcagaaagcatctttccagatttatctgaagatgtttctttttcacaattggcctcaatgtgctcccaaaaatccctttgccgattctatgaaaacagtgtttccatactgctgaatgaacaaagagacttaagtctgcgagatgaatgtccacatcacaaagtggtttctgagatagattccctcyagtttttatcctggtatattcactttttcttcattggcctcaattagctcccaaatatccattcgcagaatgtacaaaacagtgtttccaaactgcaaaatccaaagacaagtttaactgtaagataaattcatacatcacaaagcattttctca

SEQ ID NO: 363116 - DNA, 481 bp, Homo sapiens
atccctttacaaattctacaaaaacagtgtttaaaaactggtgaaagaaaagaaaggtttaagtatgtgagatgaatgcacacatcaaataacakattctcaggcagcttctatctagcttttatcctaggatattcacttttttgccatttaccacgattaactcccaaatgtccattcacagaatggacaaaaacactctttccaaaccactgaatccaaagaaacgtttaaatctgtgagatgaatgcacacatcacaaagcagtttctcagaaagcttctttctagtttttatctgaagatgtttccttttatactgaaggcctcaatgcactctggaatatccaattgcattttctacaaaacagtgctttcaaactgctgaatgaatgtgaagttttaattctgtcagaagaatgcacacatcacaaagttgtttgtcagattgcttttttctagtttttatcttagtatattcg

SEQ ID NO: 363117 - DNA, 481 bp, Homo sapiens
atccctttacaaattctacaaaaacagtgtttaaaaactggtgaaagaaaagaaaggtttaagtatgtgagatgaatgcacacatcaaataacagattctcaggcagcttctatctagcttttatcctaggatattcacttttttgccatttaccacgattaactcccaaatgtccattcacagaatggacaaaaacactctttccaaaccactgaatccaaagaaacgtttaaatctgtgagatgaatgcacacatcacaaagcagtttctcagaaagcttctttctagtttttatctgaagatgtttccttttatactgaaggcctcaatgcactctggaatatccaattgcattttctacaaaacagtgctttcaaactgctgaatgaatgtgaagttttaattctgtcagaagaatgcacacatcacaaarttgtttgtcagattgcttttttctagtttttatcttagtatattcg

SEQ ID NO: 363118 - DNA, 552 bp, Homo sapiens
tcagagtgtttccttctagtttttatcctgggatattcactttttcaccattggcctccacgacctccaaatatccaatcacagaatggacaaaaagggtgtttccaaactgtagaacccttagaaagggttaattcttggagatgaatacacacatcacaaagcagtttctcagaaatattctttcttgtttttatctgaagatttttcttttttcaacataggcatcaatgtgctccaaaatatcacttcttagactctacaaaaccagtgttcaaaactgttgaatgaaaagaaaggcttaagtctgtgagatgaatgcacacrtcataaagaggtccctcggatagcttccttctagtttttatcctgggatatttgctttttcgccactgttctcaatgagatcccaaatgtccattctcagaacggacaaacacagtgtttccaaacagctgattaaaaagcaaagtttaacactgagaaatgaatgtacacatcacagaatggtttctcagatatcttccttctagttttcatcttgccatatta

SEQ ID NO: 363119 - DNA, 590 bp, Homo sapiens
gaatggacattttggagctcattgaggccaatggtgaaaaacagaatatttcaggttaaaaactagatggacccactctgagaaaactctttgtgaagtgtgcattcatcttgtagacttaaagttttcttttcagtcagcagtttgaaaacaagttttgtcgtatctgggaagggatatttgggatcacattgaggcctaaggtgaaaaatgaaacatctttagataaaaactagaaagaaggtttctgagaaactgcgtcctgatgwgtgcattcatctcaaagagttaaatctttctttggattcatcagtttggaaacacgcttttagtccactctgcggatggtcattttggagctcattgaggacaaaggcgaaaaaacgaatatcccataataaaaacgagaaggatgcaatctgagaaaccagtttgtgagatgtttattcatctcacataattaaacttttctttccaatcaggagtttggaaatgctgtttttgtagaagctgtgaagggatatttgggagtgcattgaggcttatgttgaacaatggaacgtcttctgacaaaaattagaaagaagctt

SEQ ID NO: 363120 - DNA, 590 bp, Homo sapiens
gaatggacattttggagctcattgaggccaatggtgaaaaacagaatatttcaggttaaaaactagatggacccactctgagaaaactctttgtgaagtgtgcattcatcttgtagacttaaagttttcttttcagtcagcagtttgaaaacaagttttgtcgtatctgggaagggatatttgggatcacattgaggcctaaggtgaaaaatgaaacatctttagataaaaactagaaagaaggtttctgagaaactgcgtcctgatgtgtgcattcatctcaaagagttaaatctttctttggattcatcagtttggaaacacgcttttagtccactctgcggatggtcattttggagctcattgaggacaaaggygaaaaaacgaatatcccataataaaaacgagaaggatgcaatctgagaaaccagtttgtgagatgtttattcatctcacataattaaacttttctttccaatcaggagtttggaaatgctgtttttgtagaagctgtgaagggatatttgggagtgcattgaggcttatgttgaacaatggaacgtcttctgacaaaaattagaaagaagctt

SEQ ID NO: 363121 - DNA, 648 bp, Homo sapiens
ctttggggaacatcctttctcttcaatttacaatcataaggagtgggattaatgagcataacccccctatatggaagttagatcttaaatttctctyctttagaaataatgcccagagggaattagtcaaaaataagattccaccccctaagccaaaaaaaaaaaaaaagaaaaaaaaaaaagaaagactcacttgaagccttggatatgctactacagccatcactatggataaaacttctggtcctttggagccctctactcccaatatgaccaatatggtaatacttgaacatttgacccatggcaagtccccatgggatgtcctcttaacactggactggtggcaacccctcttccgggtcccctctctgcagcggagagctttcttcttttgcttattaaactttcgctccaacctcacccttggtgtccacactccttaactttcttggtagtgaaacagagaacttctgggtgatatctccggctattggctatgagacactgctacattgtggtgcattggcaaaactgtaacattttggtgcattggccagaagtggaaacatccaaagggcatcagttttgaatgtcaaggaatccaaagctttgaaagaacagttgtaactacaactggttgtactg

SEQ ID NO: 363122 - DNA, 648 bp, Homo sapiens
ctttggggaacatcctttctcttcaatttacaatcataaggagtgggattaatgagcataacccccctatatggaagttagatcttaaatttctctcctttagaaataatgcccagagggaattagtcaaaaataagattccaccccctaagccaaaaaaaaaaaaaaagaaaaaaaaaaaagaaagactcacttgaagccttggatatgctactacagccatcactatggataaaacttctggtcctttggagccctctactcccaatatgaccaatatggtaatacttgaacatttgacccatggcaagtccccatgggatgtcctcttaacactggactggtggcaacccctcttccgggtcccctctctgcagcggagagctttcttcttttgcttattaaactttcgctccaacctcacccttggtgtccacactccttaactttcttggtagtgaaacagagaacttctgggtgatatctccggctaytggctatgagacactgctacattgtggtgcattggcaaaactgtaacattttggtgcattggccagaagtggaaacatccaaagggcatcagttttgaatgtcaaggaatccaaagctttgaaagaacagttgtaactacaactggttgtactg

SEQ ID NO: 363123 - DNA, 618 bp, Homo sapiens
ctctgtaaatgctatccttgatctttctgtttttggaagtgaagttactctagaaattctggtaatgaacctgaaaaagaaattcccaactttaagctttagtcctttggaagctagyggaagactttccatggaaggatcatttctagctgtcaaagaggctcaaataatctttgcaagtaaaagcaagttctcttttataaaaaaaaaaaaaagacaactttcaccagtgaggggagaaagtagaataaatagagcccccaaaggaatctatagagaggcaataactctttggagtcagtcgggaccttagtacctgagactactagaagtggagaaatacttctgcccaacacagatgtttttctttacctgaaacagaaatgtggattttttgaaaacgcactgaacaaattccatattctgagtcagaagagagtggatggtgaaatgaccacaatttgtctaaaaagtactcaagcccgttctcaaccaaacaatccaaaacatgtaacagagctcattgaggaatggtcacatgctcttcatttagagcttagaaaagagacatgtattttgggggggaaaaaaggaaaacagagagaaaatcattaaatg

SEQ ID NO: 363124 - DNA, 622 bp, Homo sapiens
gtgatagctaacatttattgcacatttgctctttgtcaaaaactctgttaatcagttcagaatggcttacaccaacagaagaatttatttgctggtgtgactgaaacttttcagggtagcttcaggcccaggtgagtgtatcccttggctctgcgtttttccacattggtcaacagttcctggctgactcctatttyttcagtgtccaaaaggaaagagcaccctcctttttagtatttgcagcagaaggtcccctgctaggatcccatttacctagcatggattctgtacccgtacctaaacgagtcatgatcaggagaatgtggtgcttggacagactagtcatattcttcttctggagttgggaggtatatactaggattgagaagagctgagacactatggttgtgattatgtcatttatttctcacaaaaaaccctaggcacattcttttattaacccatgttacagatttaaaaatggaggcttgacaaggtcaggtgacttgctcacagtcatgtagctggtaatgggagagcagggattgaaacaagggaagcttgatttggggaaccacaggtttcactgcctacagtgagcgaaacaattttttttgaacct

SEQ ID NO: 363125 - DNA, 622 bp, Homo sapiens
gtgatagctaacatttattgcacatttgctctttgtcaaaaactctgttaatcagttcagaatggcttacaccaacagaagaatttatttgctggtgtgactgaaacttttcagggtagcttcaggcccaggtgagtgtatcccttggctctgcgtttttccacattggtcaacagttcctggctgactcctatttcttcagtgtccaaaaggaaagagcaccctcctttttagtatttgcagcagaaggtcccctgctaggatcccatttacctagcatggattctgtacccrtacctaaacgagtcatgatcaggagaatgtggtgcttggacagactagtcatattcttcttctggagttgggaggtatatactaggattgagaagagctgagacactatggttgtgattatgtcatttatttctcacaaaaaaccctaggcacattcttttattaacccatgttacagatttaaaaatggaggcttgacaaggtcaggtgacttgctcacagtcatgtagctggtaatgggagagcagggattgaaacaagggaagcttgatttggggaaccacaggtttcactgcctacagtgagcgaaacaattttttttgaacct

SEQ ID NO: 363126 - DNA, 581 bp, Homo sapiens
cagcctcaacctccctgggctctggtgatcctcccacatcagcctcctgagtagctgggactacagatgtgtgccaccatgcctggctaagttttgtattttttttttttgtagagatggggttttgccatgttgcccaggctagtgtcaaacttctgggctcaatcaatctgcctgtcttggcctctcaaagtgctaggattacaggtgtgagccaccatgctcggcctgtttctaattcttaaaaccaccatagcaggtgctttcggcatccctcccactcctttgtccttaccatttcagagcacagtggcttgcttccaactgccagcacctgaatttctctgctgaggactttcttgtgctgctagagtcctactttgccaagcacgggatacaacatatgcacctacaaattattasaacactccacctcccagaagtagccctcagttaactactctcaggaattggtgtataaataccttggctccctcggatttttcctcagatgggaaaattcagaggtacatgcactccactggttcccagagcctccccagtgtgaacaagctctaata

SEQ ID NO: 363127 - DNA, 518 bp, Homo sapiens
tgtagccacatttatatgtaccaagcaaaaaaaaaggaaagaaccatgtgccatgttttcatcaaagaaagtttaagcaaagaataatgtgtgcacaaagaggtaagcttcaattacctggaaaaatcacttaagtgaaacaaatcacttattccttgacaacaytatgtaaatgaaactgtacatggggcggaaaaaatgtttgcattgtaggctctgcaagatgacaaagttacatttcccactcatcatttagtgaaagcatctatcgaatagcatgaacctttgctgacaaactgccaatttttaaataccctttatcagcatcattttcatagcttttctctgagatccaaaaaagaccaaagatcagtttccagtatgcttttccaagtgtaatcaagctcagtgctagaaagtacaatgagaaccactcattatctgaactgtttaaagcagctgaatcattgcaaaaacaatttcttcttcttaatatgtttgaatcaaacttttgacct

SEQ ID NO: 363128 - DNA, 518 bp, Homo sapiens
tgtagccacatttatatgtaccaagcaaaaaaaaaggaaagaaccatgtgccatgttttcatcaaagaaagtttaagcaaagaataatgtgtgcacaaagaggtaagcttcaattacctggaaaaatcacttaagtgaaacaaatcacttattccttgacaacactatgtaaatgaaactgtacatggggcggaaaaaatgtttgcattgtaggctctgcaagatgacaaagttacatttcccactcatcatttagtgaaagcrtctatcgaatagcatgaacctttgctgacaaactgccaatttttaaataccctttatcagcatcattttcatagcttttctctgagatccaaaaaagaccaaagatcagtttccagtatgcttttccaagtgtaatcaagctcagtgctagaaagtacaatgagaaccactcattatctgaactgtttaaagcagctgaatcattgcaaaaacaatttcttcttcttaatatgtttgaatcaaacttttgacct

SEQ ID NO: 363129 - DNA, 518 bp, Homo sapiens
tgtagccacatttatatgtaccaagcaaaaaaaaaggaaagaaccatgtgccatgttttcatcaaagaaagtttaagcaaagaataatgtgtgcacaaagaggtaagcttcaattacctggaaaaatcacttaagtgaaacaaatcacttattccttgacaacactatgtaaatgaaactgtacatggggcggaaaaaatgtttgcattgtaggctctgcaagatgacaaagttacatttcccactcatcatttagtgaaagcatctatcgaatagcatgaacctttgctgacaaactgccaatttttaaataccctttatcagcatcattttcatagcttttctctgagatccaaaaaagaccaaagatcagtttccartatgcttttccaagtgtaatcaagctcagtgctagaaagtacaatgagaaccactcattatctgaactgtttaaagcagctgaatcattgcaaaaacaatttcttcttcttaatatgtttgaatcaaacttttgacct

SEQ ID NO: 363130 - DNA, 499 bp, Homo sapiens
aaagcagctgaatcattgcaaaaacaatttcttcttcttaatrtgtttgaatcaaacttttgacctctagtaaactggatgccccattctttcaggcagtaaaagagcagctagactgggaacctggaggtatataaaacactacactactttttttctcttaaaaatacaaattgaattactttaacatagttggagcaaatgaccatgatatgtcctcaatttaagtcttacagcccaactgggatggcgttctgtgttcccagtctaagggcacatggttttcattagtttgtcaggattctgcatttcaatttgcacatttaaataaatgcagttagttcattcgtgatggccccacatacccttatcttttctgatttactgaataagccacactctcttaatgttttgagatttgtctaaatactaaaaggttatttgatatgacaagttacaacaaataccacttttactgcatgacaaataattatactga

SEQ ID NO: 363131 - DNA, 519 bp, Homo sapiens
ttggtaaccatgtgctgctatcgttaccattagttctactattatttgttgagcctttacatctgcacaagattttgtgtgtgtggtgggggtggcgggccagggcagaagaaacaaaagtctttattgataaatagcttacaatgaaataaataaagcagtggtttgctgaagaataaaaatcagggcagtggctcggtctctccgcccctgcctccggccctaggatacagccctctggctagatacgtcagatgaggagaccrtaatgggcagtccagcctttcacgggcacttgggggtctctgtcttcctagacaggtgtgcaggcaccaccttggacccactgcccttagcaggagaagcagccttggtgtttggcccctgggcagctgcccctttaggagccttggtcttggctaccaccttctggtcgaggaagcaatgccattcttgaccttgctgacagtgggttttgaactcttactcccagctttcattttcctgtggtccccagca

SEQ ID NO: 363132 - DNA, 619 bp, Homo sapiens
aggtttttattgactgccttcccttaccataaaataagctccatacacatcaggggcttttttgactatcgttcattgctgtatcatcagcacctgaacagaattgacacccagtagagattcactaagtacttcttggaattaaatgctgccccttccctctttgcttagctaactcctattaatcactgggacctcagttcagatagcatggcctcaggaaaatctttcctggtgatccaaggcctgttaaatcgcccaatacactctggataatagcataaatctctttctcctcttgacactttcttggttctcattcarggctgactttgtcccccagggaacatttgacaatatctggagaaatgttggtggacacaactggggaggaggagtgcagtggttactactgtcacccagtgggtagaggccagaaatactgtcatacatacgatcatgcacacaagggcctctcaacaacaaggaattatccagccccacgtgtcagtactcctgaagttgagaaaccctaccctaaacagattggcaattttatattcatttgtgtaattctttgcttaatgtctgtctcccctactagactataaaataatga

SEQ ID NO: 363133 - DNA, 619 bp, Homo sapiens
aggtttttattgactgccttcccttaccataaaataagctccatacacatcaggggcttttttgactatcgttcattgctgtatcatcagcacctgaacagaattgacacccagtagagattcactaagtacttcttggaattaaatgctgccccttccctctttgcttagctaactcctattaatcactgggacctcagttcagatagcatggcctcaggaaaatctttcctggtgatccaaggcctgttaaatcgcccaatacactctggataatagcataaatctctttctcctcttgacactttcttggttctcattcagggctgactttgtcccccagggaacatttgacaatatctggagaaatgttggtggacacaactggggaggaggagtgcagtggttactactgtcacccagtgggtagaggccagaaatactgtcatacatacgatcatgcacacragggcctctcaacaacaaggaattatccagccccacgtgtcagtactcctgaagttgagaaaccctaccctaaacagattggcaattttatattcatttgtgtaattctttgcttaatgtctgtctcccctactagactataaaataatga

SEQ ID NO: 363134 - DNA, 571 bp, Homo sapiens
tggtgcacacaaagtgtgaacagcaaacgagctatggcaatctagtgctggagccaggagtgaagcctgctacaggagggacacctactcagcctgggagatatgattctggaggaggcaacagtaagtttgagaatcaaaagataagccagagttagcccagtacaaatatctagaggtagcagggcaatgaagattctcctactccttcctatggaccaaggtggacaacatcctggatgacactttgggaactaaagatagtggaagaataagaagcaaaattgtagtgttgttcaaattgtgagcccttaagcaaatrctcataggctctttcctctctggagccagagacatcattgcagtattttctgggggcaccattttttggaacttgtcccagcatgtgtaccaatgaagaccagtaagctctttgagagctgttagcttgaagggctgggactagctggcaccatgggtttcagtattattagtgtggaatattgccagaggtgagaggtcttaggcagaaataagaagacaaatagattccacctaacctgccactctc

SEQ ID NO: 363135 - DNA, 592 bp, Homo sapiens
atgttcattagggacacaacatccattttyttccccaaatatttttgatccttggttgattgaattcgttcatgtggaacccacagatatggagggccaactgtgtttcactatatttaaaatgagcaggctccatgtatcagctgaatattatgtgaatgaagggagatggatatgtttttaagttttaatttatgtagtcatttaatccatacaattatgtatgacttttccattccctgctttggatagacatggtttcagtgaatattttatttttatctgaattataagaaaagtcataagtgtaacaatcatgttacatacataacaacaacatgtacatgtagcagtagagttgcatacataacataaatgtaacaaagaggaacaatagggactggtgggaactgtggcaaactggagaagtgtgcctgacctaatgggtgcaactgctactcagctgaagccagctgggaaccatgtgggaatgcaggcccactattgccaacagttctgatttttccaggggagccagaaactccaatttttaaaagatttctctggattttgaaatgttgacagccaattc

SEQ ID NO: 363136 - DNA, 615 bp, Homo sapiens
taatgggtgcagcacactaatatggcacatgtattcatatgtaacaatcctgcacgttgtgcacatgtaccctagaacttaaagtataataaaaacaaatagagacataaactttgaatatgcttctccatgccccatcatgcatgcttccatcagggtatatacttcccactttggagatcaccagctaaacagttagtatttgytaccgggcagaccatcccactgcactaccttgagtaaattcacccattacagcctcactgtcctcatctgtaaaatgataacagttactagtatcctggttgttggaggactaaatgcactacatccagtcaaacacttagcccagcacatcagtactcaatacaatgttacatgcgattattgtcataaaaggaatggtcattgtattaaaaccaggaaagagaaaaaaacaaaaattgtccatactcctacaggatcatatacaatcactgtaaaataatattggcatatgtttttttgagaccttcttctaaagcttatacacacacatattttgcataattggatcatactgtacattctgtggtgggtctctttttaatggcagtaaagtataacatcttatag

SEQ ID NO: 363137 - DNA, 615 bp, Homo sapiens
taatgggtgcagcacactaatatggcacatgtattcatatgtaacaatcctgcacgttgtgcacatgtaccctagaacttaaagtataataaaaacaaatagagacataaactttgaatatgcttctccatgccccatcatgcatgcttccatcagggtatatacttcccactttggagatcaccagctaaacagttagtatttgttaccgggcagaccatcccactgcactaccttgagtaaattcacccattrcagcctcactgtcctcatctgtaaaatgataacagttactagtatcctggttgttggaggactaaatgcactacatccagtcaaacacttagcccagcacatcagtactcaatacaatgttacatgcgattattgtcataaaaggaatggtcattgtattaaaaccaggaaagagaaaaaaacaaaaattgtccatactcctacaggatcatatacaatcactgtaaaataatattggcatatgtttttttgagaccttcttctaaagcttatacacacacatattttgcataattggatcatactgtacattctgtggtgggtctctttttaatggcagtaaagtataacatcttatag

SEQ ID NO: 363138 - DNA, 615 bp, Homo sapiens
taatgggtgcagcacactaatatggcacatgtattcatatgtaacaatcctgcacgttgtgcacatgtaccctagaacttaaagtataataaaaacaaatagagacataaactttgaatatgcttctccatgccccatcatgcatgcttccatcagggtatatacttcccactttggagatcaccagctaaacagttagtatttgttaccgggcagaccatcccactgcactaccttgagtaaattcacccattacagcctcactgtcctcatctgtaaaatgataacagttactagtatcctggttgttggaggactaaatgcactacatccagtcaaacacttagcccagcacatcagtactcaatacaatgttacatgcgattattgtcataaaaggaatggtcattgtattaaaaycaggaaagagaaaaaaacaaaaattgtccatactcctacaggatcatatacaatcactgtaaaataatattggcatatgtttttttgagaccttcttctaaagcttatacacacacatattttgcataattggatcatactgtacattctgtggtgggtctctttttaatggcagtaaagtataacatcttatag

SEQ ID NO: 363139 - DNA, 615 bp, Homo sapiens
taatgggtgcagcacactaatatggcacatgtattcatatgtaacaatcctgcacgttgtgcacatgtaccctagaacttaaagtataataaaaacaaatagagacataaactttgaatatgcttctccatgccccatcatgcatgcttccatcagggtatatacttcccactttggagatcaccagctaaacagttagtatttgttaccgggcagaccatcccactgcactaccttgagtaaattcacccattacagcctcactgtcctcatctgtaaaatgataacagttactagtatcctggttgttggaggactaaatgcactacatccagtcaaacacttagcccagcacatcagtactcaatacaatgttacatgcgattattgtcataaaaggaatggtcattgtattaaaaccaggaaagagaaaaaaacaaaaattgtccatactcctacaggatcatatacaatcactgtaaaataatattggcatatgtttttttgagaccttcttctaaagcttatacacacacatattttgcataattggatcatactgtacattctgtggtgggtctctttttaatggcwgtaaagtataacatcttatag

SEQ ID NO: 363140 - DNA, 595 bp, Homo sapiens
tcaatactatttttgtggaacaccaattagcctttaayggagctgttttttgtgacacacacaagcagaatgaacttcttaatggccattcatttttggtttgatttttaaataggcagtatatacagacagtaaattttgagtatccagagttattcagtgaaaggtccatctctcttcaacctttgcctctaaaattctctcttaagaaacaactattgatttcaagttctaagatattttaggcatatgcaaccatgcatgcacgtatgtatgtgtgtatatgtgtaagtttgtgtgtgtgtgtgtgtttcagttttgagtcacagtatatatattgttctgtaccttgtatttttacttaatagatgttagaaatcagtccatatccatatatataaggctgtgtcacttttttaatacctacatagtattttacggtatagatgtgttaaatatgtttaaccagtaccatattgatggatatttagaatatttctaatcttttactgctacaaacagtgctgtagggggtacccttgtacatttttctttgcaccatggtgtttcttgtatcagattttgatttttagaa

SEQ ID NO: 363141 - DNA, 529 bp, Homo sapiens
actttaataccacaaatataccatgtgtctgtttgagttctctatgtatatctgtgttttatacataaaaagagtaagtcctcccccctcactatcaccctacaccaattttcacatctttggagatgatattcccattgaagatgcatgtcttaaagagactcacaacatgaattgagttccgtcagttgtgtctcaccttttgattagtgataatggatataaatctcattgttcagtgcctggcatagagtagatgccaataaattatagctattataataaatgttaataagatacacggagatttaacaggrtaattctatggagcactgagtgtcatcagaagcccagaggcatgcctaccttctatgttttacagtcttgcttccaggtctttatgaagactgttttacaacagaccaaaaacttcagcaattcctctggagatattacttaccagggaaccatattctccaaggaatatagcagcattgctgttcttccttgcaatactaccttgcaaagt

SEQ ID NO: 363142 - DNA, 603 bp, Homo sapiens
aagcattctcatgcagttctgtcatcatgcccagttttcatgcctgaccttttctcatacttcagaacattctgacacttcctctctgcctaacttcaaagcagtgagcatgggagaataatttacattcttatagttgaccaataaatctaaccattttttccttgcagaccaatagagcattttatttacatgtggggtcatttataaatagagtactttattaagctcataaagatttctcagaacaaacaccatttttccaagtatgtttaatgcattcttggggttaasattttgttgagattagatatgtcgccctgatcaactgccataaggacatttactgcattaaattttatcaaatacagatcttcaggttcatggtcccagtagttgtataagcatcactgcagaatctatttattttgcatttcattttttttccctaaggcaaatcctctttaaaaccatgttggataagttttttaaaaatctttttaaactgaaaaagaatttataatttttttaatgttcaggttgcctttgtttaaaatgtgccagccactatgctaggccctgaggatacctaggcaaaacaca

SEQ ID NO: 363143 - DNA, 606 bp, Homo sapiens
ctacatggagcttagagtacagacgggaagcagcaagaagaataccatgcctatataatcacacatgcatgtataattaaaaacacaggatgcagtgggcacatgtggtggccatggaaacacaactctccaactgcagggagcatacctgactgacagccccagctgtcgctcctctagatccttcaggccacccccagccaatggctcccattcctatcagacgcagaacttgtctaacgtgcatcttgggctaagaacacccccactggcatcactgaagtgttcttagagctgagtagagtctgagactcttcctatccattccttcttccttccccttctcctttctcaaggatcagacctgcawttgtggtctgaaggctctccctgcctattcttaccccacttacccctgcactgtatcctgcacaggtgttttccctcgtatgtcccttggacatgcttctcagaggacctggactatatacaacttagaagagaggagtacaacctagtctgagggatcagcgaagacatcctggagggggcaataaatgagatgagtacaagtagaaagcaatgatgctaagaggaggcaatgaa

SEQ ID NO: 363144 - DNA, 540 bp, Homo sapiens
gataaaaggtaagcaaccaatgggtcaaaaaagacatcacaagggaaatttaaaaatatactgagataagtgaaaatcaaaatattacacaccaaaatttatgacatgcagtgaaagcagtcataagaggagagtttgtagctgtaaatgcatatattaaaaaagaagactgatctcatatcaacaacctaactttataactcaaagaactaggaaaataagaacaaattaaatgcaaagctaaccaaaggaaggaaataataaagattagagcagagataaacaaaatagagagtagaaaatttatagaaaaagagtcaatgaaactgagtattttgaaaaaaatcaacaaatttgataagttcttagatgaactaagaaaaaaagakaacactcaaaaaactagaattagaaaggaaagagatgttagaagcaatgttgtagaaataaaagggattataagagaatacaatgaacaattgtataccaacagattggataatgtagaagaaacataagaattcctagaaacacacaacc

SEQ ID NO: 363145 - DNA, 604 bp, Homo sapiens
tgtgttgaacagtcatctttttgctatattcccaaattttcgataacctttcttaacatctctttgctgtgcccatatttctctcagaagcattcacatacttccatacctctcctccctctggagggtagcattgttactgcacattaacccattatttgggggcctttgatagctttggactctttacacatgaggcctttgaaagggcagtatcttaaggatgagatttaatggtcagacaatttaccttgcctttggaaagattcaggtcatatctctgatactaatgctactttctgttaaacatttttaaaaaatccattgacaccaaagtttatacaytaactgacattgttcctgaagccagaatctgtaaatgcatatttcttgttttttcaataatatgcaatatgtacaacatactcccttcattccactttttcctctgtgatggctcgcccaaataccaccctatgtcagattgatttgttcagcccaacaaccttgtgaaaaaaagagcaccagtcacataaatagacatcataaagattaagaaataattgaacagagaaaaaaaaattttaactgaaagtagtgttag

SEQ ID NO: 363146 - DNA, 657 bp, Homo sapiens
gcaagaaaaccatagactcctacagttcttacctgaaattgtgcagtctttcacgaatatatgattctccatttgttttttctatttggttgatttctagagccccmaaatgattgtttttgacaattttgtccaactttatagttgttttttggaaaaaggatttaattgacctccttattcttttataccatctccatttttgtatgcatcttgtctgttgattgcaggttcctcaaaacagaattgtcagagcaagtccttggacactaacaactttttctattgcagattcttacttgaaaacattttattgtctcttgttggttcccaagaaattggttgcgtaaccctatgagagttgcatcttgtccacctcttttactctatccttccttgctttccctgcacaaataaatggctactgactccaagcagaaaagcatggtgggacacttatagaagcttttctaggaaagactgtggagggaaatttaatcacataccactcagcaaaaacacagaataaatctccattcattaattattccttttcctcagttttattaaggtatatgaaatataacaattgtatatgtttaaggtgtatgtatgtatgacatgatgctttgatatcagtaaacattgtgcagttat

SEQ ID NO: 363147 - DNA, 522 bp, Homo sapiens
agaacaatttttttaaatttaactttgcacttgataagaggatattttaatatttcaggctatgtttcataatttcagaaatgccaygccaacgcatcattaacaacacatttctgcccactgactttccatccacaataaataaatatgagttgtagtgattgttgcacagagattcaatgccactaatgtttcaaccaatgaggagctagctatataaaacacactataaactaaatcttagcatccttttaataggcatgtttcagctcaatctttgcctgataattgctgcatttatcaattttccggcaattatacatgataaaaaaatttccagacttttaactctaagtgacttcatttaacattcctgatggcatggataagctaatctgaagaagagggggctatgtggttatcatacattatcacatagcctggtcatgaccaggttttccaattcctatgactatagccaaacaggtatagtccaatccctatgactacagtagccaaaac

SEQ ID NO: 363148 - DNA, 523 bp, Homo sapiens
ctaaatcttagcatccttttaataggcatgtttcagctcaatctttgcctgataattgctgcatttatcaattttccggcaattatacatgataaaaaaatttccagacttttaactctaagtgacttcatttaacattcctgatgkcatggataagctaatctgaagaagagggggctatgtggttatcatacattatcacatagcctggtcatgaccaggttttccaattcctatgactatagccaaacaggtatagtccaatccctatgactacagtagccaaaaccactctgccccatcaattatgctaccctagcaatttttttaagaaaaagcctaagagctagagtggtccctattctaaaaaataaatatttaaagaaaagagattaattttccttgtcatgagggaaagaacagaaaattctcatgatggtcaacaagtttctgtttgccgtagaccccatcacatactgcctgggtgacaccatttacctctccttggcaaccagtgtaaaga

SEQ ID NO: 363149 - DNA, 523 bp, Homo sapiens
ctaaatcttagcatccttttaataggcatgtttcagctcaatctttgcctgataattgctgcatttatcaattttccggcaattatacatgataaaaaaatttccagacttttaactctaagtgacttcatttaacattcctgatggcatggataagctaatctgaagaagagggggctatgtggttatcatacattatcacatagcctggtcatgaccaggttttccaattcctatgactatagccaaacaggtatagtccaatccctatgactacagtagccaaaaccactctgccccatcaattatgctaccctagcaatttttttaagaaaaagcytaagagctagagtggtccctattctaaaaaataaatatttaaagaaaagagattaattttccttgtcatgagggaaagaacagaaaattctcatgatggtcaacaagtttctgtttgccgtagaccccatcacatactgcctgggtgacaccatttacctctccttggcaaccagtgtaaaga

SEQ ID NO: 363150 - DNA, 416 bp, Homo sapiens
ttttaagaaaaagcctaagagctagagtggtccctattctaaaaaataaatatttaaagaaaagagattaattttccttgtcatgagggaaagaacagaaaattctcatgatggtcaacaagtttctgyttgccgtagaccccatcacatactgcctgggtgacaccatttacctctccttggcaaccagtgtaaagaattctgtttcctctgcctggggttctccatcattcgcctgtctcgccccaccctgacccctcccctttctcccacctcattcatcagatttcagcttaagtgttactcctcaaagaagcgttcccccaccaagtccaaatccctaacaggctctcattgcaaactgaacccttaggtggtgtcagaagtactaaaattagataattattttgagagta

SEQ ID NO: 363151 - DNA, 479 bp, Homo sapiens
agcattctttttatgagcctggtgtgagtgcttagccagcaggggaaaaggagaatatgatatattataatgaccatttaaattctgctttgcaaaataacctgggttgttaaaaagaatgagatggctgtatatataccaccgtggaaagatatccatgatgagataaaagaacaagtgaaggaacagagcagtaggcatactataattccatctgtataaatcaaatgattaaaaactctatatagaatgtacatctgtttataaatgtatcaatgtctagagataaacatacctasctattttggtgtttcctgtgggagaagcaattgatgttaggagaggaaatgaaggcttttatttgttgtattacaccaacatttaaaacataaattaagaaaatttcattaaaaacagctggcagggtgcggtgggtcatgcctgtaatcccaacaatttgggaggccaaggctggtgga

SEQ ID NO: 363152 - DNA, 433 bp, Homo sapiens
atcccccacagcagtttgatcttcacccagcagccaaagtggaccttgtccaatgggtgaagaagagggtgcctctctttggctttaaagtcctcctatggtttcctggaaacttcaaacaaaattgaaagttcttaagggggtctggagcccatgtaggatctgggccctaactacatctatctcatctcctattattatccttctcaatcagattggagggaataatttgtgcttccatgarcactatacaatatctagactctagaagacattcatagaatctgaatcaggtagattcagattatatgaaagctattttacagctctgtaatttggcaatgccaaataactcttgcctctagatatgcaaatgtatactgttctttagaaattcaatgggctttccaccacacctgaagaaactagtttt

SEQ ID NO: 363153 - DNA, 603 bp, Homo sapiens
tcatctgtaattataatattctagaatacatatatctgcatgtattggtgttacagagatgctaaatacataatagtgatggcagcgatgggccttctggtgtggctgctgccatcacactggccactgcagggagggcacagggaggtggacagccccacacctgcagcccactgccttgggggccaccatgatggggctgggctgcgtcgcaccaggtgaaggggagctctgggtcaccccaagcaccagggccaaaggggagcttgcagcaacattgcccctgccctggatgctggyccaggcccagcaaggacctggatccccaaccccaggctgtgagggggctgggccaggtgccatgctccatggagccagcgggaaccagggacaagcgggagccctaccccttccaagttggtggggtgggagctccccagttgcatctgcagctgcccaagctgtggctgcaacccaggcaccccttgcttctgggagctgagagtaggcaggaacgctgttctcctgagcagggctgcagccacccaagtcctgggtgcggatctgggcctcctgcttcacaaagtaggcaggagcccccca

SEQ ID NO: 363154 - DNA, 598 bp, Homo sapiens
tcttcttaaactaaagattttcagaggaaacctctatgggattctaaatcattataatctttattatcatcagtgtaagcacttcataagggaaaatacaatcttggactgaaggaaagaagcagctcttaagatttattttaaaatccaagaatctctggcaaaggccttagaagccacagacactcttctcacctaaaatatttgactgttattctcacactgacatgggttgggaacatggagtcttccttttgacccatggacctagaaacatacatacttagtaactaagagtacttttggaacatctggtaccaccactgttgatatttttctttcaatttactgccttttttgaactacaaaaaaaatttaggaagcagctttacatgcctactctcaaaggaagaccgatattcctagcctaaaattgaacattattgggatattcaatgcaatgaaacacaccaatgttactcagttctatctaggtcctcctgcmtagccgagtgtctgctctttctgtacaacagggggtagaattggtgttagagaagtaataaatatgtaaaagtgcaaaacactgtcacatatt

SEQ ID NO: 363155 - DNA, 579 bp, Homo sapiens
gtgcacccccatacctgcatcttatgtctgttcttcaagtcctcctgtattgctttctttgtgataaatattgtctattcttattttaattcctttatttacttcacacaaacacacaaatacacaaatacagttaattattagtggtgtacagattacaaatgcatttttaaaatttttttgtagagatggggtctcactgtgttgcctagactagtcttgaactcctgaccttgcttttgcctctcaaagtactcggattacaagtatgagccattgcacccagcctagctcacactgttttctaattttctctgtgattattttctttgacctatgggttatttagaaatgtgtttttaatttccaaatatttactgatttttttwaactttcttttgttatttattgataatttaaatccatttagatttaatctaatttaggctggttttggtggctcatgcttgtaatcccagcactttgggaggccaaggtaggaggatcagttgggttcagaagtttggggctcgcctggccaacatagtgagacctcatttctgtttaaaaaaccaaaaa

SEQ ID NO: 363156 - DNA, 646 bp, Homo sapiens
agaatgctccatgtattcttgaaaatagtatgtattctgctggaagaagcattctatagattttagttaggtcaaatgtttgataatattgttcaattcttgtatatcctgtctaattcctaactcttttaggatttctgtatgcacgatatatcttttccatcattttgctttcaacctatttgtgtcttcaaagcgtatttcttacagtcagcatataattaaatctttttttaaaaaaatcttgcattacagtctctcccttttgattacagtatttcatgcatytgtatttaatgcagttattatagggttggatatacacctgccatttccatttgttttctatgtatcttatgcctgttcttcaagtcctcctttattgctttctttgtaatgaatattgtctagtcttattttaattcctttacttactatacacaaacactgaaatacacaaacacagttaattattagtggtgttgtagagattacaaatgcatttctaattatcacaatgtagatcagttggatactaacctaatttttttaaaatatagagacttttcttcaatatagttcaatctttcccccacttgtgctattattacagtatatatttacatatatactaagaaatacaatg

SEQ ID NO: 363157 - DNA, 646 bp, Homo sapiens
agaatgctccatgtattcttgaaaatagtatgtattctgctggaagaagcattctatagattttagttaggtcaaatgtttgataatattgttcaattcttgtatatcctgtctaattcctaactcttttaggatttctgtatgcacgatatatcttttccatcattttgctttcaacctatttgtgtcttcaaagcgtatttcttacagtcagcatataattaaatctttttttaaaaaaatcttgcattacagtctctcccttttgattacagtatttcatgcatctgtatttaatgcagttattatagggttggatatacacctgccatttccatttgttttctatgtatcttatgcctgttcttcaagtcctcctttattgctttctttgtaatgaatattgtctagtcttattttaattcctttacttactayacacaaacactgaaatacacaaacacagttaattattagtggtgttgtagagattacaaatgcatttctaattatcacaatgtagatcagttggatactaacctaatttttttaaaatatagagacttttcttcaatatagttcaatctttcccccacttgtgctattattacagtatatatttacatatatactaagaaatacaatg

SEQ ID NO: 363158 - DNA, 583 bp, Homo sapiens
acattggtctttattccattagaggtttaacctgctactgaaaatgtccactttggtatccagacctgaaaattttttgtaggtaaataatatgtaactacgatgagcagagtattagcttttaatattatcactatccttgttagtgtgaattctaaaataaagttggatcccttttaggactcaaaaaaatttttgtaattgagagagtcttgctctgttgcccaggctgggatgcagtggcatgatcgtagctcactatgacctccaactcatggtctcaagcaattctccctccttagcctttcaagtagctaggactacacacatgtgccaccatgcccattgatttttaaaagtttttttgtagacacagagtctcactatgttgtccaggctggtctcaagctcctgggcctcaagtgatccttctgccttggcctcccakagtgctgggattatagtcgtgagtcactgtgctcatccctattactatcttaataattcatgttagaaaggagatattaatggctgctttgcaaattatttatgaaatgttatctttttattaatttgtttactt

SEQ ID NO: 363159 - DNA, 583 bp, Homo sapiens
acattggtctttattccattagaggtttaacctgctactgaaaatgtccactttggtatccagacctgaaaattttttgtaggtaaataatatgtaactacgatgagcagagtattagcttttaatattatcactatccttgttagtgtgaattctaaaataaagttggatcccttttaggactcaaaaaaatttttgtaattgagagagtcttgctctgttgcccaggctgggatgcagtggcatgatcgtagctcactatgacctccaactcatggtctcaagcaattctccctccttagcctttcaagtagctaggactacacacatgtgccaccatgcccattgatttttaaaagtttttttgtagacacagagtctcactatgttgtccaggctggtctcaagctcctgggcctcaagtgatccttctgccttggcctcccagagtgctgggattayagtcgtgagtcactgtgctcatccctattactatcttaataattcatgttagaaaggagatattaatggctgctttgcaaattatttatgaaatgttatctttttattaatttgtttactt

SEQ ID NO: 363160 - DNA, 603 bp, Homo sapiens
gcagttgtcaccatgtgatcatttattctggcttatttatgtagttttgtctctccttgtctgtcttattttctgttatagtcacatcttctagagtagtgcctaacacttagtaggcatttaataaatatgttaaatcagcagttgaaatcagtcttttaaatgtatagcaagtaaaacctgttaatgaactgaactctactacattctgtacttgagagaagaaagtaaatattctttttttctaacagagtgaaagtgatttttaaaatgagtctttagcacaaaaagaggagcaatttgaagtagaattttaagctttttctttcccagaaaagaattacgtattaaaaaaaattggctaatttgataaaatctataamacaaacctctaaaggatcataaatggggattatgattccctaacttattttttccaccctagaacattgaaaggaagcatccttagaactttgaaaatctggtacaacccctacttgacattaccattgtctgtcacttcaaggaaaacaaaatcattcacgtccatgataaaatggatcattcaaatctgttatttagtaccatgtggtcaactggttg

SEQ ID NO: 363161 - DNA, 495 bp, Homo sapiens
ctgccactcaataaaccagaaacgtctatagagagaaataactatagagaccaggaatatctgaaacaagagactaagattgctatttttcyagtctactaatttagggacagtttgatccaaaacattcgagataacgagtgaaaaatggatgaagctacttttaccaaaacactttttaaggattttcagtgtacattttgcagaatattatgccaaataaacaactactctaatataaaggacacatagtatcaattattatcactgtcaatcagagaataaaagcattctacaatgggccttgacagaaccgactattatgattgtttctgcaacgctggaaatatgtaaatgaagacactcaagaagactttgacacaacaggtttaacagatagggcctaattatgtcagtcagtggaattcaattaccaggaggcatagatggacatcctagtacagagcttggattaaatccacctatatatttttg

SEQ ID NO: 363162 - DNA, 514 bp, Homo sapiens
gctataactacttccctgtatatttacgaaacttactttcttcataataaaaaagaggtattgagaacatgtcccctcaaaacctaagacagcttaataattttaatgaaaaatgttcattcagagataagaagagaccatttcatttgtttatttaaaaagagaatttctaaaacgtatctgcatatttaatctgtgccattgccaagagtaacctggtttcccaagcytcaaaaagaagctctagtttttaataacaatgtgaaatttggtgatttgtcctttacacagtaaaaagatacttggagaagacccttgcggagggtctgctatagtgaactaatttgtatctggtcttatttgagggactcatgggaaaattgcaaaactaatctgatttccttcagagcttaacaaatagaagaccatttttaaggctgaagtttgagatataaagtaaggcttattatttttatccataaaatatagtaaatattagaacaaattagaatgc

SEQ ID NO: 363163 - DNA, 618 bp, Homo sapiens
aatgttgcagaaagttggtgctcagtacatgttttaaatcttgtatgtgtgattatatatatttggtctttgtaattcacggcataataactgatgaaatagtcactattacaattttttcatgtgttcagggaaggaggtcctttaatttgcttactaaggcttaatcttatggtgaagaggagaaataaaaattgtattgtataacaaattgaatacacttgaaaaattatcagccgtttgattagggaatgcatttttagttttcataacacatgaaaatctatatgctgtcaaggaaaggttattctaacatttaaggaattacacaaattctgttctttaacatgacagaataatagaaagagtcctctttgtaatgttagggcagctaagcrtgaccaacataactgagaagtttgttgccattattatcgttaaatctatcattatatctttgtgtaattaaatctttataaaagcaaatgagatgaggtatacttctaataattagtggtttagaataaatgaagaatttataaagtatattaatagtaagaggacacctgactaaaatctcaacagcaaagataactatgacctgaattaaagagaaga

SEQ ID NO: 363164 - DNA, 623 bp, Homo sapiens
gttagcagggccttctccaatcgggttcctcctaactgcgttgatcattgtgctccctgttactctgtattcctcatcttgcaattcctagatttcatcatgctttctctcacttccaagatttagaaaatagtattctatgacttctgtggtttagggtgcagggagcaggcagggaggtttccctggccacctagattatgacacttccctcttatgcctctgtacagtcaaaatgtctgtagcagtcaccaacacttttgtaattacascatgtacttataaggtgaccatactgtcttctagtctcaatgtccctgagggcaggagatcataactgtctcatttggtgcaaaactcccagcacagcacagtgcctgtcacacagcaatgccttctcaatattgttggatgaatgaatttgcttgtttcttaataatttggattaataggagcacggatcagagttttaaagtagtaatatatcaaatatctaaaacagaggttcctttaaactaaaatttggacaacagaaaaccatatattgattgtcccataaggagatgtcgcaccttccttctagctgcttgaatttgcatgctactaggctggtatgataaaca

SEQ ID NO: 363165 - DNA, 623 bp, Homo sapiens
gttagcagggccttctccaatcgggttcctcctaactgcgttgatcattgtgctccctgttactctgtattcctcatcttgcaattcctagatttcatcatgctttctctcacttccaagatttagaaaatagtattctatgacttctgtggtttagggtgcagggagcaggcagggaggtttccctggccacctagattatgacacttccctcttatgcctctgtacagtcaaaatgtctgtagcagtcaccaacacttttgtaattacaccatgtacttayaaggtgaccatactgtcttctagtctcaatgtccctgagggcaggagatcataactgtctcatttggtgcaaaactcccagcacagcacagtgcctgtcacacagcaatgccttctcaatattgttggatgaatgaatttgcttgtttcttaataatttggattaataggagcacggatcagagttttaaagtagtaatatatcaaatatctaaaacagaggttcctttaaactaaaatttggacaacagaaaaccatatattgattgtcccataaggagatgtcgcaccttccttctagctgcttgaatttgcatgctactaggctggtatgataaaca

SEQ ID NO: 363166 - DNA, 422 bp, Homo sapiens
gggcattaccacatgggatcagccaggacctagtgtctgcaaatcataaatggtttatttctttatgcaaatacctcggctttacacattctctaactagaaattattcaacaagatcatactgcctttacctgtcaatttcttatgargtggtctgcatgtggaatgaaccctcaaaccctaaaatttggttgacacaattgcataacaattccaagaaagtctcactttttaacattaatttactaaaagtcacagcaaacagtgttttgtaaacattgttttaaatgttttctggttgttaaattctaaataaattcttgaagagtaaacgttaacaagtgatccttttcttcagttaggagcttctaaatcagccaagaaggttctcaggtgaatacctaaatcatcccaagaatctt

SEQ ID NO: 363167 - DNA, 422 bp, Homo sapiens
gggcattaccacatgggatcagccaggacctagtgtctgcaaatcataaatggtttatttctttatgcaaatacctcggctttacacattctctaactagaaattattcaacaagatcatactgcctttacctgtcaatttcttatgaggtggtctgcatgkggaatgaaccctcaaaccctaaaatttggttgacacaattgcataacaattccaagaaagtctcactttttaacattaatttactaaaagtcacagcaaacagtgttttgtaaacattgttttaaatgttttctggttgttaaattctaaataaattcttgaagagtaaacgttaacaagtgatccttttcttcagttaggagcttctaaatcagccaagaaggttctcaggtgaatacctaaatcatcccaagaatctt

SEQ ID NO: 363168 - DNA, 369 bp, Homo sapiens
ttgcaaagtgggctgcaacttactctcttcaaattgctgcacctcatgtctttctctttattgacttgacattgagtttcyttaaagaatttccataaattctatatttcatatttaatagctttcattgagtgttattagatggcaaactttgtactaggtactttatgtatcttatctccaatctttatagcaacctaacatagcaggtatgattactgcttttgtaagaataaggaaactgatatgcagggaggataagtgacttgcgcaaagccttagagcagtgaagtaatgaaacagagattctcccccaagctctatggctctgaggcctgtgttctttccatggcactacaaaatcactgt

SEQ ID NO: 363169 - DNA, 567 bp, Homo sapiens
ccttgtttaaaagtatcagcaaataatgtaaatctagaataaaacagaagtcaccagttacaactgttatttgtggggagtgaggcgcgtggaaactgagcaaatgaggaatgggaatgggggagagattttttcctgtacacattttttatacttttgaaattctgaaccttgtgagtctattcaaaaaagcaacttaaccaaaattttcaaaaaaaaatgaggataaaaagatagcttttattttcaataaaatggttctggacatcttaacataaaaatgtactcttttagtttgggaaaaaagccatcagcaggagaacgtttcatcccaaggatcatttagacttargccaagcaggcccatcagtcaggaatgctgctgcttctacttccaaaaactccttcaaggaagagggacctactgattcatgccagtgactcatgccctgattatcaaagagggatacaatatggcaggggtccctcacagtccttataactgatagaagtctgtaataataagctaccggtcaacagtctataggacatggcaaaaaagaagtc

SEQ ID NO: 363170 - DNA, 571 bp, Homo sapiens
gtaagttgaaatagttataataaatgacagcatttattgagcatctattgtgtgccaraaactatacacagcagtctatatatttgtgtcatgtaaccttcacaatagcactatgaagtagatacaattattatcccattttatggataacaaaactgaggcttgaaaagattacatacttccccaaggccacagagctaggaagtggtggagccaggaattgcacctatgcgcttgtactgcactcttatactctcaaccatgacaactctcctgcaggtgcatgggctttggaatcagacagaatgggataacagtccatattcttatatacactccatatatttgctatgtgagcttaggcaaagttcttacattttttaagtagaaaaataatactattctgttatcagggagatcagttgttttgtcctgactggcatgtctcctggtaaaagacccatcttttcctacgggaaacaactagacctccattctcaaacaagagttaggcataggaccataccctagccaaagagcacgtcatcttctcagcctcgaggatgggttc

SEQ ID NO: 363171 - DNA, 571 bp, Homo sapiens
gtaagttgaaatagttataataaatgacagcatttattgagcatctattgtgtgccagaaactatacacagcagtctatatatttgtgtcatgtaaccttcacaatagcactatgaagtagatacaattattatcccattttatggataacaaaactgaggcttgaaaagattacatacttccccaaggccacagagctaggaagtggtggagccaggaattgcacctatgcgyttgtactgcactcttatactctcaaccatgacaactctcctgcaggtgcatgggctttggaatcagacagaatgggataacagtccatattcttatatacactccatatatttgctatgtgagcttaggcaaagttcttacattttttaagtagaaaaataatactattctgttatcagggagatcagttgttttgtcctgactggcatgtctcctggtaaaagacccatcttttcctacgggaaacaactagacctccattctcaaacaagagttaggcataggaccataccctagccaaagagcacgtcatcttctcagcctcgaggatgggttc

SEQ ID NO: 363172 - DNA, 571 bp, Homo sapiens
gtaagttgaaatagttataataaatgacagcatttattgagcatctattgtgtgccagaaactatacacagcagtctatatatttgtgtcatgtaaccttcacaatagcactatgaagtagatacaattattatcccattttatggataacaaaactgaggcttgaaaagattacatacttccccaaggccacagagctaggaagtggtggagccaggaattgcacctatgcgcttgtactgcactcttatactctcaaccatgacamctctcctgcaggtgcatgggctttggaatcagacagaatgggataacagtccatattcttatatacactccatatatttgctatgtgagcttaggcaaagttcttacattttttaagtagaaaaataatactattctgttatcagggagatcagttgttttgtcctgactggcatgtctcctggtaaaagacccatcttttcctacgggaaacaactagacctccattctcaaacaagagttaggcataggaccataccctagccaaagagcacgtcatcttctcagcctcgaggatgggttc

SEQ ID NO: 363173 - DNA, 571 bp, Homo sapiens
gtaagttgaaatagttataataaatgacagcatttattgagcatctattgtgtgccagaaactatacacagcagtctatatatttgtgtcatgtaaccttcacaatagcactatgaagtagatacaattattatcccattttatggataacaaaactgaggcttgaaaagattacatacttccccaaggccacagagctaggaagtggtggagccaggaattgcacctatgcgcttgtactgcactcttatactctcaaccatgacaactctcckgcaggtgcatgggctttggaatcagacagaatgggataacagtccatattcttatatacactccatatatttgctatgtgagcttaggcaaagttcttacattttttaagtagaaaaataatactattctgttatcagggagatcagttgttttgtcctgactggcatgtctcctggtaaaagacccatcttttcctacgggaaacaactagacctccattctcaaacaagagttaggcataggaccataccctagccaaagagcacgtcatcttctcagcctcgaggatgggttc

SEQ ID NO: 363174 - DNA, 543 bp, Homo sapiens
caattagcttctctgggccttcagaggagccagcacaccaaaccatccattattgccatgtatccactttgtagtcacaatgtttggtcatatccaatgattatggatatggaggtcatatccataatccaaatgattatccaggcagaaataacatttaatgaaaaccaaggccctactttacttacctactgctaaaataccaatgayaacgtttgcacaaagtaccaatgataacgtttgcacaaaacatagggcatcacacaaaagctaagcaatttggttctgagaactttcttccatgttacccaaaagtctaaagtcagtaattaagtccctagtcataactgaatcacttaaggtttacatgatcaccatatacctattgcttcaatatgacagaaaaaaaaaaaaaaaaaaacctttctcttttctgtttcctcctttcaacaggccctataatgtaagaagcaagaatggttccagaggaactgttgtgagccactgcatcaatcataggaacattaaaacactgcttgctag

SEQ ID NO: 363175 - DNA, 543 bp, Homo sapiens
caattagcttctctgggccttcagaggagccagcacaccaaaccatccattattgccatgtatccactttgtagtcacaatgtttggtcatatccaatgattatggatatggaggtcatatccataatccaaatgattatccaggcagaaataacatttaatgaaaaccaaggccctactttacttacctactgctaaaataccaatgacaacgtttgcacaaagtaccaatgataacgtttgcacaaaacatagggcatcacacaaaagctaagcaatttggttctgagaactttcttccatgttacccaaaagtctaaagtcagtaattaagtccctagtcataactgaatcacttaaggtttacatgatcaccatatacctattgcttcaatatgacagaaaaaaaaaaaaaamaaaacctttctcttttctgtttcctcctttcaacaggccctataatgtaagaagcaagaatggttccagaggaactgttgtgagccactgcatcaatcataggaacattaaaacactgcttgctag

SEQ ID NO: 363176 - DNA, 457 bp, Homo sapiens
gctgccaatcttttatggagtggccctgggcaagttattttgtgtctcatattcttcggctacagactgtggttaacactgctactattgataacaaaaacatcctaacaacaactcctgggaacaatattgtgaggatttgtgtttgtacagtgatttaagaatgagggaagaaaggcacaatgttatactattaccaagygctttatcaaccagtatattgcataatgtgttataatgtaccatgtgcccatggaaacatgaaatcattcataattcttaagtactgccagatgtgcagctataacaaatttcagccctttctgaagaattcacccacacactcacttctcccaccaatatttccactggtaactgtcagagttgagaaatcatagaatagacccttattcacatctctgtggtaattacatatagtttgcttcatatttgggtt

SEQ ID NO: 363177 - DNA, 606 bp, Homo sapiens
tcatgtaagtacttgtaagatgtaataaaatactagactttaagatagtatgaaatgaaaatcaatcaaccatgaaaatgaaaatattctatgatagcttccmatgaagatgtagtgaaaaacttaaaatagctgtacatgataggtgctcaataagtgttgaaataatgagtccttgaaaaaatcatctttagaagcagacagaaataacaataaaagaatgaatttttaaaatgtgaaaaattgatattgtttgaatataaataggataaacagcaaatttcagaaggtaaataactaaagagttatttcaaagtttatctgaagagcagagtagaaaaaaagttctacatttctgcagaaattaattaacaacttgctgaaataaaaccatatctggtataaaatgtagcagtggttaaaagttcacaatcattcttaaaaatgttttaaggaacataagcaggaaaatattacacctatttataactaagcaatgggggaaaaggtgaagagtaagtaaaagtccaaactggcacaaagttgaaccaacaagatgaacacaggtggtcagagattttatttcacctttcacctaaaagttgc

SEQ ID NO: 363178 - DNA, 519 bp, Homo sapiens
tctgggcgctctgtttggatttattaagtgtataaaatcctattgtatatcaaagccaagatgtcaagtagtttattaaatattagaatccagagatcagtggaaaaaatttgggttagagacataaatttgttcatcagaagcacataaaagtggcatctgatggcactggcctttatgggatgacctgaactgagtgtagattaaaaaagggttccccgaacaatttgaggcaatcacctttaagagcaatggaacaagactgagaaagaaacagtgatgtaggaggaagcccaggagaggagagaatggcagagtcaattgtgttaatgctgccaagatataaatggaggactgactttggygaaatgtagtcatttttaactttgaaaagaataatttcaatgcaatggtggggagtggtagcagattggagtaagtaaatttaagaaagagttgggtggtttggaagtggagaaagtgagtttagaggtgttaagaattgtagctgtgaataag

SEQ ID NO: 363179 - DNA, 627 bp, Homo sapiens
taaatgcattggaccgttctctaaacttgtcctgttagtaagtcctataatttacaggtggagtctattgggcaagggcgggtaaatcaactcagttaaagggtcaacttgatactaatttccaagcaattgaaaactaccgtgtgtgtgtatgtgcatactaaaataaatatttccaaagcactattgcctctgcaaaattatgataagagtaaaaatagtggactgccactggaaaccccaagagcaggaaatttataatagaggattcatgctggaagtattaaaggtygtttatagacctaagtggttaataaggatgtgtgtattgatattgctttagttaactccaacttgtaaccaattttattagcaataaagtactcacaatgacttagaaaactcactgacacatacgaacttccaagcatcacacctactacctaggtaggaagtacctacctacttccaagcatcacaccactctagtgactaaaattcataaagtaaaaggaaaataatgaaataagttggtaaagtaggaaaccgtggaagatcatagatgtgacatagaatagtgtagattctcagaacttctctgaaaaaattgtaacagtgaggataatt

SEQ ID NO: 363180 - DNA, 627 bp, Homo sapiens
tggtattggtatatcctcctgttatgttattcttcttgacacagtaaatgccttgattaaagaataatgtaggtcaattaaattctattttacttgaagcttttttaagtttgaccaagactgtgatgtctgctttcatctacagatgaattttcctgcctacaattgaataattacmattactgatgaatagagatttcctaggctttttttttaaagatgtatgatcatgtcaagtaatctcatctattgttttgatgttatcaagatgtttaatgacctttagtagtttctcgtctatgattgtgtcattgagaactgtctgtgtcaatgaattcaaggcaaataaggccctaagaattttgcatttctatttcattcctttaattaatttatttttaattgacagataataattgtgtatacttatggggtacaatgtgatgtttcaatgtatgtatacatagtagatagtacaaatacttaagctaattaacatatgcatcacctcaccgacttatcatgtttttgtagtgaggatgttaatgatctattcttttagcaatttggaaatatacagtgataactaactggtcaccatgcagtgcaaaagatcactaaaagtta

SEQ ID NO: 363181 - DNA, 590 bp, Homo sapiens
ttcctttttctctccctcctgctttctcttatcactccttctctcatcctatctctttttctctctttccttccatcttggagaaagcttaacaaactttaaacagcttagaattctgaagacagaaattgttttttactcttctttcctctagacaatcattttgaaaagatgtctgtctaaaaaacaaactctttcaaaaattgacacataaatgtttttagcctgcagtgttgcccaccacaaattgctagaaacaaataatatttatttgtttaaattgaataaatataacacaaaacatgcatttgaaataaattatttggtaaaagggaagtctatggactacttaaaataatgttgacaaaattaaaaattaagaaatattacwtcaaaagatttttttacattgtataaatataccacattttattcattatttatttatttggtattcaggggggtacaggtttgttacattggtatgttgtgtgatgttgaggtttgggatacaaagggtcctatcactcatgtagtgagcatagtacccgatggtttttcagcccataccctctcccttccttcctgct

SEQ ID NO: 363182 - DNA, 590 bp, Homo sapiens
attttcagattcttatgttctaattattattagttaatgattatacactaccacccccctttaaccttttggagaacaaggataacaaatacatgtcaactagaatcccaggtctactctctgaatttctttttatagtagaccttgcagtggaaaaggatttaaattaataattagttaattataataattgattataaaattaatgacaatttcaaaggaaagaaagaaaaaggaggcatatatattcccttaatagacaaaatttatttccctaaaaggaaacaagaaaacagttacatatttcttctgcattgtcctgtgtggctgattgttgttcaatatagtcatcatcttttccctcacttctacgggcagtggttccccttcttttgattcttggcttggctcattcttgctttgaccaatggsatattagcagacctgactcaagccaaggcttaaaaaacacctgtgagattggatttgaattctcatgtcaaatatttattagtgcattcactgatattttgttgtatttagttatacattactttttgaatcatattgatctgtatactccaaaacac

SEQ ID NO: 363183 - DNA, 596 bp, Homo sapiens
ggctattcccacagcaatgcckaactgtcatcacagctggaaactgtggactttaaatttcttcttaatgtcctgcccaagttcacctgagaattgcttaactttctgctttactttcatttaattcaacaccctggctaattcctgtgtaaacatatgtttgactatacatacatggagagaaacatattgaaaacattaagggttaaaaaatggtttacattagttacttccatatatgttcatttgaataaggtgaagcatcaagaaaactagttaccaggagccttatttatccaagatgaatacctagagatattctttggtatcagtgtcagcgttcgccagaaaaaattatcccattaaaatagccttcatgaataattcagagagttcaatttaatggaggaagggggagacagaaacaggttatcaaatgtgttggaaacccatgttgctgcacggcattttttatgagcagttataatgtaggttattctttgttctgtatctacatgaaaaagtagatctcaacatttaaacaccattgcctttaattttttgctttgtagccattaatgcattttttcaaattc

SEQ ID NO: 363184 - DNA, 596 bp, Homo sapiens
ggctattcccacagcaatgccgaactgtcatcacagctggaaactgtggactttaaatttcttcttaatgtcctgcccaagttcacctgagaattgcttaactttctgctttactttcatttaattcaacaccctggctaattcctgtgtaaacatatgtttgactatacatacatggagagaaacatattgaaaacattaagggttaaaaaatggtttacattagttacttccatatatgttcatttgaataaggtgaagcatcaagaaaactagttaccaggagccttatttatccaagatgaatacctagagatattctttggtatcagtgtcagcgttcgcmagaaaaaattatcccattaaaatagccttcatgaataattcagagagttcaatttaatggaggaagggggagacagaaacaggttatcaaatgtgttggaaacccatgttgctgcacggcattttttatgagcagttataatgtaggttattctttgttctgtatctacatgaaaaagtagatctcaacatttaaacaccattgcctttaattttttgctttgtagccattaatgcattttttcaaattc

SEQ ID NO: 363185 - DNA, 478 bp, Homo sapiens
atgaataattcagagagttcaatttaatggaggaagggggagacagaaacaggttatcaaatgtgttggaaacccatgttgctgcacggcattttttatgagcagttataatgtaggttattctttgttctgtatctacatgaaaaagtagatckcaacatttaaacaccattgcctttaattttttgctttgtagccattaatgcattttttcaaattctatttctcaaaaaatatgtgttgaactgtggagtgccatttttttttttatagttgataagaaatgtttgccaatgttgaaatagtagcagatttaaaaggaaacaaatgggattacaaactttctgtgtggtaaagatgatcatgaaggtgagtgtagtgtacactggttatttatcttctatattagttaggattcagtaaaaacaaactcagaagccactttagaaatgccaattatgagggatttagaatagag

SEQ ID NO: 363186 - DNA, 585 bp, Homo sapiens
ccatgagtggcttcttgctggctgccaggacttgaggaaggaaaagagggtaagaaaaaaatgacaccctttgttctccccctcacataccccaggtttttgctgaaagagagacaggaactaaaggatgccttttccgctctctttcagatgggtaacagaccatcttcagcctgcactcctcttgagtgaatcttgaatcactgggactcctttgaccctcagactctggaaaaaaaaaccctttaaatttctttgcatgagggtttggccagattgtgatttrcaggaaggacaagcctggcctctagagggaagcattaatttcaatactatcctgtagttggaccttttctttaaatgccagggcaaatggtctgaggtcccatatgtgcaggctttctttgccttgcagggtaatccaaaactttgctgacattgtaggattgattcagccctcctagtgaccatctcaggagaggctgaaaaaggcaatcccaagggaataggaaagtgaaccccccaggtgcctccaccaagggagtcagctccctccagtcctgctcctcctagtccaccacattc

SEQ ID NO: 363187 - DNA, 476 bp, Homo sapiens
tgattaaacgtgtaatttctttggcccatttccaacaagaactggaacaactgtgtggcccaaccccatgaactagggccacctctgttcaaatcaggggacttagtactggtaaatggtcttccttctctttctccctctgtaggcctggattgaaaggaaccttacactgtacttctattccttcrgcattaaagtcactagaattgattattgaactcattatagtcacataaaggcctgagaaactgacggaattatctctgttgacccagaacagcccccaaagcaccagtgtgaagaaatcggagacctcaagctaaaaataaaagatgagtgtcaataattaatcttccatagatactctctttatagtcttgcctatgcttgctgtacttgccttcttctcttcctcaccataaggcatgtttgccaaagaccccttgatcctgaatacccatgggattatctactcc

SEQ ID NO: 363188 - DNA, 665 bp, Homo sapiens
atcctaacagcagttagctgcacctcttcagaggcagattgatagtgaaaggaggcagacaaattcctaggcagacaggacaggccctaggtaaaacctgaccttcaaaccaaagacagcctgaagtctgaaaatagagctgccagttccaggtggaatctacaaccagagtgagaacttccttgatgccttttagccaatcaaatggtgctttctccaggcccacccatggaccaattagaacacactcccccattctgggcctataaaaaccccagactcagcctcacagacagctacctacttttgggccccttctcatacagagggttgcccattttgggtctcctctcatgtagagagcttttctgtcactcaataaaattcttctctgccttgctcactctccagtgtctgcatacctcattcttcttggtcatggacaagaactgagaatccactgaacggkgggtgcaaaaagagctataacatgcactcttgctcactgagctatgggagtgaaaaaaactgctgggtggcaggaatgaatgagctgtaacccacccccatcccctgccccccaccccatgcaccgagctgcaggcagcagggagagttgtaacacattactgtctgccaagctgtgggtggtggggagagctata

SEQ ID NO: 363189 - DNA, 516 bp, Homo sapiens
cctgctgggctgactgggtggagcaagcttagtggtcccagtgaggccccaggcagaggtcacggtggccacagagatttctgactggtgaagtggcaccaaaggaatcctgtaacagtggcagtacaggcatgagccaccacacctggctgaaggtggcagttttttagaggagcagaaaagagaaaggctgtgagttggatttcctaggatgtagaaactgagaaggagataagtgtccaggaagtttactatgatatgtttttggaatcaatatctggaagaaagaagaaaaggaaacaaaagtgggtaggaggcgaagccaagctgagaggtaagacagtctcactgtraatctatgagatgcactgcaaatggagcaggcctttacagatgttccaactgggcctagaaggccagacccttatgtcttcacttccattattgagtgtggattgccctgagaaggaggaacagctttgggctagttttctttcttcagctaaggcaatttct

SEQ ID NO: 363190 - DNA, 516 bp, Homo sapiens
cctgctgggctgactgggtggagcaagcttagtggtcccagtgaggccccaggcagaggtcacggtggccacagagatttctgactggtgaagtggcaccaaaggaatcctgtaacagtggcagtacaggcatgagccaccacacctggctgaaggtggcagttttttagaggagcagaaaagagaaaggctgtgagttggatttcctaggatgtagaaactgagaaggagataagtgtccaggaagtttactatgatatgtttttggaatcaatatctggaagaaagaagaaaaggaaacaaaagtgggtaggaggcgaagccaagctgagaggtaagacagtctcactgtaaatctatgagatgcactgcaaatggagcagscctttacagatgttccaactgggcctagaaggccagacccttatgtcttcacttccattattgagtgtggattgccctgagaaggaggaacagctttgggctagttttctttcttcagctaaggcaatttct

SEQ ID NO: 363191 - DNA, 644 bp, Homo sapiens
gcttaaaaagataagacaggaaccagtcatgaccagcatcctaccacaaactattactgctttgggtaaaatgctgtaatgactctccagtgagccttgaggacaccataagcctcatgaagaaatccctcctaataagataatatgcacttctaattaacatttctgtaggcccatccatcagattttattgttttattcatataaaattgtaattttcttggtaaatgcgttgcttatttttgttatttctatttttatcacattgtggttaagagttcgggctccacaattggaccacatggctttgagtcctgcgttttctcagtatcagccctatgaccatggacaaattgctcaaactatgtrtgcctcagtttgctcatatataaaatggaataacactttttccatttgagtatttaatatgtttatgcatataaagaatttaaggtggggtgtggtagctcacacctgtaatcctaacactttgggaggctgaggtgggagaatcacttgatcccaggaggacagggctgcactaaactgtgtttgtgccactgcactccagcctgggcaacagagtgaccctgtttaaaaattaaaataaaataaaatgctcaagaatacaaatgttcaacaaa

SEQ ID NO: 363192 - DNA, 644 bp, Homo sapiens
gcttaaaaagataagacaggaaccagtcatgaccagcatcctaccacaaactattactgctttgggtaaaatgctgtaatgactctccagtgagccttgaggacaccataagcctcatgaagaaatccctcctaataagataatatgcacttctaattaacatttctgtaggcccatccatcagattttattgttttattcatataaaattgtaattttcttggtaaatgcgttgcttatttttgttatttctatttttatcacattgtggttaagagttcgggctccacaattggaccacatggctttgagtcctgcgttttctcagtatcagccctatgaccatggacaaattgctcaaactatgtgtgcctcagtttgctcatatataaaatggaataacactttttccatttgagtatttaataygtttatgcatataaagaatttaaggtggggtgtggtagctcacacctgtaatcctaacactttgggaggctgaggtgggagaatcacttgatcccaggaggacagggctgcactaaactgtgtttgtgccactgcactccagcctgggcaacagagtgaccctgtttaaaaattaaaataaaataaaatgctcaagaatacaaatgttcaacaaa

SEQ ID NO: 363193 - DNA, 574 bp, Homo sapiens
gcagtggtgtgatcatagctcactattgcctcaaactcctaagttccagtgatcttcccacctcagccttccaaatagcctcacaccacattgtcatctgccaagctcttttacctgttggtggacacttctttttcccaatgtgtggttactccagaaaaagctgatatgaatattcatgtataagtctttgtatccacacatgttttcattggaggggaggtaaatacatgtgaatggaaaggtgggtcatatagcagatgtatgtttaaacttttaagaaatttctaagatgtggttggcacacagtggttatgccattttatattcctattagcagtgaatgagagttccagtttctccacacttacaccaatacatggtgtgattattcctttaattttaaacatgctggtgaatgtacatgtaatgctattttatcgaggtgctaacatgatgacacaagtggaaaattccatatgtgrcctcatgtacacaaactttgtttcgtgcaaaaaattatttaaaatattgtttaaaattacactctagctatgtgtataagatgtatatg

SEQ ID NO: 363194 - DNA, 579 bp, Homo sapiens
ttatatccacaataacagtaaaaccatcctaaacttactacaccacagtattaagggttttggtgggtttttatttatttatttgctttgttttgttttgcttaataatgttttagaataggtgtctgtaatttgtggctgcctcaaatctttttaaccttattcctatattgkggacctttcaaaggcagaatttcaaaagatctacacatttctcctttgtgatgagtgcaatttccactcatcaggtggatttgtatgggactttaacttagaagcaagacataaagagtgagccagggcaccaggcgtggagtggcagagagggcatgcatctgatactgtcagctgttgtggcagttttcttgtcatggaaccaagcatgattctgtacttggcaaagaaaaagcctgaacaagccacagtactccagtaaaagtactgtggttgtggtgtgggcagtggcatatctgcagtgtcatgaatgaaattattattgtaacctcaacctagaatctattccctcaggctttccaaaagttctgctacatttctaacatttctcaataattccctact

SEQ ID NO: 363195 - DNA, 560 bp, Homo sapiens
tgtttgttccgtagtccatttgtattccactcctgatgatgcgtttgtccttctctgccacacaggatggctgcaattattttaaattgttatgcactgcttctcttttaattatatgttccaactttaagtcattcctgtggtctcacatctgatgagggctattagaagcaaacatgttatctcttgaacactttgcyacttagaaatttcttccaccgggtactctaggccatcaatcttaagttcaactttccacaaatctctagggcatgaatacaatgtagccaagctttttgctaaggcataacaagggttacctttacttcattttccaataacttcctcatttccatctgagacttcataagcctagccttcattgtccatatttctatcagcattttggacataaccatttaagcaacctctaagaagtttcaaacttcctctcatcttcctgttttcttctgagccctccaaactcttccaacctctgcctgttacctagttctgaagttgctttcatattttcaagtatctttatagccataccaaac

SEQ ID NO: 363196 - DNA, 560 bp, Homo sapiens
tgtttgttccgtagtccatttgtattccactcctgatgatgcgtttgtccttctctgccacacaggatggctgcaattattttaaattgttatgcactgcttctcttttaattatatgttccaactttaagtcattcctgtggtctcacatctgatgagggctattagaagcaaacatgttatctcttgaacactttgctacttagaaatttcttccaccgggtactctaggccatcaatcttaagttcaactttccacaaatctctagggcatgaatacaatgtagccaagctttttgctaaggcataacaagggtkacctttacttcattttccaataacttcctcatttccatctgagacttcataagcctagccttcattgtccatatttctatcagcattttggacataaccatttaagcaacctctaagaagtttcaaacttcctctcatcttcctgttttcttctgagccctccaaactcttccaacctctgcctgttacctagttctgaagttgctttcatattttcaagtatctttatagccataccaaac

SEQ ID NO: 363197 - DNA, 573 bp, Homo sapiens
attttttcattcatttagaaaggcatatcagaggtatttttaaaaattttatcaatttataaatgtaagctttataaggagcatttatttaaacaaattgtttaagcattgcaccagcacacaggggctgaaataatatttgaacttgaagatattgggtggtctaatattttgaaagggatgccttcctgaacacctcacataactcaaaataaatataatttaagatgaatattcccataggaataaatgtaaagsttattttttagtttttagtttttaattgataataattgtacaaattcatggggtacaaaacagtgtttcaatatgtatagtgtatagtgatcagatcaggataattaatatatttatcatttcaaacatttatcctttttttgtgtttgagagcattcaaaattttctttctagttatttaaaactatataatatcttattaactagagtcatattacagtggtataaaacactgtaatttattcctcttatctagacagaattttatatcccttaacaaatctctccctagccctcccttccccctaccactcc

SEQ ID NO: 363198 - DNA, 501 bp, Homo sapiens
tctaccagtttgaatatatagaattcagttataacaattgatttaatgtttttatctactaattctactctctgtgtcaattctgcattaatttcaatttattgatttttctcctgaatatgggtcatctctgcttcgtccataactgataatttttattatttgccagatattgtaaatattacctttttgttaagattkattctgagaagtagtcaagttagtcagaaatagtttcattcttgcaggttttctttgaactttattagacaggaccagtacagtgttaagtttagggctaagtttaggctcacagttgaagccaaactcttctcaatactccacctatttccctgtgaattttgagtttttcacccataattctgataggcatggacatcatttccatttctttgtgatctctgtgaattgtttcctccaattctttggggtaattctttccctcatctcaggtcatttctttacacacaagtactgatc

SEQ ID NO: 363199 - DNA, 491 bp, Homo sapiens
taacagtttatgatagaaagtattacggccagactatataaaaatttgttttaaaatgaacacattaagacatatatgttactatatatattatgcatgtaatgcttatacacctacacacataaagagtattcatttcaagaaaggattctacattgtattcagaattttgtaacccacagaaagtgttcacattttcattcatgtctttctttcatattcagcatatccacagcttataatgggttgaggagggccaggctttgtggcttagcaaattagtccttgatttttttcttttaatgcagtggacaagaaagcccaatagaaaattttctaaacccccatgaagctagaaaacatggattagtatgaggtaagtctatcttcttcagcttggctctgcaggaccattacactttttaaaaagtgtgtgygcatatgcatttgttgtgtgcacatatatttcacatttgttgagtatatacaca

SEQ ID NO: 363200 - DNA, 602 bp, Homo sapiens
ttacttagcaaaagtcgcacttttcaatgataaaaatttcttcatgtaactgagactcagtttctttaactgcagaatgggggaactgggycaattattaattccccttttactctaaaattactctcaaatagaaagatcactgtatgttttgaattaaaaatacattctagatatttacacttttagttattagagtgatacatcaattaatgaatctcctagcagcaaatacactttatggcagttaaaactgctgttaaaataacttgataaatttttaggagctgtgaacatttagctcagcagccttgtttctgcaaaactgtgttagtggatatgtaagatcataaaaaatagcagtagcatcttcaagaaaaatgttcaagctcaggtagtttaccagattattaaaaattgcattacatgatgttaagtactatattacttacaatgaaattataagtgtcaccttaaaattaataattgaatattttatgagaaaaaatgaaaactgaaggctaagtttatgatactaacacttgttcagcttaatctttccatttttgaataaaatcactaatctaatcctttggaaatat

SEQ ID NO: 363201 - DNA, 602 bp, Homo sapiens
ttacttagcaaaagtcgcacttttcaatgataaaaatttcttcatgtaactgagactcagtttctttaactgcagaatgggggaactgggccaattattaattcccctttyactctaaaattactctcaaatagaaagatcactgtatgttttgaattaaaaatacattctagatatttacacttttagttattagagtgatacatcaattaatgaatctcctagcagcaaatacactttatggcagttaaaactgctgttaaaataacttgataaatttttaggagctgtgaacatttagctcagcagccttgtttctgcaaaactgtgttagtggatatgtaagatcataaaaaatagcagtagcatcttcaagaaaaatgttcaagctcaggtagtttaccagattattaaaaattgcattacatgatgttaagtactatattacttacaatgaaattataagtgtcaccttaaaattaataattgaatattttatgagaaaaaatgaaaactgaaggctaagtttatgatactaacacttgttcagcttaatctttccatttttgaataaaatcactaatctaatcctttggaaatat

SEQ ID NO: 363202 - DNA, 531 bp, Homo sapiens
tgggcaacatgatgaaacccagtctccaccaaaaatacaaaaaaattagccaggtatgatggcacacccctgtggtcccagctactcaggaggctgaagtgggaggactgcttgagcccaggaggtggaggctgcagtcagctgagattgagctactgcactccatcctaagagacagagtgagatcctgtctcaagaaaaaaaaaaaaaaaaacccgccaaaaatataccttcataaaaacaaaaatttaaaaaaatactgcaaagcaattgttttcatgtgcctggaaagtcagcaaatactaacaaattatgatactttaatactgcccatatttgagtgatctggtagtaggtcaggaatgtttaaatgagtaataaaataaaggccagcagtgttaataaattcttattgctcttatttcagcaaaattcccagttatcgggttaatataattgaratgttttatgtaatttgggttgggagtataatgttaaatttgacaatctttctgaaagcatggtaggccc

SEQ ID NO: 363203 - DNA, 540 bp, Homo sapiens
tagactccaaaggccattttattttgaactttccctatcccttttagttcaagttgtcaatggttctaataaatacaattctctggctrggcatggtggctcacatctgtaatcctagcactttgggaggccgaggtgggaggatcacttgaggccaggagttcaagaccagcttggccaacatggtgaaaccctgtctctacttaaaaagatacaaaaattagctgggcatggtggcacatgcctgtgatcccaggtactcaggaggctgaggcaggagaatcacttgaacctgggaggtggaggttgcagtgacctgagatttcaccactgcactccagcctgggcaagagagtgatactctgtctcaaaaatttaaaaataaataaataaataaatacaattatcttaaaaactttgtaggtgttctacaaatcttattaaggttcactctattagacaaaagccatacccacaaatcttgttgaaataagtccttctgtgccttaagcttactgtaatgctgctgcaaaaaaggac

SEQ ID NO: 363204 - DNA, 633 bp, Homo sapiens
ttatgaaggcattgggatgtaatttatttctagataagtaagtctaatttgcagttccatgggtctctgcaatgctgattctaatagttattcctgcagatgtgctgctcacagcatgtctttccattaraactgaacacctcattatataaactgtacctaattaaacataatacagtggtgacttgttaaactggcctttttaagtcagcagctgcctaagctaataatactgtacacaagatttatatcatcttccctagaatactgatattaaaatatactgcccaagggattgataactaatttaccagtatgtagcaggtacatttctgattctgtgataagagattaaagaccagcagtccataaaaataaaatgaattcaagtccatttggaacttaagagtactcgggaaactttattaaaactacatacttttaaaaaatcaataaaatagtcatgaaaagaaagtgaacaataaaagtaaaaaatataaataaataaatgtgaaagatctggaagtcctttaggtatttttccaaaggcatacaaaattttttcagacttgacacgctgaaattacatttgtcacttattctcatatctggattggatatatacaatcccta

SEQ ID NO: 363205 - DNA, 486 bp, Homo sapiens
aagaagccatcttctttattttaaaaatgctagttgtccacaggtaaaatgaaaacttgccaaagttgattttaccttctctccctgggttctttgagatccacagccacagaaaaaaataaatcatctcacttttacttaaacatctttattctaaaatcagaaattggaaaaaraaaacaaatttgaataaataaataaagtagtattggattgtaatataaaacagatatctgtgagtccatactgatgtgaataaatgattgaataaatacataaatggggaagaaaaaacaaatctcccatacagaagaattccaaataatttatgtagatactctgcctacaagggaatgaagcaaaactccccactcaggtgttagctaaggaagtgactttcttctaaacagcacagtaaggaaacagataaaaacttgaccatggagaaacctgacaaaccgccccctcagccaggtgatcaagttt

SEQ ID NO: 363206 - DNA, 580 bp, Homo sapiens
tattaaaagcctgctttacgaacaacatttaaaatatatattcagttattatatttaatgaatattgctgtagccttctaagtttccataattgttatgaaaattcaaggttctacctggccaaatttggccagtatactactagtacactgacgaccagtgtaacttttatgctccgtttctttttgtctgttttgtttttgttttttgagacagagtttcgctcttgttgcccaggctggagtgcaatggcgcgatctcggcccactgcaacccctgcctcccrggttcaactgattctcctgcctcagcctcccgagtagcttggattacaggcatgcgccaccacgcctggctaattttgtatttttagtagagacagggtttctctatgttggtcaggctggtcttgaactccttacctcaggtgatctgcccaccttggcctcccaaagtgctgggattataggtgtgaaccaccgcgcccagccgctctgtttcttttttaattataagttttgattttaagtcattcctttactgttatagctgagcataagctgctaaaagtaaccatgcc

SEQ ID NO: 363207 - DNA, 580 bp, Homo sapiens
tattaaaagcctgctttacgaacaacatttaaaatatatattcagttattatatttaatgaatattgctgtagccttctaagtttccataattgttatgaaaattcaaggttctacctggccaaatttggccagtatactactagtacactgacgaccagtgtaacttttatgctccgtttctttttgtctgttttgtttttgttttttgagacagagtttcgctcttgttgcccaggctggagtgcaatggcgcgatctcggcccactgcaacccctgcctcccgggttcaactgattctcctgcctcagcctcccgagtagcttggattacaggcatgcgycaccacgcctggctaattttgtatttttagtagagacagggtttctctatgttggtcaggctggtcttgaactccttacctcaggtgatctgcccaccttggcctcccaaagtgctgggattataggtgtgaaccaccgcgcccagccgctctgtttcttttttaattataagttttgattttaagtcattcctttactgttatagctgagcataagctgctaaaagtaaccatgcc

SEQ ID NO: 363208 - DNA, 574 bp, Homo sapiens
ctttgttattttttgctgaacttgatgcctgtaataaatgtcactggtgtcatacaaaacaatttataaattatttttgaaaagaattatttcaactacagagcaggcagggaaggagacaaatgggaatgatctgtgagagggcatttctatcatgacatcataagagccaagagaatttcagtagcaattctattcatgccaggaacaggaaaaaacaatgtagaaggcttgatgtttctgtttgttttttagttattttaccctttcccaggtgattggagaaaataaaaggagtggtggtatggagacttcaaatcagtttgtgttagtttacttgtgtgaatttatattacctcctactaagttttatgaaacccctttgctaaccaaaagaacagccagggacaagattacttggattttataatcctttgtctcaaaatattgcagatgtgaaagtaacaatggttagcaaagcatgcygcaccaaacaggttttacatttttagtaaaatttccaaatgagcattgtatcactgaaatgttgtcaaaggttatgtttagttcatga

SEQ ID NO: 363209 - DNA, 543 bp, Homo sapiens
aaaagaacagccagggacaagattacttggattttataatcctttgtctcaaaatattgcagatgtgaaagtaacaatggttagcaaagcatgccgcaccaaacaggttttacatttttagtaaaatttccaaatgagcattgtatcactgaaatgttgtcaaaggttatgtttagttcatgagacaggctcaaaacaatgaagtttttctcccatacaaattcccaagatgagaaagaattaaaaaccaaattaagtggagagaagtaaatgcgacattatttctctraagttgttttattgcctgccaggaaaatatcttcaggagatggactgaaaaggaaaagacttttgtagtgagcatctgagccacagcagatttgtgggtattattggctttttcagacatcaaaagcaaactgtgtgaaagatgatggaggtgctcaaacaggaatggggaatgaaaatgagcaaatagaagatcatgctcaataaaaacacaaaatgataatcagaataaatgagactatcagtgcacaagta

SEQ ID NO: 363210 - DNA, 543 bp, Homo sapiens
aaaagaacagccagggacaagattacttggattttataatcctttgtctcaaaatattgcagatgtgaaagtaacaatggttagcaaagcatgccgcaccaaacaggttttacatttttagtaaaatttccaaatgagcattgtatcactgaaatgttgtcaaaggttatgtttagttcatgagacaggctcaaaacaatgaagtttttctcccatacaaattcccaagatgagaaagaattaaaaaccaaattaagtggagagaagtaaatgcgacattatttctctaaagttgttttattgcctgccaggaaaatatcttcaggagatggactgaaaaggaaaagacttttgtagtgagcatctgagccacagcagatttgtgggtattattggctttttcagacatcaaaagcaaactgtgtgaaagatgatggaggtgctcaaacargaatggggaatgaaaatgagcaaatagaagatcatgctcaataaaaacacaaaatgataatcagaataaatgagactatcagtgcacaagta

SEQ ID NO: 363211 - DNA, 604 bp, Homo sapiens
tccatacatcacagaaaaaaatggtagtcctatttcgacccttgtcagcaaaggctgagtgggaagcctggacttccaccctcacctagaggtaatgaggtacctcttccactggttgccggggtgtgtcagagagtagaaagtaggatttgcgtcttttcccggaggtcatgaaccactctctttccatggtggtatgaatggaatctgaacttccactgccattcagcagaaatgaggcagcatccccttcccctgtagtgttgtgtcagaggaaacttgttaaaacataagatttaagaaagatccgaagtctaatatgataataagtatgatgtccagaatacagtaaaaatcacttgtcataccaaggagccaggaaaacctaaacttgaaacagaagacaccaccaacatggcatagatgttgggatgatctgacagggattttaaagcagccatcataaaaatgcttcagkgagcaactataaacacacttgaaacaaatgaaaaaatggaaagtatcagcagaaaaataggatatataaagaagaaccaaaagtaaatgttagaactgaaaaatacaataaataaaattaaaaagt

SEQ ID NO: 363212 - DNA, 493 bp, Homo sapiens
agtaatcagaagagtctgacttgcagaaaattgtatgtggtgttggccagttgatcatgttgtccctagcagtgacataggtggcagtctaccgaattcttacttgacttgtataagtgggagagttcaaggtcragtgaacagaaatcaaaccaaaataatcaaaacatagagtcacagtccctcaatcagttcccagacttgagccagtttacagaaacagaaccctttgaatgagggggaggccacattcctgtgaggaagaacacggatacactgcccaaaatttagactgttggcctttcttttagtcttccccaagaggacctatgtccttttaccagggttactgcaaattgagaaaaaggaaataatcatggttttgggtgactgctgggctttggctgtgaaccaacactaatttcaggagaccccaaacgtcactgcagtttaccagttagagtagaaggttatgtaggtcaggtgattaatg

SEQ ID NO: 363213 - DNA, 579 bp, Homo sapiens
acaactttaaaaggcttcatagttcagaaaaatgtctaacactccatctcctggcagaaagggccaaactttggcccaaaaactaaggttgagacatagtttaagtgaggagtatgtgaaagctacaatcaaggaaaccataaaaccaaaaaytgagtatccagaaacagctctctgaaggcagggtgaaaaaccaagcaatagagaacaaagaatatgagctagaagagaaaagaaaaggacaggacatgagctcctaggtgattacctggaataggtgtggccttcttttactaactcccagtgcatggtgagcagggaggaagacggtaagtaaaagagggctggctgcacacaaacggccaaggtagataagatgagagttgggaggaggttaaagcaataggagatggggaagattagatttgatcatgtctgtaggctgaagagagggaatcagagacaagagaaagaaaaaaatttacatctagggaggaggtcagaggagatagaatccaatgaacccaaaaagttaatactgggatgaaagaaaaaccctcttactttaagactgaagaa

SEQ ID NO: 363214 - DNA, 493 bp, Homo sapiens
agtaatcagaagagtctgacttgcagaaaattgtatgtggtgttggccagttgatcatgttgtccctagcagtgacataggtggcagtctaccgaattcttacttgacttgtataagtgggagagttcaaggtcaagtgaacagaaatcaaaccaaaataatcaaaacatagagtcacagtccctcaatcagttcccagacttgagccagtttacagaaacagaaccctttgaatgagggggaggccacattcctgtgaggaagaacacggatacactgcccaaaatttagactgttggcctttcttttagtcttccccaagaggacctatgtccttttaccagggttactrcaaattgagaaaaaggaaataatcatggttttgggtgactgctgggctttggctgtgaaccaacactaatttcaggagaccccaaacgtcactgcagtttaccagttagagtagaaggttatgtaggtcaggtgattaatg

SEQ ID NO: 363215 - DNA, 508 bp, Homo sapiens
ttttagatctttttattgtaaaataaaatgcaggtataagaaaccacaccaaaatacataatcagcaaattatcataaggtgaaaattattgtaaccaccatctgggacaaaaaaaattggaacwtttacagaaaccccaataccttctcctcatcacagtctcatcctccttccaaaagtaattattatcctggcttctgcagtcatcacttcttttgaaatctttatggtttattacgcaagtgtgcatccttaaacactatagtttagtcttgcccattaaaaaaattcatatgccttttatgtcacttttaatctgcaattaaaattttataatttgtctcttttccttctcctcctccttcttttctctttctcctttttcttcgtcttctttttccttcttccttcttctccttttccttctcctcctcctcttctctttctccttcttcttcatcttctttttccttcttccttccttctctttctcctcctctgattgat

SEQ ID NO: 363216 - DNA, 508 bp, Homo sapiens
ttttagatctttttattgtaaaataaaatgcaggtataagaaaccacaccaaaatacataatcagcaaattatcataaggtgaaaattattgtaaccaccatctgggacaaaaaaaattggaacatttacagaaaccccaataccttctcctcatcacagtctcatcctccttccaaaagtaattattatcctggcttctgcagtcatcacttcttttgaaatctttatggtttattacgcaagtgtgcrtccttaaacactatagtttagtcttgcccattaaaaaaattcatatgccttttatgtcacttttaatctgcaattaaaattttataatttgtctcttttccttctcctcctccttcttttctctttctcctttttcttcgtcttctttttccttcttccttcttctccttttccttctcctcctcctcttctctttctccttcttcttcatcttctttttccttcttccttccttctctttctcctcctctgattgat

SEQ ID NO: 363217 - DNA, 567 bp, Homo sapiens
tttgtcaatggagcagttagaacacacgcaacatttataaattagttcaccatcttacatgagcacagttcatggtgccccaaaacaattacaatagtagcaacaaagatcattgatcacagatcaccaccacaggtttaccaacaatgaaaaagtttgaaatattatgagaattaccagcatggaataaagagacacaaagtgagaacatgctgttgaagaaatgagatagatttgctcgattcaggattgccacaaactttcaatttgtaaaaagtaaagcaaagcaaataaaatragatatgcctgtacaaagaaagaaccttaaaagcaccaaaagagaagcgattcatcatatacaagtgatcctcaataagattgtcatcagatttctcatcagacacttgagtggccagaaggtggtgggccaacatattcaaagtgctaaaggaaaaaaaaactgtcaacaaaaatcccttattcagaaaaattgttctgtaaaagtaagggagaaattaagtaactcccagataaataaaacctgaaaagagtttattattactaaat

SEQ ID NO: 363218 - DNA, 560 bp, Homo sapiens
tccttgtgggtgggaaaaaaaatcagggaggaggaacaaaagaataaaaataaaataaaagcaggagtgaataagcagaaacaaagtyaaatatgaagaaaaaagaacaaatgagaagacaggtaaacacaaaattataactaaactctaaaaaaaataaaaagaatggttgaaatggaaataatgatgctcctagcagtgttgagcactgctacttttttctcctacttaaaccaccattgacacctttgcaaaagttgctatcttttccaaagttaaatgtaatttatcttaaaggcaccttactggttaatacatctttacaataaacactctgcaaagtgtaaaaaaactgaagaaataaattgaagtggcttttagtagtggctgggggtaccagattgacagctttggaaattgatgacttctttttctcccaagaatagatacagcttgataaacagaggtgtaagattcccccaactacttctccaatacaccttcaccctgacaaagtaatggctgcaaggaggaaagagcaagtcaccttttccagccag

SEQ ID NO: 363219 - DNA, 560 bp, Homo sapiens
tccttgtgggtgggaaaaaaaatcagggaggaggaacaaaagaataaaaataaaataaaagcaggagtgaataagcagaaacaaagtcaaatatgaagaaaaaagaacaaatgagaagacaggtaaacacaaaattataactaaaytctaaaaaaaataaaaagaatggttgaaatggaaataatgatgctcctagcagtgttgagcactgctacttttttctcctacttaaaccaccattgacacctttgcaaaagttgctatcttttccaaagttaaatgtaatttatcttaaaggcaccttactggttaatacatctttacaataaacactctgcaaagtgtaaaaaaactgaagaaataaattgaagtggcttttagtagtggctgggggtaccagattgacagctttggaaattgatgacttctttttctcccaagaatagatacagcttgataaacagaggtgtaagattcccccaactacttctccaatacaccttcaccctgacaaagtaatggctgcaaggaggaaagagcaagtcaccttttccagccag

SEQ ID NO: 363220 - DNA, 560 bp, Homo sapiens
tccttgtgggtgggaaaaaaaatcagggaggaggaacaaaagaataaaaataaaataaaagcaggagtgaataagcagaaacaaagtcaaatatgaagaaaaaagaacaaatgagaagacaggtaaacacaaaattataactaaactctaaaaaaaataaaaagaatggttgaaatggaaataatgatgctcctagcagtgttgagcactgctacttttttctcctacttaaaccaccattgacacctttgcaaaagttgctatcttttccaaagttaaatgtaatttatcttaaaggcaccttactggttaatacatctttacaataaacactctgcaaagtgtaaaaamactgaagaaataaattgaagtggcttttagtagtggctgggggtaccagattgacagctttggaaattgatgacttctttttctcccaagaatagatacagcttgataaacagaggtgtaagattcccccaactacttctccaatacaccttcaccctgacaaagtaatggctgcaaggaggaaagagcaagtcaccttttccagccag

SEQ ID NO: 363221 - DNA, 616 bp, Homo sapiens
ctgctctgtccaatatggtagccactagtcatgtgcgactatttttacttaagtaaaaatgtaatttttcagtcatactagccacacttcaagtgttcaatagccacatgtggctagtggctaccatattggacagtagagacatagaacatcttcacaatcatagaaaaaaattctaatggagagcactgagctgtactgttgaatattatgcttatacaggtacacatgtacactttgaacactttgtataygcacacatgcacaaacatacatatattaatagataaacatatacacattttacagccaggaaggaaaggtaatgaatccaaatacctaaattgtgttgtgactatccacagtgtcctttctattgtagaccaaataatatgttgatttgaatcaaaattatggaaattcatgaagggggtgatgggcattactgttaagaatggagtagaaccaagtgagtataaggctctactctttaatttctcttctctctccttaaactgtctactccatttcattctccaaaaatgaaaaactgctgcataggtgagcacttggttacttaattagacaactgaaatgtgaggatgaaattcctatt

SEQ ID NO: 363222 - DNA, 621 bp, Homo sapiens
caagaagaaaagctaggtatttgtatgtgtaattttgtattccttttttcttaaagaatttttctccttctcaatgaataaacygcatatgcacacaacttggatctgcccttgttcctgagaaggtagaaagggcaacagaaacctttttttagtttccagaacacaaatgacttcttgatagtttccatggaagaaggattatgggttgacttaaaccactctctctaaattaacttgaatcactaaatgagaagccccacaaaggggatggagaaaatgcagaaaaacccatgagattatcgtaagattttgtgcctgttcaacttcactatcattgaatgataagagacaaatacattgggggcttacagggctacttttgggtttaactttagacgatgagatccttgaaggcaagttgaacaaatgttcagtttgattgaatttgaagagaatgctgagcagcagtctccaacatcaatatttaaaacaaaccatagtggctcatttagataacctaggtccctaattaaccaaaagagaaatgaagctgaaattgcttcaagccaagtaatatacttcctgatgtatgcagtataataaagagtgggaatacac

SEQ ID NO: 363223 - DNA, 621 bp, Homo sapiens
caagaagaaaagctaggtatttgtatgtgtaattttgtattccttttttcttaaagaatttttctccttctcaatgaataaaccgcatatgcacacaacttggatctgcccttgttcctgagaaggtagaaagggcaacagaaacctttttttagtttccagaacacaaatgacttcttgatagtttccatggaagaaggattatgggttgacttaaaccactctctctaaattaacttgaatcactaaatgagaagccccacaaaggggatggagaaaatgcagaaaaacccatgagattatcgtaagattttgtgcctgttcaacttcactatcattgaatgataagagasaaatacattgggggcttacagggctacttttgggtttaactttagacgatgagatccttgaaggcaagttgaacaaatgttcagtttgattgaatttgaagagaatgctgagcagcagtctccaacatcaatatttaaaacaaaccatagtggctcatttagataacctaggtccctaattaaccaaaagagaaatgaagctgaaattgcttcaagccaagtaatatacttcctgatgtatgcagtataataaagagtgggaatacac

SEQ ID NO: 363224 - DNA, 612 bp, Homo sapiens
taaataattttttactaccttttcaattaaaaaaatctggctaaaattactctctgacctttacattaatattcctgcctaataaagagtttggggaatcctaaagactcatctggaaatgatagaatttctgtttttgtctttcttccgtggacactaatggctttttgtcagccctcttcactcagtgtatgacacgtgaagccattccatttagttgtccattaacctcaagcatagtgacaagaacaaagcaaccccctaaagaaactgagctcaaacactcatattaaatttccccaattccttagcttataaggtgctgttttcaattgtcaataatgttcrtggagtaagcgatatccattactaattaaaacaagctgtttaaacaaacacaaaaggtcaccaagcctgtagatcaacatatccatgctattgtttggtttcttggtgcattaccatctgatgatttatttctatcttctattcacctatttttctaagtaacaaatatagagaataaacacgcagaaagcaaccttccacaataggtgccatgaggcccagggctccaatgttgcactggatattgtttccttaagatcagta

SEQ ID NO: 363225 - DNA, 630 bp, Homo sapiens
tgctgttttcaattgtcaataatgttcatggagtaagcgatatccattactaattawaacaagctgtttaaacaaacacaaaaggtcaccaagcctgtagatcaacatatccatgctattgtttggtttcttggtgcattaccatctgatgatttatttctatcttctattcacctatttttctaagtaacaaatatagagaataaacacgcagaaagcaaccttccacaataggtgccatgaggcccagggctccaatgttgcactggatattgtttccttaagatcagtaatgtgcatcatatcactgcaaatgaaagcaaagaaattttcatttattttttctgagtttgtagggatcaaaggcataaaccacatggaaaatgcagtttttattaggaaaagtgacacctgtggttttctgcaagatttttaaacaatcttctatctacatggatgtgctattaaggcacaaataaaatataataccttgtctgccatgctgaacaatggcttatttttgaagttttctttatttttatgccactaagtcccctacaaaatattttgaaactatttgctcaatctttgcttgagctctgacatttgaaactgacttttcttttacaa

SEQ ID NO: 363226 - DNA, 540 bp, Homo sapiens
ggatcaaaggcataaaccacatggaaaatgcagtttttattaggaaaagtgacacctgtggttttctgcaagatttttaaacaatcttctatctacatggatgtgctattaaggcacaaataaaatataataccttgtctgccatgctgaacaatggcttatttttgaagttttctttatttttatgccactaagtcccctacaaaatattttgaaactatttgctcaatctttgcttgagctctgacatttgaaactgacttttcttttacaattgtattccctgacagtatattaattacatagagggtataatctctgaattaatatcaaaccaactgagtaagctagtataaaagtcagatagactttttaagctatttaatattaagttgtrtaattcagttattataatcatttccaaattatcaacagaagtggaaggtaagaataatttaaatttacaaaacccagcactaattcccaaacctcactttagtcaacattatcaacattgtcctccaaagcttttatccaaaa

SEQ ID NO: 363227 - DNA, 585 bp, Homo sapiens
ctttgtgaacatttttgagaacatgctttgtgacatgtataattgttcattaaaccctaagaaaataaaaggacttcattacacaaccacctctgaatgtcagtcttcctaaagaacttcccaaagaatataagaggcctagtttaaaatccccgctctcctaccttttatatgaccttagaccatagaataatcatttaacatttccagaacttaatttcttcacacataaagttgagataataatacagtaatgtatttcaagaattaaatgagataacacacttaaatcatccagcccagtacctggcaatcaaaaggtatttaataaatgccaaggataattctaataatgcaattattctaataaaatgtgtaagtcagtgaacatgatccaaagactttattcttatccatcttaattcccataaaaatgrtctaggtaagaaattctaccagattatactgcacagtaggacaacccagaggaaaaaaataggattcagatatactacattgaaaattctagatttttaccacaagcttatatgtacacattcatggattcgtggtcaagtcaaggag

SEQ ID NO: 363228 - DNA, 588 bp, Homo sapiens
tgcagtccttgtggtctagactgcctttcgaggttatttaggaccccataatacttgagccctcagctttcccagaactcaagtttcaactactgcaatgggtaattaccctctggctagggctgatctgaatgctttctgcatggrcaggtgtcagctgatttcagcatggtttgctttccactgtgacagagcagcactgagttcaatgcaaagtctcatagtcactgagctctccctctcccaagcacacagatctcttttttgccatgtgtctgttgtagggggatgggagaggggtggcattagcatttcaagactgtattttctgcccttttcatcacgtcttttagtgagaggaagttaaaaccaggtacttcgagtgctcacctaatttttgtttcttatgatggtgcttatgatggtggtttttgaatttggtattcctgtcgtcggggggaaaaatcagtggggccatctattcaactatcttactctacccattttgtcccttacacatttatgatagggctgttctagtggtgatgaagtcccccagcttttgcctgtctgagaaggactgtattt

SEQ ID NO: 363229 - DNA, 588 bp, Homo sapiens
tgcagtccttgtggtctagactgcctttcgaggttatttaggaccccataatacttgagccctcagctttcccagaactcaagtttcaactactgcaatgggtaattaccctctggctagggctgatctgaatgctttctgcatggacaggtgtcagctgatttcagcatggtttgctttccactgtgacagagcagcactgagttcaatgcaaagtctcatagtcactgagctctccctctcccaagcacacakatctcttttttgccatgtgtctgttgtagggggatgggagaggggtggcattagcatttcaagactgtattttctgcccttttcatcacgtcttttagtgagaggaagttaaaaccaggtacttcgagtgctcacctaatttttgtttcttatgatggtgcttatgatggtggtttttgaatttggtattcctgtcgtcggggggaaaaatcagtggggccatctattcaactatcttactctacccattttgtcccttacacatttatgatagggctgttctagtggtgatgaagtcccccagcttttgcctgtctgagaaggactgtattt

SEQ ID NO: 363230 - DNA, 397 bp, Homo sapiens
ctacaattttatcaccaccccagtagctcagcgcaaataaattcatgcatctgtgttaataactttgaggtacccattccaaaatgtttacattttcaatggttgaattataarggctctccaaagggaagttagaaaatcctaactgatatttttggcatgttagtgggctaatggaggagtatttgagaagagcaaatttcatttaggagattagtcttgcctaccagcgtatttgctgtctacatttcatctcctttcattctcccctttacccacttcaagcaggctgttacttccacatatccattgaaactactgccaccaaggtcaccaagtgacttccagagttaaacccagtagtcaattggtattcctcaacatatttgtcctgtct

SEQ ID NO: 363231 - DNA, 397 bp, Homo sapiens
ctacaattttatcaccaccccagtagctcagcgcaaataaattcatgcatctgtgttaataactttgaggtacccattccaaaatgtttacattttcaatggttgaattataagggctctccaaagggaagttagaaaatcctaactgatatttttggcatgttagtgggctaatggaggagtatttgagaagagcaaatttcatttargagattagtcttgcctaccagcgtatttgctgtctacatttcatctcctttcattctcccctttacccacttcaagcaggctgttacttccacatatccattgaaactactgccaccaaggtcaccaagtgacttccagagttaaacccagtagtcaattggtattcctcaacatatttgtcctgtct

SEQ ID NO: 363232 - DNA, 397 bp, Homo sapiens
ctacaattttatcaccaccccagtagctcagcgcaaataaattcatgcatctgtgttaataactttgaggtacccattccaaaatgtttacattttcaatggttgaattataagggctctccaaagggaagttagaaaatcctaactgatatttttggcatgttagtgggctaatggaggagtatttgagaagagcaaatttcatttaggagattagtcttgcctaccagcgtatttgctgtctacatttcatctcctttcattctcccctttacccacttcaagcaggctgttacttccacatatccattgaaactactgccaccaargtcaccaagtgacttccagagttaaacccagtagtcaattggtattcctcaacatatttgtcctgtct

SEQ ID NO: 363233 - DNA, 418 bp, Homo sapiens
tgtcattctttcttctgcttgatctaatctattgttgaagcttttacatgaattttgtatttcattcaataaattctttaaatccagaatttctgtttctttaaaaaatctytttgttaaattacaaattcatatcctgaattgtttttctaatttgtttgtattgtcttttagaattctgttatatctcactgagctttagaaccaatattttgaattttttctggaatttcataaatttcttttcaatggagatctgttgctgaataattattgtgttcctctggaggtgtaattttttgttgttttgttttttcatgtccttacactgatgtctgtgaatttggtgtaacagtcacttcttccattttatttttttaaatttggtttcataggggaagactttttcctaatgatt

SEQ ID NO: 363234 - DNA, 608 bp, Homo sapiens
aatgttttatagtttttatcatgcaagtctttctccttaagttaatttctaagtattttattatttttgatgctatcataaacggaattttcttaattattttaggttgttaattattaatgtataggaatgctactgattattgtgcattgactttacatcttgctaatttgataagttcacttattagtttyaacagtttcttggtgaggaatctttagagttttctacatataagatcatgtcatgtgcaaatagaggtaattttacttctttctatccaatgtggatcttttttatttttaaatttttttatttttaatttttgtggctacatggtaggtgtatattattatgggctacatgagatgttttgacacaggcatgcaatgtgaaataaacacattatggacaatgggatatccatcttctcaagcatttatcctttgaattataaacaacccagttacactctttaagttattttataatgcacaactaagttattattgattgtagtcaccctgttgtgctatcaaatagtaggtcttattcattctttctaactatatttttgtacccattaaccacccccacctcccactacc

SEQ ID NO: 363235 - DNA, 616 bp, Homo sapiens
ttattttaggttgttaattattaatgtataggaatgctactgattattgtgcattgactttacatcttgctaatttgataagttcacttattagttttaacagtttcttggtgaggaatctttagagttttctacatataagatcatgtcatgtgcaaatagaggtaattttacttctttctatccaatgtggatcttttttatttttaaatttttttatttttaatttttgtggctacatggtaggtgtatattattatgggctacatgagatgttttgacacaggcatgcaatgtgaaataaacacattatggacaatgggatatccatcttctcaagcatttatcctttgaattataaacaacccagttacactctttaagttattttataatgcacaactaagttattattgattgtagtcaccctgttgtgctatcaaatagtaggtcttattcattctttctaactatatttttgtacccrttaaccacccccacctcccactaccagctccccactatgctttccagcctctggtagccatctttcaactctctgtgtccatgagtctaattgttttggtttttagattccaaaaataattgagaacat

SEQ ID NO: 363236 - DNA, 594 bp, Homo sapiens
ggctagccaacacatattaagggagaagaacaaagttgttcttctcaagcttacatggaacatttaccaagacagaccatatttgaggccttaaaatacactttaacaaatttaaaagaataaaaatcatacagtgtctactcttagaccacaatggaattaaactaaaatcagtaacagaaagataagtggagaatcccaagacagctgacactacccaacttcaagacttactataaagtgcctgtaatcccaccactttgggaggccaagacaggmagatcacgaggtcaggagtttgagaccagcctggctggtggttcgagaccaccccatctctactaaagatacaaaaaaataagctgggaatggtggcgcgtgcctgtaatcccagctactcgggagtctgaggcaggagaatcacttgaacccaggaggtggaggctgccgtgagctgagatcgcgccattgcactccagcctgggcaagaggccgagactccatctcaaaaaaataaataaataaataaataataataaaaattttactgtaaggctacaccaaataagacagtgtggtattggcaaaagagca

SEQ ID NO: 363237 - DNA, 588 bp, Homo sapiens
tttataccatataaaaattaactgaaaatagatcaaatatctaaacagaagagctaaaactatacaactcttagaagaaaacaggtataaatcttcacgaccagtgattaagcaagtttcttaaatacggcaccaacagcccaagcaaacagcaaaaagaaattagacttcaccaaaattaaaaacttttgtacattaaaggacactatgaggaaggcraaaagacaacccatagaatgaagggaaatatttgcaaatcatatatctgataagagtcccatgacaagagtcccagaatatacaaacacaactcaacaacaaaaagacaaacaatccaattaaaaataggtaaaggatttaaatagacatttctccaaagaaggtatgtaaatgactcataccttcatatgcacatagaaagatgctcaacatcattagtcatcagagaaataaaaaccaaaatcacaacaaattaccacttcacatccactaggatgattataataattttttaaagaaacagaaaataagagttggcaaggatgtcaagaaactggaaccctgtatgttgctgtcagaaatgtaaaa

SEQ ID NO: 363238 - DNA, 455 bp, Homo sapiens
acccattttaactacgggcctgcttaatcaaagtgaaagggcagtagaaccagcgcagcttcactttcccttctccaacatggcctcgagggcatggggagaaggaggaggtttccgctcgaccccgcccgcgcctcggggcgggccaatcatggcgggcagctcggcytgcgcaagcgcgctgccagcagggcgcagcgcagacttggtgaggtgattattttggcacctgttgccatggctcctccctctctcctgccgggggccggaggcggaccgggggctggcagtcggcagcctccgccccctcaaccttcgcggggcgcgggccgcagcttttcggttcacagcgggcagggaaagccgcgggaagggtactccaggcgagaggcggacgcgagtcgtcgtggcaggaaaagtgactagctccccttcgttgtcagccagggacgaga

SEQ ID NO: 363239 - DNA, 585 bp, Homo sapiens
tatacactcgttttactaagacttagtgggctccaactatatgagaggtaaataaataatrttaagtgttgaggatgcaaaaagaaaaaagaaattgtcattatctcaaagaagttgccatctaagcacaacatgcaaacaaatataatacaatataataatagagttatccacaagacaggaacacagatgaaggagtggctacatgtgtccaggaaatgttagagaaatatcacaaaaaagagctgagatttgaagaatgaattttaaatttaccaagtagatgggagatacccgagaaagcaggtgatctcagaaagaaagaagagtataagcaaaagcacacagtaatgaaaactttttaagctctgaggactataagtagctggctgaggccaaatcaagaaaaatcatgtatacagtatatatttggaatttattttacaaaagatattgcaagaccatctctgggcttccttctctttcacctatgccataatagggtaccctaatgggactccccagtatatgatggggagtctctatgctatatataattaaaatataattgcattaataaggaat

SEQ ID NO: 363240 - DNA, 601 bp, Homo sapiens
cactgggccttcagctcatgaagaaacatccaccagggactctgctcttcaggacacagatgacagtgatgatgacccagtcctgatcccaggtgcaaggtatcgagcaggacctggtgataggttggtaaatttttaattaacatgaactgtaaaaaatgtatttcacaaggatttgtttgaagtcatktaagggaatctctccatttttgacagttgcttcctctaagagtgtctcattcatataaacttaaagaaactttacagtttactgtaaatgattttacgtattatattctttgagcactgtgcattaatagggaaataaaaagtcttcattctccatatctctagcactgaggcttgcttctgaatttacagatcaagagaaaagaatgttaagaatgacccacaggttatttatgaagtcaaggttatacttagctctcagattatcttgtagatatccaggcctttatcagtgttgttttggttttaatgttaattttttctgcttttctattgaccctggattaaggtagtgtgttagtagttctgtttttgggaacactgtttttctttgatttctactaaacttagt

SEQ ID NO: 363241 - DNA, 601 bp, Homo sapiens
cactgggccttcagctcatgaagaaacatccaccagggactctgctcttcaggacacagatgacagtgatgatgacccagtcctgatcccaggtgcaaggtatcgagcaggacctggtgataggttggtaaatttttaattaacatgaactgtaaaaaatgtatttcacaaggatttgtttgaagtcatgkaagggaatctctccatttttgacagttgcttcctctaagagtgtctcattcatataaacttaaagaaactttacagtttactgtaaatgattttacgtattatattctttgagcactgtgcattaatagggaaataaaaagtcttcattctccatatctctagcactgaggcttgcttctgaatttacagatcaagagaaaagaatgttaagaatgacccacaggttatttatgaagtcaaggttatacttagctctcagattatcttgtagatatccaggcctttatcagtgttgttttggttttaatgttaattttttctgcttttctattgaccctggattaaggtagtgtgttagtagttctgtttttgggaacactgtttttctttgatttctactaaacttagt

SEQ ID NO: 363242 - DNA, 519 bp, Homo sapiens
ctatagtctgggccaaatctacattttgtctatctcacttttcacttcttcattcactccatgctttggttaaattgaattagtatatcatatatgcagtctgcctgtttacttattaacactctgcttaaacttaccttttccataaaatattttctataattcagctgaaaaaatattttctttctcaaagctccataggatgttaactgaatttctcttgtggcacaaatcttgttctaccctctaatatagtgatgtatatacatgacttacctcatagtctggcagctttgcatccttctctatgcttacatttgttgaacgaattagtgaactttccagtttcttctctttataaactttagactagttttacatgytcctatggttccagaacagttggaggagtttaataagagggactgttgattaaaatgtctcacattttagccgggcacggtggctcatgcctgtaatcccagcacttttggaggctgaggcggttggatcacctga

SEQ ID NO: 363243 - DNA, 530 bp, Homo sapiens
tttctatcactggaagtaataacaatgaattgcccccaagagtttttttctttaaaaggtcatttcagttttataaaaactcagaaaaaaaaaaaaaggctgcaataaacactctacatagtgccctctaacgcccccaaacatgtttttaaaatactgatccatgttactattttatgacaaagttttttttgaaagagtgtgggactgtaggaagaatcggtatttttcaaggatgccagaaattcagagattgggtatggtctttttttttttttttttagagtagccttttttaatatacttattcctaagcttttcccagaaaaggtttaaagcaactaaaattatttaataaacagtgactttttcgtgattatttctcaaaggtgatgtggagagagtagaaactgctttgcttaaaaaaaaaaaaaaaaaaaaaaaaamctttaaactggaagcagttcccgaaataattttagtttgttgactgtccacaaccaaacttggttggtttttaagcttttgaa

SEQ ID NO: 363244 - DNA, 556 bp, Homo sapiens
cacattgctataggagtaacatataaaatgtgtcatcaaatgtcacattttagatgacattgctttttaagagctagaataagcaatctgtaatctagttattcataagcaatactgagagataaatattttatagacatctaaaactaaaaatcaaaattcagtttccagaattctgacgtacacaagacaaaataaatgatggttgaaattccagaacattgagataggtaagatttgtgctaccttaaaaacatatatkttctaccttgtacagaaatataaattattggttcttagtgaacatacacacctccgtatccagtaaattaatgaactagtagtggattcataatgctactgaagaaccacgtttttagctcctaaaataagttcctataaatggtaatgtaaaactgaaaaagggaagataagggtacaaagatgaagtactttcatcgtgtcacacaggaagtagaactttaacatatccttccttttttgctttaatatattactgaggctggggacaagtggccatttgagaaccagacct

SEQ ID NO: 363245 - DNA, 593 bp, Homo sapiens
gatctgccgtcactggggaggcaatgtcctgggtcccaaatctgtggctcgcattgccaagcttgaaaaggcaaaggctaaagaacttgccaccaaactgggttaaatgcacactgttgagatttctgtacataaaaataattaaaataatacaaattttargaaaaagaaaaagggcaggagaccacccattgcagtgggctatgcactggctgaagaatcctttttttttttttttttttgagacggagtcttgctctgtcacccaggctggagtgcagtggcatgatcccagctcactgcaaactctaccccccgggttcaagtgattcttctgcctcagctgggattacagtgattcttctgcctcagctgggattacaggcacctgccaccatgcccggctaatttttatatttttagtagtgacggagtttcaccatgttggtcaggctggtctcgaactcctggcctcaagtgatctgcccacttcagcctcccaaaagaatccttcatctttagtttgcagtgagaaagaaagaaccacataagactctgcaatggagatactggagtacaagattagccaggga

SEQ ID NO: 363246 - DNA, 602 bp, Homo sapiens
tgcagaaggatatagagcgtaggcaattgttaaataaatttgattcatgtatatcaatgatgcccaatagaatcacctggtgtgacccatgccacaccaattaaatcacaatctgtgggcttagggccagggcatcagtgttgttttcaagatactaagtgcagcaataatcgataaccactgataaagttacttcaatgcctatttatactttttaaattcggtgattacaaaacatatactttctttgaagctatacagatatartatccaaattggtgatcacaattgattagtttaagtagcttcaaaattggcatgtggctttcttgactaggttcccagaatctagatgtaataggttgggtgttggggcaggatgtagaaactgttaacattgttcttggagtgcctggctggcttgaagcaaaagattgatatacataaattttattggattgtaagaataatgatcctgcgtctagttatgcatcttcataggaaaggttttaaaatgtactttcagggcattatatttgaatccagcattaataagctctggaaacaagaatgggctattttactcttggtgagagggccag

SEQ ID NO: 363247 - DNA, 334 bp, Homo sapiens
caggggttcccaaccctaaggccatggaacagtaaaggtccgtgacctgttaggaaccaggtgagctgccagtaaggtgaggtgccagtaagcaaccatgcccacctgagctccgcctcctactgcacatgcgaggaatctgggtttcatgctcttatgagartctaatgtctgatgatctgagatggaaaaatttcattctgaaaccatcccccaaccctgcacaccatccatggaaaaattgtcttccatgaaatcagtccctggtgccaaaaatattgggaaccgctggtttacatgattaggctatgtaaagcctattcactcctgaggt

SEQ ID NO: 363248 - DNA, 529 bp, Homo sapiens
tcatataaagaaaattccctcctcctgggatgtcctgcttctacagaatcttcataaagtgacattctgcccatccaccaagatctgacctatgccctcctagattcctccaatctttccttgcagcacttaattgcacctaccatttgctcctgtgatatctgtttaattgcttatacgaattctacgtaatcttagactgtacactcctggagggcagacacctmgtcttacacatctttgtgtactatctaccacctccatactacttccaagaatctaacccagggcttagcactatgcagttcttaataaatgtctgttgaatgaataaataaataagtaaagtaatacataaaagaaattagaaaactagtgcctttcagaaaaaatcctgtcacacaaacctgacaaaaacaagcaatgaggaaaggattccctatttaataaatggtgttgggaaaattggctagccatatgtggaaaactgaaactggaccccttccttacaacttatacaaaaattaac

SEQ ID NO: 363249 - DNA, 502 bp, Homo sapiens
tacccacagctgacctccaacagcaggaagaaggagcttcagctttggacctggtccctggccccacctgactccaggaggctgcccagatcagaacagggaggatgctggtttcagtygggaagaccaagcaagaaaaaaaaggtgagaaggctcatggggccccattcctttccattcacttcactcacacaggaggaaactgaggcctcccagcaggtcagagacttgcccggccacctagggcgtctaagtcaacaggaaaaggctgctcattctggtttttctttttccaagcctcttttccaaacatagagctcctcatctgaccgtgcagaaaacagcaaaagcctccctgtattaaagtcccaccaggaacacactgtacaggtcactctaactcgggcacacactgagtcctggaagtgcagacagagccagaggagccccaagcccctgcccctgttaactgggtcaccgcttcacaccgagaagtgggagg

SEQ ID NO: 363250 - DNA, 587 bp, Homo sapiens
aacaaaaatagactgctgctgcatgacagaggtcccagctttgaacaggagtgcacctggtcatccactttgtgtgaagagagtggcttgaaggaaggataagcacggacttctgagcagtgcagaatggatcatttggaattgaactatttggattggaagattgggaacaaagagatctggagtagaaacaggttcatggacccataggaatgggcaaactgtgtatcatgcattaatgtccattagggagtattcactgtagaagaggctctacaaaactagatggacaggatgacttgactggtaaatgtcaggtagccctggccacaccagggctggcacactgggcctcctcaaagaatagtcacggatattcaaatggaggctctgcgtgagcccagtggaagggtctccctcccaccamtgctgatctagttactgccactgctgaaacccgtctgaaagatgcccagtatgctatctctcaagaagacaccatttagttgcaaataattccttttctaccttgaaaagagaagtgatttgtcttatccaggaatagcatattttctgggtataggttt

SEQ ID NO: 363251 - DNA, 578 bp, Homo sapiens
aatggaaaacatcagtaggcttggaatcttgtgtttcagttctacactgccacaaacttgctttcattaccttgagcagcttgcttctgattcyttctctacaaaatgaagggatcagatgattctttcacaaactatagctgtttcgttcattatgactaaaagagtgaattcttttactagctaattacataatttgtgcttctcccttcattttttttaaaaattaacagaacactttgaagatgttagtatcaaaggaatcaggaatgacacttaaaattctaagagtgccctatattcatgaaagatgcgttacatgtcacgatgtatatttatttggtttctaaaaaggaatgcataaccaaatgcaaggtatactcatgtagagtttaatggggttttattgtaattgaaatgttctacaattgattctttttgtgattatggtttttgaaaaccaaactaaacttgaagcttataacataacatgaaagcctgaggttgggatagcataaagaggagagacagttttttcttttctcttggcccctgcagatacactttccactcttctc

SEQ ID NO: 363252 - DNA, 578 bp, Homo sapiens
aatggaaaacatcagtaggcttggaatcttgtgtttcagttctacactgccacaaacttgctttcattaccttgagcagcttgcttctgattccttctctacaaaatgaagggatcagatgattctttcacaaactatagctgtttcgttcattatgactaaaagagtgaattcttttactagctaattacataatttgtgcttctcccttcattttttttaaaaattaacagaacactttgaagatgttagtatcaaaggaatcaggaatgacacttaaaattctaagagtgccctatattcatgaaagatgcrttacatgtcacgatgtatatttatttggtttctaaaaaggaatgcataaccaaatgcaaggtatactcatgtagagtttaatggggttttattgtaattgaaatgttctacaattgattctttttgtgattatggtttttgaaaaccaaactaaacttgaagcttataacataacatgaaagcctgaggttgggatagcataaagaggagagacagttttttcttttctcttggcccctgcagatacactttccactcttctc

SEQ ID NO: 363253 - DNA, 579 bp, Homo sapiens
cagtaggcttggaatcttgtgtttcagttctacactgccacaaacttgctttcattaccttgagcagcttgcttctgattccttctctacaaaatgaagggatcagatgattctttcacaaactatagctgtttcgttcattatgactaaaagagtgaattcttttactagctaattacataatttgtgcttctcccttcattttttttaaaaattaacagaacactttgaagatgttagtatcaaaggaatcaggaatgacacttaaaattctaagagtgccctatattcatgaaagatgcgttacatgtcacgatgtatatttatttggtttctaaaaagraatgcataaccaaatgcaaggtatactcatgtagagtttaatggggttttattgtaattgaaatgttctacaattgattctttttgtgattatggtttttgaaaaccaaactaaacttgaagcttataacataacatgaaagcctgaggttgggatagcataaagaggagagacagttttttcttttctcttggcccctgcagatacactttccactcttctccattagaacatgg

SEQ ID NO: 363254 - DNA, 562 bp, Homo sapiens
ttctgtgacaaatagaactcacatatttcttcctgcatgataaaaagtcaccaccagcatttaatgatatccagaatttttaaaaagaaacagctaaaaaaaaaccctaagtatttgcaaaatatacattgatgaacctcctcttcccttattttactatttgtttcatcttatattttcaatgtcaaaaaatgcaaaacttcaaaatagtgacagcttaataataactgccatttctttaatgcttaacaaggcacattgccaaatactttacatattgtcgtgtagctagtgagatgtaacttttttcagtcttgagaagcttccagatagttgtgtctgaatggaggcagcagatcccttagagtagatctkcagtggagaggactccgtttcctttcttggatttttgaaggtatgcaaatgcaccacgagtaagtggtaatcattgtctttgaggaaggatgtaacagaatcttctacaaccgaacaaagtcttctcttcccaatgtcctggcattaagaaaagtttagtaaatttactcagaaaattaaaaatgct

SEQ ID NO: 363255 - DNA, 612 bp, Homo sapiens
aaaacttcaaaatagtgacagcttaataataactgccatttctttaatgcttaacaaggcacattgccaaatactttacatattgtcgtgtagctagtgagatgtaacttttttcagtcttgagaagcttccagatagttgtgtctgaatggaggcagcagatcccttagagtagatcttcagtggagaggactccgtttcctttcttggatttttgaaggtatgcaaatgcaccacgagtaagtggtaatcattgtctttgaggaaggatgtaacagaatcttctacaaccgaacaaagtcttctcttcccaatgtcctggcattaagaaaagtttagtaaatttactcagaaaattaaaaatgctcatttggggagaaataagaacaagatccaaactctctctttttgaggctcaactctactaaaatttcaatgataaatgaaaatggcacaaaccaagatatttatgtaggaaatgataccaaggaccacraagggcaacttggctttaaggaagagggcatagaatggagacctggatttgacaccagatctgaccacttttgtgcaaacttgacttcagaagaacttgttactagtaattggatt

SEQ ID NO: 363256 - DNA, 593 bp, Homo sapiens
gacaggtgttggatagagaagaaaggctctagacataaaattttaagattgctttcttttaacagctccctggggtagtagtctgtgttttgaaatcttaaatataataagtctgttgcacaggatcctataatccataggaccctattttcttccagtccagacccctcatcactgaccccaacaattcatgttggattacctatrcaggctgacattttcaatctcaactctgagaatcttaggaagagaagaagtttgtaaaaaaaggtctcgtttgaccccttcattttatagatggaaagactgaaccccacaagtaaattaacttgccgaaggccacatagctagtggtagagctagaacttgaagccaggtgttccttgcaattttcactgcttggacaattatttctcggttaatttggatctgctgatgccagtctcagcttgtgttcatagatttttgtcttttgtccatctacttcctattataagtgaacttagattctgaacatagcttttctggagggcccaatatctatttctaattgagcacctgaatttacttcttcccttaccaaacatcttgcc

SEQ ID NO: 363257 - DNA, 536 bp, Homo sapiens
tgtttctactccactctaagaaggcttattattccaagtgcttattagccatttcctcaggaagttcatttaagaaacatagggagaaggtacgttgtcacccagtttaggggaagaaaatggaatagaggcagagagaggtaagtgatttctccaaggtcaccctttactctgggaattggcaaagccataactacattgcaaggctgtgccccaaaagagtagatgtccttactggtcctgcattatcctgcttcagacatatagcaaaaagtttgtctgagggtctgctgtaagctctcgaaacactcccactttgctccaaaggtacccttgccagtggttcctattgtgtttttactggaatgttttcacctctaagggatatttgcggttaacccckttagtcaccctcaaagaaataaatggtacggaaagaagtcatatccctgaactatccacaagcctcccattttccccaaggaagaaataaacacccagaagttgaggccaagtccatgtaccccagcctccca

SEQ ID NO: 363258 - DNA, 623 bp, Homo sapiens
attattaccaccattttgcagatgagaaagtaaatctcagtgaggttgcttgcccaagttacacagctagtttgaccctacattttgtgtgcttttccctattccttgaagtaaagatgcctcaagatttgagtgtcacttttgttgcatacagaagatatatgggccaaaaaataccatattattctgtttcataatagttattgttgggcaaattcttggaaatgtttgtttagaaatagcacagaatctaaatgaaataagaattagtttattgcttttgctagacaacatgatatcgtggttaagaggctaaaatctgaggttggataggtttgggttcgcaccccagctactccacytcatgagctctatgaccttagcaagttacttaacctctctgagtctcagatttctcctctataaaatggaaattagaaataataactacctaacaggatgaaataaggcaattattcatttatgaataaataaatgcatttatgtgtttagtacagtgcctggcacatggtaagcagtctacagcacactcacatatatcccattttggttacaaagaattggctttataactggatttgtttcttttggtctggcttgat

SEQ ID NO: 363259 - DNA, 623 bp, Homo sapiens
attattaccaccattttgcagatgagaaagtaaatctcagtgaggttgcttgcccaagttacacagctagtttgaccctacattttgtgtgcttttccctattccttgaagtaaagatgcctcaagatttgagtgtcacttttgttgcatacagaagatatatgggccaaaaaataccatattattctgtttcataatagttattgttgggcaaattcttggaaatgtttgtttagaaatagcacagaatctaaatgaaataagaattagtttattgcttttgctagacaacatgatatcgtggttaagaggctaaaatctgaggttggataggtttgggttcgcaccccagctactccacctcatgagctctatgaccttagcaagttacttaacctctctgagtctcagatttctcctctataaaatggaaattagaaataataactacctaacaggatgaaataaggcaattattcatttatgaataaataaatgcatttatgtgtttagtacagtgcctggcacatggtaagcagtctacagcacactcacatatatcccattttggttacaaagaattggctttataaytggatttgtttcttttggtctggcttgat

SEQ ID NO: 363260 - DNA, 550 bp, Homo sapiens
ctccgggtcccgggtctcagcatctccatttaccttgagataaatccattggtgtgaccaccactgcaccgggtgacaaatcaccccagccggccgagcagcgcaagggcttattggccttcctttaagtggtcttacccttcaatgaaaaggatggggcttgtcaagcaggaccagattaaagttagacaaaaagaaatgatctgttattagaaaactcygattgagaatcacaaaacaggaaagaaatatgaataaaaatttccagggggaagaccatctgatcccaacagaaattaactcccattatgagcacaaggtaatagatggcctgcagttggaactaatgaggattttagattaaggaggtgtggggctcggctgggggtgttagcagctgctctgggtattcaagtgaaaagttcagaaatggcctgggttcctggcttcctggactgggtggtggtgttcaggtggggcatggaaattacaagctcttagaagcgaggactcactcacgaaggcttggatacttcacagaatgttaaca

SEQ ID NO: 363261 - DNA, 617 bp, Homo sapiens
agctgaatgctgatttccccccattttactaaaaatagccctttatagagggacagctaaccaggaaatatcctgcttttcttcccaagtctgttctggagcatttctgaaccaatgttggctctcggcaatgagatagtatgtcaaaccctgaattcgagataggatacccaggtttaagtaccagcgtcctccgacaccagcttcatgttcttcaacaaataactgaaactttctgaagctcagtgttttcacatgtaaattgaaaaggcagggatgaatcttagtccctttcagcaataaaatgttaggagaccattttaacgtggttttgggcacgttggtgcaatggcaggttggacctgggggtggggaaggggcgctgartttctcccatgcactctgaactaggagtcaggatactggggtcaagtcctgatccttgttcttgttcagtggttccctacttggggaggtaggtggatgcaggatacgaggtgtggtatttggtcatgtctagagacatttttgttgtcaccactggggggtgctactggtatctagtgggtagaggccaaggatgctgcccaacatcccataatgcacaggacaggtcc

SEQ ID NO: 363262 - DNA, 481 bp, Homo sapiens
atcactagtcaggcctgattcttttgtcccargaattgtgcgaggcagtgtgtatgcaagatgaaaaaagacacagtcgctgccctcaaagagcttagaggcttttaatgtgttactataaataataccagctaacatttactgggtgctttctttgtgccaggcattgtttcatactttattatgcatattttatcttttgttgggtattattttattctcattttgcagctgaggaaattgaagcctaaagaagttaaataatttgctgaaaattccatagctagtaagtgttggagttgagattcaaacccagattacagcctatattctaaactaaaccactgcactaaaaaacctcctgaatctttagagtccctgagatgacctattacacattatgcgaaattagataaagtgtcatccttaaaatgaataactagttagatattaatattttaaaaataataaagggaagtga

SEQ ID NO: 363263 - DNA, 599 bp, Homo sapiens
ctggtttaatcttctatccaaaccactcaagctttctgcatatcaacaataaagctatcttgctttcttatcactcttgtgttcattacagtggcacttttaatttccttcaagaactcttcttttaaattcagaacttggctaactgtttagctcaagaggcctagcttttggcctatctcagctttcaacatgccttcctcactaagcttactctaatctaccttttgatttaacgtgagagatgcaggactcttcctttcacttgaatgcttagaggccattgtagagttattaattggcctaatttcaatattgttgtgtcttagggaatagggaggcctcaggagagggagagagatggggggaatggccaagtcggtggagcagtcagaacacacgtatttatggattaaattatctgtctwatatagacgtggtttgtgtgctccaaaacaatgacaacaataacatcaaagatcactgcttacagaccactgcaacaaatgtaataatggtaaataagtttgatatgttgtgagaattagtaaatgtgacatgaagtgagcacatgctgttgaaaaaatggagcccataga

SEQ ID NO: 363264 - DNA, 616 bp, Homo sapiens
tatgggtgtgaagtagagatttaaggaattaattctttaaaaaactgttttttattttttagcttttttgtagagatgggatcttgttatgtttcccaggctggttttgaactcctggtctcaagcaatccttccgccttggcctcccaaatactaggcttacagaagtgagcccactgtgcccagcctaattcttacaattctggcagagaaatagtcattaaagtttactgtactttgatatggcattcttgggcaatagttcagttcaaaaaacattccttgggtagccacgatgtcccatggcaaatttaaaaataaatagtacctgccttcaraaataaattctgtactattccagtgaaaataaaataagtatgatgacatatattataagaattagtaaggcaatgctataccaagggatggggatggacaatgggaatggtccaccccaggtacaagcgtcatctgcagaaaatgtaaaaacctgaccacatcttggtttacttcttattatcaccatacagtagcaattctaaatgacaactatactgggttgaatagtgtccccctcaaaatgtgcatccttccccggactttggaatgtggcctt

SEQ ID NO: 363265 - DNA, 558 bp, Homo sapiens
agagatttaaggaattaattctttaaaaaactgttttttattttttagcttttttgtagagatgggatcttgttatgtttcccaggctggttttgaactcctggtctcaagcaatccttccgccttggcctcccaaatactaggcttacagaagtgagcccactgtgcccagcctaattcttacaattctggcagagaaatagtcattaaagtttactgtactttgatatggcattcttgggcaatagttcagttcaaaaaacattccttgggtagccacgatgtcccatggcaaatttaaaaataaatagtacctgccttcaaaaataaattctgtactattccagtgaaaataaaataagtatgatgacatatattataagaattagtaaggcaatgctataccaagggatggggatggacaatgggaatggtccaccccaggtacaagcgtcatctgcagaaaatgtaaaaacctgaccacatcttggtttacttcttattatcaccatrcagtagcaattctaaatgacaactatactgggttgaatagtgtcc

SEQ ID NO: 363266 - DNA, 570 bp, Homo sapiens
caaggaaaggattagaaaaccagactactaagggttagatgtgcaattccatgatttwaaaaaaaaatgtataggctataggaagatacatagcatgagtatcataagaaagatagtacagcatagtacagagtgtgtttagaagtctatggccctgggttccaataccaactctgtcgtttctagcccaagcaatttcctctctttctcattttagtttcttgtatatctgaatcttgagcaagttacataactgatccatgcctcagtttcctcatttgctaaccaaggaaataacttccccctcacaggttgattatgaggattaaaagagatgatgaatgtcaaggacttagcagagttcctaaaggaccgtaagcacttggcgggcccccagtctcggagagctgagaggaactctctgaaacagccccaccttgttccttgtgcaggatcataggaagggctgacctcagtgaggatgctgatctcagagatgctgaatggagtggccttgtccatactctgcccaatgtctagtgaacacatagaaatgcagttaaagctggg

SEQ ID NO: 363267 - DNA, 623 bp, Homo sapiens
taatgcattgttgtatttatcactgctgtgcacacacagggggaaaaagccagtttcacttaagaatgctttgatgaagcagtaaaaattattaattttaataaatatagacccttgagtccacactcattgaatcttctatatgacaccatggaaatatgcataaagcactctgatacacaccaaagcatgaggcttgtcttgaggaaaaacactygcatgagtgagtagccactttttttcatggaacacattttcacttgaaaagaaaaactgacaggcaaactacatttatttagacatgggtatttttggctgatgttttctcaaaaatgaatgaagggagcctgtcactttgaggaaaaatgactgacaatatttgttaccaatgataaaatttgaactttcatatgaaaattagaattctggaggacttttatacatcaccgtgaaattgtcagcttccctaaatctgaagacttttctgatgagatgcgatgctattaatgactgcgatttttttccatgttgcataatgaaacatgtcaatgttttgtagatctgcataacccagtgaaccaacactattcgaaatgaccaatgcatgatggtgtaaaattgta

SEQ ID NO: 363268 - DNA, 520 bp, Homo sapiens
ttgcacagttgataaatggcagagccaggttgtgagcccagtatgtgctgcctcttgccagatgtttctcacttctcctatacagttattgcccttctttcaagtctaccttttccaaaaaatcttctctgacttctatatcccatgaaatttctttccatgaacttcttaacacttactatgtacttcatccctgtaacaatcaccacatacacacgtatatatgctatatttttaaaggatgatgttttgtttctccarctactttctctgaaggcatagaggtgttcgtgttgtaccaaatcttccctccaggcttccgcagttttaggtccgtacttttccaagtaccatgggttacaggttgatatgaatgaatactgaatcaggaatcagaggacctgaattttagttcttacttgctgaaggtaggggaaatagaatgagagagtgggcttgagcccagcattcagtccctttgaaccacagattccttacttgttataaaaggggaaatggc

SEQ ID NO: 363269 - DNA, 597 bp, Homo sapiens
gaaataaaaaaattgaagtatcagtattcacatcttaataataaattccaaaatttcrcacatatctgcctcctatctcagttctgaatttattatacactttcaaaaagaaagttaaaatatataaaaatgaaaaagaacagtcaaaatgatttattatgaatagactttatgaatttcagggtttttaaaaggaaaatatgaaaacttgaatttcacagaaaactctaagtttccatcaagttcatgattttgttcattgtaagcgtgactttttctgttcttgcagctttcagtatacatatattactgttggatatgggttgatagatgttcctgtgaaaaccaaggaaaaggagggaaaagcaatatcccttcttaaagtttgttgttttatgttttaatatttttatttgaatgtgttgtccttatcaaagttgaaaaggaaatgcctccttaaataaattagcacatctttttgtgtgctatgctcatttgcaatagaataatgccaagattaaatctggtcagcaggcctttgtggattgcctgatatgtttttagcatagtgattcagaaaggaaacgttttgaaaga

SEQ ID NO: 363270 - DNA, 597 bp, Homo sapiens
gaaataaaaaaattgaagtatcagtattcacatcttaataataaattccaaaatttcgcacatatctgcctcctatctcagttctgaatttattatacactttcaaaaagaaagttaaaatatataaaaatgaaaaagaacagtcaaaatgatttattatgaatagmctttatgaatttcagggtttttaaaaggaaaatatgaaaacttgaatttcacagaaaactctaagtttccatcaagttcatgattttgttcattgtaagcgtgactttttctgttcttgcagctttcagtatacatatattactgttggatatgggttgatagatgttcctgtgaaaaccaaggaaaaggagggaaaagcaatatcccttcttaaagtttgttgttttatgttttaatatttttatttgaatgtgttgtccttatcaaagttgaaaaggaaatgcctccttaaataaattagcacatctttttgtgtgctatgctcatttgcaatagaataatgccaagattaaatctggtcagcaggcctttgtggattgcctgatatgtttttagcatagtgattcagaaaggaaacgttttgaaaga

SEQ ID NO: 363271 - DNA, 574 bp, Homo sapiens
cttggcttttactccaccaaaatgatttctgaaagctgtgcagtgggaggatttttatgttaaatcatctacactatgagatcattatattcctatrcactgaggacaagcaggagactataactctgataaaagaccaagacacttctcttccagggccattgccaaaaacaggaataaaagcacctggagaaatagcattgcagaagttgaggatctcagagtagccagatgtgccaggtgttgtctttgatgatggtgtttctaatctggttgcagagcactggcatgtttggaaacttattttgtttagaaattttgatttttagaattcaattcaacaaatttgctcagggacgcacagttttaaccactagtctgctaggctaaggtctttagcagttttactgttactttgggagaaagtcattcctctactttaatctcatggtcttgtggagattttttttaattaagtaaattaatttttaagtatagttaaggtagtggttctcaaccacaggcaatttttctccttggggacatttggcaaaatgtctcctcaggagacagt

SEQ ID NO: 363272 - DNA, 586 bp, Homo sapiens
aacaaatttgctcagggacgcacagttttaaccactagtctgctaggctaaggtctttagcagttttactgttactttgggagaaagtcattcctctactttaatctcatggtcttgtggagattttttttaattaagtaaattaatttttaagtatagttaaggtagtggttctcaaccacaggcaatttttctccttggggacatttggcaaaatgtctcctcaggagacagttttgattgccayggagaagggggatgctgctgttacctggtgtgtagaggccaggggtttctgcctaacatcctacaatgcacaggacagccccccaagcagataagtacccagtccaaaatgtcaatagtgctgaggttgagaaacccagagttaatgtattgttggctgtaacattacatgtatatttaacatatatgtaatgctacattatgcatatgttgaatatataaatgctaaaactcagtaatttactgcagtgggtgcttgtgtttttgcttatgtaaagtcaaaacgtatgtccttgatcaatagtttcctgcaagcagggatttagagacccaggctcct

SEQ ID NO: 363273 - DNA, 579 bp, Homo sapiens
taatgtcatgtattatttgctctcttaacatactgtgcttcttttttgaagcacttaatacaattgaaagtaattattagtgtaattatttgtttgatacttgttatccaaagtagactgtcagtcccttgggggtagagactggtttatctggctcactgcaatgggaagaattaaatgcatttggcaaacatttattaacttttactatatgccagatatggagaagatgctccataaatatattgatgcaatgaaagaatgaattaacacaggtaaagcaagtgactgggaggcaatggctaaagcaactataaaacaactgtaccttaattagttgtttaatacattgcccactgccgcagcccactttgcccatgaggttgtagaaggttccataagatggccaaygagagaatatgtcttactcagagctggagttggtgagcagtggttccattcttttcttgaaggctttaattacctgttctcagttctgaatgggtgttagctatttccttttctaagcttttttcttgtcaatcttctttcctccttttcctctaaatcagtaagcaa

SEQ ID NO: 363274 - DNA, 618 bp, Homo sapiens
ccaagagtcatgctgaatagccaagtgaattaggcttagaaaaaaatcgtgtctcaatgtggaggctgctcatgtggaaatgaacaggatgtgtcatccttgcgatggatcaagaggccaaggtgctgagaataagcactggaccaagaatccaaagacccggtttcaaccccaggctttgtcatgtagtggctgtgtgtctctatgcaagttaagtaagttattggactaattgtttttgtaatctgtgaaagaagacaatgtctaattcatagaattgctaagaagattaagtgtgctggcctatgatagttcctggtccatactaagttcagacataaatgtttgctgaatgaatagaatacttcccaatgcattatactttttctggttgatcctgarctagaattctttccattcattcattcattcattcattcaacgtatacatatgtttgcttaagaaggttcagaaactggtttccaagccacattttgagaaatatatttttggattggaaaagaatgagcttttgaaatcactgaagcaggcaacacaatatagtagataataacaacaacaactactaccagttattgtgagcataccaagtgtca

SEQ ID NO: 363275 - DNA, 618 bp, Homo sapiens
ccaagagtcatgctgaatagccaagtgaattaggcttagaaaaaaatcgtgtctcaatgtggaggctgctcatgtggaaatgaacaggatgtgtcatccttgcgatggatcaagaggccaaggtgctgagaataagcactggaccaagaatccaaagacccggtttcaaccccaggctttgtcatgtagtggctgtgtgtctctatgcaagttaagtaagttattggactaattgtttttgtaatctgtgaaagaagacaatgtctaattcatagaattgctaagaagattaagtgtgctggcctatgatagttcctggtccatactaagttcagacataaatgtttgctgaatgaatagaatacttcccaatgcattatactttttctggttgatcctgagctagaattctttccattcattcattcattcattcattcaaygtatacatatgtttgcttaagaaggttcagaaactggtttccaagccacattttgagaaatatatttttggattggaaaagaatgagcttttgaaatcactgaagcaggcaacacaatatagtagataataacaacaacaactactaccagttattgtgagcataccaagtgtca

SEQ ID NO: 363276 - DNA, 567 bp, Homo sapiens
tccatcacttataagccatgtgattttgagtgataaatatacaatatctcctatgattgctgcataaaacactttaaacagtgcccagcacttaccacatgctcaataagtgttagctattttgactagtggctattactaaggaaccacgtgtcaccccagattggctcccactgaaatttacaactgaacaaaacagtcctggagcaaaactgtgaagttgtttgtctctgcttcccttcccctgccttctcaatgcccctctcaccccttagatttctaaacataccaccacctgagacaccagtctaactcccagttaaccatcagctcatccttctgcctctcttcatcycacctctatttccttccaaaatagggtagaatggttattggtagactttcaaaaatcatttattgagcaactactatgtgctaggcactttgaatactaactttatttaatcctctcaataagtcagcaaagtaggcattgctgatcctcaactgcagaaaccactgcatctctaatgtcaggcacaatctcttggaaacaagaaaatctca

SEQ ID NO: 363277 - DNA, 617 bp, Homo sapiens
gataatataaacatgacttttgcatgcattgggaaaccaaaaaatcctgtgacttgctttatttccatagttgccttattgcggtattctggaaccaagcctgcaatatctctgaggtatgcatatacagctctatctcatcttgcagcagatgtgtttccttgacatttttgtgtaggtagaaatgttgtgtagtgacttatattttaaatatactagccatttgaggcaagtttgcagtgacttatttggtggaacaatcacttaatcatgtgcctgtttaataaccttagatgtgcctttaggtacatcacatcctgtgtagtctcagcttctttatctcaragatgaaggtttgattttgatggctgttgaggttctttcactgctaaaattctttcatcaaaatttaactttccatatattagcacatgttaaattatacagcttctgtaattaacatcacagtttgtcttaaaagaattttgatttctgagactttcaagcacatattttgaagtaattatatgatagtgattatgagcacatattttggagctgagcaggtttaaatgttgactctgacattttctaaaaccaagctgaggccaggtatg

SEQ ID NO: 363278 - DNA, 617 bp, Homo sapiens
gataatataaacatgacttttgcatgcattgggaaaccaaaaaatcctgtgacttgctttatttccatagttgccttattgcggtattctggaaccaagcctgcaatatctctgaggtatgcatatacagctctatctcatcttgcagcagatgtgtttccttgacatttttgtgtaggtagaaatgttgtgtagtgacttatattttaaatatactagccatttgaggcaagtttgcagtgacttatttggtggaacaatcacttaatcatgtgcctgtttaataaccttagatgtgcctttaggtacatcacatcctgtgtagtctcagcttctttatctcaaagatgaaggtttgattttgatggctgttgaggttctttcactgctaaaattctttcatcaaaatttaactttccatatattagcacaygttaaattatacagcttctgtaattaacatcacagtttgtcttaaaagaattttgatttctgagactttcaagcacatattttgaagtaattatatgatagtgattatgagcacatattttggagctgagcaggtttaaatgttgactctgacattttctaaaaccaagctgaggccaggtatg

SEQ ID NO: 363279 - DNA, 561 bp, Homo sapiens
atctgactccatttttgatgtttgatcagtgacagctttcaatcaccacctcccactttcccttccaccacatatttgtgcaactgcctgcaggacagtcaaacctcatagatcctcagcaatgcaagatagcatatctccagtccaactataaaaactcagccctctgtgtaactcgagccagcttataccagcttgtgcatatcctgctttccccaagattcccttgtgtgagttagaaaatttctcccaaattctcttgtacatggagtgtcaacagcttcaccataatatctactaattagaaaagatscatctcacctccgtaggtgaccacaaaatatgccaagagagcaagtatttgatgaatcaagaaaataaggtaagcttttatgaactgaatatttgtgtcccctcaaaattcaccagttgaagccctaactccatgtgcgcgtatatttggaggtatcgctaagaaactaacagtcaaatgaggccataaggttgagattctgatctgattcaattagtgtcctcattaaaaaaaaaaaaaaaaaggag

SEQ ID NO: 363280 - DNA, 561 bp, Homo sapiens
atctgactccatttttgatgtttgatcagtgacagctttcaatcaccacctcccactttcccttccaccacatatttgtgcaactgcctgcaggacagtcaaacctcatagatcctcagcaatgcaagatagcatatctccagtccaactataaaaactcagccctctgtgtaactcgagccagcttataccagcttgtgcatatcctgctttccccaagattcccttgtgtgagttagaaaatttctcccaaattctcttgtacatggagtgtcaacagcttcaccataatatctactaattagaaaagatccatctcacctccgtaggtgaccacaaaatatgccaagagagcaagtatttgatgaatcaagaaaataaggtaagcttttatgaactgaatatttgtgtcccctcaaaattcaccagttgaagccctaactccatgtgcgsgtatatttggaggtatcgctaagaaactaacagtcaaatgaggccataaggttgagattctgatctgattcaattagtgtcctcattaaaaaaaaaaaaaaaaaggag

SEQ ID NO: 363281 - DNA, 510 bp, Homo sapiens
tcctcattaaaaaaaaaaaaaaaaaggagagattgggctcagtggctcatgtctgcaatctcagtactttgggaggcagaggcgggtggatcatgaggtcaagagattgaraccatcctggccaacatggtgaaaccccgtctctactaaaaatagaaaaattagctggatatggtggcacatgcctgtagttccagctactcaggaggctgaggcaggagaatcacttgaacccaggaggcagaggttgcagtgagccaagattgcaccactgcactccagcctggtgacagagcgaaactccatctcaaaaaaagaaaaaaaaaaaaaagagaccaaatctattaggccattcttgcaatgctacaaagaaatactgagactgggtgatttataaagaaaagagttttactcagctcacatttctgcaggctttggaggaagcatgatgctggcatctgctcagcttctgggaaggcctcaggaagcttacagttatgatggaaggct

SEQ ID NO: 363282 - DNA, 625 bp, Homo sapiens
cagcatacatcaaaagtttcaaggtatttcaaaacaaagactaaaaaactgtcagagattgaaggaaattaagaaagcatgaaaactgaatgcaatatgggatccagaaattttatcctaaaacattaaaagtaaaaatggtaaatacatgtatcagtggaaagctcagtgaaattcaaatgtagattgtaacttcattaataatagtggattaaccattaatgttaaagctatttgaagtactagaaaaatcagtttaaaatgattttatattcagcaaaactatccttaaagaaaagaaaagaagccgtgactagcatatatstcctataagaaactcaagaagaaatccttcagaattcagaatcacagtaaacgacaatgaacagtaatttaaatccatgaaattaaatgaaagcttcataaatatacttacctcaattcatatgttgttgatgttcacgaaaactgaatctttgtgatagatatcagagttgcagttcccttggtaggttagaggcagaagctattgactagaaaggtgaatgaaggcagcatgtggagaatttcaaatcattcatatttgtatctgggtagtgaatgtgagtactttatttggctgagc

SEQ ID NO: 363283 - DNA, 625 bp, Homo sapiens
cagcatacatcaaaagtttcaaggtatttcaaaacaaagactaaaaaactgtcagagattgaaggaaattaagaaagcatgaaaactgaatgcaatatgggatccagaaattttatcctaaaacattaaaagtaaaaatggtaaatacatgtatcagtggaaagctcagtgaaattcaaatgtagattgtaacttcattaataatagtggattaaccattaatgttaaagctatttgaagtactagaaaaatcagtttaaaatgattttatattcagcaaaactatccttaaagaaaagaaaagaagccgtgactagcatatatctcctataagaaactcargaagaaatccttcagaattcagaatcacagtaaacgacaatgaacagtaatttaaatccatgaaattaaatgaaagcttcataaatatacttacctcaattcatatgttgttgatgttcacgaaaactgaatctttgtgatagatatcagagttgcagttcccttggtaggttagaggcagaagctattgactagaaaggtgaatgaaggcagcatgtggagaatttcaaatcattcatatttgtatctgggtagtgaatgtgagtactttatttggctgagc

SEQ ID NO: 363284 - DNA, 625 bp, Homo sapiens
cagcatacatcaaaagtttcaaggtatttcaaaacaaagactaaaaaactgtcagagattgaaggaaattaagaaagcatgaaaactgaatgcaatatgggatccagaaattttatcctaaaacattaaaagtaaaaatggtaaatacatgtatcagtggaaagctcagtgaaattcaaatgtagattgtaacttcattaataatagtggattaaccattaatgttaaagctatttgaagtactagaaaaatcagtttaaaatgattttatattcagcaaaactatccttaaagaaaagaaaagaagccgtgactagcatatatctcctataagaaactcaagaagaaatccttcagaattcagaatcacagtaaaygacaatgaacagtaatttaaatccatgaaattaaatgaaagcttcataaatatacttacctcaattcatatgttgttgatgttcacgaaaactgaatctttgtgatagatatcagagttgcagttcccttggtaggttagaggcagaagctattgactagaaaggtgaatgaaggcagcatgtggagaatttcaaatcattcatatttgtatctgggtagtgaatgtgagtactttatttggctgagc

SEQ ID NO: 363285 - DNA, 625 bp, Homo sapiens
cagcatacatcaaaagtttcaaggtatttcaaaacaaagactaaaaaactgtcagagattgaaggaaattaagaaagcatgaaaactgaatgcaatatgggatccagaaattttatcctaaaacattaaaagtaaaaatggtaaatacatgtatcagtggaaagctcagtgaaattcaaatgtagattgtaacttcattaataatagtggattaaccattaatgttaaagctatttgaagtactagaaaaatcagtttaaaatgattttatattcagcaaaactatccttaaagaaaagaaaagaagccgtgactagcatatatctcctataagaaactcaagaagaaatccttcagaattcagaatcacagtaaacgacaatgaacagtaatttaaatccatgaaattaaatgaaagcttcataaatatacttacctcaaytcatatgttgttgatgttcacgaaaactgaatctttgtgatagatatcagagttgcagttcccttggtaggttagaggcagaagctattgactagaaaggtgaatgaaggcagcatgtggagaatttcaaatcattcatatttgtatctgggtagtgaatgtgagtactttatttggctgagc

SEQ ID NO: 363286 - DNA, 263 bp, Homo sapiens
tttcataaacagaaacttaaactakaagacataggttatagaatttacctcatagaacactgaaataacacagaatgatatgcgatttctttccccaaaatgtaagagtttgaagacagtgggcagacttcaagaatgggagaattaatggaagatagtggaggtcaactatggcccaataacctgctctttgacttacattaggtacagttgtggatgacagtgactgttgggggttggtgatataaactcagaaaggagcc

SEQ ID NO: 363287 - DNA, 263 bp, Homo sapiens
tttcataaacagaaacttaaactataagacataggttatagaatttacctcatagaacactgaaataacacagaatgatatgcgatttctttccccaaaatgtaagagtttgaagacagtgggcmgacttcaagaatgggagaattaatggaagatagtggaggtcaactatggcccaataacctgctctttgacttacattaggtacagttgtggatgacagtgactgttgggggttggtgatataaactcagaaaggagcc

SEQ ID NO: 363288 - DNA, 447 bp, Homo sapiens
agaggagatgagggaggagaatggggtgggagggtgagctctgggggccccrctgtcacccatgtgtgttctgtccacgtgttggatgcacgtgtcttgtgctccaggataaaatgtatggtggcacttttatatgtgaaagagtgaggaagattccagaaaaagcaaagacctgtgctctggtgcagattctgacatagaaagaggagggtagcataagtgacttccaaagggcaacttgggccttcaaaatgtctgttttttttttaattaaatttttttggtgcatgaatcaaaattacacacacactcacacacacacacacacacacacacgcgccgcaatacaattatttagcattaaataattgtagagaaattatgataatgtctcatgatttacataacattgtacttcttttttatattactttaggatccggtggg

SEQ ID NO: 363289 - DNA, 447 bp, Homo sapiens
agaggagatgagggaggagaatggggtgggagggtgagctctgggggccccactgycacccatgtgtgttctgtccacgtgttggatgcacgtgtcttgtgctccaggataaaatgtatggtggcacttttatatgtgaaagagtgaggaagattccagaaaaagcaaagacctgtgctctggtgcagattctgacatagaaagaggagggtagcataagtgacttccaaagggcaacttgggccttcaaaatgtctgttttttttttaattaaatttttttggtgcatgaatcaaaattacacacacactcacacacacacacacacacacacacgcgccgcaatacaattatttagcattaaataattgtagagaaattatgataatgtctcatgatttacataacattgtacttcttttttatattactttaggatccggtggg

SEQ ID NO: 363290 - DNA, 579 bp, Homo sapiens
agtggttgcaggtcagggacagattttatgcttaagatcagtagggtggaggctgaggatcttggctattacaactgccaccacactctacaatatcctcccacaatggttcagcaccaaacaaaagcctcctgcttggattgtcccasctgcccaaattagttccttcactgaggagtagacagggtatattctctaaatctatgtaacaggaagatgttggtgaactcaggggattagtatgaagctacacctcaggcatcacacataagatcacttcagcagtcgcagccttagcatgggcagaacctacagaagatgcaagtgccctctgagccaggagacaggaggaaggaggaagggaaaggtgacttagctcatctcaatcctctctcctttgcatacatttgtcaaccagatgtattcagcctaccagtcacacaactgaggctgatacatgacaacatagcactggtatattcttggtattgtttggcttagcagttactagtatatatttaatgggagaatatttggtggtgttaacacattgcttatctccctttccccagttgtact

SEQ ID NO: 363291 - DNA, 527 bp, Homo sapiens
tgggctatctaaccatatagtcttctttgtctaggaagtccgtatgcgaagatgctgatgytatcagttgttgcagcacctcaccaggtgattctccagtccttatctcagtgaacatgtttgcctaccggtgtcaaagaatattgaatcgccttcttcttaccttcaaatatgatgagaggtcttctctttgagtaactctacaagaaaccatagagggtttaatgtgtttcaggaaaggtgcttttagaaatcatggtgaatatgaggaattacagccaagtgagataagtatttcccaaaatctcagaattttccaggtatggggtggcttcagaatacatttggatgttcttacatgtattattagaaagtttggtattattgcaagaaaattttattaagtcgtaaagtaaaagaaaaaaatgacaacattgcttgaaatacatagcaatcctttgacaaatgaaaaaaaaattgacaaaacaaacaagaacacctataggtgcacgtagcatactttttcc

SEQ ID NO: 363292 - DNA, 527 bp, Homo sapiens
tgggctatctaaccatatagtcttctttgtctaggaagtccgtatgcgaagatgctgatgctatcagttgttgcagcacctcaccaggtgattctccagtccttatctcagtgaacatgtttgcctaccggtgtcaaagaatattgaatcgccttcttcttaccttcaaatatgatgagaggtcttctctttgagtaactctacaagamaccatagagggtttaatgtgtttcaggaaaggtgcttttagaaatcatggtgaatatgaggaattacagccaagtgagataagtatttcccaaaatctcagaattttccaggtatggggtggcttcagaatacatttggatgttcttacatgtattattagaaagtttggtattattgcaagaaaattttattaagtcgtaaagtaaaagaaaaaaatgacaacattgcttgaaatacatagcaatcctttgacaaatgaaaaaaaaattgacaaaacaaacaagaacacctataggtgcacgtagcatactttttcc

SEQ ID NO: 363293 - DNA, 527 bp, Homo sapiens
tgggctatctaaccatatagtcttctttgtctaggaagtccgtatgcgaagatgctgatgctatcagttgttgcagcacctcaccaggtgattctccagtccttatctcagtgaacatgtttgcctaccggtgtcaaagaatattgaatcgccttcttcttaccttcaaatatgatgagaggtcttctctttgagtaactctacaagaaaccatagagggtttaatgkgtttcaggaaaggtgcttttagaaatcatggtgaatatgaggaattacagccaagtgagataagtatttcccaaaatctcagaattttccaggtatggggtggcttcagaatacatttggatgttcttacatgtattattagaaagtttggtattattgcaagaaaattttattaagtcgtaaagtaaaagaaaaaaatgacaacattgcttgaaatacatagcaatcctttgacaaatgaaaaaaaaattgacaaaacaaacaagaacacctataggtgcacgtagcatactttttcc

SEQ ID NO: 363294 - DNA, 527 bp, Homo sapiens
tgggctatctaaccatatagtcttctttgtctaggaagtccgtatgcgaagatgctgatgctatcagttgttgcagcacctcaccaggtgattctccagtccttatctcagtgaacatgtttgcctaccggtgtcaaagaatattgaatcgccttcttcttaccttcaaatatgatgagaggtcttctctttgagtaactctacaagaaaccatagagggtttaatgtgtttcaggaaaggtgcttttagaaatcatggtgaatatgaggaattacagccaagtgrgataagtatttcccaaaatctcagaattttccaggtatggggtggcttcagaatacatttggatgttcttacatgtattattagaaagtttggtattattgcaagaaaattttattaagtcgtaaagtaaaagaaaaaaatgacaacattgcttgaaatacatagcaatcctttgacaaatgaaaaaaaaattgacaaaacaaacaagaacacctataggtgcacgtagcatactttttcc

SEQ ID NO: 363295 - DNA, 626 bp, Homo sapiens
gaactaaattaagttgtgtggtcccatttcttttgtttctaccctaaatatgcctagttgttttccctggtgcatgacagaatatggttggaatgaagagttattggaactttatctcccaagtacacctttcacttgctgcttagggatcttttctgagggccctgaagcttcctcaaagagcaacactcaagtacccacagtgctgcaggtgcaggggtgaccacaactgcacagatgagaagcacccaggytctgacccttcaggttaccaatgccatttccctgaagacagacaatcatgctgtccatgcaggtaacagacaatgatgctgtccatataggcaggggacaactccttgggtgatcctctaatctacacaccgcttgattctgtgcaatgcttatatcaatccagagtcaggttctcttctccttaatagttcccagaacctctgcttacaccccctgaatctcatttcatatactgctgctcctttcctttaatcagttaaaatcgtttgctttttcttcctttctcttaggtatcaaggaagcagttttattaatgctgctctaagtttcaattggatcttcattcattctggaaatagagtcaacaatat

SEQ ID NO: 363296 - DNA, 626 bp, Homo sapiens
gaactaaattaagttgtgtggtcccatttcttttgtttctaccctaaatatgcctagttgttttccctggtgcatgacagaatatggttggaatgaagagttattggaactttatctcccaagtacacctttcacttgctgcttagggatcttttctgagggccctgaagcttcctcaaagagcaacactcaagtacccacagtgctgcaggtgcaggggtgaccacaactgcacagatgagaagcacccaggctctgacccttcaggttaccaatgccatttccctgaagacagacaatcatgctgtccatgcaggtaacagacaatgatgctgtccatataggcaggggacaactccttgggtgatcctctaatctacacaccgcttgattctgtgcaatgcttatatcaatccagagtcaggttctcttctccttaatagttcccagaacctctgcttacaccccctgaatctcatttcatatactgctgctcctttcctttaatcagttaaaatcgtttgctttttcttcctttctcttaggtatcaaggaagcagttttaytaatgctgctctaagtttcaattggatcttcattcattctggaaatagagtcaacaatat

SEQ ID NO: 363297 - DNA, 603 bp, Homo sapiens
aaatggtatctcagtctcctcagcagaagtagctcagggcaagctgttcctatccatttgattcttgcagtattccaagtgctagaaaattatgtttttccaaacagttgattcagtaactgctgttcatttgttgrtaccactacattttaataaatctcattcctctgggttttttttcaggctattaacatttaaatggtaaatggccatcatagtaacatttgccatttaaaagccagctcatttatttgttcaatattctctattgtacagtaagtgtgaagagggttaaagcctaagcaacataaaaaaaaatagtttcagacaggaataggttatttctcagaaagtcagcaaataaccaaatacaaagagtgatagaagcagctggcttaattagctttgtccaagacctcctttcagaaaccagaatctttgggacacagcaaaagcagtgtttaaagggaaatttatagcactaaatgctcacgggagaaagcaggaaacatctaaaatcgacacccttacatcacaattaaaataactggagaagcaagagcaaacaaattcaaaagctagcagaagacaagaaataactaa

SEQ ID NO: 363298 - DNA, 603 bp, Homo sapiens
aaatggtatctcagtctcctcagcagaagtagctcagggcaagctgttcctatccatttgattcttgcagtattccaagtgctagaaaattatgtttttccaaacagttgattcagtaactgctgttcatttgttgataccactacattttaataaatctcattcctctgggttttttttcaggctattaacatttaaatggtaaatggccatcatagtaacatttgccatttaaaagccarctcatttatttgttcaatattctctattgtacagtaagtgtgaagagggttaaagcctaagcaacataaaaaaaaatagtttcagacaggaataggttatttctcagaaagtcagcaaataaccaaatacaaagagtgatagaagcagctggcttaattagctttgtccaagacctcctttcagaaaccagaatctttgggacacagcaaaagcagtgtttaaagggaaatttatagcactaaatgctcacgggagaaagcaggaaacatctaaaatcgacacccttacatcacaattaaaataactggagaagcaagagcaaacaaattcaaaagctagcagaagacaagaaataactaa

SEQ ID NO: 363299 - DNA, 512 bp, Homo sapiens
cccaatattgaatggtgctgagcttcacctgatcttaaaattggtgagagtgacattctcagtttatgaggggcagcttagtcacttaattatttagtcawacagtcaattactcatggacatgcctacatggaccctgtgatattttgagagctgcattttgagtagtgagttgtttgtgtgttgtttgtttgtttattttgggggcatttcaggatcttgctcaagaactgtagagatttttttctgtgactcttttttggtgcttgcatggaggtttacagagtttcctcatctaatatagattatctagcaccaggcaatgtgctggatctcatggctgaagtgacagaggcatttgcattaaaactcaaacttactacagaatattttctttctcagagtttattcataaaagacagccttccaagttagctgataaatgggttggtatagtaaacccaagtgcaaaatgcattgtcaacactctaggatggcttaaccagtaatgt

SEQ ID NO: 363300 - DNA, 483 bp, Homo sapiens
taaaaagttattgttaaaaaaatctgtgactctaactgttcttgtttgaaaggaatacgtctttttaagacactcagactccttttaagctcctcatttggccctcctttgtttctgattcaatgtattgtttaatttgttatttatgactaattaatctattaattaattttcacaatcacagaatcaaatgtccyataagttgctatgtcaaagacctgcctgaagatggcacacatgctccacaatgaacaaaggacagcaccatggtctcaggaacactgggaagtaggagtgctggtgtcccattatcaacagggagccctagagttagagtcaaatcttccctgtgacctgggcacctgggaggagccacccgtgtgctgagctgtgggaacctgccccatgccctgagactggaagcacggccttggctgtgtcccacctgctatggactgaattgtgccctcagattcatgttga

SEQ ID NO: 363301 - DNA, 659 bp, Homo sapiens
ttaatacccttggtgatacatttcagatgagtaaactgttatcagagcccgtagttgaaactattcaacagagatggtttgcccaaagatatgtggtcagcaattgtcagggctgagcttggaacccaggtctgcataaccttaaatatgttgcttccacatggccacgtttgtttcrtatacgattgaatggcctttaaattcaaagaagagacaaagccagaagagtggtgtgaaattctcaacacaagctccctgctacctctacaccttaccgtgattactccaattataaactcaggccctcatgcagttttgtctacaaagcaaaacttcctcaaagtctttacaaatactaaatgtctttctttcagattcgagggcaagagcacatcttgcattgccctgaacactttgcatcttttctaccattctcatctttctgtcccagtccttccttctcaaatgatgtcctgtaaatctgatttctcccccaatatgaaaacaaatgaacaaatattcccctacttttctcatatccagaggatacaagagttaatcacatatccagagagtacgagagttaatcaagggatttatgcaagagtgtttacacataacaaggattctggtgctagccatcttcacagtgaaatttt

SEQ ID NO: 363302 - DNA, 602 bp, Homo sapiens
ccccttgtgttagtttcctactcctgctgtaacaagttatcagaatcttactrgtttcatacaacacaaatttattatcatacagttctggcagtgagaagtctcactgatttataatcaaggtatccgtagttctatattccttctggaagttccaggggagagaatctgattctcagcttttcatcttcaaagatagccccatgttccgggctgcctggcccctttctccatcactgaagcatccctgtccattgtccctattcctctctgactgttacccccactcctccctattataaagacccttctgatgacgctgtctttcctagataattcagctgtttcctaaattttctgaatatccctatgcatgaaaaaaaaagaattggcaagtattcagactatactttccaagaatgagggtttgtccactgttttaggttggatctttcagggacaatgatgcccatgcaggcagcatatttataatgcacagtaaacactaggaggaaacaaggcagtgagagaggaaagagagcagcgataccgaaaatgtcctcagcgagaagctaccacagaggatgaatggagatcaagcc

SEQ ID NO: 363303 - DNA, 587 bp, Homo sapiens
tccagaactgcttctctctgaacctaaatcttagcaagcagtttaccagtaactgcccttgaaattcaggcccctggaaaggagcagggggttgtgtacaggctataccacagcagtctgcccacccttagtgatgcatgagtaatgctccctggactccccaggttctagtcttctcatgtcgatgtagttgattccacttcccttgctgcacaaccaggctgggatgcctgggcagaggcagacatgtgaggtataggggttcaaatctgtttccaagttttatccagcttcaaagcatttctcygtgtacatgagcggtggcttgacaggagatggagactctctttcctggatgtgaggcaaggaggcaggcgtctgagtcaggatgatgtccctactcactgctaaagagaaaagtggctttgatggtgcagggcagggaaatgcactgagtggtcgccaccctcacagaagagaaagtgttcactgacctggcctttccccagggcctctccctcccattgctttccagaaagccatgatttttgagagccacacctgaacactcacaaacattatggtgg

SEQ ID NO: 363304 - DNA, 565 bp, Homo sapiens
ggcaaacccgaagggtgaagtcaccgtacactttgcaaagagggattagcaattccataacattggctattggtttggagagatcaccagkcctcagaagaaacaaaactgaaggactcgagacaaagttggtttggaagagctatgactggatctttgaaaatacgtcaagatcaaaaataaatgcttcctaagtgaatattcatatctattccattactgaggaccagctcttagtaattaagaggatcgaatgcttggccttcagtcagtcaactttcccagattttttaggaagtgacatgaaccatagaaatccatgcaggagctcaacaatatgaatttcagttaatgaggcttgcatacctatggctcttctgagcattcaacttgccaagtagcattacccctcccaaaccactaacatctaaccacacatcagtgatcagactaacaacgcgtgtcaaatgagtacagtgcacctaacccagcatccagaggacagtggtagttttcctgtatacggatttgcctttcttgtcagtcatgtttctgccagaatcat

SEQ ID NO: 363305 - DNA, 565 bp, Homo sapiens
ggcaaacccgaagggtgaagtcaccgtacactttgcaaagagggattagcaattccataacattggctattggtttggagagatcaccaggcctcagaagaaacaaaactgaaggactcgagacaaagttggtttggaagagctatgactggatctttgaaaatacgtcaagatcaaaaataaatgcttcctaagtgaatattcatatctattccattactgaggaccagctcttagtaattaagaggatcgaatgcttggccttcagtcagtcaactttcccagattttttaggaagtgacatgaaccatagaaatccatgcaggagctcaacaatatgaatttcagttaatgaggcttgcatacctatggctcttctgagcattcaacttgccaagtagcattacccctcccaaaccrctaacatctaaccacacatcagtgatcagactaacaacgcgtgtcaaatgagtacagtgcacctaacccagcatccagaggacagtggtagttttcctgtatacggatttgcctttcttgtcagtcatgtttctgccagaatcat

SEQ ID NO: 363306 - DNA, 661 bp, Homo sapiens
ctaatgcctggcacttcaggaaattcttcttagaacattactaatcatgtggatatgtgtttttatgttcctaatatcagataccagatgtgacatccagatgacccagtctccatcctccctgtctgcatctgtaggagacagagtcaccatcacttgccgggcgagtcagggcattagcaattatttagcctggtatcagcagaaaccagggaaagttcctaagctcctgatctatgctgcatccactttgcaatcaggggtcccatctcggttcagtggcagtggatctgggacagatttcactctcaccatcagcagcctgcagcctgaagatgttgcaacttattactgtcaaaagtataacagtgcccctcccactgtgatacaagcccgaacataaaccatggagggaagtagatgtgtgagkctgggctgccccagctgctcctcctggtgccgccctctgctgacagcagttctcagatgcagccaaggtttgaagctcactgggaagttttggtagaaggggtcagggaggcacatttacattctatctctctttatcctcagctccatcagctgatatgcaagtatctctcctgattattattaataaaggacaaagaaaattaaacctaggaggtctagattgcagcaa

SEQ ID NO: 363307 - DNA, 626 bp, Homo sapiens
gatcccaccttcttccaacactacccagatcaagatccacactcttcccagcatctcaaatatctccccagtttacttccctgtcaattccgtgttccatctatcatcatcctaggcttccactgtattttatatcaatatttattaatttttcctatacttaagctttatataatttcaatcatacagtatttactctttgacgtcttgcttattttggtcaaaatatttttgagcttcatctgcgttgtttctctggcagtaatttgtgcctttttattgaggaacaattttccatgaatatgccaaaatatattcatttttcaactaattatttgtttttggtttaagaatattactggtaaaaaccttaagaacattcttgtgcttgtcttttgtgaacttatgcactcatttctcttgggaatattcctaagaatggaagtgttgagttataaagttagcatagawtttgtcttagtaaacattgacaatagtttactgaaatgctgaacatgtttacatgaaaccaaccacgtcctaaaagtctcaattgctgtcaatctttttcagtactcagtactgtcaaacttttattatatctagggtggaggccaaagcaaccc

SEQ ID NO: 363308 - DNA, 507 bp, Homo sapiens
ttgtgtggaaccagagagcaaagccattttcaaaagcattgctccgcctgtaatcccagcaatttgggaggctgaggcaggagaatagcttgaaccccagaggcggaggttgcagactgtcaagacgatgccattgcagtctagccattagcatgrgcaacaagagggaaactctgtttcaaaaaaaaaaaaaaaaagaagcattgctcctcgccttcagacacagcttccaatacagttttgaaaaataatttaaatcattccataaatactggaatgcaaatatttcataaaaatctagaatgtactccatttagagaagacagaagaggcagtctttctgctctataatcatctggagggcactgtcctgctctgaacttgagctctagccagagctgataatacgaagacctctctctgtgcagccatcagccctgactcccagcactgcaggggagctgagagaggccagaggcacagacatggtggaaactgcccacagat

SEQ ID NO: 363309 - DNA, 507 bp, Homo sapiens
ttgtgtggaaccagagagcaaagccattttcaaaagcattgctccgcctgtaatcccagcaatttgggaggctgaggcaggagaatagcttgaaccccagaggcggaggttgcagactgtcaagacgatgccattgcagtctagccattagcatgggcaacaagagggaaactctgtttcaaaaaaaaaaaaaaaaagaagcattgctcctcgccttcagacacagcttccaatacagttttgaaaaataatttaaatcattccataaatactggaatgyaaatatttcataaaaatctagaatgtactccatttagagaagacagaagaggcagtctttctgctctataatcatctggagggcactgtcctgctctgaacttgagctctagccagagctgataatacgaagacctctctctgtgcagccatcagccctgactcccagcactgcaggggagctgagagaggccagaggcacagacatggtggaaactgcccacagat

SEQ ID NO: 363310 - DNA, 507 bp, Homo sapiens
ttgtgtggaaccagagagcaaagccattttcaaaagcattgctccgcctgtaatcccagcaatttgggaggctgaggcaggagaatagcttgaaccccagaggcggaggttgcagactgtcaagacgatgccattgcagtctagccattagcatgggcaacaagagggaaactctgtttcaaaaaaaaaaaaaaaaagaagcattgctcctcgccttcagacacagcttccaatacagttttgaaaaataatttaaatcattccataaatactggaatgcaaatatttcataaaaatctagaatgtactccatttagagaagayagaagaggcagtctttctgctctataatcatctggagggcactgtcctgctctgaacttgagctctagccagagctgataatacgaagacctctctctgtgcagccatcagccctgactcccagcactgcaggggagctgagagaggccagaggcacagacatggtggaaactgcccacagat

SEQ ID NO: 363311 - DNA, 586 bp, Homo sapiens
tcactaggaatgacactgtcaagtacctaccgggaaaaaacaccaggtgtcttggcggagttgaccacaagagggggcacgtgcgcaatagcgatcctagagagggctctgggatctcggattaacaatggcccagagtcccggccggttctgggtattattattattattattattattattattattaytattactattattacttcatgatcccagttcatagcttaccattttcacgcactaataattttacacctcttcgcgtttcttatttttctagctgactctattgtagaaggacaattaaacttaggactcagaacaacctaatcaatgggtaattgtttaaacatcagttccctctgtcacatactgtgacatgcagagtgtgtgtaagcctggagaaatgattcacaggaaatgtccatgaggaagagctgtgagtgagagggtctgtctagcaaaggagaggagtgaggactaggttttttggagtgtggcctagtaattgaagggcatcaaaaggacaaggatcaagatgttcttcatccaggtgtgaggacatgcaaaccctgcaggtcct

SEQ ID NO: 363312 - DNA, 586 bp, Homo sapiens
tcactaggaatgacactgtcaagtacctaccgggaaaaaacaccaggtgtcttggcggagttgaccacaagagggggcacgtgcgcaatagcgatcctagagagggctctgggatctcggattaacaatggcccagagtcccggccggttctgggtattattattattattattattattattattattattattactattattacttcatsatcccagttcatagcttaccattttcacgcactaataattttacacctcttcgcgtttcttatttttctagctgactctattgtagaaggacaattaaacttaggactcagaacaacctaatcaatgggtaattgtttaaacatcagttccctctgtcacatactgtgacatgcagagtgtgtgtaagcctggagaaatgattcacaggaaatgtccatgaggaagagctgtgagtgagagggtctgtctagcaaaggagaggagtgaggactaggttttttggagtgtggcctagtaattgaagggcatcaaaaggacaaggatcaagatgttcttcatccaggtgtgaggacatgcaaaccctgcaggtcct

SEQ ID NO: 363313 - DNA, 528 bp, Homo sapiens
ctgttggtggactctctttacatggacacacgtgacacacccatgcagggtcaacccttctgctcagctgagcatctgcttcctccagggaatcagtgtctgagcagctgctcctcttagagaagaaggaaattggggtgaggtagaaatggtgaggagcccttgaaggaggtgggaagatgtggtgtggctctaagcccaggggtccctctcattaaatgatcagtgtccagacagcattgctgaggcagctcccagagggctccatcctgagtccctcttctcaggccccctgtatcactggccctgaagaaatactctcctgttgtccatggctccaagaacagtttgccttgccctgactttgctgctcaactcacagcctcatkgcagattccactggaccatacacagtgtcagatccataaggaggtactggtctgttctaaatcagctgttctgattctcaacttcctgcctaatggctcatctccatgagattcatgtgctccaccctttctggctcag

SEQ ID NO: 363314 - DNA, 528 bp, Homo sapiens
ctgttggtggactctctttacatggacacacgtgacacacccatgcagggtcaacccttctgctcagctgagcatctgcttcctccagggaatcagtgtctgagcagctgctcctcttagagaagaaggaaattggggtgaggtagaaatggtgaggagcccttgaaggaggtgggaagatgtggtgtggctctaagcccaggggtccctctcattaaatgatcagtgtccagacagcattgctgaggcagctcccagagggctccatcctgagtccctcttctcaggccccctgtatcactggccctgaagaaatactctcctgttgtccatggctccaagaacagtttgccttgccctgactttgctgctcaactcacagcctcatggcagattccactggaccatacacagtgtcagatccataaggaggtactggtctgttctaaatcagctgttctgattctcaacttcctgcctwatggctcatctccatgagattcatgtgctccaccctttctggctcag

SEQ ID NO: 363315 - DNA, 571 bp, Homo sapiens
gctctaagcccaggggtccctctcattaaatgatcagtgtccagacagcattgctgaggcagctcccagagggctccatcctgagtccctcttctcaggccccctgtatcactggccctgaagaaatactctcctgttgtccatggctccaagaacagtttgccttgccctgactttgctgctcaactcacagcctcatggcagattccactggaccatacacagtgtcagatccataaggaggtactggtctgttctaaatcagctgttctgattctcaacttcctgcctaatggctcatctccatgagattcatgtgctccaccctttctggctcagccatgctcttcctggcttcccctaatcccaggctttccccctggaagtttgacaggcttctcctctaagtatgttgtcaatttattttcttacttgcttgattcctggggaaacaagtcctttcaagcctaggcccttctgagacctcagggatgcaaggcaaaaagagcaaagcagctgcacrtgtatgagactgaattggtcacctaaactgtcatttaacttttttgct

SEQ ID NO: 363316 - DNA, 604 bp, Homo sapiens
ggatgcaaggcaaaaagagcaaagcagctgcacgtgtatgagactgaattggtcacctaaactgtcatttaacttttttgctaagtcattgcttttctctggaaatagtttttcaagatgcaagtatttgatttttaaaacatgtgtggctttwccaaatgcttttcttctaagtcttcttctccacaagtccaagttaggctaattatatccagtaaagtctggtagcccttctctaatagctcctctttccatacccctagcaacactcagtcataatcccactgattcatcagatgacaaatgcaaaaacttggaaaaatatatattcttcataacaaatgctatatattttaaactgaggccctagactttcatcttctccaatattgtgtctcaactgtgtgaattatataatatggcagcaattgtatttcaatctctccagttaggagcagctcagtgcttgcagtatctttccatttgatttctataacattcctagtggtagaaaactcaattcatttatccaattacatggcttagtaacagctgtctgttggtgtatacttctatgttttaataatcctattcccctgttcca

SEQ ID NO: 363317 - DNA, 604 bp, Homo sapiens
ggatgcaaggcaaaaagagcaaagcagctgcacgtgtatgagactgaattggtcacctaaactgtcatttaacttttttgctaagtcattgcttttctctggaaatagtttttcaagatgcaagtatttgatttttaaaacatgtgtggctttaccaaatgcttttcttctaagtcttcttctccacaagtccaagttaggctaattatatccagtaaagtctggtagcccttctctaatagctcctctttccrtacccctagcaacactcagtcataatcccactgattcatcagatgacaaatgcaaaaacttggaaaaatatatattcttcataacaaatgctatatattttaaactgaggccctagactttcatcttctccaatattgtgtctcaactgtgtgaattatataatatggcagcaattgtatttcaatctctccagttaggagcagctcagtgcttgcagtatctttccatttgatttctataacattcctagtggtagaaaactcaattcatttatccaattacatggcttagtaacagctgtctgttggtgtatacttctatgttttaataatcctattcccctgttcca

SEQ ID NO: 363318 - DNA, 604 bp, Homo sapiens
ggatgcaaggcaaaaagagcaaagcagctgcacgtgtatgagactgaattggtcacctaaactgtcatttaacttttttgctaagtcattgcttttctctggaaatagtttttcaagatgcaagtatttgatttttaaaacatgtgtggctttaccaaatgcttttcttctaagtcttcttctccacaagtccaagttaggctaattatatccagtaaagtctggtagcccttctctaatagctcctctttccatacccctagcaacactcagtcataatcccactgattcatcagatgacaaatgcaaaaacttggaaaaatatatattcttcataacaaatgctatatattttaaactgaggccctagactttcatcttctccaatattgtgtctcaactgtgtgaattatataatatggcagcaattgtatttcaatctctccagttaggagcagctcagtgcttgcagtatctttccatttgatttctataacattcctagtggtagaaaaytcaattcatttatccaattacatggcttagtaacagctgtctgttggtgtatacttctatgttttaataatcctattcccctgttcca

SEQ ID NO: 363319 - DNA, 604 bp, Homo sapiens
ggatgcaaggcaaaaagagcaaagcagctgcacgtgtatgagactgaattggtcacctaaactgtcatttaacttttttgctaagtcattgcttttctctggaaatagtttttcaagatgcaagtatttgatttttaaaacatgtgtggctttaccaaatgcttttcttctaagtcttcttctccacaagtccaagttaggctaattatatccagtaaagtctggtagcccttctctaatagctcctctttccatacccctagcaacactcagtcataatcccactgattcatcagatgacaaatgcaaaaacttggaaaaatatatattcttcataacaaatgctatatattttaaactgaggccctagactttcatcttctccaatattgtgtctcaactgtgtgaattatataatatggcagcaattgtatttcaatctctccagttaggagcagctcagtgcttgcagtatctttccatttgatttctataacattcctagtggtagaaaactcarttcatttatccaattacatggcttagtaacagctgtctgttggtgtatacttctatgttttaataatcctattcccctgttcca

SEQ ID NO: 363320 - DNA, 555 bp, Homo sapiens
aggtagaggagaagtatattgaaacaatctactacttttgaaactttgcataaatctaaatttatttcaaaactaattaaaatatacaaatgaaaatataagtaagaaaagaacataagctcctaaggagcaattccacaagtatcattctatttttcctcattttcttatttgtgatttctgtttcttgaaatgacaatccyggtttctattatctatagcagtggtccccaacctttttggcaccagggactggtttcatggaagacaatttttccatgggtctcaagagtcggggatggtttcaggactatccaagcacatatttattgtgcactttatttcaattattattacattgtaatatataatgaaataattgcacaactcatcataatgtagaatcagtggaagccctgggcttgttttcccgcaactagatggtgccatctgggggtgatgggagacagtgacagatcatcaggcattagtttctcataaggagcacacaacctagatccctcacatgtacagttcaaaatagggtttgcactg

SEQ ID NO: 363321 - DNA, 536 bp, Homo sapiens
gccataattttcctactattaaaatttttgcaaaggtggtttcaaaatagcgactttcaatataacagtggaagttatgaagacaaaaaaataccaaaagagaattttaaaactgwaaagtagaataactcaattgaaaatttagataggtaccacaatagttgacagtgtcagaagaatcagtgaacttgaagatcaaccaatagaaataatctgttccaaagaataaagatgtaagcagccaagcaagacctcagagatgtataggtcagtgtgaagaacaccaacaaatgtggatgggagtcacaaaggagaagggagagagaaaggagctgaaaaagtatatgaaaaataatgggaacatcttttcaaatgtattgaaatacattactatatagatccaagaaatgtgatgaaacacatccaggggaagcaaaaaagattcataactacacatattgtaattaaaatgctgaaatacagttacaaagggaaaatcttcaagagaaaaaaaaccactatgtacaaagatacaa

SEQ ID NO: 363322 - DNA, 536 bp, Homo sapiens
gccataattttcctactattaaaatttttgcaaaggtggtttcaaaatagcgactttcaatataacagtggaagttatgaagacaaaaaaataccaaaagagaattttaaaactgaaaagtagaataactcaattgaaaatttagataggtaccacaatagttgacagtgtcagaagaatcagtgaacttgaagatcaaccaatagaaataatctgttccaaagaataaagatgtaagcagmcaagcaagacctcagagatgtataggtcagtgtgaagaacaccaacaaatgtggatgggagtcacaaaggagaagggagagagaaaggagctgaaaaagtatatgaaaaataatgggaacatcttttcaaatgtattgaaatacattactatatagatccaagaaatgtgatgaaacacatccaggggaagcaaaaaagattcataactacacatattgtaattaaaatgctgaaatacagttacaaagggaaaatcttcaagagaaaaaaaaccactatgtacaaagatacaa

SEQ ID NO: 363323 - DNA, 517 bp, Homo sapiens
ataaaaaaaagtttacttcaatttctatgatattcactaccaagtacaaacaaactatygtggtagatgtcagaaagacagttactttggttgggatggggaggcagttattgaatgggaaggtgtacgagagaatcatccagaaattttgaaacattctatagtttcagctggatagtgaatatacataaaactttattcattccacatttaggatttctgccctttatatgtggtttatttcaatgaaaaaaaaatagaaaagccaagcctagattcttttaaagaaaattggaggcaagaaaaaagaatcagccaatatttatggaaactcaactttattaaagacaagtgcaaaatgtgcctggaaaagtgctaaagaactgttgaaaaacaggtggaaagaaaaggaaatattataatatgtctcttctccaactgaagcaacacagattttatcttggttagttttccttgaaacacgcaggatattttatgtccccttgcccacaagaga

SEQ ID NO: 363324 - DNA, 517 bp, Homo sapiens
ataaaaaaaagtttacttcaatttctatgatattcactaccaagtacaaacaaactatcgtggtagatgtcagaaagacagttactttggttgggatggggaggcagttattgaatgggaaggtgtacgagagaatcatccagaaattttgaaayattctatagtttcagctggatagtgaatatacataaaactttattcattccacatttaggatttctgccctttatatgtggtttatttcaatgaaaaaaaaatagaaaagccaagcctagattcttttaaagaaaattggaggcaagaaaaaagaatcagccaatatttatggaaactcaactttattaaagacaagtgcaaaatgtgcctggaaaagtgctaaagaactgttgaaaaacaggtggaaagaaaaggaaatattataatatgtctcttctccaactgaagcaacacagattttatcttggttagttttccttgaaacacgcaggatattttatgtccccttgcccacaagaga

SEQ ID NO: 363325 - DNA, 575 bp, Homo sapiens
tgtacatatccttccacttctttctatttattttaggatccagtgcagagattgtgatgacccagactccactctccttgtctatcacccctggagagcaggcctccatgtcctgcaggtctagtcagagcctcctgcatagtgatggatacacctatttgtattggtttctgcagaaagccaggccagtctccacagctcctgatctatgaagtttccaaccggttctctggagtgccagataggttcagtggcagcgggtcagggacagatttcacactgaaaatcagccgggtggaggctgaggatkttggagtttattactgcatgcaagatgcacaagatcctcccacagtgctacagccctgagcacaaacctctctgcttgaagtggcccagctgctcacatgtgatgtttgtctggggagcagcacagcaagttctctgagtctgtgcatgaggaaaatgttggacaactcagaggagtagattggtctcatgaattccttggttacatctcaggaactactcatttgtgcagctgcaaaagccttgacatggcaaaagcagtagga

SEQ ID NO: 363326 - DNA, 575 bp, Homo sapiens
tgtacatatccttccacttctttctatttattttaggatccagtgcagagattgtgatgacccagactccactctccttgtctatcacccctggagagcaggcctccatgtcctgcaggtctagtcagagcctcctgcatagtgatggatacacctatttgtattggtttctgcagaaagccaggccagtctccacagctcctgatctatgaagtttccaaccggttctctggagtgccagataggttcagtggcagcgggtcagggacagatttcacactgaaaatcagccgggtggaggctgaggatgttggagtttattactgcatgcaagatgcacaagatcctcccacagtgctacagccctgagcacaaacctctctgcttgaagtggcccagctgctcacatgtgatgtttgtctggggagcagcacagcaagttctctgagtctgtgcatgaggaaaatgttggacaactcagaggagtagattggtctcatgaattccttggttacatctcaggaactactcatttgtgyagctgcaaaagccttgacatggcaaaagcagtagga

SEQ ID NO: 363327 - DNA, 602 bp, Homo sapiens
attttatgtgactttttatttgggcatattgttaaacttaaagaaaaattgccaaagtaatataagaactccaatgtatacgttacccaaattcatttagtaaccatagatgactttctacttccaaattctttctatatttatgagttggcakctagttactactgattcagaacaaatcacccaaaacttaatgacacattacaattgacatcattatactattatctttgtagttgttaggtgtctcctgggctgaccaagatttctgctcgggatttcttacatggatgtagtcagatagcagctggggatggagtcatataaaaggtggccaattcaggctataggatgagtcctcagctgaggctgtgaatctctacatgctcctgcttggcttcttgtacacttcctcgaagagtaccagacagatgttttataacctcttatgacttactatagcctcagaagacacatagtgttacttctatgacaattataggttcactaagattccaaagggggaaaagtatgctaatatgtccaatagggaaattatcaacatcacactattagaggaactaataagatggaagatcttg

SEQ ID NO: 363328 - DNA, 602 bp, Homo sapiens
attttatgtgactttttatttgggcatattgttaaacttaaagaaaaattgccaaagtaatataagaactccaatgtatacgttacccaaattcatttagtaaccatagatgactttctacttccaaattctttctatatttatgagttggcagctagttactactgattcagaacaaatcacccaaaacttaatgacacattacaattgacatcattatactattatctttgtagttgttaggtgtytcctgggctgaccaagatttctgctcgggatttcttacatggatgtagtcagatagcagctggggatggagtcatataaaaggtggccaattcaggctataggatgagtcctcagctgaggctgtgaatctctacatgctcctgcttggcttcttgtacacttcctcgaagagtaccagacagatgttttataacctcttatgacttactatagcctcagaagacacatagtgttacttctatgacaattataggttcactaagattccaaagggggaaaagtatgctaatatgtccaatagggaaattatcaacatcacactattagaggaactaataagatggaagatcttg

SEQ ID NO: 363329 - DNA, 602 bp, Homo sapiens
attttatgtgactttttatttgggcatattgttaaacttaaagaaaaattgccaaagtaatataagaactccaatgtatacgttacccaaattcatttagtaaccatagatgactttctacttccaaattctttctatatttatgagttggcagctagttactactgattcagaacaaatcacccaaaacttaatgacacattacaattgacatcattatactattatctttgtagttgttaggtgtctcctgggctgaccaagatttctgctygggatttcttacatggatgtagtcagatagcagctggggatggagtcatataaaaggtggccaattcaggctataggatgagtcctcagctgaggctgtgaatctctacatgctcctgcttggcttcttgtacacttcctcgaagagtaccagacagatgttttataacctcttatgacttactatagcctcagaagacacatagtgttacttctatgacaattataggttcactaagattccaaagggggaaaagtatgctaatatgtccaatagggaaattatcaacatcacactattagaggaactaataagatggaagatcttg

SEQ ID NO: 363330 - DNA, 602 bp, Homo sapiens
attttatgtgactttttatttgggcatattgttaaacttaaagaaaaattgccaaagtaatataagaactccaatgtatacgttacccaaattcatttagtaaccatagatgactttctacttccaaattctttctatatttatgagttggcagctagttactactgattcagaacaaatcacccaaaacttaatgacacattacaattgacatcattatactattatctttgtagttgttaggtgtctcctgggctgaccaagatttctgctcgggatttcttacatggatgtagtcagatagcagctggggatggagtcatataaaaggtggccaattcaggctataggatgagtcctcagctgaggctgtgaatctctacatgctcctgcttggcttcttgtacacttcctcgaagagtaccagacagatgttttataacctcttatgacttactatagcctcagaagacacatagtgttacttctatsacaattataggttcactaagattccaaagggggaaaagtatgctaatatgtccaatagggaaattatcaacatcacactattagaggaactaataagatggaagatcttg

SEQ ID NO: 363331 - DNA, 571 bp, Homo sapiens
ttctcctgtcaccaagctgctgtattaaccctgaatgtgccaaacttcagatctcttctcattgcttaagccattgttattctttcacttgtttctaaaattattgtcgcttatccttaaatgatactgaagaaaaagagcctcgttggccatagacctgccccttaggagaagaaatgcattatcatgcgtgtgtatgtgtgtgtttgtgggtgtcaaaggcagtaaaagcaagaaccagaataagtgatgtcctttcctgacatcttggctctgctgtatttatagctaaggaaacccaaaccactgcaaagagttcataatttctgctctcttcctgtctcagtttcatgttttatatcttaaggatgaacatctttttgttgtccctaattcctccctcctttatgatcatgaaattaaaatagtggtcaagaaagagacaagaacacttgaagaagacataaaatctgtggactgtacacatctcctcaacagcracatcatgctagcagttttctccttcttctcagtggtttttgatgggaagatgctaactcctccaaccagg

SEQ ID NO: 363332 - DNA, 643 bp, Homo sapiens
ttgaaactgtgtatttttgaaatatgaacaaatacatatatagcctgaaataaacaacaaatcaaaatttatgaaaattacacataaactttatacataaccttgctcttctttctatttatttcaggatccagtggggatgttgtgatgactcagtctccactctccctgcccgtcacccttggacagccggcctccatctcctgcaggtctagtcaaagcctcgtatacagtgatggaaacacctacttgaattggtttcagcagaggccaggccaatctccaaggcgcctaatttataaggtttctaacygggactctggggtcccagacagattcagcggcagtgggtcaggcactgatttcacactgaaaatcagcagggtggaggctgaggatgttggggtttattactgcatgcaaggtacacactggcctcccacagtggtacagccctgaacaaaaacctccctgtggagtggcccagctgcccacatgtggtgcttgtctggggagcagctcagcagggtctcagaatctgtgtaagaggaagatgctggagaaccagggaacaattcacatctgaggactctggactttgagagcccagccacacctcaggcaccactcctttatgccctgc

SEQ ID NO: 363333 - DNA, 643 bp, Homo sapiens
ttgaaactgtgtatttttgaaatatgaacaaatacatatatagcctgaaataaacaacaaatcaaaatttatgaaaattacacataaactttatacataaccttgctcttctttctatttatttcaggatccagtggggatgttgtgatgactcagtctccactctccctgcccgtcacccttggacagccggcctccatctcctgcaggtctagtcaaagcctcgtatacagtgatggaaacacctacttgaattggtttcagcagaggccaggccaatctccaaggcgcctaatttataaggtttctaaccgggactctggggtcccagacagattcagcggcagtgggtcaggcactgatttcacactgaaaatcagcagggtggaggctgaggatgttggggtttattactgcatgcaaggtacacactggcctcccacagtggtacagccctgaacaaaaacctccctgtggrgtggcccagctgcccacatgtggtgcttgtctggggagcagctcagcagggtctcagaatctgtgtaagaggaagatgctggagaaccagggaacaattcacatctgaggactctggactttgagagcccagccacacctcaggcaccactcctttatgccctgc

SEQ ID NO: 363334 - DNA, 483 bp, Homo sapiens
tgaaactcattctgtccctagagactgctggttgggtctggagatgtcacaagcactgacatgctgagcagaaggcccagcagggtctacaccagcagggggcgcagtggggatggagaccagtgtccatgattcagacatgtattcgggatacatgtatctgtgtagccttggggattgggggagcatgctgaatctgtggaagttttatgtccttgtagcccagcacctccatccctgcctgctgactcagacctcaacatgtgtcccatggaaagcacgggccacttatagaggctgccctgtgcaacccccaaggctcagctggattctcctttcccaggagagctcctctgcctgyaccaagtcagagcttgtttccacaggcaaacttggcggctatggcagaaggacaaaaagtcaggtgagcatcagctcaacaatgaaaggttctttttactatggaattttagatcattcatt

SEQ ID NO: 363335 - DNA, 614 bp, Homo sapiens
tttgcctattccattaaacattttaatatcttgaatacggttgtgcaaatcatgcctctcagtctctctgcaaatattaatattggggcaaatttaataacagttttctcatgatgtcatattttcttaccagttctgaatargctgaactgtatgtaatgacaaatattataagctagtttgagctcaagacaaattacttttactgaaatttaataccttagcatcaacctggaaacaaaagatgttgctcaagtttaaaggtctattcatgagtatcataaacttgcacatatttgctacagtattccacaggatcaataggttttctgttttaatgtgctaaatatagacactttttgtgcaatcagattttctgggataagcggataacagagattctcatattaggctttaaattctacctaggactgctaggatttcacaatacaaaaagtcattttctaggttgacgatattcttcattttctagggtaagaacattaaataggagtaagagctggtaaagtaagtctctaagacacagtcatatctatagtcctttgttacactttataatttcatgccctgactgcttctaggagattaaaatt

SEQ ID NO: 363336 - DNA, 614 bp, Homo sapiens
tttgcctattccattaaacattttaatatcttgaatacggttgtgcaaatcatgcctctcagtctctctgcaaatattaatattggggcaaatttaataacagttttctcatgatgtcatattttcttaccagttctgaataagctgaactgtatgtaatgacaaatattataagctagtttgagctcaagacaaattacttttactgaaatttaataccttagcatcaacctggaaacaaaagatgttgctcaagtttaaargtctattcatgagtatcataaacttgcacatatttgctacagtattccacaggatcaataggttttctgttttaatgtgctaaatatagacactttttgtgcaatcagattttctgggataagcggataacagagattctcatattaggctttaaattctacctaggactgctaggatttcacaatacaaaaagtcattttctaggttgacgatattcttcattttctagggtaagaacattaaataggagtaagagctggtaaagtaagtctctaagacacagtcatatctatagtcctttgttacactttataatttcatgccctgactgcttctaggagattaaaatt

SEQ ID NO: 363337 - DNA, 614 bp, Homo sapiens
tttgcctattccattaaacattttaatatcttgaatacggttgtgcaaatcatgcctctcagtctctctgcaaatattaatattggggcaaatttaataacagttttctcatgatgtcatattttcttaccagttctgaataagctgaactgtatgtaatgacaaatattataagctagtttgagctcaagacaaattacttttactgaaatttaataccttagcatcaacctggaaacaaaagatgttgctcaagtttaaaggtctattcatgagtatcataaacttgcacatatttgctacagtattccacaggatcaataggttttctgttttaatgtgctaaatatagacactttttgtgcaatcagattttctgggataagcggataacagagattctcatattaggctttaaattctacctaggactgctaggatttcacaatacaaaaagtcattttctrggttgacgatattcttcattttctagggtaagaacattaaataggagtaagagctggtaaagtaagtctctaagacacagtcatatctatagtcctttgttacactttataatttcatgccctgactgcttctaggagattaaaatt

SEQ ID NO: 363338 - DNA, 614 bp, Homo sapiens
tttgcctattccattaaacattttaatatcttgaatacggttgtgcaaatcatgcctctcagtctctctgcaaatattaatattggggcaaatttaataacagttttctcatgatgtcatattttcttaccagttctgaataagctgaactgtatgtaatgacaaatattataagctagtttgagctcaagacaaattacttttactgaaatttaataccttagcatcaacctggaaacaaaagatgttgctcaagtttaaaggtctattcatgagtatcataaacttgcacatatttgctacagtattccacaggatcaataggttttctgttttaatgtgctaaatatagacactttttgtgcaatcagattttctgggataagcggataacagagattctcatattaggctttaaattctacctaggactgctaggatttcacaatacaaaaagtcattttctaggttgacgatattcttcattttctagggtaagaacattaaataggagtaagagctggtaaagtaagtctctaagacacrgtcatatctatagtcctttgttacactttataatttcatgccctgactgcttctaggagattaaaatt

SEQ ID NO: 363339 - DNA, 607 bp, Homo sapiens
tctctctgagatgggcagactccatggtcatgctgctgctctttctgagctggggaaggcagctctgcctgcatgcatgccagaccacagtgtctggaatagcatcccctaggacagccctcaatcggtaaggacaggggaggtgtatacatacatgtggccatgtggaaggaacatatataagttctgacagacctgggttccaatctcagtccctacttctgctgaccatgtgactttgggaaatcacccctgcactctgatgggcagttttcttacctgtaaaatgaagtactgtggatatcaagcagtgtcttgagggcttcaccagatcatgacccatgaagagagaaagagagagagagagagtaccyggtgtccatttcatgcatccttgactgtcttagaatgaagacgttatgtaagatattactagtcagatgtcactttcaactaaaaattatcaatatttattctaactaatagatctctctctctctatacagtgaagtttcacgtaaatgttttcccaccatatcctttcccatcaatctatttatgtgtagcagtagaaagttgaacaagaagactgaaaaccaccagagca

SEQ ID NO: 363340 - DNA, 655 bp, Homo sapiens
gaatcaaggttaaacaccggacttcttcttcaagtcgcccactttggtctctttcaagtgtactttcctttctcccctgttctaaagcttttcaataaactttcacttctgctctgaaatttaccttggtctctttttctcccttatgcccctcagtcgcattctttcttctgaggargcaagaattgaggttgccgcaggccaaggattgaggttgctgcagactcatacggatttgccactagcaactagaatatctttaaccagtaacattcccagcaaaaagtgctaagaagaaagagaaacctgcaaacacactttgttgttaatgaaatgcataaaatcccctgtttctatgtcttctccaactatttttgtttcttaaccacaattatatatgtatgatcttggagcagggaggaattaagaacaggcatttatttcatgcttaggatataaaaagaggaatggagagggaaagacagcagaatttataagttcttcaaagtgatttgagtttttctagccatgggcatagaatgaccaagatctcaggggagcactgcacttacaattcctgcccttcacgcctcagactcccatgaacacacacacacataaaaatgcctgtcttctcctaaagagcaaatttaag

SEQ ID NO: 363341 - DNA, 563 bp, Homo sapiens
aatgtcccagcctggtggagtggcagtgggttcggggaaaacttcagtctcattatcagcaggctggagcatgaagattttgcactttaacactgttatcagcatagtggtgggtattccacagtgattccacaggaaaccaaacctccacaagacagctggtgttttttcctcaagccttctgtttacttatgggaagctactatggtggctgcttagttattgagagaaaacaatggagacttcaataaatagaagtttataccacattcatgcattataaaacttaatattgtgagtaacataattctcccttaattaattcaatacagtgacaattaaaatcccagaggacttttgtgaaattgaaatgatgtttcatatatatatagtatatatatatatatatatatatatatgtactcacataccacrcactatatatatatatatatacacacacactatatatggtgtatgtatatatatagtgatatgtatgtgtataatatatatatagagagtgtgtgtgtatatatatagatacatacatatcacacatg

SEQ ID NO: 363342 - DNA, 598 bp, Homo sapiens
cagttactcccatgaaaaaaactgatgtccaggactatatatgttacctgctctggctacagggatttcctttgtaatctttwtttctaacactcaccaaatgggtatgtgcacctgaaaatatcttttagtggaggggtaaaggatatgaagaaaggtaattttgcctaatgttaaaattaggcaaaatgttaaaatttcacagtgatgcctgctgggcagagttctaaattgggtgctggaccaaagccacacccctgccatcgtcaaggatgccctggaagactagaaatcacaatagtgggttaactacaagggtatatcattggctactttgcaaagagaggctggtaatgcaatgacattgattattaatttgcacaggtcattaggtctcagaagaaacaaaacttaaggacaaaattggtttagaagagctgtgactggatctttcaaaatgggccaagatcaaaaataaatgctacccaagtgaatactcatctaaatgccattgcctagcagggaactcttaataattaaggtgatccaacacatggacttcagtcagtcacctttcccagggagtctcatgaaccta

SEQ ID NO: 363343 - DNA, 598 bp, Homo sapiens
cagttactcccatgaaaaaaactgatgtccaggactatatatgttacctgctctggctacagggatttcctttgtaatctttatttctaacactcaccaaatgggtatgtgcacctgaaaatatcttttagtggaggggtaaaggatatgaagaaaggtaattttgcctaatgttaaaattaggcaaaatgttaaaatttcacartgatgcctgctgggcagagttctaaattgggtgctggaccaaagccacacccctgccatcgtcaaggatgccctggaagactagaaatcacaatagtgggttaactacaagggtatatcattggctactttgcaaagagaggctggtaatgcaatgacattgattattaatttgcacaggtcattaggtctcagaagaaacaaaacttaaggacaaaattggtttagaagagctgtgactggatctttcaaaatgggccaagatcaaaaataaatgctacccaagtgaatactcatctaaatgccattgcctagcagggaactcttaataattaaggtgatccaacacatggacttcagtcagtcacctttcccagggagtctcatgaaccta

SEQ ID NO: 363344 - DNA, 532 bp, Homo sapiens
cacatgcatacgtatgaaattattgtataaattaaatctgttaagataattccagttactcccatgaaaaaaactgatgtccaggactatatatgttacctgctctggctacagggatttcctttgtaatctttatttctaacactcaccaaatgggtatgtgcacctgaaaatatcttttagtggaggggtaaaggatatgaagaaaggtaattttgcctaatgttaaaattaggcaaaatgttaaaatttcacagtgatgcctgctgggcagagttctaaattgggtgctggaccaaagccacacccctgccatcrtcaaggatgccctggaagactagaaatcacaatagtgggttaactacaagggtatatcattggctactttgcaaagagaggctggtaatgcaatgacattgattattaatttgcacaggtcattaggtctcagaagaaacaaaacttaaggacaaaattggtttagaagagctgtgactggatctttcaaaatgggccaagatcaaaaataaat

SEQ ID NO: 363345 - DNA, 443 bp, Homo sapiens
gaccacggctgggccttagacctgctctttagaagaagacaggcattatcatatgtgtgcatttgtgggagtctgaagcatgaagggcaggaaccaaaataagtgatatcctctcctggcatcttggtcctgctgtgtccctggctagagaaacccaaaccgcttcgaagagtttataaattccattctcctgctgtcgtcatttctattttcatattctaaatataaaagaacccttcttatcttcarttcttccctctgcaagattgtgaaaatagaaccatggttaagaaacagacaaaaaagtttgaaaacacataaaatctaaggattacatgcatctcctccacaccaccgtggtgtttgcaggtttcccctccttctcagtgttttttgatgggaggatgctgactgctccagccatgttgccggcagaggttgca

SEQ ID NO: 363346 - DNA, 611 bp, Homo sapiens
agcatcctagctcagttccaacggaacccaggcctggctctgagctcctgctatcccctggacaccatgcctgccctggttaagggccatgggcttggacagatgtcattctgactatcagcatccaagctgccttcaggggcacwtgcccccacctcccgtcattactggtgcacaaacctcgccccagctcctgctctgcctggagtgctgctgaagatctggggccttctcagtggagcagaatgggaggcagctctgaaatcttaaacccccttctcctcccactagcttcccaccttccgtatgggcacctcctgagcatctgatgagcatcacagagtagagaatgtcaatgtgttttctcccacatcctgctctgaatttatgaggccaatttatcctcacctcacacatgagctgcccttgtcttcagggatgtgatccttgtttctctcacatcctgtcacagtgttgacaacctagttttgacttcactccatgaatccttttggaaatattatggtcaacaagttgtcgtccttgaataacacacaataaaaataacaaatattcagaaggttttgcaagggggagaaatgtttcattgt

SEQ ID NO: 363347 - DNA, 611 bp, Homo sapiens
agcatcctagctcagttccaacggaacccaggcctggctctgagctcctgctatcccctggacaccatgcctgccctggttaagggccatgggcttggacagatgtcattctgactatcagcatccaagctgccttcaggggcacatgcccccacctcccgtcattactggtgcacaaacctcgccccagctcctgctctgcctggagtgctgctgaagatctggggccttctcagtggagcagaatgggaggcagctctgaaatcttaaacccccttctcctcccactagcttcccaccttccgtatgggcacctcctgagcatctgatgagcatcacagagtagagaatgtcaatgtgttttctcccacatcctgctctgaatttatraggccaatttatcctcacctcacacatgagctgcccttgtcttcagggatgtgatccttgtttctctcacatcctgtcacagtgttgacaacctagttttgacttcactccatgaatccttttggaaatattatggtcaacaagttgtcgtccttgaataacacacaataaaaataacaaatattcagaaggttttgcaagggggagaaatgtttcattgt

SEQ ID NO: 363348 - DNA, 611 bp, Homo sapiens
agcatcctagctcagttccaacggaacccaggcctggctctgagctcctgctatcccctggacaccatgcctgccctggttaagggccatgggcttggacagatgtcattctgactatcagcatccaagctgccttcaggggcacatgcccccacctcccgtcattactggtgcacaaacctcgccccagctcctgctctgcctggagtgctgctgaagatctggggccttctcagtggagcagaatgggaggcagctctgaaatcttaaacccccttctcctcccactagcttcccaccttccgtatgggcacctcctgagcatctgatgagcatcacagagtagagaatgtcaatgtgttttctcccacatcctgctctgaatttatgaggccaatttatcctcrcctcacacatgagctgcccttgtcttcagggatgtgatccttgtttctctcacatcctgtcacagtgttgacaacctagttttgacttcactccatgaatccttttggaaatattatggtcaacaagttgtcgtccttgaataacacacaataaaaataacaaatattcagaaggttttgcaagggggagaaatgtttcattgt

SEQ ID NO: 363349 - DNA, 525 bp, Homo sapiens
gatgtgatccttgtttctctcacatcctgtcacagtgttgacaacctagttttgacttcactccatgaatccttttggaaatattatggtcaacaagttgtcgtccttgaataacacacaataaaaataacaaatattcagaaggttttgcawgggggagaaatgtttcattgtgaacagagttccagcagctgtgtgtgccatagaagctgggcagagagatcccatatggctccagttagaggggaggctgccaacgagccatggagggcttttgtcttgtgaccacacctgtaagcctttcttataagccacatgtagcctaattctatgagccacatgtgctgctctgtcctacagggacccccaggggacaaaatgcccatgctgagctctgggcacaaaacatccttctaccaggagccgaggcccactccctgcctcctcggcacctgctgctttgtgttccccagacccttagcaatcttagcaatcctcagcaatcctcagcatccttagcaatct

SEQ ID NO: 363350 - DNA, 525 bp, Homo sapiens
gatgtgatccttgtttctctcacatcctgtcacagtgttgacaacctagttttgacttcactccatgaatccttttggaaatattatggtcaacaagttgtcgtccttgaataacacacaataaaaataacaaatattcagaaggttttgcaagggggagaaatgtttcattgtgaacagagttccagcagctgtgtgtgccatagaagctgggcagagagatcccatatggctccagttagaggggaggctgccaacgagccatggagggcttttgtcttgtgaccacacctgtaagcctttcttataagccacatgtagcctaattctatgagccacatgtgctgctctgtcctacagggacccccaggggacaaaatgcccatgctgagctctgggyacaaaacatccttctaccaggagccgaggcccactccctgcctcctcggcacctgctgctttgtgttccccagacccttagcaatcttagcaatcctcagcaatcctcagcatccttagcaatct

SEQ ID NO: 363351 - DNA, 635 bp, Homo sapiens
tatttgtgtttatgtttctaatcgcaggtgccagatgtgacatccagatgacccagtctccatcctccctgtctgcatctgtaggagacagagtcaccatcacttgccaggcgagtcaggacattagcaactatttaaattggtatcagcagaaaccagggaaagcccctaagctcctgatctacgatgcatccaatttggaaacaggggtcccatcaaggttcagtggaagtggatctgggacagattttactttcaccatcagcagcctgcagcctgaagatattgcaacatattactgtcaacagyatgataatctccctcccacagtgtaacaagtcataacataaatcacccaggggagcagatgcgtgaggctcagctgtcccagatgccccttctggtgccttcgcctgctgagaatgtttctcaaattgcagtcacactttgaagttcactggagagtttttgtaaaagggccatgaaggcccacttcatcgtagctgtctttccttgtcctaatccccagtatcatagacagggcaatgcctctcctgatttcattgagaagaaatggttacacctgaggggtctgagttgtagcatcagttggaattcatgtagcaatagtgagc

SEQ ID NO: 363352 - DNA, 562 bp, Homo sapiens
agtcataacataaatcacccaggggagcagatgcgtgaggctcagctgtcccagatgccccttctggtgccttcgcctgctgagaatgtttctcaaattgcagtcacactttgaagttcactggagagtttttgtaaaagggccatgaaggcccacttcatcgtagctgtctttccttgtcctaatccccagtatcatagacagggcaatgcctctcctgatttcattgagaagaaatggttacacctgaggggtctgagttgtagcatcagttggaattcatgtagcaatagtgagccactctaggtattccaagtaggattttttttaaatayaagatgtgagaatctaaactacagccttttaaaggtttgcaagtatagtagtcaaagacgcaaatactagagaagaggaattctcttccggaatccagaatgcatctgatagagaaggtacaactgccaatcatgtggtcctcagacctttctgagaagcccatgggtgggggtgcagatgctctcagctgcctagaggacttcatcaggtgcttctgcagtcctca

SEQ ID NO: 363353 - DNA, 562 bp, Homo sapiens
agtcataacataaatcacccaggggagcagatgcgtgaggctcagctgtcccagatgccccttctggtgccttcgcctgctgagaatgtttctcaaattgcagtcacactttgaagttcactggagagtttttgtaaaagggccatgaaggcccacttcatcgtagctgtctttccttgtcctaatccccagtatcatagacagggcaatgcctctcctgatttcattgagaagaaatggttacacctgaggggtctgagttgtagcatcagttggaattcatgtagcaatagtgagccactctaggtattccaagtaggattttttttaaatataagatgtgagaatctaaactacagccttttaaaggtttgcaagtatagtagtcaaagacgcaaatactagagaagaggaattctcttcyggaatccagaatgcatctgatagagaaggtacaactgccaatcatgtggtcctcagacctttctgagaagcccatgggtgggggtgcagatgctctcagctgcctagaggacttcatcaggtgcttctgcagtcctca

SEQ ID NO: 363354 - DNA, 473 bp, Homo sapiens
taaaacgttacttgcccaagattgaaactttcaaattcaggtccttcttcctcctctatgatgaattaggttttattagtttcctccaagggacactttatatcacattgctcacagagaagacatatctacccccttcaccccccacccaatggctctttccacaccamtgcacccaccaggtgatttgcatattgtcccctagggaggaccttcccttgtgagcctgagataaaagctcagctctaaccttgccttgactgatcaggacttctcagttcatcttctcaccatgaggctccctgctcagctcctggggctgctaatgctctggatccctggtaaggatggaaggagatgagggaggaggagggggtgggaggctgagctctggcggccccactgattcccgtgtttattctaaccatgtgttaaaggaatatgccctatgctccagggagaggaattcatat

SEQ ID NO: 363355 - DNA, 473 bp, Homo sapiens
taaaacgttacttgcccaagattgaaactttcaaattcaggtccttcttcctcctctatgatgaattaggttttattagtttcctccaagggacactttatatcacattgctcacagagaagacatatctacccccttcaccccccacccaatggctctttccacaccactgcacccaccaggtgatttgcatattgtcccctagggaggaccttcccttgtgagcctgagataaaagctcagctctaaccttgccttgactgatcaggacttctcagttcatcttctcaccatgaggctccctgctcagctcctggggctgctaatgctctggatmcctggtaaggatggaaggagatgagggaggaggagggggtgggaggctgagctctggcggccccactgattcccgtgtttattctaaccatgtgttaaaggaatatgccctatgctccagggagaggaattcatat

SEQ ID NO: 363356 - DNA, 529 bp, Homo sapiens
ggtattaatacttggggatgttcatgtttgttyccgacatagatgccagtgggtatgttgtgtgcactccatctcttaccccttttcctatgtccccagagagaaggccactgtcatctgtagggccggccagagtgttaagagcgttctatttttgcttggctcccgcagaaaacaggcccagctctgagctcctgttggctcctggttctctgtggatgcaacacctgcccgggtcagggttcaactgcctggacagatatcactctggccatcagcagtgaagctgatcaaggaaccccattgtgaacagggttccagcagctgtgtgagtcgtgaaagctgggccgataggtcccacatggctccagtcagaggggaggctgccaataggctgtggagggctttcatcctgtgaccacacagccactgacctcatgtgctgctctgtctgacaggatcccctatgggaaggacctgcccacaggaagctctgggcaccaaatgttcctccaccgcctagctccac

SEQ ID NO: 363357 - DNA, 529 bp, Homo sapiens
ggtattaatacttggggatgttcatgtttgtttccracatagatgccagtgggtatgttgtgtgcactccatctcttaccccttttcctatgtccccagagagaaggccactgtcatctgtagggccggccagagtgttaagagcgttctatttttgcttggctcccgcagaaaacaggcccagctctgagctcctgttggctcctggttctctgtggatgcaacacctgcccgggtcagggttcaactgcctggacagatatcactctggccatcagcagtgaagctgatcaaggaaccccattgtgaacagggttccagcagctgtgtgagtcgtgaaagctgggccgataggtcccacatggctccagtcagaggggaggctgccaataggctgtggagggctttcatcctgtgaccacacagccactgacctcatgtgctgctctgtctgacaggatcccctatgggaaggacctgcccacaggaagctctgggcaccaaatgttcctccaccgcctagctccac

SEQ ID NO: 363358 - DNA, 529 bp, Homo sapiens
ggtattaatacttggggatgttcatgtttgtttccgacatagatgccagtgggtatgttgtgtgcactccatctcttaccccttttcctatgtccccagagagaaggccactgtcatctgtagggccggccagagtgttaagagcgttctattttwgcttggctcccgcagaaaacaggcccagctctgagctcctgttggctcctggttctctgtggatgcaacacctgcccgggtcagggttcaactgcctggacagatatcactctggccatcagcagtgaagctgatcaaggaaccccattgtgaacagggttccagcagctgtgtgagtcgtgaaagctgggccgataggtcccacatggctccagtcagaggggaggctgccaataggctgtggagggctttcatcctgtgaccacacagccactgacctcatgtgctgctctgtctgacaggatcccctatgggaaggacctgcccacaggaagctctgggcaccaaatgttcctccaccgcctagctccac

SEQ ID NO: 363359 - DNA, 529 bp, Homo sapiens
ggtattaatacttggggatgttcatgtttgtttccgacatagatgccagtgggtatgttgtgtgcactccatctcttaccccttttcctatgtccccagagagaaggccactgtcatctgtagggccggccagagtgttaagagcgttctatttttgcttggctccmgcagaaaacaggcccagctctgagctcctgttggctcctggttctctgtggatgcaacacctgcccgggtcagggttcaactgcctggacagatatcactctggccatcagcagtgaagctgatcaaggaaccccattgtgaacagggttccagcagctgtgtgagtcgtgaaagctgggccgataggtcccacatggctccagtcagaggggaggctgccaataggctgtggagggctttcatcctgtgaccacacagccactgacctcatgtgctgctctgtctgacaggatcccctatgggaaggacctgcccacaggaagctctgggcaccaaatgttcctccaccgcctagctccac

SEQ ID NO: 363360 - DNA, 524 bp, Homo sapiens
aggctttgacttgtcttggtgcatgattgaattaggatctaatagaaggaggcagagaagaaggttagaaatggactgttattccttaggttctcttaagggggtggaggccaaataattcacrggttgtcagaaaataccccagggctctttctcagttgcctggtaacaaactggctgaagtttggtgcttcttttccctggaaagaggtgctatgattttccatagcttccaggttgccaggagctgaatgcctggcatatccaggccttcctcaaaaagctggttcctgagctcagagtgcttggggcctgcacataatattccttccctgtgctgatggatagctctaggctaggagaagccaggggagaaggagaggctggtgtggggctagagaagtgaacatttctctctgcttattgttttgtatttttagtatattttccattcaatgtgttatacatatcgtatgtgcacaattatgtttattttatgtaaatatcatcctgtgaaatatgtc

SEQ ID NO: 363361 - DNA, 519 bp, Homo sapiens
agttgcctggtaacaaactggctgaagtttggtgcttcttttccctggaaagaggtgctatgattttccatagcttccaggttgccaggagctgaatgcctggcatatccaggccttcctcaaaaagctggttcctgagctcagagtgcttggggcctgcacataatattccttccctgtgctgatggayagctctaggctaggagaagccaggggagaaggagaggctggtgtggggctagagaagtgaacatttctctctgcttattgttttgtatttttagtatattttccattcaatgtgttatacatatcgtatgtgcacaattatgtttattttatgtaaatatcatcctgtgaaatatgtcattatgctcactgtttttctactgagatgtatgagttaaaatatttcagtgttgttaagggtgaaacttgtctattacttctcattgctgcctgatgatccagtcaagatgtcaactacatttaacctatgttcctggtaatagataccca

SEQ ID NO: 363362 - DNA, 524 bp, Homo sapiens
aggctttgacttgtcttggtgcatgattgaattaggatctaatagaaggaggcagagaagaaggttagaaatggactgttattccttaggttctcttaagggggtggaggccaaataattcacgggttgtcagaaaataccccagggctctttctcagttgcctggtaacaaactggctgaagtttggtgcttcttttccctggaaagaggtgctatgattttccatagcttccaggttgccaggagctgaatgcctggcatatccaggccttcctcaaaaagctggttcctgagctcagagtgcttggggcctgcacataatattccttccctgtgctgatggatagctctaggctaggagaagccaggggagaaggagaggctggtgtggggctagagaagtgaacatttctctctgcttattgttttgtatttttagtatattttccattcaatgtgttatacatatcgtatgtkcacaattatgtttattttatgtaaatatcatcctgtgaaatatgtc

SEQ ID NO: 363363 - DNA, 519 bp, Homo sapiens
agttgcctggtaacaaactggctgaagtttggtgcttcttttccctggaaagaggtgctatgattttccatagcttccaggttgccaggagctgaatgcctggcatatccaggccttcctcaaaaagctggttcctgagctcagagtgcttggggcctgcacataatattccttccctgtgctgatggatagctctaggctaggagaagccaggggagaaggagaggctggtgtggggctagagaagtgaacatttctctctgcttattgttttgtatttttagtatattttccattcaatgtgttatacatatcgtatgtgcacaattatgtttattttatgtaaatatcatcctgtgaaatatgtcattatgctcactgtttttctactgagatgtatgagttaaaatatttcagtgttgttaagggtgaaacttgtctattacttctcrttgctgcctgatgatccagtcaagatgtcaactacatttaacctatgttcctggtaatagataccca

SEQ ID NO: 363364 - DNA, 498 bp, Homo sapiens
tgtggcgtttggaacaccaagctctgtgctataaagggtggaaggctaccctgacacacygtaatctaagcccagggcataaaatccctcgtggcttggatagaatccagggttcatggctctggaatgtgtctacacttgctggctccttgctccttgctctcccaggttcgattgtatcttgagttaaaggaacctgctctccattatctcaagtagcagagcgaatgctaaaccatcacagctataaatcttgtgcctaatgcaacgtgcccttttgacctccacattctcaccacctttttctttgttggataaccaataaatagcactgggctcccagagctcggggccttcgcagcctccatgatcacgatggccccctggtcccactttacttctcaaactgtcttttctcaatcctttgactccaccagacttggtcatccccatgacctggtgttgggtctgatcaccccaacactgctgtgtgacaac

SEQ ID NO: 363365 - DNA, 498 bp, Homo sapiens
tgtggcgtttggaacaccaagctctgtgctataaagggtggaaggctaccctgacacactgtaatctaagcccagggcataaaatccctcrtggcttggatagaatccagggttcatggctctggaatgtgtctacacttgctggctccttgctccttgctctcccaggttcgattgtatcttgagttaaaggaacctgctctccattatctcaagtagcagagcgaatgctaaaccatcacagctataaatcttgtgcctaatgcaacgtgcccttttgacctccacattctcaccacctttttctttgttggataaccaataaatagcactgggctcccagagctcggggccttcgcagcctccatgatcacgatggccccctggtcccactttacttctcaaactgtcttttctcaatcctttgactccaccagacttggtcatccccatgacctggtgttgggtctgatcaccccaacactgctgtgtgacaac

SEQ ID NO: 363366 - DNA, 498 bp, Homo sapiens
tgtggcgtttggaacaccaagctctgtgctataaagggtggaaggctaccctgacacactgtaatctaagcccagggcataaaatccctcgtggcttggatagaatccagggttcatggctctggaatgtgtctacacttgctggctccttgctccttgctctcccaggttcgattgtatcttgagttaaaggaacctgctctccattatctcaagtagcagagcgaatgctaaaccatcacagctataaatcttgtgcctaatgcaacgygcccttttgacctccacattctcaccacctttttctttgttggataaccaataaatagcactgggctcccagagctcggggccttcgcagcctccatgatcacgatggccccctggtcccactttacttctcaaactgtcttttctcaatcctttgactccaccagacttggtcatccccatgacctggtgttgggtctgatcaccccaacactgctgtgtgacaac

SEQ ID NO: 363367 - DNA, 498 bp, Homo sapiens
tgtggcgtttggaacaccaagctctgtgctataaagggtggaaggctaccctgacacactgtaatctaagcccagggcataaaatccctcgtggcttggatagaatccagggttcatggctctggaatgtgtctacacttgctggctccttgctccttgctctcccaggttcgattgtatcttgagttaaaggaacctgctctccattatctcaagtagcagagcgaatgctaaaccatcacagctataaatcttgtgcctaatgcaacgtgcccttttgacctccacattctcaccacctttttctttgttggataaccaataaatagcactgggctcccagagctcggggccttcrcagcctccatgatcacgatggccccctggtcccactttacttctcaaactgtcttttctcaatcctttgactccaccagacttggtcatccccatgacctggtgttgggtctgatcaccccaacactgctgtgtgacaac

SEQ ID NO: 363368 - DNA, 435 bp, Homo sapiens
caccattcagaaaaacatagtgcaaagttagtttttgttctttctatataattatcctagaaaagtcttcccttaataaatccttytggttaatctggcatatgtgagatgattatgatgggatatataccagattgaacaattggtcaccaggaattttatattcactgcctgaggaataaattgtttcccactttcctcttacctgcactgggctcttgaatctaaatatagagacccacattattttccctatgaggcccttggacagagcgctcttatggggctcactcaccaggtgccaggggagggtagattccaacacttgctatgaacattcttgaacagttatcctggaaaccgcagataccagaccactcttgaactggctcaagactatgttttatttgtaggctgtctgctcatcagtgcttg

SEQ ID NO: 363369 - DNA, 563 bp, Homo sapiens
atgtgtgacctgggacatctgggatgagctgccagtgtgctgagttgtggggaacctgctctgtgcttggaggctgaaagcatatcctttccctccctactgccttacctgtgtccacctgctgtggtctaaattgtgttcccacattcatgttgaaggtctaatctccaacgtggctgtaggagataggacctataagaatataatggaagttataagggtggggccctgatccaataggattagtggttctcataagatccagagatctctctttttcctctctctctaactcccacactcwtatggaaagaccatatgaaagcatggtgagaaggtagcatctacaaaccaggaagaaggtctttaccagaaagtgaaccctgctggaccttgatgttggacttcccagccatcagaaatgtgaaaataaatgtctatggttcaagccacccacccagagtattttggtgttgcagtgaaagaagactcattcactatccccaccctctctgagcaggatcagcatcaagaaatatctcatggatgtggggacccagctt

SEQ ID NO: 363370 - DNA, 576 bp, Homo sapiens
tgccttacctgtgtccacctgctgtggtctaaattgtgttcccacattcatgttgaaggtctaatctccaacgtggctgtaggagataggacctataagaatataatggaagttataagggtggggccctgatccaataggattagtggttctcataagatccagagatctctctttttcctctctctctaactcccacactcttatggaaagaccatatgaaagcatggtgagaaggtagcatctacaaaccaggaagaaggtctttaccagaaaktgaaccctgctggaccttgatgttggacttcccagccatcagaaatgtgaaaataaatgtctatggttcaagccacccacccagagtattttggtgttgcagtgaaagaagactcattcactatccccaccctctctgagcaggatcagcatcaagaaatatctcatggatgtggggacccagctttgctcctattcctcctgctgttctctctcttgaggaagaagggagggttcaggcttcatcttcagtttgtttgcaataaacaggaatgtttccttgacaatcagttaattagc

SEQ ID NO: 363371 - DNA, 576 bp, Homo sapiens
tgccttacctgtgtccacctgctgtggtctaaattgtgttcccacattcatgttgaaggtctaatctccaacgtggctgtaggagataggacctataagaatataatggaagttataagggtggggccctgatccaataggattagtggttctcataagatccagagatctctctttttcctctctctctaactcccacactcttatggaaagaccatatgaaagcatggtgagaaggtagcatctacaaaccaggaagaaggtctttaccagaaagtgaaccctgctggaccttgatgttggacttcccagccatcagaaatgtgaaaataaatgtctatggttcaagccacccacccagagtattttggtgttgcagtgaaagaagrctcattcactatccccaccctctctgagcaggatcagcatcaagaaatatctcatggatgtggggacccagctttgctcctattcctcctgctgttctctctcttgaggaagaagggagggttcaggcttcatcttcagtttgtttgcaataaacaggaatgtttccttgacaatcagttaattagc

SEQ ID NO: 363372 - DNA, 576 bp, Homo sapiens
tgccttacctgtgtccacctgctgtggtctaaattgtgttcccacattcatgttgaaggtctaatctccaacgtggctgtaggagataggacctataagaatataatggaagttataagggtggggccctgatccaataggattagtggttctcataagatccagagatctctctttttcctctctctctaactcccacactcttatggaaagaccatatgaaagcatggtgagaaggtagcatctacaaaccaggaagaaggtctttaccagaaagtgaaccctgctggaccttgatgttggacttcccagccatcagaaatgtgaaaataaatgtctatggttcaagccacccacccagagtattttggtgttgcagtgaaagaagactcattcactatccccaccctctctgagcaggatcagcatcaagaaatatctcatggaygtggggacccagctttgctcctattcctcctgctgttctctctcttgaggaagaagggagggttcaggcttcatcttcagtttgtttgcaataaacaggaatgtttccttgacaatcagttaattagc

SEQ ID NO: 363373 - DNA, 581 bp, Homo sapiens
tgccgactgttccagccagattcctgtcagaggttgtgtttggagggtttaaaagaaaagcttccaggggcttagggctgaattccaaaaaggatagccggagagtggctctggattcccagcaaggagaatgccagattgagtcttgggaaaggctatrgacatactggatcccaggcagagacttgtagcagggagaaagcctccacagaaaatccctgctagggcaatatctagtagagccatgaaagtgaggcagcctgggagaccacagaattgtagggccagcagcatgcaactccagcctgggaaagatgcaggcacaagactccaacccatgaaggcttctgggtgaagtgagcccagtaaaaccatagaggtggggctgcctgaggcattggtaaaccaactcccaccccagattgccccagatatgagatttgaagtcaaagattattctccacctttaagacttaatgtttttcctgttgggttttgggcttacttgggaccagttaaccctttctttttacctatctctcttttttggaatgagaatgtttatcttatgcctgccccac

SEQ ID NO: 363374 - DNA, 476 bp, Homo sapiens
ttcagtgctgtgctagaaagatgcttcagacaggtacttttttatttttattttttacaaaaccatggcctttctggtttaagaatttatattctattttaaagcttatcttttcagtgcttgactattcgttgtgctatatgacaatgtgcaatcatgttctagatagaaatgaaagtcatttttagaaaacagagscaatttacctgccctttggctgcttaataacattaggcaggcacttgctttgcatcacaggcttgtaaaagtgattgtgtttaaagccttttgtgaaatccaaaatggaatgtcaatagccaaaagaacagcctgttcatacatttttaggaaatggaattcatttgtgggatgagcttcaaaactaaattacaaaaataaataaataaataaaagactgccattaacataagcacaaaagaggaagttcaaatacagaataatcttatattgaaata

SEQ ID NO: 363375 - DNA, 585 bp, Homo sapiens
cttaaacatcttattgtctcctttccagattacacaaaccaaaaaaaaaaaaaaaaatcagtatgatcaaagtagaagtattgatctcactaccygtcatttgttaccatagaaataatttaaatgactagcagacataggtcctagcttatgatagcttctgtcaaggtctcactcaacaagcatcccatcattcttgataatactgtagttgtcaatgctctagtccccagctttgagaaagtagccaagaaataaaacctagtaggattcttatcctgcagtctctgtgattctttgcatctaactcatcaatttaaatgggagaaaaatgtatccaaatttttaataacctatattcaatatatagcatgtcctgtaattataaatattggcaaaaataataacattggagtaaaagagtatctttgtctttgtcatcaattaaagtcacaaatgtttcctattactttacaatcattgtaggtatctcaaaatattacattgctgacttcaaaattatattttcatacccactgctaaatcttatttaatgtgctaataaagaagtatatatgttagtat

SEQ ID NO: 363376 - DNA, 587 bp, Homo sapiens
ttttaaaatatgcaagtataccacatacaattgctccaaaaattgaaatacttagatatacatttaaaacaacatgtatagattcaatataataaaattataaaattctgatgaaagaaatcaaagaggacttaaaatcttttagagacatgccatgttttaaaattggaatattcaatatattaaagttgtctgttctccctaaattgagctataagtttcatacaattcctatcaaaatcttgcaagtttttgtaaacacagacaagcttattttmacatttatatgaaaaagtaaatttcctagaatagcgaaaacaacttgaaaaataagaaaaatgtaggaggaataaacattgttctcaatgttaaggcttatagctgaagtaatcataagagtgcggcattggaggatgtgtagacaaatagatcagtgaaacaaaaatagtgaacacagaaatagacccacaggaatatgcctgcctaattttttcaaaggaataaaagtcattcaatggtcctgtagcaatttgatagtcatcagcaaaaaaaaaaatgaatcttcacctagacctcagctcttatgc

SEQ ID NO: 363377 - DNA, 490 bp, Homo sapiens
ggccaaggcaaatgtgcacagatatttcgctgatacagaagaagataacaaaggcaaataaacacattaaaatatcttcagcgtcattagccaatagtgaaataaaaatgaaaaccwtaatgagatattacagtacacctattggaacagctaaaatgaaaaagtgacaccacctaatacaggcaaggctgtgaaaaaacctggatcgctcatatattgctggtttgaatgtcgaatggtataccactctggaaaatagttcctctaaaatctaaaaatatactcaccatacaacctagtagttgtgcacttgggttttaccatgaagaaatggagacttaataggccatgttggtgtggtggctcatgcctgtaatcccagcactttgggaggccaaggcaggtggatcacttgagatcaggagtttgagaccagcctggctaacatggcaaaatcctgtttctactaaaaatacaaaaattagccagg

SEQ ID NO: 363378 - DNA, 613 bp, Homo sapiens
tccaatggtacaaaatggctgacacaatttgccaggtagaagagatcacagccatcatcttagagaactcagatagtaatttactaaaataggccatttagagaaatggaaccaggataggccatttcccagaaatgaatggcatggcctttctctgtgtggctttgcaaaagaatagtctgaaaagttagaggatgttggaggaagaccctgaaacagccaaaaggtcatgaaaattgaaagacaggtgatggggaaaagatttgagaatcttagttttcacagaggcagcaggaggcattagagcaattctaaggcttgcagcatgtggcatrtagagtctcctcttattggcaaaggattatttaaaagttaataaaataaaattagtcatctaatatcattttgcttgatagaaaagaatttagacttgaggtagtcaattgattctggtactaggaccccaggtataaggtagccccaagtttgtctttgctgacttcctcccttgtgccagacccttcctcagatccctgtaacaaacctgtggaaaagagaagacgtaaaatatttcttctacataaattttctttttctcctctggctgacgtga

SEQ ID NO: 363379 - DNA, 572 bp, Homo sapiens
gtctcctcttattggcaaaggattatttaaaagttaataaaataaaattagtcatctaatatcattttgcttgatagaaaagaatttagacttgaggtagtcaattgattctggtactaggaccccaggtataaggtagccccaagtttgtctttgctgacttcctcccttgtgccagacccttcctcagatccctgtaacaaacctgtggaaaagagaagacgtaaaatatttcttctacataaattttctttttctcctctggctgacgtgagagattttcactggagagccctgtgcacaagtccaaagattcaatatagattcttagtggagaatgagaaagcttattgctgctttatgataccttcacaaggccatctctaatcttgytcagtctgttccctctgcctggaatgatgttgccttcctcgccttgttcacattctccttacacttcaatacctacctcaatcatatcttttcccctgtgaagttaactctaatctttatccttttcccactcaaggaatacgttgtactttctggtattcccttggtaatttattcat

SEQ ID NO: 363380 - DNA, 626 bp, Homo sapiens
ctctgccagcatcgactcaaagaaagtagaaggaaagtttgctggctttgggactaaggtgcttatccctcccaccccccaacttttaccacagttgtctattataaccattgctaggctcttctattctgtgataaagcttctttatcaagtttaaggaataaaatacaagcacaagtggtgattttgtaatacaggaggtggtcctttctgataactgctggcttctatttaactttctaaaatttctgaatttgtctgtcccaaagtggtatctgcatgtgtgcctgtgtgtgtgtgtgagtgtgtttataattgtcctaggtattggcagaattctacaaaattattttatttattattttatttttggattaacataaatagtttttgagctcctgatatgctctggccattggagatatcaacatacagaaaacacagtcagcttggagagagcagcatgtaaaatgttacaacaaactgwgatggctcttcaggggtcagagggaagcaggtaaaggataagcagagatgcatggtgatttgcaagtgagagactgtgatagtgcaaatctaccacctttctactcaaaatgtggtccatgaaacatcagcctgcacac

SEQ ID NO: 363381 - DNA, 588 bp, Homo sapiens
acgattctttcttaagacagagtcttctaaatttcaatctgtattcaatttatttactcaagtttctattcttcgttgccctcctcttcctattttgtttgtgttatgcaactgaggttacttttttgtaaaatcatattagtgaatgtctagcgtaaagagataactatttttttttctccttatcgcttcactcatattatggaaacttcccatatgctcttcttaacgtcttattccgcaactcatgatgcttgaggagtgagtcatatgaacgacctatctgctcatagtcacctgatccaataaatgagattctctttcctyggattttgtaattgatttaaagactcttgttacttcctgtggaacccgtggattggaaggttatctaggctgctgcagaactcttccaccctgtgcacagagaagtacataaagtggtaagtgaaatatttttggttgcaaaatagaaaccagacatattaatttaagcaaaagagaacacattgcttcacctaactgaataatccagtagtctcaagaatagctagatcagggtgtttacgcatagctgttaaaaacttt

SEQ ID NO: 363382 - DNA, 588 bp, Homo sapiens
acgattctttcttaagacagagtcttctaaatttcaatctgtattcaatttatttactcaagtttctattcttcgttgccctcctcttcctattttgtttgtgttatgcaactgaggttacttttttgtaaaatcatattagtgaatgtctagcgtaaagagataactatttttttttctccttatcgcttcactcatattatggaaacttcccatatgctcttcttaacgtcttattccgcaactcatgatgcttgaggagtgagtcatatgaacgacctatctgctcatagtcacctgatccaataaatgagattctctttccttggattttgtaattgatttaragactcttgttacttcctgtggaacccgtggattggaaggttatctaggctgctgcagaactcttccaccctgtgcacagagaagtacataaagtggtaagtgaaatatttttggttgcaaaatagaaaccagacatattaatttaagcaaaagagaacacattgcttcacctaactgaataatccagtagtctcaagaatagctagatcagggtgtttacgcatagctgttaaaaacttt

SEQ ID NO: 363383 - DNA, 565 bp, Homo sapiens
taaaatctactgataacattttccttaatggtgaaatattgaatgcttccccccaagattggaaacaagtcaagaatgtcaattctcaccacttttattggacattgtactggaagsttcagctagtgcaataatatatgaaaaagaaataaaatccatatgcactggaaggaaaaatgtgaattgttttttatttgtagatgatgtaactgtattttgaacatcatgaggtatatacatcacaaatactagaaatagtaagtgactttaacatggttgcataatacaagatcgatatataataattaattgcctttacatataaaggcagcatacaattagaaagtagaattcaaaaagctgtttcatttataattacatcaaaagcattaaataattaagtgtaaatttaatgaaatatatgtacatgtaaactgaaaagtaaacacattagtgagacatattagagtcctatgtaaagggaaatgcattgggggaatagatttattcactcaatatagttaggatgtaaattctcttcagattggtgaatatattttataca

SEQ ID NO: 363384 - DNA, 565 bp, Homo sapiens
taaaatctactgataacattttccttaatggtgaaatattgaatgcttccccccaagattggaaacaagtcaagaatgtcaattctcaccacttttattggacattgtactggaaggttcagctagtgcaataatatatgaaaaagaaataaaatccatatgcactggaaggaaaaatgtgaattgttttttatttgtagatgatgtaactgtattttgaacatcatgaggtatatacatcacaaatactagaaatagtaagtgactttaacatggttgcataatacaagatcgatatataataattaattgcctttacatataaaggcagcatacaattagaaagtagaattcaaaaagctgtttcatttataattacatcaaaagcattaaataattaagtgtaaatttaatgaaatatatgtacatrtaaactgaaaagtaaacacattagtgagacatattagagtcctatgtaaagggaaatgcattgggggaatagatttattcactcaatatagttaggatgtaaattctcttcagattggtgaatatattttataca

SEQ ID NO: 363385 - DNA, 502 bp, Homo sapiens
gcttgtagcctagggcaagttctcagccctgctcaccaacaggctggatataaagtcagtgctgttgtaggggaacagtgggagtgtgatcggcctttcaggttgcagactgcatgggagctaggtgaggcccgtacctgctggctttcccccactttcctggtgacctgtgcaacacggcagaggcagccataatttcctcgggaaaataattcctttggcctgggcactatacccctatccctcacagcagatgcagcaagccttgcccaaggagtggctgagctcagacaagcctatccctgccctgacctagtggtctttctctaccctccctggtagccaaagacaaaggttataatctcttgggagctccatggccctgtccactgcttggtcctccctatattactgcagcytatgtgctttgaaagtgccgccttctggctggaggccaaccaacaaaaaatgagcacatttaacacaaaacaaccaaggaccc

SEQ ID NO: 363386 - DNA, 553 bp, Homo sapiens
cctctaatgcttgagctcagaatacaaatgaccctgcagtccctctcttttcaagtcaactcttgggctcttttcagattctatctgggcaggttttatgattcacctattttctctcatatcagcctgaaaattcctggcattcacacaattttaacttgattaaaatttggcctaaataygtcggctgttcttttggcacaatatattaccaaggtggtaagggaaataaaagtactacctgcaatttctcttaagtttgttgaatggtggactgtgtggtatatatctgtgtgagtatgttttttcccaattagcatatacaaatctgatttatttgctcttaaagtgccatagaactgttctgtatgacaactgtttatttggaattatttaattcaatgaatgtaaactgatgcataaaatgatttacttggatgaaagataattatgtgactaaagatcctgattaattgtattattcaattcacatcaaatctgaatctaaaatgtgaaaccattttattccatttaaatgggggggaactaggat

SEQ ID NO: 363387 - DNA, 451 bp, Homo sapiens
atgttttagtagctcctcttggaccttcatgcttttcaccaggcctatgtcggtgggagtgggtgggtaggtgggatagggtctatcataaatcattcttgctactctccatgaaaagactagtggctgaacccaaagatgctcatatccttctaaatgattactgagctgtactgatgggatcatttccattagactacttgaccttctcaatttcaaagtttgtacccactgcttgatgggtcttttacacatgtggctctgccttctgacctaagaaatttgcaggaattctggcagtcttcaggctattgcaatgtgaaattagaagaggtgatgatagctgtaaactccagaagaaaccacgtttcttgagccaactcctctgaaagcttctgtaatgagtaygctgtgtcgcatttaggtcttgctttaggcttgtaggcttgtt

SEQ ID NO: 363388 - DNA, 517 bp, Homo sapiens
cattacgacttttctcatttttatggaagtaaattagcatcccatggcacacaattcagaaacagctaattatggtctgtcaacaactgaaatcatgtaggtagctctaggataccaggtagatgttgccataacaaaatttaatgggagataaattgtaagaaaaaaatcacagtgtaagatatttgtttcggataagaatagataattcaaagcragagaatgacaagaaacaaggtcaaaagtcttgccttaaggcaaagaatgacactcagttgtgaaagtattacatactccttgtatgttcagatctgtgagtttataaatactaaaggcaaattcagtgattaatgtcaagttgctgagttctaaaagtaggattcacaacctcttaagcttcttatgtgaaagttatgttattgatcaagaatacattgaaccctaacagttgaaatgaaaatatttaagtattccagtgagtcactgcaatactctgaaaaagttcagctgcattttc

SEQ ID NO: 363389 - DNA, 517 bp, Homo sapiens
cattacgacttttctcatttttatggaagtaaattagcatcccatggcacacaattcagaaacagctaattatggtctgtcaacaactgaaatcatgtaggtagctctaggataccaggtagatgttgccataacaaaatttaatgggagataaattgtaagaaaaaaatcacagtgtaagatatttgtttcggataagaatagataattcaaagcaagagaatgacaagaaacaaggtcaaaagtcttgccttaaggcaaagaatgacactcagttgtgaaagtattacatactccttgtatgttcagatctgtgagtttataaatactaaaggcaaattcagtgattaatgtcaagttgctgagttctaaaagtaggattcacaacctcttaagcttcttatgtgaaagttatgttattgatcaagaatacattgaaccctaacagttgaaatgaaaatatttragtattccagtgagtcactgcaatactctgaaaaagttcagctgcattttc

SEQ ID NO: 363390 - DNA, 614 bp, Homo sapiens
ccaaaaactaatctgtacttttgtaaagccctgaactgaagctagacaacttaaacttcagaagaaaataacagccacctatttacatacataaaaccaccttcatacctgcctactgatatatggacctcagagtaatgcggagtatatcaattttccaggattgttcttttgtttgttgttgtttttctcccttcctccccctattttctcttcataggacatgagacttcacaacctgctaaaaatgagctttcctaataactcaggacatacccatctaggaataaaccatcctagtcatgagagatgagatgaaacctgagaccagagattctttttcttctaaaatgctttctcctaaagattttcttaaaaggaggtgaaacatgaaagsaaaaaaatcttggggctctgaaatcactaagctaaagggagaagtcaagctgggaactgcttagggccaacctgcttcccattctattcaaagtcatccctctgctcactgagataaacacatatctggttgcctcctttggagaaactcaaaacaaatgaagccacttgtttcttctccacctatgacctagacaccccctccccactttgattct

SEQ ID NO: 363391 - DNA, 542 bp, Homo sapiens
gaagtaagctcccaaaatcctatgatatatcttcagttatctgaaggagattgatatttcctaaatcattatctctagatcaaattcattttctgaccttaatactggcttacaattaggttagcttggtcagtccgcagacatctcaaactccacttgtctaaaacaaaacacatcatcttgtctccattttgcgtagtctcagttccagagctgagtggctccatgctctacacagttccccagaacccaaatctcaaagtcatgtataagcccttcctcctgttaccttgaacatccaattattttgcattcttttgattttgcacttcctaaatatgtcttgaattcttccatttctccccttctccctaaaatacyatatctcacctagattctaataagtagaacagcctcctatttattatgctccaaacttgaccgaactcaaagtattcacactgcagtgatcttccttaaatacaattttagaatatgtcattgccctgcttaaaatctttcagtggatccccaacaccttt

SEQ ID NO: 363392 - DNA, 549 bp, Homo sapiens
gaaatcataatttcatatttgaatcaatcacagtttcttaatcagtgattaggaaaaggagtgtcaggattttagtgacactatttcagaaagtgtcagagtacatggcctttcaggccacatggatatgagccagaaccaccagggtgcccattacctaaaacattaacagtcacyttggaagcacagatgctggggcacctgaccaactcaaactgcattgcctttgtgtctgctttcttatagagacagaggcagactatgcatgcattggcctgcagtctcagagggagttggaagatttttttgccaagaaacagaatcgaaatgaaaattatatcttagaaaggtctttggaggatttatattaggaacctgatcttttcactatctactaagtttataatctcattacctgactcaaagcatccagcattttgttgaacctctggagcacaattaggaaatgtcccttggggcctgagttattagtgaccatgacatacagatctgtgcaacaaagatcagaaattatgaatctagttatac

SEQ ID NO: 363393 - DNA, 549 bp, Homo sapiens
gaaatcataatttcatatttgaatcaatcacagtttcttaatcagtgattaggaaaaggagtgtcaggattttagtgacactatttcagaaagtgtcagagtacatggcctttcaggccacatggatatgagccagaaccaccagggtgcccattacctaaaacattaacagtcactttggaagcacagatgctggggcacctgaccaactcaaactgcattgcctttgtgtctgctttctwatagagacagaggcagactatgcatgcattggcctgcagtctcagagggagttggaagatttttttgccaagaaacagaatcgaaatgaaaattatatcttagaaaggtctttggaggatttatattaggaacctgatcttttcactatctactaagtttataatctcattacctgactcaaagcatccagcattttgttgaacctctggagcacaattaggaaatgtcccttggggcctgagttattagtgaccatgacatacagatctgtgcaacaaagatcagaaattatgaatctagttatac

SEQ ID NO: 363394 - DNA, 530 bp, Homo sapiens
acatggatatgagccagaaccaccagggtgcccattacctaaaacattaacagtcactttggaagcacagatgctggggcacctgaccaactcaaactgcattgcctttgtgtctgctttcttatagagacagaggcagactatgcatgcattggcctgcagtctcagagggagttggaagatttttttgccaagaaacagaatcgaaatgaaaattatatcttagaaaggtctttggaggatttatattaggaacctgatcttttcactatctactaagtttataatctcattacctgactcaaagcatccagcattttgttgaacctctggagcacaattaggaaatgtcccttggggcctgagttattagtgaccatgacatacagatctgtgcaacaaagatcagaaattatgaatctagttatactatagcatgggaacgtcacatatattattattctgtgtttgcatccatgattgcaaaactcrataaaatagaattgtctttcctaggatttcaagaacac

SEQ ID NO: 363395 - DNA, 535 bp, Homo sapiens
tttggcaaatgttatccaaagatagccatcatcagtccctttccttcttatgtgcacatgttgcctttcacataaaagggcatattaaaaggtgtatccccttcccatagatggagagtaggcttagtgacttgcttsaataatagatcttggtgaaaatgatgtctgggacttcccaggtcaagtcatgagatgctttaaaacttctgctttgttggcaagctcttggaagacttgctcatggattctagctcaggccaggtgcagtggctcacatctgtaatcagcactttgggaggccgaggtgggcagatcacctgaagtcaggagtctgagaccagcctggtcaacatgacaaaaccccatctccactaaaaaaaaaaaaaaaaaaggattcttgctcttgaaattcaaacaccatgcttgcagaagaagcccaagtcacatatagagagcatgtgtacttttcatacttaagtgcctaactaaacatccaaacagcagccaacatcaactaggtcagttttcaggtaat

SEQ ID NO: 363396 - DNA, 429 bp, Homo sapiens
aatagtctaccaagatgtttagcttttttcttagagggatttaaggagttgaggacttggggaagtggagtggccagcaggaggtacagagaacaatttctgtttccttctctccctattgtctgamaaaccaaaaccttagttaaaagctcttttctctctgattttgtaaacagcactggaaattacacagaaggtaagtagcattagctttagtaaagctggttttcaaaaagtatataatgctattccaggaaatccttatttccaaagtaattaaaaaccagcctttattcattgtgatattttacttctcatggatactttcatgtgatgtgtcaaggagattacctgggcactcagtcagcaatttaagtcaaatcccagcatctaagtatctcagggaagcctagttcttgctccaacttt

SEQ ID NO: 363397 - DNA, 509 bp, Homo sapiens
tctgtacagaaaggctagtggtatctacctagaggattattctgaggaaaatgtcatcatgtatttgaaaatttaggattatttcttgatggaaaaatttgtggatgttttatgtatttccctgcctttctgctctgccagtggtagtctgtagggcatttttccttttaagcataaccaaaggcagaaacaaatactcaagaaaacatttgccctaaggtctaaataaaaagaaatgaatgtaaggttgcaaagtaagtttttctatctcaaaggctacataacaatgagcctgagagaaggrgaagacaagatgaatgtctctgagtgatctgactccttcatgagggaagggtgaaaataatcttttgtcagaaggctaagggaaaaacatggaaggaacgcagggctcctgagctatcctccaatatgggatgcttcctccatttcccgcagacaacactaccatgcacctgtcttagatgcctgtgaattccctttaactgagg

SEQ ID NO: 363398 - DNA, 564 bp, Homo sapiens
ccatgaccgaaacatttcccattaggtctcacctgctacattggggatcaaatttcaacatgaagtttgcaggacaaacatccaaactatggcaacaagttaatattcattggtgcttattatttgacaagcactgttaaatgctttaaaagcagtacaatatacaattcttctaataattcgatgtgagccacattgataatattattactagtcccattttataaatgaggaaggtgagccataaaaaggttttgtaattttctctaactcacacaattaacaaatgacagagctgggatttgaccctcatgagtctgactccagagtctatcattttaatcactgtcttaaatagcgaacaattttcacttaatgccagcttaaacaaaatatttcaatcaggtataatgctactatagaccttttctccgtgtttcatggtaaaatataaaatataacaagcgrctgttttgacataaacaataaatacatcttcaattgatgctgttaaggttagaagtgcacaagaagaaactaaagctgccaagtcacaactagcta

SEQ ID NO: 363399 - DNA, 609 bp, Homo sapiens
catcatattccagttgacaccagctgttctgaggagtcctaagggctcactttgattcccaatacataacctgagttcggcaagtctagtttaacattgtccacatcaatgtaagaattaaaaggaatctgagggtgttaaatcaaaaatagttttcacttaggcaaggagctgaagatgaaatgaaggctaaagggttgtatgcttttccagaagatcagtgaatcccacaacagagcacttgtgtcacatagaatccttatcgagcaagttatctacccaaggrgaaaagtgctacaagtttccattaggaagattcatttgctatttgttaagttgctggaattttcagccttctcagtgaaacttttagctggttaaatacatggcatactggaaaaagctgaaaaaaagtaaggctcaaaatttctagttaagttttttaacctctcctctcactcataatgttattttgactcagttttctcatctgtaaactggccaaactaaaatcagtccttcctactatagccctatgagtatcaaaagagatagtaaatgagataaagaatgtgaatgagttaaaagagttgtaaggtattttacaaa

SEQ ID NO: 363400 - DNA, 567 bp, Homo sapiens
ccttgttttcttaaaataatctaccagaagtactcctctgactgtgttattacccagcttagagtcatcaatgcttgtcatcacccacaaggggagttcaggttccatagctgagggagaaaggcctggcctttaacatctttgttcttccgcaatgccgcacgccacacatttgttgacctctttgctttgcttcgtctcacccacgttgccttctaagcttcctgccctcttccacctgacttgcttattttttaagacatggctcaggtgytacctgccccaggacactttgctttacgccctctccctcccctccctcttgcccctctgctaacacccccacccaaactgagtttggagcatctctccttggtgattctgttctgatgatatgagtcagtctatgggtctgcctccctcctagtgagtgaacatcttccagagctggattctgttgccttcatctcggtatcaagtgcctgcaatacaaagcacagagcaatggttgaatgaatgaataaatacatgcacacagaagtacaatgtgcattagatccccctaat

SEQ ID NO: 363401 - DNA, 625 bp, Homo sapiens
atcgctggtatttttttttccaagagtcacacatcttgtttcctcctgcctagttggatttgatagaagaagaagattggaatggaactaaaagggttttgaaccactcagatattctacagacakgtttagaggaaattagtagcagggtcatggatcagctatgcaagatactagcatagttattcatctgaataggagcagtcggccacacaagagagatgcttatgaaagaaccacaccaaaatccagctagattctatcttgtatgaatgagagatatttttggtctgcaaacaagcaggcattccataccttggcattctctttgacccatttgtgtgaggttgcctttctcagagcatttccataacacgggaaaattgacttttgtttgtttacccaaacaatattcttaaaatgaacaacccctgttcatccacaaatgaccgtggaatctcgctatcactctttgctactggtgacctctgccagtcctcccaggctgtagagctgtatttacacctcacagagaagcactggggtgaaactctgcgtggagctgtgctgctcagagatgctcctctcctctctttccacttctttcttccacagggtaagactc

SEQ ID NO: 363402 - DNA, 625 bp, Homo sapiens
atcgctggtatttttttttccaagagtcacacatcttgtttcctcctgcctagttggatttgatagaagaagaagattggaatggaactaaaagggttttgaaccactcagatattctacagacaggtttagaggaaattagtagcagggtcatggatcagctatgcaagrtactagcatagttattcatctgaataggagcagtcggccacacaagagagatgcttatgaaagaaccacaccaaaatccagctagattctatcttgtatgaatgagagatatttttggtctgcaaacaagcaggcattccataccttggcattctctttgacccatttgtgtgaggttgcctttctcagagcatttccataacacgggaaaattgacttttgtttgtttacccaaacaatattcttaaaatgaacaacccctgttcatccacaaatgaccgtggaatctcgctatcactctttgctactggtgacctctgccagtcctcccaggctgtagagctgtatttacacctcacagagaagcactggggtgaaactctgcgtggagctgtgctgctcagagatgctcctctcctctctttccacttctttcttccacagggtaagactc

SEQ ID NO: 363403 - DNA, 570 bp, Homo sapiens
taaacaacacaaacttagaaaagcatcatctgttggaattagtgtcaaatgggaaatgttataaaagaagctgtagaacttcagtagggacacagactttcagacyagaggaaatggaaggctgctagagactttctccacattcaaagaaaagcaaacaaacaaaaaacttcaagtggaagaggtgggactggcccaagcagccctacaaaagaatccagaatcttttttgttctcaaagcaatgtgggttttttttttttctattaaagaaattatgcctttggggatagtctgtatagtcttagagtaatttaaatcatttttcttttgagattcttttcatatttatgattttaatactttatgctgattaactacatagagattataggctttgcaaaaggaatatctcagcctgtcacagttacatttgtatgaaacgacctcactgcaggaatgttaacaattgtattagaggttccgtttctaagtttaaataggaataatctacctcaacctattcagttagaacaaaagccacttccgcaaagcaataagcatgtatctt

SEQ ID NO: 363404 - DNA, 604 bp, Homo sapiens
ctataaataatgtggacaagaggtatttgatccttgggtgtgactgacattatagttacacagtgtagtgtcaagctctggtgcctcatgagctgggtttgaatagagaccccgccactttctatttgtgtgaccttggcaaattatgaaactttctgaggctcggtgtgacacggggataaaattcatgcccaattcataggttcattgtgaaaaasaaatgagcgatttccctaaagcacttggtggtgtgtacattataatcacttagtaaatattgtttgttgttatttaaattgcttttactaaactattatgaaagacttttctgctgtttgtccttctaatcactattgtctttgtctgtgtcccacctgacctctcctataaactgaccttttatctgtctactctgatgagagcaatggcagagtagctgctgctttgagcagaaagtaaagccgtgtggaagggtacagtgagacagtgtgacagggaaagctttcagttagcctcagcaggtcagtatgatgctcacacattcacttcccaactgcttctgtaaaacgctccatgattcttcttttttaagcaaatgagaaat

SEQ ID NO: 363405 - DNA, 613 bp, Homo sapiens
agatgctcactctgcctcatttattcctttaatgtcatctcttggtttgtgtgtctgtgtgtctagtgggaacggggatggggatgggaataacagagcttttctctctctgtctcattctttctctcttttctactttctattgttctggccaatatttctgttcactttgtgtgtatgtaatcacattaatggtactgaaaaaaaatcctgaaaaaagattagtatacaccaagatctcaatagctggaatctgcatttcacacagawctcatagatactatgctactgttcaaaaaagccagctgcattagtacaaggatagggaagatatggcttaaaaacagagcttgatttgccaaccacatcacaccgtttacccatggagctgagagtccagtattttaatattagaccacatgtatagaggggcccaacagcaagagtatgatgattgccccatcctgttttacatggattagaaaaaacttggagcaatcttcgcaattgaagaggaaaagaagatattccaaggattgaggccaggttttggctttgaaaaggaacaagttttggaaactgagcacatttcaaaaaaagcgcagttccaaaa

SEQ ID NO: 363406 - DNA, 515 bp, Homo sapiens
ctgattttgcttttactgcaagaaataaatgaagttgtcacaaggaaagaaaatgaaaagttgtcacattttttccataccttttagattttctcaaattattacaaagataatgttcatgaagccaattaattctttagttaaaacgtgttcagttttatgtttaaaagtagattttgatcttaatcatcatggtaggtgatgtgggtttctttaagccttgtctgtgtctctcccttagtggcccactatgaacttgcttaagagatgtcagtgcttatggcaacctcagctaaaaggcacctggtggaaaggaaatgtggcaratggcaatctgaaatacccaacatgtgctaagcatcttattttaccatgatttttttctgctgcataagggagaaaggggagaaaaagtgagatttaaaaatacaaaattaagtggttatcttagtttgttttctgttgttctaatagaataccaagacagaatgatttataaagaattgaggtttatt

SEQ ID NO: 363407 - DNA, 607 bp, Homo sapiens
ggcaaggatgcatttggaatcagggactagcacgttctctctcagtaaactaactaaggctctctctctmtctctctctctctctctctcttctctatttctctttgtgcagcttcttcattcctctttcttgtggggatttctgtagcctccacaagaattgctagttgggcatctttcccattaagagaaacactttgagagtagaatctcttaacttcaaatgcagattcacagtagacagatttcattctattaaagcattgtgattcatttcacaaactgaataaccaaggcagcgctttgtcatcttttgacaaagaaccatactataccctaagcgactgaaagaaaacagtattcaatgctaagaatatcccatatgtgaattacaccaactgtgttccttgcctggcttcagacatctgccgttccctgagacagtgagctgtagccaggagcatgtcactgggccagtctaatgatacgaggacaggcttacttcccctcaagaagaagatgtggtgaagaagttccatttttctacttcagtgacctcttagagttagattttagttcaaatgggaccactgcatttcgtagccaa

SEQ ID NO: 363408 - DNA, 595 bp, Homo sapiens
ctaaatttagccacatatggaaatctgcacagtttttcaaatatattttgattatttaaccaacattcatataaaatttacaaagcagcagatttttccatggctgtttcaaataacaattttcaccctcacaacaacccaataaaaaaaggtctcattacagaggaggaaaccgaggtatggggaggctaagtaagtgacctacagccacagccacgcgtaagtggcaggatgaggattcgaacccaggcaccctgactccagactctactcttaagtattatgcacttttaaaagttttctgaaaggttcaaccaagaaagtgagaagcaaagctgcagatggtctttgcatatagaattggaagttttaaatgttaccagcgtgagcccagattctctcttacagtgaggattttatttttaccaagctctgtgaaacacacaasgctcaggtgccgcctgaaaatgtgagaagtcattcggcaaactaatgaggttattcagacacactcttaaagttggcgtgctcgtttatttaaggccggaacagaggtggagcgaataacagaaggcctctctactccaaaatatgg

SEQ ID NO: 363409 - DNA, 571 bp, Homo sapiens
cacataaggatcgtctgagtaacaaaaacgggaagaaataacaaagaaaaagaaaattagaatcaaaagaaaactggaaaaaaaaaaaaaaccttagtagccagaagtctgttttacgagtgaaacttctgctgtgtaagggataagggatttcttaaaaatgtatttcctaaaatgggcaaaatgtagcacttactagccattcaatcagctttggaatattctcttcattgtgaagaaagcacaggtgtgtgtgacatttgttcccttcttctttcccaccccaagcacaaggtattttcacagtcctcagccaaatacagagtttgacgttccctggcaaacggtccctgcgtgttctgttgaaggttaggagtagaatgagcctaatcctgtcaggagactgtttaagtcccagtcaaggacgctagctcctcagcgctgacgcagtctgccccgtcctctgcaccttgctaagaaggacaaacgcaagtggccacaggacaaatctccaaaggggckgagctgtggagaaagctacggcagagatctccctggattaggagcagat

SEQ ID NO: 363410 - DNA, 551 bp, Homo sapiens
gatttgatagccccagactggtacagtgagcagaggaaaggaagatgttcaaatggaggttctagagaaaatcattcagaaccatcccacaaggaagctctcactaaccatatcaaggtataaggagttcagtagttttaagacattcatcatccataacaaaacagaaaaaggggaaggataggcttggcgtggtggctcacgcctataaccccagcaygttgggaggccgaggcaggtggatcacttgagatcaggagttcaagaccagcctgaccaaaatggtgaaaccccatctctactaaaaaaaaaaaaaaaatgcaaaattagccaggcatggtggtgcacacctataatcccagctacttgggaggctgaagtgggagaatagcttgaacctgggaggcggagggtgcagtgagccaagatcccaccattgcactccagcctgggcaacaagagtgaaactctgtctcaaaaaaaaaaaaaaaaaaaaaaggaaacgatgaaaatgccagggaaaggattaaaaaaaaattaaaaattgagaa

SEQ ID NO: 363411 - DNA, 596 bp, Homo sapiens
cacaaactatcacatacagtttgagaagttaaagaacaaaggctgttaagatttatgcagagggagcaggcttacctaggctgctgctgcagagaacagaagaacagaattggtggatggaacttatattaagaatatgaagaaatttttaagcagttatccttgcctgataattgctgggcttccctggaggcaagtgatcttttggctgcagatttagaggtttgtcctaaggactgctaacacaacaagccaggcatcagacattatcatcatctaaaaagcattattttaaaaggtattgcttaagtttcattgtccaccttgagccatggtagagaatgtgctgagggaaagccccaagcacacacaaagttctttgccctctggaaactgtcaggtcaggaagctaaccctgagacacagagcatcattcgttacttctgtmatatttccattacagatttgtggagccagtcatggagctcatttaatccaggtggggtggggggttattccctctctcagaattgggacagtcttcctaggactaaacagtggaagagaggagcattctttaggaattgataggcagg

SEQ ID NO: 363412 - DNA, 545 bp, Homo sapiens
cttggggtaagtggaagtggatatcgtacagtgacagggtgaagggaaacgaagccccacaggctaggtaagtgacaaacactgggctttcattgatagactccagtgacccagatcttgggtcccatagatgggggttgtggggaacttagtggctttggccctaactctgattcataggattaggaatgaggtaaacatcacaaagcagatggatgctrtgcatcatatcagacaagttacaatgggaaaagggcacctcccctcctttcctaaataagaaattttatgttagatactcatttttgcagatctctaaagattattagaagattctagaagcttccagagagaggggaaaaaaacaagttgcccacaaagaaataagaataaaactggcatcaaattttccaaaagcaacactaaatgatacaaaataatagaaaagataatacttttcaaaattctgagggaaattgaatttaatacccagttaaactgttaagtaagtgttacattttcagatgtgcagactctaaaagttt

SEQ ID NO: 363413 - DNA, 607 bp, Homo sapiens
gtgagtgccaacctgcagtgacttcagcagagagtcactgctatgcagttgatgtcctggggtacatactcccacttcatctcacccccctcacattggcaagaaagagaagtcaggaactaagttgagggaaagtgacttcatgcctactgtggtttattggggtcagttttatagctaatgcaaaatggaaaagatccctgtccactattgggggatagcagattttgcacaaagtgctggtgtgtgtgttgtgactgatgagagaacagtgaggtcagctactggcctgactatgagcatcaagggaagcttgrttggtgttggcttttgccattgccagactgattggttcacaggtggaaaagggggtctggccttcacccttaaatgtaacattgcccaatctttctttgttctgtgaacaagggtcattttccctgttacaaaggcaaggcagatgttttatactaggcatttaaaacggcagatgccagactctgaagacatctcccaaagcacagttcattggaataggtgtccccaaagcaccagcatggactgctatgctgatgtcttgaaggagataacattcaaggggatgttt

SEQ ID NO: 363414 - DNA, 641 bp, Homo sapiens
gagtcatacaaggagataagaccaaatgactgagactacggagaaaaaacagacaatagaaacagactcaaaaatgatccagatatttgaggtatcagacattgatcagaaactattataattaatgtgttcaagaaaatggatggcaaaacggaaatgtcaccagaaaattatttttaaaggaatcagatataacttctaacacatcaaaaatacaattacaaatgttaagaagtaaagagatgagttgaacaccagattagatacagcagaagaagttattcaactggaagatagatacacagaaaatgaagaaacagacacagagtaaaaaaatgaattgaaataaatttataaataacataaatcaaagaagaaatmaaaaagaaaatcagaaaatattttgaatgaaatataaaatatattactaaaacttgtaaaatgcaactaaagcagtgtttagaggaaaacttaagctttaaattcacatattaggagattgtaaaggctgaaaattaattatctaagcattcaagtcaaaaagctaaaaaaatcccagcgaattataaacaaaaaaaaacaaaaggcagaaaaattaagcaaaattgacaaattaatttaaaaacacaatatagcaaacc

SEQ ID NO: 363415 - DNA, 524 bp, Homo sapiens
ggttacttaattggatagtgcagttctagaagataaaaataagagaatatatttataatgctgaatataagtaactgtttctttaactaaaagtaataaccataaaggaaatgactataaattgtacttcattaaaactagggattaaagctcaccaaaatatagcattaagagggtgaaaaggcatgtcacggaatggggaaagatatttgctatgtaaatagtaataaatatgtgtgtgcacacmagtgtgcataggacttgtatctagaaaacataaagaacaacaaatcaaaaaagtagagaacccaatttctaaaatatgggcaaagacttatactggcacttctcaaaaacacatgaaaaggtgatcactgtcattaggcacgtgggaaatgagaattgaaactgcaatgagatacagtatgcccctgccattttaaataaaactggcaatattcaatgctagtgagggtgtggagcagctggaattctcataccttgctgttgtcaactggtacaac

SEQ ID NO: 363416 - DNA, 623 bp, Homo sapiens
tgcgtgggttggggaactgggagcttgggctcaattcagaacaacccagctcccttccagacgggaaacgcaacacaagagcagcatccagagggagccccrggagaccccggtgagccgggcctggcagccgagccacctgcagctggggggagctgagtacactctgcctggccttggaagtaaagctgtttcacctgagagggctagaaaacgctcaccccgggggaggaaaaagaagatgggatttctcctggggtcggaacaggacccggccagccagagacaatggctccaagagcctcaacaactccacccctgttgacaagggaactcaacaccctggagatcggcgtgtgaaatctgtactggggaagagagtcctcatttagcagagaaagtgctgtgctatctatgtgtgaaagcttttttaacactgttccctgctctccatatggcgaacttcacccaaattaggaggaactgatgaacaaagctccaacgacttgaaaatgagagcaagttccaggggcccatcccagagtcagctgccgcccagtgctcagggtgggtctagcaggccagagcacccagacgcctctccttgcacccctgcaacctca

SEQ ID NO: 363417 - DNA, 580 bp, Homo sapiens
tggatgcagagattacagtgatgctgccacaagccaaggaacgtctgatgccaccagaagctggaagaagcaaggaaggatcctcccctagagcctttgcagggagccctgacctgctgacaccttgatttcagacttttggcttccagactttaagataattaatttgttctttaaagtcgctgatgttatggtgatttcttatggcagctactccaaactaaacatcgtaaaaccttcagtacctacctgtgacctgttaatgttaacttttataaattactgggcatggtttttgtgagatcactggaccacactcatcagctggaatgagcatatgaaaaaccttgcccagctgaacctttcaaaaatacccttcagtgttatgcatatatagatggtagataytgataaaggagatagtgtgttttcacatatgtgtatccatgtggggctgtagaatggggatgagtttatttaggaaaagatgattgtaggtgagttctgaggaagacctgcacatctacatcccagagggagaagaagggaagggatatctcagacgacccattcattttgt

SEQ ID NO: 363418 - DNA, 580 bp, Homo sapiens
tggatgcagagattacagtgatgctgccacaagccaaggaacgtctgatgccaccagaagctggaagaagcaaggaaggatcctcccctagagcctttgcagggagccctgacctgctgacaccttgatttcagacttttggcttccagactttaagataattaatttgttctttaaagtcgctgatgttatggtgatttcttatggcagctactccaaactaaacatcgtaaaaccttcagtacctacctgtgacctgttaatgttaacttttataaattactgggcatggtttttgtgagatcactggaccacactcatcagctggaatgagcatatgaaaaaccttgcccagctgaacctttcaaaaatacccttcagtgttatgcatatatagatggtagatattgataaaggagatagtgtgttttcacatatgtgtatccatgtggggctgtagaatggggatgagtttatttaggaaargatgattgtaggtgagttctgaggaagacctgcacatctacatcccagagggagaagaagggaagggatatctcagacgacccattcattttgt

SEQ ID NO: 363419 - DNA, 582 bp, Homo sapiens
ttgagagatcacacagcttctgccttttaaatgtggaataaaggattaacatctttatcttgagctatgtatataagagatccaaaccaatggtggttcttattatgtgtctaaactctgttctattccattacctgtctccttcttgctcttaatgaccctgcctctgtgtattagtccattttcacgctgctgataaagacatgtctgagactgggtttataaagagaagaggtttaatggactcacagttctggctggggaggcctcacaatcatggtggaagacaaaggaagagcaaagggacttcttacatggcagcaggcaaaaagagagaatgagagccaagcgaaaggggaaaccccttataaaaccatcagatctcatgagacttattcactaccacgagaacagtatgaggaaaaccaccccatgattcagttgtctcccaccrggtccctcccacaacacgtgggaattgtgagagctacaattcaagatgagatttgggcggggacacagccaaaccatatcactcagtgacccttggagggacacatgggtaagaaagggacttaaaag

SEQ ID NO: 363420 - DNA, 579 bp, Homo sapiens
aggctgtttccatttacatttcattgcccaggactggtcacatgttcagcccagacaaaagggggaaggaaagtgcaccaggaagtaaaggagccctccacggtggtacctgggtaatgtctaagtgctcgggaacttttgactactggtgagttgtttctccctactctccatgaatgttggtatcttgacccaggtgtcagccatctgggacttcctgtgttctacacttcttaagtacagtacatgtatgtatatatatgtatttgttagaatagttttaggttcacagcaaaactaagcagaacgtatagggagttcccgtatatattgccccgacacaggcactacctcccccactatcaacatccagcacctaagtggtacgtttcttacacttggtgaacatacaytgacacatcactgtcacccaaagtccatcgtttacgccggggttctttcttggtgttgcacattttgtggatttggacaaatgtatgacaggtattcaccattgtagcatcatacagactattttcattgctcaaaaattcctctgtgctctgcctattcatccct

SEQ ID NO: 363421 - DNA, 579 bp, Homo sapiens
aggctgtttccatttacatttcattgcccaggactggtcacatgttcagcccagacaaaagggggaaggaaagtgcaccaggaagtaaaggagccctccacggtggtacctgggtaatgtctaagtgctcgggaacttttgactactggtgagttgtttctccctactctccatgaatgttggtatcttgacccaggtgtcagccatctgggacttcctgtgttctacacttcttaagtacagtacatgtatgtatatatatgtatttgttagaatagttttaggttcacagcaaaactaagcagaacgtatagggagttcccgtatatattgccccgacacaggcactacctcccccactatcaacatccagcacctaagtggtacgtttcttacacttggtgaacatacactgacacatcactgtcacccaaagtccatcgtttacgccggggttctttcttggtgttgcacattttgtggatttggacaaatgtatgacakgtattcaccattgtagcatcatacagactattttcattgctcaaaaattcctctgtgctctgcctattcatccct

SEQ ID NO: 363422 - DNA, 593 bp, Homo sapiens
agaaagctatggaacacgagagggcaaatagaatggaggaagggagatgacagtgtcatggggtcctgctaacttatagctaacacaagtggagatgcccatcagggatttgagcagaaatctagaaatcggcagagaggtgggaccgagagctgtatctttgggaggtgttggcataaatggctgctggaggcctgggcagtagatgagattacccaaggggatcggtagaaaaagaaggcaaacaggctggagatggggcctcaaaacatttcagatgttttaaggtcaaccgtatatgccctgagaagtccctgtgtttaccactaggaaaacgtttgtaggaggcacagaaatagcacagcattaagccataagggagtgactaacctgaaaccatgatgctttggggtaggayggtcagagggggctcacagatccaaagtctgtaatcgcaggtgtctggactctcaggctacatatacaatttcctaaggaatgtcctgctttgtctgcgtcccgaatctgtgttgaaagatagtaaactggggtgatggagtacatcctggcagaggctatgtggggagagcaga

SEQ ID NO: 363423 - DNA, 626 bp, Homo sapiens
tttctacctgattcccctgataaaatatgtcattcctgcctatctttctcagatccctacttctccctttccctgctaaaaaggcctcctggtgttgtgtgccatttaatatttacaaatgaatattttcagaggtatagtttttttttaggatctttacatttattttctatatgatcacttgcctgtgtagtgaggatataaacttgcctgctgacttaaagctaaatgtattttaaatttcagattaaaagcgttgtgtaaatataaattaatcctcaaatttctcttcgaatgaacttaaaagtgctccttatgaataggaagggattttatatttgccttttcataaaattatttaatggtcgggtgtcctccaggcttaacgactcttctgagttttgtttgccrtaaatgagcagccttttaaatgtttcagttcacctttagtaaaggtcttattctcactagctaatagtagcagcacagagtagctctaaagttagaattcagtggggcaatattaactcttcagtaaacacttgatcacatttgctttagcaaaatcaagaagaacagatattctgaaaaaagttttcacactgttctccatataagaaggtatt

SEQ ID NO: 363424 - DNA, 578 bp, Homo sapiens
tctcttcgaatgaacttaaaagtgctccttatgaataggaagggattttatatttgccttttcataaaattatttaatggtcgggtgtcctccaggcttaacgactcttctgagttttgtttgccgtaaatgagcagccttttaaatgtttcagttcacctttagtaaaggtcttattctcactagctaatagtagcagcacagagtagctctaaagttagaattcagtggggcaatattaactcttcagtaaacacttgatcacatttgctttagcaaaatcaagaagaacagatattctgaaaaaagttttcacactgttctccatataagaaggtattatttgtgacattatgatggagaacagaagctcaacaatgttaaacactgttcatccatgaycaaagtatagattaatgtgggtaccttgaagtccccgtgctgaaaggtggttcatctttaccttcttccttgctgcactgcattttgtgtcagatagtctgataggaacacattttgcaatgtttttgcctcctgtgtttctcccataagccttttaggtgctagagaacaggagg

SEQ ID NO: 363425 - DNA, 584 bp, Homo sapiens
cctctgctttccacttatttacttgagaatccactaatagatgctcaccagatctccccacttttcccctatatatcatccccgttgccttaaatttttatctgtggtagattccacagtacatcattataatcattttcttgcaaatgtcctacatttcctctctgttgttctgttttttactcttcttagacaaaccccagccgtggtaataatgtttgtttagctcttactatgggctaggcaccattctcaatgtcttgcatgcattaatttctttagctggattaatgaaaacaactggcagacttttccatttctgaacctggcaggggtgggggtgtggggggagtcagaccatgcaaaatactggtaggactactgattcaagatcttattaaatctcyctagggtgttcattctcccactatccacaaaggtttgcttcatacattccccactctcttcaaaagtccaccctttcctttctctcttttgctttcataagatgatcctacatttcaaagagaaaacagaagttattggaacaagaaaattttcactttcggccataaaatctacaa

SEQ ID NO: 363426 - DNA, 584 bp, Homo sapiens
cctctgctttccacttatttacttgagaatccactaatagatgctcaccagatctccccacttttcccctatatatcatccccgttgccttaaatttttatctgtggtagattccacagtacatcattataatcattttcttgcaaatgtcctacatttcctctctgttgttctgttttttactcttcttagacaaaccccagccgtggtaataatgtttgtttagctcttactatgggctaggcaccattctcaatgtcttgcatgcattaatttctttagctggattaatgaaaacaactggcagacttttccatttctgaacctggcaggggtgggggtgtggggggagtcagaccatgcaaaatactggtaggactactgattcaagatcttattaaatctccctagggtgttcattctcccactatccacaaaggtttgcttcatacattccccactctcttcaaaastccaccctttcctttctctcttttgctttcataagatgatcctacatttcaaagagaaaacagaagttattggaacaagaaaattttcactttcggccataaaatctacaa

SEQ ID NO: 363427 - DNA, 549 bp, Homo sapiens
attaataatgagtaagatagtaaattttgctatatgtatttcatcaccattttaaaaaatgaaaaaaagtacagtcgtagccatctatgtctcytaaatatagtatagatatgaagtactgatgacttaatttgctttccttgttgatatatatagtttttaggaagatgtatatggaaatttgaatttaagtagcattactacctttttgggcctctatcattttaatgtaaaaagctcatactgtatcaaaattacaagttttcaatcatcataagcatttcctcacagcattaaaatgtctataaacataatttttaaaaatccaattaagtagtttggaatttcaaaagtaaaacaaattgggcacttttaactaccttttccttgtattatctgatcatattcaatattttctcctactgatgaatgatcttgctcatattaatttatacaaggtattgatttatatattacatgagctctttatcatttttgttgtaaatatttccacccctcttttttctttatggtatttaaccaagcata

SEQ ID NO: 363428 - DNA, 563 bp, Homo sapiens
acatccagttgtttaagagtgtggcacctcaccccgtgagcattttttatgtctcttggctgactgtatgtcttcttttgagaagtgtctgttcatgtcctttgcccaccttttaatggctttatttggtttttgcttattcaattgtctaagttccttatagattctggatattaaacctttggatgcatagtttgtgaaatactttctcccattctgtaggttatctgttcactccattgacagtttcttttgctgagcagaagctctttaattaggtcccacttgtcagtttttgtgtttaytacaattgcttttgaggacttagtcataaattcattgccaaggccattgtctagaatggtattccctaggctttcttctaggaattttatagtttagaggtcttacctttaaatctttcattcatcttgagttaacttttgtatatgatgaaatgtaggggtctaatttatttcttctgcatatggctagccagttatctcagcaccatttattaaatggggagtcctttcttcattgcttatttttgtcagctttac

SEQ ID NO: 363429 - DNA, 563 bp, Homo sapiens
cagggaaatatagaaaagatggatggtgcaggcacaatgcagaagatgtcgctttgattaacaagtgatgatgcctttgggaggtgggaagtgagagtaacagcaagggagggccatgaatgctagggttctacagcaggagaaagatatcctcaaataatttaacacttatttagccctactatatgcagaacactgctttgcactagtgacacagggttaaataattaccttttagaaactacagttttgtaggyaaaacaataagtaattatattatgcagcagaaatgatcaattattatgcagcaatgatgtagctgggcaaggatgttaaacagtaaactgggaaaagacttcctaaaggtagagattactgagattagttttgaagagtaagtaggggctggctttgcggagtgggtatttcagaagaggaaatggcaggtaggcagtaaagaaggaagtgcactgttaaaaatcaaatacgtcaatatttacatacacttcatgtgccacataacgatgtttcagtcaacaattggcagcatatacaactgtggt

SEQ ID NO: 363430 - DNA, 563 bp, Homo sapiens
cagggaaatatagaaaagatggatggtgcaggcacaatgcagaagatgtcgctttgattaacaagtgatgatgcctttgggaggtgggaagtgagagtaacagcaagggagggccatgaatgctagggttctacagcaggagaaagatatcctcaaataatttaacacttatttagccctactatatgcagaacactgctttgcactagtgacacagggttaaataattaccttttagaaactacagttttgtaggcaaaacaataagtaattatattatgcagcagaaatgatcaattattatgcagcaatgatgtagctgggcaaggatgttaaacagtaaactgggaaaagacttcctaaaggtagagattactgagattagttttgaagagtaagtaggggctggctttgcggagtgggtatttcagaagaggaaatggcaggtaggcagtaaagaaggaagtgcactgttaaaaatcaaatacgtcaatatttacawacacttcatgtgccacataacgatgtttcagtcaacaattggcagcatatacaactgtggt

SEQ ID NO: 363431 - DNA, 583 bp, Homo sapiens
ggagaatgagtttgacaaattaacagaagtaggcttcagaaggtgggtaataacaaactcctctgagctaaaggagcatgwtataaccgaatgcaaggaagctaagaaccttgaaaaaaggttagaggaattgctaactagaataaccagtttagagaagaacataaatgatctgatggagctgaaaaacacaacacgagaacttcgtgaagcatacacaaggatcaatagctgaatcaaccaagcggaagaaaggatatcagagactgaagatcaacttaatgatataaagcatgaagacaagattagagaaaaaagaatagaaaggaatgaacaaagcccccaagaaatacgggaatatgtgaaaagaacacaactacgtttgattggtgtgcctgaaagtgactgggagaatggaaccaagttggaaaacactctgcaggatattatccaggagaacttccccaacctagcaagaaaggccaacactgaaattcaggaattacagagaatgccccagagatactcctcgagaagagcaaccccaagacacataatcatcagattcaccaaggttgaaatg

SEQ ID NO: 363432 - DNA, 550 bp, Homo sapiens
caaaaaaaaagccacagcaatcaggcatgagaaaaaaataaaaggcatccaaataggaagagaggaagtcaaattatctctctttgcagacaatatgcttctatatctaaaaaatcccacagtctgcccaaaagctcctatgtctaataaacaccttcaaggaagtgtcaggataaaagaaaaatcaatgtataaaaatcagaggcatttttatacaccagcaacatcccacatgaaagccaaatcaagagtgtaatccattcacaatagccacaaaaaatataaagaatctaggaatgtagttaaatagagaggtgaaagatttctacaaagaaattgacaaaacactgctgaaagcaatcagaaatgacacaaacaatggaagaacattccatgctcatccacaggacgaatcaatattaacatggccatactgcccaaagcaatttgcagattcaatgctattcctatcaaagtaccaatgccattcttctcagaattaaaaaawaaaatctattttaaaattcatatggaaccaaaaagagcccca

SEQ ID NO: 363433 - DNA, 578 bp, Homo sapiens
tgttttttttttttttttttttttttttttgagacaatcttgctttgtcacccaggctggagtgcagtggagtggtgagatcttggctcactgcaacctctgcctccaggttcaagcgattcttcttcctcaacctcctgagtagctgagattacaggcacccactaccatgcctggctaattttcrtatttttagtagagatggagtttgaccacgttggccaggctggtctcgaactcctgacctcaagtgatcccacccgcctcagtctcccaaagtgctgagattacaggtgtgagccaccgtgcctggccaggatttcactatatcttttcaggggacacaatccaatctataatgtggcccctgtcaaactccaagtagtattaagagttcggagctctagagcagatatgagtgtaaatccaggttctacctccactttctacagcacccttgaatgagttctctgatcagaatttgagttttctcatcttaaaacagggaaaataatagccagctcagagagtagttcaaggattagtaccaaaaaaaattatttgaataatgcatgtta

SEQ ID NO: 363434 - DNA, 514 bp, Homo sapiens
gaccttgaacaagttacttaatctctttgtgccttagttatctgtaaatttgggagataatgctatctaccttatataattcattatgaggattaattcataaggtgtataaagtggttagcacaggtactagtgcttaatagatattagttgatattaatttcattgcagttataattttggtgcttgtactttagataacaatctacggtacttctctcgaacactaatttatttttattcttctttgttttagagcagggtaaagtctttccttccccttccccctaccaagtgcctttcatataggtgaacaaataataggtgcctaatctaatgaatctttgttgcatgagtaaattaattagaattacaatattttgaaaggcttatagaatatatttcattacaacagcactacataatgaacgtcttttcaaaggaatgtgtccaaacactaggggtaaaaatgaactaggttttcargctaaccagcttgagttggtttttaaaa

SEQ ID NO: 363435 - DNA, 601 bp, Homo sapiens
aacaacaaaaacagtgagggtaatagatgaaaaagattggtaaaatgttgatgattattgtggatatttctgcagtgaaaagttgtaaaaaatcatttggagattagccctcaagttccagagactccacctgacatttaaagccctttgctctgccacttccctgccttgggaacctctggtcttcactgttcagccagcagtgtgctgggcccctgtagtgcccagagcctcacccaagcttctgtgcgtttgcccttacatttcaattctgcatcttccttcctatgtggctaattcctactcattctttaagactcagttcagtctctttggagcattcatggacttctccaggcagggagaatggctccctcctttgggttcccataatgctgtgcttgtatgtctactgcagttgataccctgaattataatcttttatttttgtttctgtctctccactgacwtatgaggtagaggaaacttgctttccactgtacatcctcctggactatatgaaacttttattattgttttagttgtgtgcttaaatttttttttaaaggaaaagattaaaaggtagaaatgtgagtgctag

SEQ ID NO: 363436 - DNA, 608 bp, Homo sapiens
tgaggcgtaggtgggggagcagtgtctgattattagacaaccgactttgaaaggtggtatcagatgatgatgctgtgagccaaatatcatgagcagacaataaatgtgatgaaakttcagaaaaggaagaagccatgttggctgtagtcatattaaaatagcataaatgtttgctgctttttgctaacagtgcttcatatttgcataaatttcagcatttccaaaactttcatgtcatctgatttcattaaatcttcacaaccacctgtgagccaaacattattaaatgaggtaaaatacataaaacacttagaatagtgcctagtacatcacaggtgttcactattaagatcaccattagccctattttataaatgacacaactaagactcagagacgcattatttgcccaaagtcacacagctgaaaagtggtagaagtaggcctgaacctagcttccctggcttctatttctagaactctttctccattatccaatgcataaaagagggcgtatttaagctaggcttgcctgggttgggccaagttttgtgggggcgttaggagagaagtctctgaaatcatattcctcagcctcacaagcccta

SEQ ID NO: 363437 - DNA, 579 bp, Homo sapiens
ctagaacatgatgcccaataaatattggtttattccttcattttggggacaaactcccaaaaaatctccaatgaaatattacagttggaaatttcaagcactggaaaagcaagctcaacttacctaacaggtagagtatggaaaggcccttttgacaaatggagaaccagcctaaaaggacagataaggaaatctaatgtggggagggcaggttagaagcaaagtaggaattaatataaatataagcataaaaatatctgcttataagggattaattacttattacaggggattaattaatgcattaatgtgaggttcctctagatctgtgacaaactgggaagatactatgtactgtgtaactcaccttgacccattttcttgactgctcagaaatgtgggctaagttttgtgttcaaatgcaatggcttccctcagtcttttcccgctaccttctrttttggtctaattaatttcctctcattcattgattgttctttaatccttattttgttggttatatttttaaattactaattgcctcaggtcctctttgtatgggtatgaagaagtaaagtg

SEQ ID NO: 363438 - DNA, 577 bp, Homo sapiens
ggaaacctgaaactgggcccaagagacactagttggaactagtgaaaagccagagatgagagagagggaaaattttgttcctgatgactttgcagtttctgattccagtttctcaagaggtgcagctttggagttctctgagatatccctgtatccttgcaataaattctcctgttttgttaaagtaatttatagtgggtttctttcttgttatcaaaggaacttgaaaatgccattctccttcccagaattactaattttaaattaattatatcattgcacatctgtttaatacttcatagcttactaaatatgtactgtcattaatctattctccttacaacaatgtgaatattartggtttttcaactagataaatgaggaaactgaggcccagactcatgaaatgattggcccaagttcttaaagatatggttgatcagcttatatgaaaacccaggtgttatttttagcccagtggcttcctatgcaccattgcattctaaattgtcctaaggttgtcacaaaggttgttttcataacatagagcttcattttctccaaagaaatagaattg

SEQ ID NO: 363439 - DNA, 577 bp, Homo sapiens
ggaaacctgaaactgggcccaagagacactagttggaactagtgaaaagccagagatgagagagagggaaaattttgttcctgatgactttgcagtttctgattccagtttctcaagaggtgcagctttggagttctctgagatatccctgtatccttgcaataaattctcctgttttgttaaagtaatttatagtgggtttctttcttgttatcaaaggaacttgaaaatgccattctccttcccagaattactaattttaaattaattatatcattgcacatctgtttaatacttcatagcttactaaatatgtactgtcattaatctattctccttacaacaatgtgaatattagtggtttttcaactagataaatgaggaaactgaggcccagactcatgaaatgattgrcccaagttcttaaagatatggttgatcagcttatatgaaaacccaggtgttatttttagcccagtggcttcctatgcaccattgcattctaaattgtcctaaggttgtcacaaaggttgttttcataacatagagcttcattttctccaaagaaatagaattg

SEQ ID NO: 363440 - DNA, 641 bp, Homo sapiens
ttcttttctcaggctgtgtacaaatttttgattacggtaacatgatcaccacgggaagtgaggatggagaaaaaaatcatttcaagggaatcatactaataatacatattcacctttttatcmgtcattactagataacatgatgaccatgggaagtgagaatggaaaaaaaaaatgatttcaagggaatcactgataatacctacgtttttatcagtcattactaggtgttagacactatgctaagtgttttacccgttttaatttaacctcacagcaattctgttaggtaagtattattactcaccaaagctaagaaaggttaagtaagttgtacagtctcacatggctcattagtgatagaactgtgttttgaacacaggtctatcccattacagacctctttgaaactgtttctggaaacaaatttgatgtcactcaaatagcccagggatgctaagattacaacatgtcaaatgcctctgtagtgacagatggtttggataacaagattgattgaagttaactttaacctgagaaattgtgtggttttagatggaagaagaggtgttgaaggaagactgagccagctgctgatcaatgggatagaatttgagagggagaagtgttggaagtggagt

SEQ ID NO: 363441 - DNA, 540 bp, Homo sapiens
tgattaactttactactcagtgcaggtttgcgatggggcaatcttgctacagtatctcctctgtgaactagtctccacacctagttaagttaatatggttagttaggttaatatgtaaagttaagcattgagcttggtatcagtgacccaattaagatggtttcactcccaagaaaattcatataagaataactctaagcatggccatagattttaatcaaaccttgcatagaatttttttyctttttttttaaaaaaaaattatttttcttttaagttccagggcacatgtgcaggatgtgcaggtttgttacataggtaaacatgtgccatggtagtttgccgcacctatcaacccatcacctaggtgataagcccagcatgcattagctatttttcctaatgatctcccttcccccacccaaatcctgataggccccagtgtggtgttcccctccctgtgtccatatgttctcattgttcagcttctacttacaagtgagaatatgcggtgtttggttttctgttcctgtgttagct

SEQ ID NO: 363442 - DNA, 534 bp, Homo sapiens
ccaaatttgcgaacaggcttttgtaaggatagcagtctmaagcttgctatattaactcttttctgcaaagtttggtattaggaaggcctttccaaagtgctaacttcagaactaggctgacttaagaagtaagtattacctttttactaaaaggcatttacaaataaattgtgtgagaagttttagaggatgtatatccattgctcactgaaaactcactgttattcaaatctggggcttttataatcccttgatatatattatagtttctttttttaaaaactgtgttactcttttattatacaggagaatggctttgagttagaagtcaggatacttgagttttgatgtagtgttgtcactcttcacctatctccttaatatctcttacctatttataaaggatttgaacttttttatttcagagttttcttcctagctcatatttctgccccttgagagagtccattggatttctttgatttttaaaaagttcttaatgatacctagtagaaaaacctactttcccgtaat

SEQ ID NO: 363443 - DNA, 507 bp, Homo sapiens
ggcttatacaaaatgctaaagggagtccttcaagctgaaggaaaatgttactaagcagtaacacaaaaacatgaaagtacaaaactcactggtaaaagtaatcacakagtaaaattcaaaatattctagtactgtgatgacagtggaaaatcaattacatctcttatatgaaggttgaaatattatatagctgcaataatctgttaagggatacacattataaaaagatgttagatgtgataccaaacacataaaatggaagaaggagtaaaagtttagagtttgtgtaagtgatcaaagctgttaccaacttaaaatagcctgttacaagatgttttatgtaagccttacggtaaccatgaggcaaaaacccctagtagatacacaaaagataaaaagaaaggattcaaagtataccactgcaggaaatcattaaatcacaacggaggacagcaagagaaaagaggaacaaagggtctacaaattaactaggaaaaaaaaaatcag

SEQ ID NO: 363444 - DNA, 520 bp, Homo sapiens
aaaaagaacagagtaatcccaaacttagcagaaggaaggaaataacaaaaatcagagcagaaatagataaaatagagactggaaaaacaatagaaaatatcaataaaactaaaagttgggtttttgaaaagataaacaatattgacagtattttagctagactaacaaagaaaaagagaagatgcaaataaacccagaaatggaagagtggacattatacctgataccacagaaatacaaagtagcacaagagacttctatgtaacaaattgcataagcagaagaaataaattcctaaaaacctagaacctattaagatgaatcaagaagaaatagaaaatctgaacaggcaataatgagtaaggagattgaataagtaataaaaagtctcccatcaatgaaaacccaagacctgatggtttcactgctgattctaccagatatttaaagaactaataccaatccttctcaaactcttccaraaaatggaagaggagggaatacttccaaactcgtttta

SEQ ID NO: 363445 - DNA, 488 bp, Homo sapiens
ttttgcaggagaggacagcatagcactaaatggtttgctttgagtgatagatgtatttaaaatgttataagacaaactcatgtaaatttggcattctattccataatattgtgttccataatgtagttagttttaatatcagcatgttttaaattgtttttagggaaatggaaattcaaaacttccttcttctatctcttcccctcataatcttggtagatggagggcttaagtctagaagaatgatcaacactaaactgtttataatagtttgctttcagaggtgggattgtagagaaatttaagtttatgtttttatattccttgggctcattacaactatatactaagaacaatcattgtgtaaaattggtactrcaaaaagaatctctatgggtattctgtgaggatatgtatttgttttctcattactcttatttaaggagcatggagctataagaagataaccttgctctaatattttctca

SEQ ID NO: 363446 - DNA, 528 bp, Homo sapiens
ctgcatttaaccatgacttcactctaggtggtggatatgatcctgaaaaagctgtgtatattgagtttttgtaaattgaataatttcaaaaacagtggggcactcactatttaaatgaattgtggamaatcttttgcaagagaaattgccttttttataagaaaaaaattgttacctaattttttttagcttcccacatagaagcaattgggtatcataaagctacaatatctctttagagaaaggagaggatgatctagaaggcttttctgttctgcagacactgcttcaatacagcaggaagacgtagtttttagtagggcagtgacctgtggagagaataaagtgagcagataccacaggtgcctgaactctaaggatgtccatgctgcatgactaagaataggaggatgtatatgggccttggtgtttgttgcttgacagcaggcatttcagaaattttaaccagttcatgtaagattgtaaaatagattagattcagtcaccctgcccttctttccttttcag

SEQ ID NO: 363447 - DNA, 528 bp, Homo sapiens
ctgcatttaaccatgacttcactctaggtggtggatatgatcctgaaaaagctgtgtatattgagtttttgtaaattgaataatttcaaaaacagtggggcactcactatttaaatgaattgtggaaaatcttttgcaagagaaattgccttttttataagaaaaaaattgttacctaattttttttagcttcccacatagaagcaattgggtatcataaagctacaatatctctttagagaaaggagaggatgatctagaaggcttttctgttctgcagacactgcttcaatacagcaggaagacgtagtttttagtagggcagkgacctgtggagagaataaagtgagcagataccacaggtgcctgaactctaaggatgtccatgctgcatgactaagaataggaggatgtatatgggccttggtgtttgttgcttgacagcaggcatttcagaaattttaaccagttcatgtaagattgtaaaatagattagattcagtcaccctgcccttctttccttttcag

SEQ ID NO: 363448 - DNA, 523 bp, Homo sapiens
tttctatgggttgctccattcttgtaaataaagtaacaaatgaaaaactcatcctcaccttcctaatcactcttccaaacatgaaagataaatctcactcgttacttatccagttatttgcccttttccactgacactggccttctgccttctctgtaatattgatactgttcttgctagggaacctaattgctaaatccagaggaaggtgtcaaatgttcactgatgtgtttgacactgtatatcttccctttggaagtcgcttggcttcaggacactgcattctttgttcctttttaaaatttttaaatagttttgtaaagacaagatcttgctatgttgcctaggctagtcccgaagtcttggccccaagtkatcctcctgcctcagcctcccaaagtgtcaagattacaggcatgagccaccacccccagcctctttgttctcttcatacttgttttatcgaagtttcttttcactcttcttgttctttccctttgtctacctcattaaatgtagatgt

SEQ ID NO: 363449 - DNA, 532 bp, Homo sapiens
tgacatcttaacaatattgagtcttccaatctataaatatagaatctgtttatttagatcttcgatttctttcatcaaagttttgcagtgttctgcttatacgtcttgaatttattttgttagatttatgcctaagtacttttttctttttttgtggtgctgttgtaaatggtagtgtttttttaatttttcattgtggtatacaggaaaataactaattatatatactcaccttgtgtcctggaaccttgctctacttgtktatgttccaggaggtttatcatttcctagcaattttctacatagacaatcatgtcacctgtgaacaaagacagttttatttcttacttcacaaaatatatagctttaatttccttttcttgtcttatttcactaagttatccaatatgatgttgactaatagtggtgacagaagacatctttacctcattctcaatcttagggagaaagtatggtttcttaccattaagtacaatataggctttttttgtaagatgttctttaataagtt

SEQ ID NO: 363450 - DNA, 504 bp, Homo sapiens
caggaaaagaagtaaattactgttgtcttatatcacacaaacatacaaaggttaatgactggaataactcattctaaaaaaaattctgagttctgattcctttagtagtcctatatatacacacagcataatagcatatcttaatttaatgtctttaacaatacagctgggaatcattcagaaatcatctacygtcattaaagggatcattaatttgtgggaaagaaaacatatttatgctaaactgttaagataatcaacttacatcagaaatctattgtttcaaaaacatgcaaatggtctaccaaatcaacctccagatggcctacttatctacagtgtccttatagacattgtaggtaagaaacttaaagtgaagaaataaatatggacatttgaaaaggacagggatcaaattctaggtatgtgcatttgttaaaaaatgtagattctgatggagaagggttggggaatgggaccacagaatatatttttaaagtaggc

SEQ ID NO: 363451 - DNA, 564 bp, Homo sapiens
cttatatcacacaaacatacaaaggttaatgactggaataactcattctaaaaaaaattctgagttctgattcctttagtagtcctatatatacacacagcataatagcatatcttaatttaatgtctttaacaatacagctgggaatcattcagaaatcatctaccgtcattaaagggatcattaatttgtgggaaakaaaacatatttatgctaaactgttaagataatcaacttacatcagaaatctattgtttcaaaaacatgcaaatggtctaccaaatcaacctccagatggcctacttatctacagtgtccttatagacattgtaggtaagaaacttaaagtgaagaaataaatatggacatttgaaaaggacagggatcaaattctaggtatgtgcatttgttaaaaaatgtagattctgatggagaagggttggggaatgggaccacagaatatatttttaaagtaggcatcccaggtgattttgatgcagatagaggaccacacgatgaaatactatgctctaaaaggatcaaaataaagactatgtttcgagt

SEQ ID NO: 363452 - DNA, 564 bp, Homo sapiens
cttatatcacacaaacatacaaaggttaatgactggaataactcattctaaaaaaaattctgagttctgattcctttagtagtcctatatatacacacagcataatagcatatcttaatttaatgtctttaacaatacagctgggaatcattcagaaatcatctaccgtcattaaagggatcattaatttgtgggaaagaaaacatatttatgctaaaytgttaagataatcaacttacatcagaaatctattgtttcaaaaacatgcaaatggtctaccaaatcaacctccagatggcctacttatctacagtgtccttatagacattgtaggtaagaaacttaaagtgaagaaataaatatggacatttgaaaaggacagggatcaaattctaggtatgtgcatttgttaaaaaatgtagattctgatggagaagggttggggaatgggaccacagaatatatttttaaagtaggcatcccaggtgattttgatgcagatagaggaccacacgatgaaatactatgctctaaaaggatcaaaataaagactatgtttcgagt

SEQ ID NO: 363453 - DNA, 564 bp, Homo sapiens
ctggctgttggcttctagtttcacaccacagagggaagagtcaaaaggcgtatagatatactgaacatccttgactttctcaaaccctttgaacatctgacaggcaattacaaaaaaaggcaatattgggtcagtgagtgtactgtatatattaacagacaaaaacctctcacttctcagcctaaaaatgtaagcaaaagtctagttgaggattttgtgtcctcagatgtccctactgggttattttctctcttaaaacaaaacaacaacaamaaaaaacacctaaaccttggtttattccagtaggtacctgtagtggcaccatacaccagcagctgtgggaccagatggatgctgaggccctccctggcaatatccctgggattctatgggctctgcctccaaatctcatccagttccacttcagtatctagacccaaggattactgagccaggccacctgaaagctaccagccctcccagaacacagactccactttctccatcagccttaggggctacacatcccagcctgcccccatgtacctttatctgtttgatttc

SEQ ID NO: 363454 - DNA, 662 bp, Homo sapiens
tggagacggaagaggaagagatctgaagcatgagaaggatttgatgtaccattgctgggttaaagattgagaaggccacatgtcaaagaatgcaggcagcctggaggaactgggagtggcccctggctaaaagctatcacggaaacagggatcttagtcctataaccacaagaaacccaattctgccaacaagaatgagcttggaaacagatttttttccccagtgtctccagataagaactcagcccagctgacaccttgattcctacccttgtgagattctaagaagatccctgtgtagaytactgacctatggaactgtgagttaataaataggtgttgttatgtagcaatagaaaactaatacaacaaatcatttccagtgttacactctaggagttgtatgagtttatagtgtctactaaggtggcaaggtgggtctgggataacatgtggcctcccttcaggctaggctagaaaaatcttccctcaagtacaacagagtctatgtgttctcctgcagaccttgccgtgaattgagagggaactgcctgtgtctcctggaactgcctgtgttctcctgaaatcttaagagagaaaaatcttcaagtgacaccatatgaattctgcagctaagggtctttgagaatattatacattgt

SEQ ID NO: 363455 - DNA, 601 bp, Homo sapiens
cagtattgttcagttttattctctgtacctagtacagctactagtgtggtttagttgttcagtcaacatttgttgactgaataaaatgaatgaatgtctggtaaattgggtgggtgaaactgaccaaatctgaggagttgggaaaggttttggtgagtatattacatttaaaatgagacctgaaggatgaataggagttggctaggtaaataaggagagcaacatcctgggagaaagaacatgaagcttgtgaaagggaaagagcatagttagtttaaagaaagacatttctttgtgactggaatgtagagagggggagaatgtgtgagatgaggctagagtaaacagaggttcatgcagaggcttataggctttgctaaggattttgcactttattctcctactgtagaaataggaagctatctaacagttttgatggaagagagmcatgattagatgttccttttgatattttgaaatgactgctctggctgccatctagtggagactggattggaggaagggaagagtggatgttcggaaattattaaaaggctattgcaaaaaactaggtgagagaagatggtggcctggacaaaag

SEQ ID NO: 363456 - DNA, 611 bp, Homo sapiens
aggcttataggctttgctaaggattttgcactttattctcctactgtagaaataggaagctatctaacagttttgatggaagagagacatgattagatgttccttttgatattttgaaatgactgctctggctgccatctagtggagactggattggaggaagggaagagtggatgttcggaaattattaaaaggctattgcaaaaaactaggtgagagaagatggtggcctggacaaaagtagcaaacgtggagatgaagagagttggaataatataagaaatatttaatagatcatcaagacttgatgattgattagataagaaatgaaggagaggtcaaagtatgacgactaggtttctgactgcacagctgggtggatggaggttgccatttactgatacgaggaacattgaaggaacctgaaggacagattttagggggagatgatgaatgttgttttagatatgttgtaattgaagtgccratgagacaataaagagaatgattatgggaagttgggtgtatgggtttgaacttcaggaaaacatattgtactccatgactgttccatatcaagatggaaagcactaccttgtttttttcatgac

SEQ ID NO: 363457 - DNA, 411 bp, Homo sapiens
tttctttgggcaatatgggcattctaatggtattgattcttccaattcatgagcatggaayttttttccatatgcttgtatcattctgatttatttcaggaatgtttcatagcactccttgtagagatatttcacctccttggttacatgtatttctaagtatttgtgtgtgtgtgtgtgtgtgtgtgtggctgttgtaatgagactccatttttgatttggctctcagcttgaacgttattagtatatagaaatgctactgaattgtgtacattaattttgtaccttgaaactgtcctgaagtcatttatcagttgcaggagacttttgacagaaattttagagttttctaggtatacaatgacattgtcaatgaagagagatagtttgatttcttcttttcccatttgg

SEQ ID NO: 363458 - DNA, 567 bp, Homo sapiens
cagttctgtgaaaaatgacattggtagtttgatagaaataggattgaatctgtagattgatttggcagtatggtcattttaataatatggattcttctaatccattagcataaagtgtttaatcataaaataaatgttttttcttcatttctttgtgtcacctacaattgttttcagcagtattttgtagtactccttttagaaatctttcacctccatggttacatgtatttcttggtattttattctttttctggctatagttaatgggattgcattcttcatttggctctcagcttgaacatattggtgtataaaaatcctrctgatttttgtgcattaatttttgtatcctcaaactttattgaagttgtttatcagttctattaatagaaaccttttggcagtttttagagttttctttatatagaatcatattgtcagaaaagagagatactttgatttatttttctatttggatgccttttgtttatttctattgcccgattactcatatgggacttccagtactgtgttaaataggagtggtgagagtggatattcttg

SEQ ID NO: 363459 - DNA, 560 bp, Homo sapiens
tagggatgaggaggcattctgctggatggctttttaaaatgcttcttccagactcatctgtcttagtaacaacagttttgtcttagaagactctctgattttataaactgacatgacttcttattctgttacaactccatgctgctctaatccttcaacaggtccatcacacatttttcctatgttgtctacaggcactttttctgcagtgttaataaagtcatttttatcattgctattattacgatcatctagattcaaaagcatattggctatgtcaccatcagtgaatgaatgaacaactgaagtctcattatcaatgttaaacaagttcttcaatattcacttcttccagcttactgatggactctgaaggtgtattttgtgcttttgtaaggaggttagacatcagtttttttcgtcacgtgatgtatggaattcttcaaagttactacctygttcatcatcactgaacatagtcacaaggcagaggttgtgccagacatgcacaactgtgtcctcagtcactgtgttccaagcactggcaatggtatatgtgg

SEQ ID NO: 363460 - DNA, 606 bp, Homo sapiens
tgttctggcatcagatttcatcaacaatgactttggtaaacttgtcaatgaaattcttcactgattcatgatcagcagatactttatcaacaaaaatctttaaaaaataatgycacatattttcctaaattttctgcaatcggcctgttgaatatttaggttgctttcaattttcagttcattgttatatatctttgtctgtttcatgatcagcatgctcttaagtggcacgtgttcaccgtgactctgacatttcaatacacaattgagatcttcatttttagctatacagagtattttaaaaaatgttttttaacttatgttcatcactttcagcataaaacttcaacggtttgtccttctctttcttcaggtcatgtacaatagccactccaacaccatactctactgtaaggcatttcagattgatactgctgtccagttgttctccaacagcttgactttctgtcctatagatagacataaatgtttcccctttttaaaatccctgttactaattaataggggtatctgcaggtctgttgaccttttcaacaatatcttttatcacagagaacacgcaaaacaaaatgagtaatgcacaca

SEQ ID NO: 363461 - DNA, 599 bp, Homo sapiens
ttcattgttatatatctttgtctgtttcatgatcagcatgctcttaagtggcacgtgttcaccgtgactctgacatttcaatacacaattgagatcttcatttttagctatacagagtattttaaaaaatgttttttaacttatgttcatcactttcagcataaaacttcaacggtttgtccttctctttcttcaggtcatgtacaatagccactccaacaccatactctactgtaaggcatttcagattgatactgctgtccagttgttctccaacagcttgactttctgtcctatagatagacataaatgyttcccctttttaaaatccctgttactaattaataggggtatctgcaggtctgttgaccttttcaacaatatcttttatcacagagaacacgcaaaacaaaatgagtaatgcacacagatcttgtccccatgtagggcattgtggggaacctaccactagtgtgtctggcctgcacacatgccattttaatatcctttgtggatgtatttccatggggaaatctgggctgatgtggcatagatatatcacagatgaaggtgttttttttcccttggggaaactgaac

SEQ ID NO: 363462 - DNA, 409 bp, Homo sapiens
catctcatacctgtcagaatggctatcattaaaaagtagaaaaacaacagatgctgatgaggatgcagagaaaaaggaatgcttatacactgttggtgggaacacaaattagttcagccactgtgggaagcagtttggacatttctcaaagaacttaaaacagaactaccatttgactcaccaatcccattgctgagtgcatatccaaaagaaaagaaatcactctacccaaaagacacatgcacttgtatgttcatcatggcactattcmcaatagcaaaaaaaaaaaaaaaaaaaaaaaaaaaaaaaaaaaaaaaaaaggaatcaatctaggtgctcatcaatggtggataagaaaaataaaatattgtacgtatgcatggtggaatactaaacagccataaacaga

SEQ ID NO: 363463 - DNA, 596 bp, Homo sapiens
aattagaaccacttggatgttgccaaggtttacagcttgtactttctggagtggtgggttgagccgcacctggatttagttgagccatggctggtgcagcaaaggaggctgtgctggagtgtraaaagcattgtcctgcagcagcacaaggcagcagatgctgagatcccacagacacttctctggaaaccttgccctgaaggtcctagtttgccttgaagatcatttaaatgttttcatggttattctttgattgtcttgatgaacagaacttggcttccttttacctatattaatctctttagcaaatggtcacttgttcatatctttggtttgctctcctaaagactccttttcattatttacatgaccaggctgcaaattttccaaatcttttcactctgcttctcacttaattcaacgttttgttttaaattattcatttcctatggtatcttactatatgtggttaaaagtagccacacagctccttcaatattttgtttagaaatttctttgaccagatacactcgtttattgctattaaagtccaccttccataaagtgctaaggcatgaacataattcagccaactt

SEQ ID NO: 363464 - DNA, 627 bp, Homo sapiens
cttgatgaacagaacttggcttccttttacctatattaatctctttagcaaatggtcacttgttcatatctttggtttgctctcctaaagactccttttcattatttacatgaccaggctgcaaattttccaaatcttttcactctgcttctcacttaattcaacgttttgttttaaattattcatttcctatggtatcttactatatgtggttaaaagtagccacacagctccttcaatattttgtttagaaatttctttgaccagatacactcgtttattgctattaaagtccaccttccataaagtgctaaggcatgaacataattcagccaacttctttggcaatttataacaaggaaggcctttactccagttgttaacaagatattcctcacttctatctgagacmtcaccataatggcctttactgtgcatatttctaacgacattcaggtcacaaccactgaagtaatcactacaaagatttaggctttccacagctcttgtcttcttctgagccttcactataatttcacttaatgctccattcgcggcaatctaggcttttctaagtctgctcctccaaattaattcagcctctaaccattacccagtcaaaagcca

SEQ ID NO: 363465 - DNA, 514 bp, Homo sapiens
cctgttctccacccataaccatcaatttttcattagcccaaaagaacaaatctgtccagaaagatccatctttaaagaaggggtgaggggaagaaaatgaaatagcaaagtaacaagactccataatggtggagggcaaggtaaaaattggcaaaaatccgtacattaaccatatcagtctgttcaggttgctataayaaagtatcatagtctgggtggcttataaacacagcatattttttcctcacagttctggaagtctggaagtctaagatcagatactagcatggttgggttcttgtaagggtcctctttcaagttgcagaccgtgagcttcttgctgtgtttttacatggcagaaggagcaaacaagctcccctggcctcttttacaagtgcaccaaccccattcatgagaaaagagccctcccaaaaggccctacttcttaataccatcaccttggggattagaatttcaatacataaattctgagggacacaaacactcaaaccat

SEQ ID NO: 363466 - DNA, 500 bp, Homo sapiens
cacagttaaaaattaatagggctagtcatattcatttccttggacaataaatccactttctcaaaaaagactccctttgagtaatttgtaggtgacatagtctaagaaaagcttctttcaagtgattccaaggtaatttttctgttactactcttacttagaaaagagagattaaaaaaaaaagccacaaatttaatcccaatgaargtaatttgctaccatgcacctagtattatttcagtgaaataaagtcttcctgcattaaaggtatctcttataaacctcctgtgccttattggtgctttattaattgaggctatttatatatttatttgtatctgatatggtttggctctctgtccccacccggatttcatctcgaatttcaatccctatgtgtcaaaagtagaaactgtaatcctcacatgtccagggagagaggtaattggatcatgggagcagtctcccctgtgctattctcatgatggtgagtgagttct

SEQ ID NO: 363467 - DNA, 613 bp, Homo sapiens
tgtttgattactgtagccttatagtattgtttgaagtcaggcaatgtgatgcctccgacttcattctttttgcttakgattgctttggctatttttgagctcctttttggtaaaatatcaattttaaaatagctttttctaactgtgaaaaatcatgttggtagattgataagaatagcattgaatctgtagatttctttgggcactatggccatttttatatcagttctttcaatacacgaggatgaaatgttattacatttgtttatgtaatctatgattcctttcagcaatgtttcataggtatccttgtagagaactttaatctccttggttaaatgtgttccttggaggctgggcatgatggatcacacctgtaatccccgcactttgagatactgagacaggcagatcacctgaggtcaggagtctgagacaagcctggccaacatggtgaaaccccatctctactaaaaatacaaacattagctgagcgtgatggcaggtgcctgtaatcccactactcgggagactgaggcaggagaatagcttaaacccaggaggcagaggttggagtgagccaagatcgtgccactgcactccagcctgggcg

SEQ ID NO: 363468 - DNA, 613 bp, Homo sapiens
tgtttgattactgtagccttatagtattgtttgaagtcaggcaatgtgatgcctccgacttcattctttttgcttatgattgctttggctatttttgagctcctttttggtaaaatatcaattttaaaatagctttttctaactgtgaaaaatcatgttrgtagattgataagaatagcattgaatctgtagatttctttgggcactatggccatttttatatcagttctttcaatacacgaggatgaaatgttattacatttgtttatgtaatctatgattcctttcagcaatgtttcataggtatccttgtagagaactttaatctccttggttaaatgtgttccttggaggctgggcatgatggatcacacctgtaatccccgcactttgagatactgagacaggcagatcacctgaggtcaggagtctgagacaagcctggccaacatggtgaaaccccatctctactaaaaatacaaacattagctgagcgtgatggcaggtgcctgtaatcccactactcgggagactgaggcaggagaatagcttaaacccaggaggcagaggttggagtgagccaagatcgtgccactgcactccagcctgggcg

SEQ ID NO: 363469 - DNA, 581 bp, Homo sapiens
gaactgacaaggggctgttgtgggtttcctctttgatatttgagcracagatctgtccagagcacaaggtgttgactggtgactaacaacatcatgcttgctttccatctatttaactaataagccatctttctgcctttccttctttctttacctctctggatttggatctcatggatgttgaactgggatcacagggtgatacagaatcagaattctgtgtctagtgttcatatccctgatcctttaatattttttctttacttagcctgagctaaagtttttcatcacttccataattcagagaatttgaaatggtgggtgtctgtgtgtgctgtgagacattgaggaaactcatttctctctgtagcacttactgtatttataatctattttgtggtagggggagtttgattgactgtatcattaaggtctgtcttctctacttgactagaagcaccctgatgatagggagtttgtctcttttgcacacaaacgggtcctcagtactgagcacagtgcctcactcatatggttaatatagcattttacaaattaatatattttgtatacaattaaat

SEQ ID NO: 363470 - DNA, 563 bp, Homo sapiens
ggtgtaaccactggcaggttttataactcccgcattggaattgctctctttttacaaatgtgcatttaatttgtgttcctcagcttgtcctacttttcttgggactttttttttttttrccttttaataaataagcacataaataaaaacatggggaagatttcttttcatttccaattattataactatcttaagcattaccttttttaatcctttaaggttgagattattattctacagttgaatgaaacaaaactcaggaacattctatacatggacaagaccacaaaactggtggaaaagaaatcccaggtgctatgattctggggtttttatgctatactacctgtctctctccacaatcacattttagagccccatattttcaggaaattatagaaggaaaaaaaatcggcttcaagctggtcacatgttaattatctccaggctgctctgatattttttattccaaatgtgcttaaaatgtgttatttgactattataattaaacttagatgaggaaaggagggaaaattcttggcatctattaaatattatttgt

SEQ ID NO: 363471 - DNA, 566 bp, Homo sapiens
atggtaacaggaaatcctcccaatggataaaactttagtgaatatctacttcatgagggaagaaaagtggcccaaagtgaataagtatgaattattggacagagttgaatggcttggctgattgattaggaaaggcctgcaaataaaatagataaaaggtaatcaggatcacccagaaagactggggaaaaggtatatatgtgaacctatgggagtggccagggtatgaagatctttgtatttcatgttaaggtttatcagagaccatctagtacacaggaggtatcaaacaaccatttaatattagctatcctcygttatcaggcatcccattgctagcatgatgggctcaaaaagagagtagctatgggtgatacatggatctgaaagcatgggatctcattcttcagaattgatatagttactgccactttcaaaactacaacctagaagcaatagagacaacagctgggtccccagtatggcacaactgctcaaggagaccaaccagctatttggtggaatgttgcctgcattgtacttctactttgaaagggcaaataact

SEQ ID NO: 363472 - DNA, 587 bp, Homo sapiens
tgtgataatcagtatctacccctaccaactcctaattgtgtggtttctcacatcctggctttttgctgtcatcagtgtgaagtgggaaggatcaaactataatcattaaaataataatacaataaatgcagtacgacaatacaaggtctaacttttataagcactgacaatatgstaaggtcctaattgaattcatgtgcatcaacctcatcaacccttccaatacctggaatatacctatcttagtcagtttgggctgctttgccaaaataccagcgactgggttttttcaacaacaaacattaatttctcatagtactggaggctagggagtcccacagttaaggccctagtagcttcagtgtttggtgagggcctgcttcctggtttactgtcctctcactatatcttcagatggcccttttgtggtgcatgcatatggaagaaaagagatgtcttgtctctttctctttctataagggcattaatctcattataaggtcccactttcactacataatctaatcctcttcatattccaaaagcccacctccaaataccatcacattggggcttaggtgtcaata

SEQ ID NO: 363473 - DNA, 587 bp, Homo sapiens
tgtgataatcagtatctacccctaccaactcctaattgtgtggtttctcacatcctggctttttgctgtcatcagtgtgaagtgggaaggatcaaactataatcattaaaataataatacaataaatgcagtacgacaatacaaggtctaacttttataagcactgacaatatggtaaggtcctaattgaattcatgtgcmtcaacctcatcaacccttccaatacctggaatatacctatcttagtcagtttgggctgctttgccaaaataccagcgactgggttttttcaacaacaaacattaatttctcatagtactggaggctagggagtcccacagttaaggccctagtagcttcagtgtttggtgagggcctgcttcctggtttactgtcctctcactatatcttcagatggcccttttgtggtgcatgcatatggaagaaaagagatgtcttgtctctttctctttctataagggcattaatctcattataaggtcccactttcactacataatctaatcctcttcatattccaaaagcccacctccaaataccatcacattggggcttaggtgtcaata

SEQ ID NO: 363474 - DNA, 587 bp, Homo sapiens
tgtgataatcagtatctacccctaccaactcctaattgtgtggtttctcacatcctggctttttgctgtcatcagtgtgaagtgggaaggatcaaactataatcattaaaataataatacaataaatgcagtacgacaatacaaggtctaacttttataagcactgacaatatggtaaggtcctaattgaattcatgtgcatcaacctcatcaacccttccaatacctggaatatacctatcttagtcagtttgggctgctttgccaaaataccagcgactgggttttttcaacaacaaacattaatttctcatagtactggaggctagggagtcccacagttaaggccctagtagcttcagtgtttggtgagggcctgcttcctggtttactgtcctctcactatatcttcagatggcccttttgtggtgcatgcatatggaagaaaagagatgtcttgtctctttctctttctataagggcattaatctcattataaggtcccactttcactacataatctaatcctcttyatattccaaaagcccacctccaaataccatcacattggggcttaggtgtcaata

SEQ ID NO: 363475 - DNA, 587 bp, Homo sapiens
tgtgataatcagtatctacccctaccaactcctaattgtgtggtttctcacatcctggctttttgctgtcatcagtgtgaagtgggaaggatcaaactataatcattaaaataataatacaataaatgcagtacgacaatacaaggtctaacttttataagcactgacaatatggtaaggtcctaattgaattcatgtgcatcaacctcatcaacccttccaatacctggaatatacctatcttagtcagtttgggctgctttgccaaaataccagcgactgggttttttcaacaacaaacattaatttctcatagtactggaggctagggagtcccacagttaaggccctagtagcttcagtgtttggtgagggcctgcttcctggtttactgtcctctcactatatcttcagatggcccttttgtggtgcatgcatatggaagaaaagagatgtcttgtctctttctctttctataagggcattaatctcattataaggtcccactttcactacataatctaatcctcttcatmttccaaaagcccacctccaaataccatcacattggggcttaggtgtcaata

SEQ ID NO: 363476 - DNA, 437 bp, Homo sapiens
ttgaggcagctgacaaagattcgtgtaaaatctatctctattctactgatcaggaggggaggatttcgttgtagaataatccagggaggtcagcagctctgcctgcttcatagataacttagaaatcagtaacatccaccttattgagaattatatagtttttttttcatgaaaaaatgccatcagggagggatattaaaatatagttgaagaatcatatgtcttgcagtcagataracctgcatcccaatctgagttttctcacttcccacatgcaccatgccttagcccaaagtctctctgcaggtcgttcctaagaaaagtacttaacttttctttactactatttcttcagctacaagattcaattcaattactctttttcacaaatactaattgagcatctattatagtatgtaacaggtactattttaagc

SEQ ID NO: 363477 - DNA, 525 bp, Homo sapiens
atattcatgtctgtgacattctaatatttgagtgtacaagaaaacatgcctccaccctgggagagtaaaagaagatgggtaaatattcttcatataacagcatcatttctgtctgtcactatgtagcagatatagagagatctgtttctttgtgtgtccttcctaataataaacaactcrtcagcattagttcagcacctattacatgacatacaatgtattaaagctttataatgaccaaacttgtttcatcttcatagaaacattaagtggtagatataattatccatattttacacatgatggaaatggaggtatggagagacatcaggttatctacccaaagttcttactctatatctgcactgcaccgtaataagccatgaacatccctaggaaacagcaaattttattaattttatttagagaccccttagctaatgcagcacctgacttttaatacgtgattaataaatatttgtttttttaaactaaatgttcactgtgactaagaggcacaatata

SEQ ID NO: 363478 - DNA, 628 bp, Homo sapiens
tgcctggatagtagagaagaagccctaaatcttgagtgaggaagggtgagggcttagggactgcttccgggaatggtaacacaactggaccttcaaagatcacagatattgatcagtactcgaagatctgatggaagataaacattcaaaatagaaggaaaacaagtgaactttgatgggttatgtaaggcaggtattaacacatactcatcaagaagcacaggatttgggaaaagaatgtcagattttgaatcccaagactatgaaattctagctgtgtgccattgggaagttagtgaatctctgtgagtcttagtttcttcattggtacaatggagaatagtgataatctaacacttagggttgtggtgaggcttcagtaaattaatacatttaagcactctaaaaagtgtgtgatacatagtaagtgctttaatagattggtttaataagtttgatatatgtattktgaatgtcataagttgagagatggagacagattcttgggtgacatacccaagaagtttgcatttgatcctaagggaaataattattgaaggggagagaaacatagaggagagataagatcagattggattttttaaagattaatcattcttggcaagtg

SEQ ID NO: 363479 - DNA, 628 bp, Homo sapiens
tgcctggatagtagagaagaagccctaaatcttgagtgaggaagggtgagggcttagggactgcttccgggaatggtaacacaactggaccttcaaagatcacagatattgatcagtactcgaagatctgatggaagataaacattcaaaatagaaggaaaacaagtgaactttgatgggttatgtaaggcaggtattaacacatactcatcaagaagcacaggatttgggaaaagaatgtcagattttgaatcccaagactatgaaattctagctgtgtgccattgggaagttagtgaatctctgtgagtcttagtttcttcattggtacaatggagaatagtgataatctaacacttagggttgtggtgaggcttcagtaaattaatacatttaagcactctaaaaagtgtgtgatacatagtaagtgctttaatagattggtttaataagtttgatatatgtattgtgaatgtcataagttgagagatggagacagattcttgggtgacatacccaagaagtttgcatttgatcctaagggaaataattattgaaggggagagaaacatagaggagagataagatcagattggattttttaragattaatcattcttggcaagtg

SEQ ID NO: 363480 - DNA, 585 bp, Homo sapiens
tcaagcactgctgagtcttcaagctcgtcaggtgattctaatgtgcttccaggctgaagaacccccattgatctcatccaaccccacactggacagagtagaaagtgagtctcagatattctgcttcttttatkatatgggtaattattgtgttaactgtcttacctataacatatgtagtttcttacacacttgtaacaagattagaacctcttgaacatttgatataaaatcatatgttatgtttatgctgatgctagagatggtgagataaaataagagatgaaaggaaaattacaaaataaaggaaaagaggtagagggagagtttatgcaaccaatatgaagtgagaccatgcattcatttcacagaccaagggaagacaaggctaattatcataggaaaaactagcttccttccagggtgaatggggaaatggtagttaggagagaacagaaaaagtatagagcgaagaagaggaagaaaaaaaaatcctccatgaaagcaaagggctgtgcctaatttgttcattttccatcctcagcaccaaggacagcactttgcaaatagactagtcccatgttt

SEQ ID NO: 363481 - DNA, 585 bp, Homo sapiens
tcaagcactgctgagtcttcaagctcgtcaggtgattctaatgtgcttccaggctgaagaacccccattgatctcatccaaccccacactggacagagtagaaagtgagtctcagatattctgcttcttttatgatatgggtaattattgtgttaactgtcttacctataacatatgtagtttcttacacacttgtaacaagattagaacctcttgaacatttgatatamaatcatatgttatgtttatgctgatgctagagatggtgagataaaataagagatgaaaggaaaattacaaaataaaggaaaagaggtagagggagagtttatgcaaccaatatgaagtgagaccatgcattcatttcacagaccaagggaagacaaggctaattatcataggaaaaactagcttccttccagggtgaatggggaaatggtagttaggagagaacagaaaaagtatagagcgaagaagaggaagaaaaaaaaatcctccatgaaagcaaagggctgtgcctaatttgttcattttccatcctcagcaccaaggacagcactttgcaaatagactagtcccatgttt

SEQ ID NO: 363482 - DNA, 585 bp, Homo sapiens
tcaagcactgctgagtcttcaagctcgtcaggtgattctaatgtgcttccaggctgaagaacccccattgatctcatccaaccccacactggacagagtagaaagtgagtctcagatattctgcttcttttatgatatgggtaattattgtgttaactgtcttacctataacatatgtagtttcttacacacttgtaacaagattagaacctcttgaacatttgatataaaatcatatgttatgtttatgctgatgctagagatggtgagataaaataagagatgaaaggaaaattacaaaataaaggaaaagaggtagagggagagtttatgcaamcaatatgaagtgagaccatgcattcatttcacagaccaagggaagacaaggctaattatcataggaaaaactagcttccttccagggtgaatggggaaatggtagttaggagagaacagaaaaagtatagagcgaagaagaggaagaaaaaaaaatcctccatgaaagcaaagggctgtgcctaatttgttcattttccatcctcagcaccaaggacagcactttgcaaatagactagtcccatgttt

SEQ ID NO: 363483 - DNA, 603 bp, Homo sapiens
acattacccattatattaaaagtcagggcttctagataatgctgtaaatgtacaactgaataaaagttattacatgttgtatatatatcttctagtcacataaatgaatatagtaaaattaactttactggacattaacataaatacaaatatgaaattataggtggcccatcaaagaagtgtagagttcttaattaatttaccatacaacctttcatcctattactctaaccatacttccacagttttcaagtactttttcaagcacttaggtaatcagaagagattatatttttatttctcatataattagctgttctacaaattcagatgaattaccgagttatttcaacaaaatgactttttcttgtccccatttgagcacaagcattaaatgcaatgccttgcacgcagtaagtgctacataaaaatgtgttaattaaatgaattaacttcaagttttgaagatgcattaacttatcaasactataattttcactttaaaagtattttcattatatagcatctagaaaacaatggagtatttgaattgagggattcatggtgtctcatacacttattcattccaaaatttatcaacac

SEQ ID NO: 363484 - DNA, 492 bp, Homo sapiens
accaattttctaaattcctttgttatttgtaatagtgtatctgtagtatatctatagattatttcagatcttctaggtaaataattgcattattcttggctaatgacagtttactcctttttatttcttttctttccttattaaacttgctagaaccttcaataaaatattgggaaaaagtagtgagtgaagacatcttttacttatgctggatatcaggaagaaatatttcaacattttactgttgtgttatcttcactgtaaagactctggcatagattaaggaagttatcttttttagctaggttgccaaggtcattttatcagaatgatgttgaatttgtcaygttttctttaatttattgacggcattatgttgttaatgtgtaaataagctgaccagctttcgaaaattaaaataattatatatgtatatcccacattttctttatccattcatccactagtgaacatttagggtgtatctacatc

SEQ ID NO: 363485 - DNA, 557 bp, Homo sapiens
gacaccatgattttaactcaggtggaagccatttcagccttctgatctccagaactgtaagatattaaatttcttttgctttaaagccactaaatttgtggtcaacttttaaagcagcaatagaaaactaatacacccttcataagatctggatcccagatgaatgatcctttcctaaccacaacactccttaaaaggtagactatcttggattaggcaaaaggagaggagattttggtcttccctacccaaaactcctgtgaggttttatgacatcttacaaggttttactttggtcatacgtatcacacagaaagtcactgtatttttccccccaacatgcatgttctaccagagatcattgargacaagaatatattcatccctaggttggctctgagtagatactcagtaaatcactgtcgtggtaatacaaggtgtgaaaatgagagcaagttctaccaattccccctacttatattcctcagggataaacaagctcctgctgtgctataccatccatcttaattttcccctatgctgtggcctgttcactt

SEQ ID NO: 363486 - DNA, 568 bp, Homo sapiens
cttcaagttaccttgaagtccaaaacaactgctggagctgtagccatcatgtttatgtgccaggcagcagaagaagaaagtaaagaagggaaaaaggttactttctaccatgagtcattttcctttcaggaatcctctgtgtacatgttattggctgaaacctattcctatgccacatttcacagcaatggttgatgaaaaatgtagtattgtaactaatgcctttaccatcccaaatgaaattagaggtctattgctgagaatgaaggggagaatagatattgacatgcaattagtcatttctgctacattcctcaaatgcccaatgctccagattacttgcctcctttcctacttactcagtgaagctatctcaagtccattttctttmaagtctaactgacaggaatgatcctcctagaacaatggttctcaactttggttgcacattagaagcacttgcagtattgttaaaaaatcctgatgcccatgtcacactcagacaaattaagtcagaagctcaaccaatgggacacccaggtctcaggattttatatatgtgtgtaaa

SEQ ID NO: 363487 - DNA, 521 bp, Homo sapiens
gggacagaagcaccaggtgagctttgaacatttttgagttctgggctaataytacatttaaaatcttatcagtgaatatctgggagggaaaagaagcacagatatctgaagcagatattatttcctcccttgaattctttgctaatttgtaggcatttactgaaaatgtcagaagtggctaagagattggacagatgagaagagctttaggcagtcatactgaattgaagaaaaaaagaattgtaattgttcattagtctatttcctgttgtttataagagaatgcccacaactgggtaatttataaagaaaacaggtttattctattttttattcggcaggctaagaagttcaagggcatgcctctagcttctggtgagggcttttgtgctgtatcacaacaaggtggaaaaggaagtggacacatgcaaagaggggaaacttgagaggtgttctgactttataatcactcactcttccaggaactaatccattcccatgagaatcaatcgagtctctca

SEQ ID NO: 363488 - DNA, 597 bp, Homo sapiens
gcatatgacgtggaagcatccctggagccacaagacattaaaccagaggagataatgcctrccatcctaggaccaaaatcaagacaggatggatattccaactattctaataggtttttcttactatctgttatttccctgtaatccccacgtctttgtaagtcagtctatactgaccacacccagaattaggtcagaccgcctaagattttatctcttcaaatattaacaggcattggccttccaagtgaagaaatgcagaatagagttgggaagtgagtattaacttcatattgctgtgtaacaaattataacaaaattagaagcttaaagaaaaatgcgtgtattatttcatgctttctggatgtcaggagtctgggtatggcaactgggttctctgctcagggtcagacaggctgtagtcagggtattggcgaactgcatttctttttggaggctttctggaagaatctgcttccaaatatattcaagtttttggctgaatttggtggtctgtgggtgtaggcttgagtctccattctggtgctggttgtatgctggaggccatactcatttctgagagaccacctgcattcc

SEQ ID NO: 363489 - DNA, 597 bp, Homo sapiens
gcatatgacgtggaagcatccctggagccacaagacattaaaccagaggagataatgcctgccatcctaggaccaaaatcaagacaggatggatattccaactattctaataggtttttcttactatctgttatttccctgtaatccccacgtctttgtaagtcagtctatactgaccacacccagaattaggtcagaccrcctaagattttatctcttcaaatattaacaggcattggccttccaagtgaagaaatgcagaatagagttgggaagtgagtattaacttcatattgctgtgtaacaaattataacaaaattagaagcttaaagaaaaatgcgtgtattatttcatgctttctggatgtcaggagtctgggtatggcaactgggttctctgctcagggtcagacaggctgtagtcagggtattggcgaactgcatttctttttggaggctttctggaagaatctgcttccaaatatattcaagtttttggctgaatttggtggtctgtgggtgtaggcttgagtctccattctggtgctggttgtatgctggaggccatactcatttctgagagaccacctgcattcc

SEQ ID NO: 363490 - DNA, 597 bp, Homo sapiens
gcatatgacgtggaagcatccctggagccacaagacattaaaccagaggagataatgcctgccatcctaggaccaaaatcaagacaggatggatattccaactattctaataggtttttcttactatctgttatttccctgtaatccccacgtctttgtaagtcagtctatactgaccacacccagaattaggtcagaccgcctaagattttatctcttcaaatattaacaggcattggccttccaagtgaagaaatgcagaatagagttgggaagtgagtattaacttcatattgctgtgtaacaaattataacaaaattagaagcttaaagaaaaatgcrtgtattatttcatgctttctggatgtcaggagtctgggtatggcaactgggttctctgctcagggtcagacaggctgtagtcagggtattggcgaactgcatttctttttggaggctttctggaagaatctgcttccaaatatattcaagtttttggctgaatttggtggtctgtgggtgtaggcttgagtctccattctggtgctggttgtatgctggaggccatactcatttctgagagaccacctgcattcc

SEQ ID NO: 363491 - DNA, 597 bp, Homo sapiens
gcatatgacgtggaagcatccctggagccacaagacattaaaccagaggagataatgcctgccatcctaggaccaaaatcaagacaggatggatattccaactattctaataggtttttcttactatctgttatttccctgtaatccccacgtctttgtaagtcagtctatactgaccacacccagaattaggtcagaccgcctaagattttatctcttcaaatattaacaggcattggccttccaagtgaagaaatgcagaatagagttgggaagtgagtattaacttcatattgctgtgtaacaaattataacaaaattagaagcttaaagaaaaatgcgtgtattatttcatrctttctggatgtcaggagtctgggtatggcaactgggttctctgctcagggtcagacaggctgtagtcagggtattggcgaactgcatttctttttggaggctttctggaagaatctgcttccaaatatattcaagtttttggctgaatttggtggtctgtgggtgtaggcttgagtctccattctggtgctggttgtatgctggaggccatactcatttctgagagaccacctgcattcc

SEQ ID NO: 363492 - DNA, 591 bp, Homo sapiens
aaggatcactcaatgcaattttcaggrctacgtgtatttttctgttttccatagcaataacttataacatatatggataggaaatgaagaaagaaagaaaaaattatattgtctgcattttatggatttagatttcattaagggagatagatttttaaattatttggcatcgctgccctaacattccataatccttagacttttatcttcataattgtctaagatttatttttatatattcctgttagcatatagcactcaggaggtttcacattctagcaaaaatagattgtgatattctgcctattggttgttaagtcctatcataattattttataactataactattggtctgctttatatttcataaatttaatataatgaatgatagaaataattataaagttaaaatacttttagtataagcatacaatggtgtaaggtataaatctttacagatgtataattaccatttttctctcatatttttgaatgccaacagctattgcacagcaaacaaaaacatacatacaataatacaacagagtaggttaatatcatactggaaccacaggtacgaacattgtta

SEQ ID NO: 363493 - DNA, 507 bp, Homo sapiens
atattgtctgcattttatggatttagatttcattaagggagatagatttttaaattatttggcatcgctgccctaacattccataatccttagacttttatcttcrtaattgtctaagatttatttttatatattcctgttagcatatagcactcaggaggtttcacattctagcaaaaatagattgtgatattctgcctattggttgttaagtcctatcataattattttataactataactattggtctgctttatatttcataaatttaatataatgaatgatagaaataattataaagttaaaatacttttagtataagcatacaatggtgtaaggtataaatctttacagatgtataattaccatttttctctcatatttttgaatgccaacagctattgcacagcaaacaaaaacatacatacaataatacaacagagtaggttaatatcatactggaaccacaggtacgaacattgttaacttgcatttttaacattcaa

SEQ ID NO: 363494 - DNA, 591 bp, Homo sapiens
aaggatcactcaatgcaattttcagggctacgtgtatttttctgttttccatagcaataacttataacatatatggataggaaatgaagaaagaaagaaaaaattatattgtctgcattttatggatttagatttcattaagggagatagatttttaaattatttggcatcgctgccctaacattccataatccttagacttttatcttcataattgtctaagatttatttttatatattcctgttagcatatagcactcaggaggtttcacattctagcaaaaatagattgtgatattctgcctattggttgttaagtcctatcataattattttataactataactattggtctgctttatatttcataaatttaatataatgaatgatagaaataattataaagttaaaatacttttagtataagcatacaatggtgtaaggtataaatctttacagatgtataattaccatttttctctcatatttttgartgccaacagctattgcacagcaaacaaaaacatacatacaataatacaacagagtaggttaatatcatactggaaccacaggtacgaacattgtta

SEQ ID NO: 363495 - DNA, 576 bp, Homo sapiens
ttagttaagccaagctaagtaagttaagaatgatttttctattttaaatgtccaagttactctgattccacagccaaagaaaggctacaaacctgactaaaacaacatccagattaagactatatgtaattacagccaattcttatcattcacagtaatgttctataaacatgcagcaaacagtaaattagtgaataatgaccattactcctggaggaaatacaagcttaggttgctgtgagcctttagtcacaacgtgttcatcaactagtcaaaacataaccttgttttatgtgtgttcttgtttaaagacatcttagttaatataaattgttgactcactaacattgaacttgcagcaacagcactttattcatgcaacttatttaacatatgtattgtctatatacagttatccctagtcccttgatatttgcagagcattggctccaggacacttcctcctctcaycccaccaataccaaaatctaaagatgctcaggtctcttataccaggtagcttagttttcacatgtaacctgtacacatcctccattatactttaaaccatctcta

SEQ ID NO: 363496 - DNA, 543 bp, Homo sapiens
tgattccagccttgccttgttctcttgcttttttgcctcctgaggacccttatccaagctttatcttctacctcccgaaagttttaatctccttcttcatctcttcccttctgctttcaaatattcatagagtccttcatcttgaataagccatgaccctgctttgccatctctctccactgtcatcaaataccttcttactttatttcccagtctaaattcttgaataagggctaggtgcggtggctcacgcctgtaatcccagcactttgggaggctgaggcgggtggatcacttgaggtcaggagttcaagaycagcctggccaacatggcaaaaccccatctctactaaaaatataaaaattagcagggcatgctggctcatgcttgtagtcccagctactcaggaggctgaggcaggacaattgcttgaacctgggaagtggaggttgtggtgagctgagatcccgccactgcactccagcctgggtgacaagagcgagactccgtctcaaaaaaaaaaaaaaaaaaattatttaagg

SEQ ID NO: 363497 - DNA, 543 bp, Homo sapiens
tgattccagccttgccttgttctcttgcttttttgcctcctgaggacccttatccaagctttatcttctacctcccgaaagttttaatctccttcttcatctcttcccttctgctttcaaatattcatagagtccttcatcttgaataagccatgaccctgctttgccatctctctccactgtcatcaaataccttcttactttatttcccagtctaaattcttgaataagggctaggtgcggtggctcacgcctgtaatcccagcactttgggaggctgaggcgggtggatcacttgaggtcaggagttcaagatcagcctggccaacatggcaaaaccccatctctactaaaaatatamaaattagcagggcatgctggctcatgcttgtagtcccagctactcaggaggctgaggcaggacaattgcttgaacctgggaagtggaggttgtggtgagctgagatcccgccactgcactccagcctgggtgacaagagcgagactccgtctcaaaaaaaaaaaaaaaaaaattatttaagg

SEQ ID NO: 363498 - DNA, 551 bp, Homo sapiens
tgtgtaaaatatagtacaattatagaaatgtgtctattaaaaataaactctgtaaggactactatctcctctttactgatgagaaattaaggctcataaagattaagtaacttgtaaaagcacacattactagtaagtatggaaggtcaaattcaagcccacttaaatcacctctccaaagcatatgttcctaaatactagataattaggccatgctaatgttsatttctatatagttacattatagtaactataattatttaattaccttaattaatccatgctaatcagtcttccacccaaaatgaaagcatgataattggacattcactaatgaaaagcgtatctatacataggctaacaaaatgggaaatattataagaaacaaatggaagggtaaatgaaaataaaataccattgaatgctataatcattgaggacaatcagaccatcagacatttaaccagatttacttcatgtcagcactctttcatttgattgggtaggttctgccttaccttggaaaatcagtaaggcaatgcaaaataaga

SEQ ID NO: 363499 - DNA, 551 bp, Homo sapiens
tgtgtaaaatatagtacaattatagaaatgtgtctattaaaaataaactctgtaaggactactatctcctctttactgatgagaaattaaggctcataaagattaagtaacttgtaaaagcacacattactagtaagtatggaaggtcaaattcaagcccacttaaatcacctctccaaagcatatgttcctaaatactagataattaggccatgctaatgttcatttctatatagttayattatagtaactataattatttaattaccttaattaatccatgctaatcagtcttccacccaaaatgaaagcatgataattggacattcactaatgaaaagcgtatctatacataggctaacaaaatgggaaatattataagaaacaaatggaagggtaaatgaaaataaaataccattgaatgctataatcattgaggacaatcagaccatcagacatttaaccagatttacttcatgtcagcactctttcatttgattgggtaggttctgccttaccttggaaaatcagtaaggcaatgcaaaataaga

SEQ ID NO: 363500 - DNA, 551 bp, Homo sapiens
tgtgtaaaatatagtacaattatagaaatgtgtctattaaaaataaactctgtaaggactactatctcctctttactgatgagaaattaaggctcataaagattaagtaacttgtaaaagcacacattactagtaagtatggaaggtcaaattcaagcccacttaaatcacctctccaaagcatatgttcctaaatactagataattaggccatgctaatgttcatttctatatagttacattatagtaactataattatttaattaccttaattaatccatgctaatcagtcttccacccaaaatgaaagcatgataattggacattcactaatgaaaagcgtatctatacataggctaacaaaatgggaaatattataagaaacaaatggaagggtaaatgaaaataaaataccattgaatgctataatcattgaggacaatcagaccatcagacatttaaccagatttamttcatgtcagcactctttcatttgattgggtaggttctgccttaccttggaaaatcagtaaggcaatgcaaaataaga

SEQ ID NO: 363501 - DNA, 628 bp, Homo sapiens
tctctgtcatccaggttttagtgcaatggcattatcatagctcactgcagcctccaactcctgggctcaagcaatcttcctgcttcagcctcttaagtacctggaataacagtcctgagcagaatatctgcagtgcccrgcagaatttaatttttttaaggaaataattttaaaatatctttgcaagcacagtcttaatgtgcttgatgtcttattctttacagaactggatggacaaagtcatgagtgagagtcaggttactcacaagccttcagcaaaacactcaagcagcaagatttcccctttgaggatggtaattgaagactcactgccactctcagtgggaggcaacagcagtttgggttttctttgcttgatggaatttgctacaaaatagaaaagaaaagtcagaattttttcaaattaatatacataaaattctgtgacaccacatctttcttaaaacaaaaaatccgacacacgagtgtgtgtgtgtgtgtgtgtgtgttctataacacatttcacatatttccatttaaatagactcctcttctctcttaccatgaagcatgggttgtccctcatatgtttttactgagcgtagcactgcaaaattttataaatatt

SEQ ID NO: 363502 - DNA, 410 bp, Homo sapiens
tgctagttgacattctcaccagcagtgtagaagtgctccctttycattgcatccacaccaacatccactattttttaaatttttttcattatggccattcttgcaggagtcaggtggtacagagatgtagttttgatttgcatttccctgatcattagtgatgttgagcattttttttcatatgtttgttggccatatgtatatcttcttttgagaattgtctattcatgtccttagcccactttatgatgggattttttgtttttttcttgctaatttgtttgagttccttgtagattctggatgtcagtcctttgttggatgtatagattgtgaagattttctcccactctgtgggttgtctatttattctgctgactgttcattttgctgagcagaagctctttaat

SEQ ID NO: 363503 - DNA, 410 bp, Homo sapiens
tgctagttgacattctcaccagcagtgtagaagtgctccctttccattgcatccacaccaacatccactattttttaaatttttttcattatggccattcttgcaggagtcaggtggtacagagatgtagttttgatttgcatttccctgatcattagtgatgttgagcattttttttcrtatgtttgttggccatatgtatatcttcttttgagaattgtctattcatgtccttagcccactttatgatgggattttttgtttttttcttgctaatttgtttgagttccttgtagattctggatgtcagtcctttgttggatgtatagattgtgaagattttctcccactctgtgggttgtctatttattctgctgactgttcattttgctgagcagaagctctttaat

SEQ ID NO: 363504 - DNA, 539 bp, Homo sapiens
gctatataacagtcagcactttcttactagagtctttcaataacaaaaggatctaaaatcaaatgtaggagaatgtattcttgatgatttccttcatgaggctttaatatgactaaagaaatcatcccacactgggcatggtggctcatgcctgtaatcccagcacttagggacactgaggcaggaagattgctcgaggctgggaggtcaagcacaaccggggcaacatagtgagcacccatctctacaaaaataaaaataaaaaataaaaattggccaggcacggtagcactcgcctgtagtcctagttactcagaaggctgagatgggaggatcacttgaacgcaggagcttcaagactgcagtgagccatgaarccatgactgcaccactgcactccagcttgacctggagagagtgagttcctgtcaaaaacaaacaaacaaacaaacaaacaaacaaaaaagccagaaaggaagaaaagaaaggaaaagaaatctttctctgtattaatgaccctggtgataaacgtattgttc

SEQ ID NO: 363505 - DNA, 613 bp, Homo sapiens
taatctcagatgctgtactagaacagtctggcacagttactgtttggtttatttttttactctagtgagctgtaggctgacacgttaccaatagcttcttttcattgtaagcagcatacagtgtgatgctcaaagtgtaaacaggataatttttaccattttcaggagcatctaagtcatctacagttggataacttttttccacaatttgtgaaatacaggtgtatctgtcaaaactgakgcacaattttctctgtttcttttatctgtataatgacttacccaattcctagtgtgcaagaaacattattgatgtcttattgaatcctgatgctttctgtatatactactgtgatcttggtggcatcttcatttattattctggtggacgcatgtagcttactatcagtgtttttatgagacaagaagcaatatctctcttttctaactaagcatttagacagtaaattctctttgcatggatagcagtgtggtcctactcaccactgcaacttcgttgcctagcatggcaccagcacacagttgaaacttcattcttgaaacagcctgtgggttagggatattctacctatttactagtgatgaaactgcc

SEQ ID NO: 363506 - DNA, 596 bp, Homo sapiens
gatttcccttgtcagactgagaaaagaaaccactcatttgcaggacagtagcaaacatcttacttgcattccagttgtgtatgggttcttttaaacttcataatattcttttcttattcctcttgctatatattgatggcaaccgtaggcctaggtttaccacatctctatagaacaaagccatatcttatgaattgttttaggtgctatctggactgacacagttttgttacctatagcaaaatatttactgctttgttgcagagaaagctagcagatggttttcatgacatcataggcagggaagagtagacatgtagggtccacatgtttggccttttttccaagagtctaacttcatatattcatgagaattttgaatgaagaattcaataaacttgttattgttctataatgagaaatctttatttgctgaaaactaagcctattactgtgttctaaagaatagatctcagtctgaaaagaatgctagtgcaaagataaacttacataaaaaaactagtataaaatttaaatattattagmaatcatgattaaggatattattaattgtatatatatactatgtgccaact

SEQ ID NO: 363507 - DNA, 590 bp, Homo sapiens
aataagtgactctaatgactctttaaaaaacctaaaactgttacaaaggggcatagtaaaacgttcaaaaaataaagtaggctatagttattgacaggatctaaatgttaccttaattattaaacttctaatttactataataatatgctaattattgtaaagtgcaaggtagaaaaggtacaaattcaatgacaattcccaaaatattgttaatgaaaatgaaataaaaataactyagtacaaagagctccagtgaacagtgcacaaacacaccgatatacaaaaacagttgtgtcactcaaaagaccaaattaataatgtgtaatgacatgccaatacacagaatgagatcatgattctccggtgcctcctcacagtgaggtcagtaatggtagacaccaaaaccttctcagttaaggagatgaatatacgaattccaagcataacgtctcgtcagccatcagttgttgccatgacttgtcttcctgccaaatactgataagtacagaaatcaaatataaggaaatccagagattttttaacatgaggagagtcaaaatgttggaaaccattcattaaaataaaattt

SEQ ID NO: 363508 - DNA, 590 bp, Homo sapiens
aataagtgactctaatgactctttaaaaaacctaaaactgttacaaaggggcatagtaaaacgttcaaaaaataaagtaggctatagttattgacaggatctaaatgttaccttaattattaaacttctaatttactataataatatgctaattattgtaaagtgcaaggtagaaaaggtacaaattcaatgacaattcccaaaatattgttaatgaaaatgaaataaaaataacttagtacaaagagctccagtgaacagtgcacaaacacacygatatacaaaaacagttgtgtcactcaaaagaccaaattaataatgtgtaatgacatgccaatacacagaatgagatcatgattctccggtgcctcctcacagtgaggtcagtaatggtagacaccaaaaccttctcagttaaggagatgaatatacgaattccaagcataacgtctcgtcagccatcagttgttgccatgacttgtcttcctgccaaatactgataagtacagaaatcaaatataaggaaatccagagattttttaacatgaggagagtcaaaatgttggaaaccattcattaaaataaaattt

SEQ ID NO: 363509 - DNA, 590 bp, Homo sapiens
aataagtgactctaatgactctttaaaaaacctaaaactgttacaaaggggcatagtaaaacgttcaaaaaataaagtaggctatagttattgacaggatctaaatgttaccttaattattaaacttctaatttactataataatatgctaattattgtaaagtgcaaggtagaaaaggtacaaattcaatgacaattcccaaaatattgttaatgaaaatgaaataaaaataacttagtacaaagagctccagtgaacagtgcacaaacacaccgatatacaaaaacagttgtgtcactcaaaagaccaaattaataatgtgtaatgacatgccaatayacagaatgagatcatgattctccggtgcctcctcacagtgaggtcagtaatggtagacaccaaaaccttctcagttaaggagatgaatatacgaattccaagcataacgtctcgtcagccatcagttgttgccatgacttgtcttcctgccaaatactgataagtacagaaatcaaatataaggaaatccagagattttttaacatgaggagagtcaaaatgttggaaaccattcattaaaataaaattt

SEQ ID NO: 363510 - DNA, 379 bp, Homo sapiens
tggggctcagctcagtgcagtgactacagagaagcttcctgaaacacagctaagtagccagagaacaggggctccagaagcccttcagctgtgagtgggatggggctggtggcaaggccagggataggatacactgacgacattagcaaagacctccgaagtgtttcctctgtaccaggctctgcactgggcatgggtgatatagtcatggccccatttcataagactcraagctcattttcagggcatagagggaagagagtgagaagggtattctaggccgagggaacagtgtagaaaaaaaagcatgaaggtgtgaaagagcccaaggttttctcagaatgatgaggatctttgtgtggctgaagctgagagatgt

SEQ ID NO: 363511 - DNA, 546 bp, Homo sapiens
cctttgttcctctgtgtgtgtgtttctctatgcctctctgrtctctttgtacttccatcttgatctcgctaaggctctgatccctctctcctctccctcttcatgtgttactgtcccccttcctgtctctgtttatctctcagtctctctgtctgtgagtcttttttcctctctcccagtcagactctctctctacccctccctctctccctctctccctctctgtctgggcctctctctgttcctcctccctcctccctcccccttctgcattatcagacctgctccaacctcctcccagagccagccgagcagcagaggcagtggcagcgggagaggcgggagcagcggggcagcagagctggattggggtgttgagtccaggctgagtagggggcagcccactgctcttggtccctgtgcctgctgggggtgccctgccctgaactccaggcagcggggacagggcgaggtgccaccttagtctggctggggaggcggacgatgaggagtgatggggcaggcatgcggccactccatcctctg

SEQ ID NO: 363512 - DNA, 635 bp, Homo sapiens
gggtgaatgaatggagaatgaatgagggagccgggctgcttgcgcagaccttgaggagagctcacctgacaggcaggcacagttgagatggttgcaattctgcttggtgctctgaagagttactaggctgcacacctgccccatcacaggagaggctggcagccacaaaaccttacggggggaagtagcacctcttgggaagcctgaccggcatggatggaagctccgaagcaggtctgcagggagaaaaatgcagcatttccaaaactgaggactaccccctggaggcagctggaggtgaacaggccctgttggacagaggcccctatcctcccaagctcaaagtggaggctgtccatccctaggaatacygcctcccagggtgcccacagcaatccctctgcactgcagcagtggcggggctcaggtcaggtagaaatgcagggccttgaagggaaagtgcctcatgtagagctctcgggagcctctgcctatccacaaggcctggctcagctctcagttcagggcgttggacaagttgatgttggccaggactgggcttgtaagctggggtggagcagggtggatgggatggaatgttgtgtggttgggaggggaagggcagagaggggata

SEQ ID NO: 363513 - DNA, 552 bp, Homo sapiens
ttttgtccccctaacagggcatgtgacaggggaaattgcttgcttcttcagtactccactgctcaaacctctaggggagcatatagatgggcaggtggtggggctctgaccccacagcagtgtctaggggtgaatgtttacagctcctgaagccccagtgggcctgtgttacagggtgttcttttagttttgctcttttagtttagctgtccataggcagattgtgttaaccagctcaattagactctctaccttgtcacaaggtcagaggtctttctgtatcctgggttcttgccttggtgtacctgaagaatcggatcacacctgggtttggagaatgagtgcaagattttactgagtggaagtacctctctgcccatcagggagccagaagggagrtggttttcccttggacctgggctgctgggaggcctgggctcccctccaactgccctggccaaactccccgttgtcctgccagtcagtggcctgccatcgtgctggtgcctgtcagtgctttcctcacaacatccagctgctgtgtgctggtgt

SEQ ID NO: 363514 - DNA, 572 bp, Homo sapiens
tgccagatctcctcatcctgctgcttctccttgctgagctgtgactgccccgcctggtgcctggttctgcatggagtttgtggagcaggggtgtgggagggaggcaaagaggcggggccttgattggctctctggcactggcagtattagaaagggtaggatagtttttgtggtctacattagtgctcacagtacccacagacaaatgaggaaactagtgagtctggctgcaaaagtgagcactttcttaaaattcactacctaagataacaccctggtctcctaacacttcgctatgattaaaaagcaatacttccatgcactgtcagcagtaacagtcttaaaaatgcaatttaattgtgatgttataatctaaagaaataaaccatttataatcatgccttgcttttctgtgackagatatttctataggttgtattatttgctcaagaaattgtcctaaaacattagacttgatgctggcattttcacagttgagaaggctcatgttgtacatttctcttaggtttccttgcaagactggttgattgagccagaaatacaagggctgt

SEQ ID NO: 363515 - DNA, 580 bp, Homo sapiens
aagacatgttttttttttttcttctaagtgttgaaaaagaagtgttcaaggcagaaaggagtggaattccccataagtcaggacaaggaaaggggggtggtgggcagatccaagagtggtaaaacttgagccatatgttcccacactctagagggtgcyggtggttggaaggaaacagctcagagttgcatgtgggcactgggaaccaaaagcaatgggtccccaaggtcagctgggcatagagggattgcagccatcagtgggtgtctttgacaagggtgtgtgagtgtggcacgaagcacctttggaggtgatctcagtagattgacaatctgaagcctcaccccaaaggtctttgattgggttcctggattaccaggtttagcagtagggaattgtaaagaaaaatgacagctactggactgcttatgacattggttagtggagacctgtgcatggacttgccatacttcagaaaaaaataattggaaaaaatccatgacagtccaacacaggaagaactaaactctacactttggaatcaatacatagatggtaaaactaaagaaaagcaaaagaa

SEQ ID NO: 363516 - DNA, 570 bp, Homo sapiens
acaaacttatactaaaaaaatcattaattgtttatctgaaattcaatttccacatttttaatttactaatctagcaacactgcttttaaggcaccaaccatgatgtatttcttgaccatggctatgctattacttgactgagagcattcactttattttttaaaaatgtacatacatattttatgagcttttctgtatatacactatctttcatgataaatttgtgttgaaatgttctcacttcttaaatacaatggaacaatttgtaccaattacaaaaacattatcttatttaccccatctctctccccacccaaatgctgaatgaaatccattcatatcccattacagtgaagaaactgagtcttaaaagttaamtaacatgtccatagccacagagctggtaaacagtagaatcaagtttcaacctgagtctatcagaccccaaagtctgtactcctaaccactggaaaatgcctgtgttatgcaacaaaaaataacatggaccaaagtctctggaggcccttaggaaacttgcatctgtgcttgtccttggagcaagggattgtc

SEQ ID NO: 363517 - DNA, 566 bp, Homo sapiens
taaaaatgtacatacatattttatgagcttttctgtatatacactatctttcatgataaatttgtgttgaaatgttctcacttcttaaatacaatggaacaatttgtaccaattacaaaaacattatcttatttaccccatctctctccccacccaaatgctgaatgaaatccattcatatcccattacagtgaagaaactgagtcttaaaagttaactaacatgtccatagccacagagctggtaaacagtagaatcaagtttcaacctgagtctatcagaccccaaagtctgtactcctaaccactgkaaaatgcctgtgttatgcaacaaaaaataacatggaccaaagtctctggaggcccttaggaaacttgcatctgtgcttgtccttggagcaagggattgtcaaatctctctgacaatggggtcaagagtaaaaaattttataaaagaatagagggaatcaacaaacacccacactgagatgtcgcatatattggaattatctggcaagtattttaaagcagccatcataaaaatgttttcacaagcagttatgaatg

SEQ ID NO: 363518 - DNA, 566 bp, Homo sapiens
taaaaatgtacatacatattttatgagcttttctgtatatacactatctttcatgataaatttgtgttgaaatgttctcacttcttaaatacaatggaacaatttgtaccaattacaaaaacattatcttatttaccccatctctctccccacccaaatgctgaatgaaatccattcatatcccattacagtgaagaaactgagtcttaaaagttaactaacatgtccatagccacagagctggtaaacagtagaatcaagtttcaacctgagtctatcagaccccaaagtctgtactcctaaccactggaaaatgcctgtgttatgcaacaaaaaataacatggaccaaagtctctggaggcccttaggaaacttgcatctgtgcttgtccttggagcaagggattgtcaaatctctctgacaatggggtcaagagtaaaaaattttataaaagaatagagggaatcaacaaacacccacactgagatgtcrcatatattggaattatctggcaagtattttaaagcagccatcataaaaatgttttcacaagcagttatgaatg

SEQ ID NO: 363519 - DNA, 566 bp, Homo sapiens
taaaaatgtacatacatattttatgagcttttctgtatatacactatctttcatgataaatttgtgttgaaatgttctcacttcttaaatacaatggaacaatttgtaccaattacaaaaacattatcttatttaccccatctctctccccacccaaatgctgaatgaaatccattcatatcccattacagtgaagaaactgagtcttaaaagttaactaacatgtccatagccacagagctggtaaacagtagaatcaagtttcaacctgagtctatcagaccccaaagtctgtactcctaaccactggaaaatgcctgtgttatgcaacaaaaaataacatggaccaaagtctctggaggcccttaggaaacttgcatctgtgcttgtccttggagcaagggattgtcaaatctctctgacaatggggtcaagagtaaaaaattttataaaagaatagagggaatcaacaaacacccacactgagatgtcgcatatattggaattatctggcaagtattttaaagcagccatcataaaaatgytttcacaagcagttatgaatg

SEQ ID NO: 363520 - DNA, 579 bp, Homo sapiens
aattatctcctaactctattataaatgtctattccagggagtattttcaaaggcagtgcaaacctttctgagggatttatgtaaaccagctagtgacccaaggtttcttgacaaaaactcctgtccccaggaggtaagatggctcagctgggctcacagaactttccaatctcatctgcttagcaacagcggagtcaaggaagcctgaagggactttatcagccaaggagagctttggcrtcttgtttctctttctgggctctgccaagaatgacatcacctcactggattattagcaagccctatgagcaacctctatcccatccatcacatcaaagctgccccacatatgttcatgctggtcagtggagccagttgctatcagctctacgccctggtttaaacattcccaacatggtcaggaatgggaaagtgaactgaaaaagtcactgctactattacttattaaccatggctgaacattcaggatgatatcatgataacagagatattattatagagatttgaatataccatgggtcaagttgttcttcccaaaactaaaataaaccaatattt

SEQ ID NO: 363521 - DNA, 542 bp, Homo sapiens
ttctgtgtgactcagatttcaccttcatacatacttgtactttgcaattttttttccgatgaagataggtaaatataagtatcaaaaacgcagcaaaatgtaaatagtgcctgcttctgaatggtaatggtgtgaaattctccccttttcttcatattgttctgtgctttccaaagtttctctgtgaactggtaatacttcagaagggaaacaaaaagcagcacagatgtggaatcagaagacctgtgatccaggtggacacctgcccccaatagctaatagcctaatcacatgtgttctacagccactgtgacctccttcaacctctccttgctcatgtgtagacagacacagtcacagaccctagcagctgcaragatagtgtatgcggaggacttcgtgaactggtaaatactacacaaatgttaatgctaaggctggcttggtgagccatgaggtccattccttggagctcttccaactcctcccttggtccatccaccctgtgggaggtcagtagagggtgtctacctcagactggc

SEQ ID NO: 363522 - DNA, 628 bp, Homo sapiens
tcttgccattcttgaagttcctgtcaagaaagagaatcttaaaagtcactagaagataaagtttttatggatctgaaatttgctgtgaaccatattccttttaggaaaaatggtataaaatttacttttaaaatacaggttgttccttaacaattttcaactctgatcctttctataaacaatatactttaaygtatctattggtactgaattatttattccaaaggttctagaattctgcttattgtttttctgttagatgtaaagatttgcatagtttgaaaaaaatgttttgtgaatataaattacactttgccaggtttcttgccagcttatggtataccactgaattccagatcattcactagcatgactcttctgatgaaagagcaataagaaaggccaaatatatatatatatagatagatagacagacagacagacagatatagatatagaaagatagatatacagttgacccttgaacaacacgggattgaaatacacgggtctgaactgtgcaagtccactaatacacacattttcttccacctcagcctactcaacttgaagaggatgaggataaggacctgtatgatgatgcacttccacttaataaacagtcaat

SEQ ID NO: 363523 - DNA, 536 bp, Homo sapiens
aagtttttatggatctgaaatttgctgtgaaccatattccttttaggaaaaatggtataaaatttacttttaaaatacaggttgttccttaacaattttcaactctgatcctttctataaacaatatactttaatgtatctattggtactgaattatttattccaaaggttctagaattctgcttattgtttttctgttagatgtaaagatttgcatagtttgaaaaaaatgttttgtgaatataaattacactttgccaggtttcttgccagcttatggtataccactgaattccagatcattcactagcatkactcttctgatgaaagagcaataagaaaggccaaatatatatatatatagatagatagacagacagacagacagatatagatatagaaagatagatatacagttgacccttgaacaacacgggattgaaatacacgggtctgaactgtgcaagtccactaatacacacattttcttccacctcagcctactcaacttgaagaggatgaggataaggacctgt

SEQ ID NO: 363524 - DNA, 628 bp, Homo sapiens
tcttgccattcttgaagttcctgtcaagaaagagaatcttaaaagtcactagaagataaagtttttatggatctgaaatttgctgtgaaccatattccttttaggaaaaatggtataaaatttacttttaaaatacaggttgttccttaacaattttcaactctgatcctttctataaacaatatactttaatgtatctattggtactgaattatttattccaaaggttctagaattctgcttattgtttttctgttagatgtaaagatttgcatagtttgaaaaaaatgttttgtgaatataaattacactttgccaggtttcttgccagcttatggtataccactgaattccagatcattcactagcatgactcttctgatgaaagagcaataagaaaggccaaatatatatatatatagatagatagacagacagacagacagatatagatatagawagatagatatacagttgacccttgaacaacacgggattgaaatacacgggtctgaactgtgcaagtccactaatacacacattttcttccacctcagcctactcaacttgaagaggatgaggataaggacctgtatgatgatgcacttccacttaataaacagtcaat

SEQ ID NO: 363525 - DNA, 469 bp, Homo sapiens
gagaagggaaggcaaggatccatacacacatgagaggtggccgttggtgagtgcaggtatgtaaagtggcatgtgggaggctgcggtgtggggagggctcaggcaggctagtgcatgtccatgagggctgctttgctggagcattctgctggtcaggtgcatttgccagcacaggagctatgatctaggcccccaggaggtatctgggtgctttattgtaagcaggcacaattgggctggggctcccacagaggcgagcagaccaaggggttctcaggtcagacagggctcatctcattggcaagactgccctgcagagttcaggtacaatagtttctctggggctaaagtctcctgtgggagcaagttgagcctgtggggatggctgtccctggccatgctcygctacagatgcttccacaccaaaccctctaggctcaacactggctggagttctgctcctaccact

SEQ ID NO: 363526 - DNA, 607 bp, Homo sapiens
tgtgtccataagtcagttattcagataatgaaaaaaacatttaaacatccaccttggtatgaatttttggtttccgtgttttaatttaagccaaaatattttttggtttgaatttattatttcaataaataatagtgaaattatttcactattccactttgctttgcatgtgtgaattaagccagtggaagcttcaggtgtaatagaatttgatggcgttaataaatataaaartgaatttgcacaaaaaatatgagatgaacagtaggaacacctggcatgggacagaacatccttgttagtatgcaggtaaattcagttactttcattttcttttctcccctatacattggttgtcaggtccgatcgatcatcaagtccagttgtttctaacacctagctctctccctaaactacccgctccttcctctgcactgagacataatctcttgcccccaaattcagtggcctctgaagaggtgcttttagactctgccctcctctaatccccattgtctgtcctacattgacttctaaaatatggatctggccttgtcaataccctgactagatgctttaatgcctttaaggataagaactgaaatct

SEQ ID NO: 363527 - DNA, 537 bp, Homo sapiens
cacacagacatcacttctcttctgggtttggtggtatgaggcttagattcctatgaccatccccctgcaacaaggagaaccttcctgaggctataaacaagcactttaaggaggaagagttgagagaaggagcctagaaacatcagtgaacccccaaatcagggcaaggctaaagctagttctgccttctaaactactcttcatgagccaaaaacaaataaaagttaactaactgaaactgactaaccaccattttttggataacccagcataggtaaagtttgtttatttacatttatctttgcatttcaacatrtaacagccacctggggacatcatagttattcagtaagcgtttatgaaaagatgggaaggaaggagacttgtagtttttcctaagtattttctgcttggctatgtaagtagcaaaactttgctctgatatttttagatttcaatccttttgtattttatttcttggaaaaaatatggaaaaaatgtttcagtaaaagcaaaggacttacacaagaaaaaatc

SEQ ID NO: 363528 - DNA, 587 bp, Homo sapiens
tagctaacttccatagcttctcttttctcatctcaaacaaatgagctactagtccctacttctcagaattgttataaaaattaaatraaataatgtcaaaaacttacttagcctgtcatgaagtaggcactcagtaaatgagaacaattacaatttagttactcttataataattatgattatctgtttaacaattaactcatcggtaataggtttcaaagcaacgaataatcactagcggtggataaggaatagacatttccacaaggaaggctgtacgccctgaaagaccagtgtgtgaagatcctggcttgtggcgggcgacagcctgattgtttttcggccaaacaaccatcaatcccattatcccctcgtgacaagaatgaatgtttcaacctttagtacactcactgggaagacatgactagatcagaagttttgagaaattagttttggcttcaattgagctgtgaaaacttgttaaatcatttcattctgttaccattcaagaatacggtcgggtggtttcctgatcctttccagcctgtagatggccttggaatcatttagctgaatgccctaccttg

SEQ ID NO: 363529 - DNA, 559 bp, Homo sapiens
gagtaacatgctgcacagctttgtagtctaggagccatgagatgtaccatatagcctaggtgtgtagtgggctatgccatttaggtctgtgtaagtgcaatctatgatgtttacacaatgacatgacaaattgcctaatgatacatttctcagaatgtatctctgttgctaagcaacatatggctgcatttattcagagatagattgttgtgtgtaatatacagtgacactgggtataaaacaattaataaagacaaggagcttgacttgtggaatttacatgagagagagagagagaaaacaaagatgtcaacatccaaataaatatacacacacagcttgtgctatgaagtaaacacgagggatgatgagataaagaataggaatgcagggagtggtttttcttaataagaagtcagaacctctctgatctaagtagtagacacaggatatgtttatttgtgagaattacatatgattgtgtatcttctgtgtgyatatatcagtaaaaaggtttatttacttttacaaaaagtttgcattacaattgtatgcacac

SEQ ID NO: 363530 - DNA, 619 bp, Homo sapiens
aacagccacttggaggaggtaggtaaagcatttcaggcaaaggaaagcacatgtgcaaaggccctgaggtggaagagaaaatagacacagtagagctagatgcaaaaaacttccaatcccccaaatcattgtgtttacwagttacaaaacaatacgtatagttgagcgaggtgggggtgttgaattcaaaagcaagagggctattccccaaaatgtcaacagtcatttcccaaaacaaaaaaaaaaggcaactttaattctcgtttttccatttcttgtaatttctaatatttcttcaattaacattaagctactgatgtaattaaaacgcaactattctgaaaaaccctgtttactttcttaagaaaaataaaatacacattcaaagaaaaaaatggcaattttatccatttagtaaacttcatttagacttttaaaattcaaaatctgagataattctagacacactggactgaaaatttcatgctatcatctatgaaagtacattatttagaagtaattcaaagaaaatgatttatatgaggggctaaaaccaataaactcctttcaagctactcttttctaaccttcctgttcaaacattgtgtgtactgaggac

SEQ ID NO: 363531 - DNA, 556 bp, Homo sapiens
tcttattttgcattgccttactgattttccaaggtaaggmagaacctacccaatcaaatgaaagagtgctgacatgaattaaatctggttaaatgtctgatggtctgattgtcctcaatgattatagcattcaatggtattttattttcatttacccttccatttgtttcttataatatttcccattttgttagcctatgtatagatacgcttttcattagtgaatgtccaattatcatgctttcattttgggtggaagactgattagcatggattaattaaggtaattaaataattatagttactgtaatgtaactatatagaaatgaacattagcatggcctaattatctagtatttaggaacatatgctttggagaggtgatttaagtgggcttgaatttgaccttccatacttactagtaatgtgtgcttttacaagttacttaatctttatgagccttaatttctcatcagtaaagaggagatagtagtccttacagagtttatttttaatagacacatttctataattgtactatattttacacatggta

SEQ ID NO: 363532 - DNA, 556 bp, Homo sapiens
tcttattttgcattgccttactgattttccaaggtaaggaagaacctacccaatcaaatgaaagagtgctgacatgaattaaatctggttaaatgtctgatggtctgattgtcctcaatgattatagcattcaatggtattttattttcatttacccttccatttgtttcttataatatttcccattttgttagcctatgtatagatacgcttttcattagtgaatgtccaattatcatgctttcattttgggtggaagactgattagcatggattaattaaggtaattaaataattatagttactrtaatgtaactatatagaaatgaacattagcatggcctaattatctagtatttaggaacatatgctttggagaggtgatttaagtgggcttgaatttgaccttccatacttactagtaatgtgtgcttttacaagttacttaatctttatgagccttaatttctcatcagtaaagaggagatagtagtccttacagagtttatttttaatagacacatttctataattgtactatattttacacatggta

SEQ ID NO: 363533 - DNA, 526 bp, Homo sapiens
agtttacagtctgaaaaggaaattgtgatgcacactaaaattcataggttgtataggaaaatggcacaattgtagtccctggagttaggaagaggtgaatcagaagatgggcaacagagctcctacctccacaactataggggaaataagatgcaaacaaacattagaagggagaatgttataagactaccaggagaagaaaccctggtcaaagcataaaatataattatatattgaccaagttcaatgcatttatyattcttatcatcatctgccagcatcatttgattcagatatttatacccaccctaaatgtaccaaactgtcagttcaattagcaaactatgaattttgagaattcatctcacctcaaactctagttgtgattcttattgaaattatgtatataagcatcacacacacgcacacacacatacacatatacactcacacacacttctaataatttaacttccaaagagatacacaagttgtattcttcactaggaataaattatgtgaaagt

SEQ ID NO: 363534 - DNA, 526 bp, Homo sapiens
agtttacagtctgaaaaggaaattgtgatgcacactaaaattcataggttgtataggaaaatggcacaattgtagtccctggagttaggaagaggtgaatcagaagatgggcaacagagctcctacctccacaactataggggaaataagatgcaaacaaacattagaagggagaatgttataagactaccaggagaagaaaccctggtcaaagcataaaatataattatatattgaccaagttcaatgcatttatcattcttatcatcatctgccagcatcatttgattcagatatttatacccaccctaaatgtaccaaaytgtcagttcaattagcaaactatgaattttgagaattcatctcacctcaaactctagttgtgattcttattgaaattatgtatataagcatcacacacacgcacacacacatacacatatacactcacacacacttctaataatttaacttccaaagagatacacaagttgtattcttcactaggaataaattatgtgaaagt

SEQ ID NO: 363535 - DNA, 526 bp, Homo sapiens
agtttacagtctgaaaaggaaattgtgatgcacactaaaattcataggttgtataggaaaatggcacaattgtagtccctggagttaggaagaggtgaatcagaagatgggcaacagagctcctacctccacaactataggggaaataagatgcaaacaaacattagaagggagaatgttataagactaccaggagaagaaaccctggtcaaagcataaaatataattatatattgaccaagttcaatgcatttatcattcttatcatcatctgccagcatcatttgattcagatatttatacccaccctaaatgtaccaaactgtcagttcaattagcaaactatgaattttgagaattcatctcacctcaaactctagttgtgattcttattgaaattatgtatataagcatcacacacacgcacmcacacatacacatatacactcacacacacttctaataatttaacttccaaagagatacacaagttgtattcttcactaggaataaattatgtgaaagt

SEQ ID NO: 363536 - DNA, 538 bp, Homo sapiens
ctcaaaatgtgtgccaaaatactcaatacaaatttgaatgactgtatcttttaaaaaggaaaatgatacatgaggcacataatattccctaggttataagctactagtactgcaaaaatgaacacacagacagaaattcttcaatatgtctaacataaaatgatgtacaataaagtaagaactagaaaaaataygatactttgttaatgttggcttttgggaattatttatcagcaaaaccttatataggcaatgtgaagatgttcaactttttctaagaatacttctgaaagagcattctaaatagaaatagcccctatttctgatcacgagttttaccatttctttactaaatcacagatattgactctccactaaacatcatatgtgatttttttctaatatcagttgaagacagattatatgtcagatgtcatatttaataatttagtataatctcacgtaatacaagtacctttaatgtgggtaccactaactttaattttacataagattaaacgaattcaattaagttagg

SEQ ID NO: 363537 - DNA, 610 bp, Homo sapiens
gggcagtttcatcactagtaaataggtagaatatccctaacccacaggctgtttcaagaatgaagtttcaactgtgtgctggtgccatgctaggcaacgaagttgcagtggtgagtaggaccacactgctatccatgcaaagagaatttactgtctaaatgcttagttagaaaagagagatattgcttcttgtctcataaaaacactgatagtaagctacatgcgtccaccagaataataaatgaagatgccaccaagatcacagtagtatatacagaaagcawcaggattcaataagacatcaataatatttcttgcacactaggaattgggtaagtcattatacagataaaagaaacagagaaaattgtgcatcagttttgacagatacacctgtatttcacaaattgtggaaaaaagttatccaactgtagatgacttagatgctcctgaaaatggtaaaaattatcctgtttacactttgagcatcacactgtatgctgcttacaatgaaaagaagctattggtaacgtgtcagcctacagctcactagagtaaaaaaataaaccaaacagtaactgtgccagactgttctagtacagcatctgag

SEQ ID NO: 363538 - DNA, 610 bp, Homo sapiens
gggcagtttcatcactagtaaataggtagaatatccctaacccacaggctgtttcaagaatgaagtttcaactgtgtgctggtgccatgctaggcaacgaagttgcagtggtgagtaggaccacactgctatccatgcaaagagaatttactgtctaaatgcttagttagaaaagagagatattgcttcttgtctcataaaaacactgatagtaagctacatgcgtccaccagaataataaatgaagatgccaccaagatcacagtagtatatacagaaagcaacaggattcaataagacatcaataatrtttcttgcacactaggaattgggtaagtcattatacagataaaagaaacagagaaaattgtgcatcagttttgacagatacacctgtatttcacaaattgtggaaaaaagttatccaactgtagatgacttagatgctcctgaaaatggtaaaaattatcctgtttacactttgagcatcacactgtatgctgcttacaatgaaaagaagctattggtaacgtgtcagcctacagctcactagagtaaaaaaataaaccaaacagtaactgtgccagactgttctagtacagcatctgag

SEQ ID NO: 363539 - DNA, 593 bp, Homo sapiens
accccctcctctgtgatttcattgccacctggttaaggtgggataatctctaaggctctttccactatgctgaagaacattaacttctattgtattttctactgatgaatgggacttcatatccatttattcattgccgtgcctttacacagactctgggtctccaagtaatgctggttgacctagttggagggtaaagcccttgaccatggtcagaaaactcaactatctaacttaaataaggctccaactcaccatcaatatggagattagtttcaactttttattattccaaggttaayaccaaccaggttaatggggtcaaaattgcatttgttgggtcagagcatgaagtggtctttagatgaaaagacaattgttaaaacccacaaagagagctaatgataatgagatgcttaatggtgtgatggaggagagacagctgtaacactctcttaatggaagttcaaatgatttttggtgaactttctctaactcctttgctcttgcattatgtataatttatcacatctaaagctctgagcccaatgtataataagcctggattttgagatatactttcaggcactctt

SEQ ID NO: 363540 - DNA, 605 bp, Homo sapiens
tcctaaatgccagcagggctaaccaccccaaggtggtcaaaggacattgttttggaggtcagggtaaggcaggaatcgcaagaagtataaacacctactccccttctacccagatgccatctttagcggataagcagagatgtttgaggtagagcaatctctgagagagagcaggaaattatatttaaataatctaarccatttttaaaagtccttgactagttattggtttaagttttatttttttgaccacctatccccaagttatgtgaataacctgaaaatggggttgtaggaggcagatagttacaggcaatatttaaaagctacatttttccctcctgtacctaagatgagtgagaattataagagagaccctgctacctacaaggcatgcacaatttacatttgtatgattactagagtttacaaaacatatccaaatgtatttttgcttttagaaggaaattatcaaggtagaaaatatagatgttgtcaagagatcttcataaagcaatcttgcatgaggttagtttaacagtcttgaaatagcagaataatgactgagatcttgctctactacatgtggaaacgtgccatgcagc

SEQ ID NO: 363541 - DNA, 621 bp, Homo sapiens
aacatttttagagacacggtttccatctcctggcctcaagtaatcctcccaccttggcctccagagtcctttggagtatttttgaactagtgacaaagtactttasagattacataatctactccattctgttttataatggaagatccttagtctcaagggagtaaacttaattgtcccacccaatttctaatcatataagtgacagtccagtctaccgaatccttaagtccacacagttcacaacataagtataattttgcctacttgtttattaacttatcatccccatatgatattcaataagagttacagtagacgaaggacagacttgtttccaattcttttggtccagatcttctgatctggaataagatcacctgggtttgtaacctagctctgccacttactagctgaacaggttacttaaccttatcatgtatctttttccgtatctttaaaatggaaaatttagtaccaacctcttaggggtgtatgttgaaatgcatagcagagagagtgtttaataaattttagccacgacagtgattagtattagcattatccggccaatctgtttctaaataaataggccatagtagaattttcatcagatctttt

SEQ ID NO: 363542 - DNA, 621 bp, Homo sapiens
aacatttttagagacacggtttccatctcctggcctcaagtaatcctcccaccttggcctccagagtcctttggagtatttttgaactagtgacaaagtactttacagattacataatctastccattctgttttataatggaagatccttagtctcaagggagtaaacttaattgtcccacccaatttctaatcatataagtgacagtccagtctaccgaatccttaagtccacacagttcacaacataagtataattttgcctacttgtttattaacttatcatccccatatgatattcaataagagttacagtagacgaaggacagacttgtttccaattcttttggtccagatcttctgatctggaataagatcacctgggtttgtaacctagctctgccacttactagctgaacaggttacttaaccttatcatgtatctttttccgtatctttaaaatggaaaatttagtaccaacctcttaggggtgtatgttgaaatgcatagcagagagagtgtttaataaattttagccacgacagtgattagtattagcattatccggccaatctgtttctaaataaataggccatagtagaattttcatcagatctttt

SEQ ID NO: 363543 - DNA, 621 bp, Homo sapiens
aacatttttagagacacggtttccatctcctggcctcaagtaatcctcccaccttggcctccagagtcctttggagtatttttgaactagtgacaaagtactttacagattacataatctactccattctgttttataatggaagatccttagtctcaagggagtaaacttaattgtcccacccaatttctaatcatataagtgacagtccagtctaccgaatccttaagtccacacagttcacaacataagtataattttgcctacttgtttattaacttatcatccccatatgatattcaataagagttacagtagacgaaggacagacttgtttccaattcttttggtccagatcttctgatctggaataagatcacctgggtttgtaacctagctctgccacttactagctgaacaggttacttaamcttatcatgtatctttttccgtatctttaaaatggaaaatttagtaccaacctcttaggggtgtatgttgaaatgcatagcagagagagtgtttaataaattttagccacgacagtgattagtattagcattatccggccaatctgtttctaaataaataggccatagtagaattttcatcagatctttt

SEQ ID NO: 363544 - DNA, 621 bp, Homo sapiens
aacatttttagagacacggtttccatctcctggcctcaagtaatcctcccaccttggcctccagagtcctttggagtatttttgaactagtgacaaagtactttacagattacataatctactccattctgttttataatggaagatccttagtctcaagggagtaaacttaattgtcccacccaatttctaatcatataagtgacagtccagtctaccgaatccttaagtccacacagttcacaacataagtataattttgcctacttgtttattaacttatcatccccatatgatattcaataagagttacagtagacgaaggacagacttgtttccaattcttttggtccagatcttctgatctggaataagatcacctgggtttgtaacctagctctgccacttactagctgaacaggttacttaaccttatcatgtatctttttccgtatctttaaaatggaaaatttagtaccaacctcttaggggtgtatgttgaaatgcatagcagagagagtgtttaataaattttagccacgacagtgattagtattagcattatccggccaatctgtttctaaataaayaggccatagtagaattttcatcagatctttt

SEQ ID NO: 363545 - DNA, 596 bp, Homo sapiens
ttttacttttacagttgtcagaattcttttgctgggttttttctcatctgtgttagctgatgtttctttaaattttgaagttgttgtccgttggatggtgctttttgcctttacgctttttgaaacctttgagggtctgactgtggtaaaagttgtgtttggttgatggagctcatttctgggtgctttcatggaccagggctcagctcggcatccctggactggtaaaagttgtgtttggttgatggagctcatttctgggtgctttcatggaccagggctcagctcggcatccctggactggtaaaagttgtgtttggttgatggagctcatttctggrtgctttcatggaccagggctcagctcggcatccctggactggtaaaagttgtgtttggttgatggagctcatttctgggtgctttcatggaccagggctcagctcggcatccctggactggtaaaagttgtgtttggttgatggagctcatttctgggtgctttcatggaccagggctcagctcggcatccctggactggtaaaagttgtgtttggttgatggagctcatttctgggtgctttcatggaccaggg

SEQ ID NO: 363546 - DNA, 582 bp, Homo sapiens
gaaatcttattataaaagaatcattattctggctctcctgcraagaatattgttggagaataagacgtaagaaaggtaacccgtttgttgagagatgatggtttaggtcagtgtttggcaaactatggcccatgacccaaatgtagctcattgcctgagagcttagaatgatttttaacattttttaatggttcccctataaatggttatagaagtacctacataatatttttgatgtagcctcttggctggcaaagcttaaactgtttacctatctaacttttaaagaaaaagtctgtcaacctctggccttggcaatgatgttaggccttaggcccctgctgtttaatcatttattattcctccatgcaaatttttattctggagaagaaagagagagaaatgatgattgccagtcggaatgaaggacaaaacatgaagaagagacatatagttggattcaggatgtattttaaaggccaagtgacaagatttgcttagggatcagacacagtgtgtgaaaaagaggagtcaaaaatgactccggaagtttttatctgagcaactaagtcgatgatggtg

SEQ ID NO: 363547 - DNA, 582 bp, Homo sapiens
gaaatcttattataaaagaatcattattctggctctcctgcaaagaatattgttggagaataagacgtaagaaaggtaacccgtttgttgagagatgatggtttaggtcagtgtttggcaaactatggcccatgacccaaatgtagctcattgcctgagagcttagaatgatttttaacattttttaatggttcccctataaatggttatagaagtacctacataatatttttgatgtagcctcttggctggcaaagcttaaactgtttacctatctaacttttaaagaaaaagtctgtcaacctctggccttggcaatgatgttaggccttaggcccctgctgtttaatcatttattattcctccatgcaaatttttattctggagaagaaagagagagaaatgatgattgccagtcrgaatgaaggacaaaacatgaagaagagacatatagttggattcaggatgtattttaaaggccaagtgacaagatttgcttagggatcagacacagtgtgtgaaaaagaggagtcaaaaatgactccggaagtttttatctgagcaactaagtcgatgatggtg

SEQ ID NO: 363548 - DNA, 584 bp, Homo sapiens
tgttgatttgcaaagtgttttaggtaacagttactaaccataaggcatatctaaagttgcaaagaaaaattaaaaagctaagtcatagcttgatatacagccaaatctttcagaatattaagaaaataaacctctacttctctctgacttcttttctctstttcctctttcctcagcctcatcttccttctttatgacctttcctttatctatctttctctctctgccttccctttctcccttggtacctctccttccttctagcctcacccccaagaccttttataaaaaatccctgtccaccaaagccattgtatagaaaaaattagaataacagaaggattcattgagtcattatactagtaatttatgaagagaaaattggtgaatatcttatcttccagccttaaaggggaaattacattgctttaaacttgtacattgttagttcctaattgtttctgtctaggaaatgacccagaatcatctaatcagaataagaaaatggcattactctcccactgggactccaatttgacattaaaattagtatattaattttaaaaattatctagcatttatgt

SEQ ID NO: 363549 - DNA, 623 bp, Homo sapiens
attgaaggctgaatgcagccctgtgagtgacccaagatgacaccatgtagagtggcactgcctaggtgagaccagcccaaatacctgtcaaatggtcgtttttgaagctactgatttttagggttgtttttatgcaaaatagataaccaaactacaaaatataagtgaagatatgccagaggaaatttaaccacagaaatggataatatgttttaaaatcagaaaagaggctattttgataaattctttaccaataaatttgaaaacctggatgaattggaaaattttgcttaaaaatataacttacaaaaaaaaaatcacccccaaagaaacagaaaatctaatacagactgatttacagagaagaaaattcaaatagatcattctccataaaacaaatttaggaactattgctaagaaaacctagatccagacagcttcatagagaattcttccagactttaaacattagataattctaatgctaaactattctaaaacttagaaaaggagaaaaatattcaaactccttcaatgaaataaggatattgtcratcccaaaacctaacaaagattgtaccaataagaaaaccgtaggtcattctcacgaatgtcaacacaaa

SEQ ID NO: 363550 - DNA, 567 bp, Homo sapiens
aaaactgtgatagcacatcataactgtgatatcccacataacttgtgatagcaaaaccagacaagaacacaacagaaagagaaactacaggataaatcctccaatgaacatagatgtaaaattcctcaacaaaatactagcaagccaaatccaaaatacataaaaaagataatacacctgatcaagtgggatttatgtcaggaatgcaagtatggttcaacatatgcaaatcaatcaatatgatacattataatcaacagaatgaaggagaaaaamcatacgatcatgtcaacaggtgcagaaaagagcatttgataaaattcaacatcccttcataattaaaaactctcatgaaattaggtatagaaggaaaataccttaacaaaataaaggccatatataataaacccacagctaacatcataccagatggactggaagaagacaaagatgcccactctcaccactgttattcaacatagtactggaagtgctatctatgtacagcaattagacaagagaaagaaataaagggcatccaaattagaaaggaggaaatcaaactgt

SEQ ID NO: 363551 - DNA, 592 bp, Homo sapiens
ggttgacttcctcttgggtattgattgcagaacagagaatactggggtagtcaagaacaggaagaagaaaagagagaagatacagagaaacagagaagggctagaaagacctctgcaagtccacagggaataatgaaataagaacaggcacgagtgggtaaggaattgtggacaaattgaatggtatattcaaaagacatggagcttgtttcagacatttacagtagttagaacttgtataggcatgaactgaaggatggagtttagtttcactatttgcttctcctctcattccagacctctaaatcttgttgctgttgttttaagggctacttcttgggccacttttattttctatttatattctttacttagcaacttcatttttactccagacttcaaggttatcttwatgttaccacttttcaaataaatgtctccatctagccctctgctctgagctgcagactcaaatattcccctgcctgtttgagctcaccatctgtatgtctcactagcacctccataaacatgtctgaaatggaatctttgactcctatgccatttctgctccatcccaaaaaagaatacc

SEQ ID NO: 363552 - DNA, 621 bp, Homo sapiens
gtgtttgtctattaaatcacaagctcagggaaccagtgattttatataactgttttcctgggctgaataacrttctccccaccatgctaaagtgtatgtgttcgaagctccaatacccagtgtcttagcatgtagctgtatttggaggtaagtcctttaaagaggtaatgagcttaaaatgaggccattagtgtgggccctaatccaacatcactgggtccttataagaagagattaggacatagagagagacacctggggtacatatgcacagagggactaccttgtgaagaagcagcaagagggacgccatctgcaagccaaggaaagaaacctagaaggaaaccaactctgccggctctttgatcttggatgtctcacttccagaactgtgagaatataaatttatgatgttgaagccaccagtctgtggtattttgttacggcaacccatgaaaactaatacaagtgttattaggagtaaggagttgtttaaatctggagtcagaggctgcctcaaggaacaggtaggaggtgagatagaccgaatttatgtggaaactaggaggaggacattctaggagagaagaatgctggtaaaaaacatgcaagagctactcc

SEQ ID NO: 363553 - DNA, 403 bp, Homo sapiens
tggccaaactcctctcagaccgtccccagccaaactcctctccatgcttcctctcttcttgatgttcagacacttctcccttctgtccttctctgccacaccactctcttcttctgtcagtggaacctgggggttttttgggcacaggatagggcatgtggtgggccaaaaggcaacattccggtgagaaaacagggatatgaagttctcatttagggctgtaggtccagtcttgagggtggaactctagccatggaccccacacttttctacccagcattgccctgcctcttgtccayatcataaggttgttgcagagccagttcctaggccaggaccaaagaaatccctccatccccttccagagtatttattcattgcaaggggaaaaatacagccttag

SEQ ID NO: 363554 - DNA, 554 bp, Homo sapiens
tgtatcgcaaaaaaattaaccttgcccgaagagaggtctggcctttgatctaactaagattttgggaggtgagctctaggaatgtcatgcctgaaaagagtatctttgcttatctggggtccttagatcacaccaaattgtataacaatgtaatctagagtgaggactttgggccacaccagatagtctaataatgtgaattagagtaggggtttggggccacaaggtatcagcttgactctgctgaagtctgagattagctgtgtgagcagccatccaggtttatgtgacctaatacaaatgctagaaactaaggctcaggtgagttttcctggatggtaatgcttcatatatattgccataaattattcatgggaggagtttacactgtccattatctcattaggagaggacaactrgaagccacaggtttggaacccttctaggctctaccccttgcatctctcctgttagctgattttaatttgtatccttttcactgtaataaaccacaaccatgagtataacaactgtcagcagagtctgtgagtttt

SEQ ID NO: 363555 - DNA, 554 bp, Homo sapiens
tgtatcgcaaaaaaattaaccttgcccgaagagaggtctggcctttgatctaactaagattttgggaggtgagctctaggaatgtcatgcctgaaaagagtatctttgcttatctggggtccttagatcacaccaaattgtataacaatgtaatctagagtgaggactttgggccacaccagatagtctaataatgtgaattagagtaggggtttggggccacaaggtatcagcttgactctgctgaagtctgagattagctgtgtgagcagccatccaggtttatgtgacctaatacaaatgctagaaactaaggctcaggtgagttttcctggatggtaatgcttcatatatattgccataaattattcatgggaggagtttacactgtccattatctcattaggagaggacaactagaagccacaggyttggaacccttctaggctctaccccttgcatctctcctgttagctgattttaatttgtatccttttcactgtaataaaccacaaccatgagtataacaactgtcagcagagtctgtgagtttt

SEQ ID NO: 363556 - DNA, 554 bp, Homo sapiens
tgtatcgcaaaaaaattaaccttgcccgaagagaggtctggcctttgatctaactaagattttgggaggtgagctctaggaatgtcatgcctgaaaagagtatctttgcttatctggggtccttagatcacaccaaattgtataacaatgtaatctagagtgaggactttgggccacaccagatagtctaataatgtgaattagagtaggggtttggggccacaaggtatcagcttgactctgctgaagtctgagattagctgtgtgagcagccatccaggtttatgtgacctaatacaaatgctagaaactaaggctcaggtgagttttcctggatggtaatgcttcatatatattgccataaattattcatgggaggagtttacactgtccattatctcattaggagaggacaactagaagccacaggtttggaacccttctaggctctaccccttgcatctctcctgttagctgattttaatytgtatccttttcactgtaataaaccacaaccatgagtataacaactgtcagcagagtctgtgagtttt

SEQ ID NO: 363557 - DNA, 526 bp, Homo sapiens
cggttttaaaatctcacaccacatacaacagttaactcaaatggattatagatatgastttaaaaaattaaaagtagaaaatttctgaaagaaagcattcagcaaagatttcttaaaatagggtataaagagtaaacatgacagtggaaaaaaatcagcagtttgaacttcagaattaaaaactttagtctttcaataatcactcataagaagctatcaagggagtaaagagacagcctacatcatgggaggaaatatttgcaaacaatacatctgacaaaggtctaagacccataatctataaagtacttaaacaaatcaacaagcaaaaaagaaataacatcattaaacagtaggctaaggatatgaacagacacttctccaaagaagtaatacacacatccaactaacatgaaaaaaatgctcatcatcactaataatcagagaaatgcaaatcaaaaccacagtgagttaccatctcacaccagtcgaatggcttttgttaaaaagccaaaaataacagatg

SEQ ID NO: 363558 - DNA, 526 bp, Homo sapiens
cggttttaaaatctcacaccacatacaacagttaactcaaatggattatagatatgagtttaaaaaattaaaagtagaaaatttctgaaagaaagcattcagcaaagatttcttaaaatagggtataaagagtaaacatgacagtggaaaaaaatcagcagtttgaacttcagaattaaaaacttyagtctttcaataatcactcataagaagctatcaagggagtaaagagacagcctacatcatgggaggaaatatttgcaaacaatacatctgacaaaggtctaagacccataatctataaagtacttaaacaaatcaacaagcaaaaaagaaataacatcattaaacagtaggctaaggatatgaacagacacttctccaaagaagtaatacacacatccaactaacatgaaaaaaatgctcatcatcactaataatcagagaaatgcaaatcaaaaccacagtgagttaccatctcacaccagtcgaatggcttttgttaaaaagccaaaaataacagatg

SEQ ID NO: 363559 - DNA, 583 bp, Homo sapiens
acagggtctttgttgatttcattaagtgccagattttggtcacccagcttgcctctgagtagacacacctcatttccatgagtattctaggaggacagcatatgtcatttgccaacacaccaggcaacatccacataataaaatgcaaccgccattgaaactgggctaaaaaccaatccatccagtgtttaatgagtaacattagcacactcttaaaaaacactaataacaaatttactgttgattttagtgttgatggcaggtatccaaaacctaacttcctactaaattcattttagtaaaagcaaaaaataatgaatgaaataaatgaatgtaatttcaagttattgccagaagttagacttttattawcatggcattaactcagaagagaaacatcttacttttcccaaattacaattttattttagggaacccttttcctcctactctgaatttcaatctaatattgttttcaaattagcttttattgttttacttttaaagtaatattattgtatgcttttaaagttttactccaaaaggaagaaaaataaaaaaaagttgcagctttaaaaaattt

SEQ ID NO: 363560 - DNA, 525 bp, Homo sapiens
gttacatgtaaaatgtttagtccaatgcttatcacagagtaagagctaagtattagcttctccttttccccttatgatagtttacatgcctaatgaagtttgatgtgaacttgcctgaagatagaaaaattaaatcattttgatatactctttaattatgttggtggctacatatgacttaatacagaaagacatagagatagtgtgttataatgatagagacatagaagagtgaacaatatttagagcaaaatgatctaagcttatctaagtttaactctcagaactacttaatcatttgcccttgagcaatgttttctgggatttatttgttccatctgtaatgagagatggattaggttatatatatttaatgttcaacaagtcwttaaacacaattctgagactcaaattccagcttcatttactcccaatttacagtagtgatttaaaacatgaggagtgttcactttagatgattcattgttgaaggagtgtgatggcaaactatgaacagactttctt

SEQ ID NO: 363561 - DNA, 515 bp, Homo sapiens
ttttaactttccttaatcccttatttgtcccacatactacagaagagattgcaatkctcaagtattaaattacaacccagagaaggcaagggccatgtaaattataaaagtaataaataaaattaatctgatttatatcagaagagatacaaaatctggacaaagctatccatgttaggtaagaagaaataaaggatcacagaaacaagatcaatatgatatggctaaggggtagggcagcgataacagaagagggtgccaaaaccatgaagccttcagcctacaataaagtaaagcctaaagagttagaaaacgttcttctgagtgttttacgctgaggtgaaacttcagtagtaggcattttcaacttgaataaaaggtattttctgtaaaatgataaaatgagatgagatgacatcatagttaatacaatgattgttgtgtgtggtttttttttttttttggcagcttagatatattcacttattatactttatcttcacagcatccctata

SEQ ID NO: 363562 - DNA, 532 bp, Homo sapiens
caggtggagtgagataaagaaaatgtcgtacatatacaccatggaatactatgtagccataaaaaaagaatgaaatcatgtcattcgcagcaatgtgggtgcagctgaagtgccatgccaaataccatatgtcctcacttataagtaggaactaaacattggggacacatggacataaacaagggaacaatagacacttggttaatacaagagcagggagggagacagcagtgcaagggttgagaggctacttattgggtactatgcttgctatctgggtgatgggttcatttatacatcaaacctcaacattatattaaatacccctgtaacaaaccttcacatgtacccctggaacctaaaataaaagttgaaattaraaaaaaattgagaattatatcaaccactaggataaataatttggagttctcccaaagccctactctccaaaaaaattgtcatgatttgacctgttttgcagttccctggaaaacaccactcagtgtttgtcttttttgatctatttcaaaac

SEQ ID NO: 363563 - DNA, 592 bp, Homo sapiens
aactggaaagtgacccaaaagccaggagacagatttatgtgacatgcacagtaaggtgatatgtgcctcttggcccacagagcagatttttggccagagcttgatgagtagatacggcagtctggagacagaacctgccgttgtgctgtgcacgagtaggcaggcttgtttctttcatgcatggcccagaaaaaggacaaccctcattttagagagctgataaaagtgtaaaaaaaaaaatttatccacatagagcagctctatgcagacaccaaggcaaccagcagtcctggagggagggtgcagcctgccaagacgattgtcagaaatggttgccagagtcagatgctatggatgtaggaatactgtctgtagcttggagtttggaacctacattaagttcaaagacgagcggcaatgactgattcaattcccaggggaacacmcaagctatgttatctataatttatttgactttaaaggcaatctttgatttcgaggacatacacaaggaatgatgtttcctctgtaagagaatctgccttagagcgtgtgtgctctggatctctctaaagatgagcatgaagattga

SEQ ID NO: 363564 - DNA, 592 bp, Homo sapiens
aactggaaagtgacccaaaagccaggagacagatttatgtgacatgcacagtaaggtgatatgtgcctcttggcccacagagcagatttttggccagagcttgatgagtagatacggcagtctggagacagaacctgccgttgtgctgtgcacgagtaggcaggcttgtttctttcatgcatggcccagaaaaaggacaaccctcattttagagagctgataaaagtgtaaaaaaaaaaatttatccacatagagcagctctatgcagacaccaaggcaaccagcagtcctggagggagggtgcagcctgccaagacgattgtcagaaatggttgccagagtcagatgctatggatgtaggaatactgtctgtagcttggagtttggaacctacattaagttcaaagacgagcggcaatgactgattcaattcccaggggaacacccaagctatgttatctataatttatttgactttaaaggcaatctttgatttcgaggacatacacaaggaatgatgtttcctctgtaagagaawctgccttagagcgtgtgtgctctggatctctctaaagatgagcatgaagattga

SEQ ID NO: 363565 - DNA, 621 bp, Homo sapiens
ccctgcttaggtttgaatgtagggcattctatgaacctcagaaaaaaacagctggtaaggaaagggaggaacaaataggccagaactaagagatatacattggctacggaactggcttttccaaagattctgatgagcagagcaagtcacaaattccagttggcagacttaggtatgatttttcctgktgtagactttcaagaggaaatgatgagattgtagaagcatgtcaaaaaagattgtaggcaccgatgatgctcatcaagtaaatggcaacaccttcatttggttcacattcccattaaccactctgtgatggccaagtgtttggactggatgtaaacaggattctacccaacaattagaaacatggagagagtctccaatgtagatctgacaagcagttcatctctagatatataatagacttcaaattaagagcataacttcttgaagtttgagctcttcatgtttaaggtttggtcctaactgggtttaatggagcagaaactgctaaatgaaggacttaagtacttacttaaataagtaagtatatagtagatatatatatatagagagagagagagtagatatactataatagttatatatagtatatat

SEQ ID NO: 363566 - DNA, 621 bp, Homo sapiens
ccctgcttaggtttgaatgtagggcattctatgaacctcagaaaaaaacagctggtaaggaaagggaggaacaaataggccagaactaagagatatacattggctacggaactggcttttccaaagattctgatgagcagagcaagtcacaaattccagttggcagacttaggtatgatttttcctgttgtagactttcaagaggaaatgatgagattgtagaagcatgtcaaaaaagattgtaggcmccgatgatgctcatcaagtaaatggcaacaccttcatttggttcacattcccattaaccactctgtgatggccaagtgtttggactggatgtaaacaggattctacccaacaattagaaacatggagagagtctccaatgtagatctgacaagcagttcatctctagatatataatagacttcaaattaagagcataacttcttgaagtttgagctcttcatgtttaaggtttggtcctaactgggtttaatggagcagaaactgctaaatgaaggacttaagtacttacttaaataagtaagtatatagtagatatatatatatagagagagagagagtagatatactataatagttatatatagtatatat

SEQ ID NO: 363567 - DNA, 621 bp, Homo sapiens
ccctgcttaggtttgaatgtagggcattctatgaacctcagaaaaaaacagctggtaaggaaagggaggaacaaataggccagaactaagagatatacattggctacggaactggcttttccaaagattctgatgagcagagcaagtcacaaattccagttggcagacttaggtatgatttttcctgttgtagactttcaagaggaaatgatgagattgtagaagcatgtcaaaaaagattgtaggcaccgatgatgctcatcaagtaaatggcaacaccttcatttggttcasattcccattaaccactctgtgatggccaagtgtttggactggatgtaaacaggattctacccaacaattagaaacatggagagagtctccaatgtagatctgacaagcagttcatctctagatatataatagacttcaaattaagagcataacttcttgaagtttgagctcttcatgtttaaggtttggtcctaactgggtttaatggagcagaaactgctaaatgaaggacttaagtacttacttaaataagtaagtatatagtagatatatatatatagagagagagagagtagatatactataatagttatatatagtatatat

SEQ ID NO: 363568 - DNA, 621 bp, Homo sapiens
ccctgcttaggtttgaatgtagggcattctatgaacctcagaaaaaaacagctggtaaggaaagggaggaacaaataggccagaactaagagatatacattggctacggaactggcttttccaaagattctgatgagcagagcaagtcacaaattccagttggcagacttaggtatgatttttcctgttgtagactttcaagaggaaatgatgagattgtagaagcatgtcaaaaaagattgtaggcaccgatgatgctcatcaagtaaatggcaacaccttcatttggttcacattcccattaaccactctgtgatggccaagtgtttggactggatgtaaacaggattctacccaacaattagaaacatggagagagtctccaatgtagatctgacaagcagttcatctctagatatatwatagacttcaaattaagagcataacttcttgaagtttgagctcttcatgtttaaggtttggtcctaactgggtttaatggagcagaaactgctaaatgaaggacttaagtacttacttaaataagtaagtatatagtagatatatatatatagagagagagagagtagatatactataatagttatatatagtatatat

SEQ ID NO: 363569 - DNA, 601 bp, Homo sapiens
agcaaatttaaattatgagttttacataagtgccactggaaatacaaaaaaaattgaaaagtctaatttcaatgtttcaagttcaaacaagatatgaaaaacaacaaaattataaagtgaaaaataagctgaaaggccttagtgaagaaatggaagagataaacactaacattgtgaaagcaaaagtcacatttaaaggaataaaatgaaaatcagtcactccttaaagcacagcaagggtgaataagatcagcttccgaaaactgagtggaaygaaattgaaaagacgtgcttaacacgtttgagaaaaagaatagatatagaagagaaaggaaagtcacatacaaatggtttaactccctgaaagggataaattgaacagaaaataatcagttacatgtatacagtaaacaagaataggggtgaaaccaaccaaaatatgtggtggaggccagggtcaggaatgggggagataaacagacattgtatagacaccatatcaatcagggaacaatcagagaagtagagtcgttgagccacatttattatattgattggaccttctacaattgtggaagctaagtcatgtatgtaagactgt

SEQ ID NO: 363570 - DNA, 394 bp, Homo sapiens
attttattttggctatgagtaattttgtcttctctcttttcttgttttgttagacttgctagaggtttatcagttttattgatcttttcaaaaacacagtttgtagcttattgattttctctattgttttcctgttttaaacttcaatgatgtctgctatagyttttatctcttttttttttctggttgcttcaaggtttatacttgccttctttctccaatttcctaagatgaagtttagattacagatgtatatatcttttttctaacacatggattcagtgctatattcttctaaatacttttgctgcattacacaaaatagggaattataacttgcattacttttatttagttcaaaatatctttgatttctcttgagacttttttgccc

SEQ ID NO: 363571 - DNA, 394 bp, Homo sapiens
attttattttggctatgagtaattttgtcttctctcttttcttgttttgttagacttgctagaggtttatcagttttattgatcttttcaaaaacacagtttgtagcttattgattttctctattgttttcctgttttaaacttcaatgatgtctgctatagtttttatctcttttttttttctggttgcttcaaggtttatacttgccttctttctccaatttcctaagatgaagtttagattacagatgtatrtatcttttttctaacacatggattcagtgctatattcttctaaatacttttgctgcattacacaaaatagggaattataacttgcattacttttatttagttcaaaatatctttgatttctcttgagacttttttgccc

SEQ ID NO: 363572 - DNA, 473 bp, Homo sapiens
tcacactcagcctccagcaatctgacaaaatgaccatttgtttggttgatgttaatgtacgtctctagcaacagctactccaggtgagtaggcctcttctgtaactctctagattcacaattctctccayacttcagggtggcaggtttccctttaaccttacttatctgatggatccaagaaaagtcactgattttcagttcattcagcctttttcttgttgtaaggatgagagtaatgacttccaagtcctttacatgtcagaactgaaaccagaagtctcctcacttctgattttccaccctgacaccctcttgtcattgaggtctgtcactattgcctatttaaaattgctaaaccctcaacgattacatctctgttcctcactacattgctctaacctgtcccataaagctgagccccttggacgacctttggcacctacagcctcggtgccatgaaaggcagcagga

SEQ ID NO: 363573 - DNA, 473 bp, Homo sapiens
tcacactcagcctccagcaatctgacaaaatgaccatttgtttggttgatgttaatgtacgtctctagcaacagctactccaggtgagtaggcctcttctgtaactctctagattcacaattctctccatacttcagggtggcaggtttccctttaaccttacttatctgatggatccaagaaaagtcactgattttcagttcattcagcctttttcttgttgtaaggatgagagtaatgacttccaagtcctttacatgtcagaactgaaaccagaagtctcctcacttctgattttccaccctgacaccctcttgtcattgagrtctgtcactattgcctatttaaaattgctaaaccctcaacgattacatctctgttcctcactacattgctctaacctgtcccataaagctgagccccttggacgacctttggcacctacagcctcggtgccatgaaaggcagcagga

SEQ ID NO: 363574 - DNA, 615 bp, Homo sapiens
agacctgtgatattttcaaagaatgttcagtaactatgtggagacttgtctttaaataagtctcatatgtgaaccaaatgggcactttgtgatgtaaaagtcaattccaaagatactaccttctaaatttaatgctatcaatacttatgtgtaaaaccagaaataattcatcacaattcctcaatgaggtgaactatttcattataactcataaatatagaaaggtttctacatctcacagacaaaactagttgtttttgagcatacctgggaacaaagctagtcgtgctgttaaaaacatctttgtgaagctttatagaataaggggcaaagtgagagagcmaattgcaaattttccctttttaaagagaatcttgttgaactttgaataatacataagggtcagtgattgtgttgaagtagttcttttcttttgagtcaaaaatctcgccagaagagtaaaaatataaatgatgatagcatgtagatcaaactcaccaaaagccacacagtaatgcttcatttacagtaattcttcatgtgttcagaaaataattagtaatctcaaatgtcaagaatatcattgaaaatgtaaaaatagcagaaattaaaatg

SEQ ID NO: 363575 - DNA, 526 bp, Homo sapiens
  misc_feature (1)...(526): n = A,T,C or G
gccctccacttcagatgccagtcacaaatagtgggtcaccaggttacccacacttctgtctaccttgcctacaaatcagaggttcccattacctcctcctcgggttcaataatttgctatagtagtagctmccaggaaggtggttactggtttatcataaaggatagaaattaacagccagatgaagagctccatagggcaaggtctggaagggtcctgagttcaggagcttctgtccagtatgatttgagatgtgctaccctctaggcatgtggatgtgttcgtgaactagaaaactctctgaacatttttatttaggagttttatggaggtttcattacataggcacaattgactaaatcatcggccattggtgattgaattcaatctccagcctctctctcattcccaaaggttaaggattagggctgaaaattccaagcttctcatcacttggttggttcctctggcaaacattcctcatcctgaagcaatctagtagcacacatcacgagtcatncttatg

SEQ ID NO: 363576 - DNA, 582 bp, Homo sapiens
tatttgaaaatgaattgaggcttgagtgttagagaagtgaaaaaccatccataaattatctataaatgtggtaaagcaaatgaattctcagtcattgattatttttagaatgttcaactctgcagtcttatagccaaccaagaaacaaaacacaggagcttcctaaaatatatctatatataaaacagttttttaagataccattttagaagtgttattttatacctggggtctctcatcaaggtataaaatgcatatgctaattcatattgtattcggtactgtatttttctttaaaaattgaatgtatattaaaaaatagagctaccattgcttttgcttaattatatggtcttagtgatwgatacacacaaaagtatgagtgagtaaaattctctacatttaatattcagcaagtttaatcaattagttcctggttgactaaattttctaaattcaattggagtttgatctaagttaagagcacatgcattccatagttagaaatgactatagaatttatattctttaaatcttctaattttacagtaagaaaattgcatcatatacaaaaatcaactc

SEQ ID NO: 363577 - DNA, 617 bp, Homo sapiens
gagtactggtatttttagtatttctgatgtttcctttatgttcataaggagtatagagagattgctgtttttacactgttaccttccatcacttcttgaaaaggcaaagacaaggtaagtatcatacgtaatactgagaaatatatttcaaagtaaatatttttccttaattctatccctgttgtttcttctcttggtttccttcctttcttgttttctatctttctccctctaattcttcctggtattatcttgttttctatctttctccctctaattcttactggcattggctctgatgctgtacagaaatctaaaaaatrtggcactaatttcagagaaaacgtggtgcaattaaaaatctttgttccaagtttaaattaagattataaaccaaaatgtggcagaaatgatctaaaaaccaagaatatttctcttacaatatacgtgcttcattaatacttcacaaatctagggtctttttttagccagtttttctcagggatttcttaagcttggaatgtatgctttggaagaaattatgaaaggttactaaagatacctgggacagctgtaaaaggaaggcctcagcccataaaattaaagtgaaataatga

SEQ ID NO: 363578 - DNA, 600 bp, Homo sapiens
aatatggaaggcccagtgtgaatggccaccgtgactcaagtgaaagagaatctcttacttggcgagaaaccttgttccattaagataaagttctaataggtgataatttcacatttgagcagcacattacggtttagaaaagggtctcactgacattacctttgatagtcatgtgatcgtatagtagaaggaaaagattgtttttaataatcctcattttatgcatcaggaaattaagatttaaagagggtaactgatctctctgataccacaacagccagtacaatacatgttgttgcagacatacraacaaaagtgtttgcattccaagttcagtgtacttcctattatacctcattgactctctataagtgtctgctcatattgcactaagatctacttctctccaatccccacccattgatcctagcattattatttggactaataagcatttgatatattttaacatagcaaacattttaaacataacttaagtcactgcaagacctctttaggacttttccctatagtatgtagatgatgtttgatgatatatttgttgatgtgtttgacagagagactgtggtgggagaaaga

SEQ ID NO: 363579 - DNA, 523 bp, Homo sapiens
gataggcttttcttatcactttatatgaaaattttaaacctacaaagaacaaaaaaacatacaaattacaccaaacccatatttaccaactaggttaaatcatatattattatactgttctacacacatctattcgcctatctattcctccactcaagcactaatctatcttaatttttgaaggtttccaaaactatgtgactggaatttaagacgtgagaagagtaattaaagatgggtgcagctggagtagactgaggccaaatcatgaaaagcstgattttggggggttaagaagtcagactttaccttatgttattgtgtggaagacagaaaacaaactagataaacaagtaagaaaggtatgttgtatagtggacaaggagaaatgttaaaaagagaattggaagcaagaacagttggaaggtagcaagatttgcaattttaagtgagtggctagtgtacatcccactaagaagatgacatttgaataaagacttgaagagaagtgagtgagcaagca

SEQ ID NO: 363580 - DNA, 527 bp, Homo sapiens
aagtgtgcaacaactctagcctggaagagctacagaacctaactccaaccgctgagagctgccgtgcagcctgcacycagcaaagtgatgatggtgggctgccccaggccttaggggaccaacctccaccccagtgtgtccagatagtcatgcatagagtcaaagaagatttttctcaagcctcaagatttcatattgtttgccctattgagttttgaacttactcagggccttttactactttcctcttatctatttctgctttttggaattggaatatctatttaatgcttgtcccaccattgtattttggaagcacataagatgtttgatttcacaggctcacagcttagagagcaatttgcctcagaatgaatcataccttgagcctcacccaaatctgatttacataacgtttagatgagactttggacttagactttaaagttgatgctggaaaaattaagactttgaaggctgttgaaatggaataaatgtattttgtatgtgagaaaaacatgaatttc

SEQ ID NO: 363581 - DNA, 603 bp, Homo sapiens
cacttctacaccgctggtgggaatgtaaactagtacaaccactatggaaacagtgtggagattgcttaaagaactacaagtagaactaccatttgatgcagcaatcccactactgggtatccacccagaggaaaagagataattatatatatatatattatatatatcacagtttctttatgcacacattgattgatgggcatttgtgttggttccagaattttgtaattgtgaattgtggtgctataaacatgcatgtgcaagtatgtttttgacacttcacaattgtgaattgtgctgctataaacgtgtgtgcaagtatatatatatatatatataattgaatactactcrgctataaaaagaaatgaattaatggcattcgcagcaacctagatgagattggagactattattctaagtgaagtaactcaggaatggaaaatcaaacatagtatgttctcacccataaatgggagctaagctatgagaacgcaaaggcataagattacacagtggactctggggactcagggggaagggatgtgaagaggatgagggaaaaaagactataaatcgggttcggtgtatactgctcgggtg

SEQ ID NO: 363582 - DNA, 506 bp, Homo sapiens
ctatatttcattccccatgggacctgattcatgcacacagcttccttcaggaatggaataagaagagaagtttcccttgaccacttcacagtctcaagtggcctcctcctccagcaggacttgaccattgagactgtctggaggaggactgaatttgagacttttaggatcccactgtggcttttcacggcagcatttttccagataacaggccggctcttgctgtgcttaggcaggctgacaactgtgacagccaccggcccgagcctgctttatgaatgcacaagggctagtctcargtcaccaggcttgattgtgagctctgtctagcatcacaacgcaggtcaccattgtgtagaaaaaagccctgcatcttggcggaaaaggagacctccatggacatctgtcagcagtggactctcacctgtcttctctgtgggatcaaagggagagttccatgattcaaggggagggtagacatgagccattttgaaaatatgtcaagt

SEQ ID NO: 363583 - DNA, 431 bp, Homo sapiens
ttgaggatgaaaaagagtctggtgaggccagtttcctttctgcctcaatgttcacagaggtagatataagactttaggaaggacccagttccctgtctttgatagtgactagaatagagttgggaggaaaaccgcattctgtacatttgaaaagcttgcaatgctattcttaaattattcttttaaaaatagtcataatggaaagaattcctaatgataacctarataaaaaaatctggctttctgaattatatggaaaattctgcacagagtaatccttaaaacaaccatacctacagatggcaggacaggatatgggtttttaagaggcagtgatccagcgtgtgctgttagttggctagagagtttttcccacaggtcacaacctgtgggtgtgtaagatttcctcagtaaaaccacctgaaacacat

SEQ ID NO: 363584 - DNA, 573 bp, Homo sapiens
gatgtaggccaatatggtctacagtctgagtcaacatagcaaaaaatagagcttcagctgagttatgttttgtttccccgctccccaccagaatagtctgggcaagatgaaaatagtatttggaaggaatgctctcagcagcagtatccaaaatttaactggtttgagcttatcatctacttgtttatgctgattccatgattaaccaggagtttctgcctaggttgttactgcattttattttatttttattattattttttgagacgaagtttcagttttgttgcccaggctggagtgcaatgacacaatttcagctcactgcaacctctacctcccagattcaagtgattctcctgcctcagcctcctgagaagctgggattacaagagtgcgcaaccacgcccagctaatttttgtatttttttagtagagatggagtttcaccatgttggccagcctggtctcaaactccagacctcaggtgatctgcacgcctcagcctcccaaagtgctgggattacgggcatgagccacmatgttcggcccgttactgtattttgatactcatga

SEQ ID NO: 363585 - DNA, 554 bp, Homo sapiens
caaatagacgtttctgagcataataatgaaccattattatttattattgtgtgtcccttccctcacactgggataaatttgctacacttgcagaattctcctacagcctagaagcactacatcaaatctacaggcccgtcttttcttttcctttttgaatactaggttagtgttttacttggaaaacttcttcagaactaaaacttagccatagcattttatttcaccgtagtatatcaaaaaaggatttgcttttcaataataattattgaacatccactctatgccaggtattaaatatatactatctctaatcctcattaaaaactacataaggtaagaattatycccctgaacttggaatgagcaaacccaggctcaagcattaaatgtaaatttaaaagatgcatccaagtcatacatcttataagatttcaagagatacattgtcatatatcatggaaaattagcttcctttacatccttgcaaacaagttatccaaaagcaaatgcttttaccagttttctatacatgttttaatgcatttatgaca

SEQ ID NO: 363586 - DNA, 551 bp, Homo sapiens
tttgtccatcaatatcctgccttatggctatcaacctgctgattayagagaagggaggaggccctcaaaatggcagcaccaactaatgaagagagtatggatccttgaaagactgaatggagcccaggacctaccatcctcacaccaaccccaatccctactgtctgcccacactagactgtgacatgagtatgagtgataaatcaacttttattaggctaagcggctgatatttagcggtggattacttaccctagctaatttctcactgttggtttcctccatagcactgattacaattacacttgtactttattgtacattactcattcgatgttgtcacatttgctcaactgtaagcttctaaggggagtgactgagtctgtttcatctaccaccatagcaagcgactagcaagagtccagcctgaagtgcccgtgtagcgatatttgttacatgattgttgggaagatggaagccaatgcaacaaagtgaatgggcatacacaaagagtttcctccccagtgtgatgtggctactttaaacagggt

SEQ ID NO: 363587 - DNA, 459 bp, Homo sapiens
tatctcaactaattaaacaagatatataaacacactatcagactactttatttttttcctttcaatccttactcttcctatktattctattgttttccctttttattcaacaagcttttatgaagtgtcttcagtgttccagttattattcagagtgaactcaaacatgagggaacaaaacatgaacatttatgccttgcagagtttacattcccataatgagtcagaaatgggttttgttacttgctgtaataaaactctgatggtttgaggagcattcccagtaaatttcaggaataaagccaagatacacaccatcgcagccctgttctgcacaatgatgaagagcttctctatcaaaacaaaagaagaaaaagtaacaagagacatggaatagaaatgaagatacaaaatcttcatgcttcccatttaataggcctatatacatggaaaatctct

SEQ ID NO: 363588 - DNA, 673 bp, Homo sapiens
gctccttcaaactctttaaatctctgccaggtacccagttccagagctacttctacattttcaggcatagcaacaactccacttcccagcatccattttcttagtttctttggtgttgctgtagtagaatacctgaggctgcataaattattttaaaaaacagccttatttgtctcatcattctggtggctgggaagtccaagaagcatggtgccaacatctgctctgcttctggggagggtcttgtgctgtgtcaacatggcagagaagtgaaagaagcaggtgtgtgcagagagttacaaacttgtgaggcagacttgctgtatagcaccccacttttctggcaaataatccagtccaggaaagcaaaaacycactcactctcccagtgactgcattaatcccttcataaaggagtacgctttatgacccaattgcctctcaatggtatcatctcccaacacagccacattggagaccaagcctcaacagaaaaacttgtcctcagttttgctgaggacaagtcatattcaaatcatagcagagatagaaacaaataaaatagtcttcctaccttttatcaccatcatcgccattatcattaccatcatttcttgggaagcaaaaacacttaaatacaaataaaacaaggggaaatagaaggaaccaaaaa

SEQ ID NO: 363589 - DNA, 465 bp, Homo sapiens
gacctggaactggtctgtgagtgtcattgctcagtgttctagtctgctcccttggtcagttgggggacagtgcccaccaggtctgagaggcagaagggaagcacagtccacttacctggagatctactcctcagttcaaaccacaccaaaggaggggatagcacagtctgccaaaggccctcttgggtcaaagaaaacgtgaamctgcaccagctactgaaggtggcaccaccaaaactcaagaatagatgtagagagggggttatctcttgccaaccccctcagtgcattgtcacagacttggtagtgcctcttcccatcagggcctggggagcctgggctaagatggttgagtttgcttttccagcttctcgagaggctccacccccactgaaggcaaacatgctctgggggagggcatttttcatcgttcttcattacctctcccctgacctctacctgcca

SEQ ID NO: 363590 - DNA, 592 bp, Homo sapiens
ttaacaaagaaaaaagaatacycaaaaagcacacaaagaaatataaaaggtcttcagagactactatgaacatctctatgtacacaaagaaaatctaaaggaaatagataaatatctagaaacacacaacctcttaaaattgaaccaggaataaacagaaatcccgaacagatcaacgagtaataaaattgaagcagtactaaaaaatctatgaaccaaaaaaagccttggaccagacagattcatagccaaattctatgagatgtccatagaagaattggtaccatccctactgaaaataatccaaaaaattgagaaggagagacttctccctaactcattttacaaaactagtgtcattctgataccaaaatttggcaagaaaacaacaaaaagttaaactacaggccaatgtcactgatgaacataaacccaaaaatccttaacaaaatactagcaaactgaacccagcagcacatccggaagtcccagccagagtgatcaggcaagagaaagaaacaaaaggcatccaagtaggaaaaggaggaagtcaaactctttctcttcactgatgatatgattctatgcctag

SEQ ID NO: 363591 - DNA, 608 bp, Homo sapiens
ctaaatagcttgctattgaatgacttatgggtaaacaaggaaattaaggcagagataaaaattgtttaagacaaatgaaaatagaaacacaacacactgaaacctctggtatgtggcaaaagtggcattaagaggaaagtttacagcactaaaagcctacattaagaatatagaaatatctcaaactgacaacctaaattcacatttaaaggaactggaaaaatagaacaaactaatcccaaagctagcaaaagaaaagaaataactaccatcagaagagaactaaatggaattgtgaccatacaaaggatcaataaaatgaaaaattgcttctttaaaagtataaacaagattgatagcctgattaacaaagaaaaaagaatactcaaaaagcacacaaagaaatataaaaggtcttcagagactactatgaacatctctatgyacacaaagaaaatctaaaggaaatagataaatatctagaaacacacaacctcttaaaattgaaccaggaataaacagaaatcccgaacagatcaacgagtaataaaattgaagcagtactaaaaaatctatgaaccaaaaaaagccttggaccagacagattc

SEQ ID NO: 363592 - DNA, 629 bp, Homo sapiens
gactaatggctgcagataacgtccatcattttaaaaagtacaggttcattatacatgattttatatattaacaaaaaaataacaaatgcctgctgtgtgctaggtaccctgtttacaggcatccaagcaatgactaaaacatggattctaccttcaaggagtttttagtctataggtgtgaagtgtaagttttaacagagaaaacaaatcaccagaaaaagtcaagaaaccccatatacctcagaagatcagaaagttggtctatcgtaaccaatggcagaaaattgaggtttgtagaacttcagttatccagaaaagaggaaataatattcattcagtcttctatttaagagaatatgcagttcactgtaggaagctgctattaagaatagttcctttctaaaaatgctttaattgacattttggcatattagagaattgtggttatctggaaaattaacatttttaacatttctgaacttcctaatttcagataaaagatgacaaagtaaccatcatggkttctatcacacataatatattttacttacaacatcgatttagaattttttaagcatccacattccatttcttgcctttttcagaaatatactcctaccctaattttt

SEQ ID NO: 363593 - DNA, 364 bp, Homo sapiens
catctcttgggccacagaggagacagagtgtagtgagggtacatgagacattttaccgcagacagcacactgctaagcacttaaattccagaaattgcacagggaacagcagagcagtctgatctacagagctgggattctaaaaacctaaaactctgatttcttggctcagaaattcatttgmaattactgaccacagagaaagccgccctcgaaaatttcatttgcttgagatgatgtaactgagaattgaaaaagtacccatgaatctttgtgaggagacatacactttttacttgaaatactttattttgttccattgactagaggaaagcaaacctacaaaaccgtttgcccaaattcc

SEQ ID NO: 363594 - DNA, 535 bp, Homo sapiens
tgagccaccatgcttccctagttattattttttgatactagctgctgattgccttttaggtcttatccgggccaggtattaacactgtctrgggattatcccagttcatcttcataatgattcaatacatctgaacttcttttatcaccagattttaacttaagtagttttcccaagctcgtccagctgacatgtgacagaggtggaatttgaactgttgcccaaagtgcatatttacagcggctcaggacctttacatctaattggtgaaagccagatgtagcctctaaaatgtcgatgtgtgatgtttcactcattttgtcataaaagaggacttggttggggtggctgcagtcagctgagattccactcctgcttctatccactacggtgaggataattcatttctcagacagtcaaagctcataggcatggctcctggacctctcttgtaagaactgtggggctttagttcccaaaagagcacaagccccaagagagcacagctgtggtgtgattcctttttcagcaagcg

SEQ ID NO: 363595 - DNA, 610 bp, Homo sapiens
ttttgagtaatatttgccactgagaagctgtatgcaaagattcctggcacaggctgcagagagctcttccgactgggctctggccagtccttgtaaatgattgagatttaaaaccctatcaaatctgagargcagggagtatcctcaatatagtaccataaatcccttatagtaggaatgttcagggaaaaatgatgtctatgtatacctatatacatacatatatattttaagtcaagaagtgttgacatcaccaattaacagtgatctaaatggctggatcgtggttattttctttcttaaatatattttctgatttttctgcaattaaaaatccattgcttgtgaaataaaggaaatataaaatataaaagctaataaagtgtcaatagagagccagaacttatctcattcaactgactcactgaagaaaataaatgaaggcgggcagagtgggggagcaccttgcttgtggtcacttggcagtccagcaagggatgcagagccaggaccctggaaatcccctgacttcctgccctccacaccaccctgctgcagctgctggattccttaggctaggaaactccctaaaaagctcggtgctaggtga

SEQ ID NO: 363596 - DNA, 340 bp, Homo sapiens
caagaagtccagaaggaaagtcatctgccacctccagaaagaacagaacaaaaccccyacactccaagaagaagtcagcaggccagtgggaagtgccagtctagcccacaacaaactaggcatatggggtgctccgaggttcatgctcgtgtcctgcaggctggagcccacaccagggtccgcagtctgttctggactggaactagcgctttagctggttacccaggcgtccccgatggggaaagggtggaaaggttgaaaatcttcagcacagaggatcacctcgcgtggcagcaaccagccctgcccgcgtggcaccagcagccccagatgagaggcg

SEQ ID NO: 363597 - DNA, 552 bp, Homo sapiens
caaagttccaacttttgactgcctctgagtgtgagattcagaatgtcataagtaggctgggtttttgtgggagggtgagaatctttactgtgagccaggtgtgcatatgagagtcacagtctcaccagtttgctggttcctgttatgaaactgtctgtaccacctgatggttttacatggtatatgtgagagtcacaatctgctttgagrtttttgtgctttcccaggtgtatgttacaatctgaaatttatgattatccccattgccctgagaccaggcatgaccgtcaacatctctcctgtttattgggttcaggtatgacagcaatttatgttcctgtgatttaggtacagaaatgggtcaacagccctcctgtggctcaatccacatgtgacaggcacaattccaacagtggactgtatatttcggtgaggctcaggtactcattattctgctctgtccatgtgtatgggtgacaaatgtaacagtcagctgggtgttcatacaatagtgacaatctcaatgttgtgctgggtactattaagacattc

SEQ ID NO: 363598 - DNA, 557 bp, Homo sapiens
cagcaattggttaaggtggataattgtgggagttttgttttattctaaaagtaacaaattctcactctagatatttggtaaaatacaaatatatatgtatacatacatacatatatacatatatatatatatacacacacacacatatacctaataaaatggacatcatctgtaaaataatattttagtgtatttccttcctcaattgatatattaatattcacccagtgctatagctacactcatatacacacatacagatatgtgtatgaatacattacatacgtaaaaatsatatgctatttatctctacataatattatgagcattttgacttctttaaatattctaacatagatttttatgttcatttggccagtatgcccagatctagaaatctaactaagtttggattaaacatattaatatatcaccaactaccaatggaaaaatctttactgagtgtaatttataacaataaaatttgggtgacaacctaagtgcccaataatagagaaataattaaatatgtagaatatagttatgtattagaaaag

SEQ ID NO: 363599 - DNA, 642 bp, Homo sapiens
tgtacaaagtgggtacttaaaatgtgtcctgagtgacaaactggcccccactggaagaactctttaaaacactctgttaccagagcttcaaaaagggcttgtttctgaaggatcaaaggatctcttgtataataaattctgagcattcagtacataatgaagagaagaaaacatgtcttttaagctcctatatgatgcctggattatgtgaagagatgaaggaagtggtgactctttctggcttttgtgtcattcacattaaacaggaatagatgaaagcaaaggcttaacactgacaaaatcccaagtaggmaggctctgcatccacagcctgttcacacattcataacaaaccaccagctgatgacttgaaaaaaatatgattttctttctagtgaaagactgactttgttttgtgttttgtgccttttttaaacatctaccttcagaaagtataaaccttttttttttttgacagagtgattgggttacaatattgttacagaaggactagaattagaatcacaatacttgggtgccacacttgacctttgtcacttgttatgtatgacactaaggaagtaatttagtctgtaaattaattttatttttcatcatttataaataaacctagtaaaatga

SEQ ID NO: 363600 - DNA, 535 bp, Homo sapiens
cttaggttctcagcatatctatgaatagcctgtggaccagtgttctttaggataccactttgggaaatgttgagttagaacgctgaagaactagaaaggtgcttagtagtcatcccatttatattgttatctctctttctctgagtgycttagcattttctcccactcctctaacttcaatgaattttatttttctttcttcttgttataaatgtagtgttttcaagtacaatactattgggttggtcggacaccttttatgatatccttaaagcaacatatgagaatggtaccaggcttcatcgtaaaaagaagataataatattgaccagtgttaatattgtgaagattaaatagaatattgtatctggaattccttagtaaaatgtacaataagatgatcatatttagcgtttcagagtttttttttgtttgtttggtgtctaagtggaaccagctagtctggcctggggaaaaatactaaaaataggagctttatctttggacaaacactgcctttgatttttgtgtgact

SEQ ID NO: 363601 - DNA, 527 bp, Homo sapiens
cattatgaaccaacaccatttcagggtttggtagtggtcactgtatcatgtctatcatgccatcaagcctgaaggtagcaccactgcaccagctaaataatcaggggccaaagtgcaggtaggaggggagagactaggtctcaggcttcagtcttactaactacaaaagggttactaataacaaaaaaagaattagaagacttactaataacaaaaacagtccactatcacatattttacatgttatatacagtatatactgtattcttacaataaagtaagataaagacaatgttattaagaaaatcataaggaagagaaaatatatttactattcattaagtggaagtagatcatcaaaaaggtkttcatccttgttgtctttaggttgagcaggccgaggaggaggaggaagaggagaggttgatcttgctgtctcaggtagaagaggtggaggaggtagaaggggaggcaggcacacttgacataagttttattaaaaaaattacttataaatggccccatgc

SEQ ID NO: 363602 - DNA, 511 bp, Homo sapiens
gatgtagggtgaagattaacctcattctataagtcaataccaaatattgatttcagaatcaaataggcttcattgccatggaatattccctgccttartggaactggaacacaggtgacctacagcctagtccctgttttgcctaatatcttggtgaccttgaggaatcctcttaagaactatacctctgatctcctcatctgtaaaataaaacagtgggcgtatgatcaaaatgactctttccacccagaaaatgcaatgattcttcaccaccatccagggagatggtacatttagaaacaagaggaattttagtgcctccagataaacgatgaactgtgagaatgacaggaaaaagccttttctgtaaaaagtcaatatggcttggttttctgccagggaagcacacatacactttgttccccagcattatagatgtgaaaagagaattcatgagttgtgtaaatggctgtttcatccacagagttggaagccaaatgcgattgttaaa

SEQ ID NO: 363603 - DNA, 635 bp, Homo sapiens
ataagctgttccctctgcttgcaatggtcttctttgtggctcattccttgtgactaaggactcagctttaatgtcacatcctcacagaagctttctctgaccactctgatgacacagacacccaccttctttctgcatgttagtactagtcctttcccttcccaacactattacgatttgtaattacttatctacttatgggtttgatttttggatctgcagtctagcatagttcctgacacacaacaggtactcaataaatatctgctgaataaatgaacgaaaagttggcttcctgagtcacattgcctacatttaaattccagaaccccacttcttaaactcttcagaaatttacttgttaagccttttttttaatgtgtaaaatgcacatcaccaacttcatgatgttgttgtaagtataaaatgagaatagcttagtatggtgcctggcacatagtaagcatacgagyaatatctatctatccatccatccatccatataacaactatttatcatctaccagctatatatctatcataatctatcctacctatctactctctagcaatcgtcatcatcattcaatttatgctcatttcttgaatgaataaattcatatcagagataatcc

SEQ ID NO: 363604 - DNA, 621 bp, Homo sapiens
tgaaatggcagtgactagagaaacggggattaaatgagaagatagcagtcaatgattcccctgacccaggaattccaccactagctgtaaactttaccttgaataaattagactcatagggtataacagaaaacaactttattcttttttatccctgtcccttcaagccttctgtgaaagtgattctgaaggtgtggtccctgggccagcagcatcaacatcacctggaacttgtgagaaatgaagattctcaggctcttctctatacctactgaatcagacattgggtgcaaaggggaacactacagtctgtctttaaggagccctcaaggtaagtctggggcttgctggaatctgagaactggcattttgtcaacttcaatcttcagtgtatgtgttagaagcaaacaggctygtggtatagcttagttttctttagtttcagatgcaggggagagatatctagcaaagaaaaacaatcaggacaattaagatgtttcaaagagcgttcaaggcaccagaaggttgaaaggaccttgggctgcacattaatgtcaccagaggagatttttttctaaatgttcctcatccagacctcatcttcagagattctgatttaac

SEQ ID NO: 363605 - DNA, 623 bp, Homo sapiens
agcactaagctatgagggacctgccccatgaccccacttccaaccttgaggattacaattcaacatgagatttggcagggacatatattcaaactagatcaaccccctagattaccgaccttccattgagttagtatttgggttgggattggggttggaattagtattgagttagtataaggattaatttagacataattaattgtgtttccaggggatttggatgcagggggmagcaagctgactttacctcttgccagtttcctcagtcctgcctgatgcttctcactttttcctactgggctttcacctcccttctccctccaagataccttcttcctttcatagccctgtaactcttactggcagtactgagagatgcaggcctggtgagcaagtacctcaccttcctttatccctagacagacttgatctacaatccacctccagttgtccttccttgtcttctcactaagaactaaatcctcctgatgctctgaaaacatgccacttcccttcaaaggtggttaaactctttcaaacccactaaaacctcctccttcctaatggcttctaatttgagaatgaataccagtcattcttttgtctccgcttggaaacta

SEQ ID NO: 363606 - DNA, 623 bp, Homo sapiens
agcactaagctatgagggacctgccccatgaccccacttccaaccttgaggattacaattcaacatgagatttggcagggacatatattcaaactagatcaaccccctagattaccgaccttccattgagttagtatttgggttgggattggggttggaattagtattgagttagtataaggattaatttagacataattaattgtgtttccaggggatttggatgcagggggaagcaagctgactttacctcttgccagtttcctcagtcctgcctgatgcttctcactttttcctactgggctttcacctcccttctccctccaagataccttcttyctttcatagccctgtaactcttactggcagtactgagagatgcaggcctggtgagcaagtacctcaccttcctttatccctagacagacttgatctacaatccacctccagttgtccttccttgtcttctcactaagaactaaatcctcctgatgctctgaaaacatgccacttcccttcaaaggtggttaaactctttcaaacccactaaaacctcctccttcctaatggcttctaatttgagaatgaataccagtcattcttttgtctccgcttggaaacta

SEQ ID NO: 363607 - DNA, 623 bp, Homo sapiens
agcactaagctatgagggacctgccccatgaccccacttccaaccttgaggattacaattcaacatgagatttggcagggacatatattcaaactagatcaaccccctagattaccgaccttccattgagttagtatttgggttgggattggggttggaattagtattgagttagtataaggattaatttagacataattaattgtgtttccaggggatttggatgcagggggaagcaagctgactttacctcttgccagtttcctcagtcctgcctgatgcttctcactttttcctactgggctttcacctcccttctccctccaagataccttcttcctttcatagccctgtaactcttactggcagtactgagagatgcaggcctggtgagcaagtacctcaccttcctttatccctagacagacttgatctacaatccacctccagttgtccttccttgtcttctcrctaagaactaaatcctcctgatgctctgaaaacatgccacttcccttcaaaggtggttaaactctttcaaacccactaaaacctcctccttcctaatggcttctaatttgagaatgaataccagtcattcttttgtctccgcttggaaacta

SEQ ID NO: 363608 - DNA, 654 bp, Homo sapiens
ctgacacaaaacagtcatacattgattatgagatatagtgaataaagtyagttttgttattatttatatttactctaaagtcccaataaataggatttccaatatttccatccttttaatattttattaaaaatggccaattagaggattaatacatagaaatatttatataaatacatcagtataacttaaatggaaatgtttataaatataaaatatcaggggattcttatgtgcttaaatgtctttcagtgtgtgtgtaagccttgcatgcattttggtatccttgctgctgaagcttcatgaaagtgattagatcaaacatagaggagctgcgtcatacaaagtaggaattattgtctactcagtttgatgctgtatttgcatgaaacttcttcagacaactaaatggttggttcatgtgactggaaggcaaaggttggatatgtttgggacgaaagataagccaattttgagagaacatctaaatactagaagagcttaatggctatttccttttattaaagctggtgctatgtatgcatgtttgaggggccatactgtaaaatgggtgattttttgaaattcttgtgattgttgagattcctttaatttcaatgaagggataaattttcattaacttatagaaacctg

SEQ ID NO: 363609 - DNA, 533 bp, Homo sapiens
aagttttaacatcttttacattatctttttatcaccctttaaataaatcctgaccttgtgttggtttagatttgaatgtgacttgaatctttactgttcaatattttaggactatattaggactacatatatttaggactagccagggactcattgtaattataatttttggtttattcactgatgggaactactttaacttcagtcctcatcctttcctactcatgattctggaagctttcttttggaaaatagtccatttatataattaaatgctttccagttgtacattttgccatatgaaagcttttcaataattttctaaaacagtaagttagataacctattgtgatggttactttaaggcgaatgtgactgagmcacccaatttcatgaatggcactgaggcctgacatctcaagtctgaatgagaggagtttctttgtctaagtaggtatagtagacacttgggatctgtgtcagcatccatttccccttctgatgaaacaacatcatttgtctttcgggaaaac

SEQ ID NO: 363610 - DNA, 575 bp, Homo sapiens
gtcaagtgggtccctgacccctgtgtacctgactgagagatacctcccagtaggggcygacagacacctcatacaagagagcactgcttggcatctggcaggtgcccctctaagacaaattttccagagtaaggatcaggcagcaatatttgctgttctgcagcctcctttagtgatacccaggaaaacagggtctggagtggacctccagcaaactccaacagacctgcagctaagtggcctgactgtcagaaggaaaactaacgaatacaaggggcctgactgttagaaggaaaactaacaaatagaaaggaatagcatcaacatcaacaaaaagacatccacaccaaaaccccatctgtaggtcaccaacatcaaagaccaaaagtagataaaaccaaaaagatgaggagaaaccagagcagaaagcctgaaaattccaaaaaccaaaacgccccttctcctcctgagggtcacaactcctcaccagcaagggaacaaaactggatggagaatgagtttgacaagttgacagaagtaggcttcagaaggtggataatcacaaacttatcaga

SEQ ID NO: 363611 - DNA, 575 bp, Homo sapiens
gtcaagtgggtccctgacccctgtgtacctgactgagagatacctcccagtaggggctgacagacacctcatacaagagagcactgcttggcatctggcaggtgcccctctaagacaaattttccagagtaaggatcaggcagcaatatttgctgttctgcagcctcctttagtgatacccaggaaaacagggtctggagtggacctccagcaaactccaacagacctgcagctaagtggcctgactgtcagaaggaaaactaacgaatacaaggggcctgactgttagaaggaaaactaacaaatagaaaggaatagcatcaacatcaacaaaaagacatccacaccaaaaccccatctgtaggtcaccaacatcaaagaccaaaagtagataaaaccaaaaagatgaggagaaaccagagcagaaagcctgaaaattccaaaaaccaaaacgccccttctcctcctgagggtcacaactcctcaccagcaagggaacaaaactggatrgagaatgagtttgacaagttgacagaagtaggcttcagaaggtggataatcacaaacttatcaga

SEQ ID NO: 363612 - DNA, 550 bp, Homo sapiens
tcaacacctaatgctgtctctccttctccttggctccaaacactgttctgggtattgcctcgctgggcctggctaaagctctgycttctgaagtgaaggttgaccttttattaaatactaaccctacaagaaaagtagaataaactagtcccattgtaacttgccaagattaatacatccatagaattggggcaggagataacaccgaatgtgtactacagactagatattgttaagtagtatatttctaatttaatctttaatctttataataagcctatgtaatagataggcactatgattattgccaatttacagatgtggaaactgtgggttagagaaataaggtaactttcccatagacttatagctattaagtgacagaggtaggatttagagataggtagatccacttgagtccagagcttatagaggtacctaccttaccaacaggacggctttttggaattcatttcgataaaaaaaaaatcaagttggatatgacggacttgatcatttcttctgcctgagatgcctaacacatctaaaa

SEQ ID NO: 363613 - DNA, 550 bp, Homo sapiens
tcaacacctaatgctgtctctccttctccttggctccaaacactgttctgggtattgcctcgctgggcctggctaaagctctgtcttctgaagtgaaggttgaccttttattaaatactaaccctacaagaaaagtagaataaactagtcccattgtaacttgccaagattaatacatccatagaattggggcaggagataacaccgaatgtgtactacagactagatattgttaagtagtatatttctaatttaatctttaatctttataataagcctatgtaatagataggcactatgattattgccaatttacagatgtggaaactgtgggttagagaaataaggtaactttcccatagacttatagctattaagtgacagaggtaggatttagagataggtagatccacttgagtccagagcttatagaggtacctaccttaccaacaggacggctttttggaattcatttygataaaaaaaaaatcaagttggatatgacggacttgatcatttcttctgcctgagatgcctaacacatctaaaa

SEQ ID NO: 363614 - DNA, 574 bp, Homo sapiens
cacacctggctaatgctttgtgttattagtagagacagggttttgccatgttgcccaggctggtcttgaatgcctgagctcaagcaatccacccttcttggtctcccaaaatgctgggattataggtgtgagccactgcacccrgccttaattcttcctttccagtttggatgcccttcatgtttttctcttgtctcattgctctagctaggacttccaggattatgttgaataacattggtgacagtgggcatacttgtcatgttccagatcttagaggaaaggctttcatttttttccccattcagtataccagctatgggtctgtcatatatggcttttattatggtgagctatagtccttctataccctgttattttagggtttttatcataaaacaatgttgaattttaccaaatgctttttcatcatcaattgaaatgattatatggtttttatccttcattctgatgatatgacatatcacatcaattgatttgcatatgttgaaccatacttgcatcccagggataaatcccacttggtcatagtgaatgagcattctgatgtact

SEQ ID NO: 363615 - DNA, 582 bp, Homo sapiens
cactgtggttcttaaaagatgtcttaaaacttaayaagaaaacatactcacaaaaacctgaccttaaaatgtacaaaagacctgaacagagacctctccagagaagatatacagatggcaaaaaaacatatgagagatgctcaccatcatatattattaggttactgcaaattaaaacaacaatgagatactaccacatatctaacagaatggccaaaatccaacacactgacaatgctaaatactcatgagcatgtggaacaacaagaactctcattcaccgcttgtagtaatacaaaaggtacagccactttggaagacaatctgtcagtgtctttcaaaactaaacacactctcaaatataacatggatgaacctgaaggacattttgctaagtgaaataaaccagatacagaaagacaaatactgcattaactcattcatatttgaaatctaaaaaggttgaactcatagaagtagagagtccaatgatgattactagaggctaggaggctgaggagggaggaaatgggagatggtgatcaaagagtacaaagtttcagacagacaggagcaataagg

SEQ ID NO: 363616 - DNA, 582 bp, Homo sapiens
cactgtggttcttaaaagatgtcttaaaacttaataagaaaacatactcacaaaaacctgaccttaaaatgtacaaaagacctgaacagagacctctccagagaagatatacagatggmaaaaaaacatatgagagatgctcaccatcatatattattaggttactgcaaattaaaacaacaatgagatactaccacatatctaacagaatggccaaaatccaacacactgacaatgctaaatactcatgagcatgtggaacaacaagaactctcattcaccgcttgtagtaatacaaaaggtacagccactttggaagacaatctgtcagtgtctttcaaaactaaacacactctcaaatataacatggatgaacctgaaggacattttgctaagtgaaataaaccagatacagaaagacaaatactgcattaactcattcatatttgaaatctaaaaaggttgaactcatagaagtagagagtccaatgatgattactagaggctaggaggctgaggagggaggaaatgggagatggtgatcaaagagtacaaagtttcagacagacaggagcaataagg

SEQ ID NO: 363617 - DNA, 582 bp, Homo sapiens
cactgtggttcttaaaagatgtcttaaaacttaataagaaaacatactcacaaaaacctgaccttaaaatgtacaaaagacctgaacagagacctctccagagaagatatacagatggcaaawaaacatatgagagatgctcaccatcatatattattaggttactgcaaattaaaacaacaatgagatactaccacatatctaacagaatggccaaaatccaacacactgacaatgctaaatactcatgagcatgtggaacaacaagaactctcattcaccgcttgtagtaatacaaaaggtacagccactttggaagacaatctgtcagtgtctttcaaaactaaacacactctcaaatataacatggatgaacctgaaggacattttgctaagtgaaataaaccagatacagaaagacaaatactgcattaactcattcatatttgaaatctaaaaaggttgaactcatagaagtagagagtccaatgatgattactagaggctaggaggctgaggagggaggaaatgggagatggtgatcaaagagtacaaagtttcagacagacaggagcaataagg

SEQ ID NO: 363618 - DNA, 582 bp, Homo sapiens
cactgtggttcttaaaagatgtcttaaaacttaataagaaaacatactcacaaaaacctgaccttaaaatgtacaaaagacctgaacagagacctctccagagaagatatacagatggcaaaaaaacatatgagagatgctcaccatcatatattattaggttactgcaaattaaaacaacaatgagatactaccacatatctaacagaatggccaaaatccaacacactgacaatgctaaatactcatgagcatgtggaacaacaagaactctcattcacygcttgtagtaatacaaaaggtacagccactttggaagacaatctgtcagtgtctttcaaaactaaacacactctcaaatataacatggatgaacctgaaggacattttgctaagtgaaataaaccagatacagaaagacaaatactgcattaactcattcatatttgaaatctaaaaaggttgaactcatagaagtagagagtccaatgatgattactagaggctaggaggctgaggagggaggaaatgggagatggtgatcaaagagtacaaagtttcagacagacaggagcaataagg

SEQ ID NO: 363619 - DNA, 580 bp, Homo sapiens
gatcaactttccgaaggtataggaaagagaaatgaaaagagccaaaggctgtttccattttgaaaacatwggctttgggtataaaaaacaaaagtaatacttggcttagattggtacctatgttaacttaattacaaactgatcttttattgtttttaattaaatgctactgttttcaattttttactaaaacatgtattattaaataagggagactcccaaagatacctactctaaaatgctctaagaatgaaaataattggtctttatttataaatgaatcttttaaaataaaataataagtgactattaggagatctgtgatcttttctcatctctatcactatgcacatttatagatgatgaaactggcgaaaaaaggtaaatgacacaccttaagcaaatcatttacctttttttggtcagtttcatcatctataaaatgtaagaattggataagttctcattcggccttagcattctatgtataaagcaaatgtatatgaagctaaactttgtaagatagtagattatcctagctaatattaactcttgcgtaaaatacacagaagcattctgt

SEQ ID NO: 363620 - DNA, 552 bp, Homo sapiens
ttaaacctgttataaattcagttaaattgccctcaaagtaaagwttataaaagaaggatgttaagggagatactgttggatttgttgcagtgcatttaaaaatagataacttcaaggccatggaatatgggactgttttttagcacaaaattataaaagtggagaactaatatatgtaaacctatcgggaaactcatctgagtatgagctgggcagacgttttgattgtctatggagggctggacttcccacttttctcccactcatctgacaggatcagtttttcaggtgatgaattaggaacaaggtgagaaggaggtggctctagacaccctggatatagcactgttttctgttaatgagattcagatggcctgataattaaagctgtctccaaaacagaatggctttcctcatctagcatccttggcacagggtaattcaactgaagactgggttcatttatccattcaactccataataaatacttatggagtattaggcaatgtcctggatattggaggaatacaaagaatagtgccagtcatatc

SEQ ID NO: 363621 - DNA, 580 bp, Homo sapiens
gcaaaaatcagcagtgtttctatacactaaccacaaactgtctgaaaaaagaaactaagaaaataatcccacctgcaatagcatsaaaaaaaatacataggtgtaaattaaactaaggaaaaaaaagatgtgtatactgaaaactacaaaacacagatgaaagaaatagaaaatgacacaaataaatggaaagatatcccatgttcatggattggaagaattcaatctaatttaatttaataataccaattcaattcaatccaattcaatttaataatatgaattcttccaatccttggattggaagaattcatattattaaattgtctatagtaaccaaagcaatctacaaatttaatgcaatccctatcaaaattctaacgtaattcttcacagaaatcgaaaaaaaatcctaaaattcatatggaaccacaaaagacactgaaaagccaaagcaatcgtgaccaaaaagaacaaagctggaggcatcacactacctgattacaaaatatattccaaagcaataataatcaaaatggcataggactggcataaaaacagacacatcaaccaaaggaat

SEQ ID NO: 363622 - DNA, 580 bp, Homo sapiens
gcaaaaatcagcagtgtttctatacactaaccacaaactgtctgaaaaaagaaactaagaaaataatcccacctgcaatagcatcaaaaaaaatacataggtgtaaattaaactaaggaaaaaaaagatgtgtatactgaaaactacaaaacacagaygaaagaaatagaaaatgacacaaataaatggaaagatatcccatgttcatggattggaagaattcaatctaatttaatttaataataccaattcaattcaatccaattcaatttaataatatgaattcttccaatccttggattggaagaattcatattattaaattgtctatagtaaccaaagcaatctacaaatttaatgcaatccctatcaaaattctaacgtaattcttcacagaaatcgaaaaaaaatcctaaaattcatatggaaccacaaaagacactgaaaagccaaagcaatcgtgaccaaaaagaacaaagctggaggcatcacactacctgattacaaaatatattccaaagcaataataatcaaaatggcataggactggcataaaaacagacacatcaaccaaaggaat

SEQ ID NO: 363623 - DNA, 580 bp, Homo sapiens
gcaaaaatcagcagtgtttctatacactaaccacaaactgtctgaaaaaagaaactaagaaaataatcccacctgcaatagcatcaaaaaaaatacataggtgtaaattaaactaaggaaaaaaaagatgtgtatactgaaaactacaaaacacagatgaaagaaatagaaaatgacacaaataaatggaaagatatcccatgttcatggattggaagaattcaatctaatttaatttaataataccaattcaattcaatccaattcaatttaataatatgaattcttccaatccttggattggaagaattcatattattaaattgtctatagtaaccaaagcaatctacaaatttaatgcaatccctatcaaaattctaaygtaattcttcacagaaatcgaaaaaaaatcctaaaattcatatggaaccacaaaagacactgaaaagccaaagcaatcgtgaccaaaaagaacaaagctggaggcatcacactacctgattacaaaatatattccaaagcaataataatcaaaatggcataggactggcataaaaacagacacatcaaccaaaggaat

SEQ ID NO: 363624 - DNA, 571 bp, Homo sapiens
aacagctgatagaagaatcaaccactratgcttagaaagtttggaagagcagaagcagaccctccaattacctcacacatttttcattttgatgataacacagagtttacttgacagcaaaattttctgtggttaacctaagtttttgtctttacatcctatatctaagttttcagaagtctggatatgagaagatgagagaccatgctggaaattttcatttagcccttgatatggtttttctgtgtccccacccaaatctcatcttgaattgtagctcccattattcccacatgttgtggcagggacctagtggcagataactgcataatgcaggcagtttcccccttactgttctcctggaggtaaataagtcttacaagatctgatggttttataaggaatttccccttatgcttgactctcattctctcgtctgccaccatgtaagatgtgcctttcaccttctgccatgattgtgaggcctccccagtcatgtggaattgtgagtccattagacctctttttctgtataaattaccctgtctcaggtatatctttaccagcagca

SEQ ID NO: 363625 - DNA, 571 bp, Homo sapiens
aacagctgatagaagaatcaaccactgatgcttagaaagtttggaagagcagaagcagaccctccaattacctcacacatttttcattttgatgataacacagagtttacttgacagcaaaattttctktggttaacctaagtttttgtctttacatcctatatctaagttttcagaagtctggatatgagaagatgagagaccatgctggaaattttcatttagcccttgatatggtttttctgtgtccccacccaaatctcatcttgaattgtagctcccattattcccacatgttgtggcagggacctagtggcagataactgcataatgcaggcagtttcccccttactgttctcctggaggtaaataagtcttacaagatctgatggttttataaggaatttccccttatgcttgactctcattctctcgtctgccaccatgtaagatgtgcctttcaccttctgccatgattgtgaggcctccccagtcatgtggaattgtgagtccattagacctctttttctgtataaattaccctgtctcaggtatatctttaccagcagca

SEQ ID NO: 363626 - DNA, 571 bp, Homo sapiens
aacagctgatagaagaatcaaccactgatgcttagaaagtttggaagagcagaagcagaccctccaattacctcacacatttttcattttgatgataacacagagtttacttgacagcaaaattttctgtggttaacctaagtttttgtctttacatcctatatctaagttttcagaagtctggatatgagaagatgagagaccatgctggaaattttcatttagcccttgatatggtttttctgtgtccccacccaaatctcatcttgaattgtagctcccattattcccacatgttgtggcagggacctagtggcagataactgcataatgcaggcagtttcccccttactgttctcctggaggtaaataagtcttacaagatctgatggttttataaggartttccccttatgcttgactctcattctctcgtctgccaccatgtaagatgtgcctttcaccttctgccatgattgtgaggcctccccagtcatgtggaattgtgagtccattagacctctttttctgtataaattaccctgtctcaggtatatctttaccagcagca

SEQ ID NO: 363627 - DNA, 526 bp, Homo sapiens
gcaggttagttacatatgtatgcatgtgacatgctggtgcgctgcacccactaactcgtcatctagcattargtagatctcccaatgctatccctcccgcctccccccaccccacaacagtccccagagtgtgatgttccccttcctgtgtccatgtgatctcattgttcaattcccacctatgagtgaggatatgcggtgtttggtcttttgttcttgtggtcgtttactgagaatgatgatacttttatcctcataagagattagttgcccaaacaagttatgaaaggtctcagatgatttcaatatacctctgatgctttaattttatttttagacaagattcttttggaagcagtggacagaaatccaacttacattaacttgaataataaaagagaatttttggttcacacaactttgaagtgaacgtttatcacagttttaggcacagcctgatccagaggaccaagcgaggttatcaagacttggcctgtccctcacctctgtttgtctgtgtggatct

SEQ ID NO: 363628 - DNA, 497 bp, Homo sapiens
aacagtaaatgtcaagggcttttctcacacagggaakgaaccggttttcctgctcataaaagaaaacaaaaatattgagtatgagtctgaaaaatatgaacttcctcatgtttgtcatctccataaactatccctgtcattttatctttttactgagaggaagataatttagcaaaatgaagcacgggctgctatttcattttcttattacatatttgaattcagtctagtataattatggtgtttatgaagtttaaactgatgtagcaagagagtaataggaagaataagtgatcatccactctcaacatgataaggagcatttcttgataagaaagttgactttaccaagtacaggaaatatgtaagaggttttatcagacaataattttaatttatgagatgctttcattgtgttccactaagaaaatatacatttatttctaaataagttagttttaaagcaaagtgagaacaacagtagcaaaaatgtctca

SEQ ID NO: 363629 - DNA, 430 bp, Homo sapiens
tctgctcacctctcccttctctttgctgtctgacttctttatagagcaacctgtacaccattccatagttttatttcagttcccagtttatctcaagcttggcctttatgtctcaattcatcttgatttgagagtgaaatttctcccaaagaagaaacaaggactttctgatgatcaacattagtgccttattgctgttgctcttgtttttcacggttactctctaacatatataactcttaacatgtgtaacyaatataactcttaattacatcctccttgttaaaaactctcctgttttggcctcccatatgatggatggggtaggcagaataatggcccccaagatgtcaatattctaatccctggaacatgtgaatctgttagattacaagacaaagggaaattacggttaaaaatggaattgagg

SEQ ID NO: 363630 - DNA, 541 bp, Homo sapiens
agccatatcttgacttgtgaatttgtaattattattgctttttaattttatatgaataaaatcatgcaatatataatatattgcttcaagtctggcttattagccaactatgtttctgagatccttttatattgttgtaggtagctgtagttcatttttctgatcacatataatattttattgtatgaatataatgcagtttatgtggaacttttactgttattggaaaattgtattatttctaagtgcattcttctatgattattcttgcacatatcttttgggagatctgtgtaaatatttctctgttgtatataccagaaatcagaattatcgggaaattgggcatgcatatgacaattttaaaagataacaccaaattgttgtctatagtgattttattaatttgtactctttccagtaatgtttttttctatattcttgacaatayttgatatgatcagtctttttaaaaattttagccttttgcagggggatagtaaaaagtatctcattttggtttagcttctgtttcctgatc

SEQ ID NO: 363631 - DNA, 591 bp, Homo sapiens
aatacttcttaaaatgactttcataaatacatagaagttactttttttctcttctctgagaatttaatttcttgtgctgtctttcgttttcttccatatgctacttatatgtgaatatattatattctatattaaacaataaacacttccatcacaaaaatcacatttatattcccttttgtattcttcatactgtttggtgaattgttttggatgtagtaggtgaattaattgatatttgttaaatgactgaaagtaacaaagkcctaaaatgtattaagaatacatctgtctctaggaactaaataatttacaatgatcttttaaattacatagtgtttaatgtgatcaacgcactgtgtttttcatttatataatactcacaagttgttattactaataactcaatgttacaaaggggaaaagtgaggtacagggattaaataatttattcaagcttacagaggggcacagcaaggatttgaaccaatgcagtcttcagtccgtactctcaattactatgctacatgtagcttttctaacacataatatttattgtgtcattaattgttgtaagtacattacatgcac

SEQ ID NO: 363632 - DNA, 567 bp, Homo sapiens
  misc_feature (1)...(567): n = A,T,C or G
acatttatattcccttttgtattcttcatactgtttggtgaattgttttggatgtagtaggtgaattaattgatatttgttaaatgactgaaagtaacaaaggcctaaaatgtattaagaatacatctgtctctaggaactaaataatttacaatgatcttttaaattacatagtgtttaatgtgatcaacgcactgtgtttttcatttatataatactcacaagttgttattactaataactcaatgttacaaaggggaaaagtgaggtacagggattaaataatttattcaagcttacagaggggcacagcaaggatttgaaccaatgcagtcttcagtcygtactctcaattactatgctacatgtagcttttctaacacataatatttattgtgtcattaattgttgtaagtacattacatgcactatctcatttatatcctgaaatctattaacagatgctgactacatgccaaggtcacatagattagcacattcagtggcctttataccaaacacagacaaagtgtntcatacttccaaggatttgtgctaatgcagtgg

SEQ ID NO: 363633 - DNA, 567 bp, Homo sapiens
  misc_feature (1)...(567): n = A,T,C or G
acatttatattcccttttgtattcttcatactgtttggtgaattgttttggatgtagtaggtgaattaattgatatttgttaaatgactgaaagtaacaaaggcctaaaatgtattaagaatacatctgtctctaggaactaaataatttacaatgatcttttaaattacatagtgtttaatgtgatcaacgcactgtgtttttcatttatataatactcacaagttgttattactaataactcaatgttacaaaggggaaaagtgaggtacagggattaaataatttattcaagcttacagaggggcacagcaaggatttgaaccaatgcagtcttcagtccgtactctcaattactatgctacatgtagcttttctaacacataatatttattgtgtcattaattgttgtaagtacattacatgcactatctcatttatatcctraaatctattaacagatgctgactacatgccaaggtcacatagattagcacattcagtggcctttataccaaacacagacaaagtgtntcatacttccaaggatttgtgctaatgcagtgg

SEQ ID NO: 363634 - DNA, 534 bp, Homo sapiens
atttatagagctggtctttagatgaatctgtcgaaaaggtatagaatagacctctctaggatgacttttttcaaaaaagaaattaaattgttcatgcaacaccattatgcatgcaagaaaaaatattcatagatgcatgataaacatttcaattgtattacacttttatagctggaactgaaatataatttgatatcacaagcattcaggcatgtttcatcaattttctgttcttttactcatatgaaatgtgtgatacatggtataactataggcgtactttgtatatgagttacatttctgaagctaaaaattaaaaaaaaaaaactaaggaaaaggagaatgtgggcaaatgattgcctttttcttaatacagaatgcygattaatgctgtgatttaaaccaagagaatactcactataactacatgtttgtcatcctttcctaggatgatactaccattttgaattacagtagaattaacaagacttgctcaagataaactaccaagtaactatagttctatattaattt

SEQ ID NO: 363635 - DNA, 603 bp, Homo sapiens
taaacaaaaattcagagattacattgtcagcagagctgaacttgaaatatattttaaaaatttcttcaggcagaaaaaaggtgatgctagatagaatcttgaatcttgacaaggaaattaagagatctataaatgcaataaatgaagacaaaaatacaatttaaatttcttacttttaactgctttgaaagaagttgcagagtatcacatttcatccctaaattccacagcattattttctgagaaaaagactattctctttcaataatcataacaacatcacacttgagaaaattaaggtagacacaatacttcattataatctatgttcaagtttattcaacaaaccccccaaaattttttatatctgagttttaaaatatcaaaccaacattgtgtttactatgcaatctctmgcttcttttaattagaacattttcctcacattttttacttttatcacgttgacgttcttgaagatcccaggccatggagaagggttcccagttggaactttgtgattgtttcctcaggattagattaagattaaacattatggcaagaaaaggacatgagtaatattctatgctttcttttgtcatc

SEQ ID NO: 363636 - DNA, 502 bp, Homo sapiens
tatttcaatctgcaacaattccacagtctttccttgatttccctgactttaacaccttagatcacaaggcagttatgtgrtaaagtttcacctcatttgggcttgtctgaatagtcaggtatcaatggcaagtcacagactcttccctgtattggtaggagctatatgccaagggcacatataataaaagggtctataaagatgttcaaaaataataataaaagcagtaaaaattggctttaaaaatcactataaaaaaggcttctcccagccagcaagtacactgatcccattgtcttgccctctttccctctatcctctcctccttcactggatacaccattggaggtaataaaccactttcattacaattcgattcaggatgctgtgctctttatgctgcgttctgtcaggtagaaggttaagacttctatctgtcccattgctcttgaagttaaataatcatttgactaaggtggtacctgtcagacttctccagtat

SEQ ID NO: 363637 - DNA, 550 bp, Homo sapiens
gcctggtcaattactggctccccagtgctggacaatttacttcaccactcttgttctctgatttctcagctgttaaaggaggatgctatgtcrtatattttagtgttcctgtaaatgatgatcgagcaagtggattgaagatgtttgagtgagttttcttatatcagtatcagtgcctaatgaaatgtgtgagacgttgtaagtacaaataacagacaaacagaaattaacaatgcctgaaaagaaaaggaacatatcctgacaaaattacttaaagaaaaaaaccaaaaacaactgtggagtaaaagcagtctggtcaggctcagagaagggaaggagttcttgatttcctaatgtcgtcctcacaccctataggatttactggtgaaataacagcattctgagaattctcattataacttctaaatctggagataagcagatttgtatgtacacagatggaaaggtcttatctttttcttttacctctttctggctgaagagcaatgaaaagggcttctaggaaaaaaaaaaaagtaaagtggggaaa

SEQ ID NO: 363638 - DNA, 652 bp, Homo sapiens
gtcaatatgaaaaaaatacacagacaatagaaccagataaatttggagaccatgaacctaaggatgcaaactgtaacccaggcaacatcaataaataacaaataaatcaattggaataggcaagcaacaaaacagatacccactgaaagtcacattactgctataatgttttgagatgattgtaattatctcacataatgtgaaaaaagcacagataataaaacaatgaggagaaggtaatggattagaaacatagataaagatgattcaacattaagatccttgatgtcaccgagttatagaatcaaacacatgtctcagtaaataccattaagaaaagttactataaatggaaagaacatgttcyagaaatatttgaaagagtgaatactcaacaccaaagcgtttgctgattaagtgactaatatttgaagaacatcaagaggaagcttctttaagaagactggacagaaatagcaagctaagtaaaagtgaaaggatgggcacaggggctcatgcctgtaatccctgcactttgagagatcaagacagaaggatcacttgaggctaagagtttgagaccgagcctgggtactatagggagaccctgtctctaccaaaaacaaaaagaaaagaaaaattagcagtggtg

SEQ ID NO: 363639 - DNA, 652 bp, Homo sapiens
gtcaatatgaaaaaaatacacagacaatagaaccagataaatttggagaccatgaacctaaggatgcaaactgtaacccaggcaacatcaataaataacaaataaatcaattggaataggcaagcaacaaaacagatacccactgaaagtcacattactgctataatgttttgagatgattgtaattatctcacataatgtgaaaaaagcacagataataaaacaatgaggagaaggtaatggattagaaacatagataaagatgattcaacattaagatccttgatgtcaccgagttatagaatcaaacacatgtctcagtaaataccattaagaaaagttactataaatggaaagaacatgttccagaaatatttgaaagagtgartactcaacaccaaagcgtttgctgattaagtgactaatatttgaagaacatcaagaggaagcttctttaagaagactggacagaaatagcaagctaagtaaaagtgaaaggatgggcacaggggctcatgcctgtaatccctgcactttgagagatcaagacagaaggatcacttgaggctaagagtttgagaccgagcctgggtactatagggagaccctgtctctaccaaaaacaaaaagaaaagaaaaattagcagtggtg

SEQ ID NO: 363640 - DNA, 652 bp, Homo sapiens
gtcaatatgaaaaaaatacacagacaatagaaccagataaatttggagaccatgaacctaaggatgcaaactgtaacccaggcaacatcaataaataacaaataaatcaattggaataggcaagcaacaaaacagatacccactgaaagtcacattactgctataatgttttgagatgattgtaattatctcacataatgtgaaaaaagcacagataataaaacaatgaggagaaggtaatggattagaaacatagataaagatgattcaacattaagatccttgatgtcaccgagttatagaatcaaacacatgtctcagtaaataccattaagaaaagttactataaatggaaagaacatgttccagaaatatttgaaagagtgaatactcaacaccaaagcrtttgctgattaagtgactaatatttgaagaacatcaagaggaagcttctttaagaagactggacagaaatagcaagctaagtaaaagtgaaaggatgggcacaggggctcatgcctgtaatccctgcactttgagagatcaagacagaaggatcacttgaggctaagagtttgagaccgagcctgggtactatagggagaccctgtctctaccaaaaacaaaaagaaaagaaaaattagcagtggtg

SEQ ID NO: 363641 - DNA, 583 bp, Homo sapiens
gctgagatggtaacttaatttttgatggtgggaatatgaatgacttttttgcagatctccataaaatctctttaaagtttccaaccccctacctcctacacaaaaaaagaaaacctggttgaaataatgcatattaagcaacatacattatgccaggcacaaaacaagcacacaacaaatgctaattcatttgctttcctttactttcactcagagaaaagtctggtttaaacttcatgtagtccaaattgggggtataacttggcttaataatatcttatacttgtgagaatgattagtggttttcaaaaaatatatacatacagcagtttccaaattaaatccctgtgatgccttttgtgagatgcacatttctgttcccatttgatagatgagaaacttaaagacatttttytaagtaactttaggtcattttgaaagacacagaagttaggtcttgttgaattatcatcagtcagttgatatcattcctttttttcatttatatttgttatcaactttttaggagcttgaatttataccacttgataagtaaaaagtctagtttcaactaattgtttaa

SEQ ID NO: 363642 - DNA, 641 bp, Homo sapiens
ttttaaaacgttattacaattctatttctagaaacttatgactgtaactttaatacacactggcaaccataaaggaatgaaccagactaacagttccccagaggatattatatgactaaatttattctactgtgataacataaatagaacaaacaacattaacttttggtaattaattaattcattcatttaacaaatatttactgaatccctaccaagtaccagcaagatatagtccctgccatctggaagcttaaagcatagtgaggaagaaacttcagtttcttatgacttctataaaagttaccamaaatgttatggcttaaaacagtacatatttattttcttagagtcctggaggtcagaagtccaaaatgggattcacggggctgaaaaaaggtgcaggcagagccatgctcagtccacagatagaggggagaatctgtccccctgcctttcccagcatctagagcttccttcatcacaccccatggctcatgatcccttcctcagtcctgaagtctagcagtgcagcatcttcacgtctccctctgctctgctgcctcattgccttcccctctgtcaggtctaactctgcctccttcttacaatctggatagtccagggctattttaatctcc

SEQ ID NO: 363643 - DNA, 641 bp, Homo sapiens
ttttaaaacgttattacaattctatttctagaaacttatgactgtaactttaatacacactggcaaccataaaggaatgaaccagactaacagttccccagaggatattatatgactaaatttattctactgtgataacataaatagaacaaacaacattaacttttggtaattaattaattcattcatttaacaaatatttactgaatccctaccaagtaccagcaagatatagtccctgccatctggaagcttaaagcatagtgaggaagaaacttcagtttcttatgacttctataaaagttaccaaaaatgttatggcttaaaacagtacatatttattttcttagagtcctggaggtcagaagtccaaaatgggattcacrgggctgaaaaaaggtgcaggcagagccatgctcagtccacagatagaggggagaatctgtccccctgcctttcccagcatctagagcttccttcatcacaccccatggctcatgatcccttcctcagtcctgaagtctagcagtgcagcatcttcacgtctccctctgctctgctgcctcattgccttcccctctgtcaggtctaactctgcctccttcttacaatctggatagtccagggctattttaatctcc

SEQ ID NO: 363644 - DNA, 429 bp, Homo sapiens
cagtaagtgctggcccacagtaggtactcaaaaaatatttgrttaatgatcagtcaacccagagaaataaagatgactttaaatagtttactaaattacttaaagccccatatgatatggccctgtttaccccatcctttcacctgtgttcagaacattccaaatacagctgccattttattttcctgtttttcggaacataatgagtttcttcccccgatggcccttggtcttcttgtttcttctgcttgaaaacttacccccagatctttgcattctagattctttttgacatttagatctcagcctacttgctactaccacatagtgaaccctcccttggctaaccaatctaacgtagcagttccctatcactctgtatttttccccaaaggcccagtcactgtcagcaatgattattgatttact

SEQ ID NO: 363645 - DNA, 429 bp, Homo sapiens
cagtaagtgctggcccacagtaggtactcaaaaaatatttgattaatgatcagtcaacccagagaaataaagatgactttaaatagtttactaaattacttaaagccccatatgatatggccctgtttaccccatcctttcacctgtgttcagaacattccaaatacagctgccattttattttcctgtttttyggaacataatgagtttcttcccccgatggcccttggtcttcttgtttcttctgcttgaaaacttacccccagatctttgcattctagattctttttgacatttagatctcagcctacttgctactaccacatagtgaaccctcccttggctaaccaatctaacgtagcagttccctatcactctgtatttttccccaaaggcccagtcactgtcagcaatgattattgatttact

SEQ ID NO: 363646 - DNA, 586 bp, Homo sapiens
atgggagaaggaagaatagatcttggtagacaatttcagtctacactcaaggacacttaccacaatttgtaaatgatgtattcattttaaaaacaatcttctggtcttcccattagatagtaagcacaataaaggtaaaatacctgcctgttttattgttttattcacaaataaaccttctcccctgaatactacttctgtcttttagtaggttttctttttttttttttttttttttttttttttttgagacckattctggctctgtctctcaggctggagtacagtggcgcaatctcggctcattgcaacctctgcctcctgggttcaagcaattctcatgcctcagcctcctgacatagctggaattacaggcgtgtgccaccatgcctggctaatttttgtaattttagtagagatggggttttgccatattggccaagctggtctcaaactcctggccacaagcaacttgcctgactcagcctcccaaagtgctgggattacaggagtgagccaccacacccagattagtaggttaattcattaaataactaattgaatgaatgaaaggattttacaggta

SEQ ID NO: 363647 - DNA, 586 bp, Homo sapiens
atgggagaaggaagaatagatcttggtagacaatttcagtctacactcaaggacacttaccacaatttgtaaatgatgtattcattttaaaaacaatcttctggtcttcccattagatagtaagcacaataaaggtaaaatacctgcctgttttattgttttattcacaaataaaccttctcccctgaatactacttctgtcttttagtaggttttctttttttttttttttttttttttttttttttgagaccgattctggctctgtctctcaggctggagtacagyggcgcaatctcggctcattgcaacctctgcctcctgggttcaagcaattctcatgcctcagcctcctgacatagctggaattacaggcgtgtgccaccatgcctggctaatttttgtaattttagtagagatggggttttgccatattggccaagctggtctcaaactcctggccacaagcaacttgcctgactcagcctcccaaagtgctgggattacaggagtgagccaccacacccagattagtaggttaattcattaaataactaattgaatgaatgaaaggattttacaggta

SEQ ID NO: 363648 - DNA, 586 bp, Homo sapiens
atgggagaaggaagaatagatcttggtagacaatttcagtctacactcaaggacacttaccacaatttgtaaatgatgtattcattttaaaaacaatcttctggtcttcccattagatagtaagcacaataaaggtaaaatacctgcctgttttattgttttattcacaaataaaccttctcccctgaatactacttctgtcttttagtaggttttctttttttttttttttttttttttttttttttgagaccgattctggctctgtctctcaggctggagtacagtggcgcaatctcggctcattgcaacctctgcctcctgggttcaagcaattctcatgcctcagcctcctgacatagctggaattacaggcgtgtgccaccatgcctggctaatttttgtaattttagtagagatggggttttgccatattggccaagctggtctcaaactcctggccacaagcaayttgcctgactcagcctcccaaagtgctgggattacaggagtgagccaccacacccagattagtaggttaattcattaaataactaattgaatgaatgaaaggattttacaggta

SEQ ID NO: 363649 - DNA, 586 bp, Homo sapiens
atgggagaaggaagaatagatcttggtagacaatttcagtctacactcaaggacacttaccacaatttgtaaatgatgtattcattttaaaaacaatcttctggtcttcccattagatagtaagcacaataaaggtaaaatacctgcctgttttattgttttattcacaaataaaccttctcccctgaatactacttctgtcttttagtaggttttctttttttttttttttttttttttttttttttgagaccgattctggctctgtctctcaggctggagtacagtggcgcaatctcggctcattgcaacctctgcctcctgggttcaagcaattctcatgcctcagcctcctgacatagctggaattacaggcgtgtgccaccatgcctggctaatttttgtaattttagtagagatggggttttgccatattggccaagctggtctcaaactcctggccacaagcaacytgcctgactcagcctcccaaagtgctgggattacaggagtgagccaccacacccagattagtaggttaattcattaaataactaattgaatgaatgaaaggattttacaggta

SEQ ID NO: 363650 - DNA, 529 bp, Homo sapiens
tttgcccagcctcatgtgacactcctatgcagatcttcagagcacattatttgagtaatgccattctttctaacactgtgctctgcaattccagccacttcagcctctccaaatcttatctttgtcttctcagcttagtgacacagtactttactacttatgtctcccctacctactccctgatctggatggaaagcatctctacacagaaaataagggctaccaaaaccttacttcatttatttcccctctttcaggatcatacttttgtgttgccaattgttcaagttccagaaagaggttttttttttycatatatttgtctagtttttcactgtttttgaaatactaattacggaggtaaatacagtgaggcttagataaattaagtgacttaaccaatgtaagttgcataagttgcatatctgggattcaaatctacatctcatagattctgacttcaaaactcatgcttataacactttcatatttatattgaattaacttctaagtatctgacttacttaat

SEQ ID NO: 363651 - DNA, 602 bp, Homo sapiens
agtgtatttttaatgttaaagctagtttttaataacattttataatctattcagttttaatcagttttaccrtaaggtaagatttttataaacctcttataaccctttacaatttttttctctgagtagaacaatgttctaagaaaactctgttgtacttttattccaatgtgcaatttatggaaaaaactgaataacaccattttaactttagccaacatgttcacacacagaatctcttacaattaatgttctataaaccttccgtaacttgttcaaatctttagctttatttaacaatcctttaaccctctaacctaggcaaaaatttacatttccataccttcttataatcccttacaaataacacatttcattctctttacacaccttgcatgtaaacctattttttcagtagtctcaactacatattacaatgttaactcttagcaacttttacttttggtgaaaatcttggtaagtataggattttaattatgcactaggtgtgaagcctaggacccagacagaaatgcagataaggtctgactctttccagcatctaactccacatgtcccaggccttacctagctgtaaagca

SEQ ID NO: 363652 - DNA, 612 bp, Homo sapiens
cagtcctgcatttctccggtggtggcacaaagaaacaattatttcttcagacagggttgggttacctagcaatttcccatgtctttcttttctcaaagatttctctctttccctttctttctttctcccagtctctctccctctctctctgtaagcatctgatctgcgataaaagaatgasggtacaatttggtagacttaatcataggcaatttttaaacatttccctagagtggtactagacataacttctaacatatacaagtgaaaattaaattcaaatcaacaattactgagagtctcccacctgctatgcctcatgctggggatagaggtcaacataagacttgggctctgccatcaagaagaaaacatggcagaaatggtaaagaaatgcaaggaatagcaatcacctcataaacacccctttagcatcaccaactgcaaagaaattctcaggatactgagcctctgtttcctcatattttaatattttaatattaatattaatatcatttaacatgatattaacaataatacttcacaggatgattgctgtaagagtcaaactagaatgtgtgtgtgaatgttgatttattttgtttttgcaac

SEQ ID NO: 363653 - DNA, 571 bp, Homo sapiens
tgcacattaaaaagcacacagacagaggaacccacctttttttccctttcccagtcaccctgggagagaccgtcttctcttcttcattcatgtgtggaatcccaattaagcgtagtaaacaaaggaaacttcttacattgtgattttcctccctcttcccttgttttatttgcagtctggatttattgctcaagaattacctcctttaagcatcatcccctattagccagagagataaaagccataaagggaagggarctccttcagttctctttgccagttgtgagacagagcagctgcgtttacaaggggagttgacatctgttgactgagccgagcctgtcctgccccagcactgtgctcatgcttggaatgcaaactgcagctatcagagacagctccggggtttaataactgcttgagcccagagcaaatctacttgggcactagaaaagaaattgtatagttttaaagcagatgtatgctcttaacgtggttggcttgtaaagcaataaaacttggggtttttccccccttagcctatcacaactcttagaataaacagtgtact

SEQ ID NO: 363654 - DNA, 571 bp, Homo sapiens
tgcacattaaaaagcacacagacagaggaacccacctttttttccctttcccagtcaccctgggagagaccgtcttctcttcttcattcatgtgtggaatcccaattaagcgtagtaaacaaaggaaacttcttacattgtgattttcctccctcttcccttgttttatttgcagtctggatttattgctcaagaattacctcctttaagcatcatcccctattagccagagagataaaagccataaagggaagggaactccttcagttctctttgccagttgtgagacagagcagctgcgtttacaaggggagttgacatctgttgactgagccgagcctgtcctgccccagcactgtgctcatgcttggaatgcaaactgcagctatcagagacagckccggggtttaataactgcttgagcccagagcaaatctacttgggcactagaaaagaaattgtatagttttaaagcagatgtatgctcttaacgtggttggcttgtaaagcaataaaacttggggtttttccccccttagcctatcacaactcttagaataaacagtgtact

SEQ ID NO: 363655 - DNA, 567 bp, Homo sapiens
ctaggcctttactgtgagatgtggtcctttgatgggacctgggagtttacatgtttgacaagcactcaggtgattgggatgcaggtggcctcaaagtgcactttgagaaacattggtaattgcattcagtgcagagatttttaaagcattcatcagctcttcaaaataatttaatcagctgctttatatactgcagctatttttggtcatttcagagatggtttcactcatcccacccccatcccactttcaccttctgagagcgartcaatcctggaaaaatgaaaaccccaagtgagccccacgttggaaagagttgcagcttatactcagtgaggaaaggacaatcaagtgagaaagaaatccattggtggggaaaaaccccatcaagtgcaggaatcatagaaaccctctctgggaggagaactgaccttttctgatgaaaactcatttcatttatttagccacgggtgacagagtgtatctgagtctgaggcatttggtggaggctctgtaaaaactaggttaaggactgaatcaaaatctcttccaattacacgaaggagg

SEQ ID NO: 363656 - DNA, 560 bp, Homo sapiens
gcaaacatctctggaatgcctgctacatgccatcactgtgcttactggtaacactccatccccctcagcttaattgaaactcacagtctgctgggaataatcaacctgtaactaaacgacactggtgcaatcatggagctattcgagtatgatgggaacataaaggctggcaaaggtagatcatggtgagtcagggaagacttcctggaagaagtggtttgagcttagycttttttctttcttttttccttttatagatttagagagtacaagtgcagttttgttacagggatatattgtgtagtggtgaagtgtgggcttttagtgtccccatcgcccaaagagtgaacaatgtacccaataggtaaattttcagctctcaccacccccccttttttctccccttttttggagcgcccattgtctgttatttccctctctgtgttcatgtgtacccattgtttagctctcataagtgagaacatgtggtatttgattttctgagttattacacttaggataagggcctctagctctatccatgttgctgcaaaagacat

SEQ ID NO: 363657 - DNA, 560 bp, Homo sapiens
gcaaacatctctggaatgcctgctacatgccatcactgtgcttactggtaacactccatccccctcagcttaattgaaactcacagtctgctgggaataatcaacctgtaactaaacgacactggtgcaatcatggagctattcgagtatgatgggaacataaaggctggcaaaggtagatcatggtgagtcagggaagacttcctggaagaagtggtttgagcttagtcttttttctttcttttttccttttatagatttagagagtacaagtgcagttttgttacagggatatattgtgtagtggtgaagtrtgggcttttagtgtccccatcgcccaaagagtgaacaatgtacccaataggtaaattttcagctctcaccacccccccttttttctccccttttttggagcgcccattgtctgttatttccctctctgtgttcatgtgtacccattgtttagctctcataagtgagaacatgtggtatttgattttctgagttattacacttaggataagggcctctagctctatccatgttgctgcaaaagacat

SEQ ID NO: 363658 - DNA, 604 bp, Homo sapiens
tgtgggcagtgggagcagatcatgctggaacaggcaataagaggtgcactgcctatgagaatttaaaaacaacaaaacccactaaaaatctgctgtggtgacccttaacaatgtcagtgataaaacactccttcccaaaagggtggaccactcctgccaagccccaccttggtacacgctggtccaactctaggttatgggtctcgggattacacctgctctccataccagagagaactgcagaagcatctgaattctgttgtttttgcttttataaagaytctaaccagcactgaggtaatggactactttgagtagatcaaaatgaggtggggaaatgtgatccccagctagaacactgtagtgatttcctcttggtactgtaataaatcatcacaaacttagtggcttaaaacaacgcaatgtattctcttacagttctagagatcagaagtctgaaagggtctcatgaggctgaaatcaaggcattggcaggatggcatttttatggaggctgtaagaccgatttccttaccttttcctgcatttagaggctgcctgcattccttggcttgtgtccccctccttcatcttcaaagccagt

SEQ ID NO: 363659 - DNA, 464 bp, Homo sapiens
attaccttgacatctcaagtacagccaaagtccatcctggctcagggactaggcaatgagtcagacctgaatcagaactaagtatcaagcagtttataacataaattatattaaagggtcaggaaaatgttgtttgaggtatgtgaggatgatttagttgacttttataggagaaaaatactagctcatacttttttccacctacagagggcctttctagactgaagatgcyggcaatacagtaacatctttgagcttcatggtgacttaatgtcaggcaacattaatggcccactgaatggaccactgatgtcggtggtcattaattggaaagtgaaagcaggtgtcatagttggatttttcactagattaaaattttggtttggatttcatcatggcttagatttcaccagatgaatgaaataagggggaaagtgaaagtgaatcattgatgtgcaagtgat

SEQ ID NO: 363660 - DNA, 281 bp, Homo sapiens
cagtttcaagagatttaacgataatctccattctgaagaccccttcaaagatccaccttcctccatggtgttctttatctgattaatatattaacttttcattttaaagagatcatttatcttgaagcaaaacgaactcctagtaaatactgcattgctagtatcaacrtggacaaactacacagagtctaaaaagaatgctgaagccacagtaggagaaacagtctattagtgcttttaatttagtgggtggcaactcaaaggaattagaaggtagatca

SEQ ID NO: 363661 - DNA, 580 bp, Homo sapiens
tctttactacatacatagtattatactagtaaaccttattgtaattgttattattattattaacacagaatggtatctcttggaaaaatacgcttacattaaaacattaaagctcgctactaaaataattttgtttttcattgattccagtttttcccacccactgtccatttaggatggcttcagaaaagagaaatggtgtcaaatctgaagcagtttatttagtgtcttcataaaaaattctgggatgaagtgggaattgctcattaaaatgcatacatatttttaaataacctgtgttttgcatttattctttctgcctctgtaccttacattaccaatgataagcaagaggaacatggcattcagatttagcagttatataactgagctgaaaaaaatctcaacatttaattaggaactgtgaaattgtataaacctgcttcacttttctcccattaaaaactttgttaacacagactattgccgcaaaatgcatttgattagacttttcttatttaaaaggtttttatcattattttttgataatttgttgttttttyttgctgtgaggattcta

SEQ ID NO: 363662 - DNA, 484 bp, Homo sapiens
ctcaacatatgttcacaattcatggtttttcacaatggttctactactaatttttttttttgtcttatatgccattcatgttcaattctctagacttccatttggatgtgtgtctaaagcctatataaaaatactataataagaaatacttaaggtttcctacagttggtattttaactaaagtagcacatgattagagcccgctgggaattctaattaattgaatttttaagaggcagaacctgaaagtataattttttgcaagtgatttattagatgagtttttagaaagaacccaaaggaaaagagggaagtggggcagggaagagatagtagccaagctyggtatactgtcaagcaaagttccacagaaggtaaatttgattcaatcctatagctctggagagaatacaggtcatacctagagttgtctcacaactaggagcacgggagctggagaagttataccctagaagccagtcat

SEQ ID NO: 363663 - DNA, 587 bp, Homo sapiens
acatcaacaatattatccctgaatctttggtaattgacagcattttctctcattttccttaaaaaaaaagcctactgcactttgcccagatttcttaaaatcaaataaataaaataaaataaaatacagctaaatgtcagaaaaagtctcattaataatgatgataaccactttaagcaccttctacatgctagatkgtgtaccaggcactttacatatctcaaaacattaaagcacatttttttttcatattcagatatatttctgaggatcacaattgtcaccgattatatgattaaatttgtatcatttttaccctagtaatctcaaaaagttaaacacaaaggcatttttaaatttacagagaatcaaactgactcaattacagagattctaccccttagcaattggtttcagaaagtgattatattccccagaattgaaatgagcggacagctggactctctggaaaccaattccgttacctttatctacttactccaagtatatatatttgcagacaggtgttatcaaatcatggattctgtgtgatttatcctacaataatgctactgttaaaacctgtg

SEQ ID NO: 363664 - DNA, 587 bp, Homo sapiens
acatcaacaatattatccctgaatctttggtaattgacagcattttctctcattttccttaaaaaaaaagcctactgcactttgcccagatttcttaaaatcaaataaataaaataaaataaaatacagctaaatgtcagaaaaagtctcattaataatgatgataaccactttaagcaccttctacatgctagatggtgtaccaggcactttacatatctcaaaacattaaagcacatttttttttcatattcagatatatttctgaggatcacaattgtcaccgattatatgattaaatttgtatcatttttaccctagtaatctcaaaaagttaaacacaaaggcatttttaaatttacagagaatcaractgactcaattacagagattctaccccttagcaattggtttcagaaagtgattatattccccagaattgaaatgagcggacagctggactctctggaaaccaattccgttacctttatctacttactccaagtatatatatttgcagacaggtgttatcaaatcatggattctgtgtgatttatcctacaataatgctactgttaaaacctgtg

SEQ ID NO: 363665 - DNA, 585 bp, Homo sapiens
attttttctttttttcatagtagaactttttaaattttttttcaaatgaaatgtatgcaagaaaacctttcattccacagataaaattgaactaatctggctaatgtcccggagggagaaccagaaccccactcaatgccctcctcaatccctctcaccctaaatctccatggtgtgccctagaaatcccctagctctccaaggagcatagtttgaggactactaatttgtagtgacaaatctgattctcaagtgtgacttgccaaacgattcatttatttataagtatagtggcaaaccaatttgacgggcgttgtgaaagattctgggtttataacttgaatgagctcagagtctcctggggaaggcagacaagcccacagctccggtgcrgtggggcatgtgtcaccactaacatgtgaagagagtgagggcaattcactaacttggcttacaggagtctagaaaggtttcaacaggttgcaggtaactgaactggcagttgaagagtgagtgggaatttttcctggaagagaaaagtgggaggtacaggcttattacgagactgtcttactgtatatttgg

SEQ ID NO: 363666 - DNA, 416 bp, Homo sapiens
  misc_feature (1)...(416): n = A,T,C or G
taacagttacagggctttttaatatataccactaaccaaatgaggaayatttcatattttatttcatatctcataaattaggagtattcgtttcattttataatgggaaaatccggctcttggaagagattggatacaaattcaagtctctctgacatcaaagcccaactcttctcatctccccaangnaaaggagcaagagaagtaaaacattctaaataatctgtataattggctattcataccaaggtactcactccgaatgcaactcttctcgttttatgcccacagaaagttgtgcttctgctttggtagatgaggacacaaatgcaaacatgtcaatgacaaagtcattgccaacattgcaaactgctcctttacatagctggaagaaatcaattctgtctcctatccag

SEQ ID NO: 363667 - DNA, 540 bp, Homo sapiens
cacaatgccataaggcctaaacgaccaactggttgattttctagttcatttcaatttctgctacaatgattattgtgtgttcattgtttgcgccaggtctctttacatgccaggaaatgaaattcacttaaagtagtataaactaaagcgggggtggagttaaaaaggatcaagagaaatcttagaccaacaaagtgcaggaggcatatctgggaacaggaaggacacytgccacacctgccaattattctcttcctccctctctaggttcctttatctacaggtgtcccagtctctgttaactctgctttgcatgaatatctgctccactgtcttcccagctgatcagtctccttgtttttacttatagttcatgcccccataacatctcagactgcatattgctttggcttatcctagccacaacactgcataagcttctctgcccctgagcctaccatgaagtcctcttgtgactcttacttcggatttttgagatgtttaatgccgcacatctgtaactgcagaaaagaggttgcc

SEQ ID NO: 363668 - DNA, 625 bp, Homo sapiens
tcatatgactattttctggtcatgtttatagagctaaacatcagtatgaaatggaaataaataaaataagcaatctagatttatttaggtggtctatatggtggggaaaaatttgaaatgaggaattaaaacttacatattttaatccctgcctaccaatccccagacatatccaagtgcctcctcaaccaaccacctctcctattgttcagacatggtccagtatagacaatttcatgtaattccacatttaaaaagtataccctgctgatttagcgattatcacagatttaggatacttttgtcattacgtcaagaaaaataatgcttttaaacacttacgcatgtgtaaagtaaaacctcattctcgtgaggcactacaataccatatacacactcagcatttcctcagttttacagtttctatgawctattattcattgtgttagtccttacaaggatacagagttgaagggcatagttttttaaaactcatcaaaattactggtttctgaatcctctaccacagagccttagatcccaagaaataaatagaaagaacctctcccagtcgcattcttgacaggagaaaaacctgactttgcaagtgaaaagttagaagaaa

SEQ ID NO: 363669 - DNA, 518 bp, Homo sapiens
tgtaccaataaatattcccaccaacagtatgtaagagctccctttttccacaccctagataacagtyatctcttgtctttttgacagtagccatcctaacaggtgtgatgtgacatctcatcatggtttagatttgcatttgcctgatgatttatgatgttgagcacattttcacatacctattggctatttgtatgtcttctttggaaaactgtctatttaattcagtttctacagttggaaggaaaaccatgtatatagaggaagtaataaagagcaacggaaaggactaatatcttaatatgtagcgtaatttgagattctgaggaattcattagaaaaaagaccaatttttaaaggtatttatttctagacattgcaagttaactagcaagagaaaatatgagagaattttgtcacctatttgaagtgctatttatatactagtttacttaatattgatttcttagcaacattttctataatgtcatagataaataaaggaagagccccatgtt

SEQ ID NO: 363670 - DNA, 559 bp, Homo sapiens
tttatagagctgaatacaagttacctaacctctctgagactcagtgttctctttacattaactagaaataagaatgagtacacaggaagagcaaatgaggaaatatccatgagagtacattctaaaatacaatgtttgaagcataaataaggcttagtaaattgccttaataccaagattatgaacagagacatgaaaggaccattgtccaaagattctctaagaattttactaccaatttctactccttttaatgtaartaatatgaatactaatctgcacatgaaacatgaattgaagcccactatttcaagatgtggtagagctgaatatgatactgcacttagcagttcactaacagcttgtctataattttttattaataaataatactaagcctcgataaatacctctgctgctcttaggagagaaaatgataatttggtataggtaggtgggccttgtgttacctcaaatttattccgtttgatcttgtctcagtttggaatcataaattttcatataaagaagtaaagagactgaaatggcatattaacag

SEQ ID NO: 363671 - DNA, 515 bp, Homo sapiens
catcatacagtaaattaaaaaaaaaaaaaaaaggatttgaaccaaagtctgtctttccacagacayggagctctaaatcaccatgctttgctccccctgcatgaattaaccaggtacaaaatgagagcaaaccttattagggtgtataacatgtgcttagcaatacattcttcacctaaggaactaatgtgtcttgcaaccagtcaatagatgcttttttttttttttttgtataagaggcaaaaggtgaaatcacggagactatctttttaaaacatattgagatgcctccaaatttgagtagaagcttagagatgggctccaaggtcagctggaaaataggaaacaaacaacttattatttttcctgagcccagttccaacttagatttgaaatccttctctactgtaaactgccaattacttaaaagtaagaactgtgggtctcctgagagaggtggtgatagactgggatggaaaggatgatgagttgcttccagaaatatacatatacat

SEQ ID NO: 363672 - DNA, 544 bp, Homo sapiens
  misc_feature (1)...(544): n = A,T,C or G
ggttctctttattcatgggagtccatttattctatcaatcacactatctacttgccacttggaacccatgygagcaccaattcacgagcgccagaaccacaggcaccgtcttggtgagtatctatgagggcagaatctctgtactctacggtgactaacagacctggtcaattcctctcacagagtttgcatatgaaacatggtgggtggcaaaacaatgatagatatacacagagcaggcaaaaagtagagaacatggagtagcaggaacagtgaggcaatagaagctaagagaaaacagatgctgtaaattagagagagggcatccaaattagctggcagccaggtagaaaactggaagtaaaggaaatgggaggaactgaggcataagcatgagagactattcaagccggggctggatcagcagaggggttgttgatggttgcctagagctcctgtgcccgagtgcccagagcagtgatgaaccatgttccggttcttcatctgaccttcctgcctggcttggncnnttggagactttttt

SEQ ID NO: 363673 - DNA, 541 bp, Homo sapiens
aaatgatcagggctgcaattcttccctacaggtgctgatatttccttagtttaagcataatgagacccatttaggcagcacattgcaagggaataagtgcactcgtataagatgatgggcaagtcactaaaccttccacatatccttcactccatcttgtcctacatccagaaatacattgcctggagtatttccttgcttaattaaccaacaattctgataaataaaaaaccactgcttgtttccaaaataagactaattaaagtccattgttcatagtgggtaattagaattgagcccaaccttccctgatagtggaggcattttgttttactcagataagtatttattaggaacaggtttggaatacttttaagccaggaaaatacctacatttttgcatgggatatctagaacccctctttgctttttggaggtatacaaatttcatttttgtgcctataaacaccagaaaaaaagaargagacagatagactagactgtcattttcaaatgttcatatgcatgtgagttacctggg

SEQ ID NO: 363674 - DNA, 366 bp, Homo sapiens
agggtcatatttctcctctagagaaagcccatttaacaacaaaagacaaacttttaaaatggcagcactgcctagatactaatggtttctgatgcsttattcttcctgtaaataggtcagatataaaggtttagaagtcagcattaagaccaaatgcagcatctaaactagagaaagtgagtgaggaactgccttgaagtccattctatcaatttcattttaacctgatttatttggctatatgtttgccccctctgcatttcctatatcagctccatcacaaatcagtcccctccaagttgtattggaaaagcaatatatgtgattgagatattgttaacaacaaagccaattctggtcccagag

SEQ ID NO: 363675 - DNA, 460 bp, Homo sapiens
aattacaaatataaagcatctggcttgccacagcctgagagtccaagggaagcstcatatacttctgtatatccaaggacagaactaaataaaggagagggattaattggcacctccaggcagtttccagtcagtttatgaaagagtatattcatgtgaaaacatttaatttccaacccgcctgtttccatgaatgatggtaaaaataatacaatcttactttcacgtcaattatgccagtttcttgttgtctcactactatgaagaactttctcaaattaaagaaaatttggaaaactcacacccagaattaaagtaagatactgaacctgtataaaactccaaatgttcaccattccttgtcaagaattttatctaggaaaaaagaatactggattatctttctaccaaaatgccaggaagctcatgtttgatttatgcttcaaggtattgagttgta

SEQ ID NO: 363676 - DNA, 460 bp, Homo sapiens
aattacaaatataaagcatctggcttgccacagcctgagagtccaagggaagcgtcatatacttctgtatatccaaggacagaactaaataaaggagagggattaattggcacctccaggcagtttccagtcagtttatgaaagagtatattcatgtgaaaacatttaatttccaacccgcctgtttccatgaatgatggtaaaaataatacaatcttactttcacrtcaattatgccagtttcttgttgtctcactactatgaagaactttctcaaattaaagaaaatttggaaaactcacacccagaattaaagtaagatactgaacctgtataaaactccaaatgttcaccattccttgtcaagaattttatctaggaaaaaagaatactggattatctttctaccaaaatgccaggaagctcatgtttgatttatgcttcaaggtattgagttgta

SEQ ID NO: 363677 - DNA, 605 bp, Homo sapiens
tggatattaacagttcccttctcaatggtgacagatgaacacttccattagggcatttaccaccatgaactgtgcttgctgttttgataatactgttaaaaactatttaaataacagcagtagtaatgtcatattagtaactgttcttattaaatgctcattctgtaccaagmactacactaaacagtttacatgttattcccttgacaaccccagtggtaagattatgcctactttactgaagagaaaactgagacactgggagcttaagtaacttgcccagagtcacacaggaagtggtagagctgagatgataacccgggtctgctagcttcaaagcccctgttctcgtcactatattacactgccttgaaggaagaaacttcttttcaggaactttctactgcccatcagcctcacacatgctaaaaaataaccaattattcacaagctaacctcctctccaacagtcaaaacaaaaaggccctggccagagctatcatccaatgtggaaggaaatcaacacagttgcagacagtggtacaaaaggatttcatctaaaatcctctgtgtgacagatcatcaagtccctacatatgtcagtc

SEQ ID NO: 363678 - DNA, 578 bp, Homo sapiens
attttatgaagtacacataacctttttaaacctttgcctaaaacatggtcactaagactttctcctgttgttttcttctagaagttttatagatttagctcttaaatttcaatctatgatctattttgagtttttttttttaatttagtgtgagctaattaytaaggtttctttctcacttaaaaaaatatgtatatccatttgttctagcgcaattcatttaaaagcctatcctttacccccattgctttagcatatttcctataagggctatatatacagatacctatatatgtatatattggtgtatatatatatgtatatgtatatattggtctatgtatatatacatatatacatatgtatatattggtctatttttgaatatacagtttacccttaaacattgtgggtttgaacttcaagggtccacttaaatgtggacttttttcaataaacctctcctgcaactctttccatccccccacccttctcctcctcagacttcttaacgtgaagaatgaaaatctttatgatgatccacttctacttaatgaataggagacacattttctttt

SEQ ID NO: 363679 - DNA, 578 bp, Homo sapiens
attttatgaagtacacataacctttttaaacctttgcctaaaacatggtcactaagactttctcctgttgttttcttctagaagttttatagatttagctcttaaatttcaatctatgatctattttgagtttttttttttaatttagtgtgagctaattactaaggtttcyttctcacttaaaaaaatatgtatatccatttgttctagcgcaattcatttaaaagcctatcctttacccccattgctttagcatatttcctataagggctatatatacagatacctatatatgtatatattggtgtatatatatatgtatatgtatatattggtctatgtatatatacatatatacatatgtatatattggtctatttttgaatatacagtttacccttaaacattgtgggtttgaacttcaagggtccacttaaatgtggacttttttcaataaacctctcctgcaactctttccatccccccacccttctcctcctcagacttcttaacgtgaagaatgaaaatctttatgatgatccacttctacttaatgaataggagacacattttctttt

SEQ ID NO: 363680 - DNA, 486 bp, Homo sapiens
tattactgtctttttctaatgataatttgtctatttccttcatttgttccacatgtattaattaaatttctctgcaagaataagttatttcttatctcctattcactgattcatttacttatatagtaagggtttcatgatatttattttactcttctgatttttatccaacaccgtcattatttattttgttatttaaattattctggctttggccattgagatctctttcaggtatttttcctgatttttcaagtgggtaaactatttaaaagttcatttcctacaaagaaaaattagaaagcagcttggagttgaggatctaggaaaacttgtgtggacctattgctgctgattggacatactrctgtgaaaacataaatggctctctttgggtctcagtttcttcatttgtaaaatgtggaagttggactacataatagtttattttcaaattctagtgttaaataattgtgaagtataact

SEQ ID NO: 363681 - DNA, 545 bp, Homo sapiens
ggagctcatctcatggatgcaaggatggttcagtgtatgcaaaccaatcaacgtgatacatcacgtcaatagaatgaagtacaaaaaccatatggtcagttcgatagatgccaaaaaaatttgataaaattcaatatcatttcatgataaaaactctcaacaaactggggaagtagaaacatacctcaacatgattaaagtcatatataacaaacccagtagctgacatcatamtgaatggagagatctgaaagcttttcctttgagatctagaaaaaaataaggatgcacacctttaccacttttattcaacaaagtactggaaatcctagccagagaaattaaataagagaaggaaataaagggcatccaaattggaaaggaagtagtcaaattatccttgtttgcagatgacatgatcttatatttagaaaatttagggactccaccaaaaaaaagggctttcagatttccccattcagtatgatgtcagctattggatttgttatatatggcttttaccatgttgaggcttctactcaccc

SEQ ID NO: 363682 - DNA, 545 bp, Homo sapiens
ggagctcatctcatggatgcaaggatggttcagtgtatgcaaaccaatcaacgtgatacatcacgtcaatagaatgaagtacaaaaaccatatggtcagttcgatagatgccaaaaaaatttgataaaattcaatatcatttcatgataaaaactctcaacaaactggggaagtagaaacatacctcaacatgattaaagtcatatataacaaacccagtagctgacatcataatgaatggagagatctgaaagcttttcctttgagatctagaaaaaaataaggatgcacacctttaccacttttattcaacaaagtactggaaatcctagccagagaaattaaataagagaaggaaataaagggcatccaaattggaaaggaagtagtcaaattatccttgtttgcagatgacatgatcttatatttagaaaatttagggactccaccaaaaaaaagggctttcagatttccccattcagtaygatgtcagctattggatttgttatatatggcttttaccatgttgaggcttctactcaccc

SEQ ID NO: 363683 - DNA, 549 bp, Homo sapiens
aaaaaaaaattcctattactcaaaacactctatagatttgttcaatctttatctaaataccaattcttcacataaatagaaaaaaataactgtcaggcatgatagctcacacctgtaatctcagtattttcagaggctgagataagaagattattgaggccaagagttcaagaacagactgggcaagatagtgagaccccatctctacaaaaaatttaggtactagctgggtgtagtgacacacacctgtagtcctaggyactcaggggactgaggcaggagaatcacttgagcccaggaggttgaggctaaagtgagctatgattgtgttatttattgtactctagcctaagtaatagagcaaaacccatttttttaaaaaagaaggaaaagaaaaaatgatgctaacatttatataaaagcacaaatgacctagaatagccaaagcaattgtgaacaaaaagaataaaggtggaggcaccacattacctgacttcaaattatactataaagttatagtaaacaaaacagcatgatactggcttaagt

SEQ ID NO: 363684 - DNA, 549 bp, Homo sapiens
aaaaaaaaattcctattactcaaaacactctatagatttgttcaatctttatctaaataccaattcttcacataaatagaaaaaaataactgtcaggcatgatagctcacacctgtaatctcagtattttcagaggctgagataagaagattattgaggccaagagttcaagaacagactgggcaagatagtgagaccccatctctacaaaaaatttaggtactagctgggtgtagtgacacacacctgtagtcctaggcactcaggggactgaggcaggagaatcacttgagcccaggaggttgaggctaaagtgagctatgattgtgttatttattgtactctagcctaagtaatagagcaaaacccatttttttaaaaaagaaggaaaagaaaaaatgatgytaacatttatataaaagcacaaatgacctagaatagccaaagcaattgtgaacaaaaagaataaaggtggaggcaccacattacctgacttcaaattatactataaagttatagtaaacaaaacagcatgatactggcttaagt

SEQ ID NO: 363685 - DNA, 572 bp, Homo sapiens
gtggtctgggtgagatggcatcttggtctttgctgtgacacatttaagagtggttatcaggagaaattttaaactgatcctcatactttggttttataagttaaaatcacaatgagatgcagatattatctgtttcaaggaactttcccttctctttctcatcccaacccacagctcagaagccacaggtaattccaggcttcttattttttttgttagctttcataataaggaatctataaagatggaaagtgttaagaaatccakattttgacaacaacttttaaattaaagtaaatcaaaatcaattaaagatgcctctcaattataggctattttattttaggtgtttataattttcctaaacattctaatgactcaacattattttgtatcttgccaacacgaatgtgcatattggcataaatataaaaaatgagtgaatgtaacacaggagttcaataacaaaggtaaagagagagaaagcatgaaagtgtgaggtcaggcacagacatggacggagacaaatgtagacagatgaatatcacatgcttgcttgattttcttccctc

SEQ ID NO: 363686 - DNA, 572 bp, Homo sapiens
gtggtctgggtgagatggcatcttggtctttgctgtgacacatttaagagtggttatcaggagaaattttaaactgatcctcatactttggttttataagttaaaatcacaatgagatgcagatattatctgtttcaaggaactttcccttctctttctcatcccaacccacagctcagaagccacaggtaattccaggcttcttattttttttgttagctttcataataaggaatctataaagatggaaagtgttaagaaatccatattttgacaacaacttttaaattaaagtaaatcaaaatcaattaaagatgcctctcarttataggctattttattttaggtgtttataattttcctaaacattctaatgactcaacattattttgtatcttgccaacacgaatgtgcatattggcataaatataaaaaatgagtgaatgtaacacaggagttcaataacaaaggtaaagagagagaaagcatgaaagtgtgaggtcaggcacagacatggacggagacaaatgtagacagatgaatatcacatgcttgcttgattttcttccctc

SEQ ID NO: 363687 - DNA, 630 bp, Homo sapiens
agactgaaaattggtccaatttgtgtggaacaagagaaggactgcctaaggtgagaaaagaaaacagctacttatccagaaaatgagagttgattaatgttattatggaataagaaatgcagttagagagtggtttgaatgagaataccaagaactagtagctagatgccaaacgcagccaagctttcccaagagttctgtcaatcaagaaaaatgacccaggcaagcctcaatcattttaggagatttatttgccaaacttaaggacacacacctgggagacctttcctgragatgtttttgagggcttcagtattcacaggggaaagggcaggatattgagaaatattcaattttcatgtgagagcaggggtaggggaatagagtcattcatgcctttgtctggctcagtgaatctgcatttttacaaaagattacatagacaataaggcagaggcaacaatcagatatgcatttgtctcaggtggtcagaggatgactttgagttctgccctatgtccctgcacctatgaagataagctatgaatttacattgccatggtgaactttaacagaaatgctttagggcaaagatcttggggtccacaaggaatttctctgtgggcaaaa

SEQ ID NO: 363688 - DNA, 594 bp, Homo sapiens
aaagtgtaaaggcaaaattttaaggaatcaagttgacctgcaagtaactgaatggacagctagaccaaacttaagactctattaaggcagatagaaaactcaaacaatcaacaacgtaacaatcacactgtcaaacaaaaatgtcctagaaaaataagcaagaacacatgacccattgatccattctttactcttgacattgatgagaaatgtcatccaaaagataaaggctttaaattggcaaaggtatgaaaatagaagacaagggcactaarcaagctttacacacattttcaaggaattgtaaaaatgtataattataatgagaaaaatagggaatcatggtagagaagtagaaactacaaaaatcagcaaatacaaaatataaactaataaacacagtataatatttttaatttaaaacatgtgttggattggattaaattttcagtcaccaaattctggtcatggaccaaagctgaaaaactcattatttttaaataaaattatgtttggaacacagccacgctcattagcttacatattgtttttggatgctttgatactatacatctccaagagcctcaacaaacc

SEQ ID NO: 363689 - DNA, 594 bp, Homo sapiens
aaagtgtaaaggcaaaattttaaggaatcaagttgacctgcaagtaactgaatggacagctagaccaaacttaagactctattaaggcagatagaaaactcaaacaatcaacaacgtaacaatcacactgtcaaacaaaaatgtcctagaaaaataagcaagaacacatgacccattgatccattctttactcttgacattgatgagaaatgtcatccaaaagataaaggctttaaattggcaaaggtatgaaaatagaagacaagggcactaaacaagctttacacacattttcaaggaattgtaaaaatgtataattataatgagaaaaatagggaatcatggtagagaagtagaaactacaaaaatcagcaaatacaaaatataaactaataaacacagtataatatttttaatttaaaacatktgttggattggattaaattttcagtcaccaaattctggtcatggaccaaagctgaaaaactcattatttttaaataaaattatgtttggaacacagccacgctcattagcttacatattgtttttggatgctttgatactatacatctccaagagcctcaacaaacc

SEQ ID NO: 363690 - DNA, 530 bp, Homo sapiens
atgaatatgtacatttatatgtcactaccataattataaaccacacacatgcaaaaccacaaaatcacaaaataaatggaatatcatgttggtttctctgatgtatgattaggagtgacataatctgtacttttccttttttttctttctaaaatctggaatcatcaccataattaccattttaaattaaacatgtgtaaaagaattgcatgtttatttaggtgttactcttagcatgtcatctgtcatcattggagagtaacttcatagtataggaggggaaacaggaaaagaaggtaaaatatttgctcaagcattggtgcctgcaagtaaggygaaggaagtgtgtatcaaaggtttctcttctcttctcccccattatcacaaattatgctgacacttgactgaacccacaggtgcttattagcatgttagcctgctgtgcatttgccagtctcagctgaagtcctactagacagataaacattcttaaatgaaaaattcattgttttttctgttacattcagcca

SEQ ID NO: 363691 - DNA, 561 bp, Homo sapiens
tggctcaaattctatctttttaacctactagctgtttgaccttagataacttatttaatcttcctgaacctcaatttccttctcataaaactaggaattataacaatctagaaacactgttggaggattttctatttttattattggattaagactgaggtgtagctaaaactagtaagagcaagagattagaaacaaagagcagaggtatttggttttgctgttgttgtcagaatcactgacttccttggtctttgacacatgcttcaatttccttaaagattactctgtgtttctcctgatgatccacctaatcacwgtgaatattttacccatttatgtttacaaaatattatatcagcagagggagaggattaattctatatcttcagcacaattaaagtgagctttggggatcatggcagatgggaggcaggactgcattgcagctccgacttggatggacatagcagcgtgtagaggctcgcatcgtgaattttcactcccaaatgactgcaggaataaatcaggaaacctgagaggaccccagaccccatgaag

SEQ ID NO: 363692 - DNA, 564 bp, Homo sapiens
actcaggcgaggacgtgaatctggtatgcagactccacaggcaggggaagaagaaaagccagatttgcttttgcagctgggaggcaggtagactagggcaagttctcagccctgcttgccactgcctggaaacagactcggtgctgttgggttgggggrcatgctgggagtgagactccctttggattgcatgggagctgggtgaggcctgtgactgccagctttcccccacttccctgccagcctgcatgacacagtagagacagtcataatcctcctaggaacataaatccattggcctgggaacctcattctcatccccaacagcagccgcagcaagatccacccaggaagagtctgaactcacacactcctagccctgcccctatccagtggtccttctctacccaccctgataactgaagatgaagggcatataagcttggacaatctggggcactgtccaccatttgttcctcctcatactaccacagctaatgctctcttgaaaccaccacttcctgctaggaggccaaccagtgcaaaaacagtgcattaatcaac

SEQ ID NO: 363693 - DNA, 388 bp, Homo sapiens
cctggctgtgtttttgtgttttattgttatatttttcatgtgaaatagggatcaacatccttggtaaggtaaggtgaggattaagtgctggcataagtaaaggcacaataaatgataatttgacttaaaatattgtaatagttaattttatgtgtcaactggactgggctatgggatggccaggtatgtgattaaacatttctagtgtgtctgtgagggtattgctggaagagattaacatttaaacctgtagacgacataaarcagatcaccctccctcatgtgggaaggcttcattcaatcctgtgaagaggtaaatagaataagagcctgagtaaggaagaattctccctctgcctgactctcttcaagtgggaatattggtttt

SEQ ID NO: 363694 - DNA, 181 bp, Homo sapiens
tttctgcaggccttgctgtccaggcaaataagatgagggcagggccatgtggttgaggtgggtctgaaacaggactcccaagggcacaggccctgcccagccttggcacccaaggcagagctsgtcagccctgggcccctgtgggctgctatggccacctcccttcaggcgctgctgcccc

SEQ ID NO: 363695 - DNA, 630 bp, Homo sapiens
aggggaaaagtaacacaagaccccagaagtatgccgagacataaaaccccaagtcaaaaggtcaaaccacacacttgatctctcaagtcaccctcttggccctattcccagtgtactttccttcttttcatttctgctctaaagctttttaataaactttcgctcctgctctaaaacttgccttggtctctccttctgccttatgcccctcagtcaagttctttcttctaaggaggtaagagttgaggttgctgcagaccgatatggattccctgccataacgtattgaatacttcaacctagaagaataaaayatacagtcaaccctccatatctgtgggttctgcattagcagattcaactaatcactggctgaaaatatttttaaaaaagtatggttacatctgtattgaatatttacagatttttcttcctgttattatttcctaaacaatacaatatagcaatttatatagcatttatgttgtattcgctattatatgtaatctggaaatgattttaggtatatatgaagatgtgcataggttatatgcaaatattatgtcattttatataagggacttgagcatcagcagatttgggtatctgcagggagtcctgaaaccaatt

SEQ ID NO: 363696 - DNA, 496 bp, Homo sapiens
ttccctggctcctgaggcagtggttccatattaggagaggcaagctgaraagaccttacttaggcttttgcacgcccccccggcatccctttcttactgccatcattcacattactcagctcctaagtggaagtgtcactcagaaagaaacttgtcattgtccccactctcatctccagagccctgactcagacatttttgccaggaatgagaaacaagccttaaaatagggtagttcccaatctcttcccagaggaactgactttgtttgaaacagattgtggaaaagtttaaaagtagggacactctcaggaatagtagagttagggtaataggcaagtaagaagacatatgtggatataattaatgtacagacaacaccgtagaccagctagtttgcaggagagaactgcagaagaagacagcttggagaaaccctcctggcaacagaaaacaaaaataaaaaacattgaacatagaaactacatgaagaagc

SEQ ID NO: 363697 - DNA, 496 bp, Homo sapiens
ttccctggctcctgaggcagtggttccatattaggagaggcaagctgagaagaccttacttaggcttttgcacgcccccccggcatcccttycttactgccatcattcacattactcagctcctaagtggaagtgtcactcagaaagaaacttgtcattgtccccactctcatctccagagccctgactcagacatttttgccaggaatgagaaacaagccttaaaatagggtagttcccaatctcttcccagaggaactgactttgtttgaaacagattgtggaaaagtttaaaagtagggacactctcaggaatagtagagttagggtaataggcaagtaagaagacatatgtggatataattaatgtacagacaacaccgtagaccagctagtttgcaggagagaactgcagaagaagacagcttggagaaaccctcctggcaacagaaaacaaaaataaaaaacattgaacatagaaactacatgaagaagc

SEQ ID NO: 363698 - DNA, 496 bp, Homo sapiens
ttccctggctcctgaggcagtggttccatattaggagaggcaagctgagaagaccttacttaggcttttgcacgcccccccggcatccctttcttactgccatyattcacattactcagctcctaagtggaagtgtcactcagaaagaaacttgtcattgtccccactctcatctccagagccctgactcagacatttttgccaggaatgagaaacaagccttaaaatagggtagttcccaatctcttcccagaggaactgactttgtttgaaacagattgtggaaaagtttaaaagtagggacactctcaggaatagtagagttagggtaataggcaagtaagaagacatatgtggatataattaatgtacagacaacaccgtagaccagctagtttgcaggagagaactgcagaagaagacagcttggagaaaccctcctggcaacagaaaacaaaaataaaaaacattgaacatagaaactacatgaagaagc

SEQ ID NO: 363699 - DNA, 599 bp, Homo sapiens
ctttctacagtgttttctataacgtataaatgacaaaaggcaaactaactgctttgttctaaggattataaccatgaggaagagttaattattaaccattatttttaataatattaactactcaattaataatcagatccacaattagatgtataaatacaacacttatccaagccttattacattctcactttcactgctggtggaaagactttctgatttatagcttttattgtctctaaaatgaagtgttttggggtccattggataaggattctattttttaaaacactacgctgttttatattttgtattttttgacagggtcttgttctgttgcccaagctggagtgcagcagcatgatcaaagctcaccataacttcaaattcttgcgctcaagcaatcctcccatcaaggtaggactagaggcatgcaacaccatgtccagctagtattttatttttattttatttttgagatggggtctcattctgtccctgaggttggagtgcagaggcacaatcttggctcactgcaacctccctatctcaggttcaaacgatcctcccacttcaamctcctgagtagctgagaccaa

SEQ ID NO: 363700 - DNA, 572 bp, Homo sapiens
ttccacatgtccttgagtctgattattagctggaagtggtagggagttttctttcccaggaccttagcctcaccccagtatccaaacrgttgactttagaacttggatacgagttgaaaatccagaggagagataataaatcattgattgagagggaggaggaaaattacttggcagacactggaacaataattcaatttgattctccagcatgtggggaggattcacacagctggaaccagaatagtaagctaagaagaccctaaagtaagaagcacatgacctggtgtttttttaaaacacttctctcttcctaaacctcccaccgtcaccagcctaaatcagcagaactgttccacctttacctcataattctcagactgcatgttcttcctctaatagcaatttttttttattttgaaattgactatataaagttttaccctaattctgtctggattttaaaagagttcttttggcttttctgtttatttaaatgtctaaattcagtgcatagaattacttttataataagaaaaaataaatttatactttaagtagctttaatagaa

SEQ ID NO: 363701 - DNA, 572 bp, Homo sapiens
ttccacatgtccttgagtctgattattagctggaagtggtagggagttttctttcccaggaccttagcctcaccccagtatccaaacagttgactttagaacttggatacgagttgaaaatccagaggagagwtaataaatcattgattgagagggaggaggaaaattacttggcagacactggaacaataattcaatttgattctccagcatgtggggaggattcacacagctggaaccagaatagtaagctaagaagaccctaaagtaagaagcacatgacctggtgtttttttaaaacacttctctcttcctaaacctcccaccgtcaccagcctaaatcagcagaactgttccacctttacctcataattctcagactgcatgttcttcctctaatagcaatttttttttattttgaaattgactatataaagttttaccctaattctgtctggattttaaaagagttcttttggcttttctgtttatttaaatgtctaaattcagtgcatagaattacttttataataagaaaaaataaatttatactttaagtagctttaatagaa

SEQ ID NO: 363702 - DNA, 572 bp, Homo sapiens
ttccacatgtccttgagtctgattattagctggaagtggtagggagttttctttcccaggaccttagcctcaccccagtatccaaacagttgactttagaacttggatacgagttgaaaatccagaggagagataataaatcattgattgagagggaggaggaaaattacttggcagacactggaacaataattcaatttgattctccagcatgtggggaggattcacacagctggaaccagaatagtaagctaagaagaccctaaagtaagaagcacatgacctggtgtttttttaaaacacttctctcttcctaaacctcccaccgtcaccagcctaaatcagcrgaactgttccacctttacctcataattctcagactgcatgttcttcctctaatagcaatttttttttattttgaaattgactatataaagttttaccctaattctgtctggattttaaaagagttcttttggcttttctgtttatttaaatgtctaaattcagtgcatagaattacttttataataagaaaaaataaatttatactttaagtagctttaatagaa

SEQ ID NO: 363703 - DNA, 584 bp, Homo sapiens
ttatttctgggtgataattaagggtatttctaataggattaacacaaattgtgaccctaggcatctagagtaggaaggaaaagtttgtcattagaagtgctaaatgctaattatggtaggtccctcagtagaagaacatctggccagaacatttcaatactagatcctgttagatctgagatctgtcaccctggagttggtaccagctatggtaggagaatcttaaaagaagggtaggtaattgtgcatcttgttcttcctgtgttcacaaagcgtgtgacataacctggaaatctgatgaaacagggtgtgattattycctctgacattcttatggacatgtgtgagagccacgtagattgagcaaataacatgcctttggcgatatcaatcatgagtagaatgattccccttttgtccaaatctctctgtaaaaaccttctctccttttgtaatgctgattgcataccatgacagtctgccctgactccagcctgcccatcacttctccatccttggtctagagggaagatgtaattccttaactgttacatttctctatgccaactctgtctttcgtagca

SEQ ID NO: 363704 - DNA, 584 bp, Homo sapiens
ttatttctgggtgataattaagggtatttctaataggattaacacaaattgtgaccctaggcatctagagtaggaaggaaaagtttgtcattagaagtgctaaatgctaattatggtaggtccctcagtagaagaacatctggccagaacatttcaatactagatcctgttagatctgagatctgtcaccctggagttggtaccagctatggtaggagaatcttaaaagaagggtaggtaattgtgcatcttgttcttcctgtgttcacaaagcgtgtgacataacctggaaatctgatgaaacagggtgtgattatttcctctgacrttcttatggacatgtgtgagagccacgtagattgagcaaataacatgcctttggcgatatcaatcatgagtagaatgattccccttttgtccaaatctctctgtaaaaaccttctctccttttgtaatgctgattgcataccatgacagtctgccctgactccagcctgcccatcacttctccatccttggtctagagggaagatgtaattccttaactgttacatttctctatgccaactctgtctttcgtagca

SEQ ID NO: 363705 - DNA, 584 bp, Homo sapiens
ttatttctgggtgataattaagggtatttctaataggattaacacaaattgtgaccctaggcatctagagtaggaaggaaaagtttgtcattagaagtgctaaatgctaattatggtaggtccctcagtagaagaacatctggccagaacatttcaatactagatcctgttagatctgagatctgtcaccctggagttggtaccagctatggtaggagaatcttaaaagaagggtaggtaattgtgcatcttgttcttcctgtgttcacaaagcgtgtgacataacctggaaatctgatgaaacagggtgtgattatttcctctgacattcttatggacatgtgtgagagccacrtagattgagcaaataacatgcctttggcgatatcaatcatgagtagaatgattccccttttgtccaaatctctctgtaaaaaccttctctccttttgtaatgctgattgcataccatgacagtctgccctgactccagcctgcccatcacttctccatccttggtctagagggaagatgtaattccttaactgttacatttctctatgccaactctgtctttcgtagca

SEQ ID NO: 363706 - DNA, 238 bp, Homo sapiens
ctgtagaagatccatttctaaaargttaaaatggttgtctcttttatgtatccatttgaggaggtgaaagtaggttcctggttatgggagaggaaatgtaagcagaacatttagagttaacagtggctttttgcttggccttctagcaggtctataatcagtgtgcaaaagtgcaagacataattaagtgaagattagcaacattgctttgaagatttcccaaactggaaaacatacc

SEQ ID NO: 363707 - DNA, 539 bp, Homo sapiens
gtgctccacaaaagacgccttttcactttctaaaaattcttttctggctctgtgtactccacttggtgtgaatgtcatttattagcatgtgatgtctttgtggagtagaggattctgccgctctctgcttgtctgtcttgctctgtttctctgcattttcatctccttttcctgtctctggctttaacattctttccacctccattaccctttatattagattagatctaacttttaaattatttgatgtatctttaaattttrtgttccctgtacctaatttaaaagacatgaaaagttgtaaacatctctctgaaaataaactaaattaagttgctttatacttgcgtgaccctcgattggttttttttttttttttttctctttgggtcagcaactctcaatagaaaagtttccttatctctagtgtggaagattggactaaatgtccagtgaccttcaaacctgctccagagagtagttcttccttacaagagtgagttttccaatgatttgcctctttctctccaaaatgaaaa

SEQ ID NO: 363708 - DNA, 559 bp, Homo sapiens
atattacgtataatttcaattttcttaaatctgttaaaacttatttgtaccctaacatatggtctcttttggacactgttccatgtgtgcatgagtagatttcatattctgttgtagtagagagcagtgttctttatatgcttgttaggtccaactggcctayagggttgttcacatcctctgcttccttatttgtcttttgtctgactgttctatccatgattgaaaatagagtatcaaagtatcctactattgtgctgctatttctctcttcagttctgtcaatgtttgcttcatacacttggaagttctaatattaggtgcatacagatttctaacagttacatctttgtgatgaatcagtccttttatcattatataatgtttttctttgtctcttgtgacagtttttgtcttaaagtttattttgtctgatattaatacggtcacccttgctctctttaggttctggtttgcacggattattttcctctattctttcattttcagcttgcgtgtaaccctagatctaaagtgtgtctcttacagagagcatata

SEQ ID NO: 363709 - DNA, 559 bp, Homo sapiens
atattacgtataatttcaattttcttaaatctgttaaaacttatttgtaccctaacatatggtctcttttggacactgttccatgtgtgcatgagtagatttcatattctgttgtagtagagagcagtgttctttatatgcttgttaggtccaactggcctacagggttgttcacatcctctgcttccttatttgtcttttgtctgactgttctatccatgattgaaaatagagtatcaaagtatcctactattgtgytgctatttctctcttcagttctgtcaatgtttgcttcatacacttggaagttctaatattaggtgcatacagatttctaacagttacatctttgtgatgaatcagtccttttatcattatataatgtttttctttgtctcttgtgacagtttttgtcttaaagtttattttgtctgatattaatacggtcacccttgctctctttaggttctggtttgcacggattattttcctctattctttcattttcagcttgcgtgtaaccctagatctaaagtgtgtctcttacagagagcatata

SEQ ID NO: 363710 - DNA, 597 bp, Homo sapiens
atgcaatcaattttgccagaaggtggtggagggggaaaaatagttacttcatttatttattyattcacaaattcaaagaacttggggtagataatggtaaaagacataaagtagtaaatacatttacaatatgactcaattcaaacaggggaagggtagaaaacaatctcactagaattaatacaatagagttaaattaatcccagactgggcaaagagaaaaataacatatttcttactgactgatgaaaaactttgcctctttactagaagatgcaaacttttcttcttttaagagagaagttctacattttatgagaaatttattggaaatatttttatgaaaaggactaaggacttcaagatggatcatctcttcacagcagttttacagaagattcagatattttggttataggattgtatataaagtattaatgctcagtgatgccttaggctgcattctagagtaatattttaaactctgactcactgcatttctttgggggaattgatgtaagggatgatcataatatttatcataatatttatcagctttcaatgtctcccctcagttggctttaactaccagagtca

SEQ ID NO: 363711 - DNA, 597 bp, Homo sapiens
atgcaatcaattttgccagaaggtggtggagggggaaaaatagttacttcatttatttattcattcacaaattcaaagaacttggggtagataatggtaaaagacataaagtagtaaatacatttacaatatgactcaattcaaacaggggaagggtagaaaacaatctcactagaattaatacaatagagttaaattaatcccagactgggcaaagagaaaaataacayatttcttactgactgatgaaaaactttgcctctttactagaagatgcaaacttttcttcttttaagagagaagttctacattttatgagaaatttattggaaatatttttatgaaaaggactaaggacttcaagatggatcatctcttcacagcagttttacagaagattcagatattttggttataggattgtatataaagtattaatgctcagtgatgccttaggctgcattctagagtaatattttaaactctgactcactgcatttctttgggggaattgatgtaagggatgatcataatatttatcataatatttatcagctttcaatgtctcccctcagttggctttaactaccagagtca

SEQ ID NO: 363712 - DNA, 572 bp, Homo sapiens
ttatatacgttgtagaatgattaaatccagctagttaacataaattaccttatataattatcatttttgtggtgaaacacttaacatccgctccctcagcattttttgagagtacgatatcttgttattaactataatcatcgtgttatacaatagagtgcttgaatgtatttgtcccatctaactgaagtgttgtattctttgaacgacatcttcccaaccctcccccgccgattcccccgaccctgacaaccagcattctactctatttctttgagataaactttttcagattctacttatgagtgagatcatgtgatatttttctgtgcctgacttatttcacacagcacgatgtcctccaggttcatcccttttgtcacaaatgacaggattttctccttttctttatggctacatagtattctactgtgttcacatataccaaatgttgtttgcccattcrtccactgaggagtcaacagctttaaaaagcactgaagattctctatgtgcaggaaactatcccagatattttataattttgagcctttgttccagccatttcattc

SEQ ID NO: 363713 - DNA, 572 bp, Homo sapiens
ttatatacgttgtagaatgattaaatccagctagttaacataaattaccttatataattatcatttttgtggtgaaacacttaacatccgctccctcagcattttttgagagtacgatatcttgttattaactataatcatcgtgttatacaatagagtgcttgaatgtatttgtcccatctaactgaagtgttgtattctttgaacgacatcttcccaaccctcccccgccgattcccccgaccctgacaaccagcattctactctatttctttgagataaactttttcagattctacttatgagtgagatcatgtgatatttttctgtgcctgacttatttcacacagcacgatgtcctccaggttcatcccttttgtcacaaatgacaggattttctccttttctttatggctacatagtattctactgtgttcacatataccaaatgttgtttgcccattcatccactgaggagtcaacagctttaaaaagcactgaagattctctatgtgcaggaaactaycccagatattttataattttgagcctttgttccagccatttcattc

SEQ ID NO: 363714 - DNA, 427 bp, Homo sapiens
ttctgtgcctgacttatttcacacagcacgatgtcctccaggttcatcccttttgtcacaaatgacaggattttctccttttctttatggctacatagtattctactgtgttcacatataccaaatgttgtttgcccattcatccactgaggagtcaacagctttaaaaagcactgaagattctctatgtgcaggaaactatcccagatattttataattttgagcctttgttccagycatttcattctgatctggactattctttgtgtttgtcaaaatctaaattgttcagggcttagctttccagcccagccccctagccaaattccctttcctgaattcctgcaagccttacatttttacaacttgtttggcctaaataatttgatgacatgcctttattgttcttatgtgaaacatggttaa

SEQ ID NO: 363715 - DNA, 566 bp, Homo sapiens
cctgggtatagagttgggaatcacctaggtcttcctgtagctgatgttcagtctgtaaagcttccttttagtttatctgtttttctaaaagccttctagtgcagggatccatgacacacaggctagtttgaaggttaaaatcctggcaatccaaaacaaaacttctttttttaatagtgcattgaaggtcactagaggcagacattcccacatactatgatttttgacacctgtaaaaaggaatttgcaatgaaaatatcaccagtgaaactactgtggagagatgagccacctttgtttttctgatatacacatatgaaygactgaaaccttccttgtaggaccttttcatctgtaaagttaaaacacttcttggagtcatggagaagacagtaaatatctatgtattaccaataagtttagacgaattatgcacgaactaaatttacacagtagtctagaacaggggtccccaacccccaggctgcagacagactggtactggtccatggcctgttaggaaccaggtggcacagcaggaggtgagagcctgtgagcaagcatca

SEQ ID NO: 363716 - DNA, 649 bp, Homo sapiens
atcaaagtctcatttctacttaatggctagagattcccaaacttcttcacagttaagctgactcaccgtgtttctggcactattattttatattcattcatattattttacagtgttaatmaactctagttaaacctgtagcttcttcctgttgatgtttgtccttccacctcttccatctaaatgctacagatggcaactcctccccctggctgagtccctctcttcccctcatttcttgtacatgacttgctgcacgtacatgggctccagcatggagacttctcccttccctctcttcctctctctgtggagcattttctttcacaaaggcttaaactcacttcctgttggaagtcgattttggcagactctgcctgactgagagtctcttcccagtctgttccctaagcactgctgtggattctgtttggactatattatgttaatttgtgcttcactggtggtttctaaattgtttgatgtgtgtatacatggtcacagtagctgaattttataaaactctagaaaccaagtcctgtgattgctgtcttctctttccttccccaacggaactagaccattcataaatatttatcagcataaacttaaagcacctgtataaaatagtccacgtaaaaccatggat

SEQ ID NO: 363717 - DNA, 649 bp, Homo sapiens
atcaaagtctcatttctacttaatggctagagattcccaaacttcttcacagttaagctgactcaccgtgtttctggcactattattttatattcattcatattattttacagtgttaatcaactctagttaaacctgtagcttcttcctgttgatgtttgtccttccacctcttccatctaaatgctacagatggcaactcctccccctggctgagtccctctcttcccctcatttcttgtacatgacttgctgcacgtacatgggctccagcatggagacttctcccttccctctcttcctctctctgtggagcattttctttcacaaaggcttaaactcacttcctgttggaagycgattttggcagactctgcctgactgagagtctcttcccagtctgttccctaagcactgctgtggattctgtttggactatattatgttaatttgtgcttcactggtggtttctaaattgtttgatgtgtgtatacatggtcacagtagctgaattttataaaactctagaaaccaagtcctgtgattgctgtcttctctttccttccccaacggaactagaccattcataaatatttatcagcataaacttaaagcacctgtataaaatagtccacgtaaaaccatggat

SEQ ID NO: 363718 - DNA, 531 bp, Homo sapiens
aattcattcagtctttagaattttagagacattgatgacaattcctgggattaggactgatttctaacctttcttgatgtgtgggtagaggtyagagattacttagttttcagaagcaaattataacattctcccccaaaatgaagctatgcacaatggttttgaacactttcaggccttcggaatactctccacatcacaaaactgaatagagaaatcagtgtctgggataaacagagatgtcaccaaaaattttagtctcgaggttgtgtcagctgtatttactttttctgtaaaactcaataaagcctgctatgtgcttaagttaatacctgggtgttctcttcccagggatattatttttatgttttctgtaccttcagatctgttttgcataggagaaacttccatgatcgactcaagtccttacagcaatcctcctctcgtttctaaataattagactcaactattttcttccctaggtagcaaagaaagcgatttcatttcaacgaagagcctttattcttttc

SEQ ID NO: 363719 - DNA, 409 bp, Homo sapiens
acaatagagacagttcagcatgttctctaatagagatatatatgaagagtgctatgggacaaagcagaggtggcgaccatatcagagagcaaatgctttaacctacacaattaaaaaaaaaaatcttatggcgttcctaattttgtttctttcyctttcaattttctgaaattttaaaatgtttgttcacttgaacatacaataaattttctttaaaagagtccctcaacagggagatgagaatattctgtgtcttgatcttcatggtggtgtataccaaattcaccaaactgtacacacacaaatgtaccttttaccaaatgcaaattatacctcaaagtttactaaatccatcaaaacatacagtgctacatactttaaaaaaattagcttcctccctttgatgacc

SEQ ID NO: 363720 - DNA, 409 bp, Homo sapiens
acaatagagacagttcagcatgttctctaatagagatatatatgaagagtgctatgggacaaagcagaggtggcgaccatatcagagagcaaatgctttaacctacacaattaaaaaaaaaaatcttatggcgttcctaattttgtttctttccctttcaattttctgaaattttaaaatgtttgttcacttgaacatacaataaattttctttaaaagagtccctcaacagggagatgagaatattctgtgtcttgatcttcatggtggtgtataccaaattcaccaaactgtacacacacaaatgtaccttttaccaaatrcaaattatacctcaaagtttactaaatccatcaaaacatacagtgctacatactttaaaaaaattagcttcctccctttgatgacc

SEQ ID NO: 363721 - DNA, 552 bp, Homo sapiens
atttaatccgcatggcccatttagcacaaggggaaacggggcctctttgcagaatgggcagcctgacttgcatttactaatcacactctggcagggggcctgaggaaatcacaggaaacggggccagatattctcctccctctaggtctgagatggagrtgacacaggccttgtgcctgggagcacaatgaggaaccacacccagatgccaacgctgaggtgccgtgtgtctactataaggcggaagacaccaacaaaaatgatttaaatataaggtacgaagggatgactgacatgagtgggtacagaccccatcccctggaggtcagagaaatgcaaggtcaatttcagatggggaagctgagggaggctttgtgcaaaacctggcatctgaatgggaaccctactgcctaagtttgaattagttgattgtatgattaaaattatcgaacattaaaatttatattaagaagtgatcatgtttaaataaaaggtgataatggatgtgtcagctgagttccactcattttggtgataagaagcatccacatc

SEQ ID NO: 363722 - DNA, 552 bp, Homo sapiens
atttaatccgcatggcccatttagcacaaggggaaacggggcctctttgcagaatgggcagcctgacttgcatttactaatcacactctggcagggggcctgaggaaatcacaggaaacggggccagatattctcctccctctaggtctgagatggaggtgacacaggccttgtgcctgggagcacaatgaggaaccacacccagatgccaacgctgaggtgccgtgtgtctactataaggcggaagacaccaacaaaaatgatttaaatataaggtacgaagggatgactgacatgagtgggtacagaccccatcccctggaggtcagagaaatgcaaggtcaatttcagatggggaagctgagggaggctttgtgcaaaacctggcatctgaatgggaaccctactgcctaagtttgaattagttgattgtatgattaaaatyatcgaacattaaaatttatattaagaagtgatcatgtttaaataaaaggtgataatggatgtgtcagctgagttccactcattttggtgataagaagcatccacatc

SEQ ID NO: 363723 - DNA, 552 bp, Homo sapiens
atttaatccgcatggcccatttagcacaaggggaaacggggcctctttgcagaatgggcagcctgacttgcatttactaatcacactctggcagggggcctgaggaaatcacaggaaacggggccagatattctcctccctctaggtctgagatggaggtgacacaggccttgtgcctgggagcacaatgaggaaccacacccagatgccaacgctgaggtgccgtgtgtctactataaggcggaagacaccaacaaaaatgatttaaatataaggtacgaagggatgactgacatgagtgggtacagaccccatcccctggaggtcagagaaatgcaaggtcaatttcagatggggaagctgagggaggctttgtgcaaaacctggcatctgaatgggaaccctactgcctaagtttgaattagttgattgtatgattaaaattatcgaacattaaaatttatattaagaagtgatcatgtttaaataaaaggtgataatggatgtgycagctgagttccactcattttggtgataagaagcatccacatc

SEQ ID NO: 363724 - DNA, 558 bp, Homo sapiens
ctattttgttcacccctaggatctagaatagtgcttgacaccagtaggcactgaacagatatttgttgaataaataatagaagtaatgagcaaggaaggactagtaatattgttactaatatattcacataattagtgtaatagtaaycattataataatcatcacagtagctaatgtttatagatttaatctatgatgggtaccatgctgagcatttgcatgcattaggtatcttacttgtttctcaaaaaagccttctaaggaaggaactggttttattcctgtagtataaacacaaaaatggaaactagattagagtaagtgacccacacatttctcttttttttttttttttcaggtcattacaaagaaaaagtgttatttcacgtaagagttaacacctttttaactactagcgatttgacccatgccacaaagggaaaggatttcttgagaaaaccccaatatctaaggaaatggccccaatttgtttatacttggagcagggtagagattaagggaaccgtggacacctacactggagttgtcactcctgg

SEQ ID NO: 363725 - DNA, 558 bp, Homo sapiens
ctattttgttcacccctaggatctagaatagtgcttgacaccagtaggcactgaacagatatttgttgaataaataatagaagtaatgagcaaggaaggactagtaatattgttactaatatattcacataattagtgtaatagtaaccattataataatcatcacagtagctaatgtttatagatttaatctatgatgggtaccatgctgagcatttgcatgcattaggtatcttacttgtttctcaaaaaagccttctaaggaaggaactggttttattcctgtagtataaacacaaaaatggaaactagatwagagtaagtgacccacacatttctcttttttttttttttttcaggtcattacaaagaaaaagtgttatttcacgtaagagttaacacctttttaactactagcgatttgacccatgccacaaagggaaaggatttcttgagaaaaccccaatatctaaggaaatggccccaatttgtttatacttggagcagggtagagattaagggaaccgtggacacctacactggagttgtcactcctgg

SEQ ID NO: 363726 - DNA, 589 bp, Homo sapiens
tctgcagtacaactaaacatactaacttggattttgtaggggaagtctgtatatgtatgtggtgtgaattaatgcaaatattggaagaaattaaattaggttcatttcaagagcatttggtatgaaaagctaggctaacaaagtaagtgttgcctgtgatagattcctagaaacttgttgaaattagtagattgtaatggttttcaattaacatatggcttgtttctrtgcaaataaaggttttcagagtgcttaagggaatgttggagaagttcatttaattacaatagttacgaatattacctctgatatctgtttacccctgtatttatacatatcttttgttttatagatcatccttttttcaactaacctattctaaattagtagatacaaagtaatgcaatggttatctctaggttgtaaaaatatgagacgtttcaattttcatcttcttatgttattttacttttttatacatctaataacgttttccctaaacaaataattttcatctgaatctcagataaaaacacgcaacagctgccttttcaacaaatcaaatgttttttcttcaaaattgaattgt

SEQ ID NO: 363727 - DNA, 589 bp, Homo sapiens
tctgcagtacaactaaacatactaacttggattttgtaggggaagtctgtatatgtatgtggtgtgaattaatgcaaatattggaagaaattaaattaggttcatttcaagagcatttggtatgaaaagctaggctaacaaagtaagtgttgcctgtgatagattcctagaaacttgttgaaattagtagattgtaatggttttcaattaacatatggcttgtttctgtgcaaataaaggttttcagagtgcttaagggaatgttggagaagttcatttaattacaatagttacgaatattacctctgatatctgtttacccctgtatttatacatatcttttgttttatagatcatccttttttcaactaacctattctaaattagtagatacaaagtaatgcaatggttatctctaggttgtaaaaatatgagacgtttcaattttcatcttcttatgttattttacttttttatacatctaataacgttttccctaaacaaataattttcatctgaatctcagataaaaacacscaacagctgccttttcaacaaatcaaatgttttttcttcaaaattgaattgt

SEQ ID NO: 363728 - DNA, 582 bp, Homo sapiens
gtgttaagatttggggtatataagataaatctccataaggctgttcatacaattcagcataacatgggtgactttgttttatattggttgaattgttcttaggtagttgctgtgtaactgttggttataaatatggctggaatagtattactaacaatgacaatggtaatagccagcatattttttagactttactatgtgctggataatgttaaagttcataactcattttatcttcatagaaaacatatgaggtaggatattwacattgccctcatttacagatgagtaaaagagacacaggggagttaagaaacatacctaagcttccatggtagtaagctggtgttcaaacccggagttgactgtttgtagccattgtacctagcaattaagatctggaaattgtgataggaaagaatgaaacatttatatattaccctttctttttgggaacaactaggcatatacatgagataaatgtctcaacaaagaaaataatgaaagagcaaattaaggagaaatagtaacacttgacctgggtaccagataggataagcaaggactgacaggagagtaaga

SEQ ID NO: 363729 - DNA, 477 bp, Homo sapiens
aggagagagagtaatgtgggaatatgggagaggctttgcttgtgtttcaccaggagaaaatcagcttcctgtttggatacccactagacatttaaagttccccagtgaacccactggagacacaaagtaagcccactccgctagaaactgttaaaaaaatttcaagaaaagaaaaataaaagggaatacttacagaaattggcatggtaagcattaagcatcttggattgtttggaatacaaggatcataggagatgaaaggagagacgaatgggagtaaggagatgagtagtgaatggaasggataaagcattacactgaggattttgtatctgttcaaagaacatgaaggagacggtgtacaatcgtagtgtgtggaactgagttttgtaaaaggagcacccatctgcaactgaaggaagaaacaaggagccaagacaaaagggggagtttcattccaggaattaagaatcagaa

SEQ ID NO: 363730 - DNA, 547 bp, Homo sapiens
tttattaccgctgatactaacagccctaacacgtcaacttatgaaattcaaccttgtaacatttcatagtcatgagcaaggtcaggctgcagctcaaaagcacaccacccttcmtcacattaacacagaatcttctacactaaaagcaagaaacagaaatagaaacaggtctctgtgccaatcattcaacagtacatgtcaacagaatagaaatgaaatgctttaactaatttcacctctaaagtttctgtcaaaaaatagcaatttaaaaaatgacctgcaaattgagcaggataaaataaacaccaaagaaagttcagggactaagtgggaagaaattaggatctctgtgagtgtgggtaaactttaccaggtgaagttcactctgagaatatttggaacttactactgaaattgcccagcctcagtcagtgcaacttaagaaagaatactaaatgaagagatgaaaaatcggcactacaccacatttccataggagaaaaaaagccgtagaaaagattctgaaatggctaattaagggctaagt

SEQ ID NO: 363731 - DNA, 262 bp, Homo sapiens
ataaatctgacacatttcttattttatccattatgttaagagcaaacattttagttaccacttcttggtttaatccaggatcctgtacttggtactttaatgagtctcgggcaattgacaatcattttgtacctcartttgcttttctacaaaatggtttattggaaggtttaaataagctaatcaatgttaaatagtcaaatgcttactgacagtgagtattcagagttaggtcttattgtttgttctttatgttgatgtt

SEQ ID NO: 363732 - DNA, 260 bp, Homo sapiens
ttctcaaattacatgactactagagtctggaaaaaagtaataatgaagttcacatgtatgtgtgtacgtatatgtatgtatgtatgtayatatacacaaacatatgtatgaaattgctttatcttaaggtagctataaatcaagtagccatacttctattggtgggagttatcatctagtaaatgctttgggagaagtggttctttttgataattcatctgtagcccaggtattacagtagtttaaaactgttcctccca

SEQ ID NO: 363733 - DNA, 575 bp, Homo sapiens
cgaggtggctcatgcctgtaatcccagcactttggaaggtcaaggcaggtggatcacctgaagtcaggagttcgagaccatcctggccaatgtggtgaaatcctgtctctactaaaaaataaaataaaataaaataacatattagccaggtgcaattgcagrcacctgtaatctcagctactcaggaggctgaggaaagagaattgcttgaacctgggagtcagaagttgcagtgagccaagattgtgccactgaactccagcctgggtgacagagcggaattctgtcttaaaaaaaaaaaaaaaaaaaagtcacaacctctgacattactgttgtcatggcatttatattgatgaaaaaaagttacaaaaaactttagcatgagagaacaaatcttgaaaaatattatgtaaactcctgtgttatattcatacagcatataatgaatccaatgccatttattattgaaggtacatattatgttctaaatcttaatttgaaaatgaaattaatacatcttttatttaaaatgtaataattatattcatttatgctactaaaatattgatatgatt

SEQ ID NO: 363734 - DNA, 592 bp, Homo sapiens
cagctgaggttgttaactaccagagccacctacaagttgtccagcaccctgtgggcactaggaccagtagtaaggattctgcttaacagatctatgctgtttaaaagaaataccatcatatgaatagctttcttcatcacattcaagggagaatgaccaaatccttaataaaatgcctctttgaggtccccatcacttactcttgattataaatgctgcggggataagagaatttgcygtgttgaatattcaaggacttttctatccccgggaattttctctgctgtgtttgtaagaagaggattaaatttgcctttaataaagcactatggaatacttactatcatggcaccaacgtaaaagaaaaacatcttcctggcacacaagagaggggaaaaatgctcaattatgcaaatgcatgcccagaaattttacccatgtaagaataatatctgatgatgtcaactcaattcttctccagtcttaggttctctcttactcttcactctgctagtgtaaatacctaatgtaatgactcacaataaaacacagttgttgagccacttctccctgactttatcacaccagaaaa

SEQ ID NO: 363735 - DNA, 546 bp, Homo sapiens
aagcttcctgtacactactgattttctattttttgagtttagtactgttgcataggtatgctcacttcatgaaaacgcatccagccatacatatgcctgatgacatgtccttttctgtgtttataattctacaatatatttttttttgagacagagtcttgctctgtcgcccaggctggaatgtagtggtgcaatctcggctcactgcaacctcctcctcccgagttcaagcaattctcctgcctcaacctcccaagtagctgggactacaggcgcccgccaccaagcctggctcaatttttgtatttttagtagagakgggatgtcaccgtgtttgccaggatgatctcgaggcagagacctcgtgatccacctgcttcggtctcccaaagtgctgggattactgacatgagccaccatgcctggcctaattctacaaatttttaatagaattatttcaaaaaccaaagtgaaggaaatcatttctgaagtgttcataacaaatgaacgatttagttttaagagtaatttgtaaagtgtgatagt

SEQ ID NO: 363736 - DNA, 480 bp, Homo sapiens
tgacaacctttgtattttagtatatttcagttattatgaaataaggtaagctttgcccagctgaatgaaatggaaactcattatatctcaaatgaggtgataaaagatagaatagtattttaataacgtagacaacatggctttttgtattttaatattcactgttctattggtaatggagccttaacaaagtgattttgtttccaatcaatcaaatatttcctcatcagcactctaagcaaaaatactgtggcagcttctcttgtttttattatcgccaaaataagaagcaccatctctaataagtgtcatttgcattaggccatgctgtcagcattcagtttggaagcttgctagtttcttacggagcctgtgacacagggycctcatcagtatgttgtgatgatagcctcacttttcctagctctgctttagattgacagtcaacctgggtttccacacatccctgcatgtgccatt

SEQ ID NO: 363737 - DNA, 567 bp, Homo sapiens
gtttaaatacaatgtcttgtaaatcatgacaacctttgtattttagtatatttcagttattatgaaataaggtaagctttgcccagctgaatgaaatggaaactcattatatctcaaatgaggtgataaaagatagaatagtattttaataacgtagacaacatggctttttgtattttaatattcactgttctattggtaatggagccttaacaaagtgattttgtttccaatcaatcaaatatttcctcatcagcactctaagcaaaaatactgtggcagcttctcttgtttttattatcgccaaaataagaagcaccatctctaataagtgtcatttgcattaggccatgctgtcagcattcagtttggaagcttgctagtttcttacggagcctgtgacacagggtcctcatcagtatgttgtgatgatagcctcacttttcctagctctgctttagattgacagtcaacctgggtttccacacatccctgcatgtgccattgcagagggccattttatagwtaggctagagtcctttggttgccaaataagagattaattct

SEQ ID NO: 363738 - DNA, 554 bp, Homo sapiens
ctcaagcatttatcctttgagttacaaacaatccaattacactgtttattttaaaatgtacaattaagttattgattgtagtcactctgttttggtatcaagtagtaggtcttattcattctttctattttttttttgtacccattaaccatcttcacccaccctccactacccttcccagcctctggtaatcattctactctctgtattgatgagttcattgctttgatttttaggtcccacaaatatgtgagaacatgtgatgtttgtctgtctgtgccatttatcacattttcaatgtgtggttatcaagccactttcacaaatatgttgtttcattgttgccacaggcttgcaggtatgcctgatggatcttgtgttatagatggagaaactgaagctcaaagtggcaaaatagcccaacgtcacatggctaatatgaggtagacgctggatgtgaatccatattttccaactaagctccacttctcttttcactattccacatctgctggtgctgaggyagtaagaaaaggatgataatactggctgaa

SEQ ID NO: 363739 - DNA, 637 bp, Homo sapiens
tacatgaaaatggaattccaaatatgatagctattttttcccaaatcttggaaagatgttggtcccccagccttgtattttagtctgttgcttccttaacatttgaaaattccatgagaagaaaagaaaaactttaaaaggaagcaaataaatctaatggcagtatttcatggactcttaagkggagttagaaaatggtattttttgaatttctctaagtctgttaatactgggttgggagatgggtgttaggaatcacatataaatacaaaataaaccttttttgttcatttttcttctccttagcaaatcatcaggcatccaggctttttagttattactatcgacatggctccatggagggagagggtttcatggacgggggctgagttggcttggggtgagatgtctctgactgtgaatttttaacaaatgctgggttttcattatctgtcaaacctgctttttcatttttctttacatagatctattcattatcttcacactctccaattagtacctcattctcttcatgatctgccataaaatacaggttctttctgcaggatttgcttatttctccccaacattcctcctttcctagtgagatgtgctttctctttagtttttaatgttt

SEQ ID NO: 363740 - DNA, 502 bp, Homo sapiens
agtaggtataaagcagtggtcctcaaacttgaccatgcatcaggatggcctgaagaacttattgaaccatagggttccactccccgagtttcaaattcagtaggtctgggatggagcctgagaatttgcatatgtagtttccaggagacgattatgttgctgccctctgatgaccccactctgagaaacctatcggcataaaggttaagtacatgggtattataattttttaaaaaaaggggtggaagctttatttactaacttatgagttgtttacaagccccttgaaaacgttattaaaatcctctaagtctcacctgcctcagcttcctcatcagtaaaataaaatgataattgtatcaacctctttttactgttcacagcattagaaccatgcttgtaacaaatgtatcattgtgtggcaggctccaggcactaaataaacattgcagaacmcatcatgatgaaagtaattgcagtaatagactcacgtaggtagcac

SEQ ID NO: 363741 - DNA, 593 bp, Homo sapiens
aaagatacctttttaaactcacacaaaacctagggggctatgacacctgagggacaggatagcctgacttgagactgacaggctaggaaagactcaaaacatgtaacatttattttctttcatccagcaaactgttactgagcactcatcaggatagagatactcggccaagccttgggaaaacagtggagagcaaaacagacaygcacggtttctgttcacctccggagtatacagtctagtttctttttccagttagataggtgtctgatgcctagtaggagcctaataaatgtttgctgagtggatatttatgtaatacgttctacagtaaagtctagactggttttctcaagtggtcctgtcccataaatctattatatggatgaacattctttaagtgggaatcttcttaagaatcacaaagttgacaattaccatgtacttttctatgagtaatataacaaagatgtgtaccagataggacattagccccagtagaatctaaccctggaaaaacacaaagtaaaatagtgctgatcacaactaaatattacaaaacagatgctgggataaaagttccagtagagcaa

SEQ ID NO: 363742 - DNA, 443 bp, Homo sapiens
tcagtcagtccccattcattatggaccatctcatttgacatcttacaccacaccagattagaggccactggttgctgacagctacttcgggcaagtaagtagcctcctgggtcaacccatgaaaggcaaaataataaatcacataacatacaaaaagaccacttatgtgaaagaaacaaccaggggtggtttttgcagaagaaggttgcagtcatagaggcgcttggtttcaatgcagataaagtttccaattttctcctgtgtgataagattcaacataccagcaggatttataagcagatatgtctcagagwtagcatgcaattggaggtttcaaaatttattttttcccagagtaatgttaagtttttatttattttttcttaatttagaaaattctttcgggatggagtaagtaatgaaaatctgagtaaatagaatcc

SEQ ID NO: 363743 - DNA, 443 bp, Homo sapiens
tcagtcagtccccattcattatggaccatctcatttgacatcttacaccacaccagattagaggccactggttgctgacagctacttcgggcaagtaagtagcctcctgggtcaacccatgaaaggcaaaataataaatcacataacatacaaaaagaccacttatgtgaaagaaacaaccaggggtggtttttgcagaagaaggttgcagtcatagaggcgcttggtttcaatgcagataaagtttccaattttctcctgtgtgataagattcaacataccagcaggatttataagcagatatgtctcagagttagcatrcaattggaggtttcaaaatttattttttcccagagtaatgttaagtttttatttattttttcttaatttagaaaattctttcgggatggagtaagtaatgaaaatctgagtaaatagaatcc

SEQ ID NO: 363744 - DNA, 554 bp, Homo sapiens
cagtgtttaaatcgatgtgattcccacattatgctgacatcattaccctatttataaataacatgtgagttaattcacatcatagaagtatgcattgtactaaaacagactgtagtcctatatagctatcatttttcctttgctcagytgttccactggtgatttagaaaggtgtacatgttacatttattctatcagtaatcacttctaagtattttaaaacacatctaagtctatttttcatttccatgcaatctcccagtctcagatggtttgacctaaagacttcttgtttcagcatcatggatggaatatctttatacacgaagaattatctaaaatgttctcatttattgtaataactacattacaggatggcagttgttctgaatagttgttctgaatattcggctgggatgcaaggtgagttctttacgtttaattgaaagagaatgcatgaataatatatttatatgtgcagcaatatatttcaggttaacagagaggatattttaaggtaatccaatactaaaaggtggggtattatggtacaa

SEQ ID NO: 363745 - DNA, 554 bp, Homo sapiens
cagtgtttaaatcgatgtgattcccacattatgctgacatcattaccctatttataaataacatgtgagttaattcacatcatagaagtatgcattgtactaaaacagactgtagtcctatatagctatcatttttcctttgctcagttgttccaytggtgatttagaaaggtgtacatgttacatttattctatcagtaatcacttctaagtattttaaaacacatctaagtctatttttcatttccatgcaatctcccagtctcagatggtttgacctaaagacttcttgtttcagcatcatggatggaatatctttatacacgaagaattatctaaaatgttctcatttattgtaataactacattacaggatggcagttgttctgaatagttgttctgaatattcggctgggatgcaaggtgagttctttacgtttaattgaaagagaatgcatgaataatatatttatatgtgcagcaatatatttcaggttaacagagaggatattttaaggtaatccaatactaaaaggtggggtattatggtacaa

SEQ ID NO: 363746 - DNA, 554 bp, Homo sapiens
cagtgtttaaatcgatgtgattcccacattatgctgacatcattaccctatttataaataacatgtgagttaattcacatcatagaagtatgcattgtactaaaacagactgtagtcctatatagctatcatttttcctttgctcagttgttccactggtgatttagaaaggtgtacatgttacatttattctatcagtaatcacttctaagtattttaaaacacatctaagtctatttttcatttccatgcaatctcccagtctcagatkgtttgacctaaagacttcttgtttcagcatcatggatggaatatctttatacacgaagaattatctaaaatgttctcatttattgtaataactacattacaggatggcagttgttctgaatagttgttctgaatattcggctgggatgcaaggtgagttctttacgtttaattgaaagagaatgcatgaataatatatttatatgtgcagcaatatatttcaggttaacagagaggatattttaaggtaatccaatactaaaaggtggggtattatggtacaa

SEQ ID NO: 363747 - DNA, 554 bp, Homo sapiens
cagtgtttaaatcgatgtgattcccacattatgctgacatcattaccctatttataaataacatgtgagttaattcacatcatagaagtatgcattgtactaaaacagactgtagtcctatatagctatcatttttcctttgctcagttgttccactggtgatttagaaaggtgtacatgttacatttattctatcagtaatcacttctaagtattttaaaacacatctaagtctatttttcatttccatgcaatctcccagtctcagatggtttgacctaaagacttcttgtttcagcatcatggatggaatatctttatacacgaagaattatctaaaatgttctcatttattgtaataactacattacaggatggcagttgttctgaatagttgttctgaatattyggctgggatgcaaggtgagttctttacgtttaattgaaagagaatgcatgaataatatatttatatgtgcagcaatatatttcaggttaacagagaggatattttaaggtaatccaatactaaaaggtggggtattatggtacaa

SEQ ID NO: 363748 - DNA, 513 bp, Homo sapiens
cagaatctctccctcccacttttctttttagagagagggagtcttgctccgtcacccaggctggagtgcagtagtgtgatgttggttcactgcaacctctgcttcccgggttcaagcaattcttgtgcccctgcctcctgagtagctgggactacaggcacacactgccatgcctggctaattttttttgtatttttagtagacacagggtttcaccgtgttgcccaggctgggttccaactccagagctcaggcaatctgcctgccttggcctcccaaactgctaggattacaggcgtaaggcaccatgcccgtcccgagctactggcccggcccagaatctccccttgtctgtgatgtttccttttagtaattttctatctactggcccacaccctgctccttagctgtaartctccctttttcttgttatatctgtaatatattaacaggtctgattttgaaggtatagctgaaaagtcaattgttattaatgccaagtttagggaaaag

SEQ ID NO: 363749 - DNA, 585 bp, Homo sapiens
gtaataaccaaattagctctaggaagctgtctaccaaggtttgttgttttgtctaataaacatatccttttatactcattgagatattctgtactgtttgaagttattttcatatgctttatttatcgttattatttgtcaatccctttgaaggaaagtcaccttttttatccctatatttccttcagattctaacacatagtaggtgctcagcaagatttatttaacttaattcattagaaatacttaaagattgtaaaatgaaatcagtgttcyttttgcctttcagttatacacacagctctatgtgatgatattttatttttatgaattcatttctcaattatgaaaattaattaaaattttctgatttctcctcccagtatgatttagtgtggcttatactactactgcaaaattacacactgaataatagtcataagaaaggagaaaaaggatttgttagccacaaagacttatattattactatggcaaaacaataactttttctttgggcttcccagcagccagagtaaaaaaggaaaaataattagatgaacagtctttacaatctgatggaagga

SEQ ID NO: 363750 - DNA, 554 bp, Homo sapiens
ccaatgccagacaagccttccaattacttcatctctagctggcatcttgagtaaaatctcatgagataccccaagttagctaacctgctaattattcctaactcaaacaaagtatatgaaataagtgtttattgttgctttaagctgctacatttaaggkgaacttcatacataggagtagatgcatgtaccactgaattttatcactattagagtaatacattgcattatttactactatagcagcaatcactctgcacttagctaaaattgcaaagtaaaacaaaattaaagcacatgtttaacatagacctagactcatccactagcttagtgactcatttccacctatcactcttacagtgggcaaaagtcataatgtagaccagcagcatctcatcatctcatcaagtttttatggtataatctttgaggaccatccaaatatgttaaatcattatgctgtgataatcaattgcatgcgctccttatagagcattaaaactattttttttacaaaaaaatacctatttatttatcttaaaatgacaaac

SEQ ID NO: 363751 - DNA, 639 bp, Homo sapiens
ccatgttgtcgcaaatgatagaattttcttcttttttaaggctgtatagtattccattgtgtaatataccacattttctttatctacttatctgttgataaacaattaggttaattctataccttggctattatcaatagtacttaaatgaacatgggagtsgagacaactcttcagcatactgctttcaattcctctggatatacacccagaaatgggattgctggatcgttgggttgtcctattttttaatttttaaaagactctctatatactattttccaaaaatcctatactattcacattctcaccaagaatgtactgtagcgttataactctttatgcctcttacattaggctagggaccatctctatttttacatatgtccatatccccagtggctagcagagtgctcaggatacagcaggtgttcaataatatcctttcagttatgtattctaatatgtatttaagtttctcatatgtatatattagtgattctttgtcagtaataagcatttttgaaaatgattcaatctattaaatggtacataggagctattctttaatgaatctgttaggctcatagttctagtagagaagccctacggttatcctgttttttagtagaggaaccc

SEQ ID NO: 363752 - DNA, 639 bp, Homo sapiens
ccatgttgtcgcaaatgatagaattttcttcttttttaaggctgtatagtattccattgtgtaatataccacattttctttatctacttatctgttgataaacaattaggttaattctataccttggctattatcaatagtacttaaatgaacatgggagtcgagacaactcttcagcatactgctttcaattcctctggatatacacccagaaatgggattgctggatcgttgggttgtcctattttttaatttttaaaagactctctatatactattttccaaaaatcctatactattcacattctcaccaagaatgtactgtagcgttataactctttatgcctcttacattaggctagggaccatctctatttttacatatgtccatatccccagtggctagcagagtgctcaggatacagcaggtgttcaataatatcctttcagttatgtattctaatatgtatttaagtttctcatatgtatatattagtgattctttgtcagtaataagcatttttgaaaatsattcaatctattaaatggtacataggagctattctttaatgaatctgttaggctcatagttctagtagagaagccctacggttatcctgttttttagtagaggaaccc

SEQ ID NO: 363753 - DNA, 639 bp, Homo sapiens
ccatgttgtcgcaaatgatagaattttcttcttttttaaggctgtatagtattccattgtgtaatataccacattttctttatctacttatctgttgataaacaattaggttaattctataccttggctattatcaatagtacttaaatgaacatgggagtcgagacaactcttcagcatactgctttcaattcctctggatatacacccagaaatgggattgctggatcgttgggttgtcctattttttaatttttaaaagactctctatatactattttccaaaaatcctatactattcacattctcaccaagaatgtactgtagcgttataactctttatgcctcttacattaggctagggaccatctctatttttacatatgtccatatccccagtggctagcagagtgctcaggatacagcaggtgttcaataatatcctttcagttatgtattctaatatgtatttaagtttctcatatgtatatattagtgattctttgtcagtaataagcatttttgaaaatgattcaatctattaaatggtacatargagctattctttaatgaatctgttaggctcatagttctagtagagaagccctacggttatcctgttttttagtagaggaaccc

SEQ ID NO: 363754 - DNA, 499 bp, Homo sapiens
tatttctaagctttaagatttaattactgccctattggatttcmaacttgaatggggcctgtagcccctttgttttggtcaatttctcccatttggaatgggtgtatttaaccaatgcctgtaccctcattgtatctaggaggtaactaacctgcttttttttttttttttttttgagatggagatttgctgtttttgcccaggctggagtgcaatgatgcaatcttggctcactgcaacctccaccttgtgggttcaagtgattctcctgcctcaacctcccaagtagctggtattacaggtgcaggccaccacacccagctaattttatatttttagtagagatggggtttcaccatattggccaggatggtctcgtactcatgaccttaggtgatctgccctcctcagcctcccaaagtgctgggattacagacacctggccctaacttgcttttggttttacagacttatgggatgaaagaacttgccttgtcag

SEQ ID NO: 363755 - DNA, 556 bp, Homo sapiens
aacaatcacactttacaaattactcttaaaactaaatcgttcrtttgttatgaacacttcagaaatgatttccttcactttggtttttgaaataattctattaaaaatttgtagaattaggccaggcatggtggctcatgtcagtaatcccagcactttgggagaccgaagcaggtggatcacgaggtctctgcctcgagatcatcctggcaaacacggtgacatcccatctctacttaaaatacaaaaattgagccaggcttggtggcgggcgcctgtagtcccagctacttgggaggttgaggcaggagaattgcttgaactcgggaggaggaggttgcagtgagccgagattgcaccactacattccagcctgggtgacagagcaagactttgtctcaaaaaaaaatatattgtagaattataaacacagaaaaggacatgtcatcaggcatatgtatggctggatgcgttttcatgaagtgagcatacctatgcaacagtactaaactcaaaaaatagaaaatcagtagtgtacagaagcttacctttcaca

SEQ ID NO: 363756 - DNA, 517 bp, Homo sapiens
ttgaaataattctattaaaaatttgtagaattaggccaggcatggtggctcatgtcagtaatcccagcactttgggagaccgaagcaggtggatcacgaggtctctgcctcgagatcatcctggcaaacacggtgacatcccatctctactwaaaatacaaaaattgagccaggcttggtggcgggcgcctgtagtcccagctacttgggaggttgaggcaggagaattgcttgaactcgggaggaggaggttgcagtgagccgagattgcaccactacattccagcctgggtgacagagcaagactttgtctcaaaaaaaaatatattgtagaattataaacacagaaaaggacatgtcatcaggcatatgtatggctggatgcgttttcatgaagtgagcatacctatgcaacagtactaaactcaaaaaatagaaaatcagtagtgtacagaagcttacctttcacatctttttaaacctctataattaaaatttgaactcaattactattaaa

SEQ ID NO: 363757 - DNA, 517 bp, Homo sapiens
ttgaaataattctattaaaaatttgtagaattaggccaggcatggtggctcatgtcagtaatcccagcactttgggagaccgaagcaggtggatcacgaggtctctgcctcgagatcatcctggcaaacacggtgacatcccatctctacttaaaatacaaaaattgagccaggcttggtggcgggcgcctgtagtcccagctacttgggaggttgaggcaggagaattgcttgaactcgggaggaggaggttgcagtgagccgagattgcaccactacattccagcctgggygacagagcaagactttgtctcaaaaaaaaatatattgtagaattataaacacagaaaaggacatgtcatcaggcatatgtatggctggatgcgttttcatgaagtgagcatacctatgcaacagtactaaactcaaaaaatagaaaatcagtagtgtacagaagcttacctttcacatctttttaaacctctataattaaaatttgaactcaattactattaaa

SEQ ID NO: 363758 - DNA, 556 bp, Homo sapiens
aacaatcacactttacaaattactcttaaaactaaatcgttcgtttgttatgaacacttcagaaatgatttccttcactttggtttttgaaataattctattaaaaatttgtagaattaggccaggcatggtggctcatgtcagtaatcccagcactttgggagaccgaagcaggtggatcacgaggtctctgcctcgagatcatcctggcaaacacggtgacatcccatctctacttaaaatacaaaaattgagccaggcttggtggcgggcgcctgtagtcccagctacttgggaggttgaggcaggagaattgcttgaactcgggaggaggaggttgcagtgagccgagattgcaccactacattccagcctgggtgacagagcaagactytgtctcaaaaaaaaatatattgtagaattataaacacagaaaaggacatgtcatcaggcatatgtatggctggatgcgttttcatgaagtgagcatacctatgcaacagtactaaactcaaaaaatagaaaatcagtagtgtacagaagcttacctttcaca

SEQ ID NO: 363759 - DNA, 608 bp, Homo sapiens
aaatattaaaatagcttatttccaacttaatgttgcaataagcattttaagtaaatgatcccacttcattctctcaataaaatgaaagaagtgcgattattatccccattttccagatgcatatagtaactgtcatgtgttgaattatgtccctccaaaaatatatttgaagttctaaccaccaatatctcagaatacracctttcttaggaatacggtccttacagaggtaatcaaaataaaatgagttcattagggtggactctaatgagactagtgttctcataataagaagaaatttcgacacagagacagacaggcacagaggaaagatgatgtgaagaaacaatggagaagatgtagccatctaacagccgaggaatccgagagactatcacaagctaagagatatgcatgaaacagatactttccctagagccttggaaaagagaaagaccctgctggcacactgattttgaacttctggcctccagatatttgtagacaatacatttgtttttgttcaagcccacccagtttgtagtgctttgttatggcagccctagggaatacacaagtctcagggtaaatcaatgtccctaattcac

SEQ ID NO: 363760 - DNA, 608 bp, Homo sapiens
aaatattaaaatagcttatttccaacttaatgttgcaataagcattttaagtaaatgatcccacttcattctctcaataaaatgaaagaagtgcgattattatccccattttccagatgcatatagtaactgtcatgtgttgaattatgtccctccaaaaatatatttgaagttctaaccaccaatatctcagaatacgacctttcttaggaatacggtccttacagaggtaatcaaaataaaatgagttcattagggtggactctaatgagactagtgttctcataataagaagaaatttcgacacagagacagacakgcacagaggaaagatgatgtgaagaaacaatggagaagatgtagccatctaacagccgaggaatccgagagactatcacaagctaagagatatgcatgaaacagatactttccctagagccttggaaaagagaaagaccctgctggcacactgattttgaacttctggcctccagatatttgtagacaatacatttgtttttgttcaagcccacccagtttgtagtgctttgttatggcagccctagggaatacacaagtctcagggtaaatcaatgtccctaattcac

SEQ ID NO: 363761 - DNA, 523 bp, Homo sapiens
gataatgatgtgaatcactaycacatgactcacaaaactgggagggagtacaactggatatttcttattacaactaaagcctaaagccttaacagatttgtttttttggttctatatgtatagatcaagtaacttttcttaactgagctggagttttctcatatctaaaaaaaggttgcattaaatatttattgagttctgttgaacatcttgtgattttgctatcctgtataacttgtgcagaaaaaatcaaaatgaaacatataaaactctagcagttggtattctgcttatacatttaagcaagagatcgagaggggttagtttatgcactgaattaatttgattttctgccacaatgcctactaagaaataaacagcaagtgccttaacaggcattttataataagaaggaatatcaatggatttcccaagttttggggttcagatgtgagcttgaccttcccttgttgataagacacaacttcatgattttctacctgtctacctccattacaaccag

SEQ ID NO: 363762 - DNA, 523 bp, Homo sapiens
gataatgatgtgaatcactaccacatgactcacaaaactgggagggagtacaactggatatttcttattacaactaaagcctaaagccttaacagatttgtttttttggttctatatgtatagatcaagtaacttttcttaactgagctggagttttctcatatctaaaaaaaggttgcattaaatatttattgagttctgttgaacatcttgtgattttgctatcctgtataacttgtgcagaaaaaawcaaaatgaaacatataaaactctagcagttggtattctgcttatacatttaagcaagagatcgagaggggttagtttatgcactgaattaatttgattttctgccacaatgcctactaagaaataaacagcaagtgccttaacaggcattttataataagaaggaatatcaatggatttcccaagttttggggttcagatgtgagcttgaccttcccttgttgataagacacaacttcatgattttctacctgtctacctccattacaaccag

SEQ ID NO: 363763 - DNA, 581 bp, Homo sapiens
tattttcaaacggaccattgcaaacttccaaatctgatgaaagtcagttcaattatttttctccaacacgagagcagatgggaagaatttcttttctgtttaccattctaactacattgtgttataggcataattattcacattttatagaagaggaactgagattcagagaaaacaagtgaggtacacattgctataaagctagcaaatctaaaaagttagagaaagctcaagtcttctgactccaacttaaataagtatcagatgtcatcattttatttctccactgacactattgtcatgagtgaacagaagaaaagcaaataaatgaaaatgtgaacatgtctgtgaacagaaagagaaatcacatccttcactcaaagacatgatatgtgttcagccattaaagaggtttagtcagctgcatttatagtcccataaacgggaagaaacatcatgacaaaaygaaattttatgaatccagggaaaaacacatcaaatgaaataaataattcatggatagagcaaagttcacagaatgggtctgataacaaagtatctaaaataagtgttgatgtgtt

SEQ ID NO: 363764 - DNA, 606 bp, Homo sapiens
ttcacaaattttcatctttaaaatatgttgacatttctattgggtttgaacagcccataatattttccaacaactgaataagatcaatattccaagaggatgggggtaggttccacatccagctgaaagggtgtgcatatttttctagctacacatttcaccagyaaaaggcttaaaagagccactgaagccctccaagtatgtttaacttgatagttacctaccatgccaaccactcaactccttcttaacttttgagtaaaaagttaattgaactgaacagatctttgctcgcttttgaagatactaagagtaattatctctaaagttattctagtttccaactcttccttcttagtttgccaatatggaagctctagatcatcgaaacataccaaaactataattcaagacagagctatacaactacaattgttaataattaggtagagaataatgtcattacttacattcttaattctataccaagtcgaataaaactacttatcccattataaattcaggcatattgttatttgaaaaataaagaacattttgattctttaaatagaaagatgtattatatttcaaacaatggggaaatag

SEQ ID NO: 363765 - DNA, 569 bp, Homo sapiens
actgctagtaagtgatacagctaggttctaaccctgtgtaatctagcatcctgattctttcctaactttgtaatgtattaagtgtattaaaagtaacgacaaaagccacaattacttttgcactggcctaatataatgtgtatttctttcaaactgacaaacaagtcttttttctaaatgaagctaatggaaagcccattagcagccagtcagttgggtcagctggtatcctacatataaatcactgaaaaacctcatacagctgtttaaatatttctaaaaattcaccgarggccaaaggtattcctaagtacttgatgaagtattattagaaacattaataaatatttcaatgtcctaagacatctcttgacacagatggagaaatcagagattcaaggcagaccgctgatccattaatcactcattatgtcatgccctcttctttgcgtaaattgctgggacagggtggccagactcattttgtagatggagcaacttgaaacacagggtaatagttcacgatttgcctgaatcttattcaaaagttgtgactgagtttctaactg

SEQ ID NO: 363766 - DNA, 569 bp, Homo sapiens
actgctagtaagtgatacagctaggttctaaccctgtgtaatctagcatcctgattctttcctaactttgtaatgtattaagtgtattaaaagtaacgacaaaagccacaattacttttgcactggcctaatataatgtgtatttctttcaaactgacaaacaagtcttttttctaaatgaagctaatggaaagcccattagcagccagtcagttgggtcagctggtatcctacatataaatcactgaaaaacctcatacagctgtttaaatatttctaaaaattcaccgaaggccaaaggtattcctaagtacttgatgaagtattattagaaacattaataaatatttcaatgtcctaagacatctcttgacacagatggagaaatcagagattcaaggcagaccgctgatccattaatcactcattatgtcatgccctcttctttgcgtaaattgctgggacagggtggccagactcattttgtagatggagcaacttgaaacacagggtaatagttcacratttgcctgaatcttattcaaaagttgtgactgagtttctaactg

SEQ ID NO: 363767 - DNA, 572 bp, Homo sapiens
cattaattataagcacaattttggtagctgttgtcatctttcaaaggtctagatgtttagatttttaagatattctaattttacaatcctgcatgggatgcctcaaaacgtctgtgagataggtttattctgtgagccagcagtttgtggtccctagcatcagctaacaacacaaaagaggttgaaagcaggatgtgggtacctggaaaaagactggakgtgaagtgttgtgattttcacagattaaaaacttgccacaagaatataggggtcaagaataacttcaataagaggtggaatttgtggtgaccctttaaagctatgtgagctacacaggcagaacacaatggggagggcattttagggcaagaggatggcatgagccaaagcaatgaggcttgaaagctcaagagataggagaagatgagttgattggccagcgccagaaatttggtaatggaacagaagtaaatcaagctggaaaggtcactgtggtcaaatatgttaatttgggtaactttgaaattcagtccagaattactgcactaaaaccccatattttctggtgtgat

SEQ ID NO: 363768 - DNA, 635 bp, Homo sapiens
aaccactgggttatgtcaggtcccaacatactctcaaatatgactggcatgacactgccacaatccacttcttttccctgcacctcttgcttaggatataaattaggtgattggctctaagaagctgcaattgagtcattgtcaggggtgttgggggatgatagtcacaggtagtcacctagctgcattctattagccatgtatggctttgcagggtaggtgtcatgagctataaaggctataaatatattgctgcattacttctgatgccagacactcctgctacttgtaactaaatggtagctccccatgcacagtggaatttaccttttgaataaagatgctgccagtgccattctctcaattgtggtcacttactaatcccctctaatgagatctttgggtaatgaggcttctaaaagaacacaagaggccaatgttagagtaagatgtaggtaaagcaagacacacrtgtcagaaggctatcaacggaaaataccagggaagacacaagaaagatagggcagaggagtgcaccaataattctgttcttaaaaaacctgcacgtctgcaggcatgactcagggatttgatgtcccagcctttacagagatgattgagaagaattctgggga

SEQ ID NO: 363769 - DNA, 637 bp, Homo sapiens
aggaatggagcagtctctaaaacttgaaaagggcaagaaaacagattctcctctagagtgtccagattggaacactgccctgccaacatgttgatttagcactatgagacccatttcaacttctaacctccagtgagataatacatttacatcgttttaagccactaaggttgtggtaatttcttacaacagtcatagaaaactaataggctcctacttctacctgtgaaaaatctgcattataatatcaatttaaccaggtgagttttctgggacagagacagttctaggagaagattttcagtaagcccttgtttagagttacgggaaaatgatatctaacaagcagccccttctaggctcaactcttgttctgctgtcccatacaccctagtcctatagctacactagactgcgattttgtgaccaagtcatgtgtcgtcacactcggcatctccatgcstgctgcagttttgcctggaaggctctcctcatgcacctgccccagcagttacctctctgtgcccagaaattttctatttgctcttcaaggcccagttcaaacaccacctcctactatgtttaccatttttcatcttggggaaaaaataacttttctttcctctatggcatggtg

SEQ ID NO: 363770 - DNA, 530 bp, Homo sapiens
tactggctgctacagaggcagaaagactgaagctccctgagatgatatacataggcactatatggagatatcattgaccactggtgtgtgtgtgtgtgtgtgcatgtgtgtgtatatatatatwttttattatttttttttttctgagccagagtctcactctctcactcagctggggtgcagtggcacaatctcggctcactgcaatctctacttcccaggctcaagcaatcgtcccacctcagctcctgagtagctgggactacacatgcgcaccaccatatccagctaatttttgtattttttgtagagactgggtatcaccatgttgtacaggccggtctcaaactcctaggctcaagcaattctcccaactcagctcccaaagtgctgggattataggtgtgaacccctgtccccggcctagagtgcatatatttttgtatgtctattttatagtcttcttttatatcatatttggttggttatgcagttcatactgtgtgtaatttatttctatatgaaaaagc

SEQ ID NO: 363771 - DNA, 661 bp, Homo sapiens
gataaattaaggatgccaattgtcatctttggaagcaacactaaaatgtgtatatatacatatacctttatatataaagcagatataaatatatatttatatataaagttttatatatttatatattttaattaattagatatttacatgtatatataaagctctctctgtagatatataaagcaaaaactatgaaaacaatttagtcaaaggccatgaaaacagttgaataaatatttaaatgatccaaaagaagggataaaaggaggaaagtagaatttttaaaagtcaaatagaataaatatackaataagaaaatggcagacctaaccgtgattatattacatgtaaatctactagatgttcaaatgaactgagtacaaaataaatgcaaaattatatcctgtttacaggatatgcactttaaatataaaaacacagtaaaaaagtgggaaaagatacaccacacaaacaacaagcataagaaagctggtagcaatatattgatatacgacaatcaagtcttcaaacacagaaatgcaagttataaccaaaatgtgatacaaatacacacccaaatgagatataaatatccacccattgaaaaggctaaactttaaaaaatactggcaatatcaaaagttagagagtctgtggtgca

SEQ ID NO: 363772 - DNA, 661 bp, Homo sapiens
gataaattaaggatgccaattgtcatctttggaagcaacactaaaatgtgtatatatacatatacctttatatataaagcagatataaatatatatttatatataaagttttatatatttatatattttaattaattagatatttacatgtatatataaagctctctctgtagatatataaagcaaaaactatgaaaacaatttagtcaaaggccatgaaaacagttgaataaatatttaaatgatccaaaagaagggataaaaggaggaaagtagaatttttaaaagtcaaatagaataaatatactaakaagaaaatggcagacctaaccgtgattatattacatgtaaatctactagatgttcaaatgaactgagtacaaaataaatgcaaaattatatcctgtttacaggatatgcactttaaatataaaaacacagtaaaaaagtgggaaaagatacaccacacaaacaacaagcataagaaagctggtagcaatatattgatatacgacaatcaagtcttcaaacacagaaatgcaagttataaccaaaatgtgatacaaatacacacccaaatgagatataaatatccacccattgaaaaggctaaactttaaaaaatactggcaatatcaaaagttagagagtctgtggtgca

SEQ ID NO: 363773 - DNA, 661 bp, Homo sapiens
gataaattaaggatgccaattgtcatctttggaagcaacactaaaatgtgtatatatacatatacctttatatataaagcagatataaatatatatttatatataaagttttatatatttatatattttaattaattagatatttacatgtatatataaagctctctctgtagatatataaagcaaaaactatgaaaacaatttagtcaaaggccatgaaaacagttgaataaatatttaaatgatccaaaagaagggataaaaggaggaaagtagaatttttaaaagtcaaatagaataaatatactaataagaaaatggcagacctaaccgtgawtatattacatgtaaatctactagatgttcaaatgaactgagtacaaaataaatgcaaaattatatcctgtttacaggatatgcactttaaatataaaaacacagtaaaaaagtgggaaaagatacaccacacaaacaacaagcataagaaagctggtagcaatatattgatatacgacaatcaagtcttcaaacacagaaatgcaagttataaccaaaatgtgatacaaatacacacccaaatgagatataaatatccacccattgaaaaggctaaactttaaaaaatactggcaatatcaaaagttagagagtctgtggtgca

SEQ ID NO: 363774 - DNA, 513 bp, Homo sapiens
cagaatctctccctcccacttttctttttagagagagggagtcttgctccgtcacccaggctggagtgcagtagtgtgatgttggttcactgcaacctctgcttcccgggttcaagcaattcttgtgcccctgcctcctgagtagctgggactacaggcacacactgccatgcctggctaattttttttgtatttttagtagacacagggtttcaccgtgttgcccaggctgggttccaactccagagctcaggcaatctgcctgccttggcctcccaaactgctaggattacaggcgtaagscaccatgcccgtcccgagctactggcccggcccagaatctccccttgtctgtgatgtttccttttagtaattttctatctactggcccacaccctgctccttagctgtaagtctccctttttcttgttatatctgtaatatattaacaggtctgattttgaaggtatagctgaaaagtcaattgttattaatgccaagtttagggaaaag

SEQ ID NO: 363775 - DNA, 582 bp, Homo sapiens
tcatttcctcttgtttctgaaagagcagagaaaaaaattctgttattgaaattttcagataattgggggtttgctaaacagcaggaaaactgagcacttatctagactcgacggtgctccttcytccttaacttctgttgcagtatgatcctctaaacccagcggagtctgatgtattccaggcaccagaggaaaaaaatatgagagattcttattttctttagagcaaatattaccatgctaggttctgccagatgaagaattgaaggaatatcaacttcttactaatcccaaacagctgtgaaaggctaaataatccttacagggttcctattgacagctgtagcagcttacacaaataacttcatgtgttcagaagcagttgagaacagtggagagaacacaagctttagaacaagaaccccatttaaatactatgtttaccacattctgattaatgtggttgcttaagcaaattgctctctgagcatcaggttcttcatctataaaagatttttgtgagaattaaactcaataataaattatgtaagctatttattatacaaattgcagcactggtct

SEQ ID NO: 363776 - DNA, 582 bp, Homo sapiens
tcatttcctcttgtttctgaaagagcagagaaaaaaattctgttattgaaattttcagataattgggggtttgctaaacagcaggaaaactgagcacttatctagactcgacggtgctccttcctccttaacttctgttgcagtatgatcctctaaacccagcggagtctgatgtattccaggcaccagaggaaaaaaatatkagagattcttattttctttagagcaaatattaccatgctaggttctgccagatgaagaattgaaggaatatcaacttcttactaatcccaaacagctgtgaaaggctaaataatccttacagggttcctattgacagctgtagcagcttacacaaataacttcatgtgttcagaagcagttgagaacagtggagagaacacaagctttagaacaagaaccccatttaaatactatgtttaccacattctgattaatgtggttgcttaagcaaattgctctctgagcatcaggttcttcatctataaaagatttttgtgagaattaaactcaataataaattatgtaagctatttattatacaaattgcagcactggtct

SEQ ID NO: 363777 - DNA, 564 bp, Homo sapiens
ctgaactctaggctgtacgtgtacctctaaattttaaaaagcctctctagatgatagatacacacagtaaagtgtaaggactacaaagtgatttcctaaaaatggaaaggtgtcaagtagttcttccttatctaacatgcaggtagacaagaaaaattcactagaatatacatactttacttctcagattttgtggtaagaaaaagtgagtgcagtttgtctaaccggctatccaggaaaaaaaaaaaaaagatcacgtaacgaggagtaacacagaataatggactaaaaacatatagaaataccattttaatagttgttcgaccaccttctgcttaraaactgatttgtgttttttattaaaatcaattattcattgacccagagggccaattagaagcagctgtggtctgcagcactcatggagaggaatataaaagggtgagtgaattcagcactttcgactgaaatatccaggttcttacattgggattgactaggcaaacaacctgacccacgaagaaggaagaaaagtcagaggtgaagtatgttccactctggagt

SEQ ID NO: 363778 - DNA, 571 bp, Homo sapiens
cccccccaggaccaagcttccagaaaagacactggatgccatcttgctatttcacagccttcactggtgatacctccaggtatgggaaaaactgaggcaactgggttctggagtggacccccagcaaaccacagcagccctacagtagagtggcctgattgttaaaaacaaccaaacsgaaaacaacaacaataacatcaacagagaaaccccacagaaaccccattcaaaggtcaacaacctcaaaagtcaaaggtagatcagcccacaaagatgagaaagaatcaacacaaaaatgctgaaaactcaaaaagccaaagtacctcttctcctctaaatgactacaacacctctcgagcaaggacccagaactggactgaggctgagatggctgaattgacagaagtaggcttcaaaaggtgggtaataacgaacttcactgaactaaaggagcatgttgtaacctaatgctaagaaggaaaaagtgataaaacaataaaggagctgatagccagaatggccagtttagagagaaacataactgatgtaatggagataaaaaacacaagag

SEQ ID NO: 363779 - DNA, 615 bp, Homo sapiens
taaacctctttcctttataaattacccagtcttgggcaattgttcatagcagtgtgagaatgggctaatacactggctaattgttttacagaatatagcacaatttggtttgttccatattactcctgattatatttaatatgtagattaggcatttatagtaagaacacaacagaagttattttgagacttcttgggacattatataaagaagctcatgacactgatttgtctcattatgttagtgttcaatttgatcacttggctaacattacttttatcgagtttctccagtataagtttactatttttactttgtaatggctaagtacattgtagaatactttcagaatatgaaaatatcctatttctcattacttccacacactaattttagcagttattgattactgaaactattattttggtgtttaccacaggataatttttttccatctttttaactttttctatactcactaattcaaattctgccatggggaataatagctttctrttgcctcccttatttctttatatttagttatttacctttcttattattgactcatggatgtttgttcaactaatattttaataagactattaaatata

SEQ ID NO: 363780 - DNA, 492 bp, Homo sapiens
gtgggtgggagggttaagagaggatttcctggaggaaatagatccacctgtgaggataatggagccagagaaaggtagacaagcagcaacaggaacacacacctgtttaatacaagcaaacacatttaaaacaatatggaagtggcccagcaagatatytaccccagtcaaagaaattcatgaaaaccacccccactgccatctgattaccatgttcagctgcggtgaagtggaaggaaggttaggctgtgccacagatatttatagactcttaaatagctgtaaaagcgtggcattgaatgacatttgtgtaacccctttcctaataatagggattagagctgcagaagatctaggtggtcatgtagttcaatctctgatcatttctaattctagaaaggtgtaataataattatttacatttgcataatactttataaagcactttcatagccattatcttatttgctcctcaaaacaattttctgaaat

SEQ ID NO: 363781 - DNA, 644 bp, Homo sapiens
caaataaggtatgaaaaactgttacagccaagaggagcctaaggagtccagataactacatgtaatatggtatactggatgcgaccccagaacagaaaaagggcattagataaaaacaaagggaatcttaataaactatggacttcttaataaatattctcttactaaataattatgtattgatattgtttcattaattttaacaaatatactacactaatrtaatgtgttaataataaactctgtgtatgtcagaggaaagagaggtaatgtaggaattctttgtactatatgctcaattttttagtgaatctaaaacttctcttaaaaatgaagttgattcatagaaaatcaattgaacaaatgttgcttttggttaattgatgatataactaaatagttcctgttttaaccttgtggaaagcagaaattgttggcttggttatatatttgatttattactatgtgatggatggtatgtgtcaccaaaactgaacagaattttatcacatgaaaggagtaacaggaatatgcttccagaaaagaatgtattcttgacagaaattgataggggttacattttgggggcatctaatgatttaaatcttttatgacacatgtattactagaatttgtcagaacgt

SEQ ID NO: 363782 - DNA, 547 bp, Homo sapiens
ctcagctggaaatgcagaaatcacccacctgcattgatctcactgggagctgcagactggagctgttcgtatttggccatcttgccagccacctaygtttgttattatccatccattcatgcagtaagtaagtacttattaatatattacaatgccccatcactattactggtccaaagaataaactagtgagtaaaatagatgcaaccctaccatcacaaaacatactatctagagaagaagataaatatcaagttaagaactgtgcaataacaccatggagggcacagttaggagtaagtatatggagtattgggaagcaagtaactttaggacacagtgtaagcagagtggcagggaccgacggcctcctgagaaaaggtcagtgcagaggagacctgaagaaagaatatgattttaacaggtgaagattgggtaagaaagaagatacctttccactatcagggatggtatgtgcttaggctcagtggcagattagtaacaacactcatgtggaatgagaaggcagccaatagagatgagttaa

SEQ ID NO: 363783 - DNA, 547 bp, Homo sapiens
ctcagctggaaatgcagaaatcacccacctgcattgatctcactgggagctgcagactggagctgttcgtatttggccatcttgccagccacctacgtttgttattatccatccattcatgcagtaagtaagtacttattaatatattacaatgccccatcactattactggtccaaagaataaactagtgagtaaaatagatgcaaccctaccatcacaaaacatactatctagagaagaagataaatatcaagttaagaactgtgcaataacaccatggagggcacagttaggagtaagtatatggagtattgggaagcaagtaactttaggacacagtgtaagcagagtggcagggaccgacggcctcctgagaaaaggtcagtgcagaggagacctgaagaaagaatatgattttaacaggtgaagattgggtargaaagaagatacctttccactatcagggatggtatgtgcttaggctcagtggcagattagtaacaacactcatgtggaatgagaaggcagccaatagagatgagttaa

SEQ ID NO: 363784 - DNA, 547 bp, Homo sapiens
ttgagtataatgttcactatttaggtaatggatatccaaatagaagcccaatccccagcagtacataatatgcccatatagcaacatgcacatgtactccctgaatctaaaatgaaacaagatttaagaagtaargaataaataaataaaaagggcatcctggctgccaagtgaacaaagagcctgaagtgatgctacaagagtaagcatgaggttaaagggtcctgatgcctggctaagataaggatcatgctaggagctatgaagagtgatggagtgagtacacaaaggttgacactgctgtttaaaacctcaatgataaggggaaggaatgttccacagtgaaaagttgttatctagttgcttgagtgttcagaggtttcccacatcttttgtagaactcatgtagcttaatgacctcttccatagtaacaaccatttgtttgagagacaagcaagaaaaaaagcatggagcaacaggaagtctcattgattgcttgtgggaattcgaaatggcatagccactttggaatacaaacgaacaaac

SEQ ID NO: 363785 - DNA, 547 bp, Homo sapiens
ttgagtataatgttcactatttaggtaatggatatccaaatagaagcccaatccccagcagtacataatatgcccatatagcaacatgcacatgtactccctgaatctaaaatgaaacaagatttaagaagtaaagaataaataaataaaaagggcatcctggctgccaagtgaacaaagagcctgaagtgatgctacaagagtaagcatgaggttaragggtcctgatgcctggctaagataaggatcatgctaggagctatgaagagtgatggagtgagtacacaaaggttgacactgctgtttaaaacctcaatgataaggggaaggaatgttccacagtgaaaagttgttatctagttgcttgagtgttcagaggtttcccacatcttttgtagaactcatgtagcttaatgacctcttccatagtaacaaccatttgtttgagagacaagcaagaaaaaaagcatggagcaacaggaagtctcattgattgcttgtgggaattcgaaatggcatagccactttggaatacaaacgaacaaac

SEQ ID NO: 363786 - DNA, 588 bp, Homo sapiens
tgccatttagaataaagaaatactagtcatgagtggtcataaatggaagagatcatataaatcatgtatttcaatactcaaatttacagatgacagactagaacccagagaaatactccatccaaagatagaaaatcagtagaagagtctacattataatccaagattttagggtctcagatcttcacattatatacatctgtgctgtcatatccagtcagcaagagttcactaggcagttattcacatggcatttgtagttataaaataagagataagacatcagcatgacaagattttataaaaaatataaagtcgaattaatatgtctcatatagtactatatgattttttgagtttctataaaatgtaaatgatgaatacatacaaaaaattatatagcaactatgttatataaactctaaactataaattataaactataactttgttgtataaactataaactataaatkatacattgtatattacacattaaaatcagcaaaattgaagataggacaatggaaattattgagtctgaggaacaaaaagtaaaaaggtaggagaagagtaaaaagataaggg

SEQ ID NO: 363787 - DNA, 612 bp, Homo sapiens
ctgctagcacatgtgtgcatgtgcactctgccatgcctctgctgctggtggaatgcactccaccccacttcccctaccctactgccattgcagttggagcctttgtgaacacagagcctgccagcctcacccccaccaatgctgtgctcctgcaacaacactgccattagagtgaaactagtatggatgacggtggaaccacccctgcctgctctgagcagccacagagagwgcacacagacttgtgcccaccagtgtctcacccccatcaatgtcccacccccctgctaacaccaccaccagtggaaccacaaacacagtcaccaataagggatgtcctcctccagttacgctgtctcccccactgctacgaatgcaatacagaggcaggaaccttggcacccactagcaccctgctgcagtcaatgagtgtgaaccccaccatgctacctctgccactggcacatgtgaacaagaatggatcctgctgccatagccctacaaaatgctttggcacctcccattgatgtttagggaccagtggtccaagagcaccatggcttccccaaccgcccaccgattgtagttggtttctaaccttgaggagccaga

SEQ ID NO: 363788 - DNA, 533 bp, Homo sapiens
gccttctttcctgcaaatcactgcactacctctccagcaaagtgttctcaatcaggctgagatgtctgaaattacagtagtatttgaaattgggtaggaatgaagatcactgagaggcagtagtacactgaagcccaatccaaggaagctaagaatcacagtaaaatgatgcatgagttgacagacaaaatggccagtatagaaaagtatgtaaccaacccaatagacgtggaagacacactacaagaatttcataatgcaattgcaagtactatcaagtaataagcaaaatagaccatactgaagaaagaacctcagagctttaagactggctttctgaaataagacagtcagagaagaatagagaaaaargaataaaaaggaacaaacaaaacttcagaaaaatatgagattatgtaaagggaccaaatctaagattcattggtgttctcgaaagcgttggggagaatggaatcaacttggaaagcatatttcaggatatcattcataagaacttttacaacctagccaga

SEQ ID NO: 363789 - DNA, 560 bp, Homo sapiens
gtggaagacagtggaatgagcaagggttattggtggaggccacaccatacaaggttgtaggagacatgataaggcatttggatttatttgaagagtttttggaaagtatcaaatgattttaattggggaaatggcatgatttcctatagattttaaagagtcttctcttttaaagatcctgtgtagtgcgtgaataggactgtgacaagaatggaactggaataataggaggctcttatagccatccaggtgagatcccatgatttrggttaagaatattaatgatggtgatgcatggatatgtttaagattgactttaaggatagatcattaggtgttggattgcatttaggaggtaaagaaaagagagagaggaaaaacaagtcttcattttctggctttggtaataaaataatatcatttattgagatagggaatgtagggaaatgaatggggaaaaagggataaaaaagggatagaaatttggtttctttctggatatgttaagtttgaaaggcttatgtgatatccaagtggagatgtcacgtaggcaggtcaat

SEQ ID NO: 363790 - DNA, 559 bp, Homo sapiens
caataatgttaatatagttacaggaaagatcactaggctaaaaattaggagaatcgtgttctaaaccagacccagatatgaacttaggaaagctagttcttccctggtctccaattccagcatctggatatgagtgaaataattgttagagttccttttgcctataatcatttaatctgtgagtgacaggtgaatggcaatccacaaagtagaggataatacctttaacaagaaggaaattgtgggtgatgagatcaattgtcaaggtctggaggccaagttccatttaaataacataaaagcaaagaaaaaaaagaaaaaagaaaaaaagaaagagaagaaaactttaagtgaaaatttaagaatgaattatttcggtaaggcttatctgtaagttaatgtacctgctaatatataatgattttcatttttgttataaattgaacattttttgttcaagtacactgtatttagccatttttgatatttttaatattcagagaatttataaacattcctaaaatcyttttatgaaccttatcttttagaatgatagaag

SEQ ID NO: 363791 - DNA, 536 bp, Homo sapiens
tcaggagttcaagaccagcctgatcaacatggtgaaactccgtctctactaaaaattagcggagcgtggtggtgcatgcctgtaaacccagctacttgggaggctgagtcaggagaatctcttgaacccaggaggcggaggttgcagtgagccgagattgcaccactgcactccagcctgggtgacagagcaagactctgtctctaaaaaaacaaaaacaaaaaacaaaacaaacaacaacaacaagtaaaagaatccagtcttctcatgttgaacacctagattttgcagagatgatatcaatgtttgtacagtctctgaaactaatttkgtatacattaattcaacagcaaacatttcctgtttgtccactctgtactaagaaattatccaggttctaagagtgtaataaaactatgcttgtttctgtacacacacacacacacacacacacacacacacacgtgtgtgtgtgtgtactttcctttcatctaggtaatcacaaaaagaaatacaggcacctgtttctttccaca

SEQ ID NO: 363792 - DNA, 558 bp, Homo sapiens
tggtggcattagtaaaaataaaacatgggaatgagtccttttcaaatatcaattctgtacaaacatctgtagctacacaaatattacatgaagaaacagctgagaaaaaagtaaatgctcatatataagattagcaaggtatggtggggcccagcaagacagggattaaattaggaagagagtagatactgaagatcggtcagggagctgttagagtaagcatcctgaagaaggcatcaacaggcagaatgaatcctgttcgttgctcctacaaacatgcagcataggaggaagggaaacagcttttactgagaagctgtatttgtgtcagtcattgatattttatcatattaaatattcmaagttaaattaattgtgaagtataaatatgtatgtcagtatgaagatgaccaatgccaaccaggatcattgaataaaaaagagttttgtttaatctatttattgccatctatgtccaaagaggaagtcaatattggcagatagtctccttgtgctcaaagagttcaaaaaactatgtcacaacttaagagaaacaga

SEQ ID NO: 363793 - DNA, 605 bp, Homo sapiens
ctttggtgatattgttaatgtttctgccttcaagtggttacaaaaggaaggtgaagttaatttcccttgcttcggaagttctgttttataagtctgaagggtacaatattgaaatgataacctacattcaatattaaccatttgctgccaaagtaaatactatatttcgataatttcataaatatccaagagaaattgtcccaatattcacatatattgaagttagctcatcaggaaaagtcattttagtgatgaggctctgaagaggcccccmaaaattgagataattatatgtgatacgtcaactgcaaaaaccatatttgtgagagatgctcagttatgtctgaataagaatcttagaattatagaatgttccaactggagaggatcttgtctaacacatttatcatagagataaagcaattaagacctggaaatgttaaattatttgcttaggattgcccaagaaatggaagagatggttctgaaccaggtcttttgacttaatttttttctaatgcatttgttatagagataaagcaactaagacaaggagatgttatttgttctgcattgttcagtaagtggaagagacaaaaatattt

SEQ ID NO: 363794 - DNA, 586 bp, Homo sapiens
taactttatttttggatacagaaactgacttctgcgggawctttgtgttttaatgtgcaaattgattttatgattatccaacccttactcaggtaaagaagggtaagttctgaaggtcctggaggcttgttttctcccaaatttttgtatctctttgcaagtggctagatgtgtatatcttagtcaactcaaaaacagggcaggttgatgccagcaactgaattttggagcccacctttactaaaaaggctattttctcaaccaacaaatgtctcttattacatagtagagttaatgttccctgatttcctttccaactttgttacaaatatgtgagtgtgaggggcatggggtcctgctttgctggcatttttcatggtgcctccagctggtctactcaggcacatttccctgcaggatgggaattgaaggggattctggataattcactgattctctgccatgtaatcccttgcaggaaaatactgtaatacaccatgacaagattaaagtgccactttcatggtatcagtagccattatactagggacactgaactgtttatcaatatactaaaaatgaggca

SEQ ID NO: 363795 - DNA, 637 bp, Homo sapiens
acaacaaaatagttacatgagagtcttgtacagaacattttgtgatattttttcatcatatatttagaaaataaaaaggaagggaaggagcttgtcatgattttaagcaggctcatcttggccatagatttttatcacatctaatcttctttcacatctatctatactacaatatgcatgatccatttaaacagatttaaaagacaaactgaaatttarctttaaaataactttttaaatgtcatcaagttatatttggaaactttatgagagcagttatacaatcctataattatcatgttcatgaacctttccaacaagtatacaattcatgattacaatgtttttgaaagatagatgtgaaaatgaataaactagaataaagacagttgtgaaatttcatctagtgaaaatagatttttaaaattcatgtattcagagagtattttttgaagcaagacagtttgagtctggctaaatgattgaaatcacaagaattttttgaaatgtttctgtattttatgttattttattatttgtactttagcacaattataaaatctatttttattataatatgtggcagaatagagtgaaaaaagattatataaactggtaacttaagaaacacatttca

SEQ ID NO: 363796 - DNA, 601 bp, Homo sapiens
tggaaacaggcaagcttagatttgagccttggcctaccctctactagatgtagttacctcatcaaattcattaaattcatctatgaaatggagtagttattgtgtaagtgatatgtttgttgcaaaactttcaatacatattaccttctctctaataggcagttaataatacaatttgaaatgccttgtccatttctttgcctggagaacctccttcaaaattctaatttcatcctaatgttacttttctcaattctagtgctgtttcttctaaaatattataaaaactaatgttttttactagtaaacatacgtttttaaacttctacatcacaagcacctaacatagtgactaacacttagaaggtgcaataaacatttgttgaattacatttgatcacacagaccttaattctataatagatgtgasaggcatattattgcacagtgtatgtcaataagcagcaaatgttttcatagaaaaaccaatttaaaatagttcacatattgacattattgtttaaaagtagcatagatgttaagaaaccaagtgataattatatggtggacttgtttttttccatttttgcctttacaaata

SEQ ID NO: 363797 - DNA, 470 bp, Homo sapiens
cactcacccaagtggctctagtcctctgtcctctgcctgtgatttccctttgacttcctagacttgtgtgacctgtctggctccctgaaaaatagatctcaaaaaaaaaactacataatagttgggcaagccctctttaatggaggggctagactgaaatctatacctgatattatgggctgtactaaagcgttttcccttagagaatggttctggttaacttycagacttaaaatccccttactaattaagtaccattctaattggaggcagaataggtgtcttaaaaatgtatggactaaatggcaattttcctgctgatgggacagtatcaagaactaacatttggttccagaagacattttaatcctaattgttgaagctagagttttcctgttaacagaagcagcataaagcatggtgtctagtagagggatgcaaaaagggagagaattggttagctagagtgt

SEQ ID NO: 363798 - DNA, 509 bp, Homo sapiens
tggctgtggcaatttcttaaaataagacaacaatgaagtttgccacatcaaatgagtcttcctttcacaaaaggaagtggtatttatctgtagcatgaaatgttgtttgatggcattttacccgcgttagaactgctcttaaaattgsagtcagtcctttcaaattctatcactgctttatctactaagtttaggtaatattctaaattctttgttgtcatttcaacaatgcttatagcaacttcaccagagtatattccgcctcaagaaaccactttctttgctgatctataagaagcaattcctcatccatttaagatttatcatgagattgtaggagttcagtcccatctttgaactcactttctaattctagttctcctgctcttttcactacatcttcagttatttccttgactggaagtattggaacatctcaaagtcatccatgagggttggaatcacttcttccaaactcctgttgctgatatttttaccttctctcatga

SEQ ID NO: 363799 - DNA, 546 bp, Homo sapiens
caaaagttatatatagatatttgactgtgtaacatgatgttgcatctaactcctgcattgttcaagggtcaactgtatattttaagggaaaatgaggtaaagagagattttttaacattaacattttatttctctccaaagatgtaatttataatcatgaaaaatagtttaagtggtgaacaaaatgtatagtgaaaagcacttgtatttctgtgtcaactcatggcattattaaatcatttgcactttgataatattatgaatgaaaatggcatcayaatgttttaatttgtagttttaaaattatgagtaagatagtaaatattatcttatgtcaatatttcctaaaagctacctatccatgtactaaaaccattttttgtttatttttccttattgatttctaaaaactttataaattaaggaaggtagctcattggaatatgttgaaaatatttttactcttgtcatttaatttgggctttatgatcttcagacaatgccaagcttcataatttttagatttttaaaattttatgatatata

SEQ ID NO: 363800 - DNA, 546 bp, Homo sapiens
caaaagttatatatagatatttgactgtgtaacatgatgttgcatctaactcctgcattgttcaagggtcaactgtatattttaagggaaaatgaggtaaagagagattttttaacattaacattttatttctctccaaagatgtaatttataatcatgaaaaatagtttaagtggtgaacaaaatgtatagtgaaaagcacttgtatttctgtgtcaactcatggcattattaaatcatttgcactttgataatattatgaatgaaaatggcatcacaatgttttaatttgtagttttaaaattatgagtaagatagkaaatattatcttatgtcaatatttcctaaaagctacctatccatgtactaaaaccattttttgtttatttttccttattgatttctaaaaactttataaattaaggaaggtagctcattggaatatgttgaaaatatttttactcttgtcatttaatttgggctttatgatcttcagacaatgccaagcttcataatttttagatttttaaaattttatgatatata

SEQ ID NO: 363801 - DNA, 483 bp, Homo sapiens
ggggtaattgaatcatgggggtcaggtctttcccatgctgttctcatgatgctaagtctcatgagatctggttactataatggggagctttcctgcacaagctctttctttgcctgctgccatccatgtgagacctgacttgctcttccttgcctaccttcgtgattgtgaggtctccccaggcacgtggaactgcaaartccaattaaacctcttccttttgtaaattgcccagtcttgggtatgtctttatcagcagcataaaaacagacgaatacacagcgtgacctccctttcttgagccatgctgtcagagctgtcttcacgtagctctctctgttagtctcacagccagtgtgggtagaacggctctggcaagtattgcaggaatccgtggtggggatatggaccattaggggtcactcacttactctttccccacattgggaagtctctcctggctcctggcagagaaggatgcct

SEQ ID NO: 363802 - DNA, 620 bp, Homo sapiens
acattcactaaaattttttaatcactggtgtataataatagtgataacaagtatcctatttctttactttttatgggattgtttgtttactttactatttagaaataacatcgtatatttttgtctttatcgatttacttatcttcttcttcttatattgtcctgtcatgatcctgggtcctcatatctccagttccaagtaaacactttaaagaaaaatatatatatgcccaaattagaacaaataagattggatgagaattaggatcctaagttgtgaatgtacaattacctatatctcaaggaacacaaaacaattatatctggattctggtttagatggtaactaaagtatacgagtttatcttttttctcctctaacaatccatctaatttacttgccatttatttacagtaaaacccacagtcttacactatgttaccagattaacacatacctcttctgcctttctcatccatgtcctgttgctcctcccctgtcccaattcactttagccacagtggtsttcttgctgttcctagtctcacttccacctcagggcttttgcacttactgttctctttgcctgaaacaaccttcccccagatatcaacatcaa

SEQ ID NO: 363803 - DNA, 544 bp, Homo sapiens
agtcttacactatgttaccagattaacacatacctcttctgcctttctcatccatgtcctgttgctcctcccctgtcccaattcactttagccacagtggtgttcttgctgttcctagtctcacttccacctcagggcttttgcacttactgttctctttgcctgaaacaaccttcccccagatatcaacatcaatagatttgtcacgtaaaatcttcactcagatgttaccttctcactgaaacatctctgaccatcacatttaaacatgaaacataccctaccattgatagtctttaccccccacccactttatttttgtcaataatatgtattgccttataacatgtagcacatttgctacaaaatttcttatttatttggtttattgtctctctagtctatgctasaaggtaagctccatgaggaaagggattttgtttactgctgtatcctatgtcactataaagaatacctggtacaaaataagcacctaatgaaataaataagctgaagaaaccttaatccatattttagcagatag

SEQ ID NO: 363804 - DNA, 556 bp, Homo sapiens
ggcggtggctgctgaatgtttgggtggctgtggcaatttcttaaaataacaatgaagtctgccacatgaattkactgtttttttttttttcatgaaagatttcttggtagcatataatgctgttggataacattgtgcccacagtagaactgcttttaaaattggagtcaatacactaaaaccctgctgctgctttattaactagatttaggtaattttctaaatcattctcatttcatcaaggctcacagcatctttgctgtagcagatccatctcaaaaaagcacattctttgcttatctattagaagcaacttctcatccactcaagttttaccataagattgtataaattcacattgtgaggctcaccttctaactctggttctcttactcttctaccacatctgtagttaattcttctacttgaagtcttgaacccctcaaaatcatccatgagggttggaatcaactttttccaaattcctgttaatattgatattctgacccactcccatgaatcactaatgttattaatggtaattaaaatgttgaat

SEQ ID NO: 363805 - DNA, 598 bp, Homo sapiens
tggacacagcgcggggaacatcacacactgaggcctgtaggggtatggggggctgggggagaaatagcattaggagaactacctaatgtaaatgatgagttgatgggtgcagcaaagcaacatggcacatgtatacctatgtgtcaaacctgcacattgtgcacatgtactctagaacttaaagtacaataaaataaaaaatraataaaaataaataaagggccagatagtaaaaaaaaaataaaaaaagtacatgattgatatttaaaagagttttcaaaaaggaatgtaagaaataaagcaagtctgcaatgaggcaaagaaaacggttaagagcttcttaccgccttcatgtgtatttgagggtcagaggagtgaacccacattttgtttcttctcttttacatttttttgctttcatttttgtttttaccaatcacatattagtcctgaatttaaactaagagcaataataatgtttcaatagatatctttatgtttaaaataaaatgttaagagtttcaagatacagtaagtaaaacaaaacaaaatgtccttcaatgggtgaataaacagtggaatatccacacataatact

SEQ ID NO: 363806 - DNA, 598 bp, Homo sapiens
tggacacagcgcggggaacatcacacactgaggcctgtaggggtatggggggctgggggagaaatagcattaggagaactacctaatgtaaatgatgagttgatgggtgcagcaaagcaacatggcacatgtatacctatgtgtcaaacctgcacattgtgcacatgtactctagaacttaaagtacaataaaataaaaaatgaataaaaataaataaagggccagatagtaaaaaaaaaataaaaaaagtacatgattgatatttaaaagagttttcaaaaaggaatgtaagaaataaagcaagtctgcaatgaggcaaagaaaacggttaagagcttcttacygccttcatgtgtatttgagggtcagaggagtgaacccacattttgtttcttctcttttacatttttttgctttcatttttgtttttaccaatcacatattagtcctgaatttaaactaagagcaataataatgtttcaatagatatctttatgtttaaaataaaatgttaagagtttcaagatacagtaagtaaaacaaaacaaaatgtccttcaatgggtgaataaacagtggaatatccacacataatact

SEQ ID NO: 363807 - DNA, 584 bp, Homo sapiens
atgtctctatttcctttatttccactctgattttgttctttgttttttttttttttttttttggcttctgctatctttggkgtttgtttcctcttgtttctctagttctgtttctttcctcttgtttctctagttcttttagttgagatgtgaagtttctaacttgtgatctttctagtttttgatgtgggcattgagtgctataaatttccctcttaaccatgccttacagcatcccagagatgcctctttatactcattagtttcaacaaactttttgatgtctgccttaatttcattatttacccaagagtcattctggaagaggttgttcaattttcatgtaggtgtgtggttttcagtgaatttcttaatattgagttctaatttgtgctgtgatctgagagactgtttgttatgatttaagttcttttgcattcactgaggagtgttttactcccaattatgagatcaattttaaagtgatgtgtggtggtaagaatgtatattctattgaatttgggtggagaattctgtagatatctatcagggccacttgatccagagctaagtttagatcctgc

SEQ ID NO: 363808 - DNA, 584 bp, Homo sapiens
atgtctctatttcctttatttccactctgattttgttctttgttttttttttttttttttttggcttctgctatctttggggtttgtttcctcttgtttctctagttctgtttctttcctcttgtttctctagttcttttagttgagatgtgaagtttctaacttgtgatctttctagtttttgatgtgggcattgagtgctataaatttccctcttaaccatgccttacagcatcccagagatgcctctttatactcattagtttcaacaaactttttgatgtctgccttaatttcattatttacccaagagtcattctggaagaggttgttcaattttcatgtaggtgtgtggttttcagtgaatttcttaatattgagttctaatttgtgctgtgrtctgagagactgtttgttatgatttaagttcttttgcattcactgaggagtgttttactcccaattatgagatcaattttaaagtgatgtgtggtggtaagaatgtatattctattgaatttgggtggagaattctgtagatatctatcagggccacttgatccagagctaagtttagatcctgc

SEQ ID NO: 363809 - DNA, 584 bp, Homo sapiens
atgtctctatttcctttatttccactctgattttgttctttgttttttttttttttttttttggcttctgctatctttggggtttgtttcctcttgtttctctagttctgtttctttcctcttgtttctctagttcttttagttgagatgtgaagtttctaacttgtgatctttctagtttttgatgtgggcattgagtgctataaatttccctcttaaccatgccttacagcatcccagagatgcctctttatactcattagtttcaacaaactttttgatgtctgccttaatttcattatttacccaagagtcattctggaagaggttgttcaattttcatgtaggtgtgtggttttcagtgaatttcttaatattgagttctaatttgtgctgtgatctgagagactgtttgttatgatttaagttcttttgcattcrctgaggagtgttttactcccaattatgagatcaattttaaagtgatgtgtggtggtaagaatgtatattctattgaatttgggtggagaattctgtagatatctatcagggccacttgatccagagctaagtttagatcctgc

SEQ ID NO: 363810 - DNA, 584 bp, Homo sapiens
atgtctctatttcctttatttccactctgattttgttctttgttttttttttttttttttttggcttctgctatctttggggtttgtttcctcttgtttctctagttctgtttctttcctcttgtttctctagttcttttagttgagatgtgaagtttctaacttgtgatctttctagtttttgatgtgggcattgagtgctataaatttccctcttaaccatgccttacagcatcccagagatgcctctttatactcattagtttcaacaaactttttgatgtctgccttaatttcattatttacccaagagtcattctggaagaggttgttcaattttcatgtaggtgtgtggttttcagtgaatttcttaatattgagttctaatttgtgctgtgatctgagagactgtttgttatgatttaagttcttttgcattcactgaggagtgttttactcccaattatgagatcaattttaaagtgatgtgtggtggtaagaatgtayattctattgaatttgggtggagaattctgtagatatctatcagggccacttgatccagagctaagtttagatcctgc

SEQ ID NO: 363811 - DNA, 623 bp, Homo sapiens
gtgccaactatgttttcctgctttgggtatgcagtattagaaaaggaagatatagtggagaaaagatacaattcctgcctgaatttgctcagttttattttcggtggaaagaagaatccaatcagtgcttttaaaacctggttgtatataagaataacccatggtgtttgctgaaagaaccgaattagactatctgggtttgggtctgggaatttctatttttatcaagagccccagatcattctgatgcacagccacatttaggaaacactgaattagatgcaagctagaatcccttccagcttttgaattctatgactttctatcattacagaactttctcacaaaaatagggagaaaaaagaaatgtatgtttctgccaacagagcattaaggcaaaaaaaggatgagagtttgtaaggcagagattttgttctgtaaggtcaagggcagcttgggccagcaccagcccaaattctaaatggttcaggccagatgtagattccctaggtacttgataggaaakagcatggattatgttggaggggtagtgaaaagtacaaaagagtaggccaggaaggtttaaatgagtgcatttagcatagtgtattgcacatagtgaa

SEQ ID NO: 363812 - DNA, 503 bp, Homo sapiens
  misc_feature (1)...(503): n = A,T,C or G
nnnnnnnnnnatctgcctccagtacctgaccttcagtatgttaatgaattctattgaactttttttttcatctgtttatagggtataattatttctawcctattatctcctttttgttatgggattacaagatatttaagagtctagtaaataactttaataagttatgtagtttgaaattacagcaatttgttcaacaccccctaattcctcctctgcaccacaccccgtcttctaaactccccccgacgacagaatttctgcctgattacagccccccttaatatgctagggtcttccttgctaatgtggatttacctggcttagatggattctctcctttctttcatttccatatactagaatttgcattccataaatactctttttacctcctattcttcatccaaactttgcactcaagtctgatttatgctctactgcttcactaagacagtgctgctacaggttactaaccaccatgtcttgctgccttctttcag

SEQ ID NO: 363813 - DNA, 503 bp, Homo sapiens
  misc_feature (1)...(503): n = A,T,C or G
nnnnnnnnnnatctgcctccagtacctgaccttcagtatgttaatgaattctattgaactttttttttcatctgtttatagggtataattatttctaacctrttatctcctttttgttatgggattacaagatatttaagagtctagtaaataactttaataagttatgtagtttgaaattacagcaatttgttcaacaccccctaattcctcctctgcaccacaccccgtcttctaaactccccccgacgacagaatttctgcctgattacagccccccttaatatgctagggtcttccttgctaatgtggatttacctggcttagatggattctctcctttctttcatttccatatactagaatttgcattccataaatactctttttacctcctattcttcatccaaactttgcactcaagtctgatttatgctctactgcttcactaagacagtgctgctacaggttactaaccaccatgtcttgctgccttctttcag

SEQ ID NO: 363814 - DNA, 503 bp, Homo sapiens
  misc_feature (1)...(503): n = A,T,C or G
nnnnnnnnnnatctgcctccagtacctgaccttcagtatgttaatgaattctattgaactttttttttcatctgtttatagggtataattatttctaacctattatctcctttttgttatgggattacaagatatttaagagtctagtaaataactttaataagttatgtagtttgaaattacagcaatttgttcaacaccccctaattcctcctctgcaccacaccccgtcttctaaactccccccgacgacagaatttctgcctgattacagccccccttaatatgctagggtcttccttgctaatgtggatttacctggcttagatggattctctcctttctttcatttccatatactagaatttgcattccataaataytctttttacctcctattcttcatccaaactttgcactcaagtctgatttatgctctactgcttcactaagacagtgctgctacaggttactaaccaccatgtcttgctgccttctttcag

SEQ ID NO: 363815 - DNA, 503 bp, Homo sapiens
  misc_feature (1)...(503): n = A,T,C or G
nnnnnnnnnnatctgcctccagtacctgaccttcagtatgttaatgaattctattgaactttttttttcatctgtttatagggtataattatttctaacctattatctcctttttgttatgggattacaagatatttaagagtctagtaaataactttaataagttatgtagtttgaaattacagcaatttgttcaacaccccctaattcctcctctgcaccacaccccgtcttctaaactccccccgacgacagaatttctgcctgattacagccccccttaatatgctagggtcttccttgctaatgtggatttacctggcttagatggattctctcctttctttcatttccatatactagaatttgcattccataaatactctttttacctcctattcttcatccwaactttgcactcaagtctgatttatgctctactgcttcactaagacagtgctgctacaggttactaaccaccatgtcttgctgccttctttcag

SEQ ID NO: 363816 - DNA, 372 bp, Homo sapiens
attcacagagacaatttttcttccataacatggtgaaacctaaagctttccaattttcaaagaacagagacttaaagcttcatttataacagggacaatcttaaataagccaatatatataaggtgatatggaagtttatgtcaaaaaaatatgcaattagtaaaagttaccmattgatatggtttgactgtgtccccacccaaatctcatcatgaattcccatgtgttgtggaagggaccccgtgggaggtgattgaatcacaagggcaggtctttgctatgcttttcttgtgacagtgaataagtcttatgggatctgatggttttaaaaatgggagtttccctgcacaagctctcttttcgcctgctgt

SEQ ID NO: 363817 - DNA, 372 bp, Homo sapiens
attcacagagacaatttttcttccataacatggtgaaacctaaagctttccaattttcaaagaacagagacttaaagcttcatttataacagggacaatcttaaataagccaatatatataaggtgatatggaagtttatgtcaaaaaaatatgcaattagtaaaagttacccattgatatggtttgactgtgtccccacccaaatctcatcatgaattcccaygtgttgtggaagggaccccgtgggaggtgattgaatcacaagggcaggtctttgctatgcttttcttgtgacagtgaataagtcttatgggatctgatggttttaaaaatgggagtttccctgcacaagctctcttttcgcctgctgt

SEQ ID NO: 363818 - DNA, 568 bp, Homo sapiens
tgttactataatgaaaatttcttgaaataactggtttcttaatggacattcagaaatcttaagaaacaaacacaaattgttctaggggcacattaaaaatggaagcttgacacccttgtcggcaggcaggtagacataaggaaaatgcaatatgagtgagtgattattccctgggaagtctaktgcacgttagtttatgggaaagatagcaaaagcagaacagatgaggcaactaggtaaaggcaaaaacttttccctaagttacttgacattttatagtcttagacacaaggcaagcaacactcattatctcattatttcctatgggacaatccagttcagtcaattatcattaaaatttaactagaaattcaatacattatgcaaatgttccatttatatactgtcatgtcaagccagtactgaaatgtagctgtagttaaaaggtgtagatgaaaccctggttctcttccagagacatttcaaaaacaatgaatgacactccctagcccaagcacgatagaataaatctcacagatagttagggtcatgttaccagaatggcaag

SEQ ID NO: 363819 - DNA, 671 bp, Homo sapiens
tatttaagtatctaccacattgcctagagcacaataaattctcaatcaatgtttatattcataacaattaattaaaatgtatcaagagctgaccttgaacagcacactgttcaaagggctttacgttattgctttatttaatacttaaccttgattagctaggcaccattatgcaaatgaggaaactaaggtgcagagagctgaattaacctgcccaaggtcacacagctagtaaatgatggaactgggatctctgacttaaagaatcaggaaatatgtaagaatggtgatcaacagcaaattggcagatgaaccactgctgagagtggcttccaactcaaagaagagaaggagatttgagaaaaacatagcacagtatagcayagagtcctaagtcaacaaaatgagatagaaatgcggtatagctagagacctgcaattgccttcacaaagtctactgtgaaaatatgtttctgctctcccttggatctttattttaactgtgtagccgtacacttgagttctgttctaggctgaagtcgtttttagaaatagacaaggtataaattaaaaataaatgcccacatacatattggatgagaaccacctggtttaatagcagcttacaagaaatgaatttaaaggttttagctgactgcaagtttattttg

SEQ ID NO: 363820 - DNA, 531 bp, Homo sapiens
tatacatacatacatacatacatacatacatacatacatacatacatacatagaactcagctcaagcattcttcctctccaaggaaacttccagttttggtctccactgtctgtcatacaatttcttagaaytgaagtccactccttcacagatcatcatctgccaactttaagttcattgctccagtgataagaaaaagcacaaccttgtcagaatcttagtagcatctcagagtggaagggcaaagttggaatatttaggagattcaggggactggtttaaggcacttccatcaacacaaggtctaatcgggtttgggcaaagttcataacataattgtttcaaatttgtggacacagcaaggcaaggctcttgaagctgtcttgaaaagtcatttgataagcctagttaagggagctgttgccttgagaaagggttatttaccctaatgagagctagttgagaagtctctaatatggatacgtggattttctatatacctatttgcaacttcagcttccaggacaaga

SEQ ID NO: 363821 - DNA, 531 bp, Homo sapiens
tatacatacatacatacatacatacatacatacatacatacatacatacatagaactcagctcaagcattcttcctctccaaggaaacttccagttttggtctccactgtctgtcatacaatttcttagaactgaagtccactccttcacagatcatcatctgccaactttaagttcattgctccagtgataagaaaaagcacaaccttgtcagaatcttagtagcatctcagagtggaagggcaaagttggaatatttaggagattcaggggactggtttaaggcacttccatcaacacaaggtctratcgggtttgggcaaagttcataacataattgtttcaaatttgtggacacagcaaggcaaggctcttgaagctgtcttgaaaagtcatttgataagcctagttaagggagctgttgccttgagaaagggttatttaccctaatgagagctagttgagaagtctctaatatggatacgtggattttctatatacctatttgcaacttcagcttccaggacaaga

SEQ ID NO: 363822 - DNA, 497 bp, Homo sapiens
ttctttttaaaatcatctttttttggataaattcccaggaatggcagtactgggttaaagtctgtgaaaaactcttgggttttgaaatgcatcgtcaatctggaaaagcaaaatgagaaacctatttttattttgcattaaatgtttatccccatgtttgtgtcagtaaatgctatatatttagaagatgtctaggctaagttagtgataagactgataaaaatgttaggtccaagcaaccacctccttctcctgtatgccaaggataaaggtgctgaggagcagtgtggttggagtaggaggcctgtctccatycatgtcctccccgatgagacagctgggacctcaagtgccttgtttatttttgcaggcaatgtcgtgaacattcagacgggccactgggttggaaagcagagtggcctgggtgccgggctggactccttctatgaatacctcttgaaatcttacattctctttggagaaaaagaagacctaga

SEQ ID NO: 363823 - DNA, 488 bp, Homo sapiens
cgtaagtgttcctgctgcaatttggatcatttttacttttctcrtctccaatagaaacaccacccaactaccacaatactttgacataggaaattgtagcctgtagttcttccattctttcttccttgtcaaaccctaggatagccagtgctcttgagtgaatctctgggtgccctgcaggacattgctgcaggcttggaaaagaagtccgaatacatctaaggctccagacatttttcttcttcatcctctatatcaaaatgtatctgtcccacatcatattctccagctagatagtgatgactttgtcctcaaaataacaacgatttcttctagttggaacaaaaaacacttaagcactggggcattttttttgtctgctcttagacctttaactgtgctctactagccaggatgtgtggagtggctaacaatataaacacagtgcagacgatcttaagggatgcacaaaatgaaaggaatgggag

SEQ ID NO: 363824 - DNA, 556 bp, Homo sapiens
gtaattgattaacttcatatcctaaccccccggggctgcttgcaagattcatgaacttgtttttcttttagagaacaatgatccttggtcatgcagacctccttgagagcatccaggagtttgactggcctgagggatgcaaacagttttgatcatcaagggaagctcacctcctgccttactcataaaagcccctggttatgtttaaaggcagatcagatttgagagctcatctctcccatcttctttggctttggccaaatcaaataaacctttctctgttcctaagcactgacgtgtcagtgtttggcttactgtgcatcaagtatgcaaacctaaattttgaggttctacaacaaaaggaaggggagaagagaggaaggactaggtrtggggttgacaaaaactgaagctgtgaaaacccacccatctagtcccacatttcacctacctacagggcttttcttcatagccttccttaacccgtcataacattatctggctaaagccctgtagccttatttagaatctgcttgaagaaagggataaaaatatg

SEQ ID NO: 363825 - DNA, 504 bp, Homo sapiens
catcttccaccagctgccttaacccagttttgaggccctgtccaaaagccagacagttcccttctaggacagtcaattaaggccataccccaaccacctgctgtatcagrctctcatgctccaggccactatatacccaccctaattaccccagggccaagtactctacaaccaaggacagcctctatactccagagccactgaaatcattcaaattagccactcctatgtctgcatgccctgccttaccctctccttcccacagaaaccacaatagtgcccacagttccctcatattcctctgcatcatgactgaccaaggtgcatcccccaagtggttcttcatggggtgctatgttctcccagggagctgtatttcttctcttgatttgcatctgctctcgtcaaacctcatccatggtaatagagttaaaacacggagttgctatgacaagctccagtcccctgctaacctgcactaggcatgtcactagtgcagtaagt

SEQ ID NO: 363826 - DNA, 504 bp, Homo sapiens
catcttccaccagctgccttaacccagttttgaggccctgtccaaaagccagacagttcccttctaggacagtcaattaaggccataccccaaccacctgctgtatcagactctcatgctccaggccactatatacccaccctaattaccccagggccaagtactctacaaccaaggacagcctctatactccagagccactgaaatcattcaaattagccactcctatgtctgcatgccctgccttaccctctccttcccacagaaaccacaatagtgcccacagttccytcatattcctctgcatcatgactgaccaaggtgcatcccccaagtggttcttcatggggtgctatgttctcccagggagctgtatttcttctcttgatttgcatctgctctcgtcaaacctcatccatggtaatagagttaaaacacggagttgctatgacaagctccagtcccctgctaacctgcactaggcatgtcactagtgcagtaagt

SEQ ID NO: 363827 - DNA, 657 bp, Homo sapiens
tgtatttcttctcttgatttgcatctgctctcgtcaaacctcatccatggtaatagagttaaaacacggagttgctatgacaagctccagtcccctgctaacctgcactaggcatgtcactagtgcagtaagttcaactttactgccttaagccattgaggtcttgaggttgttggttactgtagtatcagcccaccctgactgagtactgcccagtctcatcttcccaattcccttctcaattttctttaggaaatcattgctctctgactcatgtggttccgatgtgttgattccattctcttgctccaggataaaacatgtcacccaagcccagaaaatcagcacaattcatctgtctttaaaaagtatccagaatccagccacttacttccatcttcactatcctagcccatgccaacatcatttcatcactrgataaccacacctgcctcttatctggcttccacagtctcttctacagtcaattttcaatgtaataatcagaggggttactatgaaatcagttttgaaacataactcgcttcattgtactcctgcttaaaactctcctagactacccatcttacttgggaaaagccacagtccttacagtaatcagcaaagtcctatctgactggctatccgttactcccc

SEQ ID NO: 363828 - DNA, 398 bp, Homo sapiens
atgatagaataaatgaatgaattccatctctttaagcacggttattcaatcaagaataggcatatgacccaaaccagaccaagacttcttaatttcagagactctggttggcattactggaaatttgtgacagagactgacagcaatcaacaaattcatgagctcctgcccgtggtgtgaaattgtggctagaaagcagttattcagtctggggctacgttttccagcccttcctgtgtccatatttggtcatgtrgtcaattctcactaaagggagttgagggaaggtgcagagtaaacattctttaaaaaatgattgcggtttctccacgctttgcttccccatttgctaagtaaagaaaactctgaaccctaaaggattgtgggccctgaatcat

SEQ ID NO: 363829 - DNA, 398 bp, Homo sapiens
atgatagaataaatgaatgaattccatctctttaagcacggttattcaatcaagaataggcatatgacccaaaccagaccaagacttcttaatttcagagactctggttggcattactggaaatttgtgacagagactgacagcaatcaacaaattcatgagctcctgcccgtggtgtgaaattgtggctagaaagcagttattcagtctggggctacgttttccagcccttcctgtgtccatatttggtcatgtggtcaattctcactaaagggagttgagggaaggtrcagagtaaacattctttaaaaaatgattgcggtttctccacgctttgcttccccatttgctaagtaaagaaaactctgaaccctaaaggattgtgggccctgaatcat

SEQ ID NO: 363830 - DNA, 564 bp, Homo sapiens
  misc_feature (1)...(564): n = A,T,C or G
actataataaaaatttcttgaaataactggtttcttaatggacattcagaaatcttaagaaacaaacacaaattgttctaggggcacattaaaaakggaagcttgacacccttgtcggcaggcaggtagacataaggaaaatgcaatatgagtgagtgattattccctgggaagtctattgcacgttagtttatgggaaagatagcaaaagcagaacagatgaggcaactaggtaaaggcaaaaacttttccctaagttacttgacattttatagtcttagacacaaggcaagcaacactcattatctcattatttcctatgggacaatccagttcagtcaattatcattaaaatttaactagaaattcaatacattatgcaaatgttccatttatatactgtcatgtcaagccagtactgaaatgtagctgtagttaaaaggtgtagatgaaaccctggttctcttccagagacatttcaaaaacaatgaatgacactccctagcccaagcacgatagaataaatctcacagatagttagggtcatgttaccagaatgnnnnn

SEQ ID NO: 363831 - DNA, 574 bp, Homo sapiens
gaccatggccgggagcggtggctcacgcctgtaatcccagcactttgggaggcccaggcgggtggatcacgaggtcaggagatgagaccatcctggctaatacggtgaaaccccgtctctactaaaaatacaaaaaattagccgggcgtggtggcacgagtctgtagtcccagctactcgggaggctgaggcaggagaatcactttaaccacrgaggcggagcttgcagtgagcggagatcgcgccactgcactccagcctgggcgacaaagcgagactccgtttcatcatacataccataaatctggaagaggccaaatacttttttttcaaaatttaatattttttctcaaaaaaattgagatagaaaatacacttatacgtataaacgctatggttaagcaagaaaaactcatcggtttcctagaattttgaaaaggctcagtcctttgaatttagcttgggatgtccccttgcttcggtagaaatcatgctctcaaactgcaatttaaaacataaatgtgtaaataaccacaccattttaaaaacccaactccgtttagtctataggctt

SEQ ID NO: 363832 - DNA, 564 bp, Homo sapiens
gattcttatgcacgggattttttgagggagctgtatgagtcagcttgggctgccataatgaaataccacaggcaggatggcttcaacagaaatgtattttctcatasttctggagactggaagttgaagatcaaggtatgggcaggtcgggtttcttccgaggctctgtcgtttgcttgcagatggctgccttcttgttgtgtcctcacatggccatttctctgtgcacgtgcacccctggtgtctctttgtgtatccagatttcctcttttcataaggacaccagtcagcttgggttagggcccaacctaatggccttattttaactaagtcccctctttaaaggccctacctccaaatacagttgcattctgaggttctgggagggagggattcaacatatgaatttagggagcaggagacaacaattcagtccacaacaggagtgcactcaggagaagcctgtaagaaagtgaggggaacaggagaaggcaagagaaaagatgtggcttcagctacagtctagcttcagtctgatcccacaggaagctctggaatatgata

SEQ ID NO: 363833 - DNA, 564 bp, Homo sapiens
gattcttatgcacgggattttttgagggagctgtatgagtcagcttgggctgccataatgaaataccacaggcaggatggcttcaacagaaatgtattttctcatacttctggagactggaagttgaagatcaaggtatgggcaggtcgggtttcttccgaggctctgtcgtttgcttgcagatggctgccttcttgttgtgtcctcacatggccatttctctgtgcacrtgcacccctggtgtctctttgtgtatccagatttcctcttttcataaggacaccagtcagcttgggttagggcccaacctaatggccttattttaactaagtcccctctttaaaggccctacctccaaatacagttgcattctgaggttctgggagggagggattcaacatatgaatttagggagcaggagacaacaattcagtccacaacaggagtgcactcaggagaagcctgtaagaaagtgaggggaacaggagaaggcaagagaaaagatgtggcttcagctacagtctagcttcagtctgatcccacaggaagctctggaatatgata

SEQ ID NO: 363834 - DNA, 538 bp, Homo sapiens
acatggtactggaaagttccatgctcccatgatcgaatgatattccacctcatacctakgcaaacctagcttggtaaagccaaacaccagtccctgccttcacctcctcaatctaaacacgattcaaataaaatgaggactgtcttagataactactgaacagaacacctgactatatatggccttaggaagaaatagcttcaaataaatttagaatcatccagccccactccttcatttgacagatgagaaaacagggagccacagtgggaacataaatgactcaagctaaggaagctgttaagaaagctcagatttcttttttttttttttttaacattggcaaggtagctcgttttcacttctaccccatcctccctcaggctccaatccaacctaactacctttaaaaagttgtttaacaagtcagagctacatctgatattcctattaaagcctcaaatagaataattatttctagctttggttggcgctttgctatactttctgcaacagaaataattgcattttgtcaagc

SEQ ID NO: 363835 - DNA, 538 bp, Homo sapiens
acatggtactggaaagttccatgctcccatgatcgaatgatattccacctcatacctatgcaaacctagcttggtaaagccaaacaccagtccctgccttcacctcctcaatctaaacacgattcaaataaaatgaggactgtcttagataactactgaacagaacacctgactatatatggccttaggaagaaatagctwcaaataaatttagaatcatccagccccactccttcatttgacagatgagaaaacagggagccacagtgggaacataaatgactcaagctaaggaagctgttaagaaagctcagatttcttttttttttttttttaacattggcaaggtagctcgttttcacttctaccccatcctccctcaggctccaatccaacctaactacctttaaaaagttgtttaacaagtcagagctacatctgatattcctattaaagcctcaaatagaataattatttctagctttggttggcgctttgctatactttctgcaacagaaataattgcattttgtcaagc

SEQ ID NO: 363836 - DNA, 556 bp, Homo sapiens
gacaatgaactcagtggccaagagaaaggaggctgatgcagaggggaaggccagggctgggacaaaagtcatgaaaagcagttctgacctgcatgtgaggggcatttaatggaagagtgtgacatacaaaaatgtagtggaattccatgggggaggtattacttagggcttagctataaaaagcaaggttttattcatctagatgggcacttcctttagagacttttctcccatttgtcttgcatgtaatgtaatgtacatgagaatgtaaaaragaaacaagatgacaactcaaaaaaagaaatcttttaataaaaattactcataaaaatcctaataaattttaaagagcaagatattccttattacatttataaaagaacatttggtccttttacaaaaagatcccttttaatttaaatacatttcttatttacagattaaacataaaatatcatctacagttgcaaagcatattgcacattacagagaagcatttgtgtatttccgtaagttttcccagagtttccaactctatacttttttttgtaaaaag

SEQ ID NO: 363837 - DNA, 567 bp, Homo sapiens
tttgctaaagataatggtctccagttccatccacgtcccagcaaaggacatgatctcgttctttttatggctgcatagtattccatggcgtatatgtaccacattttctctatctagtctgttatttatgggcatgtaaattttttttaaataataaaaattcataaaaagtaatgtctgcttttcagaaatgcctatgcagataatttgcccatttagttgtaaaaaattatataaaagcctgttattcgtgcaacatggaagaacctggagtgcattacattaagttaaatgagccatacacagaaagataaatatcacatgttctcactcatatgtgaaaactaaaaatgttgatttcactgaagggagtagaatagtggatactkgaggctcagaaggttaggggagggtagaatagggaagaggttggttaatggaagcaaaattatagctagagaggaggaacaagttctggtgttctgttgcactttagggttactgtagttaacaattcattgtatattttcaaaaaaactggacgagaggatttttgaatgttcccta

SEQ ID NO: 363838 - DNA, 567 bp, Homo sapiens
tttgctaaagataatggtctccagttccatccacgtcccagcaaaggacatgatctcgttctttttatggctgcatagtattccatggcgtatatgtaccacattttctctatctagtctgttatttatgggcatgtaaattttttttaaataataaaaattcataaaaagtaatgtctgcttttcagaaatgcctatgcagataatttgcccatttagttgtaaaaaattatataaaagcctgttattcgtgcaacatggaagaacctggagtgcattacattaagttaaatgagccatacacagaaagataaatatcacatgttctcactcatatgtgaaaactaaaaatgttgatttcactgaagggagtagaatagtggatacttgaggctcagaaggttaggggagggtagaatagggaagaggttggttaatggaagcaaaattayagctagagaggaggaacaagttctggtgttctgttgcactttagggttactgtagttaacaattcattgtatattttcaaaaaaactggacgagaggatttttgaatgttcccta

SEQ ID NO: 363839 - DNA, 429 bp, Homo sapiens
tgacatcagcagaggaggattttttwttttttattttttttgagacagagtctcactctgtcgcccaggctggtgtatagtggtgtgatctcggctcgctgcagcctctacctcccaaattcaagcgattctcctgcctcagcctcccaactatctgggattacaggcatgtgccaccacgcctggttaatttttgcatttttagtacagatgaggtttcactatgttgcctagcctggtctcaaactcctgagctcaaaaccatcttcccacttcagcctcccaaagtgctaggattacaggcataagccaccactcccggccagcagaggaagattttaataatcaagtagataggctgacccttttttagataccactcagcttctttccccagccatccatgttatcagagtctttgatgttgtt

SEQ ID NO: 363840 - DNA, 627 bp, Homo sapiens
aaaggtaatattgatatgagatgtaaatttttaaagatacattagaaaaatctttttttttccccacagctagttattttaagttaagtatgattcctacatggactgcctttcacgtgttagcttatgcatctggtctacttgataggtattggtgagatccacagtaactgatctataacaactgctctttagctgtacgattcattaaaaacataccttatgcgtgcttcttttgaaactgtgtgtaataagcataataaccttagacttatactttcaagtttatgtgtggtgtagcgygaagaggtgttaattcagatatcagtcctactgcctgatacttgagtaatattatgccacttcattccaagttttagttcctgttcttaaaagtagggattgcagctgggcatgatggctcacagctgtaatcccagcaatttgcgaggccagggtggaaggattgcttgaagccagagtctgggcaacatagcaagacctcatgtctgcaagaaaataaaaataaaaagttacccaggcatggtggtacatgcctgtagtcccagctattcagaaggctgaggcaggatgatctcttgagcccagacatttgaggatgcagtg

SEQ ID NO: 363841 - DNA, 580 bp, Homo sapiens
ttctttgtttcagtgaattggatcctcttgtgtgtcgaccgaaaaaaaaaaaaattaacagaaggaggaraaatattctaattgcattaatccatgactaaattcctagttcaatctgacaggtaggtagttactagcataatttccatttgtaggtgagaaaacagagttataagaaatagtaacatgcctaaggtcaaccattatgccacattctgcatccctaaccatgtcagctcctgatccatgaatattattttaagaacctcctttcacttagcaatatcccattatgtaattgactttctagtcaaattagaaggaaaagtttttgaagaggttgtaggtgaactgagtccaatataaacctcaatccaatgtataaagagtgtccagatgagcagggacgaggacgccaggaactctctagcttcctctttaggacagtgtgactttaaatgttcgtatggggtcataagatcttgcaagagagtcagagtggaaaaagatacgggattcagtgtcccaaggcctaggctcaaatcccaaatctatgaatctcactcagtcatggaaccat

SEQ ID NO: 363842 - DNA, 635 bp, Homo sapiens
tgttttgctatcaaactatactttttaatttgcttattatttcattcattcattcatttcttcacatattccaaatgcgacttaaagcggcacctacttttcctcatctataaattaaggatagtaggataccttacagatgatttttaaaattttcagtatgaaggataaaccaacattttaaaatggttcagtaaatgcaggttcctttccttttgttaaggtaagcagttttaatatcagttcgaggcactgtaaagtaacaaccctctacccttgaaagcctcttatcattttcctatgctatgtgcagtcatgtgagcttaatggcccacatacatattgttttgaggctgctcaagatgcacaaggtcagtagaatgaaacataaaatgaccatccctctagwggatgatttaggaggtgagacttgaagaggcatctacctggaggccacaggctgcttccacagggcgtggaacgggtgataaataagcgcacagtggaggctcctgctatccttccttctaccctacctcatggcaatgccaacttgaacccctgccttagtgattaaatgttctgtgcagaaatgtggtaagggttttactcaagagcactggtccctcacaggt

SEQ ID NO: 363843 - DNA, 646 bp, Homo sapiens
tatttagcacatatcaattattaatcaattcagcaaatggcacctacccatttctccaggcaatgacagaaagaaagccagacaaacttgtcagaaaattattgtgcattgtagaagcttcacgttttatttttaataactatagaagaaccatgttgcctggttaccatcttcattttgtactctggtctaaaaatgtctcagcagccagaagttttcagtgagctcaacatctaaacttatataatcaaacatctataacgattcaaaaggaattttaccaaaatgatatttcattttcttcctaatcacagattcagccaccacctaatgattgaggggaaaagaaagcaaccttttgaaggaaagacttttcatatgcaagtctgagaggggaaaaagaatcttaaaaaaaaaaaaaaggaaaacaayactcaaagaaaataataccagtgtcctgaatgcatgaccacttagtatttgaattcctatgaaaatataaatcaaaagaagaaatgttttggacacctagagaagcttaaattaatatttacaatatttttcaatttcacatcaaaggtcacttttatatgcaggtattttcaggtttgagaagaactgtccaacgttctaaaacatgctattt

SEQ ID NO: 363844 - DNA, 646 bp, Homo sapiens
tatttagcacatatcaattattaatcaattcagcaaatggcacctacccatttctccaggcaatgacagaaagaaagccagacaaacttgtcagaaaattattgtgcattgtagaagcttcacgttttatttttaataactatagaagaaccatgttgcctggttaccatcttcattttgtactctggtctaaaaatgtctcagcagccagaagttttcagtgagctcaacatctaaacttatataatcaaacatctataacgattcaaaaggaattttaccaaaatgatatttcattttcttcctaatcacagattcagccaccacctaatgattgaggggaaaagaaagcaaccttttgaaggaaagacttttcatatgcaagtctgagaggggaaaaagaatcttaaaaaaaaaaaaaaggaaaacaatactcaaagaaaataataccagtgtccygaatgcatgaccacttagtatttgaattcctatgaaaatataaatcaaaagaagaaatgttttggacacctagagaagcttaaattaatatttacaatatttttcaatttcacatcaaaggtcacttttatatgcaggtattttcaggtttgagaagaactgtccaacgttctaaaacatgctattt

SEQ ID NO: 363845 - DNA, 579 bp, Homo sapiens
tacagtcttcctacaatggtatatgtattagttcattctcacgctgctgataaagacatacctgagactrggtaatttataaaggaaagaggtttaactgactcacaattccatatgactggggaggcctcataatcatggtggaaagcgaataagaagcaaagtcatatcttacatggcagcaggcaagagagcttgtgaggggaattcccatttataaaaccatcagatcttttgagacttattcactaccatgaggacagtatgaagaaaattgcccctaggattcaattatctccacctggccccacccttgacatgtggggattattacaattcaaggtgagatttgggtggggacacagccaaaccatattattatataacaatagaaattattcctcctctctagtagaaatggtgagatgacatgctatctgaagtggaactccatactagagttggaaaagcaaattagtaatgtaaaacagttattttaaatttattatgagaaaaaatgcctatccaacttgaatacatgatcatagatacatgtgaatgtagatacatgtgaatcat

SEQ ID NO: 363846 - DNA, 579 bp, Homo sapiens
tacagtcttcctacaatggtatatgtattagttcattctcacgctgctgataaagacatacctgagactaggtaatttataaaggaaagaggtttaactgactcacaattccatatgrctggggaggcctcataatcatggtggaaagcgaataagaagcaaagtcatatcttacatggcagcaggcaagagagcttgtgaggggaattcccatttataaaaccatcagatcttttgagacttattcactaccatgaggacagtatgaagaaaattgcccctaggattcaattatctccacctggccccacccttgacatgtggggattattacaattcaaggtgagatttgggtggggacacagccaaaccatattattatataacaatagaaattattcctcctctctagtagaaatggtgagatgacatgctatctgaagtggaactccatactagagttggaaaagcaaattagtaatgtaaaacagttattttaaatttattatgagaaaaaatgcctatccaacttgaatacatgatcatagatacatgtgaatgtagatacatgtgaatcat

SEQ ID NO: 363847 - DNA, 579 bp, Homo sapiens
tacagtcttcctacaatggtatatgtattagttcattctcacgctgctgataaagacatacctgagactaggtaatttataaaggaaagaggtttaactgactcacaattccatatgactggggaggcctcataatcatggtggaaagcgaataagaagcaaagtcatatcttacatggcagcaggcaagagagcttgtgaggggaattcccatttataaaaccatcagatcttttgagacttattcactaccatgaggacagtatgaagaaaattgcccctaggattcaattatctccacctggccccacccttgacatgtggggattattacaattcaaggtgagatttgggtggggacacagccaaaccatattattatataacaatagaaattattcctcctctctagtaraaatggtgagatgacatgctatctgaagtggaactccatactagagttggaaaagcaaattagtaatgtaaaacagttattttaaatttattatgagaaaaaatgcctatccaacttgaatacatgatcatagatacatgtgaatgtagatacatgtgaatcat

SEQ ID NO: 363848 - DNA, 579 bp, Homo sapiens
tacagtcttcctacaatggtatatgtattagttcattctcacgctgctgataaagacatacctgagactaggtaatttataaaggaaagaggtttaactgactcacaattccatatgactggggaggcctcataatcatggtggaaagcgaataagaagcaaagtcatatcttacatggcagcaggcaagagagcttgtgaggggaattcccatttataaaaccatcagatcttttgagacttattcactaccatgaggacagtatgaagaaaattgcccctaggattcaattatctccacctggccccacccttgacatgtggggattattacaattcaaggtgagatttgggtggggacacagccaaaccatattattatataacaatagaaattattcctcctctctagtagaaatggtgagatgacatgctatctgaagtggaactccatactagagttggaaaagcaaattagtaatgtaaaacagttattttaaatttattatgasaaaaaatgcctatccaacttgaatacatgatcatagatacatgtgaatgtagatacatgtgaatcat

SEQ ID NO: 363849 - DNA, 598 bp, Homo sapiens
atttcctgcctggaagaaaaaaaagtagaactggcctttgtcagcttattcacaatctttgacccaatcttcctgcatttagccatgtagctctgtggtgcctgatactcccaagtcccaagagacaaacaaaccacttatcctgtggtcttacccaccaaaggggcttcagttgtagctttttctgatctaccaatgcagttacatctcatcaatcccctcttccaaaagtactattgcaataactttttcattaatagctagttcccttttttcttttatttgctcccattgtcctgattatgtatatataatactttcaatcatacacaagttataaatttttcatgtttcacatggagttctgtttattttaataaataattaacatctttaattcataatcatattgcttttcagagatagtgtataccatcagcagtaaatgagagtgctcatttctccagccccaagccaaaactcttaaaacaaaacaaacattttggccaatatgtgaaatgaatttgktatctttgtctaatttgcacttccatcctttctaacatatgtaaatatgtgtctttaccttattggacat

SEQ ID NO: 363850 - DNA, 545 bp, Homo sapiens
tctgtgactagtggctaccatgttggggaagtgcagctctgaatagtgattatgtcaaggacatgttccatgggagaggcagcatagtgtcgtggaaatccaacctctcccattatgatcgctgggatcttagctttgttagacaagtctctgtgcctcagtttccacacaaaacaaagtccaagtaacaaaacttacttgcatgaaatattagtaagatataacatgagtgaaacaggctttctcaaggtccagcacttatagatactctatgactattagttaaacatatatatatgtacatatatattttttattatatatgttttatgctgttcaagcgattttcccacctcagtctctactctagctagatctacaggcccatgtaccatccctggctaatattaatatttttattgaggccrcacctcgctttgttgcccaggctggtctagaactcctggcctctagcaatcatcccacctcagcctcccagagcactgggattacagatgtgagctatttattatcattattattat

SEQ ID NO: 363851 - DNA, 594 bp, Homo sapiens
acttttgccctacaatattgtacaagagaccgtgtggcttgtaatgcctaaaatatttactatgtggctctttacagaaaagaaaattgctgacctctgttctgaggcagaactactgccattaggagcgggagaattctttgctgggtaaggggacaaagagggtttttctgtacaatatgggatatwtggcagcatcccatgcctctgcctaccagtgcatctacagtagtaccacctccccatttgtgacaaccaaaaatgtcactagacaatgccaaacgtcccctgggggacgaaatcactttcagttgagaaccactgctggagacaaagtagacccaaatacactttagaagaaagtaagaaaaaaatcaattattgaaaaacatgaagatgtcagatgcactaactacttatttttctttggcaaactcattgcacagatttcactgacctaaatgtaatactgttcaatctgcatggtcaggaggggagaacatattgagatttattggctgggttcctaatattttttttccaccataaattcaagtcaaatgtgtagagtggaagtgtgaccacaggggtgtt

SEQ ID NO: 363852 - DNA, 594 bp, Homo sapiens
acttttgccctacaatattgtacaagagaccgtgtggcttgtaatgcctaaaatatttactatgtggctctttacagaaaagaaaattgctgacctctgttctgaggcagaactactgccattaggagcgggagaattctttgctgggtaaggggacaaagagggtttttctgtacaatatgggatatttggcagcatcccatgcctctgcctaccagtgcatctacagtagtaccacctccccatttgtgacaaccaaaaatgtcactagacaatgccaaacgtccsctgggggacgaaatcactttcagttgagaaccactgctggagacaaagtagacccaaatacactttagaagaaagtaagaaaaaaatcaattattgaaaaacatgaagatgtcagatgcactaactacttatttttctttggcaaactcattgcacagatttcactgacctaaatgtaatactgttcaatctgcatggtcaggaggggagaacatattgagatttattggctgggttcctaatattttttttccaccataaattcaagtcaaatgtgtagagtggaagtgtgaccacaggggtgtt

SEQ ID NO: 363853 - DNA, 594 bp, Homo sapiens
acttttgccctacaatattgtacaagagaccgtgtggcttgtaatgcctaaaatatttactatgtggctctttacagaaaagaaaattgctgacctctgttctgaggcagaactactgccattaggagcgggagaattctttgctgggtaaggggacaaagagggtttttctgtacaatatgggatatttggcagcatcccatgcctctgcctaccagtgcatctacagtagtaccacctccccatttgtgacaaccaaaaatgtcactagacaatgccaaacgtcccctgggggacgaaatcactttcagttgagaaccactgctggagacaaagtagacccaaatacaytttagaagaaagtaagaaaaaaatcaattattgaaaaacatgaagatgtcagatgcactaactacttatttttctttggcaaactcattgcacagatttcactgacctaaatgtaatactgttcaatctgcatggtcaggaggggagaacatattgagatttattggctgggttcctaatattttttttccaccataaattcaagtcaaatgtgtagagtggaagtgtgaccacaggggtgtt

SEQ ID NO: 363854 - DNA, 619 bp, Homo sapiens
tatatcttgaacatgtctgtgctgctaacatatcaagatgatgccttaaaaacagcaggaattcaatatatatttgacaaactgactgaagtgtgcttttaygagaccttttgggttcatttagagagaattccttctatcttttgaagtggataccccatgcctcaacctctgtgattgggtaacatgaacattaccttctgtgttgtttaattacctttcttcttctcactggcattcttaagagttgagcaaatcatactattgagtgactcccaaacactagtcattcatgtaacatcctcaaaatgtttgttaaatccatatgccatctacacaactggaaaattaatatatttctctataataaaacactgtttactcaaataagtacattttaaaaggaaatagatgcatatatgttatgcatatctaagtatacatacatccatgcatatatacccccactcacagatatatgaacataagtttaaaggaaatataaacacacacacgtatacacacacaatgctactgaacagccatgaaatcatagatgagacacaccaggtatacttttaagttacatatagaaatataagactgttgaaatttttta

SEQ ID NO: 363855 - DNA, 619 bp, Homo sapiens
tatatcttgaacatgtctgtgctgctaacatatcaagatgatgccttaaaaacagcaggaattcaatatatatttgacaaactgactgaagtgtgcttttacgagaccttttgggttcatttagagagaattccttytatcttttgaagtggataccccatgcctcaacctctgtgattgggtaacatgaacattaccttctgtgttgtttaattacctttcttcttctcactggcattcttaagagttgagcaaatcatactattgagtgactcccaaacactagtcattcatgtaacatcctcaaaatgtttgttaaatccatatgccatctacacaactggaaaattaatatatttctctataataaaacactgtttactcaaataagtacattttaaaaggaaatagatgcatatatgttatgcatatctaagtatacatacatccatgcatatatacccccactcacagatatatgaacataagtttaaaggaaatataaacacacacacgtatacacacacaatgctactgaacagccatgaaatcatagatgagacacaccaggtatacttttaagttacatatagaaatataagactgttgaaatttttta

SEQ ID NO: 363856 - DNA, 619 bp, Homo sapiens
tatatcttgaacatgtctgtgctgctaacatatcaagatgatgccttaaaaacagcaggaattcaatatatatttgacaaactgactgaagtgtgcttttacgagaccttttgggttcatttagagagaattccttctatcttttgaagtggataccccatgcctcaacctctgtgattgggtaacatgaacattaccttctgtgttgtttaattacctttcttcttctcactggcattcttaagagttgagcaaatcatactattgagtgactcccaaacactagtcattcatgtaacatcctcaaaatgtttgttaaatccatatgccatctacacaactggaaaattaatatatttctctataataaaacactgtttactcaaataagtacattttaaaaggaaatagatgcatatatgttatgcatatmtaagtatacatacatccatgcatatatacccccactcacagatatatgaacataagtttaaaggaaatataaacacacacacgtatacacacacaatgctactgaacagccatgaaatcatagatgagacacaccaggtatacttttaagttacatatagaaatataagactgttgaaatttttta

SEQ ID NO: 363857 - DNA, 554 bp, Homo sapiens
tagtgactcacaggcaaaggcagctccaggtatcacwtctaccagtaaggtatagagaaggggtcaaggttcaaagggctgtgctattgctagcatcctatgggccagaactcagacacctggccatctcaaagcagcagggaagctaaaatactaattgttaagtacctagcagtgaagaatcggttggaaatggtttgggggcacacaaatcaatagtttctcttacatcaaacctttcttcaaagattctaaaccagactacattatcagggtatccacagtgtcaaaaactttttaatcaaatggtataggacacaaaagccatgacgatgagttagaaaatttttcctaatctgttaccttggtaaatcagccttttaaaatatgtcttttcatgggaaaaatctttgctaattctaaagttgaaataagccgcagtcactgaattttagtgccatagttggttttgcagtgggatgaaaaaagcagggatttcagcattagagggccctgtgttcaatttctggctttggaacttggaagctagtagc

SEQ ID NO: 363858 - DNA, 616 bp, Homo sapiens
gtgactgcaatgtggggcaaagtttgggacctgtctctgtaagtgatgaaaggaggtatgacgataaagggagagcaaggtgggagttacatttcatttctgaagggtcattttggacttaggagtttaatgtactgaaaggaaagtctggcagggaattcaccaagtagatctgaaatccaggagcaaagacaacatttcttacttaggtttggaagtcattggtatggcagaaccagcttcacctaatgaactcctgttcattgtatcaattacagctgacattgcttttcactggggaaactagcctaagctgctaaaaaggtcagacaactgtgttccatgctctaaaagccatctgaacttctttgacacagtactgttcacagtttatattatatatatatatattttttggtgttatgtatatatgcaaatgagctcatctgtgattggaaagtagaggrtttttgtctgtgcaacacaaagtacaataattcaactgaatatagcaagcttagataaggactgttcagcagggtgtccccagactctgctatttggctcagattggtcagatgttttatcttggaagtctttactgcatggttatccc

SEQ ID NO: 363859 - DNA, 556 bp, Homo sapiens
tgcaaccctgatttttttctaacctcacaatcaacatccaaagcccacatgtgatgagtaattcaggggtcatagtctctcttaggtctgagtcttgtgcatcttttcactcacctgygacagccccacccccttccatgtggaatgcctactcagctttcagatctcagactcaacacctctggctctgggaagacatgaggctttgggaagtccgggctggctttcccttctaagtgctcccacaaagccctgagagccccttattcttcacgccgtgcatggcgattgcatgtctcaaccaccaggccacgtgtttagagacgccagccacacccttccttgtcttcgttactgctgctgacagcatgctctcagtacacaacctttgcgagaaagaataaatgagtgagtggagaagcactagccattttcagggtgaattggtggtaatcagatgctggaatttgctggcggagtcactcagatgaggagaatggccaaaaatttccttgaggtactcaatagaagtttaaaaatgaagaaataaccccaa

SEQ ID NO: 363860 - DNA, 556 bp, Homo sapiens
tgcaaccctgatttttttctaacctcacaatcaacatccaaagcccacatgtgatgagtaattcaggggtcatagtctctcttaggtctgagtcttgtgcatcttttcactcacctgtgacagccccacccccttccatgtggaatgcctactcagctttcagatctcagactcaacacctctggctctgggaagacatgaggctttgggaagtccgggctggctttcccttctaagtgctcccacaaagccctgagagccccttattcttcacgcmgtgcatggcgattgcatgtctcaaccaccaggccacgtgtttagagacgccagccacacccttccttgtcttcgttactgctgctgacagcatgctctcagtacacaacctttgcgagaaagaataaatgagtgagtggagaagcactagccattttcagggtgaattggtggtaatcagatgctggaatttgctggcggagtcactcagatgaggagaatggccaaaaatttccttgaggtactcaatagaagtttaaaaatgaagaaataaccccaa

SEQ ID NO: 363861 - DNA, 567 bp, Homo sapiens
aagtttataataaaaggaagcatgaactccatatatttcccattaaacgttctgcagcagattatagcaatcttgattctaattctaagtagaattaataaatgaaaaaaattgataggaaaaatataatactgcatggtggtttataatatttgttcctagttttcatattttgtctactcataagtaggtaatataaaaagaaggcaattacattatttaaaattatgtttgtctcagttacaaaaatctctcgtaaacttaagagagacgatgaatgcatatattatctaaaagctgtctttgtgtcttctttaatccaggattgaaattttctcttacttaacattaagtaaacaatacaatatatctcagaatttgcaaaatgctgtatactattaaaagatccttaacttctttgataaacttaatgtatctgtattagataatttttaaaaagtattgatatatggccaaaatactttcytatgtgacatgtttataatcaatgataaagtaattagagaaaatatgtgtgtatgtgtgtgtgtatgtgtgtgtgtgtgt

SEQ ID NO: 363862 - DNA, 635 bp, Homo sapiens
aatttccacacatatttttatgactcattatatattagtagtataacttcaaccttaaatcctcatataataatatacatataatatgtaatcatggtattaccttctgcttttttccctgtaactatatgctttktactaatcattcatgcaaatctctacttttattatcagaatatttttcctgctttttacagatagccaagcttatctattcttctggctgtgtgtgtttttttttaaatgccagagaagcatatatgcaaatgaaggtagaatattttaatgtcgttcattgatatgttattaccaatccttgagataaagtatcttttttgcatattgtaaaagaagaatagaaaaaaatcagtctctctctatgaatgttaccaaaaccatcaattaaaatgttccagttaattcttacatgtgcattttgccttatctgaaaatgccaattgctcagtgccatttgatcttcactgagtgttccttcttttggcttttttaaaatcatttctgctaagacgtgtttagatatgttaaaaaactggaaattcttttatagtttttgtttaattttttcttaataaaattaagacaatgatcaggttgtttaattctgtttatattgt

SEQ ID NO: 363863 - DNA, 635 bp, Homo sapiens
aatttccacacatatttttatgactcattatatattagtagtataacttcaaccttaaatcctcatataataatatacatataatatgtaatcatggtattaccttctgcttttttccctgtaactatatgctttgtactaatcattcatgcaaatctctacttttattatcagaatatttttcctgctttttacagatagccaagcttatctattcttctggctgtgtgtgtttttttttaaatgccagagaagcatatatgcaaatgaaggtagaatattttaatgtcgttcattgatatgttattaccaatccttgagataaagtatcttttttgcatattgtaaaagaagaatagaaaaaaatcagtctctctctatgaatgttaccaaaaccatcaattaaaatgttccagttaattcttacatgtgcattttgccttatctgaaaatgccaattgctcagtrccatttgatcttcactgagtgttccttcttttggcttttttaaaatcatttctgctaagacgtgtttagatatgttaaaaaactggaaattcttttatagtttttgtttaattttttcttaataaaattaagacaatgatcaggttgtttaattctgtttatattgt

SEQ ID NO: 363864 - DNA, 618 bp, Homo sapiens
ctagcacagtacaggagaataactcacatatacaaaaagggtacatgataacataactgatgtcactatgcctgattatcaagttactttcatgcatttacacctaataatgggaaggaaattttgctatattttaaccttcatgacacatccacatcccattttaagtggactttggggtcttttgcttctttgtcattaacaagaactatcctatgcaatataaacatgtacatacttaaccacacaaatacatataaataaaataaacacaaaatgtgtgtacagtatgaagaaaaacagccttagaaagttgctttattatttatctgtaatgtttaatctttatgaaattgtgtgactgtcatacaagcacagttctaagtctattattaccaygtcctcttaactagactgttatctctaattccctttcatataaaaatgttgaagacatcactgccaaggaattattattttacaacctacaaatttgaagcctagcataggaaaaaattataatagtgtacatcaattcaaccattttcttgactattgggtgtatagtcatctggttgtttcttaagatggcttaatagttgtgtatatatgtatgtg

SEQ ID NO: 363865 - DNA, 618 bp, Homo sapiens
ctagcacagtacaggagaataactcacatatacaaaaagggtacatgataacataactgatgtcactatgcctgattatcaagttactttcatgcatttacacctaataatgggaaggaaattttgctatattttaaccttcatgacacatccacatcccattttaagtggactttggggtcttttgcttctttgtcattaacaagaactatcctatgcaatataaacatgtacatacttaaccacacaaatacatataaataaaataaacacaaaatgtgtgtacagtatgaagaaaaacagccttagaaagttgctttattatttatctgtaatgtttaatctttatgaaattgtgtgactgtcatacaagcacagttctaagtctattattaccatgtcctcttaactagactgttatctctaattccctttcatrtaaaaatgttgaagacatcactgccaaggaattattattttacaacctacaaatttgaagcctagcataggaaaaaattataatagtgtacatcaattcaaccattttcttgactattgggtgtatagtcatctggttgtttcttaagatggcttaatagttgtgtatatatgtatgtg

SEQ ID NO: 363866 - DNA, 550 bp, Homo sapiens
aactcaaatcaagctaattccagctcagatatttctcttcaatccccaaattcaacagcctattttatcatcttcacttacaaatttactatatcctaaccttgaactcctgattcttactccccaaacttgtttctactgtcttctttctccactatattaatgacagtctgcactgacagttgtttagaccaaatccttgagattatttttaatttttttctttcatttaaaccccatattcaattgccccaaaatggtttcagcttcaaggtacatacagaatctaaccacttctctccgcttcaatgaccaaactttaagccatgccatctctttcccagagtrttgctatagcacagaatggctcaaccaggatgattttgtctcccaggggacattggcaaaatatgcaaatatttttggttttcacaactgaagggtctcacccgaccccatccgctgccttgcaccacacacacgctaaacccacaccttgacacacacaagaaaaaattatttggaccaactgttgataaatgttaagctt

SEQ ID NO: 363867 - DNA, 550 bp, Homo sapiens
aactcaaatcaagctaattccagctcagatatttctcttcaatccccaaattcaacagcctattttatcatcttcacttacaaatttactatatcctaaccttgaactcctgattcttactccccaaacttgtttctactgtcttctttctccactatattaatgacagtctgcactgacagttgtttagaccaaatccttgagattatttttaatttttttctttcatttaaaccccatattcaattgccccaaaatggtttcagcttcaaggtacatacagaatctaaccacttctctccgcttcaatgaccaaactttaagccatgccatctctttcccagagtattgctatagcacagaatggctcaaccaggatgattttgtctcccaggggacattggcaaamtatgcaaatatttttggttttcacaactgaagggtctcacccgaccccatccgctgccttgcaccacacacacgctaaacccacaccttgacacacacaagaaaaaattatttggaccaactgttgataaatgttaagctt

SEQ ID NO: 363868 - DNA, 550 bp, Homo sapiens
aactcaaatcaagctaattccagctcagatatttctcttcaatccccaaattcaacagcctattttatcatcttcacttacaaatttactatatcctaaccttgaactcctgattcttactccccaaacttgtttctactgtcttctttctccactatattaatgacagtctgcactgacagttgtttagaccaaatccttgagattatttttaatttttttctttcatttaaaccccatattcaattgccccaaaatggtttcagcttcaaggtacatacagaatctaaccacttctctccgcttcaatgaccaaactttaagccatgccatctctttcccagagtattgctatagcacagaatggctcaaccaggatgattttgtctcccaggggacattggcaaaatatgcaaatatttttggttttcacaactgaagggtctcacccgaccccayccgctgccttgcaccacacacacgctaaacccacaccttgacacacacaagaaaaaattatttggaccaactgttgataaatgttaagctt

SEQ ID NO: 363869 - DNA, 644 bp, Homo sapiens
gaatagagtgttgtgcttcaccttctgcagaataatgagactatagaattcttctacctgtgaaatgtgtcacttcttcctcatttattaatatttaataatttacttctgtcagtactgactcacatataattattttagactttggggttgtaattctgtgctactttgtttattttgctgctcaaattgttttagcttttgccattgggagacttttaagttggatcttgtgccctttgttatgcactcatcaatgtatggggtgttttgtgtgtgtgtgtgtgtgtgtgtgtgtgtgtgtgtgcacctgttagcactttcttatttactggccattaaagatgttccaggttcatcttgtatgtttcatgccctagtcatagaagcagtcatgtctccaaggatagggtcttgttattgaagaatgacatyagaaaccaatatctgggtactaggtgtgcttgttgctgctggagtgtcatttatttaggcgctctcagatgacagagaaaagaagtatgtgtgtctatactaattattatgtacatatatctataagtatttctacatacagctatttgtattatgttaaattaaacatatgatcttgttgttgtctccgactctaatccattaccaca

SEQ ID NO: 363870 - DNA, 556 bp, Homo sapiens
ccagttctgtgactttggcataatgacttaactatctctattttctcatttgtaaaatggggataagaatttgggtgaccacttgtcgcactgtgcctaggaccaagaggtttctgggaacatagggctttgagtgctaaaagtaaaaaagggtcaggcaatctggaatggttgcttactctatgaataactttttgtaaggattcagagacaatacttataaaatgatgcagggcatctggtctacaaatatgtcttttttttcttttcttttctttttttttttttgagacagggtctcactctgtggcccaggctggagtgcagtgatgtgatcttggctccctgcagcctctgcttgctgagttcaagtgattcttgtgcctcagcctcccgagtagctgggrttacaggcatacgccactacatccagctaatttttttgtattttcagtagaaacggggtttcaccatgttccccaggctggtctcaaactcctgggctcaagggatcctcctgcctcggcctcccaaagtgctgagattacccatcgcg

SEQ ID NO: 363871 - DNA, 556 bp, Homo sapiens
ccagttctgtgactttggcataatgacttaactatctctattttctcatttgtaaaatggggataagaatttgggtgaccacttgtcgcactgtgcctaggaccaagaggtttctgggaacatagggctttgagtgctaaaagtaaaaaagggtcaggcaatctggaatggttgcttactctatgaataactttttgtaaggattcagagacaatacttataaaatgatgcagggcatctggtctacaaatatgtcttttttttcttttcttttctttttttttttttgagacagggtctcactctgtggcccaggctggagtgcagtgatgtgatcttggctccctgcagcctctgcttgctgagttcaagtgattcttgtgcctcagcctcccgagtagctggggttacaggcatacgccactacatccagctaatttttttgtattttcagtagaaacggggtttcaccatgttycccaggctggtctcaaactcctgggctcaagggatcctcctgcctcggcctcccaaagtgctgagattacccatcgcg

SEQ ID NO: 363872 - DNA, 556 bp, Homo sapiens
ccagttctgtgactttggcataatgacttaactatctctattttctcatttgtaaaatggggataagaatttgggtgaccacttgtcgcactgtgcctaggaccaagaggtttctgggaacatagggctttgagtgctaaaagtaaaaaagggtcaggcaatctggaatggttgcttactctatgaataactttttgtaaggattcagagacaatacttataaaatgatgcagggcatctggtctacaaatatgtcttttttttcttttcttttctttttttttttttgagacagggtctcactctgtggcccaggctggagtgcagtgatgtgatcttggctccctgcagcctctgcttgctgagttcaagtgattcttgtgcctcagcctcccgagtagctggggttacaggcatacgccactacatccagctaatttttttgtattttcagtagaaacggggtttcaccatgttccccaggctggtctcaaacycctgggctcaagggatcctcctgcctcggcctcccaaagtgctgagattacccatcgcg

SEQ ID NO: 363873 - DNA, 568 bp, Homo sapiens
cagtacagcacaaaactgctgggaaaaggaaactaatgcttttaaacaaataaaagagttttcttacaagtctaaattgccagtgatctatcaataattaaagagaacaaagaccacttgtaaacctgcagtgcatggcagggactgaagtctacaatttagattaaggttttggctgatgatttcagagaaccagtgccataccagttgatactactgactggaagacagacacaatgcttcaggtcaatggctgatttgtaaagagtaaaactgtgttctcaaatttctggttagcttgtaastaaaaatggatttagaacatacttcaggaatcagaatgaaagtttctccaaacatatgccacatgggggttcctgccagatggaagccatgtcattatcaatagagggacaaaagacatcatagtttagggttcccaaactggctacatattagaaacctctttgaagcttcaataccaatgcccaggttccaccccagaccaataaaatcagggtatctagagagcaggtgtggaaatctgtatctgcaaaggttgagacac

SEQ ID NO: 363874 - DNA, 632 bp, Homo sapiens
aaatctcttgcccgtctcagtcaccacccctctcaaaggtactctgacttcaaatagcatagtttggttttgcctgtcttaattttttgtaagtggaagcctagagtgtgtgctctttcttgcattgcatcatgtccacracatcgtgtttgcaagattcatcctcattattataagtagcaatagtttatgccttctcgtctctagacaatattccattgcatgaatatacattttatttatctattctgctatggatgggctgtgtctaggttttacctgcattggaggctgctgccgtaaacattttcatacatgccatttgctacaaatacatacaggagtgcgattgctgtgccgtaagatatgctcacgattagctttagttcagaacatatatactaccaaaagtctctctgctaaacacactgtggtaccctggattggatcctgggacagtaaatgggcattagggtaaatataggtggaagctgaataaagtctggagtgaagttaatagtaatttgttgatgttgtgacaactgtaccatggttttttaagaggttaacattaggggaaattaggtgagaggaagtatatggaaattgtattatttttgcaacttatgtgc

SEQ ID NO: 363875 - DNA, 632 bp, Homo sapiens
aaatctcttgcccgtctcagtcaccacccctctcaaaggtactctgacttcaaatagcatagtttggttttgcctgtcttaattttttgtaagtggaagcctagagtgtgtgctctttcttgcattgcatcatgtccacaacatcgtgtttgcaagattcatcctcattattataagtagcaatagtttatkccttctcgtctctagacaatattccattgcatgaatatacattttatttatctattctgctatggatgggctgtgtctaggttttacctgcattggaggctgctgccgtaaacattttcatacatgccatttgctacaaatacatacaggagtgcgattgctgtgccgtaagatatgctcacgattagctttagttcagaacatatatactaccaaaagtctctctgctaaacacactgtggtaccctggattggatcctgggacagtaaatgggcattagggtaaatataggtggaagctgaataaagtctggagtgaagttaatagtaatttgttgatgttgtgacaactgtaccatggttttttaagaggttaacattaggggaaattaggtgagaggaagtatatggaaattgtattatttttgcaacttatgtgc

SEQ ID NO: 363876 - DNA, 632 bp, Homo sapiens
aaatctcttgcccgtctcagtcaccacccctctcaaaggtactctgacttcaaatagcatagtttggttttgcctgtcttaattttttgtaagtggaagcctagagtgtgtgctctttcttgcattgcatcatgtccacaacatcgtgtttgcaagattcatcctcattattataagtagcaatagtttatgccttctcgtctctagacaatattccattgcatgaatatacattttatttatctattctgctatggatgggctgtgtctaggttttacctgcattggaggctgctgccgtaaacattttcatacatgccatttgctacaaatacatacaggagtgcgattgctgtgccgtaagatatgctcacgattagctttagttcagaacatatatactaccaaaagtctctctgctaaacacactstggtaccctggattggatcctgggacagtaaatgggcattagggtaaatataggtggaagctgaataaagtctggagtgaagttaatagtaatttgttgatgttgtgacaactgtaccatggttttttaagaggttaacattaggggaaattaggtgagaggaagtatatggaaattgtattatttttgcaacttatgtgc

SEQ ID NO: 363877 - DNA, 632 bp, Homo sapiens
aaatctcttgcccgtctcagtcaccacccctctcaaaggtactctgacttcaaatagcatagtttggttttgcctgtcttaattttttgtaagtggaagcctagagtgtgtgctctttcttgcattgcatcatgtccacaacatcgtgtttgcaagattcatcctcattattataagtagcaatagtttatgccttctcgtctctagacaatattccattgcatgaatatacattttatttatctattctgctatggatgggctgtgtctaggttttacctgcattggaggctgctgccgtaaacattttcatacatgccatttgctacaaatacatacaggagtgcgattgctgtgccgtaagatatgctcacgattagctttagttcagaacatatatactaccaaaagtctctctgctaaacacactgtggtaccctggattggatcctgggacagtaaatgggcattagggtaaatataggtggaagctgaataaagtctggagtgaagttaatagtaatttgttgatgttgtgacawctgtaccatggttttttaagaggttaacattaggggaaattaggtgagaggaagtatatggaaattgtattatttttgcaacttatgtgc

SEQ ID NO: 363878 - DNA, 644 bp, Homo sapiens
cactgcgtctagccaggtcttttgggcaaatgttaatctttttcttaaatctttaattttcaaattgcaaaagaaagagctgttcattgcgaaaaactcaaatgtaaaagcttcctctcaccaatcccacaccacagccagtggcagccactgaaaactcatctcatgctgaggagggagggtgggccaccttgaactcagtgtcatcaggactgcacccaatgggggacagacaattgcccaccaccaaacaaaacaaaacaaaataaacccagggcattgtcactagaagaaagggagcctggatgttgcgcagccaggagccagaaaacatccaccatatgcagatattaaagctcagtaaaaacattaaagccagtctctacattttgacatgcagtgggaatacacactggtgatttccctaatttcccaatgaatgttcacaatcaaaattcacatgtacmcctagtaatgtttgatgatactttaaattttcatacatgagtcaaagggagcaaaagaagtgcctgagggacctgcgagtatgcggggatgttgtgtgataagaataggaaatctagacactcagcaccaggaacagaaattgccccagactcctgcctcagtcacacttccatctt

SEQ ID NO: 363879 - DNA, 686 bp, Homo sapiens
acgttttccttcttcattccccttttgagcaggtatagctgacccgtgtccttgctttagggaggtgagcggcaggatgagatgcagaaggaccctgggagcatttctggcttttgtcttctaaaaagccagagtccaaggggaggattgggtttgaggaaacagaatggcttggaaaaacaggcaagaattgtcagactaaaaggtaattcccctagctgaggcaaggagcaagttcggcaggttcttcctggcaggggccaggtctgggccagagccgggagaggaagagcttccagctggaggagctggggagcgggggccacaggtactgaggttttcagccttgcccagaagcagcagaaggccgccaggcacgaagggactttggggacaggcacaatgtgatggcctgrttggcagaggaccctctgaaattttccactctgccagcagagtgggaattcataattttaaaaatatcattgtagaaaatagaagccacatttcttatcacctgcatttgtggatcgggattcattctctatatattcaagtacacctaatacaacttttccccttgaggaagagcacctgacttcaagtcaacaagacttagcatgccactgttctgcgtcgtggagatacagcaatgagcaggattaaagacccttcctcaaagacag

SEQ ID NO: 363880 - DNA, 598 bp, Homo sapiens
ctgacgttttccttcttcattccccttttgagcaggtatagctgacccgtgtccttgctttagggaggtgagcggcaggatgagatgcagaaggaccctgggagcatttctggcttttgtcttctaaaaagccagagtccaaggggaggattgggtttgaggaaacagaatggcttggaaaaacaggcaagaattgtcagactaaaaggtaattcccctagctgaggcaaggagcaagttcggcaggttcttcctggcaggggccaggtctgggccagagccgggagaggaagagcttccagctggaggagctggggagcgggggccacaggtactgaggttttcagccttgcccagaagcagcagaaggccgccaggcacgaagggactttggggacaggcacaatgtgatggcctgattggcagaggaccctctgaaattttccactytgccagcagagtgggaattcataattttaaaaatatcattgtagaaaatagaagccacatttcttatcacctgcatttgtggatcgggattcattctctatatattcaagtacacctaatacaacttttccccttgaggaagagcacc

SEQ ID NO: 363881 - DNA, 479 bp, Homo sapiens
ggccagagccgggagaggaagagcttccagctggaggagctggggagcgggggccacaggtactgaggttttcagccttgcccagaagcagcagaaggccgccaggcacgaagggactttggggacaggcacaatgtgatggcctgattggcagaggaccctctgaaattttccactctgccagcagagtgggaattcataattttaaaaatatcattgtagaaaatagaarccacatttcttatcacctgcatttgtggatcgggattcattctctatatattcaagtacacctaatacaacttttccccttgaggaagagcacctgacttcaagtcaacaagacttagcatgccactgttctgcgtcgtggagatacagcaatgagcaggattaaagacccttcctcaaagacagtgcattcccgtgagaggtcagtgttcaacatgcatacatatctacatgcatacagaaagaca

SEQ ID NO: 363882 - DNA, 641 bp, Homo sapiens
gtgtgctggcccacacgacccctcctggcccctggctgcaggtgccagagtctggtctctggcccaggaacatccttgcttcacaattctcagggatttgccatcattagcaagatggtgcctgtgagattttcctctctctgtttggggttgaagtattggaacatttcctagagaggcattttgttcctctcaggcctctgcttttactgctagtggccgcccccagctgttcctaattctctctctggatgaatgactcagcttgattcaatgtctacaacttgtggcttcttaaaggagccagaccaytttgtaaaacaatgaaacagagctcaaaccaagtaaaattacctaagagtacagccataaattaaaatacataaaatgtatttattttcaatgtccaagattacaactctttgactatgaaaataaacatgtgcctggcttttaaaaaaaaaatcagaaagaacttaatagaaatcagacagcaagtctacactcttctctgatgcagcctcctattgttccatctgctttgggcatagctctttctggagaagctgtgggacctgttctgaggtggcctcttagccccaggagaagtggaaggggcatgttgacagccaaaagggagg

SEQ ID NO: 363883 - DNA, 641 bp, Homo sapiens
gtgtgctggcccacacgacccctcctggcccctggctgcaggtgccagagtctggtctctggcccaggaacatccttgcttcacaattctcagggatttgccatcattagcaagatggtgcctgtgagattttcctctctctgtttggggttgaagtattggaacatttcctagagaggcattttgttcctctcaggcctctgcttttactgctagtggccgcccccagctgttcctaattctctctctggatgaatgactcagcttgattcaatgtctacaacttgtggcttcttaaaggagccagaccactttgtaaaacaatgaaacagagctcaaaccaagtaaaattacctaagagtacagccataaattaaaatacataaaatgtatttattttcaatgtccaagattacaactctttgactatgaaaataaacatgtgcctggsttttaaaaaaaaaatcagaaagaacttaatagaaatcagacagcaagtctacactcttctctgatgcagcctcctattgttccatctgctttgggcatagctctttctggagaagctgtgggacctgttctgaggtggcctcttagccccaggagaagtggaaggggcatgttgacagccaaaagggagg

SEQ ID NO: 363884 - DNA, 377 bp, Homo sapiens
cacccagaacacctaaaccacttgcaaagacagaagtacttccttccaccctccctctctctcctcctcctgctgcttctgttcttctttcctctttccctggagcaatggggatgttctaggttggaactttcccgaatgagcgggtcctgtgtgatggggctgaagatagaaactgagggatgggtgggtgggattgtaggatggtagtcatctaggaatatagrcatgatttcttatcactctccccacacactggatttcaaatgaagacttccctgactgagataataaaaggtgcattcagctgcctctatggctgtcttataatcagttcataaggagttgatgggtgctttgagcttaaccagacctgc

SEQ ID NO: 363885 - DNA, 377 bp, Homo sapiens
cacccagaacacctaaaccacttgcaaagacagaagtacttccttccaccctccctctctctcctcctcctgctgcttctgttcttctttcctctttccctggagcaatggggatgttctaggttggaactttcccgaatgagcgggtcctgtgtgatggggctgaagatagaaactgagggatgggtgggtgggattgtaggatggtagtcatctaggaatataggcatgatttcttatcactctccccacacactggatttcaaaygaagacttccctgactgagataataaaaggtgcattcagctgcctctatggctgtcttataatcagttcataaggagttgatgggtgctttgagcttaaccagacctgc

SEQ ID NO: 363886 - DNA, 377 bp, Homo sapiens
cacccagaacacctaaaccacttgcaaagacagaagtacttccttccaccctccctctctctcctcctcctgctgcttctgttcttctttcctctttccctggagcaatggggatgttctaggttggaactttcccgaatgagcgggtcctgtgtgatggggctgaagatagaaactgagggatgggtgggtgggattgtaggatggtagtcatctaggaatataggcatgatttcttatcactctccccacacactggatttcaaatkaagacttccctgactgagataataaaaggtgcattcagctgcctctatggctgtcttataatcagttcataaggagttgatgggtgctttgagcttaaccagacctgc

SEQ ID NO: 363887 - DNA, 505 bp, Homo sapiens
taactctgttttaggacatttacttactagggaagctaagaccttggccttaaaaagtcacaggtagttgagtgtaagactgctagagtattaaaagattcagaatgagacagcagccagggttagactaataagcaaagtggactgtgtcactgcttcacgagtttgttaagggctccattytagaaaattaaaggcataatttaaattatacaattaaaaggctgcacagatattattcagttttgaccactctatacaggtatgtaattagcaccctaaaaaagatacggaccattgccatcaacccagaaagttcagtagtatcctgtccagccaattcccaccattaccagaggcaatcactgtcttgatttctatcaccacagatgagcattgtttcagaacctcacttaaatggaatcacacaggaagtgctcacacaatctgagcttcagtaatggtgggcactagatggcatgtgtcttcttatgtaacttcaaac

SEQ ID NO: 363888 - DNA, 561 bp, Homo sapiens
gtccagcaccgtcaagtgatttgccctgtgagctcaatgactgcagagctggcccagaatccaggcctgtctatgcagctatccagagagaacctgtgggccgaagatgtgtgctctgggcccaggtggcctggagaagggctatgaaaccataataagatggaaacagatgtacaaggaaagacagtaaagccagttacctgggaatgtggcttcctcctccttgtgttttgctcaacctaacatttattaaagacctacagtttcagaaaagaccctatgttgsatgttacagagaacactacgaaactgtgcaaaagacttggttctgccctcaaggacctcagattctcattgaaaaaacacgcatgaggttgaaatgttggcaacaattctatgttcataccatttgttgtgttctaagcagtttcacatacattttacaaaactcttacagtgggcaagtatgatttctccctttttatagatgggaaaatgagcaactgatcagggagactgtgatgtggctcaagggcaagaaacacagcaagtggaccccac

SEQ ID NO: 363889 - DNA, 577 bp, Homo sapiens
ctagtttattcattcacctactgaagaatatcttggttgtttccaagttttggcaattatgaataaagctgttataaatagccctgtrcagatttttgtgtggacacaagcttacagttcatttgggtaaataccaaagagaatgactgctgaatggtatggtaagagtatattaaattttgtaagaaattttcaaactgtcttccaaggtggctgtatcattttgcattcccaccagaatgagagttcctattgctccacatccttgtaagcatttaatgttgtcagtactttggattttggctattccaataggtctggaagtggtatctcatggctttaatttgtaataccctaatgacatatgatgttgaacatcttttccttttcttttaatttttttttttttgagacagggtctccactctgttgcctaggctatagtacggtggcacagtcatgacttgctgcaaccttgaactcttggggtcgagtgatcctcccacctcagcctctcaggtagccatgactacaggtgcacaccaccacatccagctaataaattaattaattattt

SEQ ID NO: 363890 - DNA, 577 bp, Homo sapiens
ctagtttattcattcacctactgaagaatatcttggttgtttccaagttttggcaattatgaataaagctgttataaatagccctgtgcagatttttgtgtggacacaagcttacagttcatttgggtaaataccaaagagaatgactgctgaatggtatggtaagagtatattaaattttgtaagaaattttcaaactgtcttccaaggtggctgtatcattttgcattcccaccagaatgagagttcctattgctccacatccttgtaagcatttartgttgtcagtactttggattttggctattccaataggtctggaagtggtatctcatggctttaatttgtaataccctaatgacatatgatgttgaacatcttttccttttcttttaatttttttttttttgagacagggtctccactctgttgcctaggctatagtacggtggcacagtcatgacttgctgcaaccttgaactcttggggtcgagtgatcctcccacctcagcctctcaggtagccatgactacaggtgcacaccaccacatccagctaataaattaattaattattt

SEQ ID NO: 363891 - DNA, 577 bp, Homo sapiens
ctagtttattcattcacctactgaagaatatcttggttgtttccaagttttggcaattatgaataaagctgttataaatagccctgtgcagatttttgtgtggacacaagcttacagttcatttgggtaaataccaaagagaatgactgctgaatggtatggtaagagtatattaaattttgtaagaaattttcaaactgtcttccaaggtggctgtatcattttgcattcccaccagaatgagagttcctattgctccacatccttgtaagcatttaatgttgtcagtaytttggattttggctattccaataggtctggaagtggtatctcatggctttaatttgtaataccctaatgacatatgatgttgaacatcttttccttttcttttaatttttttttttttgagacagggtctccactctgttgcctaggctatagtacggtggcacagtcatgacttgctgcaaccttgaactcttggggtcgagtgatcctcccacctcagcctctcaggtagccatgactacaggtgcacaccaccacatccagctaataaattaattaattattt

SEQ ID NO: 363892 - DNA, 641 bp, Homo sapiens
acaagtgtactttctaatgttttaagcatgagacactttcaaacaacaacaaaataaagcctttatgacatgatggtggtgtgcaccaagaaaaacaacttaaaccatctcatggggaagaatatattattaaatggcttaaygaaagaatgaagagaaaatacaaacacacacgggttatcatgtgaacatttcatctaacataaagtatgaacaagagaagatgtcgaaagcatggcaagtttaggtgaatcgaaatcaatttcataatttataggtattctcttttccctttattctctgaaatgcttaaaaatcaaaaaagcccagaagtatgcctcattaaaaaaagtaatgctactcttgcatttggattataacggatacagataaaatgaactcacaaggaactctgcagtataaattggttttcgaatgtacactatttttatctgcctataatgtggcagttgcttatctatagactatagttacataaaataaatgtcctagagttagcttccttctctgcagaagtcatgcttcactgggagctacttcctcctcccagaagttttcgtgaaatgatactggcattctcttcattgtcttcaaagggctagggggaaatcacatacagc

SEQ ID NO: 363893 - DNA, 587 bp, Homo sapiens
tattatcttgattcctaagccaggcaaagatatcataagaaaaaagaaaactgcaaggctgtaactctgacattcatgcaaaaattatcgataaaatattagcaatccaaattcaacaatacaccaaaaagattctacagcatgatcaagtgggatttacccttagcatgcaagactggtttaacataggtacgttaatcaaagtkacacatcacagactgaaagacaaaaccacatgatcatctcaattgacacaaaaagtattcaacaaaatccaacatcctttcttgataaaaacgctcaacagtctgggtatacaagaaaagtccctcaacataataaaggtcatttacaaatgacctttggctgagtcctctccccacccatggtgttttaaactctcagacttgtccctatggagcctctagtaatttaccaattactgttcaggtttcccttcctcaccatttgtttccatggagggttctacttacaggtttgctcctgttaagttttgactccctatattcatctctctctctaattttggagggcagcaatttgccctgtgacctcagtttcaacaa

SEQ ID NO: 363894 - DNA, 587 bp, Homo sapiens
tattatcttgattcctaagccaggcaaagatatcataagaaaaaagaaaactgcaaggctgtaactctgacattcatgcaaaaattatcgataaaatattagcaatccaaattcaacaatacaccaaaaagattctacagcatgatcaagtgggatttacccttagcatgcaagactggtttaacataggtacgttaatcaaagttacacatcacagactgaaagacaaaaccacatgatcatctcaattgacacaaaaagtattcaacaaaatccaacatcctttcttgataaaaacgctcaacagtctgggtatayaagaaaagtccctcaacataataaaggtcatttacaaatgacctttggctgagtcctctccccacccatggtgttttaaactctcagacttgtccctatggagcctctagtaatttaccaattactgttcaggtttcccttcctcaccatttgtttccatggagggttctacttacaggtttgctcctgttaagttttgactccctatattcatctctctctctaattttggagggcagcaatttgccctgtgacctcagtttcaacaa

SEQ ID NO: 363895 - DNA, 631 bp, Homo sapiens
ccttcctcaccatttgtttccatggagggttctacttacaggtttgctcctgttaagttttgactccctatattcatctctctctctaattttggagggcagcaatttgccctgtgacctcagtttcaacaaatctaaaaagagttcttgattatatttcagtttgtttggctttttactgttgttacaatggagtggagacttctaagcttcttacacactggaatggaaactggaagcctgtccattcttttttatttttgtgttttccagggtttcttgtataacttttgaatgtagcaagatcttaaagactttcacaaaatttgttgaacatttttggtaatagcttatatatatataaataagcaccttctaaccatcaggcactcttctaagtgtgtttacatatataatctcatttaaacctcacagaaactcacacataaatactgtttttattcctgttttatagacaaggaagccaaagcgcagagagtttaagtttcctctcccaaaggagcayagccagtgactggtgtaaccagagctcaaactcaagatatgcaacttaagaacatgttcataaccaccatactctattaaccagctaactcctaaaagtcctgat

SEQ ID NO: 363896 - DNA, 581 bp, Homo sapiens
ctctactcaaatgcaaacatgttgagagtccaccctattgggtttaatttatcagatcctttctatggaacaatgagttgacaacaagtcagaatgggggacagaaacagaacaatcatgatacagatggaagaagcatggagaaatagaagctgtgcacaatagactgaggagaggatggctgaggtgggaagatggccctggaaaacaacggaggccaaaggagagtccccagggcctgggacatagtacagggagagaagggcaatgaaagggaggcgagaggagcagaaaagatcactattgggtactgagcttaatacctgggtgatgtaataatatgtacaacaaacccctatgacacgtgtttgtctatgtaacaaaccttcacatgtacacccaaacctaaaataaaaattttaaaaaaagaaaggggctgggcgcagtggcttayatctgtaatctcagcactttgggagactgaggtaggcagatcacccagtcaggagttcaaggccagcctgtccaacatagtgaaaccccatctctactaaaaatacaaaaattaggcgggcatggtg

SEQ ID NO: 363897 - DNA, 561 bp, Homo sapiens
aaacaagcacaacttctaatgtcaactgctaagctccatttttttttagacaaagtaactaytgcttttaaaaatgatttcaaaataatagacacagagtagagggggaaatgccatatcccagcaatgagttagcggagcttctattaacacttcagctcttgtctccaggcattaggctgtatgcttgggagtcataatatattagcccagcttttcagcatgaatggtaataatagtcatcatgtgttgggtactcaccacagccagtcactatgctaatatctgaggagggttatctaattaaatgctcaaaacaaccctatgcagtaggtactattattatttccagactgcttcacaccaaatcaaggttctgaacagctgctccagaccccttgagcatcaggctcctctcattcatagcacacaaatgtgaagatatttaggtctggtgcatttacattgaaaagcagaaaaccatttctgaatttgtgcatttattttttgaagatggctctacaaactcagcagcactattcagctttcctaagagtgtga

SEQ ID NO: 363898 - DNA, 604 bp, Homo sapiens
agcaacccaattaataggcaaagtatttggatacacatttctccaaaaaacataaaaatgaaaaataaaaatcacatagaaagatgttcatcgttcatcattaggraaatgccaatcaaagcccaatgagatagcactttaaatcactaggatggctagaatcaaaatgtcagacaataacaagtgctgacaaggatgtggagaaactggaacttcaaaatgttaaatatagagttaacatatgacccagtaattccactcttaggtatctatctacccaagagaatggaaaacatatgttcacaccaacactgtacatgaatattcatagcaacatttttcacaataatcacaaagtggaaacatgccaaatgtccatcaatagatgaatggatgaatagaatgtggtataaccatacataggaatattattttgcagtaaaaagaatgaacatgctataacatgtatgaaccctgaaaacatacaaagtgaaagaaacagtcacaaaaggccatatactgcacaatttcatttataagaaatatccaaaataggcaaatccatacagacagaaagtagattagtggttgccaggggctggaa

SEQ ID NO: 363899 - DNA, 551 bp, Homo sapiens
gattcattaaatttatcttcagcactgtctaatctactctttaacccatgcactgagttttaaattcaacaactgtatcattcatttttaatgattacaatttgttctctttcaaatttgcctagccatatttattagtttctcatttattgcttgtttygtaactccatttttatgccttcaaatatttcatacatagttgttttatctctcatatgtcctatatctgaaagtgccttggctatctttctctcttatatttgtttctgtttattcacaggctgtagcctgtttacttttgtgttaggtgacttttgattacaagcttacatttttgttgaaaatggctttatatttttgaaaaatctgagagactgtaaacacctctattttcttttcatttatttatttatttattttgagagggagtctcactctgtcacccaaactggagtgcagtggtgcaatctcggctcactgcaacctctgcttcctaggttcaagcaattcttctgcttcagcctcccaagtagctgggattacaggcgccc

SEQ ID NO: 363900 - DNA, 612 bp, Homo sapiens
cttttataaaaccatcagatctcacaagacttactcactatcacgagaatagcacaggaaagacctgctcccatgattcaattacctcccaccgggtcccttccatgacatgtggggattatgggagctacaactcaggatgagatktgggtagggactcagccaaataatatgaaggcccaaggatcagcccactcagacctgcttctaccagtttccatgtatgccacctgggaacccaagaaacagcatactggtgccaaagaactggcccacctggtgtcccaatccatagcaaaacctcactacagtgtctactaaaaaccacagcctaacccactgaggaactcgaagataccactgacactgattatagctgaagaagtcatctgaagactacattactgtgcccacccaaaatcaaaaccaaagtgccctacacaaccaaccctacagacacatctattggaaaacatctttcctacaaaagtcaattcaaaaaatcagaagaagggactgttacaccagattcacagatatcaatgtaaaaacaaacaaacatgaaaaagcaaggaaatgtgatatgtgtaaaaaaacaataattccctagtg

SEQ ID NO: 363901 - DNA, 612 bp, Homo sapiens
cttttataaaaccatcagatctcacaagacttactcactatcacgagaatagcacaggaaagacctgctcccatgattcaattacctcccaccgggtcccttccatgacatgtggggattatgggagctacaactcaggatgagatgtgggtagggactcagccaaataatatgaaggccsaaggatcagcccactcagacctgcttctaccagtttccatgtatgccacctgggaacccaagaaacagcatactggtgccaaagaactggcccacctggtgtcccaatccatagcaaaacctcactacagtgtctactaaaaaccacagcctaacccactgaggaactcgaagataccactgacactgattatagctgaagaagtcatctgaagactacattactgtgcccacccaaaatcaaaaccaaagtgccctacacaaccaaccctacagacacatctattggaaaacatctttcctacaaaagtcaattcaaaaaatcagaagaagggactgttacaccagattcacagatatcaatgtaaaaacaaacaaacatgaaaaagcaaggaaatgtgatatgtgtaaaaaaacaataattccctagtg

SEQ ID NO: 363902 - DNA, 544 bp, Homo sapiens
gaccaataaagaataatgagattgaatcagtaataaaaattctcccaacaaaggaaagtctagactggatgacttttctgccaaattctaccaaacttatatgaaagagctaacacaaactcttctcaaactaattctttaaaattaaagaggaggcaattctttctaattcattctacaaggctatcatcctgataygaaaaccagacaaggacacacacaagaagaaaactacaggccaatctccctaatgaatatagatgtaaacatcctcaacaaaatactagcaaacagaatccaacaacacatcaaaaagataatacaccataatcaagtggaatttatcccagaaatgcaaggatggttcaacatatgcaaatcaataaacatgatacatcacatcaacagaatgaaagacaaaaactgtaagttcatctcaatagattaagaaaaacatctgataaaatccaacatcccttcatgataaaaactgtcaacaaatcaggcatagaaggaacataccataacgtaataaaggccatat

SEQ ID NO: 363903 - DNA, 570 bp, Homo sapiens
agcacacttaaacgacttttaagaatgatccagaataattcttgtcctcttgcttgaatataaaagtcctggggccccttctagtcagtcctttactctgcttcttgtttcagggtctgctctcatggctgctttctgatccccttgcctctcaagaatctcctctgaccatgatcaataactggatttttttttttttttttttttttgagacagggtcttgctctgtcacccaggctggagtgcagtggtgcgatctcggctcrctgcaacttctgcctcccgggtttacacctggctaatttttgtattttttggtagagacaaggtttcaccatgtttcccaggctggtcttgaacaccggacctcaagtgatccacccgccttggcctcccaaagtgctgggattacaggcatgagccaccgcgcctggcccaataactgaattttaataaactgactgtcccaggagcaagctcacccactcccacagacaaatctctccagaggaggaatgtacccctgcctgtcagaaggtcagcttcaaggtcacacctaagggtcatctc

SEQ ID NO: 363904 - DNA, 570 bp, Homo sapiens
agcacacttaaacgacttttaagaatgatccagaataattcttgtcctcttgcttgaatataaaagtcctggggccccttctagtcagtcctttactctgcttcttgtttcagggtctgctctcatggctgctttctgatccccttgcctctcaagaatctcctctgaccatgatcaataactggatttttttttttttttttttttttgagacagggtcttgctctgtcacccaggctggagtgcagtggtgcgatctcggctcgctgcracttctgcctcccgggtttacacctggctaatttttgtattttttggtagagacaaggtttcaccatgtttcccaggctggtcttgaacaccggacctcaagtgatccacccgccttggcctcccaaagtgctgggattacaggcatgagccaccgcgcctggcccaataactgaattttaataaactgactgtcccaggagcaagctcacccactcccacagacaaatctctccagaggaggaatgtacccctgcctgtcagaaggtcagcttcaaggtcacacctaagggtcatctc

SEQ ID NO: 363905 - DNA, 516 bp, Homo sapiens
tatatatatatatatatatatatatgtacgcacacacacatacatatatacatatatatacacacacatatatatacatatatacacacatatatatacatatatacacgcacacatatatatacatatatatacacacacacacacayatatatatatatatatatatatatatatatatatatatatacaccatggaatactactcagccataaaaaagaataaaataatatcttctgcacaacttggatggagctgaggccattatcctaagtgaattagctcaggaacagaaaaccaaatactgcatgttctcacttataagtgggagctaagctatgaagacatgaaggcacacagagtgatagagtggacatggaagactcagaagtggggagggtgggagagatagtgagggataaaaaaactacatattaggtacaaggtacactactcaagtgaccgatgcactaaaacctcagactttaccattatactattcatccatgaaacca

SEQ ID NO: 363906 - DNA, 516 bp, Homo sapiens
tatatatatatatatatatatatatgtacgcacacacacatacatatatacatatatatacacacacatatatatacatatatacacacatatatatacatatatacacgcacacatatatatacatatatatacacacacacacacatatatatatatatatatatatatatatatatatatatatatacaccatggaatactactcagccataaaaaagaataaaataatatcttctgcacaacttggatggagctgaggccattatcctaagtgaattagctcaggaacagaaaaccaaatactgcatgttctcacttataagtgggagctaagctatgaagacatgaaggcacacagagtgatagagtggacatggaagactcagaagtggggagggtgggagagatagtgagggataaaaaaactacatattrggtacaaggtacactactcaagtgaccgatgcactaaaacctcagactttaccattatactattcatccatgaaacca

SEQ ID NO: 363907 - DNA, 569 bp, Homo sapiens
ctgtgtccaaaaatgtgaactactgattttttaaatgcactattttaaaaatgcactgaaataatgtagaaaataggtagagttacaaactgtattagtccattttcatatcgctatgaacaaatacctgagactgggtaatttataaagaaaaagatgtttgatggactcacagttccacgtgactggggaggcctcaagtcgtggaaggtgaaggaggaccaaaggcatgtcttamacagtggcaggcaagagagaatgtgcaaggaaactaccctttatgaaaccatcagatctcatgagacttactcaccatcatgacaacagcatgggaaaacccacccccatgattcaattacctcccagtgggaacctcccacgacatgtggagattataggagctgcaattcaagatgagatttgggcggggacacagcaaaaccatatcacaaaccaaagttgcaataatactagcttttacactaataattgttttttgtttagtattagtctctgaaatcatagaaaacaaaaagtgaagtttcaaaccatagttacaataataatag

SEQ ID NO: 363908 - DNA, 594 bp, Homo sapiens
gcatgttttaaaaccacttggaaacagaagacaaaaaattagagactgataaactatatactgtccctgcaatgtagtacaaattgccaatttgacaagatttaaatgaatggacaatgaaatctctcacatagtaaaatcaaggcctcctggacaaacatttattgagaaataataaatgcagcttgagctctttttatacttaaatataaaatgcacttgcttgccattgtgactactcaatacactgctgttataataaacaaaaaagggaaaaatcagtacaaaaagatgtcaatgtccctgacaggactgacttcacaggcatgtgccctaaacagcagcacagggctctgcactttcaagrgccctgtactttgtttaaagctcaactgtcactgtcttgaaattgttaataattcttggcatctaaaataattaacagaattagttccattaacttacaacttaagaaaaagcagttcaaaaagtcctaattgacgtagcaaagctctaagagcagaatgttagctaataaatgtagaagaattgatagagttagaaagcctaattttgcaaacccaaatgtaatta

SEQ ID NO: 363909 - DNA, 594 bp, Homo sapiens
gcatgttttaaaaccacttggaaacagaagacaaaaaattagagactgataaactatatactgtccctgcaatgtagtacaaattgccaatttgacaagatttaaatgaatggacaatgaaatctctcacatagtaaaatcaaggcctcctggacaaacatttattgagaaataataaatgcagcttgagctctttttatacttaaatataaaatgcacttgcttgccattgtgactactcaatacactgctgttataataaacaaaaaagggaaaaatcagtacaaaaagatgtcaatgtccctgacaggactgacttcacaggcatgtgccctaaacagcagcacagggctctgcactttcaagagccctgtactttgtttaaagctcaactgtcactgtcttgaaattgttaataattcttggcatctaaaataattaacagaattagttccattaacttacaacwtaagaaaaagcagttcaaaaagtcctaattgacgtagcaaagctctaagagcagaatgttagctaataaatgtagaagaattgatagagttagaaagcctaattttgcaaacccaaatgtaatta

SEQ ID NO: 363910 - DNA, 607 bp, Homo sapiens
  misc_feature (1)...(607): n = A,T,C or G
nncttggtgcttcatagtcagtcagagttgatgtacgtttcacaactttttagctgcatcttgtagaacatgtgggcatcttggttgcagcagcagaacagaggctgaaattacacaagggctttatactgtctcagccaggaagttacatacatcaccttccctcatcacctcttggtcagaactagtcacatggccctgcctaattacaagcaggtggaaaattgaaatccagccatgtctctagaaggagggcaaaactggatatgggtgaacatgaaaactttctatcaataatttatcttatcagactccctagtaaaatgataatatattggtaactttaaattacatataagcaatttaccatacctaacaaaagktttacacatatgaagtcaatttctaaaatgaacatatccaatgacagatatccaagttggtggtgtgcctttgcaaaaatatatatgtgtgtcacaggtcaaggaactttttggaaaatcatctttaaaaattattttaagatttgttaagtaatctatatccatgtatggcttcaacttcatattatttcagaattatttattgattagaggtggaattattt

SEQ ID NO: 363911 - DNA, 553 bp, Homo sapiens
catgacattgaaagttctttgcaaaccgtaaagtactataattatgcttcaatcaccatctatctggactgcctacattattaaaaccctatgaagaccaattggggtttacaaagtacagacccraaagtaagttaaaatgacattttccactacaaaaatatatgcttttgtgtaacaatatttaacacttgaaatagtgtgtcaatgtgttactcttgatttcaggattaaaaactgtcattcaactttgtttttcatgcaatttattgtaactttatttcattaatcaggaaatatccatagagaatttggcccaacattcttaattaaatttgaaatctcagacatgctacttgtgaaaaatctaccagtattccttaccaccatggccctttctaactatgccattttatcagctatttgcacaaatgcctagagttcagtcatggggaaactcctgagtcaaaaaagaaaataaaggcaacacttcagtgggatagtcaaacataaattgcaactccatcacacaactaattaaagatacaattga

SEQ ID NO: 363912 - DNA, 553 bp, Homo sapiens
catgacattgaaagttctttgcaaaccgtaaagtactataattatgcttcaatcaccatctatctggactgcctacattattaaaaccctatgaagaccaattggggtttacaaagtacagacccgaaagtaagttaaaatgacattttccactacaaaaatatatgcttttgtgtaacaatatttaacacttgaaatagtgtgtcaatgtgttactcttgatttcaggattaaaaactgtcattcaactttgtttttcatgcaatttattgtaactttatttcattaatcaggaaatatccatagagaatttggcccaacattcttaattaaatttgaaatctcagacatgctacttgtgaaaaatctaccagtattccttaccaccatggccctttctaactatgccattttatcagctatttgcacaaatgcctagagttcagtcatggggaaactcctgagtcaaaaaagaaaataaaggcaacacttcagtgggatagtmaaacataaattgcaactccatcacacaactaattaaagatacaattga

SEQ ID NO: 363913 - DNA, 583 bp, Homo sapiens
gtagaaattctcttctggggaatgtgaaggcataaggggaggaaatactaatgcttgccttgatattagtaatataacatggcttgcttgcccatgtatctaaacatcaggatttttgaaaaagcttttttactctgacttgtttctccttggctccagtaacctcagcagatttgtagcactgtrgataagattctgatagtccacatttacccacacataaatcaaatacttttttgagactcattttacatacagtatgttatagtaaatcctgtgaagagtacaaagatgtgttagtgcatttaccagatagatcagagtctaagaaaagagcttaacacctataagtaaacaacttttatacacgttttattctctttcatggagcgcaacattagaatctattgaagtcaagctagaaatctcagcatcattcacaacttttctcccttgtgcatcacacattagttataagagcttgcatagtttatttctcaatttttcttaatgtttcccttcttttcactgccaatgctcataaatgtaatatttatgtaccaatgttcataaacttaaactt

SEQ ID NO: 363914 - DNA, 602 bp, Homo sapiens
tgtacagtcttagatttaagagctatatttctaaggcctccaaatatttctatcataaaattcatcaagttatcactgacctaaagcttgagaaacagattagatctgcctgtaaagaaaacagactttcacatctgcaagaatatacatagggtataggcaagaagggaataacacctctccaaaggaaaataatggtttttgtttatttgtttgttttacaaataagtgggtaactaggtaataatttacctatttctgtgctcaatggttaagcttccctttgttatccatgacttccatacctcaacaagtcctgcttttttgtgactgtcaaagatcatgcatcctataaatatggatttttactaatgtcaccttcttccaagtggaggtaattctcaggcattgtgcaatgtgccagtcatatgctaagcactttacatatatagcattatttattcttctcaacatcttcaggaagcaagtgttattcccacatcccaaaagaggaaattgtggytgaaagagatcaagtaatgaagttaaatacatgacagaacaagatttccatcccaaattcatggtgttcactactaagt

SEQ ID NO: 363915 - DNA, 613 bp, Homo sapiens
aaacttcttccataaatggaaaagaaccatttcccgtgcagaataatagacttttggaataagcagacttggatgtataaattatgccagccagggtctctttctacagacaaacttcagcagtgttgccaggataaaagagctatgttaaaatgagaactctaaaatggtcaatagcagcaaaaataaaaatgtaacatttgtgtagtttcacagttcataaascatattcatagcctcattttctgattatagaggtggtatattctcattggaaacaatttagaatattacccacaatcccagaacccaaagagaaagagactgttaaacctactgttaagagtctgcttatgtccggccttttatctacctactatttcatcttcacatttcagaggcaggaatgaaatatctggaaaggttgggaaatagtgcttaacggaaatgaactggttgaattgactactatgtccagcgatgagagaaaccttgttaggaatgatgaatttttgtatttccctcttgtctgtcttttgcctggatttttaggaaaaacccaaaggaatttgcacctatcagagaagctaatctctgggatcttcccctactt

SEQ ID NO: 363916 - DNA, 563 bp, Homo sapiens
tggttgaattgactactatgtccagcgatgagagaaaccttgttaggaatgatgaatttttgtatttccctcttgtctgtcttttgcctggatttttaggaaaaacccaaaggaatttgcacctatcagagaagctaatctctgggatcttcccctacttgacttttattcttctgatatgtttgcaatagaaaaaaatcttgagcaaagaatgtttggtgcggtatgaaccctgtcttaatggcttataccttcatgatttatcctgatttgaaaattgcctataccttcagctgtttctcctgctttcagtgaattgcagtatttttttttctgacctgggatgcagtcttgattcttaaccaataatgagtgtatttgcaattaatatgcacatgcaatttcttatgcacataagcctttccaaacatttgagctccttactaagtgacttaatgtttgtcttcacatactgctagttataattgtactattggaaaaagtattaattgctttcctgtaagttattaggktatcatctcaacttcttatgggaaaatttg

SEQ ID NO: 363917 - DNA, 577 bp, Homo sapiens
cacttttatgatttcagtcacttactcaaaaccctttagtggcttctcattccactttaaataaaggcaattttcctttctttccttgccttacaagattaaaagtatactctgcttctctatacacrtttatttgctcatctcttgtcattctcctttccatatactccaaaaacatggaaattctttcagtttttgaaataaacagttttttttctgttctagcacttgtgcttacattattccttcagtcaataatgttctcattcaggtctttcacctctcagcttaattttatcttctcaccataacatctctgtctaaatatatttcatcccgatatttttcttcaggcagcccattctctattaattacagttttcttgttcatttgtgtctgcctttttcactgggctataagctgagggagggcaagtatgcctctcttttgctaactattgaacatctaagaccctcatactatgactgacatacattaagtagcttatgtatagtaatgaagtagaaatttgatgacagcatcatcctctgtgtcatatcgctaagaaacataagt

SEQ ID NO: 363918 - DNA, 577 bp, Homo sapiens
cacttttatgatttcagtcacttactcaaaaccctttagtggcttctcattccactttaaataaaggcaattttcctttctttccttgccttacaagattaaaagtatactctgcttctctatacacatttatttgctcatctcttgtcattctcctttccatatactccaaaaacatggaaattctttcagtttttgaaataaacagttttttttctgttctagcacttgtgcttacattattccttcagtcaataatgttctcattcaggtctttcacctctcagcttaattttatcttctcaccataacatctctgtctaaatatatttcatcccgatatttttcttcaggcagcccattctctattaattacagttttcytgttcatttgtgtctgcctttttcactgggctataagctgagggagggcaagtatgcctctcttttgctaactattgaacatctaagaccctcatactatgactgacatacattaagtagcttatgtatagtaatgaagtagaaatttgatgacagcatcatcctctgtgtcatatcgctaagaaacataagt

SEQ ID NO: 363919 - DNA, 612 bp, Homo sapiens
aaacagcatgttattacattaacagtcctggattatggcagccacccattattcaaatacattaggcatattctactacttttataattattgatggactttttaagaatattattggcttggatttgattatatactaaaataagtgttctcaaattgtctatttcacatgtatttttaatttraaatgatggcttacctttattttcaattaatatttgtctaatgctatataaattacatgagagcatattttaaagaaaggattatagttgttaaacatgaaataaaattgttcttaaagcttatagatctttaggatataggcatatgtgtttggataatgcagggactttgaataaatcatcagatatattaaaaatcaagttgtgctgaattgattttacttatatttagaaaatgcattgacagttgatgtcatggtgattttccctttctttgagctttgtacatgcatataaaagaaaatgcagttattttccacttaatatgagcattatgtaacatttcatttttttcagttattcttaaaaaataacattttcagcattaaaaatttaagcacctatttattagggttgctgctgtcaa

SEQ ID NO: 363920 - DNA, 595 bp, Homo sapiens
caaatactatttgatccagcaatcccactactgagtatctacccagaagaaaataagtcattatatgaaagacacttacacacgcatgtttatagcagcacaatttgcaattgcgaaaatatggaaccagcctaaatatccatcaactaataagtagataaagaaaatgtgtcatatatatatatatggtgtgtgtgtgtatgtgtatgtttgtgtgtatatatgtatcatggaatactactcagtcataaaatggaatgaaataatggcattcacagcaacctgaatagagttcgagaccattattctaagtgaagtaactcaggaatggacaaccaaacattgtgtgttctcagttataagtgggagctaagctatgaagatgaaaaggcataagaataatataatggactatggggactttgggggaagggtgggagggggttgagggataaaagacagcacawtgggtacattgtacactgctcaagtgatgggtgcaccaaaatctcagaaattatacctaaagaacttagccatgtaatggaacaccacctgtttccccaaaactattgaaataataataataataata

SEQ ID NO: 363921 - DNA, 551 bp, Homo sapiens
aaacagctgaaatcttactaattttatgtgcttaaggaaatctgtatttgttctcagaggagttggcgtgatatggcaaagaaataccatcaaatttttgaaaattctcttagcaaagatgggaacagcataaatttagcctgggggaatatgctagacctgaataaaaaaaaggaaacagaatratctcacagtagtctgctttacacaatagtgtgctcatgaaatgctcagtaaataaatcagcttttgattattattaccatttcctcatatcaaagtaaaaaaatttggtggaagatgtgtgcgtacatagataatacctgtttttcagtcctgtggttaatttacagatcaattttaactttcaggtttgtaggaaaccatgcgagtggaggattataggaagggggtgtaaaagaattatttgcacaaacaattaaataaaattgcttacaagatctggtaaatgttaagatcgtgtaaaaatatatagccataaaatcaagtcttagtaacaaggagtacactctgcatgtgtggacgattaa

SEQ ID NO: 363922 - DNA, 610 bp, Homo sapiens
ggaaaccatgcgagtggaggattataggaagggggtgtaaaagaattatttgcacaaacaattaaataaaattgcttacaagatctggtaaatgttaagatcgtgtaaaaatatatagccataaaatcaagtcttagtaacaaggagtacactctgcatgtgtggacgattaacatcacgatttaaaattctacagtgcctctgaattgccaaagaacaatcacatggggaaactatcgttwatttgctagtttgttcattgtacaatttttcattaaagaagcattttctcagttattactataggataaattggttaataaaagctatgaatgtaaatattgtcttgtctcattttctcattgtccatgacttcttttgttgtttgaactaatgaaattttcctgtggacaccaagaagagtccatctaatattaaatcctctctgctagaaatagcactataggtgaaggttctaatgtgtatttactttgatggcttttaaaagccccatccaaataatactacattttaccctaaaattacaaagtttaaagcaacttatataatgaccctggtatataaatgcatactctataacaaataaaat

SEQ ID NO: 363923 - DNA, 610 bp, Homo sapiens
ggaaaccatgcgagtggaggattataggaagggggtgtaaaagaattatttgcacaaacaattaaataaaattgcttacaagatctggtaaatgttaagatcgtgtaaaaatatatagccataaaatcaagtcttagtaacaaggagtacactctgcatgtgtggacgattaacatcacgatttaaaattctacagtgcctctgaattgccaaagaacaatcacatggggaaactatcgtttatttgctagtttgttcattgtacaatttttcattaaagaagcattttctcagtkattactataggataaattggttaataaaagctatgaatgtaaatattgtcttgtctcattttctcattgtccatgacttcttttgttgtttgaactaatgaaattttcctgtggacaccaagaagagtccatctaatattaaatcctctctgctagaaatagcactataggtgaaggttctaatgtgtatttactttgatggcttttaaaagccccatccaaataatactacattttaccctaaaattacaaagtttaaagcaacttatataatgaccctggtatataaatgcatactctataacaaataaaat

SEQ ID NO: 363924 - DNA, 563 bp, Homo sapiens
cagcttgcccttcaaacactcttgccaattatggaaaactgccttctctctaggccagagtacttgatgatctagtttatgttataggcaagttttatgggaccacaaactccgtgggaacaaattatttgagacatcaccttgtaatgggctttctgaccttttgttgttgttgctaaaccaaactatccaatgttttattatttccttttctcagaaactcataccttggttcacagtctctaactttcactcccaacatagttcatttgtcatatttttcctaaagtctggcttcatagactatggrggaatgcagagaaaatgaatagtctttctaagatctcatttaaaggcagataaaaggcaggcctgatttcaaatttgtcttctagcttttgtattaggcataaggtctctaagaatttcattccagaaccatgacatgcagacaaagtaacacattaatttgtcatcatctaccaatgataacattcatgctaatgttactcagtcctggactctattttgataatcatgctaagatcttaaggaactcctta

SEQ ID NO: 363925 - DNA, 570 bp, Homo sapiens
acaagagggtgtgctatttgaaagaactgttagaaagcttgaggatttaatttctttgtagsttctgtttcctggtaaagataatgcttaataatgtaaatattggtcatatactattaattattctgacagttcaatataatttaatttattatccccattaataattgacagagacaggatgtgagtttctgaaaatctacttctaaaattccttcaacagacgtgcaaatgtgtcatacaagatacaagtataactcagttgtgtggcagaaacaccagacataacttttcttggagctgttgaaaggcattgtatagacttatgaagcaagttacttgtaaatgaacatgaaacctaagtctgtggagctaatctgaccatgacagccctgacccccatttatcaccaaagtcgattgaacccctctgcctggctggtgttaagtttcccctttcactatccaggtgtcacttggttcaagaggaagatgttggcggacaggttttcttcaaataatatgagtacctctgttattttcactacttaaattgccacaattctccttg

SEQ ID NO: 363926 - DNA, 570 bp, Homo sapiens
acaagagggtgtgctatttgaaagaactgttagaaagcttgaggatttaatttctttgtagcttctgtttcctggtaaagataatgcttaataatgtaaatattggtcatatactattaattattctgacagttcaatataatttaatttattatccccattaataattgacagagacaggatgtgagtttctgaaaatctacttctaaaattccttcaacagacgtgcaaatgtgtcatacaagatacaagtataactcagttgtgtggcagaaacaccagacataacttttcttggagctgttgaaaggcattgtatagacttatgaagcaagttacttgtaaatgaacatgaaacctaagtctgtggagctaatctgaccatgacagccctgacccccatttatcaccaaagtcgattgaacccctctkcctggctggtgttaagtttcccctttcactatccaggtgtcacttggttcaagaggaagatgttggcggacaggttttcttcaaataatatgagtacctctgttattttcactacttaaattgccacaattctccttg

SEQ ID NO: 363927 - DNA, 622 bp, Homo sapiens
ccagcaattttcacatagccagaggctagtgagggaggcatcgatatatgtaatgtgcttcccacctggcatgcacttcctagacattcccagttaaatacatcagagctccgttttaattttatgtgcaattttattttattttgaaacagagtttcgctcttgttgcccaggctggagtacaatggcacaatctcggctcactgcaacctccgcctcccgggttcaagcaattcccctgtctcagcctcccaagtagctgagattacaggagcatgccaccacacccggctaatttttgtatttttagtggagatggggtttcaccatgttggtcaggctgttctcgaactcctgacctcaggtgatcggcccgcctcagcctcccaaagtcctgggattacaggcatgagccactgcgcctggccttttgtgcaattttatgttcagtgatctccaaatttatttattctgttacaagtatttctctaaaataacccagagctctctcaacttactaggtgttagagctactacaaatgacttatcttcraacatgatctctttctgattttcttaaagtgaagggctttctaaacaagacctatgtttcatgaaaatg

SEQ ID NO: 363928 - DNA, 605 bp, Homo sapiens
cccctgacattgatcactaaataaggaagttcatcttatctactaataagaaagaaaatagaacaggataatatggaaggcagtagttgtggcagcttcggccagagtgattgggcaagagttttttgtgattgagttaaatcagtgtccgagtgattaaagagcaagttgtcaatatcatctatttatcatctatttacctttctgttaaaattttatataaagctaagaaaattaagttacatattatacatttataggaggtaggaaccatatagaacatgctgacatgtacctggactcaacaattgttgccctgtagttgaagagagtttcagaaaatatctttctcaaaagttccagccttctttaattcatactttcctctgaatttctatggcatttattaaatgatgagattcacttagccttgagaaaatgtaacattggttagtgtatgttttttgtatgctgacctgaagtgtgtrgacagtgttatatgttagtttctaaactggcctctcagcttggcattcttctgtagctggcatgtcataactattgaattaccattttatgaggatcaggaaagttaaaagagagtg

SEQ ID NO: 363929 - DNA, 527 bp, Homo sapiens
tatactaacaacaaagtacagagtgttctttttaattaggtaacatgttatttgcactctaattacataaattgcataatccttttggtgaatctaattaaataaaagcttatgaraaatgatggtattaaaagagtattgtgtataaactcaatgaatctgaaatattgattaaaaacttagcagagaaataattgtgtcattaggcaatgcacagatctagccaagaaagatttactgaatagatctttgttttcaaaaatattatggcagaatactagaacaaaatttctggactgtaatttttggtttattctaaataagtagtaccattgaactaagtaaatttggacaaattattttatttctaactgctcagatttcttttctccacattaattctaatattcttctctagtgattataaacacttgatgaaagtatagtgtttgactttttttgaagaaaacaagagagattgtacttaatttttaatagagaatgaaaagagatataaaaaatattaa

SEQ ID NO: 363930 - DNA, 527 bp, Homo sapiens
tatactaacaacaaagtacagagtgttctttttaattaggtaacatgttatttgcactctaattacataaattgcataatccttttggtgaatctaattaaataaaagcttatgaaaaatgatggtattaaaagagtattgtgtataaactcaatgaatctgaaatattgattaaaaacttagcagagaaataattgtgtcattaggcaatgcacagatctagccaagaaagatttactgaatagatctttgttttcaaaaatattatggcagaatactagaacaaaatttctggactgtaatttttggtttattctaaataagtagtaccattgaactaagtaaatttggacaaattattttatttctaactgctcagatttcttttctccacattaattctaatattcttytctagtgattataaacacttgatgaaagtatagtgtttgactttttttgaagaaaacaagagagattgtacttaatttttaatagagaatgaaaagagatataaaaaatattaa

SEQ ID NO: 363931 - DNA, 413 bp, Homo sapiens
tatattacttttatgagtattaatttatgataataatttcaggatactcattcagccctggattatttatattaatttctttcccaggatcattttattttagactttttrttttttaacacatttttgttttatgaagtacatacttcattagtatttcaattcacttttactctggaactcagaaaacccttttcaaatctggccctctcccctatgtcagggaagatgcaggagggagcagttaaatcccttacgcaatgttacacaacttttaaatggcccagctacagtttgaattcagctccattcaccttcagaaatcatgccccatctgttatagaaagatgtactttgtctgcgttcattttagatgttattagaattatttcaagcaaaaggaaaaaatatat

SEQ ID NO: 363932 - DNA, 464 bp, Homo sapiens
ataaaatagcagtgtgtataacatgcacaatatatctcaatgaaaataatacataaataaattccttttataaaataaaacaatccctctgcctgtgttctgcatcctgtttcttctcatcttcttaagaaccccaagctttcatttatttcctacttctctcatttcttcaaacattccctctttatgcarcacagcatttaaacatactgaaaccactttttgcttggaacatcagcaagatggtagcataagaaggcctggaccctcctttcccctacaaacatacctattcagcaaaaatttatgaacaaattatctttgtgagaaatctagaaactagtagaaccagagttctcttaaattctggatgagaacaaaactacccaaattgaagggagtagggataatttaaacaccatattactatactccttacctttggcacagtgccatacaattag

SEQ ID NO: 363933 - DNA, 562 bp, Homo sapiens
aatcaaagttgttgaaggaaatttaaattgcctatgcataaaatggaaaggtaaagtacatcagtggagagcagcttgtactccttttaaattgttattaagcaaatgcagttagtatttttagyattccaggcaatttacacacctgagcacaatttattacctttctttatgcatctttaggaacaaggtttcctacagccatcactgtttgacctaatcaatggattcatatgtttctgcattgtcctgtcactttagctttgtttctacaaatgagtttcttttcatgggaaggagaaaaaaaatcacttcagtttaatcctagcagaggcacagtgctgggggtcgcagaggtcctgattaacagaaagcctcattcctgaagatcctgtagactggatcccaccaggcttcccatattggtattgttggtataccttttggggggaagtgtctcatctgctctcattccaatcagggcaaggttgttgaagtgtagtgctaactgaattctagctttcaagcatgcaagaggagagtcaaaatcaccaggctgtgg

SEQ ID NO: 363934 - DNA, 503 bp, Homo sapiens
accattgtagcatttctctgtcttccatttttaaagctctacactctttcctggtgagagtgtgtgtgtgtgtgtgtgtgtgtgtgtgcacgcatgtgtgtgtgtgtgaatgtgtgtgtgtgtgtgtgtgtggtgtagtagcagtagtagtaaaagaaaatacataaacacatttggccctggaagatttttccttagtgagaaataaattgtgcaaccatgtaactagcatacatagcactcttcaataatcaaagttccttacctacgtctaattctcatactatgtctttgaaaaaggtgatgatcatgccaattttcaaataaggaagccaaatcaccattagttttggcctataaatcaatctgttctctgactctaagctccacgacttttattttatakatacagtaggtatgtcctgctactatgtaccagactgttctaggcactcaacagatggagataaataagacacagcacagcttcagccttgagtgtc

SEQ ID NO: 363935 - DNA, 532 bp, Homo sapiens
gctgggcataataactatatcyaatgggattgttattgtttgtttgtacaaacacaagaggaaaaatagcattacagtgaattggataaatctgaacccctcttgcactaaaagcagcaccaccttttttctgactcattcctctttctgggatgataaccgttgccaagtgttaaagaaatgttttggttatccagttttgctttttgtctaccttctccttagaattaggtagacaactctctggtcagaaacgctactgaacctgtgaacttggctctgactttgtgtaaaccatccgcaggctaatgcttcccctttgggatcctcgtcttcctatgtgtatttaggtctcttgtagtgctattctcaccacatgtattcattagcctgtttatgtgggtttctgagtccaggaaaaggaccttatttgtatggtgaatgctctaaaaatattgactgtctggattaaaaaaagaaaaattgaagaatgtcaaattcaaaaaaaaaaaaaagttaatgtgcatgtatg

SEQ ID NO: 363936 - DNA, 592 bp, Homo sapiens
ccagcttctcctaatgttactttcttacataaccagagtacagttatctaaactaagaaattgacactagtgtaatactattcactaagccatagactagaattctataaagctataaaactggaattaactagttttccaccaaaatgatttttctcggtttcaaaatataatcagtctaatcaaagactccaccttgcatttagctggcatattcccttagtttccaacctatgacaatttctcagtctttccttgtttttcatgattttgagattattaaagtcagatattttgtggtatgtccctcagattgggttggtctgaggttttctcatgattagactgatgatactcatcttagggcagaataccatagaggtgatgtgcttcttttwgtgcattatatcaggcacatattgacattatgtatatatgtcttattgctggagctgtcaccctgagtacttggctaggtagtattcactataaaattagtgtctttccctttgttgttagtaaatatttattgcagagggcaatagtttgagatcatgcaaatatcctgtttcttcttaaactttagtcaact

SEQ ID NO: 363937 - DNA, 471 bp, Homo sapiens
atcttcaccctggggtgtgtgttttactattataacaagcaaaaggctactctggggtgagttattagaggagtgtgcatgcttggcagcagggaaagtccctaccatcgttatctctggatgsggcctgataggtctcctttagggccagaggagcccaactataaggctagaagcagtcaatgaagccaatgtattttttgctgaccatcaatgggcagcactgactatcagtgggcagtgtctccaagtcttcttttcgcaggctcacttgcttgctcatttctggctattcacctatgctaacagtaggtcttattcattctacctattttttgtacctattaaccttccctacctccctcccagccccccaatacccttccctgcctctggtagccatccttttacgctctatgtccattagttcaattgttttgagttttagatccccaaaataagtgagaacat

SEQ ID NO: 363938 - DNA, 568 bp, Homo sapiens
tggctattcacctatgctaacagtaggtcttattcattctacctattttttgtacctattaaccttccctacctccctcccagccccccaatacccttccctgcctctggtagccatccttttacgctctatgtccattagttcaattgttttgagttttagatccccaaaataagtgagaacatatgatatttgtctttctgtgcctgacttatttaaaataacttaatgatctccagtttcatccatgtcattgcaaatgaaaggatctcattcttcttttatggctgaattgtattccactgtgtatatgtaccacattttttaaaaatccattcttcggttgaaggacactaagattgcttccaattcttgactatcgtgaatagtgcttcaaaaaacatgggagtgcaggagtctcttctgcatattcatttcctttcttttgggtatatgcccagcagtgggattgctggatcttatgatagctatatttttagtgtttagaggagacttcaaactgttttcatagtggtggtactaatttwcatttccaccagcagcgtaa

SEQ ID NO: 363939 - DNA, 538 bp, Homo sapiens
ttgccctaacatatatcccaaggtctgctatttcaactgtgtgtctatgtcctacctagaatcacagactccttcaactttttccattgctgcattaacaatgcctctagttccatactccatgctcctcacttctcttttattattttcagatggtatcactagtttcttccaatggaatgactcctcccatgtctcacctttcttatccagtcagtcatcattcatattaagtctgactgcctgatagctctcatatctgtaatcttttccctttttattcctgctgtcattgatttaggtttacccttatcacatttcacttggactattgcaataattttttaacttgtgttaatgttaaacacatatggtatatccttctccagttttttcactaacccatcacagagtaatctttctraaatattaaatatgtcatgttggtcacttgtttaaaatccttcaataaattccttttgtcttcatgttcaaatatttagtatgtcaaaccaagtctttccatttgagtcttgaa

SEQ ID NO: 363940 - DNA, 610 bp, Homo sapiens
tataattcccagttactgtccggagtttaatatcttagcaggacacacatcaagtgtaattgacacaccatggaacaaaatttctygacgtttgaaatttactagtatgttgctcaaggtttctcttcttcgggctaagaatccctaataaattaattacatagtaattatttgaggatgtactatgttccagatcctaaggtaataatttaacatagtacttgcccttatgaagcttatggtcttctattctaatatcaactaatactcatagttaaaatatttcccattcagatatctccaattactataaaaataccacagtcaacacactcctagatacttatgcatataaagtcatataagacatagtttctgccctcaaggaacttgttgactggttgaacagccaaagacagtttcttcatttatttcttttatcataaatttcccaaggtaattagctatgtggagtatatctggctagtataccctcctttctcagagttatagaagccatctacaatttggataaatactttgagaatgaattttaattacaatataatgtagtattcagcatttatgaaacatttaatattaatgtaca

SEQ ID NO: 363941 - DNA, 524 bp, Homo sapiens
agaaaactcatcctgtttaaaaatgaaagcccgtgaagtgaattggttaaagtagaaataattttttgaaaagaataaaggagggtaattgaggactttcacaaagaggtcattgcagctgggcaactgccacaccaaatggagaaataatagatcacaagttaccagtcaagaacacaaacttattgatgaagcatcagtccaaatgcagattcctcttatctgcagtaagaagaggagcacatgtttcygctgtgatgtgtcctcctcatggaagaaagtatatctataaagcaagagccattcccagcatctgcatatggaatattaagacttagggcccctgaatgctttcttcagatttctgcaactttgagtaaataaaggtcattaagagagaagcagattggtaagaaacagattgaaaacataaggacaaatttcaagtccacacagattcttcatataaaacattaggatagtaactcaatggggcttgcacaggtttaatgagatgataggta

SEQ ID NO: 363942 - DNA, 568 bp, Homo sapiens
gtatccacggctgagagacacatagatggttcccatcacagaactctgtgaagacaacccccagtaccagcccagagcctggtagacttgctgggtggctagatccaaaagagagataacaattactatagctcagctctcaggaagccatatccataggaaaacrgagagaatactacatcaagtgaacacctcatgggacaaaagaatctgaacaacagccttcagccctagaccttctgtctgacagaatctacacaaatgagaaggaagcagaaaatcatctctggtaatatgacaaaacaaggttctttaacaccaccccaaaatcacactagctcaccagcaatggacccacaccaagaagaaaccccgatttacctgaaaaagaattcgggaggttagtaattaagctaatcaaggaggcaccacaaaaagctgaggcccaatgtaaggaaatccaaaaaatgacacaagaagtgaagggagaaatattcaaggaaatagcataaatagaaaacaatcaaaactttgggaaacaatggacacacttatagaaatgcaaaag

SEQ ID NO: 363943 - DNA, 568 bp, Homo sapiens
gtatccacggctgagagacacatagatggttcccatcacagaactctgtgaagacaacccccagtaccagcccagagcctggtagacttgctgggtggctagatccaaaagagagataacaattactatagctcagctctcaggaagccatatccataggaaaacagagagaatactacatcaagtgaacacctcatgggacaaaagaatctgaacaacagccttcagccctagaccttctgtctgacagaatctacacaaatgagaaggaagcagaaaatcawctctggtaatatgacaaaacaaggttctttaacaccaccccaaaatcacactagctcaccagcaatggacccacaccaagaagaaaccccgatttacctgaaaaagaattcgggaggttagtaattaagctaatcaaggaggcaccacaaaaagctgaggcccaatgtaaggaaatccaaaaaatgacacaagaagtgaagggagaaatattcaaggaaatagcataaatagaaaacaatcaaaactttgggaaacaatggacacacttatagaaatgcaaaag

SEQ ID NO: 363944 - DNA, 621 bp, Homo sapiens
atgattaatggaatggtacctcacatttcaatactgagattgaatgcaaatggcctaaatgctccacttaaaagatatagaactgcagaatggataagaattcaccaaccagctatctactgccttcaagagactcacctaacacatraacaccctcacaaacttgaggtaaaagggtggaaaactacatttcatgaaaatgaacaccaaaattgagcaggagtagctattcttatatcagacaaaacaaattttaaagcaacagcagtttaaaaagacgaaggacatatataatgataaaaggccttgtccaacagaaaaatatcataatcctaaaaatatatgcacctaacactggagctctgtaatttatgaaacaattactaatagacctaagaaatgagatagacagcaacagaataatgcgggggacttcaatactccactgacagcactagacaggtcatcaagacagaaattcaataaaaaaacaatgaatttaagctataccctgaaacaaatggaattaacagatatatacagaacattccatccaaaaaccacagaataaacattctattcaacagtgcgtagaactttctccaagatagaccacatgat

SEQ ID NO: 363945 - DNA, 611 bp, Homo sapiens
ggaatagacatttttccaaagaaaacgtacaaatccacaatgagtatatgaagagatgttcaaaatcactaatcatgagagaaatacaaagcaaaacaataatcgatcatcacctcacacttattaggatggctagtatcaaaaagacaagatataacaagtattggtgaggttgtgaagagaagggaatgtttgtacactgttggtaggagcgtaaattgatatagtcattatgaaaagcatatagaggttcctaaatattaaaaataaaattatcatatgattcagccattctacttctgggtatgtaccccaaggaaataaattagtatctcaaaaagatatctccactctcatgttcattgaaacatcagtcacaagagataagatgcagatgttgaaacaatttaagtgttggatgaatggataaagaagatgtgagatatatacacaccaattctctctctctctctctctcacacacacacacacacacacagaatattattcaaccataacagatggatgaatggataaagaaaatgtgagatataaacacacacacagacatacctasacacacacacagggaatattattcagctatgatt

SEQ ID NO: 363946 - DNA, 592 bp, Homo sapiens
aagttagaattgaggggtgaaacttttgagggcttagggtgggtatgtatctttgacttatttttttgtactttgctttgcagggaatgaaattcaaatctgtgattaattcacggccttaccttttttacatagttgagatgacacttaattgttcagattgacattcagatcacattctgggacaggtatttctctttgtccaaggagacagctcctccagcctctactccatctatattgtttctagaggtataacattttcatgggacttcattccagctaagttcgattgggtacttgacccaagctggggcaatgagtgtcttccagaggaaaaacaatatgatcactctctccctgggactaaatctgtgagacataaaactaggcagctcttggcagttgtgttttggccatgaggagaaagctgttctgaggtaagatagaagaacaaggctaacacaataaaaagaggatagcatcttgatggttctaatatttctgaagtccagttacaaaactgttggyaagttctattgttattccagcaaattccctttctgagtaaaaaagttcacgtttttgttaa

SEQ ID NO: 363947 - DNA, 604 bp, Homo sapiens
tttcataattagaaatattgacaacagaattcaccaagctgaggaaagaatctcagagcttgaagatgactcttttgtatcaatgcaggcaaacaaaaatattttccttgtgaaactttccttattacctcaggacagtgttggtcaccgttttctctaagcttctataccactttgtatataccattataaaagcatttattaacaacataattaaattgtgtgctagttatatgattgtacatctgtttctttgatggactagaagttgtatgactcaagggaccatgtcttattaattccagctgaattcatacatattacagattattaaagaaataatgtgagtaatgagtattcattcaattaaataataaatcaacaaagaaagaaagcagctgtactttaaatcattaaaagatcattagcgtggtagatttgtattacatcaacttaattakgcttgaactgtggtttccagaattctcttttctggatatttgttgtacatgtggcagagtacaggagaaatcttgtaatagattgggaagacaaagagaaccaggagtcaccttttgtatttagattcagacggctgagagta

SEQ ID NO: 363948 - DNA, 564 bp, Homo sapiens
ttgtatttcgatttttgatgtgtgtgtatgtgtaaaagtattatttgtaaactgtgaacatgtaaagtataccacaattttktaagcctgtctagatgattagttaattaatttctatatactggcatttatggaaagtagaataagccaagtttccttcaactactcaactactgagaagtcttggctctacttcaggatacttggagacagcaaaagtttttttctagaactttggtcaagtacaaatgtcatctgggcactctgggaacgggatagctgcaggactgtccctaggctgttatttgtctatgagcccaggcactgggcgcacagagtttaccttcagagcatctgggctctgagagcagatgactctgtgtcacactctatgaggcacacaacattgtgcagagaaaatacaggagcctgaagatgaagagagagagaaaaaaaaaaacctctagtatgtgactgaaagtaattatttatctactatccgacagccagtctgttttggaaaacattcttttatgctcccctaagattaaccctttctagagg

SEQ ID NO: 363949 - DNA, 601 bp, Homo sapiens
ttaaggttttattgttgggggcccagagctaaatcaaataattgttctttaaaatggtaacagttattttaaggagtcagataatatttccaaagcttcttatggggcaaagtgtcatctaaagaatctcaaattattttaggattgttataaatccaaataaaaatacacatttaattgcagtgatagcttaattgaatttgattttaaaatgttcattattcaattttaagcttatatgtcattactaaagcacactgtcaatgctgaatggtaagatgatattttgtattggttctgaaattatcttttgaataggacaattgtatttcgatttttgatgtgtgtgtatgtgtaaaagtattatttgtaaactgtgaacatgtaaagtataccacaattttgtaagcctgtctagatgattagttaattaatttctatatactggcattyatggaaagtagaataagccaagtttccttcaactactcaactactgagaagtcttggctctacttcaggatacttggagacagcaaaagtttttttctagaactttggtcaagtacaaatgtcatctgggcactctgggaacgggata

SEQ ID NO: 363950 - DNA, 564 bp, Homo sapiens
ttgtatttcgatttttgatgtgtgtgtatgtgtaaaagtattatttgtaaactgtgaacatgtaaagtataccacaattttgtaagcctgtctagatgattagttaattaatttctatatactggcatttatggaaagtagaataagccaagtttccttcaactactcaactactgagaagtcttggctctacttcaggatacttggagacagcaaaagtttttttctagaactttggtcaagtacaaatgtcatctgggcactctgggaacgggatagctgcaggactgtccctaggctgttatttgyctatgagcccaggcactgggcgcacagagtttaccttcagagcatctgggctctgagagcagatgactctgtgtcacactctatgaggcacacaacattgtgcagagaaaatacaggagcctgaagatgaagagagagagaaaaaaaaaaacctctagtatgtgactgaaagtaattatttatctactatccgacagccagtctgttttggaaaacattcttttatgctcccctaagattaaccctttctagagg

SEQ ID NO: 363951 - DNA, 594 bp, Homo sapiens
taggaggtaggaaagtaggacaagagggaagaaaatcaagcaagcatgtgatattcatctgtctacatttgtctccgtccatgtctgtgcctgacctcacactttcatgctttctctctctttacctttgttattgaactcctgtgttacattcactcattttttatatttatgccaatatgcacattcgtgttggcaagatacaaaataatgttgagtcattagaatgtttaggaaaattataaacacctaaaataaaatagcctataactgagaggcatctttaattgattttgatttactttaatttaaaagttgtgttaaawtctggatttcttaacactttccatctttatagattccttattatgaaagctaacaaaaaaaataagaagcctggaattacctgtggcttctgagctgtgggttgggatgagaaagagaagggaaagttccttgaaacagataatatctgcatctcattgtgattttaacttataaaaccaaagtatgaggatcagtttaaaatttctcctgataaccactcttaaatgtgtcacagcaaagaccaagatgccatctcacccagaccac

SEQ ID NO: 363952 - DNA, 611 bp, Homo sapiens
cctaaataattaaagaaccagtcacaaaggaattagaaagtactttgagataaatgaaaatgaaaacatagtatatccaaatttagaatattcagtgaaatttatagctataaatgtttatatttaaaaaattaaaatctaaaatgaaaaattctaaacttaaatcttaactttttcagttacacactaaaaaagaagaaaaagcaatctaaagcaaccagaagtaagaacacagtaattataaaagcaaaagtaaataaaaaatagaaaaacaatagaggaaataaagacaaataagtcagttctttgaaaagkttaaaaaaattgacaaatcaaccaaaaaatagatgaattggactccatcaaaaataaaatattttatccttcaaaatggacatccaagaaagtgaaagacaagcctcagaagaagagaaaatattgtcaaatcatgtgtctgttatgcatcaggcatcaggattatagtcatgcattgtttaatgacattttggtcaatgatataatgcctatacaatgatgatcccataagattataatggagctgaaaaattctaattgcctcatgatatcatagccatcatagcatcatagca

SEQ ID NO: 363953 - DNA, 588 bp, Homo sapiens
gtatccatgaaaataagagggcccacttttctagagakataacatggttcacttaaaacatgtttagggacgggaagcccagcattttcacttgaaactgttctcttctttttatgtttagatttcccacataccttagcgtagatggaggttcccccacaaaaagtatatatggctacttctccttcttcttcctttccaggagaaactgggagagaagtggcattccaaagggactctgcaagactgtcccatgagctttggtaggttttgcataatttagaacctaatatcccagcaattcagttaaacattttgcatgtcagtctaaatagcatctaaatcttttgttctttgacatttaacatcattctgttcattccagtaaaggttgttgcctttttttttcaatgactttctgacctgtctttaaagtcagcattccaatcagtctccactgacgtacagagaatagtgacatattgacttttacaagaaatgaatcaaaaggtgacagaatatgaatcgatggaaccttagcactaaattttccatataaatgcaagtgtcaactaaacaaagggcttg

SEQ ID NO: 363954 - DNA, 588 bp, Homo sapiens
gtatccatgaaaataagagggcccacttttctagagatataacatggttcacttaaaacatgtttagggacgggaagcccagcattttcacttgaaactgttctcttctttttatgtttagatttcccacataccttagcgtagatggaggttcccccacaaaaagtatatatggctacttctccttcttcttcctttccaggagaaactgggagagaagtggcattccaaagggactctgcaagactgtcccatgagctttggtaggttttgcataatttagaacctaatatcccagcaattcagttaaacattttgcatgtcagtctaaatagcatctaaatcttttgttctttgacatttaacatcattctgttcattccagtaaaggttgttgcctttttttttcaatgactttctgacctgtctttaaagtcagcattccaatcagtctccactgacgtacagagaatagtgacatattgacttttacaagaaatgaatcaaaaggtgacagaatatgartcgatggaaccttagcactaaattttccatataaatgcaagtgtcaactaaacaaagggcttg

SEQ ID NO: 363955 - DNA, 527 bp, Homo sapiens
ttggtgactgctcttactggagtaattatactatatgattcttagctcgtctttggtctaaaaggataacaatggtacttgtttgtacagcaccaacacagcattatcctgcaactcgaatttaaagctatcaattgataataattattccttgaaacagtaaaatgtttaatttcatttacatttcattagcgtcattatcactcatatcactaatagtgcaaaactttacttttttggtaacttgaaaaagtaatatttttaggcatggaaaattgaaggaattacattaattctttaaattaattaatttctctagagatatcttcctttgatgctcaaagaaaatgagcaatcatttgtttccagtgtgtgttktttactggacccctttctgttagtgtttttaataattgggagtaaaggatagtctaattcactgtatattactgaagaaatctcctatatatccaactgtgaactgttgataagtcatgatattggcataaagaagtaggtaagactgc

SEQ ID NO: 363956 - DNA, 546 bp, Homo sapiens
tttatcagtctctactccctcatctcccaaagccagttgaaaaacaagccctgaagcctttgccttctaaacacagcacaactctagctacctccctgtcttcccacggatccactctaaaccatggcactatcctctcttacctgatctaaggtactagcttcccaaatcttttactcacgtccacctttgtgacttgtctaatctccacatcacagccagagatgatgttgtggatggagttttgttctgttttgttttacattctaaaaatctgatattatgcccctacttaaaatttctcaatgactttcacatgcatgttcttagttgaagacaagtacaaaatgcttcaatgtcacctacaaamccctcgatgttctgggcctaacaatgttctggcacctcctcctacatatgctgactcatctcatattttactttgacttcttccatatggaccgcttgttgatttcccctaagtcccgctccatctcccagcacaaggtcttttcatacatggttttctctgcacatgttgttctt

SEQ ID NO: 363957 - DNA, 608 bp, Homo sapiens
tcacttagggatccagagaagaaagttaaggggaagtatagatgaagaaggaagaatatgagatgagaagatactggggctgtttactgagacattttstgtcaatttaggtgataagggtagaaacagagaaaaaagcagctgaaaaagaatcatttttaaaaatgactttcttttcagaatgacatcaaatcaaggtgtctacacactattaaaatgtggaagttgagcccaggaaataggccaggcataaattatgagtcatcatcataaagaactcaaatgaaagaaataaaaaggacctttaaaaaagaaaacagagaatgagacagcaggaggcttaaactgaacggttgaaaagttctatatcaaggatatcagagaaagcataagacatagcaaagttatataagagctgtattaagagtatggtaaagttggtgaggtacttatgagatctcccttcaaggaagtgcagtgtagacatctttcagctgtcagctccttcaagatttgtctctgctgcagaaagctggtccaaccaaggtcacactattccaagagcagcctgaacacagtgactgagaaaggcagaagtataagcatct

SEQ ID NO: 363958 - DNA, 566 bp, Homo sapiens
tggatttagtgaatgcaaaaacttagttcacttagggatccagagaagaaagttaaggggaagtatagatgaagaaggaagaatatgagatgagaagatactggggctgtttactgagacattttgtgtcaatttaggtgataagggtagaaacagagaaaaaagcagctgaaaaagaatcatttttaaaaatgactttcttttcagaatgacatcaaatcaaggtgtctacacactattaaaatgtggaagttgagcccaggaaayaggccaggcataaattatgagtcatcatcataaagaactcaaatgaaagaaataaaaaggacctttaaaaaagaaaacagagaatgagacagcaggaggcttaaactgaacggttgaaaagttctatatcaaggatatcagagaaagcataagacatagcaaagttatataagagctgtattaagagtatggtaaagttggtgaggtacttatgagatctcccttcaaggaagtgcagtgtagacatctttcagctgtcagctccttcaagatttgtctctgctgcagaaagctggtcc

SEQ ID NO: 363959 - DNA, 540 bp, Homo sapiens
gctatgtagtcgagtctggtcttgaacttctggcttcaagtgatcttccctcttcaaccttctaacgtgctgggattacaggtgtaagccaccactcccagctgagtcttcaggtatttctgaactcaactccagcagcaccattttcctgagctcctaatttccacattttaataaatgtcagctttatttaatcagtctttgtatatgtgaagggaggggctttcaaaacaacaaagaattcattctccctgtgaactctagcattacaaatgccaagaaaggacttcaggttgtctcactgaggccctgtgtccactcctggttataatcaggaacttactagaaagagggaagaaatggattcttagcggataaaaggcagtaactagaaagtgcaccccacaccagatgcttagcacaatgatyacatatagtgaaagcttaatgagtggtgtcttttttaaaaataattttcatgaacaaccagtgaactctagataaacaatgattttactatctgcagtggcttatgcaata

SEQ ID NO: 363960 - DNA, 580 bp, Homo sapiens
attcaactcttctgtttgaaatgagtgtctgctcattgcaataagaatttaatctaaatctctaactaggcttaaaattcttccgccatccagcctctgcctcccacggcaccctcatcccttactgctctatgtccctgtatgactagccttccttctgtstttcaggaacccaacatactcccagctgaagatgttgacactgtttttcctttccagaatgttcttctttcagactgttatgaggctgcctcttttgtgatccttcttcagattgctaatgaaatgcgtcgccataaccaggagccttccctaatatttttggctaatgtaacacaccccgatctcatttcccattcccttcactagaatataaactcccagcaggtaagaattatagctctcttgtccactacattatccctaggcttaatatataggagggacttagtaattatatgatggtaatagaccaagggtgattaaagtagaaaaaagaaaagttgccagctcaaaactctcacattaatagatgttaaaacttggaattaagaaacagtctctgtagggctttgttaga

SEQ ID NO: 363961 - DNA, 539 bp, Homo sapiens
cctttctcctggcagctcgaagattacctgagaggttttcatctgcataacaagacagcctttgcttggcatgccttcctcccctcactcttccagaacctgtgatgccacctccccctgggaaaccccaatctcctgttctttctgtagcctcaggatgatagaaacattttaaccacctggctccacctctgagcctcatacatagcacatggcttctgtgctgacgcacatgataaaatctgtattttttatacatttttttcttttaatctatctattgtcaattcatctcaatagacttagacctgaaccttcaaagagaaagtttgaacttttctaaacatgaaaataataaataggaacacacacacacacacacacacacacacacacacacmccttattatctggacagaggaaaataataccaaaagaaatctcctgctaaagagaatgcaaggagggttaaaagatcgttattgcatattataaatataaaaatgttgtagaatcccaaaatccagttttgcataccc

SEQ ID NO: 363962 - DNA, 539 bp, Homo sapiens
cctttctcctggcagctcgaagattacctgagaggttttcatctgcataacaagacagcctttgcttggcatgccttcctcccctcactcttccagaacctgtgatgccacctccccctgggaaaccccaatctcctgttctttctgtagcctcaggatgatagaaacattttaaccacctggctccacctctgagcctcatacatagcacatggcttctgtgctgacgcacatgataaaatctgtattttttatacatttttttcttttaatctatctattgtcaattcatctcaatagacttagacctgaaccttcaaagagaaagtttgaacttttctaaacatgaaaataataaataggaacacacacacacacacacacacacacacacacacaccccttattatctggacagaggaaaataataccaaaagaaatctcctgctaaagagaatgcaaggagggttaaaagatcgttattgcatattataaatawaaaaatgttgtagaatcccaaaatccagttttgcataccc

SEQ ID NO: 363963 - DNA, 455 bp, Homo sapiens
tgaactaagcctcatgtaagcatacagggaaacatttctctatcacatcccaactggactgtaagtgattgagtgaacaatagtgatatcccagtggaagtggggtggaaagagaatgtatggtaatatatttgagacacctggattcagcaatatgtgmatcttccagtgacacacaggagattaaacagcagttgactcaaaactatgaaagaaatagtttccacttctaccagtgttataatgaattaaatattatgctcactcagcctcacaaattcaaaagagatgccaaaaacatcttgttgggcagttttatctttacttccactttccagatgaattattttatatctctccagtttcaatctcaaaaatagtcatgtggactcagataagcagcaagttgttctgcagaaacactagactgaaagcgctagaccaagattcgtcag

SEQ ID NO: 363964 - DNA, 602 bp, Homo sapiens
aaattactcgaacatccctatatacctccactttgttaataattaatttgtttaaaacattatgtgatcactttagaaagagtasctagcactcacaatttacaaaaataaaatacaatcagctgtcatgacatcaactaaagataacaatctggtatatattgtttgttcataaaagtgttgaatttaaatgtatactcatatttccatattcagttttatttttacaaatttaaatcagattgtgttttccactgtcatttaatattatgtaatgaacatattcccaagtaatgaactattttaaaaatacatagtgtgatgtttgcataagtattccatcatatgaatatatcacaatttttcctaccagttttctagtaccagaatcttaggtagttgcaataatgtattggagtaaataacaatccaggaatagccttgtacttgtttttccgggacctctaatttccttagtatagtatttagaactagagtatagagctgttgctgtacagtatctacaatcaaacaatttctaattctccacagatcataggctttatgctccaaattaagaggctgattggacagtgagtaac

SEQ ID NO: 363965 - DNA, 498 bp, Homo sapiens
atacttctcaaaataagatataaaaatggccaaaaacatacgagacaatgctcaatatcacaagctgtcaggctgatgagcacaatgagataccaccttgcccctacaagaacggacattattaaaaagtcaaaaaataatatatgttggcttggatgtggtgaaaagggaatgcttatacacggctggtgagaatgtaaattagtacaacctcagtggaaagcagtatggagacttcttaaagaactaaaagtagatctaccacttgctccagcaatcccactactgggtatctacccaaaggaaaataaatcattatatcaaaaagacccctgcatgcgtatgcttattgcaacacaagtcacaattgcaaagatatggaaccaacctatgtgcccattgactaatgagtagataaagaaaatkttgtatatatacaccatgaaatactcagccataaaaaaatgaaataatgtcttttggagcaacttgggcaga

SEQ ID NO: 363966 - DNA, 591 bp, Homo sapiens
tctatagaaccatccaggaggcactaaactcgagatatatttattacacagcagaaaaagttgaaaaaggaaaggaggaaggtggtaaaagtgaagtagatgaagaaatctgggtagcctaaaatagtatatttatatactaaaataatacattaaggctgttctttccttgtgttgctggtggagatacagacttggaatacataaaggagcaagttactattattatgkggaacgattaaggtggagaacttcaaatgccacatcaattattatgtaaatcctaatgatgccaagaaactcacattcaactaaagggtcctatgtgtgtggctgaggtaaaatgtggccttttgaagttgtcaataaaggaacaaatagattgttgtgactatatagggtctgatgagccacttaccagcagcttccaagaggaaaatgtacaggcccaaaaaaatgtcacagaactgccaaaaggataggaaatcgatgacataaatgatgaaataactcattcttctacttgctctttattggtgttaaataattgctaaatttttatttgaatggaaaaacagaaggaaattggtg

SEQ ID NO: 363967 - DNA, 591 bp, Homo sapiens
tctatagaaccatccaggaggcactaaactcgagatatatttattacacagcagaaaaagttgaaaaaggaaaggaggaaggtggtaaaagtgaagtagatgaagaaatctgggtagcctaaaatagtatatttatatactaaaataatacattaaggctgttctttccttgtgttgctggtggagatacagacttggaatacataaaggagcaagttactattattatgtggaacgattaaggtggagaacttcaaatgccacatcaattattatgtaaatcctaatgatgccaagaaactcacattcaactaaagggtcctatgtgtgtggctgaggtaaaatgtggccttttgaagttgtcaataaaggaacaaatagattgttgtgamtatatagggtctgatgagccacttaccagcagcttccaagaggaaaatgtacaggcccaaaaaaatgtcacagaactgccaaaaggataggaaatcgatgacataaatgatgaaataactcattcttctacttgctctttattggtgttaaataattgctaaatttttatttgaatggaaaaacagaaggaaattggtg

SEQ ID NO: 363968 - DNA, 353 bp, Homo sapiens
atgaatgttttgaagtttaatttcaaggtgctggcatctggcgagggtcttcttgccaagtcatcccatggcagaaggaggaagggcaattgcccacaagacagcaagagagagtcaaacttgtatttataacacgcccamtctctccataactaactctctccaacaatgatgacattaatcccttcatgaaggcggaggccttatgatctaaccaccacttattagagccctacctcccaaaactgttgcactggggattaagtttccaacacatgaactttgagatacacaattcaaaccttagatatttccgtaatcaccaatcaaagtcataataaaatgttccttca

SEQ ID NO: 363969 - DNA, 506 bp, Homo sapiens
gatgtaaatgatatcttgttttcatttgcatttttaaacaacaaatgacgtttcatatgtttattaccactcacattgtttttggtgaaatgtctactcaaaatctttgccaactttaaaatttgatactttgtatttttaagttatagaatggttagagttccataaaygctagattcaaatattttatcagatatctaggtttatttttaacaactcatttcttcaggtcagacacagcccagagtagcaatatccttctgatttctgatagatggaacactgtgtagatgatgtgtagactttgaagtcagacagccctaggtccatattttattcctgctgttaccaccttgtagactctgactgagttgaatctcaaagtttaatttccttctctttaaaatggaattaataacacaaacatcgtgtgagaaattaataagcaagttcaagtcagcaacttacctcaaaatgaatagataaaacccaattcctcccctcta

SEQ ID NO: 363970 - DNA, 572 bp, Homo sapiens
attcaatggctaatgatgctttctgtctaaatactctgtcataattactctcagcttcatcgtaaggctgctgtctgttgaattttaagatggctgtccacaggagcaacgtcgttatttttttaaaaatatccagtgggagacagataagccctcaaaaaaaaatgagtgatcactccctcaattttcccaaggattgtatagctagtttctttttatattagtaggatatattaattaatttcatactatggatgccttcaaacattcattcttttatgaccgaacatgtctaggaagggctggctagtaagctaacagaatcatattagggctatgataggaaagaggataggagatactgcataccccatgggtaggaagccaatggtaaccastagatatatttattgtattgcacctatcaaaattccactgcaagatactcccttctttacttttaaatctggaaagattgatcttggtttatcactagtacatttaaagatgggtgttttatatcatttatcttccttcaccctgctgggtctcagtaacaatccttgaatatt

SEQ ID NO: 363971 - DNA, 540 bp, Homo sapiens
tgtttacacagtcatatgatgacttttctcttttttacaagtctgaaaaagtttctttgcaatctaagggtccaatattaccttatgtatcattatagtatgtatgcctaaatatttttgcattaaataagtagagctctcttaaagttaatatatctttatgaatattataagcagagtagaaatccatacaagtatagtataattggtttcctgtatatgcgttgggcctttttacccagtgactccaggagaaagatctgagaaaatacagaatgtagcaggacttctacgaaagttgagttaccaaagtcaaagtcagatcaaaaggaaataaaggacagaacacttcagggagtagaaaatattccctgttgggtaaaatgtaaagattccatatggtgctggaaatgtgccatgtcctcggcaccccttgtaaatgttttgttagttcactggtgrgtctgcctgtttctctctgacttgatttcacagctttggtcactgctgtccacagtcaggcaaacacaaaaggaatca

SEQ ID NO: 363972 - DNA, 556 bp, Homo sapiens
tgcaaccctgatttttttctaacctcacaatcaacatccaaagcccacatgtgatgagtaattcaggggtcatagtctctcttaggtctgagtcttgtgcatcttttcactcacctgcgacagccccacccccttccatgtggaatgcctactcagctttcagatctcagactcaacacctctggctctgggaagacatgaggctttgggaagtccgggctggctttcccttctaagtgctcccacaaagccctgagagccccttattcttcacgcagtgcatggcgattgcatgtctcaaccaccaggccacgtgtttagagacgccagccacacccttcctygtcttcgttactgctgctgacagcatgctctcagtacacaacctttgcgagaaagaataaatgagtgagtggagaagcactagccattttcagggtgaattggtggtaatcagatgctggaatttgctggtggagtcactcagatgaggagaatggccaaaaatttccttgaggtactcaatagaagtttaaaaatgaagaaataaccccaa

SEQ ID NO: 363973 - DNA, 556 bp, Homo sapiens
tgcaaccctgatttttttctaacctcacaatcaacatccaaagcccacatgtgatgagtaattcaggggtcatagtctctcttaggtctgagtcttgtgcatcttttcactcacctgcgacagccccacccccttccatgtggaatgcctactcagctttcagatctcagactcaacacctctggctctgggaagacatgaggctttgggaagtccgggctggctttcccttctaagtgctcccacaaagccctgagagccccttattcttcacgcagtgcatggcgattgcatgtctcaaccaccaggccacgtgtttagagacgccagccacacccttccttgtcttcgttactgctgctgacagcatgctctcagtacacaacctttgcgagaaagaataaatgagtgagtggagaagcactagccattttcagggtgaattggtggtaatcagatgctggaatttgctggyggagtcactcagatgaggagaatggccaaaaatttccttgaggtactcaatagaagtttaaaaatgaagaaataaccccaa

SEQ ID NO: 363974 - DNA, 586 bp, Homo sapiens
ttaaaaacaattaaaggtatcccttatagactagcagttaagtgtggctgctcattagaaatacttagtgaactttgggaggccaaggtggatggatcacctgaggtcaggagttcaagaccagcctaggcaacatggtgaaaccccatctctactaaattcaaaaagtagctgggcacagtggcgcatgcctgtaatcccagctactcsggaggctgagggaggagaatcacttgagcccaggtggcggaggttgcagtgagctgagattgcaccattgcactccaacctaggcgacagtgtaagactccgtctcaaaaaaaaataataataataataaatacttagtgaattaaagatgcctgggctccacacccagaaaagctgattcagtgtctggggtaaggtcccatcacatccgtatttttctctttcccactgattctactgcctagcactgtgaactgttacacaataactgatggagaagaatttcatctttaatttttctgttttcttaatcatgtgaaaaggcaaatataaaataatgaaacaaacagttcatgaaaagaattggacagcagag

SEQ ID NO: 363975 - DNA, 595 bp, Homo sapiens
cattattttatcataatgtgtatactcccaaatacttccaggtttgaggtgcttgtggtgaatgtctcataaatattactataaaattaggtacacaggataaagcactatagagtaagagatacatacctacactgagggttggcacgctttttatttaaagggccagacagtaaaaatattcagtctcgtgggccacatgacctcttttctaatgtctcagtctgcttttgtagctcaaaagagccacataccacttacaaacatataggtgtgggtgtgtctcaaaacctttattttcaaaaccaggctgcatgccagatgtggctagaagtacatagttttgctgattcttagtctgtactaaagatttggttcttacagacactgtggttgagaattacattattagtttatcaattttcatagattttactcccaggagaatttcacaatttctttattttactgaacactgtctccacttaaagaaaactctttttctggccttgttaaataactatatatattttttaatcatttgactctctgttsatgtaagaataaagggaagtatctaaataagtctcttttt

SEQ ID NO: 363976 - DNA, 542 bp, Homo sapiens
ggacaggaaaaaagtctcagcaagcaggcaggaaggtcagatgaagaaccggaacatggttcatcactgctctgggcactcgggcacaggagctctaggcaaccatcaacaacccctctgctgatccagccccggcttgaatagtctctcatgcttatgcctcagttcctcccatttcctttacttccagttttctacctggctgccagctaatttggatgccctctctctaatttacagcatctgttttctcttagcttctattgcctcactgttcctgctactccatgttctctactttttgcctgctctgtgtatatctatcattgttttgccacccaccatgtttcatatgcaaactctgtgagaggaattgaccaggtctgttagtcaccrtagagtacagagattctgccctcatagatactcaccaagacggtgcctgtggttctggcgctcgtgaattggtgctcacatgggttccaagtggcaagatagatagtgtgattgatagaataaatggactcccatgaataaagaga

SEQ ID NO: 363977 - DNA, 584 bp, Homo sapiens
ctaaattcaagcatctgccatatgattagccctcactatatctgacagaagtaataaacgaataacgtctggccacgtaccatctgcagatagctttggtttggccggyatggtcagtctttaagaaaatgagtcactataaggagcactaacagtactggcctagcactcttactagtcgaccatgaattgaagtgggtaggggtaaaggttctgccagccccattgaatcagacatgcacatctgagctggtctcttgcactcacagataacacagataaaaggaaacatatcccatgctcatggatgggtagaatcaatatagtgaaaatgaccatactgccaaaaataatctacaaattcaattcccttcaaaataccatcatcattcttcacagaactagaagaaacaatcctaaaatttatacggaacaaaaaaaaaaaaaaaaagagcctgcatagcaaaagcaagactaagcaaaaagaacaaatctggaggtatcacattatccaacttcatgctaatattataaggctatagacaccaaaacagcatggtactggtataaaaataggcacatag

SEQ ID NO: 363978 - DNA, 584 bp, Homo sapiens
ctaaattcaagcatctgccatatgattagccctcactatatctgacagaagtaataaacgaataacgtctggccacgtaccatctgcagatagctttggtttggccggcrtggtcagtctttaagaaaatgagtcactataaggagcactaacagtactggcctagcactcttactagtcgaccatgaattgaagtgggtaggggtaaaggttctgccagccccattgaatcagacatgcacatctgagctggtctcttgcactcacagataacacagataaaaggaaacatatcccatgctcatggatgggtagaatcaatatagtgaaaatgaccatactgccaaaaataatctacaaattcaattcccttcaaaataccatcatcattcttcacagaactagaagaaacaatcctaaaatttatacggaacaaaaaaaaaaaaaaaaagagcctgcatagcaaaagcaagactaagcaaaaagaacaaatctggaggtatcacattatccaacttcatgctaatattataaggctatagacaccaaaacagcatggtactggtataaaaataggcacatag

SEQ ID NO: 363979 - DNA, 584 bp, Homo sapiens
ctaaattcaagcatctgccatatgattagccctcactatatctgacagaagtaataaacgaataacgtctggccacgtaccatctgcagatagctttggtttggccggcatggtcagtctttaagaaaatgagtcactataaggagcactaacagtactggcctagcactcttactagtcgaccatgaattgaagtgggtaggggtaaakgttctgccagccccattgaatcagacatgcacatctgagctggtctcttgcactcacagataacacagataaaaggaaacatatcccatgctcatggatgggtagaatcaatatagtgaaaatgaccatactgccaaaaataatctacaaattcaattcccttcaaaataccatcatcattcttcacagaactagaagaaacaatcctaaaatttatacggaacaaaaaaaaaaaaaaaaagagcctgcatagcaaaagcaagactaagcaaaaagaacaaatctggaggtatcacattatccaacttcatgctaatattataaggctatagacaccaaaacagcatggtactggtataaaaataggcacatag

SEQ ID NO: 363980 - DNA, 629 bp, Homo sapiens
tggtaatttgaaaataatacatttctatggtaatacaagagcagagatatactcggtatcaaagtggtactaaatactgtttatacagcctgtttcatgagatgctgaagatgtactgtaaacagtaatacttacacgaaattaaagtctaccagtgttatccttgggctgccaattgattgtggttcatggatttcatttactttgtgtgagtgcatcaatgttcttttaaagcgcagggagagtttacaactataatttttactaatgattgctgataggtttttcatgatttagatatcaggaatcttgaaatcaaaactaatagcaatagacaagaagtgataaacagatacttagaaaggtataaggaaacaagagaagggcgcttcattacaagaatgagcttggggagcaggtgtgaccagagagtgkagaagctgtgctaaaagccaggctttgatgtaacttggaggaagtatttagaacagttagagaatagccacttcctagagccagaaagaagacagatcaacttgtaattccattattttccaggtggatgatactgaaatgtatagttaacctctctgagcttgattcttatctctttaaaaagcacattaata

SEQ ID NO: 363981 - DNA, 568 bp, Homo sapiens
ttaccaattcttcttgccagctgtggtgtctgtgtttgcccactccagggggattacacattcattttatgtggcacaagaggctgagaagaaaaattgctggcawatgagacacctgtgacatttggggtaaacacaattacataaagccctggtttatgggcttgtgtcatcactatgggaggatcaccttctccctcctccaatggatgggagacctggctataagcagcagaaggggactttataggctgttagacaggcttgacatgggctctgggggtcttccagtcaggatttgcctacccacgcaaagtgcaaaagagaaataaagcatttaaccagaaaattaagacccaaccaagtcacaagaagttgattgtagcaaaagcaatgtacattggttttttctaataactgttgacacataaatctttaattgctaataatgtattgcttatgcactctgctataccatatatatatatacatatatacatacataatctcatttatgcctcacaataatgctccaaggaaggcatttcttatactggttttacaaatg

SEQ ID NO: 363982 - DNA, 568 bp, Homo sapiens
ttaccaattcttcttgccagctgtggtgtctgtgtttgcccactccagggggattacacattcattttatgtggcacaagaggctgagaagaaaaattgctggcatatgagacacctgtgacatttggggtaaacacaattacataaagccctggtttatgggcttgtgtcatcactatgggaggatcaccttctccctcctccaatggatgggagacctggctataagcagcagaaggggactttataggctgttagacaggcttgacatgggctctgggggtcttccagtcaggatttgcctacccacgcaaagtgcaaaagagaaataaagcatttaaccagaaaattaagacccaaccaagtcacaagaagttgattgtagcaaaagcaatgtacmttggttttttctaataactgttgacacataaatctttaattgctaataatgtattgcttatgcactctgctataccatatatatatatacatatatacatacataatctcatttatgcctcacaataatgctccaaggaaggcatttcttatactggttttacaaatg

SEQ ID NO: 363983 - DNA, 452 bp, Homo sapiens
tatacatacataatctcatttatgcctcacaataatgctccaaggaaggcatttcttatactggttttacaaatgagaagctgaagctgagagtgaagatacggtttgcccaagttattacatacaggaagatagcagaccagaaattcagatcaggtcgagtcaactacaaaacccatgttctggaaccactaaggtatggactcttcctgttctgcatatcttccttgtgttcctccagatcgattctccacccttctctgcccctctttttgtcctaggaggatgatctgcatggattatttttataagttccattttctctggcttcttgttaaatgtgaccaatagaggtcactggcagggttggagggrgttcctttaactgactctattctaccatcattgcttttctcaatgcagctaattctatgtaattttctcgctcatag

SEQ ID NO: 363984 - DNA, 496 bp, Homo sapiens
gtgcagtgaccccccacacattaaaataagagagccactgcaggaagctggttccattcatagcttcagaacagagggaagataattgggctatgtagggagtgagcctatggccttggcctcattagcaacatagtttaatcatcagagccaagccaccacaggtggctgtgccccatgcaagtgttgtgcatttcatttcctgaaaacgtcagtgtctgagaatataaatattacttataatcctgggatgattgtgcaggtactaatggaatggtttcatggtattgattttcaatagctcatttgctataatcagcttaacttcatctgctagaaaacgracttctaattccagtctgaaacatagtacaagcaaatgattttagcctagtctgccaccaccttgaatcccttatggaagtaggctgggtataaatcttaaataaataaatcaactttagcttttcccagattttcatgatcttgcaagatt

SEQ ID NO: 363985 - DNA, 611 bp, Homo sapiens
tggtttcatggtattgattttcaatagctcatttgctataatcagcttaacttcatctgctagaaaacgaacttctaattccagtctgaaacatagtacaagcaaatgattttagcctagtctgccaccaccttgaatcccttatggaagtaggctgggtataaatcttaaataaataaatcaactttagcttttcccagattttcatgatcttgcaagaytgattttcttccctttaatctgtttttaataaaagagatattttcctttgagacatggtccataatcttttccatgtgtattatcattctcatagacatcctcttttcaatttcaagagaagcaaggcctcttagaggaaggtagcttttgtgactagccaaatctgcacaaagttggaggaattctaggaagacggatgggcctttggtgtaggttggaaagaacaatgtttaaaaataccctgtctcctccctgagaggtatgataccatgattctctctctttatctaaaggtattagtctaaggaattaaaagccatttttctatgagaagaaaaatgaacaagatatgggaaggtgaactagcagagcaacatatagaaataata

SEQ ID NO: 363986 - DNA, 498 bp, Homo sapiens
gtattatcattctcatagacatcctcttttcaatttcaagagaagcaaggcctcttagaggaaggtagcttttgtgactagccaaatctgcacaaagttggaggaattctaggaagacggatgggcctttggtgtaggttggaaagaacaatgtttaaaaataccctgtctcctccctgagaggtatgataccatgattctctctctttatctaaaggtattagtctaaggaattaaaagccatttttytatgagaagaaaaatgaacaagatatgggaaggtgaactagcagagcaacatatagaaataataataaaaggccttattcagaatgtaaaatacactatactaaaaggtttaccttgattatagcactcaatcattccaagactctgagattgtagctattatcatatccatatcttaatagaagtttatagagttacatgaacttcctcaatgtcttgcaggtagtgtggaaggagtacggatcagaa

SEQ ID NO: 363987 - DNA, 586 bp, Homo sapiens
acttacagctacgaagtacagctttgttcaggtcaggagcaaaggttacctttctgtatttctgggacctatttcagggaccctgtggcacttagcattctctcttcttccccaatcccctcctgcgccctcctccaacccctgaaggtattttctttcatctttgcagtttcttctttctaccttagtatgtattcagkcgatactggtcatcctagctctagactaacatgacccactggattgggtctctgtatcctaaccagagattccacagtgagaaaaatctcctgctccaaacagtttttagtacaaggaaaaaccaggacctcctaagataaagagttgcattcttggcagagaacccaaagatttttaaaatacattcagaaaattgccatcaatgctcaattgtaatctaattcaaattgtagcaggggcagggtttatccctggttagtatataacaacaccgggaagccacttccttcctgccttccagacctcccctcagttgttgcctgggtgctttttaccttgattggctcagtgtttcctgactgctaatcttgtatcaaagagaatc

SEQ ID NO: 363988 - DNA, 539 bp, Homo sapiens
ttttctgggtacatcagggccttgatttattcatttattcagcaaatatttagtaatccccaccaaatgccaacctttgttctaagctttgaggatagagcaggaaacaagacagtaaaagctctaccaccgtgaaatcacattccacattctactaggggctaacagacagacagataataaacatgtaaaaaataagataatttcaggtagtgctaaatgctatgaagaaaattaagcaggayagagaatgattaaagttgggggagaggatgtgagagctctttagacaggtggtcaggataaggcttctcagaggagagaatatttgagctgagacttcagtgatgagaacaagtcagccatgagaaatggggtagagaattccagacccagaggaagatcaaatgcaaaatctctaagttaggaatgaggttggagtattcaagcaaagacagaaaatcaatatgactggatcataatgagcaaggaaggcgatttgagagcaatcaaagggaaggtatagaataggtcatata

SEQ ID NO: 363989 - DNA, 531 bp, Homo sapiens
ttttgttccagcctcactggcgtcctttctgtttctgtaacattatggtagggctcccaccacatatcttcaattcagccatacctcttaaaattctctgtgctcagatcttcatggccaactcccttctttgtcttggcttcagtgttatcttctcatctagtgaacattctgatcaataagtctgagtcctggccagccatccccctcctcccatcaacactctcaatccctcttactctgctctacgttttcctttttccatgatgtttatcactttctaacatatttcatgatgtactcatttactttgtacatcatttattctttgtctccctctactaaaacgtaagcttcatgagggcatctttatctgttttgtttattgctgaatctcaaacacctargacagtgcctggcacaaagtagacaatagatagacagatggataaacctgttttagaaagatcactcaaaaaacaatatacaggatagtttgaaggggagagagaatggaagcttttaagatct

SEQ ID NO: 363990 - DNA, 554 bp, Homo sapiens
ttgctgcacctcgacttggggagagctgcaggaactatcttgagtcctctgctggcccttggacacatactatttaggactgaaacttctttgatcctcagccgattttggtgcagaccctccagctcttgggtctcctggatcactcttcctccaaatctagggagtgtccgctctgacatcttggactggccagttatgtatgaaaggtcagttaagtgtggggattgggaaaagatrgtctcataagaggtgatgttctggtgacagtatttttcataagataaaatgcatttccattatgaatgtttagattagaatgattggaaaaagaaggtatcaaggataggcagtgtggaaaaaaaggccaagtttatgggaataccaaacaaaataagaacacaaagagcacagtagagtcattatcaaccataagtgcagaaggatcattttgtcaatgaagtattcagataaaaaccagacaagttctgttttatgtatccaagacaactagtattgttgattgggagcctaatttgtgcatctttattctg

SEQ ID NO: 363991 - DNA, 554 bp, Homo sapiens
ttgctgcacctcgacttggggagagctgcaggaactatcttgagtcctctgctggcccttggacacatactatttaggactgaaacttctttgatcctcagccgattttggtgcagaccctccagctcttgggtctcctggatcactcttcctccaaatctagggagtgtccgctctgacatcttggactggccagttatgtatgaaaggtcagttaagtgtggggattgggaaaagatagtctcataagrggtgatgttctggtgacagtatttttcataagataaaatgcatttccattatgaatgtttagattagaatgattggaaaaagaaggtatcaaggataggcagtgtggaaaaaaaggccaagtttatgggaataccaaacaaaataagaacacaaagagcacagtagagtcattatcaaccataagtgcagaaggatcattttgtcaatgaagtattcagataaaaaccagacaagttctgttttatgtatccaagacaactagtattgttgattgggagcctaatttgtgcatctttattctg

SEQ ID NO: 363992 - DNA, 644 bp, Homo sapiens
actaggcttttattgactctgcaaatctagattgactcctgaaagggaagcatacccttccagtcaaagccttggtaaaattaccagtttttccaactgtgtcctgttgcaaaagaaaaatggagtcttactgcactgatgcaaacaactatattgccataagaatactcacagtttccaaattctagagaaaccaggcagagagaaacaaacatgctccaaatcttgatcacaggagtgtataccttacttaattattaaaggccataaatagctcaaaataagtttccttggctctgaaaaactaaaaaaggatcaccaatattccaagcaaaagtaaaaaggtttcttcagctttctgagttcagtccatttagttaaytctggttttgctcgatattcgtgaacatttcagctcttcatgagtcttgtacattttcctttattccaatgttacaatctgcaaagttatcagaaacctgattgtctcaaataaaatcagaaattgtatctgaaagcacttatcagagtcttataccctattataaaccatcttttgaaaagaattaaaacaagacaacaattgtctgtgaatagcaaaatgtccagggtagttaaaattagaaacacaattgacaaagaag

SEQ ID NO: 363993 - DNA, 644 bp, Homo sapiens
actaggcttttattgactctgcaaatctagattgactcctgaaagggaagcatacccttccagtcaaagccttggtaaaattaccagtttttccaactgtgtcctgttgcaaaagaaaaatggagtcttactgcactgatgcaaacaactatattgccataagaatactcacagtttccaaattctagagaaaccaggcagagagaaacaaacatgctccaaatcttgatcacaggagtgtataccttacttaattattaaaggccataaatagctcaaaataagtttccttggctctgaaaaactaaaaaaggatcaccaatattccaagcaaaagtaaaaaggtttcttcagctttctgagttcagtccatttagttaactctggttttgctcgatattcgtgaacatttcagctcttcatgagtcttgtacattttcctttattccaatgttacaatctgcaaagttatcagaaacctgattgtctcaaataaaatcagaaattgtatctgaaagcacttatcagagtcttataccctattataaaccatcttttgaaaagaattaaaacaagacaacaattgtctgtgaatagcaaaatgtccagggtagttaaaattaraaacacaattgacaaagaag

SEQ ID NO: 363994 - DNA, 579 bp, Homo sapiens
atcatagaagaacatcttgtagcaacctttacgttgcaatcatactttattgaaactccttgatatatgagtcttccctacttacaacatatatacccaaaaaagagtacataarcttatttgaaaatttatttgaaatatatgaaaagaaattaaaatacattcctatttttctttctcccatcccatgtagaataatttctgttcacttggctacaaactagctgatgcattaagataagcttattgctgtgttgttgggctatctcagcaagccagaaagcaaggggtgcatccagacctcctaaggggttggaagcaggaactagatggctttctggaacttcacttcttttcccagctctagacgccagtgtgcatcctgtcacacagctctgcacctgctttgtgcttctgtctctgccgggaggtttgctctgctctgctcagactattttagctactgtctgttagtcttagctcattgccccaggaaaacaatctaattggattagttaccatgattcatttagccataaacaggtatgtgatgtcacatgtgccctcccattcactgga

SEQ ID NO: 363995 - DNA, 573 bp, Homo sapiens
  misc_feature (1)...(573): n = A,T,C or G
cttgaaggagtatttttatttgctagtatatrtttggtggggagtgtatttcattgntgtatgtaaatcatgtgaaggagactggatttcaaatcttgttttgagtggtagagaatagggaaataatatgaagcacagttagacaattcactaatgaaactaacagaaaaagcaggagctaatagtcataggtgatttggaaatcttttaaatcctcactattgctttttgcagcaatttctacattgcaaagaaggccacgccaatatataacccctatcccatatgctctttttccaatgtgaagttgacacattgccatcaagaaatagagtctatgttccttcccacattttttttaacgtttattttaagttcaggggtatatgtgcaggtttgtaatgtaggtaaacttgtgtcataggggtttgttatatagattatttcatttttaacaaacaacatcttttcttaaaaaactttaagttcaagggttttttatataggtcaacttgtgtcataggggtttgtggtatagattattttgccatccaggtattaagcctagtactc

SEQ ID NO: 363996 - DNA, 556 bp, Homo sapiens
ggcttgcttccccttcgccttctgctataattgtaagttttctgaggcctcccagccatgctttctgtgcagcctgcagaactgtttgccaattaaacctgttttcctcataaatttygcagtctcaggtgtatctttacagcagtatgaagacagatgaatacaccccactcccccaatatctttcaaccttggcttcttattcaggtcctagctcaagtgctgcctcaaagaggccttgcctaaataccgctttcctcaccctccccccaggcattctttgcccggtcattttgttgttgttgttaattttctttatctgaaaatgccctgcttatactaatttgtttcttgtgccttggatttgtgattgtaattatagaattaagttccattaggacagtgtgggggtctatcttgtccaccgctgtaactctggtgcctagcattttgccttgcaaatagcaagtggatgctcaataaatatttattgaagatgaaggaatagtgctgtggggagtaaccacagccatcagggaagcttcacaccaaaggt

SEQ ID NO: 363997 - DNA, 579 bp, Homo sapiens
tagcattttgccttgcaaatagcaagtggatgctcaataaatatttattgaagatgaaggaatagtgctgtggggagtaaccacagccatcagggaagcttcacaccaaaggtaatgcttaaactgatgcttgatgtatcccatttaagatataggattaacatcaaagaaatgcaaatcaaaaccacaatgagatgtcatctcacaccagtcagaatgcctattattaaaastcaaaaaaaacaacagatgctggcaaggctgcagagaaaagggaatgcttttacactgttgatgggaaaataaattagtgcagccactgtggaaaacagtttggagatttctcaaagaacttaaaacagaactaccattcaacccagcattcccattattgggtatacatctgaaaggaaacaaatggttctaccagacaggtatatatacttgtatgttaattgcagcaccattcacagtagaaagacgtggactcaacctacgtgcccatcaatggtagactgaataaagaaaacatggtacatataaaccacagaatactacacagccataaaaaatgaaatc

SEQ ID NO: 363998 - DNA, 566 bp, Homo sapiens
ggcctggaaactccttttttgatgacaagggtgaaatggtaatgcgtaaaaacacacagaactatggtgtttgagagggcgaagccttgggaaacaagaacraggatggagttccaagttgtcataggtaagactagcaaaccaggaggaaaggtcaatattagcaacactacatagatgcctccaatatatgtttccaattaatttgcagaaatacttaagtgccttactataatgtcttgctaaggacatggctcatgcagaagagttgggtgaagacttgaaaacagaaattgagaaagagtatgaaaactgtggcaaaactggaaaatgtgaaatgttacgaattcctggtacatggaaggatacctaatgataggctttaaatttctattatcaggtatttggatagcttaagctatatctctcctcttacagtggaaataaatcaacgtagcatagcaaattaaaactcaggttttggaatgactatagaatagagtgactttgaacaaataactctctgaatagcagtgggctggaaaactagctctccacaagaaaac

SEQ ID NO: 363999 - DNA, 573 bp, Homo sapiens
ttctctacccatatttatgagggcttgactttgcctctctgctcaacagtcttatataaatatgccatacttttttatgtgtataagtaattcaaatgattgatgtaatgtgtgtgtgtatttgtgcacacatgtacacttgcataagtatgtgtgcacttgtgtgtgtgcagaggcctgcacatagagacagacatttcaacttcaagagttgacctcagttaggataaagtaatgtgactttgggagattacaaaagatcctacctgttttaaatttatctcctaccaacgaaacactgacttttcttttaatgccaaacaatgagtatctcttggaaatatcatctaaccccatgacttcaactaccataktggtaactcctcaaagctctagccttccagagaaagccctagcccaaaaacatatatttcaaatgaaaccaatatagtctgcagactactaaaaaggccaggtgattgatttcttttcttcattaatttgagtgcaatttgcttccttattgatataagtggtttatctcattggaaatagcatctttatttatacaat

SEQ ID NO: 364000 - DNA, 544 bp, Homo sapiens
taattattatctcatgtaagtttgcaattctatactacttcatccagccaactgcttttcttttttctttttctttgtctttaatggcacaattccacaaagttaatatacctcccctttaaatggccacatcatagtttatggagttatattttaatttagataaacatttatcagaacaacttcaatttgcttaaaaaatattacacctaaatagactcttgcaacaaaataaccttgttctaaactataactttatgatcacataaagaaaaaactcaataccaacaaaaatggcccaggaaaagtaacattagttaacactgaataarctttcagaaaactcttaactctagcaagagcaaggtagtaaaatcagatggaataatttaagagaaaggtaaaatgtctggggtatgcatgttcactaggaaacatttttccagaaaatacattgtcataatgttttatggaacccataatacaatcatatagtattatgagttcttttaagtcctgtagagttatagaagaagtacatctt

SEQ ID NO: 364001 - DNA, 593 bp, Homo sapiens
aagaaaaactgagagaaaaaaagaaaaaagatatgcctccaaaatagcactacaatctaaagagtaggcttctaagcttttagtgttctgaataaggccattgtccaaagttttaaattcatgtgttctgatactaaaattgcttgccacagagctactataccctactggcttttttatgtttagggactcaaataacttttaatctattgaatcaaatatcactcttgggaagaaaatattacttyattcatatatttatttaactgatatatgaaatgagacccagcaaggttgatcatcagccacatgtcatattaaaatacaaaggtgctgaggctcaatagtaagcataatattccttttatgccttgaatcctcagccagttgttaacaagtccaaaggtaaggatcacaatgttcaaaatgaccaaataccaatattattgatcacttaaggacagaaacaaaaacaaaaaaccaggaatgtgccatgggtaacagtgtgaacacacacaaaaaaatgtcttctggaaattttaatagaaatctctgtatttggcaatactaaaaatatgctttttaatgtcttg

SEQ ID NO: 364002 - DNA, 620 bp, Homo sapiens
gagtaactaattatagccagaatgttgtcaccaatctactgtaggcaaaacatttgtctcctctgagccttgatttccaagtctatcaagtagaaatgttaataatgatccttgtagtattgttcaaggattgacataaaattccacatatgaacaccatttggaaactctaaagcactctagcatataaaggataaaaggtcaggaaacggcctccacatggcaaattctcaaatagtcccattgccaattttgttgttgacattcttccattcataaaatatatgcaatttaagttgcaagaaaacagatatttctattataatgtgatatattcattcctaaaagcaatcttgtgttttctacaaaatcacacataaaaatcatacagcttatgataaaaacagagttggggcagtcaactcaaagtccatacacctttttagctaaaacataaagtcgaaacaactcaaataaaaatactagcrtaattttaaaggcatttagattcctaataaattctatactaaataaatgattacagtggaatgaagtaagaaaatgttaaggctgaatagttgtggggacaagggcaaaatgaactaagtttggggccaatt

SEQ ID NO: 364003 - DNA, 675 bp, Homo sapiens
tatattataatttgcatatgcaaagatacatatttataaatacgttatatctttataagtctgtactatcttagtttcctattcttaaactaatcaaaggcaagaaatagggtaasattctggtagatgaaataaatgttattctgactgcattatttttaatctttggtgcactaaagtacaattgtataattttgcagacttctagcctttccttggaatgatatttgtcttctcaatccattttagtttctttggaaggaagataatctctacatggcctgggcataaaagctttgacagtaccaatttatttttacatttccttaaagaaggagttttaacaaagcttgtaaccagatcactcctaggctacagagttaacatttattgaacgtctattctgtgtgccaattacttacagaaagatttcataattttaatctttatccctcctttataaatgaggctcacaatggctagtaatgctcaaggtcacaaaatcacttagttgtagaatccaggacctagttgtcttgaaaccaagcctgggacacttccttctctacctctggtattcagcccttttgttatattaaactcaactgacttttacaaaaagaaagaaaaacaagtttcgaaaagattagcatcttactatatttaagccagact

SEQ ID NO: 364004 - DNA, 538 bp, Homo sapiens
catttcctacctacttgcccgtttcccattatattttactctgacctagggaaagtacaggatcagagataaaggtgaaaatgattcccagaaagacaggaaaaatttgaacttattaagctctattaagttttagataaggagttaggcccagagtgagaaatttactgtggtgataacagactcattctcttgaaaacctactagtgtatttaatgaggcagatagtgaatttgcatcagtcttcgcactttcccacattccacatgcyatcccattttcttccagttcaggctgagaacacactgacacacaaagggtcagagaactattcccagagttcattcctcctcataaaatagattgtggtttttttctcccttctgcagaaaatgttctttccttctaccatatccaatccatgttggccatttagtaaaatgaacaacttaagagagaagttatttttgtttgttaaaggtgttttcctgagttttacaacgaaagataaaatgttgaatataaaaatagaaaagac

SEQ ID NO: 364005 - DNA, 567 bp, Homo sapiens
cactgacacacaaagggtcagagaactattcccagagttcattcctcctcataaaatagattgtggtttttttctcccttctgcagaaaatgttctttccttctaccatatccaatccatgttggccatttagtamaatgaacaacttaagagagaagttatttttgtttgttaaaggtgttttcctgagttttacaacgaaagataaaatgttgaatataaaaatagaaaagaccccggtgggtctttctagtgtccagccccagggccttccccaggccccagctagctccttgtcacttctttattcctgacttcagtccccaggggtcagtttccctttccctgaggtggctgtgccaccaaccagttaatcctggacattctttcttccaggaatggctatggaaagggacagaatgtctcaaactcccctgtcaccatccccatctttgctgtcctaaaaacgaaagaagctaagcttccttttctggtttaaccagtcagtgcttagtcatgtaagaaatgcagaggagacaacaaaaacatggatactattatacaaag

SEQ ID NO: 364006 - DNA, 606 bp, Homo sapiens
cccattcttaattatccctgggtaagattgttttacctgaagaaatttggaccggttttccaggagcagtttgttgtcggtcttcactgcttgttgaaacakgtagtcgcagaactgctccctcacaaatcctgggctggccaccaggatgcactttacaacatcaaagtgtatgtggcgctggatagcctggaccacctgttcatagaaccgctccaaggcccggtcatgctgagagcaattgcctttccttttcctagggatgttcacctccaccttggcccgagtgagggtcatgctgggagtgactaagcagatatgggcgaggccttcctgcatgaccacagccgccacatcagcgctccaggctgggtcacaggcctgctcgatgcgctccagtaccacactatcccactgcttcttggccagggtgaactggcggttgggctccagctcgatggtgtggtaagcccccatcttgacatactcattctcttggatgttggtccccttaacccgcagctggcaggcttgagagtcgaagtcgatggcctccacgcagagagtgagggtagtgcggacccggttgctgcccacgctgcccgt

SEQ ID NO: 364007 - DNA, 555 bp, Homo sapiens
ttattaggaagtggaaatggagaagtgggattgcctctttaagagaccgatgaatagaaaaaacaaaagaatctaaaagtttcttgagagcttagatggagtggagggcagagaagtcctgcacacatagcttctcactgtcttttctgtctttctctgtgtggattggaaaggggaactaaccagcctgaacagatgaaacagggatgaaaggaaggaatctgagtttggcataggcgtgtggaaggaaaataaatctcggatccccaaactcattaagccaaagggaaaagttaagctgggaactgggtcacgcaaaactgccttgcctcttggtttttaaatgagatggctaccagatgaaaagctacacacctcgctcatattttgcccacaaggaaattctcagtgagcgccaagatctttaccataaagtgtttctatkaaaatttaccatggcaatgtaaatagatagcttctgttttcaggtacagtcacccctctgccctcctgacacaaatgcatatctgattgttcccctgccccatttgtcta

SEQ ID NO: 364008 - DNA, 542 bp, Homo sapiens
ggaactcttgttgaaaattaactggtcacaaatgtatgggtttttttctgaacactcaattgtattccattgrtctatataatgtccttatgccatgaccacactcactgtcttgattgctgtagctttgtagcaagtttagaaatcaggaaacttctcaaaatttctcccattgtgtttttcttttccaagattggtttttctatttagaatttcttgtctttccatatgaattttaggatcagcttgttcatttctgaacaagaaagtagttggaattttgataaggattgcattgattttgtagatcaatttggggaatattgccatcttagtaaaataaagtcttccaatccattaacaaagaattatttctattttttaggtcgtctttaattactttcaacgatgttttgtagtttctcttgtgctattttctctttaccatggtccacatctccaacttcagaacctgctgctgcctgttctgggaatggttgctatcatcagacctgagatctagaagtagtagtaggagaggg

SEQ ID NO: 364009 - DNA, 593 bp, Homo sapiens
ggcaaaatcataactcaatacatggaggtgatacatcgttacggcctcaaaaggtgggatatcttggagtcttatgggtcatcagtggatttaaagattctctgatctgcaatcgggttaaggaagccaggctttstctataatcttggggtcagcagaaagggtataatattggcggtcagcagaaaggaatgttaagctctggcctgtggcatgatttccctccaggccctcaggaagaaatttagaacaaagaatgacagacagagttcagtcctcagttcccccttatctgaggtctacctgccagtgatggcattttccattttccatctggtaggggtccaggtttctgaaaaacaactcagggacatatgttaagatgttatctttagtttctacagggaaccaaacatgttctggctctaatttccttggctattgttttaagctattatcaccttcttgcttatcacgctgttcctttacttttcaaggctagctaggtacttggaattttccttgaaggaactcaagactttccattattttcaagcttgagaaggtggggcccgcaggcccctaagagggct

SEQ ID NO: 364010 - DNA, 593 bp, Homo sapiens
ggcaaaatcataactcaatacatggaggtgatacatcgttacggcctcaaaaggtgggatatcttggagtcttatgggtcatcagtggatttaaagattctctgatctgcaatcgggttaaggaagccaggctttctctataatcttggggtcagcagaaagggtataatmttggcggtcagcagaaaggaatgttaagctctggcctgtggcatgatttccctccaggccctcaggaagaaatttagaacaaagaatgacagacagagttcagtcctcagttcccccttatctgaggtctacctgccagtgatggcattttccattttccatctggtaggggtccaggtttctgaaaaacaactcagggacatatgttaagatgttatctttagtttctacagggaaccaaacatgttctggctctaatttccttggctattgttttaagctattatcaccttcttgcttatcacgctgttcctttacttttcaaggctagctaggtacttggaattttccttgaaggaactcaagactttccattattttcaagcttgagaaggtggggcccgcaggcccctaagagggct

SEQ ID NO: 364011 - DNA, 517 bp, Homo sapiens
tccacttcgacccccatcgcctggtctccttcctctccgtgggctcggcttctccctacctcttacaaggcgctcccgtcgtgtttccactttgtctccaattatatctaaatgcaacccaccacagatgctgacattttaaatgtttagttattatagctacttgactaattgccgggaccgacggcggcgcttctccttcgcctcccgccggcaggagaggacggggcgggagaggaaggggttagttgtggttgtagccgccactccccggcgcccgggacccgggacgcccagtcgggccctgcagagggtgtcctacctgggcaccagcggcccctcgcctccagccagggcaccgaaggcgcgcccggcggratgcagcgaactgcctcctgccccgggacagtggagcggcagaaggtccaaccttccggttcgcccacgcccgcaaggtggaaaaagtggggtgaaatcggggaaatttagcgaaattggggcgaaagaagagagacca

SEQ ID NO: 364012 - DNA, 549 bp, Homo sapiens
tttctcttttacagaagtatttcttccagtataaattgtcattaaagaaaatttggaggtcaggcactgtggctcatgcctgtaatctcagcactttgggaggctgaggcgggtggatcacttgaggtcaggagttcgcgatcatcttgggcaacatarttaagacccggtctctacaaaaatgaaaataaaattagccaggcatggtggtgcacacctgtagtctcagctactcaggaggctgaggccagaggattgcttgagcccaagaggtcaaggcacagtgagctgtgatcatgccactgcaccccacctcgggtgacaaagcgagagcctgtctcaaaaatataaaataatttggaaaatataaaaatgaaaaagataaacaccacagtttgctgctctcagataccaccaacacaatcctggtgtatttctttctagctgtttttttgctttttattttatatagatcatttcttttcattgtagtaattgtactgtataaaatttcgtgacaccaaaattctgagtccctttgggacctct

SEQ ID NO: 364013 - DNA, 569 bp, Homo sapiens
ctggttcctttctaccttgtttcataaataacctttccaagtccataatttaacctttaggtaatgtattagtccattttcatgctgctgataaagacatasctgagactaggcaatttacaaaagaaagagttttatttggacttacagttccacgtggctggggaagccttacaatcacggtggaagacaaggagtcagtcacatcttacatagatgacagcaggcaaagagagatcagatctcgtgagacttactcactaccacgagaacagtgtgatggaaatcacccccataattcaatgatctcccactgggtccctcccacaacacatgggaattattggagcataattcaagatgagatttggttggggacacagccaaaccgtgtcagataacttctgaattaaacaaaattattatttttctcaataagaacacatcttctttggcacattttatatacaattttttttttcaggaaaaatgcactgaacacatttgcgtttctttgttttaaagcaaatgacaaagacccagcttaccagctttacttttttaaaacc

SEQ ID NO: 364014 - DNA, 569 bp, Homo sapiens
ctggttcctttctaccttgtttcataaataacctttccaagtccataatttaacctttaggtaatgtattagtccattttcatgctgctgataaagacatagctgagactaggcaatttacaaaagaaagagttttatttggacttacagttccacgtggctggggaagccttacaatcacggtggaagacaaggagtcagtcacatcttacatagatgacagcaggcaaagagagatcagatctcgtgagacttactcactaccacgagaacagtgtgatggaaatcacccccataattcaatgatctcccactgggtccctcccacaacacatgggaattatkggagcataattcaagatgagatttggttggggacacagccaaaccgtgtcagataacttctgaattaaacaaaattattatttttctcaataagaacacatcttctttggcacattttatatacaattttttttttcaggaaaaatgcactgaacacatttgcgtttctttgttttaaagcaaatgacaaagacccagcttaccagctttacttttttaaaacc

SEQ ID NO: 364015 - DNA, 569 bp, Homo sapiens
ctggttcctttctaccttgtttcataaataacctttccaagtccataatttaacctttaggtaatgtattagtccattttcatgctgctgataaagacatagctgagactaggcaatttacaaaagaaagagttttatttggacttacagttccacgtggctggggaagccttacaatcacggtggaagacaaggagtcagtcacatcttacatagatgacagcaggcaaagagagatcagatctcgtgagacttactcactaccacgagaacagtgtgatggaaatcacccccataattcaatgatctcccactgggtccctcccacaacacatgggaattattggagcataattcaagatgagatttggttggggacacagccaaaccgtgtcagataacttctgaattaaacaaaattattatttttctcaataagaacacatcttctttggcacattttatatacaattttttttttcaggaaaaatgcactgaacacatttgmgtttctttgttttaaagcaaatgacaaagacccagcttaccagctttacttttttaaaacc

SEQ ID NO: 364016 - DNA, 599 bp, Homo sapiens
tattaatgacatataatcgctctgatatttttatattatccggtggttacatacagtgtttacacactgtgaaattaatgaaacattatcactctgatatttctttaataaccagtgtttacatgctgtcatattaataaaatatcatggctctgatatttctataatatccagtatttgtaattgtaaatgtaagcactgtgataataatgaaacatcatcactctgatatttccatagtattcagtgtttacacaccatgatattaatgaaatatcatcrctctcatagttttataatatccagtgtttacaccctgtggtattagtgaaatatcatcgctctggtatttctataatattcagtattacatactatatttctgatatttctataatattccgtatttacagcctctgatattaatgaaatgtcatcgctctgatttgtctgtaacatttagtgtgtgcatacagtctgtgatattaagaaaatatcatcactctcatttgtctgtaacaaccagtgtgtgtgtacacactgtgatattaaggaaatatcatcactctgatatttccattatatccagtgtatacaca

SEQ ID NO: 364017 - DNA, 538 bp, Homo sapiens
aatatctcctttcggatattatgaatgatattacagggtgtacacccactgtggtattaggaggaatttctggcattatttccagattaattgagaattacagggccctctttattcttccccagtcatctgccaaattgccagagaagctggaacatctccagttgttaggaaatcttgcaattttggagataatattcttttgttcattcagcctccagcatggagacaaccttgcgtgtatgcacacaggtgggcccattaggtactcactcacccatcttaccactaccaattactacttcaaaagtcctaattcagtggttgagtgtcttstttctggcttaccatagtcacagtctttgtcactaaaaatatgtgcttcttccagcacctgctgtgtcccatgtcaaatggccccatcatcatctcttcaggaaaggtgttccatgaggatcactggaggacaatgagggagatacagacttgaatggttttatttgtcaaagctgaggctctgctgaccttagagtttcat

SEQ ID NO: 364018 - DNA, 587 bp, Homo sapiens
acttctaccctcaaagaagtccacacaaagatctggaagaaaggtattccaagcagaggaaagagcaagtgcaaagcactgaaatggagtcagcttggtgtgtgcgagggacagaagaaatgtcatcctggaatgcagtgcatatggaggagagtagagggaggtaaggccagggagacaggcaggaagcargtctggcaaggtcactgcaggccattgtgaacacttgttttattctggtctaataaaaaccatttggaagtgctaagcaggtggtgtaatgcaatacaattctgacactaaccacccagagtcagcactgactccacaagccaaaaggcatggtctccaacagcactgtccctatttagaaaccagctgcaagtttgagggtcttcagaccacccacacttctgaccaactagctacaaattctaagattttcatggccccctcaggtttgttaattgttagaatgactcacagaactcccgtgaactaaagtacgcaggagagtactggtaattacagttttatgataaaggatacaaatccgaagcaggcaaacaaacagacacacagggcaa

SEQ ID NO: 364019 - DNA, 613 bp, Homo sapiens
cagaagaagtactagaatagaaaataagcaaaatatagaaacagaatacagaaagacaaagttcaaaatacagaaagacaaagtagggaatgattagttctaactaggtggcacagggaaaggtagagaggtgggtctacctctcacggatagcataagcaaaaacatggaggtatgaatggcatatttagtgaagggcaagtagtgcagtatggccagtatggggcagtgaccagcatggggcataaggaaggcatagggtaggttgggactgaatcctagagcgttgtaaagtcccagcctggaactgaaccacgtatcttggagagcaaggagccactgatgattctgaggaggtaaaactatctgaactggatcagagagaaagataactcatgcaacaatgaagaaaagtcgaagttggaaatttgatatgtcatgaagctactgaaataatccrtaagagtcaaaaagtacttaaattatagcagaatcaaggtattggactgggaagaaagttcaaaggaagaaaggacagaacttggcaattgatgatttggatgtcaagagaccctggagtttaaagagaatggagaacaagaaatggaagacg

SEQ ID NO: 364020 - DNA, 561 bp, Homo sapiens
cagactcctcaatccattctcgcagggatctgggaagttgatagatgtcatgcttctcagtaaaatggctccaaaaaaaaaaaaaaacagggggtcaggaagaaggtagtagcttggcccatggcttaatgctaatcacctccagacttaagaacagaaactttgaaggccagcctttactcccacagcaggttccaaagcctgagaagctggtccttattatccaaagtcttttttttaactcctagaatcagctccatcaagtggagctaaraaataagtaagtgttgcctagtgctgccagcaaaaagaaaaaagtgcaaaaatccagctaattactcaggacatgttggcagacacctctgcttgtcagattcctggttgtctgaatggttatttacatctgaattaatttacactatgggagtttaaatgcttgttttttttttttaagtagtggcaaagatcctaccagaaactatgctggttccaaaaatgtcttcttcatccttgatttattcgtgggcataggacactctgccattgggccatgactcttgt

SEQ ID NO: 364021 - DNA, 561 bp, Homo sapiens
cagactcctcaatccattctcgcagggatctgggaagttgatagatgtcatgcttctcagtaaaatggctccaaaaaaaaaaaaaaacagggggtcaggaagaaggtagtagcttggcccatggcttaatgctaatcacctccagacttaagaacagaaactttgaaggccagcctttactcccacagcaggttccaaagcctgagaagctggtccttattatccaaagtcttttttttaactcctagaatcagctccatcaagtggagctaagaaataagtaagtgttgcctagtgctgccagcaaaaagaaaaaagtgcaaaaatccagctaattactcaggacatgttggcagacacctctgcttgtcarattcctggttgtctgaatggttatttacatctgaattaatttacactatgggagtttaaatgcttgttttttttttttaagtagtggcaaagatcctaccagaaactatgctggttccaaaaatgtcttcttcatccttgatttattcgtgggcataggacactctgccattgggccatgactcttgt

SEQ ID NO: 364022 - DNA, 534 bp, Homo sapiens
taaacatgcactcattttccaaggtcaaattctctatcargtgtgccttcccttcccaaaggagctctggccagacacccgcttccttcccaagagggtatctctgtgcaggcagaaacttcctaccttgatggcatcaagcatgaattctgtggtccacacactgtcccctggcttctactgggttgcttctggtctcatctggacaccgatgtcctactgcagggtcctagctgatatgtcttggtgtcttgatgttctgggatgttgtgttgaccccaaaagctgcagttctgaagtctggggtctctggttcccctcccaaaccttgactcttcactattgcctgctccttcagcgcacctgcattctcactcaggcctgtgtaaattgtgaatcccacaggcagaacacgtgggtataggcaaccaggcacatgacccaaagctccagcactgtcctgctgcttccacacaattttcactttctagggctgttgcaacaaattaccactaactgggtggctccaaacaa

SEQ ID NO: 364023 - DNA, 534 bp, Homo sapiens
taaacatgcactcattttccaaggtcaaattctctatcaggtgtgccttcccttcccaaaggagctctggccagacacccgcttccttcccaagagggtatctctgtgcaggcagaaacttcctaccttgatggcatcaagcatgaattctgtggtccacacactgtcccctggcttctactgggttgcttctggtctcatctggacaccgatgtcctactgcagggtcctagctgatatgtcttggtgtcttgatgttctgggatgttgtgttgaccccaaaagctgcagttctgaagtctggggtctctggttcccctcccaaaccttgactcttcactattgcctgctccttcagcgcacctgcattctcactcargcctgtgtaaattgtgaatcccacaggcagaacacgtgggtataggcaaccaggcacatgacccaaagctccagcactgtcctgctgcttccacacaattttcactttctagggctgttgcaacaaattaccactaactgggtggctccaaacaa

SEQ ID NO: 364024 - DNA, 552 bp, Homo sapiens
atgtgctacagagctggggtctcaatgcgagggaaatggagagaggtgatgcaggctgaaaactgaatgctcttcaagagtttttcacatgaattcatgctttattggtctctaacagattattgartaagtcagcacgtttgaggggttctttagaagctgatgtcagcagatgtagctgtgtcgttcccattcctaaagatgtcccttggtcctatcctcatagacttaatgctgggccaacccattaggcattgctgagattctcattttcttatcttacactaagtctggggaaaacactacatagtcaactaggccacaaactggaatattccaaagaaacaaattacaaattatttcacaaccaagaaatgcttcatttttccaaaatggtcaatgcaaatcaaaatgctgaatcatgcagccagaaaaaatatatcaaatgataaatgcatttctgcatcaaattcaagttttgccatcctgatgactgcaaatgtgaatatttttaccagtctttcttccatgacaaaaagaatcagcttccca

SEQ ID NO: 364025 - DNA, 595 bp, Homo sapiens
ctcgctctgtcatcaggctgtggccactgcaacctccgactccctggttcaagcgattctcctgcctcagtctcccaagtagctgggattataggcatgcaccaccatgcctggctaatttttgtatttttagtagagacaaggtttcaccatgttagccaggatggtctcgatctcctgacctcatgatccacccaccttgggctcccaaaagtgctgggattactggcctacccctccttttcatgtgtaacatgtggattcagaagaatgcgacctccttttttcgctttgccctttccccttttgcccacttttccgctttaaatattgaagcccttgaaatcctcttcagaaaaagcacaggctacagatcctacggtggcttatgtctccttttcccaggcatgtcttcaaccttggcaaaataaacctctayattggtggaggcttgtgtcagatactttttggtttacaatggtaacggaaactggaaagcagatggatgagtggctgatcactgacttagaaggctgaatcctaaaccagcccaggtacctttgggagtatggatgaaagtgggggccaaatataa

SEQ ID NO: 364026 - DNA, 533 bp, Homo sapiens
gtctactcagagtagcatttacatacattagaaaaatagtagattcatgtaagtacaaaacacataattgattcattcctaagcagttctcagtacatttatggatttcctytcccataaggtttagtagttaagagacttaacttacctaagtctcagtttcccataaatgttaccaagaatggatgcagttgttcatctgctctttggatgctgtaagatccatatctttttaataaagttcccttttatatgtactagcttgagtaagtatctaattgttgcacccaaacatgacctgagaaaagcagtgaagatatatacactactcaaagttgcccagttggtaagtgatagagacatgatttgaaattagtacaaaggctattctactttgctacatatttatagatcttcgtaatttttcttcagtgagtttttttttttccacaaaaagcacatttatttgaggtaaagagaagtcttgctgaaaggatgacatttccaagcagtcaaaactcagctgttagtgg

SEQ ID NO: 364027 - DNA, 575 bp, Homo sapiens
acatgataaaagccacactttaaaatatacttgaacttgtctactcagagtagcatttacatacattagaaaaatagtagattcatgtaagtacaaaacacataattgattcattcctaagcagttctcagtacatttatggatttcctctcccataaggtttagtagttaagagacttaacttacctaagtctcagtttcccataaatgttaccaagaatggatgcagttgttcatctgctctttggatgctgtaagatccatatctttttaataaagttcccttttatatgtactagcttgagtaagtatctaattgttgcacccaaacatgacctgagaaaarcagtgaagatatatacactactcaaagttgcccagttggtaagtgatagagacatgatttgaaattagtacaaaggctattctactttgctacatatttatagatcttcgtaatttttcttcagtgagtttttttttttccacaaaaagcacatttatttgaggtaaagagaagtcttgctgaaaggatgacatttccaagcagtcaaaactcagctgttagtggcact

SEQ ID NO: 364028 - DNA, 575 bp, Homo sapiens
acatgataaaagccacactttaaaatatacttgaacttgtctactcagagtagcatttacatacattagaaaaatagtagattcatgtaagtacaaaacacataattgattcattcctaagcagttctcagtacatttatggatttcctctcccataaggtttagtagttaagagacttaacttacctaagtctcagtttcccataaatgttaccaagaatggatgcagttgttcatctgctctttggatgctgtaagatccatatctttttaataaagttcccttttatatgtactagcttgagtaagtatctaattgttgcacccaaacatgacctgagaaaagcagtgaagatatatacactactcaaagttgcccagttggtaagtgatagagacatgatttgaaattagtacaaaggctattctactttgctacatatttatagatcttcgtaatttttyttcagtgagtttttttttttccacaaaaagcacatttatttgaggtaaagagaagtcttgctgaaaggatgacatttccaagcagtcaaaactcagctgttagtggcact

SEQ ID NO: 364029 - DNA, 565 bp, Homo sapiens
ccagttttattgcctgcctgttcttgagaaaacttgtgataaatggaatcaactgaaccttttttattttcaaatctgctcacacatagccttagggtcatttgtgatgtgagactgaaggggactgggatgcagtggatgacagctgcccaccatctgtctggtcctaaaccatccaccttcccactgtaactgctcaggccctcctagccagaggcctgtcaggagccaattgagctgtatctatccaggtatcgttacacatttgtttcagttgtgattattctttctggcagrcaaagccatccttgtggaaggtagagcaggacaatcccacccaggcacatgaaccaggcagctggcagagtgcattgaggtggctctgccatctgctgctcagaaggaagggcctgaggctcacacatgcctccaaagcatgtaaaccccagacttcaccaaaccaagtggtaacacctccatccaagtatcgtcagcccttctggtcacatggatgcattgtgtgatttctcatcctcttcaagttttaacccttgtcattcacttt

SEQ ID NO: 364030 - DNA, 601 bp, Homo sapiens
gcacacagtgataataaaataaaaagcaaccaacttttcattagttttattattgcttttcaattctctacagaaaatgcaccctcttactgtctgcacccaggagttgttctcccactgccaatcacttccctgcttggtattccatcgttccccacctcttgaatctgagcaagcctgggacttgctttgaccaatagtatgtggtgaaaatgacactttgggacttccaagccaagacctcaagacatttgcaaattttgctctagtcctcttggaaccctgagacctccatgtggggaagctgagcatggcctccttgaagatagaagaacacatgaaaagagaggtccagctgatagccagcaccagttatcatcaggcaggtgagtggggccatcttatatcgttgaccccaatccagccatcagatggctacagccacatgagtgactccaggcaagactggcagaagaactycccagctgagcccaggccaaatggtttacccacatatttctgagcagttcgaatggttgtttgaagtcactaaattgggttctcatcctagctcttcctcttagtggtgagaccacgaaca

SEQ ID NO: 364031 - DNA, 547 bp, Homo sapiens
tgcagtggtgacgaccaacagtgtctccagtcattaccaaagtcctcttgtctgtgaaatgcacctcagttaagaaacaccgctaaatctctgattattaactaaatcagagatgatctrtaatggtgtaaagagaatgctgcagagtatcctaggactgaagaagaatcctaaaggaggatccacttggaaagagtccatccctcaaagctgggattcagaacttgctgaagatgtggctacagtccactgtgtggggtggttctctgagttaccctgaccagagctggtatgcagttacaagcaggaagtagtcctctgagcaggggtgagtagaaaatggaggaagagaccagcaagcaggagatacccctcataagtgcaggtggactgaggctgggagcagattgctagggggcctgcaagactcactggaaacccatccctggggatgttgctgaaactccatgaggatgagcgccaatgttctctcctaacatgttgctggcagcagctcttggtagaagccagaagccaacagaagagc

SEQ ID NO: 364032 - DNA, 648 bp, Homo sapiens
aaaaaaaaaaaaaaaagaagaaaagtttggtgggttcgtagtatttttttttaaattttagttcatattcgaacaacagaggagacaaggggacacaggtaaagtttgcctgtaaggttaaggagtattttgtttttcattcatacagttaactacagaatattaagacgtggtcaagagtgactgtatattgggagaaaaacgggagggtctggacaagaatgttgagtggccaccttgagggcacaggctaggcagggtaaatatgaatttatgaatgattttattttcttttgtttttctattttgtcaagttttctgctttgtgtatatattacarttgtgatcactaacaaagctcttactaaaatagatgcagttttgttgaactactttgaagacagaggtcaaagaaagaattttttggtgaatctaagttgttttatttaaaaaaagaaagttctcccagtatgcatttacttagtgcctgctttttgcactgcaagaagcagtcatttttttcttgaaatcatcattatttaatacttttcctggtggataaaaagatgcagaaccaaagagcacacccagtttaaggctcatacttgtatagccctctaggagtgtgttaatccttttgcattgcta

SEQ ID NO: 364033 - DNA, 648 bp, Homo sapiens
aaaaaaaaaaaaaaaagaagaaaagtttggtgggttcgtagtatttttttttaaattttagttcatattcgaacaacagaggagacaaggggacacaggtaaagtttgcctgtaaggttaaggagtattttgtttttcattcatacagttaactacagaatattaagacgtggtcaagagtgactgtatattgggagaaaaacgggagggtctggacaagaatgttgagtggccaccttgagggcacaggctaggcagggtaaatatgaatttatgaatgattttattttcttttgtttttctattttgtcaagttttctgctttgtgtatatattacaattgtgatcactaacaaagctcttactaaaatagatgcagttttgttgaactactttgaagacagaggtcaaagaaagaattttttggtgaatctaagttgttttatttaaaaaaagaaagttctcccagtatgcatttacttagtgcctgcyttttgcactgcaagaagcagtcatttttttcttgaaatcatcattatttaatacttttcctggtggataaaaagatgcagaaccaaagagcacacccagtttaaggctcatacttgtatagccctctaggagtgtgttaatccttttgcattgcta

SEQ ID NO: 364034 - DNA, 633 bp, Homo sapiens
tataacccactgcccaagaagcatcaataatgctttgcttggtcatcagtaatagagtcttccagatgcttcctctcttttatgtagctggagcacatagaagaaagtgggcttggttatcagccagactgggctcacatctcagctctgctcctttctagttgtatgaccctctgtaaattatttagtctcagtaagcctcactgtgaaagtgaattttatgtgtcgacctgactcctctcagatgtgaggtgcctggattaaagagtatttctgcatgtgcctttgaggatgtttctggaaaaaatgagcaacagtgggctcagtatagtggatggccctccccagtgggggtgagcattatccaatctattgagggactgggaagaacaaaatggtgaagaaaggagaaaggcatcttttgcttcctgcctgcttgcctgagttgggacwttggtcttcttctgcagttggactgggatttacactatcatcttccctggttctcaggtctttggactcagactagaattacagcttgcagacaacagatgaatgggagacttctcagtttccataatcacataagccaattcagccaattctttataataaagctctatgtgtttgtat

SEQ ID NO: 364035 - DNA, 588 bp, Homo sapiens
aagctgggaggccttttatgacctagccttggaagtcrtgttatgccactttcaccgtaactgatctgacatgtactttataatgcagtggcatcaatgaaaagaaaggagctctgctaaagctggtatttttatttaaacatctcatttcacagtggcaggtccctgtggcaggctccaggtaacataaagccttttaaaaattatgaaacatcaccaaatacagaaaagtgcacatatgtaaatatacagctgattaaatttcaattaagcaaatccctatgtagtcacacgtcaagaaacaaatggccagaaatgcagagccaaagcatgactgcctcagtcataatctctctccactccctcaaactgaccgtgggaccaacttgtctgataaccattgtctatgttttatctgtttttgaactttatgtacattgaataataatgcctgtattgatttgtgtctgggttttaaatttttcttcctgtcaatattaggtttgtgaactctatatatattgtgagtgcagctgtggtttgtttgccattgctggagaaagttcctttgtatgaatatttattcat

SEQ ID NO: 364036 - DNA, 588 bp, Homo sapiens
aagctgggaggccttttatgacctagccttggaagtcgtgttatgccactttcaccgtaactgatctgacatgtactttataatgcagtggcatcaatgaaaagaaaggagctctgctraagctggtatttttatttaaacatctcatttcacagtggcaggtccctgtggcaggctccaggtaacataaagccttttaaaaattatgaaacatcaccaaatacagaaaagtgcacatatgtaaatatacagctgattaaatttcaattaagcaaatccctatgtagtcacacgtcaagaaacaaatggccagaaatgcagagccaaagcatgactgcctcagtcataatctctctccactccctcaaactgaccgtgggaccaacttgtctgataaccattgtctatgttttatctgtttttgaactttatgtacattgaataataatgcctgtattgatttgtgtctgggttttaaatttttcttcctgtcaatattaggtttgtgaactctatatatattgtgagtgcagctgtggtttgtttgccattgctggagaaagttcctttgtatgaatatttattcat

SEQ ID NO: 364037 - DNA, 588 bp, Homo sapiens
aagctgggaggccttttatgacctagccttggaagtcgtgttatgccactttcaccgtaactgatctgacatgtactttataatgcagtggcatcaatgaaaagaaaggagctctgctaaagctggtatttttatttaaacatctcatttcacagtggcaggtccctgtggcaggctccaggtaacataaagccttttaaaaattatgaaacatcaccaaatacagaaaagtgcacatatgtaaatatacagctgattaaatttcaattaagcaaatccctwtgtagtcacacgtcaagaaacaaatggccagaaatgcagagccaaagcatgactgcctcagtcataatctctctccactccctcaaactgaccgtgggaccaacttgtctgataaccattgtctatgttttatctgtttttgaactttatgtacattgaataataatgcctgtattgatttgtgtctgggttttaaatttttcttcctgtcaatattaggtttgtgaactctatatatattgtgagtgcagctgtggtttgtttgccattgctggagaaagttcctttgtatgaatatttattcat

SEQ ID NO: 364038 - DNA, 588 bp, Homo sapiens
aagctgggaggccttttatgacctagccttggaagtcgtgttatgccactttcaccgtaactgatctgacatgtactttataatgcagtggcatcaatgaaaagaaaggagctctgctaaagctggtatttttatttaaacatctcatttcacagtggcaggtccctgtggcaggctccaggtaacataaagccttttaaaaattatgaaacatcaccaaatacagaaaagtgcacatatgtaaatatacagctgattaaatttcaattaagcaaatccctatgtagtcacacgtcaagaaacaaatggccagaaatgcagagccaaagcatgactgcctcagtcataatctctctccactccctcaaactgaccgtgggaccaacttgtctgataaccattgtctatgttttatctgtttttgaactttatgtacattgaataataatgcctgtattgatttgtgtctgggttttaaatttttcttcctgtcaatrttaggtttgtgaactctatatatattgtgagtgcagctgtggtttgtttgccattgctggagaaagttcctttgtatgaatatttattcat

SEQ ID NO: 364039 - DNA, 376 bp, Homo sapiens
gatctcctggtctgtgagttgagaaaaccatgggaaaagcccagttatcttggctggagtgcacagtactgtccctaatggcttcccttggctgggagagggagttcccaaycccttgtgcttcctgggtgaggtgatgccccaccctgcttcggctctccctccttgggctgcacccactgtccaaccagtcccaaagagataaactaggtacctcagttggaaatgcaggaatcacccaccttctgcatcaatctcgctgggagccgcatactggagctgttcctattcggccttcttgccagcagtccttaaaatactttctaactggcccttgacagaaaaagcttgttggctcttaatttagatccacaac

SEQ ID NO: 364040 - DNA, 376 bp, Homo sapiens
gatctcctggtctgtgagttgagaaaaccatgggaaaagcccagttatcttggctggagtgcacagtactgtccctaatggcttcccttggctgggagagggagttcccaaccccttgtgcttcctgggtgaggtgatgccccaccctgcttcggctctccctccttgggctgcacccrctgtccaaccagtcccaaagagataaactaggtacctcagttggaaatgcaggaatcacccaccttctgcatcaatctcgctgggagccgcatactggagctgttcctattcggccttcttgccagcagtccttaaaatactttctaactggcccttgacagaaaaagcttgttggctcttaatttagatccacaac

SEQ ID NO: 364041 - DNA, 376 bp, Homo sapiens
gatctcctggtctgtgagttgagaaaaccatgggaaaagcccagttatcttggctggagtgcacagtactgtccctaatggcttcccttggctgggagagggagttcccaaccccttgtgcttcctgggtgaggtgatgccccaccctgcttcggctctccctccttgggctgcacccactgtccaaccagtcccaaagagataaactaggtacctcagttggaaatgcaggaatcacccaccttctgcatcaatctcgctgggagccgcatactggagctgttcytattcggccttcttgccagcagtccttaaaatactttctaactggcccttgacagaaaaagcttgttggctcttaatttagatccacaac

SEQ ID NO: 364042 - DNA, 622 bp, Homo sapiens
agtttttagttttttgaggaatcaccamatgttttctgcaatggttgacctgatttacatttccaccaacagtgtataagcattcatttttctctgaaacctcacaagcatctgtaattttttgactggcttacaagagcagatttgtgtgcatttcttcccaagcctgtgcttactgacatcatgtagatagcttgaaattagctatagtggatgcatttacaccacagaaatcagcaaactttacaaacaagggtttttgtcttttcagagagccagttattcgctattcagcagcactccactcttttctctccatttttatccgtgaagaaaatacgctactgaagaagttaagtgatctacccaaggtcacacggccagcaaacagcagagttgagggtcaagtcaggtccatctgaactcaaatcccatgtgtttatttttttcacaatgaatttgcttacatttatagtaaagggggaggaagcaacttgcatttttcataggttccttgcatatcatgagggtcttgaagatatatctgacctgttgtttttaatttaccaaacacttgtaggacgtttacttttactctctaacagcactttataagtgtgaa

SEQ ID NO: 364043 - DNA, 493 bp, Homo sapiens
ataaacaaaataatcaataaacacttagcatttgggtctttggccattgctgtcttggatttacrttaggtttgggctaatatgttacctctcccgagcccacattgatctggtggtggttggatgcctgggcgagtcatcatgaaatataaaattagatgcagagatttttttgcataggtagagtgaatatttgccatcaacaaagcaccctgaaccacagaattgactaatattgaagataaagggggctttgagatgatcagctcagatcatccaattttacagatgaaaaaaaaaaacactaaagaagtaaagtgtgtgggtcaaagtcacagagcttcttagaggtggacctttgtctcggtgtgtctgagacagaaggcgtggctccagcactcaccaccattcacaagcccacacgctgtgcctgaaaggatatgacaggggaagaaaaggctgaattgcaaaagaaatatagaaatagacagta

SEQ ID NO: 364044 - DNA, 614 bp, Homo sapiens
ctaaacttgcattatctctccaaagagaaaatatattaaaagctctgatttgtttttttgtttgttttttaatggagagtatctctctctcgcacccaggctggagtgcagtggcacgatcatagctcactgcaggctcgaactcctgggctcaagccatcctcctgcctcaacttcccgagtagctgggactacaggcatgagccactgcatttacatgcacctgctaaatatatatatatatatttacatatatataaatatatatatatgtatttacatgcagcatgccattttatgctcttkgaaatctaagtgggctaaggccagctcaaaggagaatcacctctccctggaccaagtggatgctccttctccaagtgctgctggggctgccttatttagggctgcttagatccaatgtgtagacttgactgctaagttactctaaggaggcacataacgactacgttttctagacattcgtacattttaattaagagaatatattttcattacctccctatccctctaaggcagccttgggaatgctgataggccctgttcttcgctaacagctcccctggggaaaggcaataaacctcttcttcacc

SEQ ID NO: 364045 - DNA, 614 bp, Homo sapiens
ctaaacttgcattatctctccaaagagaaaatatattaaaagctctgatttgtttttttgtttgttttttaatggagagtatctctctctcgcacccaggctggagtgcagtggcacgatcatagctcactgcaggctcgaactcctgggctcaagccatcctcctgcctcaacttcccgagtagctgggactacaggcatgagccactgcatttacatgcacctgctaaatatatatatatatatttacatatatataaatatatatatatgtatttacatgcagcatgccattttatgctcttggaaatctaagtgggctaaggccagctcaaaggagaatcacctctccctggaccaagtggatgctccttctccaagtgctgctggggctgccttatttagggctgcttagatccaatgtgtagacttgactgctaagttactctaaggaggcacataacgactacgttttctagacattcgtacattttaattaagagaatatattttcattacctccctatccctctaaggcagccttgggaatgctgataggccctgttcttcrctaacagctcccctggggaaaggcaataaacctcttcttcacc

SEQ ID NO: 364046 - DNA, 616 bp, Homo sapiens
gcttaattgtctcagagtaattcccaaaatagtggctgcattttttcactttgactctgacgttgcatagtccatgaatatttgaaagctcccctaggtgaccttggttagcctctctggccactgttgactcctctgtaagaatsatggccactcgatctacttggaaggcttattgtaagaaacaaatgagattattctgtgtcacccttcccgcgaccctagcacatagcaggtgctccaacagtggtacgttctttcttgctttaagttggatcactgaagttaccctccgagactccatgtttgataacccatgagcactttagattggttcctgtccacaactcccgggcctccagccataaggaggatggggttaagtgtagatgaatcaaagccaccagcctcttcacaagataaatactccctgagagtagacagcccatggacagcaacgttggctttgtacaggaaatatagcagctttagctgatggctttgggcagtgttggttgactgaccctgagttcatgcttggctccttcttggctcatacccttactagagggggcacttttcttctaaaagaatgagaaaatccttccgttggccc

SEQ ID NO: 364047 - DNA, 593 bp, Homo sapiens
ccctctagcttctgtctttatgtacctattctaggtgccccacgtaagtgtatgattccacttatatgaggcacctagaataggtacctttcacttagcagaatgtccccaggatttatccatgtggtagcctgtgtcagaatctccttcctttttaagtctgaataatattccattgtgtgtatggaccatgttttgtttatccattcacccatcaacgcatatttgggctgcctctgccttttggctattataacgaatgctgctatgaacatggatttgcaaacatctcctcgggacctttctttttcttttggctatatacccagaagtagaattgcaggatcatatggtagttctatttttaattttttgaggaacaccatactgcctcatagtagctgcaccattttccattcccactaacagccactgcagcgtttttatgatatgcctgtaggctacagggccaccatgggaggctaggatgcagactgagttacagccacatygggcacataattcaagcctcaaccataccactgtacagtcctgagccccaggggagcagagagccgtggaatctcccagcc

SEQ ID NO: 364048 - DNA, 413 bp, Homo sapiens
tgggaatccatatgcttgttagaaagcaaaaaggattctgggctcagagttggcaggtacagtggaacacaggagtgagaaatgagactcacaagaggaggaatggttaaaagttgctatggttggtacagcccayctatcatactttggtacagataatctggtatctgcttcaagataaaatgtaaagggtatatctgtaaatttaaatcagccctctgtggaaagctaaggcatctagtgcaggttttggtggtccagaatagagccctccatgttctggcatttggggagttcttggcttggtttttaagtgagagcctcatacattcgtcctaaagccaaagccaccagcatgccaccaggcaataattcacaccccacggagagctcctaatcaggattctaaggaa

SEQ ID NO: 364049 - DNA, 566 bp, Homo sapiens
cagacaaaaatcctgctctcacggagtttacattcttgtaggaaatatatttcagggtttgattgtggaattcagaaaacagtcatcagtaattaagagaaaagatctgagtagtctgaaatagaagctttaagcaggtyttctcccctcacaggcctctctattcagtttatcccaaactgaattcatcacccttacccttatacagaacccagccttacaagcaagaaaactggtggtataccagatgatcccaattcactctccttcccttcactcaccaccaccaatcaagtaggccttgtagactttaccttctaagtacctctgaaatctattccctcctccacattcccactgccacaaactaggtcaagccctcatcacatcatcttttcttacctactgtagtggacactgtcatgcacagcccagattccctctcaatctagcctgaaggacttttgcctcagctttgagagtgctgtcggtgctcagccttcagctattgctatagtttggatatatgtcgctgcccaaatatcatgttgaattgtaatccccag

SEQ ID NO: 364050 - DNA, 566 bp, Homo sapiens
cagacaaaaatcctgctctcacggagtttacattcttgtaggaaatatatttcagggtttgattgtggaattcagaaaacagtcatcagtaattaagagaaaagatctgagtagtctgaaatagaagctttaagcaggtcttctcccctcacaggcctctctattcagtttatcccaaactgaattcatcacccttacccttatacagaacccagccttacaagcaagaaaactggtggtataccagatgatcccaattcactctccttcccttcactcaccaccaccaatcaagtaggccttgtagactttaccttctaagtacctctgaaatctattccctcctccacattcccactgccacaaactaggtcaagccctcatcmcatcatcttttcttacctactgtagtggacactgtcatgcacagcccagattccctctcaatctagcctgaaggacttttgcctcagctttgagagtgctgtcggtgctcagccttcagctattgctatagtttggatatatgtcgctgcccaaatatcatgttgaattgtaatccccag

SEQ ID NO: 364051 - DNA, 574 bp, Homo sapiens
atcattttcaatgcatgttttctggttgtataaaagctgtcccatgaaaaagacctgatgttataacagtagattattatgtcacactgtattttcaccacataaaagaaagctttttatgattcactgactgagaataatcaacaccccttcacaatctggagcctgaagattggatcttctgagaacatcagagaaagactgcctttaacatccacactgcagcaaagcaccacaaagaagggtccctccacagtcttggaactgtacacccactggaacccttaaagtaaagctaaccagagaagtttctcccagaagatggcatacttgatgtgaacaccttttcccaagatcacagatcaagactwttctatcatgagactctgaatatttttgcccttgctaatgcctctataaacaatagacatgaaaagggggatctgttgtgcacactcatggggtatacttttatctgtgaaagattttgtagccagtcttatatatatataaaaccttaaaccttgggagcttgtttggaggttctagcagaggactgcagctagtcatatac

SEQ ID NO: 364052 - DNA, 322 bp, Homo sapiens
ctagctctgacaatgacagaaaaagaactcacaggtagctaaacatttaaattatctagtattaaggcatagaacaaattatattaagatagagaaaaaataatttagtatttatgtgtttatatacaggtctagcccagtatcacatgaaagcatttttgttttttgttttttgttttgagacagggtctcaytttgttacccaggctggagtgccatggcaccatccccactcactgcagcctcgacctcctgggctaaagcaatcctactgccttggcccccaagtagctgggactacaggtacatgccaacaaaccaa

SEQ ID NO: 364053 - DNA, 593 bp, Homo sapiens
atatgcggtgtttggttttttgttcttgcgacagtttactgagaatgaaaattattttccttttaatctttgttaacaaaaatacctctttataacttaactttctttaaatctctctcttaatggtttcctttatcttgttatataagaaatcttttaataaactttgaattggacaattactttcattttatttcttatcatttcttaatttcattttttcctacaatttttcttktttcattggaatacttcttattttggcacactttatatgtaaaatcacaaattaattaaaattttgattttttgtaataattttttgtgaaaacctaggaagcaggaaatctttaattgtcacatcagcactttataagggtgtataatctttttttttttttttcttgagacggaggtttgctttgtccccaggcaggggtgcaatggcacaatcttggatcactgcaacctctgcctcctgggttcaagcaattctcctgccttagcctcctgagtagctgggaatacaggcatgtaccaccactcccagctaatttttatatttttagtagagatgggatttcaccatattt

SEQ ID NO: 364054 - DNA, 511 bp, Homo sapiens
gggttctctggatttcctgaatttgaatgttggcctgtctggctgggttgggaatattctcatgaatgatattctgaaatatttttccaagttggttccattctcatctttcagatatattaatcagtaatagatttggtctctttacataatcccatatttctcaaagattttgttcattccttttcattcttttttcccccattcttgtctgcatgttttatttcaaaaagccagttttcaagctctgagattcttttttcttcttgttctattctgctagttggtcttgcacatgagatggggctggtctgacctcagcactccttagtctgcttgcctctcccagggccccagcctggccacacctgcttacagggyactcttgggtgcccacacacactaaaagaattttcataatgcaatcacacacaatcaccatgtgactgcgttatcaaaattcttgtagtttgcttttcagctctatcaggttggttatgttcttctttat

SEQ ID NO: 364055 - DNA, 525 bp, Homo sapiens
ttggttccattctcatctttcagatatattaatcagtaatagatttggtctctttacataatcccatatttctcaaagattttgttcattccttttcattcttttttcccccattcttgtctgcatgttttatttcaaaaagccagttttcaagctctgagattcttttttcttcttgttctattctgctagttggtcttgcacatgagatggggctggtctgacctcagcactccttagtctgcttgcctctcccagggccccagcctggccacacctgcttacagggcactcttgggtgcccacacacactaaaagaattttcataatgcaatcacacacaatcaccatgtgactgcgttatcaaaattcttgtagtttgcttttcagctctatcargttggttatgttcttctttatactggctattttgtctgttagctcctgcaatgttttacaatgatttttagctcccttgcattggattacaacatacttctttcactcagtgaactttgttcctac

SEQ ID NO: 364056 - DNA, 575 bp, Homo sapiens
catcctaactgtgggaccagagtgggttaagggctgagattcacttatcttctttctgagttattgtcatctgagatattcctggccttttaatctctaaaatttgcagtggaagcatcccccacctcacccactgggcatcaggtcctaagaagttcttctgattcagtattttctcagccttttagtctcaacttccccactgagtgccattctaatgctatagtaagtgtggacctagccatgtagccaacactgtatcctaggagctgatagttttggtcctgagacacaatggctgctgtcactcactacagaattgcttaggcctgtgaaacctggctcccagtgaagattctcctgcccctcagtccccagaacttttccagctggagagcaattctcgggaatttcccattcccgagaaagagtcaggctgtagctgctgaaagaaatgcagatatagagaattcatctaactgaaactgaacagaatgagaagttggagagaataagtttggaatttaagttgggatttgmggctttactttctttggattcatactgctcaacaa

SEQ ID NO: 364057 - DNA, 622 bp, Homo sapiens
caaccccttttctgaaaccttctgagaacaggtagaccatctacctttgtctctccttacaggtcttgtttcccctttacatctattgatccaaaccaataaaaccgcaacctttctcataaggaaatcctttgtttccttcaggtaaatattcctaaatttctttattcttgttattctgatgcacttactcttatactaagtttgaagcatactcttaaacccatggcttcctgagcaaagctgattcttgagacgcagtcctccaaacacaggcttcctagacttcggtgtcataatagcttcattgaggtatttttytacgtcaacccaaaaaggggccattttttataagaaggctcatgtctttttgcacatttgttaataaaactctactacccttctgtgggcaaggatgccttttaggtctcaaaatggtctaataccgagatcacagtttattttgattaacaaatccatgactaacttaaaactacagtgtggggactggcttttaaaagcctatgtggaagccatgtatatccatgaattagcccatctttagacgctgaattcagcctaaaatagtgcaaaaagtgaatgccaacctacatctgcacac

SEQ ID NO: 364058 - DNA, 615 bp, Homo sapiens
tgtaattcaacataaggaaatcaacaaatgtaattcaacacaaacagaactatgaagaaaaaccctatgatcatctcaacagatgcagaaaaagtattggataaaatccaatatcccctcatgataaaaaaaattcctcaacaaatgaggcattgaaggaacattcctcaaaataaaaaaagtcatgtatgctaaatccacagcctacatcatacagaacgggcaaaagttgaaagtattctccctaagaactggaacacaacatggatacccaattttatcacctatattcaagawactacttgaagtcctagactgagcaagtaagcaagagaaagaaatgaaaggcatccaaactggaaaagagaaagtcagatgatctctgtttgcttattgatcttatacctggtaaaccctaaagactcgtacaagaaacttctagactttataaatgacttcagtaatgtttcaggatacaaaatcaatgtgcaaaaagcagtatcatttctaaacaccaataatgttcaaggtgaaaacccaatcaagaactcaatcctatttacaatagtcacacaaacatgaaatacctagatgttcattttagtcaaggaggta

SEQ ID NO: 364059 - DNA, 568 bp, Homo sapiens
aattttgtaatttttatttctgactgcctccttcttttatattttaaacatgttaaagactctttcatcaaaaataactactttggttctcacatagcactccagttacccttctgtattttctccacactttttgaaaaattatttgagctcatagcaccatttcctcacctcccacttactgcttaatccattcccatttatcgtctgcctattctsaatacctttcactgaagtcactggttacttctgagtggtttgatccattgcagtgtctctgcctcattttcttaagctcttaccatcattcagtgtgataggctgcttactcccctctgagccattctctatgtcctcaacccctatcactgggccttgctaagctgagattcaattattccaggagacctttcaatgatcttcaaggagactattgaaaatttgccatgaaacatattttctttcatttggaaaaagatgagattgacaagccatcaattagtcctgaagtatggcatgacaaggctctgtgagtttaaagtgatagagtcaatcagtctttcactca

SEQ ID NO: 364060 - DNA, 522 bp, Homo sapiens
  misc_feature (1)...(522): n = A,T,C or G
tactttcacctgttgaacacagaagtatttttcaccccttgttttttcaaagaaagcagcactaccatttcttgcagtcactacagggaaagcatagcagagttctgctctcctgcaatgaatctgccatgttaaaactgggtaggttcaacatgtcaatcaacttatgccatttctttgttaaggacactttaatgactttcctttccccacagagcaaactccagatttttccacatggctgataggcctgtaaatgactccaaacctgcctgtttcctctgtatcatttttgccacctctgacattgcctactttgtgccagcctgactattgtcactgttgctgttgctctargtcatctcagggttttcacttgctttttctatgactgagggtgtcctctcacatacttanacagctgggtcagttccattgcttacatttcagttcagatgctagttccttcaacagtcctcactcctcagcatcactccctgtgtctaacactatatctaacca

SEQ ID NO: 364061 - DNA, 522 bp, Homo sapiens
  misc_feature (1)...(522): n = A,T,C or G
tactttcacctgttgaacacagaagtatttttcaccccttgttttttcaaagaaagcagcactaccatttcttgcagtcactacagggaaagcatagcagagttctgctctcctgcaatgaatctgccatgttaaaactgggtaggttcaacatgtcaatcaacttatgccatttctttgttaaggacactttaatgactttcctttccccacagagcaaactccagatttttccacatggctgataggcctgtaaatgactccaaacctgcctgtttcctctgtatcatttttgccacctctgacattgcctactttgtgccagcctgactattgtcactgttgctgttgctctaggtyatctcagggttttcacttgctttttctatgactgagggtgtcctctcacatacttanacagctgggtcagttccattgcttacatttcagttcagatgctagttccttcaacagtcctcactcctcagcatcactccctgtgtctaacactatatctaacca

SEQ ID NO: 364062 - DNA, 609 bp, Homo sapiens
ggcaggtgtatagagaatgattccccagtattaaagaagtaaattatagagaaaccatctgwggatcccccttatttgggacccctttaagttcccttctcattacaggaccttaggcaaataaagggagacttaggccaattttctgacaactctgataggaagctttccaaaatttaactcagatgtttaacctcacatggagggaggttatgctgctcctaagccaaaccctcactgctgctgaaaaacaggcagctttgtaggcagtagaaaattttggagatgagcaatatatctcctatagtaggtcaaaaaggaaaaaaggagatagggaaggtgatatgttttggctctgtttccacccaaatctcatcttgaattgtactcccataatttttatgtgttgtgggagggacgtcgtgtaacataatttgaatcatgggggtgatttcccccatattctcatggtagtgaataagtctcatgagatctggtggttttatcaggggtttctgctttagcatctttctcattttttcttgccgccgctatataagaattgcctttcacctcctgccatgattctgaggcctccccagccatgtg

SEQ ID NO: 364063 - DNA, 466 bp, Homo sapiens
ttcaagccagctgcagaaatttgcgtaactaataagctgaatgttaatcttcaagataatggggaaaatgtctccagggcaagtcagaggtcttcatagcagtccctcccatcacaggccaggaggcctaggagaaaatggttttgtggactgggcccagggtcctcgtgctgtgtgcagcctagggagttggtgccctgcatcccagccactccagctgtggctgaaaggggccaacataaagcttggtccatggcttcagagggtgcaagccccaagacttggcagcttccacatggtgtggagcctgtgagtactcggaagtcaagaattggggattgggaacctccacctagatttcagaagatgtatggaaacaacyggatgctcaggcagaagtttgctgcaggggcagggtgcttatggagaacctctgctaggtcaataacagaaggaaaatgtgggg

SEQ ID NO: 364064 - DNA, 545 bp, Homo sapiens
atggactctatcaaatgtcatgattatttctttctataccataaaaaacctttgccacagggacaaaagcttatttctcttttctcttctgaaagctgtcttgttttagtttctacatttatttgtatcaatgaacatttcttttgaaacaaaatgtcactctgttgcccaggctggagtgcagtggctcagtcacakttctctgcaacctctacttcctaggctcaagtgatcctgccacatcagcaccccaagcagctgtgactacaggtaagtgccaccatgcccaactaaattttgtattttttgtagagacgaggtctcgctatattgcccaggctgatctcaaactcctgggctcacgtggagatgccaaactgttaggattacagatgtgagccaccactcctggcttatttcaaactaatttttgggcatagtgtaaaatggggttaagttttacttacatttttttctatatggatatgtatttattttagcaccctttgttgaaaaacatttttatttcccagttacctttgaca

SEQ ID NO: 364065 - DNA, 367 bp, Homo sapiens
acatagtctagaaccaaggagttatccaacaacacataagcaagagaattaagagaggtctttagatctcctagagcctctacagtctggttcactatatgaccaatctgttgtgtcagattgtgtaaggtgaccttagggtaggtgaaacttctccaagggcccgctaggcaaataggcctcttcctgctatgaccatgctaagcccttgccttgctagaataggggcctcatgttgagcggtagagttatggatggttattccatttaaccctatyattctcaaggatgactcacttattaattatacattgtctatgcaagaataggcttgctccagcagaataaaagtataaggagagtgggc

SEQ ID NO: 364066 - DNA, 367 bp, Homo sapiens
acatagtctagaaccaaggagttatccaacaacacataagcaagagaattaagagaggtctttagatctcctagagcctctacagtctggttcactatatgaccaatctgttgtgtcagattgtgtaaggtgaccttagggtaggtgaaacttctccaagggcccgctaggcaaataggcctcttcctgctatgaccatgctaagcccttgccttgctagaataggggcctcatgttgagcggtagagttatggatggttattccatttaaccctatcattctcaaggatgactcacytattaattatacattgtctatgcaagaataggcttgctccagcagaataaaagtataaggagagtgggc

SEQ ID NO: 364067 - DNA, 353 bp, Homo sapiens
gagctgggatcctggtataatttcataaaggccagcacatatagcatttcaatccatttattaggatttctgcaatacaaatcttattgtaaaatagtataatacacaaagatccattattaggtcaatttctcttgcttcaacaggggatgctgaggccaagcaacatgacagagaaccatcagcttcttttttagattatccaaattaaattgaccccaattactgaggatgcattatatgggggaatcttttggaacatttgtagtgttttccataatatagctsacgtcctataatcaaggggcctggcaaggggtggggcccccagttcttacaattattacagttgt

SEQ ID NO: 364068 - DNA, 584 bp, Homo sapiens
aataaaaacatatcctttgcatcaacatggatatagctgaaagccattacataagtgaactaacacagggacagaaaaccaactaccacatttcctcacttacaaatgggagctaaacaccacattctcatggatataaagatggcaataaatgacwaaggggactagtagatggggaagagaaggaggggacaaagatgaaaaaacaaattgatggatattatgcttggtacctgggtaacaggataattcataccaaaaactttagcataacacaatatgctcaggtaacaaacatgcacatgtaccactgaatataaaataaaagttggtacataaaggaaaaaaaaaatcaggcaaaaagtttagtactttaatgcttaattattgtatgtttggatctttatgatcaataaaccctcatatttcttggtgacaagtccaaagctttacttttgaatattccaagtttcccaattgatatatgataggaagttaaactccttttggagatgtaaaagggcagtagcaaaaagaacatggagaacatagttttttttggaaagataaatcatatgataaca

SEQ ID NO: 364069 - DNA, 564 bp, Homo sapiens
gatcaatactatatattcaatcatttagcaaacaaaatgtatatgtgactgtgtgtctgtagggttgtttgtgtgtgtgtgtgtgtgtgtgtgtgtatgtatgtatttatgtaaattacattgctgaagaagcagaatatcacaamggactaagagtttcaagttgagacctgttctggtgcattcctgaaactttaaaaatattaaaattttagcttagaaacaaatgacaaattccatggtacaaaacccaaattagtttactttggcttagcatatgtaaagacattaatgttttaaaatgggggcacagagttagtgagaaaagttttatatggtaataaatgatgctgagataagcagtaattgttcagaagtataacaggaagttgaattttactcttaacccatacacagaaaataattccagatgaattagaaatttgaatataatacagaagtaaaactgatagagacaggagacagagaaattctaggcagacaggggcaggttcctggtgaagccccacctttaagccaaaaagcctgaaacccgcagcccaa

SEQ ID NO: 364070 - DNA, 626 bp, Homo sapiens
ataaaagacacattggttagggactccaagactgaagggacaktgtttaggtaaggactcttttaaccccttatccaaaagcagaaggtccagagttttctgatttccatactagttacagaaggcaacgaggtagtctcactctttcattaggtcaaaagagtgtcctggtaagcccagcagtaccagcaagtggggatcaaccaaaatcccaactggcaaacagcaatagaaagaactttctcccattcaaagatgccagatagtcagaatatccagcaaaaggcattgcaccacagtaagtgccaggtcagcgtgtgctactgttatttatctttgtgaaccaaatagtcctttccactacagagacaccaaaacagttgagcagcttctgaagagaaaattcaccccttaaaaatatgccaattctggaaaatgttctatgtcaccagagactataggaatccttctccagctagaactattgggttctagacaatactggcaattaagataaccacagaatatgtgatcaggcctaggaagcacacctcctcccataagccaaataactctatctaccacggacagaccccagacactgaggagatccaggcatggccaat

SEQ ID NO: 364071 - DNA, 626 bp, Homo sapiens
ataaaagacacattggttagggactccaagactgaagggacattgtttaggtaaggactcttttaaccccttatccaaaagcagaaggtccagagttttctgatttccatactagttacagaaggcaacgaggtmgtctcactctttcattaggtcaaaagagtgtcctggtaagcccagcagtaccagcaagtggggatcaaccaaaatcccaactggcaaacagcaatagaaagaactttctcccattcaaagatgccagatagtcagaatatccagcaaaaggcattgcaccacagtaagtgccaggtcagcgtgtgctactgttatttatctttgtgaaccaaatagtcctttccactacagagacaccaaaacagttgagcagcttctgaagagaaaattcaccccttaaaaatatgccaattctggaaaatgttctatgtcaccagagactataggaatccttctccagctagaactattgggttctagacaatactggcaattaagataaccacagaatatgtgatcaggcctaggaagcacacctcctcccataagccaaataactctatctaccacggacagaccccagacactgaggagatccaggcatggccaat

SEQ ID NO: 364072 - DNA, 627 bp, Homo sapiens
tcttgggcctatttttactggacataatcataattttgtatatttataaccctaaagtaagaacaggaaaaaaaataaatactaaacactgattttascctgggaataaaggggaccatcacttattgctatgcctaaagtttttgaaacttcaaagcttttgcacctgattttttctaatgtgtcattgagtctcagtttgttagaaaagggtggattttttaaaagttaaaaagaagacaatgtgagtggctgaaactcattttggcatccttttcatgccaatgagactaccttgcaccaatacaaataaaaccagaagttaaaatgtaaaataaacacataggtgaagttttaaaagaaacctaatataattcctctatgtaatagtaaggaagcgaacatagtaaaatagaccaagaactaagaatccaaactttattgtctcaaaatattttaactcaggtgaaaggcaacaaggatatgtgactaaaaacataaactctggaactgaatttgatttctgagtttaatgtctggctttgccactgtacctgctgtgctgctgtgatggttatttgatatcccttgtccttttcctcatctctaaaattattatccacttca

SEQ ID NO: 364073 - DNA, 627 bp, Homo sapiens
tcttgggcctatttttactggacataatcataattttgtatatttataaccctaaagtaagaacaggaaaaaaaataaatactaaacactgattttagcctgggaataaaggggaccatcacttattgctatgcctaaagtttttgaaacttcaaagcttttgcacctgattttttctaatgtgtcattgagtctcagtttgttagaaaagggtggattttttaaaagttaaaaagaagacaatgtgagtggctgaaactcattttggcatccttttcatgccaatgagactaccttgcaccaatacaaataaaaccagaagttaaaatgtaaaataaacacataggtgaagttttaaaagaaacctaatataattcctctatgtaatagtaaggaagcgaacatagtaaaatagaccaagaactaagaatccaaactttattgtctcaaaatattttaactcaggtgaaaggcaacaaggatatgtgactaaaaayataaactctggaactgaatttgatttctgagtttaatgtctggctttgccactgtacctgctgtgctgctgtgatggttatttgatatcccttgtccttttcctcatctctaaaattattatccacttca

SEQ ID NO: 364074 - DNA, 579 bp, Homo sapiens
aggaagcgaacatagtaaaatagaccaagaactaagaatccaaactttattgtctcaaaatattttaactcaggtgaaaggcaacaaggatatgtgactaaaaacataaactctggaactgaatttgatttctgagtttaatgtctggctttgccactgtacctgctgtgctgctgtgatggttatttgatatcccttgtccttttcctcatctctaaaattattatccacttcatagccttaatgtgaaaactaaatgaattaatgtttgcaaagcactttgaatagtgcctagacatagtaaattttatctaaatgcttgataaacaaatgttactgtatgcatgttgatatatgcatttgtttaatgtgtagtttgtcacatatatatatcaaaatacattaataatttctcattttgccatataagtggttgttgaattatgaattaatagataaactctataataatctctartcaaaatctgactgaaatagcttactgctatgtgatagatattgagccttgtttttctgagtgaaactaaaaagaaaaaaacatagaaaagagtatatagt

SEQ ID NO: 364075 - DNA, 455 bp, Homo sapiens
tggtaatgattttctgttaattgcaaataaagaattgaaacttgtatacattgtgagccaaagcaaatgcagaccttgytcttatgtttcagaatctactgaatggtacgtaaataataatgcaattataaataagtagtagttatttattgagcacttactctatgatagaccttgttatatagtcactttacataaattactgacaattgtatgtcatagattttattaatatatactaattttgcaaatgaggaaacagacaatgaaagtgatttgcccatgttcatacagctggaggaagagctagaatctgaacgcatccaattcaatttcagacccgttgtccttaaactctaacttacaattattctccaagaagcataaattggtacctgcagtaaaagctgaaaatgagagttatataatctatgagggtttattttagggtcata

SEQ ID NO: 364076 - DNA, 455 bp, Homo sapiens
tggtaatgattttctgttaattgcaaataaagaattgaaacttgtatacattgtgagccaaagcaaatgcagaccttgctcttatgtttcagaatctactgaatggtacgtaaataataatgcaattataaataagtagtagttatttattgagcacttactctatgatagaccttgttatatagtcactttacataaattactgacaattgtatgtcatagattttattaatatatactaattttgcaaatgaggaaacagacaatgaaagtgatttgcccatgttcatacagctggaggaagagctagaatctgaacscatccaattcaatttcagacccgttgtccttaaactctaacttacaattattctccaagaagcataaattggtacctgcagtaaaagctgaaaatgagagttatataatctatgagggtttattttagggtcata

SEQ ID NO: 364077 - DNA, 647 bp, Homo sapiens
tacttttttattttttaatttgaaaaactatttaaggtgctccatctaccttttaaaaatcaaattatgcgtgattttaaaaaaacacatttgtttattgtggcaaaacacattacatgagatatatccacttaaaattttaggtgcacagtatactgttgttaactataagcgcagtgttgtatagcagatctctagaatttcttaccttgcatgactgaaactgtatccattacatagcaagtttccattttcctctccctccagtcccttgacatcaccattctactttgtttctgtcagtcatgtacataaaatggaatatatttaaccataaaaaaagaaaattctgtcatatgcagcaacatggatgaattttgaggacattatgcttagtaaaataggccagtcagagaagtagtactacatgattccacttatatgaagtatcaaaagtagccatactcacagaaatagggctttcttttttaatgaaagataagtggaagataatctagaagaaaagttgtataataggtttactgatgaagcacawccctgtgatagaaaaagcataaagggcttgggaaaaaaagcataaaacgtatggataaaggactaaaagaagattggtttgactgtaacat

SEQ ID NO: 364078 - DNA, 514 bp, Homo sapiens
gttttttaaatgtgagaacatgagattttggggggtggttaggggcgaaatgatatggtttggctgtgtccccaaccaaatctcatcttgaattgtaactcccacaattcccatgtgtcctgggaggaaactggtgggaggtgawtgaattatggggatgggtatttcctgtgctattctcaggacagtgaaccaatctcatgagatctgatggttttaaaaatgggagtttctgtgcacaatctctttgcctgccaccttccatgtaaagatgtaacttgctcctccttgccttctgctatgattgtgaggccttcacagccatgtggaactgtaagtccaataaacctcttttttttgtttttgttttttgtaaattgccctgtgttgggtatgtctttatcagcagtgtgaaaacagactaatacacatgggattggccaagctagtatgtgtttcaatggaaattaaaaaaattgtttttaacatgtgtattattttcctgtgtagatta

SEQ ID NO: 364079 - DNA, 607 bp, Homo sapiens
ctttgggcatattctgtaatttatattaccttatctttgattagcatatctttaaagtgatattgcttgactttatgtcaccagaaagtgtttcagtgattgttttaatggcttattcattattaatttattttttattttcattttaatcatataatttaaaattgtattttayatattattttactgtattcttttagttgctttctaactctttaaattactttaaacatatttactgattattaattttttttttcccaaaggatgttggaggaaacacaatttacttgaaatactaattaatttcagcaggtaataggtttctgttctataaaaaatgcattgaattaaatatactaggtttatttactacaagacttactagtttgtattaagtgtggtagatctcataatggtcttccaaacatgtccacatcctacttcctataacttacaaatatattaccatatatggtatatggactttgctgatgtgatgaaattaatatttttgagatgagattatccatattgttcggagggtctgcatcaaagaatgagatgtgaaaatgaaaagagaggtaaggtgacacaagatcacaag

SEQ ID NO: 364080 - DNA, 607 bp, Homo sapiens
ctttgggcatattctgtaatttatattaccttatctttgattagcatatctttaaagtgatattgcttgactttatgtcaccagaaagtgtttcagtgattgttttaatggcttattcattattaatttattttttattttcattttaatcatataatttaaaattgtattttatatattattttactgtattcttttagttgctttctaactctttaaattactttaaacatatttactgattattaattttttttttcccaaaggatgttggaggaaacacaatttacttgaaatactaattaatttcagcaggtaataggtttctgttctataaaaaatgcattgaattaaatatactaggtttatttrctacaagacttactagtttgtattaagtgtggtagatctcataatggtcttccaaacatgtccacatcctacttcctataacttacaaatatattaccatatatggtatatggactttgctgatgtgatgaaattaatatttttgagatgagattatccatattgttcggagggtctgcatcaaagaatgagatgtgaaaatgaaaagagaggtaaggtgacacaagatcacaag

SEQ ID NO: 364081 - DNA, 607 bp, Homo sapiens
ctttgggcatattctgtaatttatattaccttatctttgattagcatatctttaaagtgatattgcttgactttatgtcaccagaaagtgtttcagtgattgttttaatggcttattcattattaatttattttttattttcattttaatcatataatttaaaattgtattttatatattattttactgtattcttttagttgctttctaactctttaaattactttaaacatatttactgattattaattttttttttcccaaaggatgttggaggaaacacaatttacttgaaatactaattaatttcagcaggtaataggtttctgttctataaaaaatgcattgaattaaatatactaggtttatttactacaagacttactagtttgtattaagtgtggtagatctcataatggtcttccaaacatgtccacatcctacttcctataacttacaaatatattaccatatatggtatatggactttgctgatgtgatgaaattaatayttttgagatgagattatccatattgttcggagggtctgcatcaaagaatgagatgtgaaaatgaaaagagaggtaaggtgacacaagatcacaag

SEQ ID NO: 364082 - DNA, 607 bp, Homo sapiens
ctttgggcatattctgtaatttatattaccttatctttgattagcatatctttaaagtgatattgcttgactttatgtcaccagaaagtgtttcagtgattgttttaatggcttattcattattaatttattttttattttcattttaatcatataatttaaaattgtattttatatattattttactgtattcttttagttgctttctaactctttaaattactttaaacatatttactgattattaattttttttttcccaaaggatgttggaggaaacacaatttacttgaaatactaattaatttcagcaggtaataggtttctgttctataaaaaatgcattgaattaaatatactaggtttatttactacaagacttactagtttgtattaagtgtggtagatctcataatggtcttccaaacatgtccacatcctacttcctataacttacaaatatattaccatatatggtatatggactttgctgatgtgatgaaattaatatttttgagatgagaktatccatattgttcggagggtctgcatcaaagaatgagatgtgaaaatgaaaagagaggtaaggtgacacaagatcacaag

SEQ ID NO: 364083 - DNA, 535 bp, Homo sapiens
  misc_feature (1)...(535): n = A,T,C or G
ctacatttgtacctgcatgagtgagtgtgggtgtgtgtgtgagtgcaccctgtaatgaggtggcatcctgtccagggctggttccactaggaacgcagagctacctgaatgggctatggccacccaggacccttaactggaataagcaggttggaaaatcaatgaatgaatgcatacaaatgcatgacaataaacaatgcagcataaaagtgctcagtgagtctgctctatttctgattgtttaactttgtggtaataagaggcgctccttacaatttttgttttgccaacatgtatccctttatttaatccaccaccactgcaactgccattgcttgctgattcaccaaaaattttgtacataattatcttccttgtttttattactcttccttacataaatatatagctcacatttatttcaatgtttaatattaaagtgttttgagtctttatttagaagattggtgatgtttttgtgaccacaaatatgtgctagcyacttaactcttgtttatatcnnnnnnnnnnnnnn

SEQ ID NO: 364084 - DNA, 555 bp, Homo sapiens
tctgtctttggcatgtgataaaatataggtcttcctgacttattttcctcatcaaaatgtatcttctttttgaggttttatttcttgtgtatttgtgtgtgtgtgtgtgcatgtgtgtatgtttgtgatgtgcttgtgctgcctagcttgccaagagagaaatcattcaacataaatcattaactggaaatatttttaatattatgtagaagacattaacataaaatgtttttgaggaataattggactaagaatatcttctctgaaatagatctaaatatgagtttgttatactgattctcacaaaaatgaagtaaaagaaaaaaaacaaaataagaggtaatattaaataactcttctgtgtaaagggaaggagtccctgctctrtgatattatttccttaacccaaagacaggaagaaattttgagtctccatcccacaatatgtggatgccatcccacagactaccactttcactggcataaaggattgtaattgtgtctgacagcagagttagggtactgctctactcattcactcagataaaatcacta

SEQ ID NO: 364085 - DNA, 555 bp, Homo sapiens
tctgtctttggcatgtgataaaatataggtcttcctgacttattttcctcatcaaaatgtatcttctttttgaggttttatttcttgtgtatttgtgtgtgtgtgtgtgcatgtgtgtatgtttgtgatgtgcttgtgctgcctagcttgccaagagagaaatcattcaacataaatcattaactggaaatatttttaatattatgtagaagacattaacataaaatgtttttgaggaataattggactaagaatatcttctctgaaatagatctaaatatgagtttgttatactgattctcacaaaaatgaagtaaaagaaaaaaaacaaaataagaggtaatattaaataactcttctgtgtaaagggaaggagtccctgctctgtgayattatttccttaacccaaagacaggaagaaattttgagtctccatcccacaatatgtggatgccatcccacagactaccactttcactggcataaaggattgtaattgtgtctgacagcagagttagggtactgctctactcattcactcagataaaatcacta

SEQ ID NO: 364086 - DNA, 570 bp, Homo sapiens
gaactattactccctacattttaggatctctagctgacactgtttttctctttcaatatctgatgtactttctcttgatccttatcttccaagctaaacaaaccaaatatacaatggtgaaggaaaatggtgaaggaaattaacaataaaaaaaacttcactyttaactttaaaaataattgacaagtgccaaaaaatatacaccaagccagtctatgttaacatcagagacaagaacacagatgcctcattggcaatggagtggaatccttggacagcacatctgactgatcatgattgtacttggcagagaggatctctttgtccaaaaactccatggcagttcctgagaccagggactttaggagaactttgtaggagaaagttaatagtccattacagtcagtcagctttacaaaatctcaggaattaccttaggataacagccaccagctctttggattatttctggaaatatagttatcttaatacatttagcagttctttcattacagttttggtgactgccttaactagtatcaatttcagaattttatttatcagaaagtt

SEQ ID NO: 364087 - DNA, 576 bp, Homo sapiens
aatatacaccaagccagtctatgttaacatcagagacaagaacacagatgcytcattggcaatggagtggaatccttggacagcacatctgactgatcatgattgtacttggcagagaggatctctttgtccaaaaactccatggcagttcctgagaccagggactttaggagaactttgtaggagaaagttaatagtccattacagtcagtcagctttacaaaatctcaggaattaccttaggataacagccaccagctctttggattatttctggaaatatagttatcttaatacatttagcagttctttcattacagttttggtgactgccttaactagtatcaatttcagaattttatttatcagaaagttttttaaattaacctttaaataaggatctggtccttggaggtcattcctcattaccaacagctgtgagagctttgctgcagtaatgtcagccctcaatctaaatgcttctcccttccgccttcacagaaatcaaattttgggctgagattgtgtccttttttatattttttatgatggataacatcaataacaggatgcaaa

SEQ ID NO: 364088 - DNA, 439 bp, Homo sapiens
ctacattttaggatctctagctgacactgtttttctctttcaatatctgatgtactttctcttgatccttatcttccaagctaaacaaaccaaatatacaatggtgaaggaaaatggtgaaggaaattaacaataaaaaaaacttcactcttaactttaaaaataattgacaagtgccaaaaaatatacaccaagccagtctatgttaacatcagagacaagaacacagatgcctcattggcaatggagtggaatccttggacagcacatctgactgatcatgattgtacttggcagagaggatctctttgtccaaaaactccatggcagttmctgagaccagggactttaggagaactttgtaggagaaagttaatagtccattacagtcagtcagctttacaaaatctcaggaattaccttaggataacagccacca

SEQ ID NO: 364089 - DNA, 576 bp, Homo sapiens
aatatacaccaagccagtctatgttaacatcagagacaagaacacagatgcctcattggcaatggagtggaatccttggacagcacatctgactgatcatgattgtacttggcagagaggatctctttgtccaaaaactccatggcagttcytgagaccagggactttaggagaactttgtaggagaaagttaatagtccattacagtcagtcagctttacaaaatctcaggaattaccttaggataacagccaccagctctttggattatttctggaaatatagttatcttaatacatttagcagttctttcattacagttttggtgactgccttaactagtatcaatttcagaattttatttatcagaaagttttttaaattaacctttaaataaggatctggtccttggaggtcattcctcattaccaacagctgtgagagctttgctgcagtaatgtcagccctcaatctaaatgcttctcccttccgccttcacagaaatcaaattttgggctgagattgtgtccttttttatattttttatgatggataacatcaataacaggatgcaaa

SEQ ID NO: 364090 - DNA, 570 bp, Homo sapiens
gaactattactccctacattttaggatctctagctgacactgtttttctctttcaatatctgatgtactttctcttgatccttatcttccaagctaaacaaaccaaatatacaatggtgaaggaaaatggtgaaggaaattaacaataaaaaaaacttcactcttaactttaaaaataattgacaagtgccaaaaaatatacaccaagccagtctatgttaacatcagagacaagaacacagatgcctcattggcaatggagtggaatccttggacagcacatctgactgatcatgattgtacttggcagagaggatctctttgtccaaaaactccatggcagttcctgagaccagggactttaggagaactttgtaggagaaagttaatagtccattacagtcagtcagctttacaaaatctcaggaattaccttaggataacagccacsagctctttggattatttctggaaatatagttatcttaatacatttagcagttctttcattacagttttggtgactgccttaactagtatcaatttcagaattttatttatcagaaagtt

SEQ ID NO: 364091 - DNA, 482 bp, Homo sapiens
ttctttgctaaggctgatgtccagatggtatttcctaagttttcttctagtgtttttattgttttargtcttacattttacctgatttgatgatatgtcttcactttcccccacatcactgtgtatcagagattcagaatgtccatgagaaatgacgtaatgctacagaagatagatattttggaaaattcttctagttgtcaatctaacaacacacactatttttgcatcatggtagtgaattcgctatttttaaagtatataatcagtttgttatactgattctgatatcatacaaataaaatttcaagtctcatgattccagattggctttgaaaggaatgtttagcattgttttgtattcattatctaaatgccattaactgctttatttgatacagaggttgcttttatattgcactccttagtttgcttcaatttgtaactatcatttattttgtgatagttctatgagtaagttc

SEQ ID NO: 364092 - DNA, 626 bp, Homo sapiens
catgtgcaatgtgcaagggttttgacatccttgctgtatgtaacttgttattattattattattaaatatagtgtttatgaagtttcttggaatttagatttgagtttctttaatgagcaataatgttgaagatcttctcatgtgtttgttatataatatcttgttgtgtgcttttgttcatcttctttggagaaatgtccattcaaatcctttgtctgtttttaaaaattgagttgtttgtctttggttgttgagttttaagagttctttacacatttaagatactgaacctttattaaatatatgattcacatatatcttctctaattctgaaagttgtgatatcatttccatgatgatgtcttttgagagaaaaatactttttattaaaaaatgtttacaaaatccaatgtatctacttttccttttgttgctattgcttttgataacaaatctaataatsccttctaaaaccctaggtaagaaagatttaagactaatgtcttgcaataatttcatagttctatctattctacttaaatcactaatatactttgattgtgttgtttctttgtgtttagaatcaggaaggaattgagctgtattattttgcatgtgactgtcc

SEQ ID NO: 364093 - DNA, 579 bp, Homo sapiens
aacatggtgaaccttatgcataattatagaatttgtgtctgcttcttttttacacattttattttcactgtactgttaagtctgaattataaattacagaagaatyactcaattttacttgtgttacactgactccagttcctcaatgatataattattcttctccatttccatggccatttttaacttgacaatagtcatctttatctacttggatgattcctgtacttagaatatatctattctaatttcatacaggcacttagttgagaactaaaattagatcttttctacttttttctttaatttaaaaaatctctgttgacagttatttcaattgtaatatcttttcatttgtgattttcatctattgctttatatttttagaagtatatctatgcttttctggtattagaagggatattggattatctccaatattctataagtctccaaatatttaaaatctagatgagaaggaaacacatacttttagatttattatggcttaaattttcaaatagaaaaacccatctacatactaggaagaaaggcagggcttgaggcagtcatgcagca

SEQ ID NO: 364094 - DNA, 607 bp, Homo sapiens
ttgctttatatttttagaagtatatctatgcttttctggtattagaagggatattggattatctccaatattctataagtctccaaatatttaaaatctagatgagaaggaaacacatacttttagatttattatggcttaaattttcaaatagaaaaacccatctacatactaggaagaaaggcagggcttgaggcagtcatgcagcaggaattatagctaccyctaccagtaatcccaatgcctaatatgttgataactaatactactattattgtttccacagaaacaataaaattatcaagtattaagaattgactataaaaataaattcgtcttaacacccttaaatcatacatattttaattctcctaacccattgtttttcaacacggcctgcacattagaatcttccaggaagctttcagaatactagtgcttgagacccatactagacaaataaactctgggagtagcattttagaaaataatgcctaactctgctacacaactatgattactatccccttggaaaatgtagtattatccccatcttatacttcaagattctgaggccaaaggaggatccttaagagcataaatgatt

SEQ ID NO: 364095 - DNA, 597 bp, Homo sapiens
cataaactattaaatatgaaacatttaaatatgcataaatcttctaaagacaattgacttttttttctaaatataagggaatcctgacttacctaataaggaatagaaattcacactcaaatgcattgaaatacacaaatagtcattctttcctttgaaatataattttatccaagaataatttccatcactttttccattgatttaaatatgttgtaatatttacttgtatatagaggacaactatataatcagtggcaagaacttagataaagaacttccagcataagtgattctatctggatttacaggacacagatgctttgagcaatgctatctttgcactgcagacactagctagttcaatctcagtggcaaagtatgtgagaagaaagactggataaaaaggtaatatcctccctaacttaatcagtcttccrtggtgagcaactaagcttgtaactgctattcagaaagatgttcattaaggtttctgacgtgtccttcaccttgcaggagacagcccagtttatcggattgcttaaattaacaggcaggatgttctttgcaataccttttaactgaagctcattatac

SEQ ID NO: 364096 - DNA, 552 bp, Homo sapiens
tatcaacataaaattctccctacaagtagagattataactttagaaatgattattaatttactgtttagtaattttaaattagctcaaacatatggaaaacagaatgtaactagtggattgtttgtttgttttgttttgttttgttttgagacagagtctagctctgttgcccaggctggagtacagtggcaccatctcagctcactgcaacctccacttcccggtttaagcgaatctccctgcctcagcctcccaattagctgagattacaggtgcacgccaccatgcccggctaatttctgtatttttagtagagacagggtttcgmcatgttggccaggctggtcttgaactcctgacctcaggtgatccgcctgcctcggcctcccaaagtgataggattacaggcgtgagccaccgcgcctgcactaatactttgccttcaaaccatagggcttacaaagcatttattgagctctgtagctgaaaatgccatttcatatttaacagccatgatggaagtcctttattatattcatctgccatagaca

SEQ ID NO: 364097 - DNA, 620 bp, Homo sapiens
ttaatgttttcctgtttaaattttggattagtaacaactaataaattttttgtttcagtaaatatatcccttgggaaaattgcattagctataaatgtttatccaaattttcaacagttaagtctcatttttataacaaacattatccattattatatagaactgtttaaagtctgggattttaccatatttgctaagctagaaaaccagtctgttagcgtctgtggatgctgacagaagacacacgattcttggattgaagacaaataactttactacttattgcaaaagtcatggcaagagtttcctgttcatgctgtttctccatgttcccccatmccaaaggggcaacccaggtggctgagatgggtgactgcatacacagtgggttacactagaggatggaagtgctgtgagctgaggtaatctactgcttttattgtaatcctgctatttgtctggtgggatgtattaaattgagattacatatgcaaaggcaatcctcagaaatggcccatataaagaatagtgagacattgcattctcaggttactagtaagaacacacagagcctttggaagattgtctctcactctgttgttaacaattaagtttcactt

SEQ ID NO: 364098 - DNA, 584 bp, Homo sapiens
ctgttcatgctgtttctccatgttcccccatcccaaaggggcaacccaggtggctgagatgggtgactgcatacacagtgggttacactagaggatggaagtgctgtgagctgaggtaatctactgcttttattgtaatcctgctatttgtctggtgggatgtattaaattgagattacatatgcaaaggcaatcctcagaaatggcccatataaagaatagtgagacattgcattctcaggttactagtaagaacacasagagcctttggaagattgtctctcactctgttgttaacaattaagtttcacttgttaggagttttttttattatatgacccacaggatatttataagtgtctaccacaaagcataattgatatgtgatggatttcaatttgggggggatcttctggaaaccctgctttaatgtattgtaacaaatgtaataagatgtatacaaagtcagtaatagagaacttattataattacaaaaatagtgcaaattcattggggactgattaaaaatatgtcacaataggaaattataaactggaaagagtattgaaagtagcacaattaa

SEQ ID NO: 364099 - DNA, 559 bp, Homo sapiens
gtaacaaatgtaataagatgtatacaaagtcagtaatagagaacttattataattacaaaaatagtgcaaattcattggggactgattaaaaatatgtcacaataggaaattataaactggaaagagtattgaaagtagcacaattaacctaggggaaaacaaccgacagtagtagtaggctatttaaaataccaacagtaaccagagccaagaaaggaataattacgtctagagatgttagaagtattgcacacatcagttagatctggaatttggaataaatacacaactttaaaaataacaagttataagcmttaaacaaaatcactctggattcaattcaagaaattttaaaaagccaaatgaaatattggatgtccaatagtgaactggtaacttatttgtccacaaataacttaatgaagtaggaaattcagacaaaagtcacatcatctagggccatggtataaagcttggcttttattttcaatgtaatagaaagccactaaaattaataagttttagacatggtttgatttataatttgcaaaaattact

SEQ ID NO: 364100 - DNA, 578 bp, Homo sapiens
  misc_feature (1)...(578): n = A,T,C or G
gattaaaattttagaaaaattgttcacgacttcctgatattataaaagggtgatttctaagtgtgtaaagaattaagtatcaaaaataattagttcgttccttttcattcttttttctctaatcttgtcttcatgccttatttcagcaaggaggtcttcaatattggatatcctgactctcccttgattgattcagctattgatacttatgtatgctttacaaagttctcgtgctgtgttttttagctycatccattcatttatgttcctttctaaactgattattctaattagcacttcctataaccttttatcaaggttcttagcttcattgcattgggttagaacatgctcctttagatcagaggagtttgttattacccaccttctgttgcctacttctatcaattcctcaatctcattctccatccagttttgcatccttgctgtagagatgttgtgatcatttggggaagaggggttctggcttttggaattttcagcctttttacactcattatcgtgtatttatctacctttgatctttgaggctgatgacctttggatagagtttntgt

SEQ ID NO: 364101 - DNA, 588 bp, Homo sapiens
tcatacatggtctatttgaacttcatattatgtcacattcagaagcacatataatatctagttgtgaataaatgagtggttcaggtaatgacagccttgtgactacattaaatttcatcagctgtatacatctagtggtttaatccatgaataatcttatcttgaatcaataaattatttaaaggttgaaaaaccgtgattttctagtacaatatttacttgtaaaattgtttattaaaattcatctgtaatgattattttttctcgtgaactagtcatatatttaatctgaaatacaactcrtacaaaaaatgtaagaaatttcaaattatttttcaaacaatgagactaattacatcaataggtgtccaatttattctggttttattctcactctgtgtttctcataacattaagaactcatttttcaatcagtccaattggagaagcattttttaaagttcagtgggatcccttttatattgtttttgtgtccttttgacaaaaccaaaatatttttaatagcatctttattttatgtcacaaaacatcctaagttccttactgtcagtattctgtacatgactt

SEQ ID NO: 364102 - DNA, 618 bp, Homo sapiens
cctttttgcctttatggcagggactagaatgtagtgagtgaggtgcttgcctggggtgcaaaagctcagtaacttaactaataatattccaataaatattttgaaaaatcaaatttaatgcaaaactaccaaagataaaatatatttaagaactatcaaagtactaaaacattaatatgtttgtaaaagtttggatcagtattactgattttatttcctcaagatttaatttaggtcaatatggctcagtttctaattctgaaattaatattttgttcaccatagatttttctgttaattatgtttctttaaaattgtgtttaaaagccatttttcttggttacagagattattgacatgtttttacattttgtaccccagccaagtgcttcactcctgtaatccccgccttgcttcctgattctgagcagaaaaatatattgaagctgtgctgattcygtttaatcattttatggggctgaggcatatggaaggagtagaaaaatttcattagtctccagatcaatagaagtagtattcatactcaatatagatcagaagatcctggatcacaaacctggtttcctgagacatttggagtttatgggtagagagtaa

SEQ ID NO: 364103 - DNA, 618 bp, Homo sapiens
cctttttgcctttatggcagggactagaatgtagtgagtgaggtgcttgcctggggtgcaaaagctcagtaacttaactaataatattccaataaatattttgaaaaatcaaatttaatgcaaaactaccaaagataaaatatatttaagaactatcaaagtactaaaacattaatatgtttgtaaaagtttggatcagtattactgattttatttcctcaagatttaatttaggtcaatatggctcagtttctaattctgaaattaatattttgttcaccatagatttttctgttaattatgtttctttaaaattgtgtttaaaagccatttttcttggttacagagattattgacatgtttttacattttgtaccccagccaagtgcttcactcctgtaatccccgccttgcttcctgattctgagcagaaaaatatattgaagctgtgctgattccgtttaatcrttttatggggctgaggcatatggaaggagtagaaaaatttcattagtctccagatcaatagaagtagtattcatactcaatatagatcagaagatcctggatcacaaacctggtttcctgagacatttggagtttatgggtagagagtaa

SEQ ID NO: 364104 - DNA, 618 bp, Homo sapiens
cctttttgcctttatggcagggactagaatgtagtgagtgaggtgcttgcctggggtgcaaaagctcagtaacttaactaataatattccaataaatattttgaaaaatcaaatttaatgcaaaactaccaaagataaaatatatttaagaactatcaaagtactaaaacattaatatgtttgtaaaagtttggatcagtattactgattttatttcctcaagatttaatttaggtcaatatggctcagtttctaattctgaaattaatattttgttcaccatagatttttctgttaattatgtttctttaaaattgtgtttaaaagccatttttcttggttacagagattattgacatgtttttacattttgtaccccagccaagtgcttcactcctgtaatccccgccttgcttcctgattctgagcagaaaaatatattgaagctgtgctgattccgtttaatcattttatggggctgaggcatatggaaggagtagaaaaatttcattagtctccagatcaatagaagtagtattcatactcaatatagatcagaagatcctggatyacaaacctggtttcctgagacatttggagtttatgggtagagagtaa

SEQ ID NO: 364105 - DNA, 570 bp, Homo sapiens
gaagttgtatagccaaaagtcactcttttgattctgcatattttaatatgcacattacagcacagatatcatctgctgtctttacagcactgctgaatattttctcatgtaactcttttaatttatttattttttaccattccattgcaggtgcttaactccttttgtacattcctttaatatgtatgttttaaggtacttttaaaaatcttttttatattttcatgytacacatccctccttagacattgctatgttccacagttatactagcaggtaacaagtagtatgaacttatcctttctagatattttcactgagctatagtcttaaatattctagtgtattcttagcatgaatatgcctcagccttctttaatttaccatacacaaaacaggtacttattgtcattgctcttttttatataatttctgtcttggctggttgtgaggcattcatcagtcttataaacatacatcatataaaacctttccttctttttccacatcacattcgatctatcagtaaattacattggttaaaccaaaatcttgtctttaatctatatc

SEQ ID NO: 364106 - DNA, 594 bp, Homo sapiens
atatgtatgttttaaggtacttttaaaaatcttttttatattttcatgctacacatccctccttagacattgcyatgttccacagttatactagcaggtaacaagtagtatgaacttatcctttctagatattttcactgagctatagtcttaaatattctagtgtattcttagcatgaatatgcctcagccttctttaatttaccatacacaaaacaggtacttattgtcattgctcttttttatataatttctgtcttggctggttgtgaggcattcatcagtcttataaacatacatcatataaaacctttccttctttttccacatcacattcgatctatcagtaaattacattggttaaaccaaaatcttgtctttaatctatatcttctccctgcaatttaatttttaatcttttaaagattaagatctctttgcttcttattaaagaaaaccactacagaaattatcaaaacacaagtaggcaaattaaaaagtggtaaacatttcacagaagtgatagaacatgtaacaatgtctttggcagtgttcaacctaaatgtaaatacaaattaagcaaatttaaatact

SEQ ID NO: 364107 - DNA, 570 bp, Homo sapiens
gaagttgtatagccaaaagtcactcttttgattctgcatattttaatatgcacattacagcacagatatcatctgctgtctttacagcactgctgaatattttctcatgtaactcttttaatttatttattttttaccattccattgcaggtgcttaactccttttgtacattcctttaatatgtatgttttaaggtacttttaaaaatcttttttatattttcatgctacacatccctccttagacattgctatgttccacagtyatactagcaggtaacaagtagtatgaacttatcctttctagatattttcactgagctatagtcttaaatattctagtgtattcttagcatgaatatgcctcagccttctttaatttaccatacacaaaacaggtacttattgtcattgctcttttttatataatttctgtcttggctggttgtgaggcattcatcagtcttataaacatacatcatataaaacctttccttctttttccacatcacattcgatctatcagtaaattacattggttaaaccaaaatcttgtctttaatctatatc

SEQ ID NO: 364108 - DNA, 592 bp, Homo sapiens
cttaggtttaagtctttaatccaccttcagttgatttttctatatagtgagagaaaggaattcagtttcattcttccacatgtacttatttagttttctcaaaaccatttattgaatagggtgtccttttctctatttttgtttttgtttttgtatgctttgtctaagatcagttgattgtaaatatttggcttttattctgggttctccattctgttccattggtttatgtatctacttttataccagcaccatactgttttggatactacagcattgtagtataaattgaagttgcttaacactatgcctccatrtttattctttttttgcttgggaatgctttggctatttaggctcttttttggttccatatacattttaggattgctttttctaattctgtaaatttcagaataattttcattattctgaaaagtgatattggtattttgatagaaattgcattgaatctatatattgctttaagaagtgcggtcatttttataatgctgattcttccagttcatgagcatggaatatatttccatttgtttgtgtcatgtatgattgtattcatcaatgttttgta

SEQ ID NO: 364109 - DNA, 592 bp, Homo sapiens
cttaggtttaagtctttaatccaccttcagttgatttttctatatagtgagagaaaggaattcagtttcattcttccacatgtacttatttagttttctcaaaaccatttattgaatagggtgtccttttctctatttttgtttttgtttttgtatgctttgtctaagatcagttgattgtaaatatttggcttttattctgggttctccattctgttccattggtttatgtatctacttttataccagcaccatactgttttggatactacagcattgtagtataaattgaagttgcttaacactatgcctccatgtttattctttttttgcttgggaatgctttggctatttaggctcttttttggttccatatacattttaggattgctttttctaattctgtaaatttcagaataattttcattattctgaaaagtgatattggtattttgatagaaattgcattgaatctatatattgctttragaagtgcggtcatttttataatgctgattcttccagttcatgagcatggaatatatttccatttgtttgtgtcatgtatgattgtattcatcaatgttttgta

SEQ ID NO: 364110 - DNA, 631 bp, Homo sapiens
catcaatgttttgtaattcgctttgtagggatctttcatctccttcattaagtataattaattttcattaagtatattattaggggtggtacttttttacaactattttaaaggggattgagttcttgatttgattctcakcttggtcattgttgggctatagcagtgctactgatttgtgtacgttgattttataacctgagactttactgaattcatttgcaaaatctagaaatcttttgaaggagtctttagggtttctcaggaatacaatcatattatcagcaaacagagagcttgacatccttttttccaatttggatacattttctttctttctcttgcctgattgctctggctaggaattccagaactatgttgaatagaagtggtgaaagtgggcatccttgtcttgttctagttcttagggggagcattttcaacttctccccattcagtataaagttgactgtgggtttgtcatatgtgtcttttataattttgagatatcttccttctatgcctagtttgttgagggtttttaattataaaaggatgctggattttattgaatgctttccctttgtccatggaggtgatcataagggttttgtttttaatttggtttatg

SEQ ID NO: 364111 - DNA, 510 bp, Homo sapiens
ataaaaggatgctggattttattgaatgctttccctttgtccatggaggtgatcataagggttttgtttttaatttggtttatgtgatgaatcacatttattgactttcattatgctraaccatccctacatcactgggctgaaatcccacttaatgatggtaaattaccttcttgatgtacagttgaatttgatttgctagaattttgttgaggatttttgcatctgtgtttatcaaagatgttggtctgtatatcctttcttgccttggtagcagtgtgatgccagctttatataatgagttatggaagattccctggttctcaatcttttggagtagtgtcagtaggattggtacaatttttttgtgaatgtctagcagaatttggctgtaaattcatctggccctgggctctttttgttgcaaaatttttactattgattcaatctcactgcttggtattggtctgtcaggatttctatttctttctgatttaagctagaaggatt

SEQ ID NO: 364112 - DNA, 510 bp, Homo sapiens
ataaaaggatgctggattttattgaatgctttccctttgtccatggaggtgatcataagggttttgtttttaatttggtttatgtgatgaatcacatttattgactttcattatgctaaaccatccctacatcactgggctgaaatcccacttaatgatggtaaattaccttcttgatgtacagttgaatttgatttgctagaattttgttgaggatttttgcatctgtgtttatcaaagatgttggtctgtatrtcctttcttgccttggtagcagtgtgatgccagctttatataatgagttatggaagattccctggttctcaatcttttggagtagtgtcagtaggattggtacaatttttttgtgaatgtctagcagaatttggctgtaaattcatctggccctgggctctttttgttgcaaaatttttactattgattcaatctcactgcttggtattggtctgtcaggatttctatttctttctgatttaagctagaaggatt

SEQ ID NO: 364113 - DNA, 560 bp, Homo sapiens
acattggcaaggtggaaggttccataccaaatctgaagtggcaagttatagtcaatatacagttaaaactttgtttcatgaacaaatttatttaaaatattgcataaaattactttcagcctatgtgtataaggtttatataaaacataaattttatgtttagacttgggttccaacctgaagatatctcattatgttatgcaaataggccaaaatcctctggttccaagcactttgaataagagatactcaagctgtaacaatattaaaggttaatacaaaatctggagaaaagtgattttatgtattgatcattgaacaagataaagacaggttgtgatattaagtggtctgagtagtactcactgaaaagataatgtttgagcaaagatggtatggtacagttgggagcatgcatgataaactgtaagaaaaytaatgtgcccaaagtgaacagagtgaatacgttatggggaaaataataagacaaaattttttttaaattttgtctcaaagaaacttaacgattgttaaaggaaacatacatttgtaaaatgaga

SEQ ID NO: 364114 - DNA, 512 bp, Homo sapiens
gtgccctgagtcatctgcaattgcacctgatgctctacaccaactctgagagtaaaatgactgctgcttcagttccacctttcaaaatagcactgacataccacttgcccccaasctagcctgtaatcacgcagaaaggaaattcagcctgtaattttgcagaatggaaattctgagaaacttctttccacattgctaagttgacactacaaaatcaccaaaatttatcctttgtcaacttagtccatgtatattcttctaaatgtgttcaacttttttaataagtcagaagcaaaactatgctttcacttaacatgatgtaactatctttcatgcaacttaaaatataactctctttctaaaatgtatatcatatattacctctattttacatatgtaacctaacctgtaatcatgcagaagggaaattcagcctgtaatctggcagaaaggaaactctaagaaacttctttccacattcctatgttgacactacagaatcaccaaaatgt

SEQ ID NO: 364115 - DNA, 512 bp, Homo sapiens
gtgccctgagtcatctgcaattgcacctgatgctctacaccaactctgagagtaaaatgactgctgcttcagttccacctttcaaaatagcactgacataccacttgcccccaagctagcctgtaatcacgcagaaaggaaattcagcctgtaattttgcagaatggaaattctgagaaacttctttccacattgctaagttgacactacaaaatcaccaaaatttatcctttgtcaacttagtccatgtatattcttctaaatgtgttcaacttttttaataagtcagaagcaaaactatgctttcacttaacatgatgtaactatctttcatgcaacttaaaatataactctctttctaaaatgtatatcatatattacctctattttacatatgyaacctaacctgtaatcatgcagaagggaaattcagcctgtaatctggcagaaaggaaactctaagaaacttctttccacattcctatgttgacactacagaatcaccaaaatgt

SEQ ID NO: 364116 - DNA, 555 bp, Homo sapiens
gtgccctgagtcatctgcaattgcacctgatgctctacaccaactctgagagtaaaatgactgctgcttcagttccacctttcaaaatagcactgacataccacttgcccccaagctagcctgtaatcacgcagaaaggaaattcagcctgtaattttgcagaatggaaattctgagaaacttctttccacattgctaagttgacactacaaaatcaccaaaatttatcctttgtcaacttagtccatgtatattcttctaaatgtgttcaacttttttaataagtcagaagcaaaactatgctttcacttaacatgatgtaactatctttcatgcaacttaaaatataactctctttctaaaatgtatatcatatattacctctattttacatatgtaacctaacctgtaatcatgcagaagggaaattcagcctgtaatctggcagaaaggaaactctaagaaacttctttccrcattcctatgttgacactacagaatcaccaaaatgtatcctctgtcaacttagtatccatgtatacttcttttaaatgt

SEQ ID NO: 364117 - DNA, 463 bp, Homo sapiens
atgcagaagggaaattcagcctgtaatctggcagaaaggaaactctaagaaacttctttccacattcctatgttgacactacagaatcaccaaaatgtatcctctgtcaacttagtatccatgtatacttcttttaaatgtatttactttttttaaaaaatcagaagcaaaagcatgctttcacttaacataatgcaactatctttcatacaacttaaatataaccmgttctctaaaatatatgtcatatattacctctatcttatccatcaacctatccatttatctttgagtgatggccattattcttctaactgggtcataaacatcctttgacattctgcaacttaaatactgaaatgtaagttagaccactattacattgtattagaatacataggaatggtgaaggagaaaataatttgttgacatataaacacatatttataccaagataagaaag

SEQ ID NO: 364118 - DNA, 568 bp, Homo sapiens
tatttaaacctcttacaagtttctgtctctctacacacatacacataaacatattcttctcacctatggatccaatattgttatagatatatttttataatattacttttcactatgtatgccattataagtagttaaatattatttataactaatttacttaatgttctgtgtttcttaggtaacctttcttacataattgttttctcttgaattgttgattacacttttacatttgctgatttgaaaaattattttatgtgtgcgtgtgtgtgtgtgtatgtatgcatttatgtataagagattgcaggcygaagcgcagtggtgcaatcatagctcactacagtctcaaactcctgggctcaagtgatcctcctacctcaacttcctgagtgtctggaactacaggcacatgccaccatgcatggctgattttttgaatttttttagagactggggtctcgctatggttcccaggctggtgttataatgtttactgtagcttttttttttgagtgattttattataattaaatgtaatataatgaatattttattctaaataata

SEQ ID NO: 364119 - DNA, 545 bp, Homo sapiens
tcctgctcaacttattttgagatttaatcatccaaacacgagtagtggtaaacaaatttttaaaaatcaatgaattgaaataattcttcagtgcaattagttcactctaatggcaagagtttcaatagcaaaatagtccctgaggatccgattgttcttggaatgaattttatttaaccactcaattacatcttcattctttaaggcactgattccaagaagacagtgctatagatttattaggtgccttgcagtctaaatagtagctgtgtgtgtgtgtgtgtgtgtgtgtgtgtgtgtgtgtgtaactgtgtgtttcctaagcagaaaagccaaactatttatatcttgaactttgaacattagttcaagacaaaaggcaatttagaaagtaagaacacaggcacattacagatacagaggtatcttgataatgggartacaaataaaccttatcatctaaactgtggaaataaagacctactattttaaatgcacctttgaaagaaaaataaatatacttaaatgtaaaaaacattaatcat

SEQ ID NO: 364120 - DNA, 561 bp, Homo sapiens
gaatatgttgtcttctagaataataaagcaatgaacataataaataagagtttccattttcattcttggttatacaatctagtttggaaatcaagtgagaaggaaaataagtacaataatttcaaatatggtaagtcctgtacattttaagaagagagtgctgtgattgtgatttrtgctgggagaaggaaggaaatggcttcattatgtaggaaagtcatcaggttttaatgttttaattatttaaaaattgaaatataataccaaaagatctatacatgaaaggtgaaaggaaaactgttaagattggaattgttagtgtatttaatttaacacattatatttttagtctattttagttcctttgtgtttctcttatcaccatccatggactgaattccctgaggatggggatgttgtcctcttatagccataaacttgcacagcacctgcatttagaataccctagatgcatgtttgttaggaataacaattaatgaatggctaattgtcctcagacataagatcctttaagagggtttgattgttaataaaaaccta

SEQ ID NO: 364121 - DNA, 561 bp, Homo sapiens
gaatatgttgtcttctagaataataaagcaatgaacataataaataagagtttccattttcattcttggttatacaatctagtttggaaatcaagtgagaaggaaaataagtacaataatttcaaatatggtaagtcctgtacattttaagaagagagtgctgtgattgtgatttgtgctgggagaaggaaggaaatggcttcattatgtaggaaagtcatcaggttttaatgttttaattatttaaaaattgaaatataataccaaaagatctatacatgaaaggtgaaaggaaaactgttaagattggaattgttagtgtatttaatttaacacattatatttttagtctattttagttcctttgtgtttctcttatcaccatccatggactgaattccctgaggatggggatgttgtcctcttatagccataaacttgcacagcacctgcatttagaataccctagatgcatgtttgttaggaataasaattaatgaatggctaattgtcctcagacataagatcctttaagagggtttgattgttaataaaaaccta

SEQ ID NO: 364122 - DNA, 599 bp, Homo sapiens
ttccctgcttatgtgaaccacacactagggagccaattaccccagttgtttttcagaaggcttgcaggtgtcccaaagagacagacccttttaatttaaaacttctataatacagtgttttcaatggctttctgatgattcctaaaaccagtacttcctcatctttgggacagaagactcctgctttttccacatgaagaattttgtgcattacgtttcttttttctctaaagtttcagtcatcaccgttgctccctttacctttttctgctcttattaagtctttgggagaagaaaacgggttcctaaatttttttccttttgcactggagtgatttttcctatattgttaaaggataaattaaaatgataggggtagagaagaatgaaaacaaatgcggcatgaagtgatcagtacttggagaaacctaaccaaaaaagaaataaaaaataccgagaaacctcacttttagyagcccacttaactcctgctttgaaaatttttgctttgcatattgagcactcgaattcggggacttgtcttttttatttttctctttccattcaagtcacattgactaccactcttaaggatgtac

SEQ ID NO: 364123 - DNA, 589 bp, Homo sapiens
tttctgtaccccaatagacaccaaagtagcaggaagatttctggatgcccatgtactgctcagaaacactggaggaagctacttgggragaaataaaataaatgcaatatgtacttatgaaccaatgttataacttctgactgctatctcattggatatctgaaaagggagttgacatgaaaaccaaatcctggctctcaatgcattgcgaaagcccttctcctctacaacgtagatacaatgctcattagcttctcattaaagctgtagaggtgattttcaaagtgtatgaagagagacaagcaggagtgaccccaggtgacaccaaaagcacaagttgcctaacaaaggtttgtttagaaagagagattttccctttccccaaagaaagagctgctcctgagctcaatttcttgtgacatacaggaaaagggagcttcttatttttctggagccagaatgcaactccaactaaagccctctgctccatttctcttaagtgcagacccatccttaatccagtgggcacaatctaatcagctgccagcaaatataaagcaggcagaaaaacatgaaaaggtgacagtgg

SEQ ID NO: 364124 - DNA, 589 bp, Homo sapiens
tttctgtaccccaatagacaccaaagtagcaggaagatttctggatgcccatgtactgctcagaaacactggaggaagctacttgggaagaaataaaataaatgcaatatgtacttatgaaccaatgttataacttctgactgctrtctcattggatatctgaaaagggagttgacatgaaaaccaaatcctggctctcaatgcattgcgaaagcccttctcctctacaacgtagatacaatgctcattagcttctcattaaagctgtagaggtgattttcaaagtgtatgaagagagacaagcaggagtgaccccaggtgacaccaaaagcacaagttgcctaacaaaggtttgtttagaaagagagattttccctttccccaaagaaagagctgctcctgagctcaatttcttgtgacatacaggaaaagggagcttcttatttttctggagccagaatgcaactccaactaaagccctctgctccatttctcttaagtgcagacccatccttaatccagtgggcacaatctaatcagctgccagcaaatataaagcaggcagaaaaacatgaaaaggtgacagtgg

SEQ ID NO: 364125 - DNA, 529 bp, Homo sapiens
tgattcatggactgtagccaagtatttggctggatggtcagggacttggaagaagcacaattggaaaattggtgacaaagaaatttggggaagaggtatgtgcatggacctctctgagtggtcaaaaactgtgaagatatttgtatcccatgggagtgctcaccaacaggtgacctcagcagatraggattttaataatgagtagataggacaacccattctgtggaccccactcagcctctttccccagccacccctgtcttcgcccaatgtacccatgaacaaagtggccatagtggcagggatggaggttatgcaagcgctcagaaaaatggacttccactcaccaaggttgacctggctatggccactgctgagtgcccaatttgccagcagcagagaccaacactaagccctcaatatggcactattgcttggggtgatcagccagctacctggtggcaggttgattatactggacctcttcaatcattgaaaggactgaggtttgtcctcactggaataaaca

SEQ ID NO: 364126 - DNA, 587 bp, Homo sapiens
  misc_feature (1)...(587): n = A,T,C or G
nnnnnnnntgtgccttccactatcatggaaagcttttgaggactcaccagaagcagatactggtgccatgcttgtacagtgtgtggaaccacaagccaaaataaaccttttttattatagattgcctgccctcaggtattctttcatagcaacgcagaatggacgaatacagtctccacccccacttgccatataaactgtactttaatgaatatcttcttacatacataagtgtactttattattatttctatttttttattttttttgagacagagtctcgctctgtcacscatgctggagtgtagtggcatgatctcagcccactgcaacctccacttcccaggttcaagagattctcctgcctcatcctaccaggtacctgggattacaggcacccaccaagacacctggcaaatttttgtattttcaataaagacagggtttcaccatgttggccaaactggtctacaaactcctgacctcaggtgatctgcctgcctcagactcccaaagtgctgggattacaggcatgagccactggacctggcccagttgtacttttaaaaatacattaatcactgaag

SEQ ID NO: 364127 - DNA, 606 bp, Homo sapiens
aaaatatttaaatctgctttaaaatttccaaatgacaacaatgtgaaaattataaagatgttttagatcaataacatggttatattaaatgggatagttaaaattatgtggggcagaaatgaacacctttgaaacgttggwtgtgtatctgtatgtgtgcactgtatatgaacatttgctcagagacatatttaaagcagtttttaaaaattatttcatttataatttatacattgcaatccctgtctttagctaaccttgtcctagttatcgatagttttctgttgttgcccatatcaacaggcaaagagactcaaagaactataaacactaagcagtctttttttttaattcccataatgaacaattcaatccaaaaataaaatataaacaataattgcctttaagaattcaatttaggcagctcctagttttgttttcacagaagatagacgtttaaaactttttaaaaaacaagatcaccagagctatccagtatgaattacaatgtttcagtgctctggtctgttcataggcttgcaagcacccacttggttcatcacacaaagtaatatgatcatgttaaaagttcagttttttggtttg

SEQ ID NO: 364128 - DNA, 599 bp, Homo sapiens
taaaaatgaaagctttttaaaatgattgttattacttttgtcattttataaaatccaaatattattttagttctagtatttcaaatgttgaaggcaattaattgcttgttgctcttagcattgtgggttcagtttccccatactttatcttttcagtggaaagagtatctttcaattttataaggtttgtaaagtttttactagattgggatgagatttattctgacttttttacaagaccaattaatackgcagtgtttctcagtttttggagtaatattgattactgatacacatgtttaaagcaatttgaaaataaaaacaactgtattgtgaatcttatctcttccagtatcacaaaaagcagtatcttttgaggcagggagtatatgtctttcaatcatctgtttacaaataaataaactgatactcactgacataaataacaagaagtgatcctacacctttctgtgatttcacagtatgaaaaagcatcagaatctcaatgatccttggtacagaaaggaaaaggaaagaatgagaaattttttgtttcttttcttttgattgtactattttctttagtaatgacccctgtg

SEQ ID NO: 364129 - DNA, 599 bp, Homo sapiens
taaaaatgaaagctttttaaaatgattgttattacttttgtcattttataaaatccaaatattattttagttctagtatttcaaatgttgaaggcaattaattgcttgttgctcttagcattgtgggttcagtttccccatactttatcttttcagtggaaagagtatctttcaattttataaggtttgtaaagtttttactagattgggatgagatttattctgacttttttacaagaccaattaatactgcagtgtttctcagtttttggagtaatattgattactgatacacatrtttaaagcaatttgaaaataaaaacaactgtattgtgaatcttatctcttccagtatcacaaaaagcagtatcttttgaggcagggagtatatgtctttcaatcatctgtttacaaataaataaactgatactcactgacataaataacaagaagtgatcctacacctttctgtgatttcacagtatgaaaaagcatcagaatctcaatgatccttggtacagaaaggaaaaggaaagaatgagaaattttttgtttcttttcttttgattgtactattttctttagtaatgacccctgtg

SEQ ID NO: 364130 - DNA, 550 bp, Homo sapiens
ttttactagattgggatgagatttattctgacttttttacaagaccaattaatactgcagtgtttctcagtttttggagtaatattgattactgatacacatgtttaaagcaatttkaaaataaaaacaactgtattgtgaatcttatctcttccagtatcacaaaaagcagtatcttttgaggcagggagtatatgtctttcaatcatctgtttacaaataaataaactgatactcactgacataaataacaagaagtgatcctacacctttctgtgatttcacagtatgaaaaagcatcagaatctcaatgatccttggtacagaaaggaaaaggaaagaatgagaaattttttgtttcttttcttttgattgtactattttctttagtaatgacccctgtgcctttggaaaacttagaaaaacacaaatctcttatgtactagtatatctccacacagtagatacttattgagcacctctacatgatctaagctaagcattagagatgcaaagataaatatggcataagtttatcctcactgtatat

SEQ ID NO: 364131 - DNA, 592 bp, Homo sapiens
ggctaactgcaagttggtttcagttatgttcctatgtccactcattctggaactcagaggcaacagagcatgctatttgcatgtaagaggagagaattgcaaacaatgaaactaaaaaataaagcaaaattataaaaacacatttaaacattttgtttacatcacatatatttaattccattggcaaagmacaccatctatgagccaggaaagtctaatccagccacagggaaactaaggaaagacatgagaggaatataaaaattgtgaaaaaaatgataatacctaccagaagacctagccaatgataagtcaagaagtgagtgcatggtgttataaaagaaggtgagtttgaaaactcacatagagtagcagtgctagtagcagtagtagtagtaagggtaatagtaaaataacagttactgagtgctcaaaatatgctaatggcttttctttctatttaataaacatattaaataagcacaacacacctttaaagtaagtcctattattatgtccattttatatgtgaagaaaccaaaacaatttcccaaagttcatagaagtagaagtggagaatggagtctaacta

SEQ ID NO: 364132 - DNA, 527 bp, Homo sapiens
gaacaccatctatgagccaggaaagtctaatccagccacagggaaactaaggaaagacatgagaggaatataaaaattgtgaaaaaaatgataatacctaccagaagacctagccaatgataagtcaagaagtgagtgcatggtgttataaaagaaggtgagtttgaaaactcacatagagtagcagtgctagtagcagtagtagtagtaagggtaatagtaaaataacagttactgagtgctcaaaatatgctaatggcttttctttctatttaataaacayattaaataagcacaacacacctttaaagtaagtcctattattatgtccattttatatgtgaagaaaccaaaacaatttcccaaagttcatagaagtagaagtggagaatggagtctaactaaaagacaagtctggagtctaactaaaaaacaagtcttcaacataatactggaagtcctagccagagcaatgaggcaagagaaagaaataaaaggcatccaaataggaagagaggaagtcaaac

SEQ ID NO: 364133 - DNA, 527 bp, Homo sapiens
gaacaccatctatgagccaggaaagtctaatccagccacagggaaactaaggaaagacatgagaggaatataaaaattgtgaaaaaaatgataatacctaccagaagacctagccaatgataagtcaagaagtgagtgcatggtgttataaaagaaggtgagtttgaaaactcacatagagtagcagtgctagtagcagtagtagtagtaagggtaatagtaaaataacagttactgagtgctcaaaatatgctaatggcttttctttctatttaataaacatattaaataagcacaacacacctttaaagtaagtcctattattatgtccattttatatrtgaagaaaccaaaacaatttcccaaagttcatagaagtagaagtggagaatggagtctaactaaaagacaagtctggagtctaactaaaaaacaagtcttcaacataatactggaagtcctagccagagcaatgaggcaagagaaagaaataaaaggcatccaaataggaagagaggaagtcaaac

SEQ ID NO: 364134 - DNA, 527 bp, Homo sapiens
gaacaccatctatgagccaggaaagtctaatccagccacagggaaactaaggaaagacatgagaggaatataaaaattgtgaaaaaaatgataatacctaccagaagacctagccaatgataagtcaagaagtgagtgcatggtgttataaaagaaggtgagtttgaaaactcacatagagtagcagtgctagtagcagtagtagtagtaagggtaatagtaaaataacagttactgagtgctcaaaatatgctaatggcttttctttctatttaataaacatattaaataagcacaacacacctttaaagtaagtcctattattatgtccattttatatgtgaagaaaccaaaacaatttcccaaagttcatagaagtagaagtggagaatgsagtctaactaaaagacaagtctggagtctaactaaaaaacaagtcttcaacataatactggaagtcctagccagagcaatgaggcaagagaaagaaataaaaggcatccaaataggaagagaggaagtcaaac

SEQ ID NO: 364135 - DNA, 477 bp, Homo sapiens
aaagaatgaagcaacaaaagaacgaaagcagggatttattgaaaatgaaagtacactccacagtgtaggagcagacccaagcagtggctcaaggtcccrgatacagaatcttcttagttccaaataccccttagaagtttcccattgtccactttatgctcacctcgtgtaactgcagtggtagcccgcaatcagtctgattggttgcagacagcaatggtatatatatacatatgtgtgtatgtatggtatatatatacatatgtgtatatatggtatatatatacacataccatatatatgtatatacgtatataaacatgcataccatatatatggtatgcatatatatacacatatctatatatgtatatatacacatatatacacatattatatatatggtgtgtatgtatatatacacatgctatatatatagtaggcatatatatacataccatatatatgtatatatac

SEQ ID NO: 364136 - DNA, 426 bp, Homo sapiens
ttattatattttatacaaaaattacaaattgcccttgctcctttcaatgactctaagggacaacaacaaatatttactgctatatatcagtgtatatacacaggatatgttaatggtattcagattgtgtcaaagaaaattaggatatgtgaaaattcaaagggcatacatagtggtttctgctttcttgtctaaataatatgttcgcaaaggtccacaacttaaagcagaaattaatctcagcttctagttcgcagttgtatagtatcaattcaaggtaattttatttatttacttacatatagttacactcaaagacatttctgtaaatcatatggaataagataaaatattaactgacttcaatttatttaatmtcaaattgctagagccccaaaatgaaatttaccaaaagagaaggtgtat

SEQ ID NO: 364137 - DNA, 588 bp, Homo sapiens
taaataactgaaactgcagcaactactgttacagtaggcratcagtcaaacacaggcagggcaggagagtcaagcagggcaagagagccccaccccacccccaagcaccatcaggaatgtcaggccttatgcctctcagttgaattcttctgaggaggcaagaactgaggttgctgctgacctgtacaaatttgctcctgttaacatacattggtgccacttaactcagttacattctctacttgtaagatatctctatatcttgccttcttcagctggaggcattcaacctcatgtatattttcttctcccctttcactctcctgcttaataatcagcccccagaatgattattctgggtcacagtgtctctgcttctccctggctgatctctcaggttaccctgacacacttatcagggtgtcaaggaccctgtaatctgcacagagtaggtcagagacactcatagctttcctggactggaagctcgtgagagtagtagggctaaagcctgagatcatttaatatcttgggtttcctctgcttttccatctacaattggctctttcccaaaaactcacatcacct

SEQ ID NO: 364138 - DNA, 588 bp, Homo sapiens
taaataactgaaactgcagcaactactgttacagtaggcgrtcagtcaaacacaggcagggcaggagagtcaagcagggcaagagagccccaccccacccccaagcaccatcaggaatgtcaggccttatgcctctcagttgaattcttctgaggaggcaagaactgaggttgctgctgacctgtacaaatttgctcctgttaacatacattggtgccacttaactcagttacattctctacttgtaagatatctctatatcttgccttcttcagctggaggcattcaacctcatgtatattttcttctcccctttcactctcctgcttaataatcagcccccagaatgattattctgggtcacagtgtctctgcttctccctggctgatctctcaggttaccctgacacacttatcagggtgtcaaggaccctgtaatctgcacagagtaggtcagagacactcatagctttcctggactggaagctcgtgagagtagtagggctaaagcctgagatcatttaatatcttgggtttcctctgcttttccatctacaattggctctttcccaaaaactcacatcacct

SEQ ID NO: 364139 - DNA, 588 bp, Homo sapiens
taaataactgaaactgcagcaactactgttacagtaggcgatcagtcaaacacaggcagggcaggagagtcaagcagggcaagagagccccaccccacccccaagcaccatcaggaatgtcaggccttatgcctctcagttgaattcttctgaggaggcaagaactgaggttgctgctgacctgtacaaatttgctcctgttaacatacattggtgccacttaactcagttacattctctacttgtaagatatctctatatcttgccttcttcagctggaggcattcaacctcatgtatattttcttctcccctttcactctcctgyttaataatcagcccccagaatgattattctgggtcacagtgtctctgcttctccctggctgatctctcaggttaccctgacacacttatcagggtgtcaaggaccctgtaatctgcacagagtaggtcagagacactcatagctttcctggactggaagctcgtgagagtagtagggctaaagcctgagatcatttaatatcttgggtttcctctgcttttccatctacaattggctctttcccaaaaactcacatcacct

SEQ ID NO: 364140 - DNA, 389 bp, Homo sapiens
ctaaggaaagagaaatgctggagccagaggcatgcttaagtactggctgctctgcaagctctcaagccttctccaggttgccctaaggacattcctccagataactgccattggtgtgggaagccaggccactggaaggcaaactgccctaaggggacaaacaggaggtagcctcacacagcttacccactttgctacaagctcagccattgtaaatgggactttccctgatggctgaaggataagtgggacagaattccaacccctgatgaccttgagctgaaggggctctctggctsgcttctaaatcagacatcatcatcaacaggccaaagccaagagcaactctggaggtggcaaaaaaaaattatcaatttcccttttgggtt

SEQ ID NO: 364141 - DNA, 615 bp, Homo sapiens
tattcagtttttccagaaattgaacattggaataaaagcacaacagagttttattaaagcattaatctgctctttataaatgtgttattggtacatcttccaacattatgtgaaattcctataattctgatataacttagtatacattatcaataataattatatttgttatgttaaattattgtgtgccacagaggtaacaartttgcatggcaaatgtgcctttgactgtggctgccctgagaagttttgacacccacagacaattgtcatcattttttcatcctctttagaaggtggttttataattcagctatagaactgtaacagctgctcttaaatgcaggtttccaatgacttcagagactgacattagaacaaaggaaaaactttcagaactctcatggagagctaaaatgttcatgaatatcaagcagaacaggagttatctgcatgaactgcactaataaaggactgaaacagtccttctagttccagcttttaacaactgagtaaagtatactcctataaagaaaatttggagcatatttgtttctctgtacctgatttctccagaattttgaaactatttgtgagtatttttaacttatgtca

SEQ ID NO: 364142 - DNA, 553 bp, Homo sapiens
ttgctttacataatgtccttctggctcatccttgttgttgtgaatgaaaggattttttatggccgaatagtattccattgtatatataggacacattttcattatctgttcmtctgttgaggaacatttaggttgacttcatatcttagctgtgtatatagtgctgcaataacaatgagggtacaggtatattttttgatatactgattttattttccttggttgaaggctagtcaagggactgtcaactcagatgctagtttcagttttagattttgagaaacctccacattgtttttcataaaggctgcagtaatttacattcccaccaacaatgtattttttgtcttcttgatgcatcttctaagcaatgatctgtgaatgctataatttaaatttccctattgaagttatgtgacttcattttataatgaacaattaaaaataaaaactcaggagttttaaagcctatcctctattggataagaagctagaagaatatttaagataaaagtatcagaatgagatttcagttgagtaccaggaagcagta

SEQ ID NO: 364143 - DNA, 582 bp, Homo sapiens
tcagtaggaagtaccaaacttaatgcaggagtgtcagggacaaatttaaatagactggttgttagtgatggatgaccattggcgtgaaggagactcatgaatatttgaggcaaaaagtcctatacaaaacacgataataagccagaacaaaacaggaagaaagatgatgtaacccacaaactgtagtggacagaaaaaagaatctgagcaacacatttcagaattgggttaggaactagctgagtccaaaactgtatgtaagcccatggctggatctttatgtaacaataaagatagatgcagcatacatccactgattttctaacttaaatttacaaattgtttatatttatattatattatttctttctcaaagtattccttaataagaatatataagatccttcataagaataataattaccactattttcttttgatgattaagtgttctgttattaagcatgcatttaaaaacagatataatcaattaaacattttaaaccyagaaaacacagatgtatatatgaaaaaactacttaaaaagaaatataaattataatttaagtgaatccataaata

SEQ ID NO: 364144 - DNA, 582 bp, Homo sapiens
tcagtaggaagtaccaaacttaatgcaggagtgtcagggacaaatttaaatagactggttgttagtgatggatgaccattggcgtgaaggagactcatgaatatttgaggcaaaaagtcctatacaaaacacgataataagccagaacaaaacaggaagaaagatgatgtaacccacaaactgtagtggacagaaaaaagaatctgagcaacacatttcagaattgggttaggaactagctgagtccaaaactgtatgtaagcccatggctggatctttatgtaacaataaagatagatgcagcatacatccactgattttctaacttaaatttacaaattgtttatatttatattatattatttctttctcaaagtattccttaataagaatatataagatccttcataagaataataattaccactattttcttttgatgattaagtgttctgttattaagcatgcatttaaaaacagatataatcaattaaacattttaaacctagaaaacacagatgtayatatgaaaaaactacttaaaaagaaatataaattataatttaagtgaatccataaata

SEQ ID NO: 364145 - DNA, 572 bp, Homo sapiens
aaaatctcatgaaaatagcatgaacataaaaactttctgagaaaagaaaaatgagaatactttaaaagttttacccttgcacacttataaatctttaaattctattaaacatattttgttagcattattttaaagctgtgtagcatgtccttaaattactgaaatagtataaccaaaatttttatggactagcatattcttgtaacaatttttgcaaaatatgcattaaaactggaagctttataataaattattactttatctgaatttaaccccacttgcattatctttctcagctataattatctgtcccaaagaatatctccagcttttgcarcagtaatcttgacctctctgcttgctcagggcatatctagaaatgaacccagttgcctcgaacctgtaatttctggaaacaatatttacagattcagagagaatctgaaaacagacagagatatgacctgttttaacatgggagctcagcaacaatctttacattgggattatcctgaggtatttgggatgcaaaaaaaaaaaaaaagtactcaagtttctgtgtatgctgtttt

SEQ ID NO: 364146 - DNA, 608 bp, Homo sapiens
tcaccatgctctaactctgtaaattactaaaatagtataatccctttcccattgcctttgttcatttgctttacccacattggcctttttgctggtcctggaatagggcaatcacactcatgactattaccatagttcaktgtattctctcctcctggaattctctttccccagatttttacttggttcatttcctagagacacccatattttcaccttaatgtctatcttactacctgctttttaaatttatttattataattgacataatcttacaataaaaatttatggatagtatttttcataaaactgtaaacatcatgagtgcagagacattatctgtcttctttacctctagaagctgagaatgaccttttgccaaaggcagcagggaaaggaggacttcagttttaccaattgaattctgtcaataccttgaattagtcaagaagtagatttgtctccagaggccagtcctgttgacaacttcattttgaacttgtgaaatttgaagcacaaatatcagctgagcgcaccaaacttccaacctacagaatcacaataaattagtgttgtattaagcctttaactatgtggcaaattttta

SEQ ID NO: 364147 - DNA, 646 bp, Homo sapiens
acatctctaatacgtgtcctattaactaayccttatgctgttaagttacagggctttgattcctgggtctgaaaaaggtcctgacttctgctatatcttaaacattgacaacagttagatcctcttgttcagaacagggagaaggtgacaatcaaaatgaactgcttttgtgagacacagggccagaaattaaaaccactcaatccctctaggtccagggactatcatgaaagaggtgggcgtgtaagattgtaagggccaactttgagaaataacactagttattgttgttgttttctggtggttatatgtacccttatgtagaccttagaaagggcttaccattctaggccaacgttgaagatacagcttagcttgagagaccaggccagattgtggcctcttaaatggcaaaggaaacttcttggagtcagaagcaattctgtaaccttacttttgggcttttagttttcagctttcatgttgcttaaaagggttttgccactttcattcgtatctgacttagaacatttaattggctaaaaatcctttaattctaatttccttggccacgggacaggttggacctagggcaggtagccatactaacccagcaacagtaggaaacaaaatacagccctaagac

SEQ ID NO: 364148 - DNA, 646 bp, Homo sapiens
acatctctaatacgtgtcctattaactaacccttatgctgttaagttacagggctttgattcctgggtctgaaaaaggtcctgacttctgctatatcttaaacattgacaacagttagatcctcttgttcagaacagggagaaggtgacaatcaaaatgaactgcttttgtgagacacagggccagaaattaaaaccactcaatccctctaggtccagggactatcatgaaagaggtgggygtgtaagattgtaagggccaactttgagaaataacactagttattgttgttgttttctggtggttatatgtacccttatgtagaccttagaaagggcttaccattctaggccaacgttgaagatacagcttagcttgagagaccaggccagattgtggcctcttaaatggcaaaggaaacttcttggagtcagaagcaattctgtaaccttacttttgggcttttagttttcagctttcatgttgcttaaaagggttttgccactttcattcgtatctgacttagaacatttaattggctaaaaatcctttaattctaatttccttggccacgggacaggttggacctagggcaggtagccatactaacccagcaacagtaggaaacaaaatacagccctaagac

SEQ ID NO: 364149 - DNA, 646 bp, Homo sapiens
acatctctaatacgtgtcctattaactaacccttatgctgttaagttacagggctttgattcctgggtctgaaaaaggtcctgacttctgctatatcttaaacattgacaacagttagatcctcttgttcagaacagggagaaggtgacaatcaaaatgaactgcttttgtgagacacagggccagaaattaaaaccactcaatccctctaggtccagggactatcatgaaagaggtgggcgtgtaagattgtaagggccaactttgagaaataacactagttattgttgttgttttctggtggttatatgtacccttatgtagaccttagaaagggcttaccattctaggccaacgttgaagatacagcttagcttgagagaccaggccagattgtggcctcttaaatggcaaaggaaacttcttggagtcagaagcaattctgtaaccttacttttgggcttttagttttcagctttcatgttgcttaaaagggttttgccactttcattcgtatctgacttagaacatttaattggctaaaaatcctttaattctaatttccttggccaygggacaggttggacctagggcaggtagccatactaacccagcaacagtaggaaacaaaatacagccctaagac

SEQ ID NO: 364150 - DNA, 482 bp, Homo sapiens
tgtctactcttcattgatttaaaataatgaagtaggctaacactatgatgcataaaaatgaaagtttcaaaaggaatattgttggactcatgtaaataaagatattaaacataagtttcctctaacttcagtaactgtagatttttattatgaatttaaattatttataaagatgtgtgggtgtgagagagttttgcttatattaatatccatyatactgatcttttctcttgtttcttcacaaaaatgcatgcaagatttatagctttgtcattaagggtattgacaataggaataaatagactgcaatcagtattgacaataggaataaacagactgcaatcaaatcatgatcataacatttattagttaggtggtcttgaattatgcatgccttaattttatcctctataaaatggggagaaatataattgactaacctaactggatatttttaaattaaataattttagtacacacac

SEQ ID NO: 364151 - DNA, 543 bp, Homo sapiens
tgacaataggaataaacagactgcaatcaaatcatgatcataacatttattagttaggtggtcttgaattatgcatgccttaattttatcctctataaaatggggagaaatataattgactaacctaactggatatttttaaattaaataattttagtacacacacaagttaatatgttaacttacayataaaaatctgtatctaagcctgggcttttcatattatttctaactttaaattcatttactgtgttattactttacattgttatttctcaatttgttaaaaatattacaaaatctttttaaaaatttagtcttatagaactcaaaatataaaaatatgcttgcctatgttaaaacctaaggaaaagatgtttaaaaatatttaatcaacaaattaataatattttatcaatgaattattaaatttttctaacaggcatttatttttatgacccttttaaaaatatatactacccctatgaatttaagttaaaaggtctgggggaaatattacaacatatatttaaacttatttat

SEQ ID NO: 364152 - DNA, 543 bp, Homo sapiens
tgacaataggaataaacagactgcaatcaaatcatgatcataacatttattagttaggtggtcttgaattatgcatgccttaattttatcctctataaaatggggagaaatataattgactaacctaactggatatttttaaattaaataattttagtacacacacaagttaatatgttaacttacatataaaaatctgtatctaagcctgggcttttcatattatttctaactttaaattcatttactgtgttattactttacattgttatttctcaatttgttaaaaatattacaaaatcttttwaaaaatttagtcttatagaactcaaaatataaaaatatgcttgcctatgttaaaacctaaggaaaagatgtttaaaaatatttaatcaacaaattaataatattttatcaatgaattattaaatttttctaacaggcatttatttttatgacccttttaaaaatatatactacccctatgaatttaagttaaaaggtctgggggaaatattacaacatatatttaaacttatttat

SEQ ID NO: 364153 - DNA, 462 bp, Homo sapiens
cagcaccagtcaactatttttgtcatcttctagattttggatttgcagtaggacagttcattttgacttccctctttccctaatggtatatttcttcctagcccaaaatgtgcactctctgtgtgtgtgtgtgtgtgtgtgtgtgtgcgtgtgtgtgtgtgtgtgtgtgagtasgctttcagctataggaaatccttgaaatctgtgctgtttctctcataaagttggagcaaattctctcttagagaagattcaatagtaagcttaaattgtatatgcttttaaaaaataattgcctggtattttcttattgttttgcaattaatgtagttaagctttaaaatttattttgttaaacattttcatagatttctttagaaacatcatagtaataaattataaatggcaaatttttacagccaaataaacagaatagacaaaccagtcattttggacaatttg

SEQ ID NO: 364154 - DNA, 554 bp, Homo sapiens
ctgtctttcaaatggcacatttttaatttcactgaagtgcaatgtgtcaatctttttacctaatggattgcgtatccttatcaatgaaatctccacattatcctactttgcaaagtttttctcctacacgttcttatagaaattttataatttcaggttgtacatattggactataattcattttaaactaawttttgtatatggtgagagatttggattgaaagttattgtttttcatatgaatattcattttccccctacatcatttgttgcagaataccctttcaacactaaatggtctcgacaactatgtaaaaaaaagaagaaaaaaatgtaagcagaaaactatagaccattcttgacatttctttttcacgtccaatttcaatattaacaccaagtttttaaattttgtatcttaaagaccttggggccacataatcaaaccaaatttattaaaaataatcatttctatacattctaattattttcttcactaccaatcaaatacctttatatttaaggaataagataaattaagggccatgcaatt

SEQ ID NO: 364155 - DNA, 639 bp, Homo sapiens
cctttgttttttagtctcccattatttaaagttcattccaggaaacttgacttcccgcatttgtcattcagaaaccagcgaaaccaragctcccgaaactccaaccctaccaagagccaggcacacgcctggtgatctctttctgcaaataggcaaaatatacagagttcctcatctgtatagatgcagatgaggaagggaggcagtagaagtgacctgacttcaagaccttgaggaaagcacaagcaccattattgttttacctgaaaataaggtaaatatatgtgtctggaatgtgtatctggagtgttgtgaactaagtcagataaacgtaccactcatgagatttctaatttcagccttcttgacaaaatggaacaattatatattttaagcaagtagttgatatagataggtttttggattaatgtaataataaatttaacaagatgagcaattttaaatatgatgcattgataatcaatagttctgacaatgtgagaagtttaaaacatacggcaggcctccagttgttatcgtgtataacatgcaggatgctatattcataacacagcaagaatatattcagctcttatttcagtgatgtgctcacttttaattttgtgtcatactcccagt

SEQ ID NO: 364156 - DNA, 639 bp, Homo sapiens
cctttgttttttagtctcccattatttaaagttcattccaggaaacttgacttcccgcatttgtcattcagaaaccagcgaaaccagagctcccgaaactccaaccctaccaagagccaggcacacgcctggtgatctctttctgcaaataggcaaaatatacagagttcctcatctgtatagatgcagatgaggaakggaggcagtagaagtgacctgacttcaagaccttgaggaaagcacaagcaccattattgttttacctgaaaataaggtaaatatatgtgtctggaatgtgtatctggagtgttgtgaactaagtcagataaacgtaccactcatgagatttctaatttcagccttcttgacaaaatggaacaattatatattttaagcaagtagttgatatagataggtttttggattaatgtaataataaatttaacaagatgagcaattttaaatatgatgcattgataatcaatagttctgacaatgtgagaagtttaaaacatacggcaggcctccagttgttatcgtgtataacatgcaggatgctatattcataacacagcaagaatatattcagctcttatttcagtgatgtgctcacttttaattttgtgtcatactcccagt

SEQ ID NO: 364157 - DNA, 594 bp, Homo sapiens
cacaagcaccattattgttttacctgaaaataaggtaaatatatgtgtctggaatgtgtatctggagtgttgtgaactaagtcagataaacgtaccactcatgagatttctaatttcagccttcttgacaaaatggaacaattatatattttaagcaagtagttgatatagataggtttttggattaatgtaataataaatttaacaagatgagcaattttaaatatgatgcattgataatcaatagttctgacaatgtgagaagtttaaaacatacggcaggcctccagttgttatcgtgtataacatgcaggatgctatattcataacacagcaagaatatattcagctcttatttcagtgatgtgctcacttttaattttgtgwcatactcccagtattcaaaaggcaaaggactttaaaggactttggattttttgtgggatagatataaggatggactacaacttttatgattactgtgaacaaaaggaaaaatcagctaaattctatcctttaaacaaattctttagccaacacttttaaattttgacctatgttattcaagatatgatgttagattttatatacaac

SEQ ID NO: 364158 - DNA, 588 bp, Homo sapiens
aaatatttataaatgaacattacatgttatttgaggttttaaagttatgttatattgaattaagcaattcattttatttacattcattaaatgtctggatcatatccaaatgagataaaaacatgaacaaatcactgaatataatatgtttgttcttggtttctaaaattttatggaaagactaactgcatttagatctcttaatactcataaaaattatgttatgggwagctgtgttttaaaaaattataaaaagattctcatctatacaatgctaatatgtgatggaccactcaaaattggttgatagaaattaatgttatttagagttaaaattctaattattttattccaatatacataatttttaatagaaattataccaaaaaaagatgtattttaataagaaagactattaaaaggcataaaaatgtgtccttattaagaaaaaaaattttaattcagagtttatttaaaagttgtttcaaaatataaattgaggaagaaaataaaaggaagatagaaagaaaacagtaagtaggagagatgtatataaagtaagttatatttataaagatttatttttgg

SEQ ID NO: 364159 - DNA, 483 bp, Homo sapiens
agcaactgggattgtcatattactatttattttactttgyatatttttcaaactttgttatctgttacttgttaaattttttcagaagtacacttcttcacaaaataatgtgaatgtagcacttttacatgatggcaaaagatgacagaatggaaaatattgaatttaattaaggactccagctagacttagccgagagtcacttttttcataactctcttgtagcttgaatgtggcttaaagagttttgacagttactcctacctgctgttcactccctccaatgtggcactagacctggaatagtaaactgggattggtcttcccggcaccaaggaacaatcaaagactaactacaggataaatagattatgcttttggaaaaaaaactctgataaacagaaccaggaaaggccatgaagaaaagggttctcatggctgataacaaaaattacacaaatagctctgcaaaaactgcaactt

SEQ ID NO: 364160 - DNA, 483 bp, Homo sapiens
agcaactgggattgtcatattactatttattttactttgtatatttttcaaactttgttatctgttacttgttaaattttttcagaagtacacttcttcacaaaataatgtgaatgtagcacttttacatgatggcaaaagatgacagaatggaaaatattgaatttaattaaggactccagctagacttagccgagagtcacttttttcataactctcttgtagcttgaatgtggcttaaagagttttgacagttactcctacctgctgttcactccctccaatgtggcactagacctggartagtaaactgggattggtcttcccggcaccaaggaacaatcaaagactaactacaggataaatagattatgcttttggaaaaaaaactctgataaacagaaccaggaaaggccatgaagaaaagggttctcatggctgataacaaaaattacacaaatagctctgcaaaaactgcaactt

SEQ ID NO: 364161 - DNA, 483 bp, Homo sapiens
agcaactgggattgtcatattactatttattttactttgtatatttttcaaactttgttatctgttacttgttaaattttttcagaagtacacttcttcacaaaataatgtgaatgtagcacttttacatgatggcaaaagatgacagaatggaaaatattgaatttaattaaggactccagctagacttagccgagagtcacttttttcataactctcttgtagcttgaatgtggcttaaagagttttgacagttactcctacctgctgttcactccctccaatgtggcactagacctggaatagtaaactgggattggtcttcccggcaccaaggamcaatcaaagactaactacaggataaatagattatgcttttggaaaaaaaactctgataaacagaaccaggaaaggccatgaagaaaagggttctcatggctgataacaaaaattacacaaatagctctgcaaaaactgcaactt

SEQ ID NO: 364162 - DNA, 628 bp, Homo sapiens
caaaagattaagctgaactgttacaacacagtgtataaaataattaaattaaaatgaatcaatagcaaatctaagaactaaaactataaaactctcagaggaatgcgtagaatgaattagcataactttgtatttggcaatggattcttagacaccraaagtacaagcaataacagcaacaaacaaaataaattaataaacttcctcaatgaaaaatttttgtccctcaaatgacattatcaagaaagtaaatgacaaaacacaggatgaaaaaaatgcaaatgatgtatacaaaaaaggtctaatatccagaataaatatactgtaacaactcaacaacaaaatgataaacatctaaattcacaaattggcacaagacttgaattaacatttctctaaatatacacaagtggacaaaaatcacatgaaaagatgttaaacattattagtcaatagtgacatgtaaattgtaaccacaaaatacaagttcatattcactaggattggtataattttttaaaagaaaataacaagtattagagagaatatggagaaactggaaccattgaacattgctgttggaatgtaaaatgatgtagtcactgtggaaaaacaaatttcagttttt

SEQ ID NO: 364163 - DNA, 596 bp, Homo sapiens
tacctttgggtgaaaataggtgtttcgtttctatgaggctgcatcttttgatgtgtttcaggcatatggttaagagtaaaaatactcccttcttagcacggtaacagattaaatttaaaatagtgctttcaaacaaatccttagatatggcaacatatttgcaagcagcagccctaaaggaaagctttttcatttcctctttaaaacactcatgtttggccaatcctttattatacgtgtgtatgtgtgcacgtgtgtgcatgcacatgtgtgtaaagaatgctattctatagtgatataattaaaaagtaaatagtaaatgagakaatcttgttcttgtgaaactcacatttacagggaaaaaagtgaacacatttcatttaaagcaacaccactgaaacaactgtgcaaagaaaataaaaataataataattatctttttaagtggtaaagaatgtaaacagaaaatacaagatgaagtgctagtaagtatagccatgacaaggtttactgagtgaattttgaactgcttgaaatagaaatgtgctaaaatttctcatataaaaagataaggaattagatttcagaaaaactag

SEQ ID NO: 364164 - DNA, 409 bp, Homo sapiens
aaggtgatcaaagttcatatcattaayaaaaaaacaaattaatctcatgtgaccacctgagtatacatttaaaagagcgaaatatcacttctgtgttattcctaccaaatgtgcatatcccaaatctaaccttatgaaatgatcaaagaagcacaacataactggcctgtactcttcacccattaaataccagatagcattcttaaaactgcaggtttagtaatggagaaagaaaagcaaaaggaaatttgaaatctagcaaatgtattactttcataaagttttgttctggttatagatagtaaaattaataaatcaacgtgagcatagcaggtaaccgtgaaaaagttgctttgatatgacatgactgggtaggggttataatttatgattggataatcaagaaagt

SEQ ID NO: 364165 - DNA, 530 bp, Homo sapiens
aataaggtgatcaaagttcatatcattaataaaaaaacaaattaatctcatgtgaccacctgartatacatttaaaagagcgaaatatcacttctgtgttattcctaccaaatgtgcatatcccaaatctaaccttatgaaatgatcaaagaagcacaacataactggcctgtactcttcacccattaaataccagatagcattcttaaaactgcaggtttagtaatggagaaagaaaagcaaaaggaaatttgaaatctagcaaatgtattactttcataaagttttgttctggttatagatagtaaaattaataaatcaacgtgagcatagcaggtaaccgtgaaaaagttgctttgatatgacatgactgggtaggggttataatttatgattggataatcaagaaagttttccctgaggaggtggaagctgacactttacaattagaaaaacaggtgggaatatctggatgataagcatttagactgaggtagcaccaggtgcattgacttgaaagaaggaacaaa

SEQ ID NO: 364166 - DNA, 508 bp, Homo sapiens
atattttttaaaaattaaaaaaattgccagagagaaattcaaatcactgagaacaagtagaaaagttttgttattatacaaatattactaaaattcaagatgagtatctaataaagatagacaagtatactcytaagacacattttttgatatgccaacagttcctttgttgcatattagtgtactttaaattatttcttaaagtacttaagaaaaaaattgaaatgtttagatactccaatcatgtgtcatagaagatgatttgtcatgtagcagcaatagagtaagttattaagatagcttttgtttttatggtcataatagtttttgttgtcaaacataaaattgtcaaacattgtatttaagtaaaatacaaatattgaccactgtttgcaatatgatttcttaaagtaacctggcaataatgaaatgtatatcctagcattaatgaaataaaaatatgtccttaaaatatgctattcaagtcaagttttatttcttaggaccc

SEQ ID NO: 364167 - DNA, 641 bp, Homo sapiens
atgtataaaaaaatgaaaatgtattcacttgyggtcctggagactgggaaatatgatatcagggcacctgcagctatggtaaatctgattccaaggtgacaccttgaatattgtactctctggagagaaggaaagccatgtcctctcatggcagaaggacaaagagaaaaaagggagctaaacttactctcttgtaaccacattaatcacttcttaaatgtttcccttcttaatactggcacctcttaacaatggcaattacattttaacatgagttttagaggggacaaacattcaaaccataccacagtgactggcatagtatttgttgaatcgacttagtttggtttgggttaaacaatcaaacaataattatttgaagtaagtcataaaaactcatgttttgatattggaacctgcaggacagttaaaatatttagaaatttataaagctttttttatgatcatgaaaaataacctgataccttgtaaaaagaattaagaaataaaaaaaatttgcaaaaattattgcatgttaaataaaacttgaaaggattaacaaatcaaaattctatttggaaactatgagcttccatgtttccaactaaaactatagcaatacaatttacctaattatatta

SEQ ID NO: 364168 - DNA, 559 bp, Homo sapiens
attcatgtttcattaaacatggattcatatacttgggtttagttgaaattaattaactgtaactctgaccttttctagagagaaatttgtcactcagcattatgccaattttgaaactgatcctgttaagaacaagtgtggtatgacattgtgtattttttcatcacaatatagaaggactgtagaaagaatgtattttgacccagacttacacgtattttggccacagaattacattgactttgtactcaaayatttttgcagcaattttgaatatgtgcagaactctgcctaaaatcaaagttctttttttattatattacacacttcattttcccattagaaaataatttacatttaatgacaagacaaaacacagaattgaatttttattatattgtcaccaatgaaggaatttagcctgttatttttcaatagcccattgcttttccttaaattatcaaagccacattataaaaacatgaatctcaatgggaaaattacgttattagcaaaatagttttataatccctcttaaaagaaagttatttttccataa

SEQ ID NO: 364169 - DNA, 602 bp, Homo sapiens
gagcaggcaacaacaggaaacaaacaaataaaaaagaagtgaaggatttcctctttcccccttagaaggtggaaagaaatgtatggattgacataaattcacagaaggtgagaactgggcaagcaaacacattatccatgttcttaaaaaggcaaaattatataaattttgataaaatttctaaaatagtatcatgtcatttgtaggctagaaaaaatatgtatttgctagtaaaaatatagacstataaaaacaccattacttgggggaggatgtggttatttgtgtattttttttcttattgctaatctgtgatttatttttttccaataaccactagttgcttgtgaattaaattgttgagaaattacttgggttgttatttctgatttgagagatcagtttcctcagtctccccctttctagaacaggcttccttctcccatccctcctgtgtttaaagctagggaactttcaggcagcactgcacagggcactgaatgtgaactttgtggttagctgggtcagggtttgatcttgcagtatctggggcaagtcacagatcttttctgtgtcctggtttcctcactggaagaaaggga

SEQ ID NO: 364170 - DNA, 500 bp, Homo sapiens
aggatgaatccataagtaaacagactagggtaaacaaatctggtcgaacaaaagggaactgagggggttatctttgaaatatgactcagagtcagagaggcagagagaagagcaagaacattcctgatggggaccacttcrggagcaaaggccaaaggccacatggggctcctgatatgggcatcctagaacaaaactgcagccatttgcatcttagtttgaaacgaggctggagatggaagcagggagccacaacgggtctcagaaatgtcagatagcatgggcactgttctacttgtatctggggctgctgctggtttagcttcctctttgatctggaagtcaccatgctgaatcatgcctcagtcactggcagcctggattccccttcataagcactggtattctagaaccgcccccccccaccctttaaaagcagacacctcagctgcaattccctgcttaattaaggagtgagtcagggtggtggcttaagacac

SEQ ID NO: 364171 - DNA, 595 bp, Homo sapiens
tttctgggaagtggtttcagggccaattkagcaggctcataagaaacatcaggcttagaattctgtcagctataccttatttctaacctaaaatggctctttgtagtttaacaaatatttagtgatcacctgctacagaatgttctggtttctgtggattccttgatgaacaaaacgatacctcattcttcacttggcttacattttgctggaggatgcaaaaaataaccaaatttgtaataacatctgcaagtcatcagtactacagataatgatgggaaatgaggggcgggggaaactcttttagagggagtggtcagaaaaggcctctctgagagttgacatctgagcagagagccaggcagatgtgcaaggaagagagagtgttccagaaaaggaaaatcgtatgtgcaaaagccctgaagccacactggtctcagatatgtctggcccacagcaaggaggccagtgtggaaagtagaataaacaagggggaaagtggcagaggaagggtgcacctggggttcactaaggacagagaaggcacttaggattttaatctgagatgagatccatgggaagattttgagtggtt

SEQ ID NO: 364172 - DNA, 595 bp, Homo sapiens
tttctgggaagtggtttcagggccaattgagcaggctcataagaaacatcaggcttagaattctgtcagctataccttatttctaacctaaaatggctctttgtagtttaacaaatatttagtgatcacytgctacagaatgttctggtttctgtggattccttgatgaacaaaacgatacctcattcttcacttggcttacattttgctggaggatgcaaaaaataaccaaatttgtaataacatctgcaagtcatcagtactacagataatgatgggaaatgaggggcgggggaaactcttttagagggagtggtcagaaaaggcctctctgagagttgacatctgagcagagagccaggcagatgtgcaaggaagagagagtgttccagaaaaggaaaatcgtatgtgcaaaagccctgaagccacactggtctcagatatgtctggcccacagcaaggaggccagtgtggaaagtagaataaacaagggggaaagtggcagaggaagggtgcacctggggttcactaaggacagagaaggcacttaggattttaatctgagatgagatccatgggaagattttgagtggtt

SEQ ID NO: 364173 - DNA, 633 bp, Homo sapiens
gagatagtcaactgtcttaggctgatggaacagttcaacaatgctataaaaaatccagaccttttctatctttgctgctccaccatctcagtctattgacttgtcacctcataattaccagatggctgctgcacatccaggtatcatgtccaagatctagggaggaagaaaggaaargagtaataagcttcctttgtaaggggctttgccttttcatttgagaagagactccctcctcagcatactgttcctaacaagactgggtaacttgcctgccattaccatatctagtttaaaccagtcaccaggttgggataagagtctgacttccctgagacttggtgcctcctgccaaccctttgaacatattgatgttctgtacagtgggaggcaatggttttgaggtaacaagagacagcgtctgccatggatgttgctaccccatgatgggaacattgcagctagaagtcacaaggttaagatcacatgactgacaatatggcagctccagaatacgaatgcaggtccatctaactctaaatctcattattttaactgtaaagtagtacattgctaagtggagtcgagaatggatggacacacatgtggctttaccactgaaagctgtagcac

SEQ ID NO: 364174 - DNA, 633 bp, Homo sapiens
gagatagtcaactgtcttaggctgatggaacagttcaacaatgctataaaaaatccagaccttttctatctttgctgctccaccatctcagtctattgacttgtcacctcataattaccagatggctgctgcacatccaggtatcatgtccaagatctagggaggaagaaaggaaaggagtaataagcttcctttgtaaggggctttgccttttcatttgagaagagactccctcctcagcatactgttcctaacaagactgggtaacttgcctgccattaccatatctagtttaaaccagtcaccaggttgggataagagtctgacttccctgagacttggtgcctcctgccaaccctttgaacatattgatgttctgtacagtgggaggcaatggttttgaggtaacaagagacagcgtctgccatggatgttgctaccccatgatgggaacattgcagctagaagtcacaaggttaagatcacatgactgacaatatggcagctccagaatacgaatgcaggtccatctaactctaaatctcattattttaactgtaaagtartacattgctaagtggagtcgagaatggatggacacacatgtggctttaccactgaaagctgtagcac

SEQ ID NO: 364175 - DNA, 562 bp, Homo sapiens
acccaaggtttattcaattttgtcattcacctcttttgaatctaaggctggcatatattggttttgcctgccctgcagccatcctcccttttgatccaatgtcttaatttctccttctggaaccatccttgactcatccagatgagtgggaccaagtgcaatargtctatgtccaggataattaaaatgtccctgtccttggctggggactgaacatgtaatatgatccaggtgggtccactgaaatttattcctgaaaatctttttttttttgaactttggagaaaaagaaattctccttcacctgatattgctaagaagattgagaatgaaactttattgacttctcactattaataacttcaaagaaaaataaaagcaatgtggatttggtcattggttttttagtcctatttctggagagatggaagccaccttgacgtctcctgggaagagtctacctcactgaaatcaaaacaggagaaattatacttaaaagatggcatttgtttgtgttcctggaagcagccatctcggaaacttttatacctaaagtttacat

SEQ ID NO: 364176 - DNA, 585 bp, Homo sapiens
ttcacctactcatttcacaaatatttgctgagagtcctactgtgtgccccacactgccaacaaggcagatagggagcttagaacctagtctgtgacacaggcaacaacagatgacagatccataaacaattaaggcatttcagttaagatatttcagatagtgacaattactatgaagaaaatagaagaagataatgagaaggaaagtggctgggtgcagagcatgccattttaaaataagttcttgctagttgaatggatgaatagtaaattccatgtgacctgaaaggggatatacttaggccatttattgtttctgactctgccttccacagggtaagactgaactttcttrcccattgtgagcaattctggccaaggagtagtgagcagaattgacatgtcatttctggccttcatgttggaattctagtgagaaaccctccagaggtcattctctcttctggcctgctgctgatcagtgctatgtgtagaggctgccacgttggcctggtctggatgatgctgagattgagcatgatctcaggttgacctgtgatgaacatgcagctgaaaaaagaaatg

SEQ ID NO: 364177 - DNA, 476 bp, Homo sapiens
agggaaccgcagtctattttgatgtccagggtcaggctgaggagagagactgacacattatctgtctggctgactgtccactcccccccaccacagtggtgactcatcagagggcgagaaagacccgtctccgcctgtctgaacagtgattctgccggtgattcattgttgcccaccagaaagcccccttcttaatgtcctctttctgagctcttcaattagcatttgaggccaaaggatatttagagggaagggagggtagaaagatccrccagtcggaccgagtgtggcttcactcagtggcagtgggacacagggagggagaagaggaagtgctgggtacggcttgctcccagagtaggaacttggaaacagctagagaaaaaatatatatataataaatggtgaatatttataacattgcagaggtccttaggggtgaaggaatctcaccaaagacaggaagaagggccaaa

SEQ ID NO: 364178 - DNA, 573 bp, Homo sapiens
ttattatataaagggtatatatatatatatatatrtgtgtgtgtgtgtgtatgtgcatgtgcgtgcatgtacaaataccacattttcttgagttggaggtggtgaagtggagtttggtccagctgatggttgctcccctgaggttggagcagtagattctcatccagacagcaagagacaccaaagggaaagaagagagcagagaatctgtgtggcaagtttgagcccaaagtctgaagagtgacagagcaatggggcagatagagaagacagggatagagccaggaatgtcagagtttggggaaaaagaggcaacctgaactgcagtaaaacaggggtcctgagaaaattctgtatccccaagtgatttggcctgattaaattaaaagcctggatcagcaaagagaatgtcatctcccctcccatttagagtagaaatcccttgctgtgtgacaggcatttaggcactgctttcttgcacctgttaccaaagtctgcccgcccacctaaatggtaagctccttgggggcaaggcccatgtgttcttgtttccttttaattccagagatctac

SEQ ID NO: 364179 - DNA, 573 bp, Homo sapiens
ttattatataaagggtatatatatatatatatatatgtgtgtgtgtgtgtatgtgcatgtgcgtgcatgtacaaataccacattttctkgagttggaggtggtgaagtggagtttggtccagctgatggttgctcccctgaggttggagcagtagattctcatccagacagcaagagacaccaaagggaaagaagagagcagagaatctgtgtggcaagtttgagcccaaagtctgaagagtgacagagcaatggggcagatagagaagacagggatagagccaggaatgtcagagtttggggaaaaagaggcaacctgaactgcagtaaaacaggggtcctgagaaaattctgtatccccaagtgatttggcctgattaaattaaaagcctggatcagcaaagagaatgtcatctcccctcccatttagagtagaaatcccttgctgtgtgacaggcatttaggcactgctttcttgcacctgttaccaaagtctgcccgcccacctaaatggtaagctccttgggggcaaggcccatgtgttcttgtttccttttaattccagagatctac

SEQ ID NO: 364180 - DNA, 572 bp, Homo sapiens
agacaatgtataggtctcaatttctttaggattggttactggtgctttagtttgttttttagtcatgtttccttgtctatttgtaacccttggggtcttgtgttgatgtctacatattttaagaagtagagatctcttttattctttaccaattagctttggccaagaaagctgttcaccagtcaagatattttgggtggattggctggcagggtctgagggcaagtttactgctggaattcttaagcgggctggcctggtgcctgagtccatgggtacaggcctagattctgggtccctgggggccagactggcactgagatacagtgggatggctttattgactgtgttcatgtctgtagcatgcgtctgtgaaggccaacctggtactaggatctacactgatgttgggtgcttacttcactctccttcctccacatgaagggtttctctcttcatgctgcactgtgctgtcttgggggaagggtgatgtgagtgatgtgaaactsttattcctacccttttcaatgcatcttttattatttctatgctccacccagctgctgtaattg

SEQ ID NO: 364181 - DNA, 606 bp, Homo sapiens
agaaatgcattaataatttcctattaatcttacattaatggtggaaaaaatgagagtatagattatagtgggtgctcagacagtgtcatctgccatcttggagggctatatatacatatatatatacacacacacacacatatatatgtattttatatatattgtatatataatacctatatatgtgtattttatatatatgggtattatatatataggtattaatatatataggtattattatcagctttagctttttcatccatgagatgagaatttgatgtagtcctgcctgatgtccacacaggctcctcagaatggctttgttttactagagatgttacccctaggaaacaagctcaatcccttgcccctcagtggactagaggcagcatgtttatgagacaggaaaggatgtgagtgatgtgagtttcttagctggctttggaacagaacagaggctctttacgatgatgccagtgctcctaattaattatcataacaagtctcctgttctcagcatctgtcagcaggtacagctgcaccagcacagtggactggctgagcaaccagaagggytggggcaaggccaggccagggcagcca

SEQ ID NO: 364182 - DNA, 596 bp, Homo sapiens
tgaaagtcacccaaagtattcaaagacaatgcttacatcttcttttatttcttgcactcaaaatgtcccatattttctggcatattctttattccaaatattgtcttactgaacttttttttactttattatctcttttatgactccattttattcaataaatgattccttaaatgttccaataaatgatttaatccttatactttattcacgagtagaaggttgaaaataaattcacattagaaaaaaattttgtcagctatgtttaatttttggttcagaaaccatggcaactgcatgcctatattattttggaaatgtaaatttggggattattttaaggttctagagtctaggtggaagaaggtgagaagctacttcagcatcagggggcagcacggggtaatcatgcaaagaagtaagagtagactcacctctacacagcaattttcatccaagagaatgtctcctttcttatccttcagatcctcactcacatagtaagaaattatgttgggttttagtacaaaccatckttcagtccagtttttccgtctgtggccctttttcatcatgtaaccctgtgaaagattaaa

SEQ ID NO: 364183 - DNA, 556 bp, Homo sapiens
gttttctgactattgtgcttaagaaactcaaaagatttgtgctgcaggcatcccgaaggattgggacccacatgggccttgatgtgcgtttctgtaggccagagcccagccaaggctcctggcatgtttttcttcacctttgcaggctaacagaaatgtcttgattctctttcaaatcaagttaatctcatttgagaagtgaacagcctttctttgatttgttagaatagccaggcagcataccttgtcatgttactgtttggactcactctgtgctttgacagcttttactctctcatcatttcttctggttagaagtagaatktgagttagttttatagattttcctctggggccaggagtgcttgtgtggggaaagaagggatcattggagtagatttatgtgagattgctttgtctagctgctgaattaccctcctgaggttaatcacatggatttgtatttatgaagctcttagcctatcacctggcctttgaccaagcactgcaaactcaaggttatgctatattatgaaaaatacattctctgttagct

SEQ ID NO: 364184 - DNA, 564 bp, Homo sapiens
tgtatggacctatttacggactttcttaactgcttttcatttttctatatgtttatacctatatgacattgttgtgattagtgtagctttacaaaaagtcttgaaaaacattgcacagtttctcaactttgcttttccagctattctaaaacctttaattttcatgtgaatcataaaaccagtgtactattttccacagaaagaaatttgctgagattttaattagtattacaaccaatttgggggagaaaatcacaatattaaatattttaatctattagatctaagaagaaataaataggaacacattgacagtaagagatttagcactcctcttgcattcctgcacagcttaggtgacagacataactaacgatattgtattgttaaatgaaatattatataaagcagatattttggatctatatcaaagttcatgtgctgataatagagaataaactttttcsaagtttactttaaacatgccttaatactcacattatcctaatccaggaaggaagcaccagttttatgaagaataagtaataaaatccaacatattat

SEQ ID NO: 364185 - DNA, 612 bp, Homo sapiens
gcattattttatgatttcatagttatttagctttttatttcttgaatttaattttttcaatctacctgggaaagtaagaaaaaagggggagtaaagagaagcgatcatatactttattgaggcaaakgtatgtgtgtgtgtgtgtgtgtgtgtatatatatatatatagaaagagagggagagagagagtgcaagagacagagacagaaacagaaggagacagagacatctatcttacaaatatttccaaatatagttcctaatacagtagaacatctcagatatttcttttataaatggcatgaaacaaaaatgtcagaatggggatagtgagaacaatatggaaaataaagaaagaagacttacaaattctaggaaatgattttagggaatttatgaatgaaactgtgtgcatattacaccctgccatgaggtttatattaaaataacatttatttttatcatttggaaagtcatttaaaaattttagtcaaagcaaaaattattagtaatctcatcaccaagaggtaatcgtggttactattttactctatttactttcttctgtttttcttttgtttgtttgtttgttttctaagaatgtacctagca

SEQ ID NO: 364186 - DNA, 586 bp, Homo sapiens
ccttaccaaatacatttctcaatattgtctttaacctaaattcaggaaaaggaagacagtcagtcctgctgtaccacttgtgttgaaaccgcacatttcttccagtgtgaatgatttattattgaacaatttgaggatgaaatgaattttttgttgtgtatctaatttcgtttgcaaaaattactagataggtatagaaaattacaccaaactaaattcagttatatagaaatacttcataatgcatacatattcatctcatgacaatgagccatgccaagccacatctggtgtaaacatatttagtagatttttatcttaagtaattgtccttctcccacttcacaataactagctgtactcttttcaacagccaccctgttgacctttagcctcctctcaggcttttttgcactttcccttttcttctttgatatttttcttcctttacctctcttttctcttactcttttcctctctctctttctctgtctctctctctcattttgtttggttttctctttcttttacctcaggagccaggtgggcagatcagaagraataaaacactcacttttgcaagaaa

SEQ ID NO: 364187 - DNA, 561 bp, Homo sapiens
atataaaagcagatgtttgcttaggggaaaagttttgttttttctaaaaacttgaaattcaaaattcttcatttagagaaagtatatatgtttatgaaaaaatactgtaaaacttttctataaaatataatcagagaaaataattgtggctagktttctcatcaacagattccaatagagtacagttaggcaagaagaataagatctggtgttcagcaaggtgactatagctaataacatagtagtgtatatttcaagacagaaataataaaagattttgaatgttattaccacaaagaaatgataaatgtttaaggtgatgaatgtggcaattagtctgatttggtcattatacaatgtatacatacaatgaaacatcacattgtatccccaaaatatgtacaattattgtgtggcagttataaattttaaaatattaattaataaaatacagaaaattgatgtaaaactaataaatattaattttacatttaaaagttattgaatcattcctccattttaaaaaacaaattactattacaagatttgaaattattgagg

SEQ ID NO: 364188 - DNA, 406 bp, Homo sapiens
gtgggtcacaggggcagatctctcatgactgtattgatgccatcctcatggtagtgagtgagttcttgctttgttcacataagatactgttgtttgaaagagtatggcgtctcttccatctttctcacttccttactcttgcttctgctctcaacatatgacactggctctccctttgctttctgccatgattgtaagctttctgacgcctcactagaagcagaacagatgctggtgccatgcttcctgtacaccctgcagaactacgtgccaatcaaaaytctttttcttataaattacccagtctcaggtattcctttatagcaacacaaaaatggactaacgcaatgatggtgtagttttaatttcaaattctactatttcattgctgggactataaaaacga

SEQ ID NO: 364189 - DNA, 512 bp, Homo sapiens
acaaaaaaatcctgatagaattaataaacaaattcagtaaagttgtgtgatacaaagtcaaaatgcaaaaatcaatgatattttcataaacaatgagctatttcaaaaagaaattaagaaaacaacccaatacatgatagcaaaaaagtgataaaatacgcctgtgcttaggaataaaattaaaaaggtaaaatacgtgtatattgaaaagtgtaaaacattgatgtgtgaaattaatgacacagataaatatagtaatataagatgctcatgaattggaagaatcaatattgttaaaatgttcatactacccaaagtgatctacaaatgtagtagaattcctatgaaaattcctatggcatttgttatagaaataggaaaaaaaaaatmttaaaatctatatgaaaccacagtggactctgaatggccaaagcaatcttgaaaacaaagaacagagctggaggcttcacacttggagcatagaaatattacaaatactcttgaaatttttc

SEQ ID NO: 364190 - DNA, 359 bp, Homo sapiens
ttttaaatattggcataacaaactaattcagtgtagactcttcatagactcttcctgtgattttagttcatcctatttccaactgtctggaagaatggtccacaaaggagccacgataagatgactgaaaagaaacctccagtgatcatcccccmacagggggaaaacaaaattgaacaactattcatgcaagaaagcaccttcataagaactaaaaatcaggtaagcaattacagtacatagttttaataattatatcaaggaaagaggcactgaagagggtaggaaagagagtcttgcattgcccacaccaccccttctccatcccctggcagtgcacatagacagaatctgtgtgc

SEQ ID NO: 364191 - DNA, 550 bp, Homo sapiens
gactgcctggcctctctgcacttccagcacccgctccaatcttggagtaggcttggggccaagccccaaggcctcaaatgacattgggatgcaaacagagccctgggaggaaggggacaggtccccaataaggccccacgttcaggccaagaaggggtctgaaggctgggggccaggctgccagttgtgctgcctggagtaaggagctatggttcttcttctgggcctgttcaaggccatccatggacctatcagcatgcacttccgcccctctgaggtccataaaatccctgggctcagctagagcagggcagaagatggccagaggagaaaagttcagagagatgatgggatgaccagctgcagagaggagtaccctctctgctgagagctacagggatgaccatctgcagagagragtaccctctcagctgagggctacagagaagacctgccagcacagaggagctaccttctctgctgagagcttcagagacaggcagagaggagctaccctccctgctaagagcttcagagacctacagagaga

SEQ ID NO: 364192 - DNA, 618 bp, Homo sapiens
gctccatgttcatgaattggaagaataaatctgtttaaaatgtctgtactacctaaaacaatctatggatgcaaatatcaaaatatcaatgacattcttccccaaaactgaaaaaaaaaatcmtaacatttatacagaacaacaaaagacccaattatcctgagcaaaaagagcaaaactgaagaaatcacatcacctaacttcaaattatattacagagctatagtaaacaaaacagcacaatactaacatcaaaacagacacatagtctgatagaacagattaaagaactcataaataaatccacatatttgcaattctatgtttgttgcatcattgtttacaggtaagacatttttggcaaaggggccatgaacatacattggggaaagcagggtctcctaaataaatggtgctggaaaactggctatctatatgcagaagaatgaaattagacccctatcccttgccataaagaaaagcaaatctaaatggattaaagacctaaatttgtggaaaatgtatgaagatactaaaagaaaacatggtggaacgtctcctgaacattggtctaggcaaaaatttcttgagtaataactcaaagcacagacaaccaaa

SEQ ID NO: 364193 - DNA, 589 bp, Homo sapiens
agacagttactgtggaattattattattattattmttattattcccttgaaggaacactttaacatctcttgaaggcacaaagaaaccagaaaaaacagcatatgcaaatacatgggtggtaaatacatggatgttcataactgcttggatgttctagggatgccaaggagccagctttacattaaaaatagtgtgtgttgggttatgagcacagaaagaggagagacgaatagaaaagtaatgtacaaaacactgaaagtcttagactttagaaatgatttatgattttacttttcttgctctatcttttttatgtgagaatatctatctttgccttcaaaatagttaaatattcatgagcatcttggttcactagacttttcaattaagttcttataattccccaatatcccagggtgtatctgggaagaaaagtgttagtagtagatgtgtaaacaagtcgttctcaaccataatgccctggagagaaatgtatgacctcaatcaaaccttcttttaaacataaaaatgagtgaccacctgataaacataggaatactgtctttaaacagaaaggtacctgagaat

SEQ ID NO: 364194 - DNA, 589 bp, Homo sapiens
agacagttactgtggaattattattattattattattattattcccttgaaggaacactttaacatctcttgaaggcacaaagaaaccagaaaaaacagcatatgcaaatacatgggtggtaaatacatggatgttcataactgcttggatgttctagggatgccaaggagccagctttacattaaaaatagtgtgtgttgggttatgagcacagaaagaggagagacgaatagaaaagtaatgtacaaaacactgaaagtcttagactttagaaatgatttatgattttacttttcttgctctatcttttttatgtgagaatatctatctttgccttcaaaatagttaaatattcatgagcatcttggttcactagacttttcarttaagttcttataattccccaatatcccagggtgtatctgggaagaaaagtgttagtagtagatgtgtaaacaagtcgttctcaaccataatgccctggagagaaatgtatgacctcaatcaaaccttcttttaaacataaaaatgagtgaccacctgataaacataggaatactgtctttaaacagaaaggtacctgagaat

SEQ ID NO: 364195 - DNA, 588 bp, Homo sapiens
attacttattaatttttagagaaagattaccaaccatagtttaatgattgcttgtctttacaactgtcaaaatttttgagaaatatggtgtataatgtgtatggtgtgaaatttcttgatgaaataagaagacaaactataattgttaattacttaaatttaatttttgatttaaatgaagtgactatgctaattctcatcatacaaattggcttatgatgcttttcaaaagggtgtgccaaaggaaggagatgcaattttgaaakaatttctgaatgtcacacttttctaaaccataaaggatataaaatgttcacataatgaagaccacagaaattatagttccacaaactccttgatagcaagtggtaaataggcagaaggtgcaagaggaaggctattgagcgcaaggtttgcgattaatcttgagtgtggatgatgcatgtaactaagtgatggagtcatttgaacctgaattgaaattctggctgttcctgctatgtggtatgggtcagtaatattttaccttctgcctgagttttcttatctgaaaaatggaccatatgagtattcaatgtgtagtacatg

SEQ ID NO: 364196 - DNA, 539 bp, Homo sapiens
ggtcagtggagagtgggatgatatcttygaagtgctgaagaaaaaagaaaatttccagcgaattgcactctacccacaaagttgtctttcagaattgagatagaaatgaaaactttgaggaagtaaacaaagagaaataaaaactaagggagctcattaccactaggtctcccttacaggaagggctaatgagagttccttacctgaaaaaaaggccactaattaataacataaaacttaagaatgcaaaaaactcaaaagaaagagtaataccaagaattattcagcacaatctaggactgtaaagtatttttagacctagtatgagggtgaaataacaacattattaacaactattgctaatataatcaagggatacttactataaaattatgtaaatttacacatcaaaaacataaaatgaggaggcggtaaaagtataaggttgtcgtatataatcaaggttaagttgttatcagcttgaaatagactgataataactttaagatgttctttgtaataattatggtaataaaaaa

SEQ ID NO: 364197 - DNA, 634 bp, Homo sapiens
attttaaaaacgttaaaataattatttttcttagaattatgacaatggctataaaaggggccaatttttactgaaacctataaaaatctaagcaaacgtgacaaatggatgtcctcccccaagcacaaaacagagttgtattttttgtttatttttcatcatatattttaaaaataaaagccaatattaaagttaataatcactacattaactaagaaaatatttcaagacataaaactagcacaaagccgctggattagggttttgcttatggatagaggtgtctactgatcaaacattcccatggacactgaatggtagaaggcatactgggaaacccacaagaggaaatagcataaaggctgtcaagcttttaatttgttcacagtataaggttaacattttactyctatttaagaatattcagaattgaaattcttatgtgtgaataatgtgcacccacaggaaaaaaaaaccagtttctttctagcatctaatttatgtttgaatcactttgcaaaacatctaaaattgcagcatttgatatttctatggaatactcttaaattgaagctcctgaaagaaacgatttttaatgtttcaatatgcagcttggagctatccaaggaaaatt

SEQ ID NO: 364198 - DNA, 616 bp, Homo sapiens
gattaaccattgcatcttttacaatactacttactgaatgtagaaataatctatttcaatagaaataatgtaatttttagcttttgttatttcatggcaaaacwtcacattttaatttagagtaataagcacatatacatatatttatcagcacttccaataagcaatgataacttcttcctcttcatatgttaataggagatattgaatgccactttttacataagatgagtacatttcttgactaattcttttagccctgctgtctgtattgcatgggaaatcaataggaatttcatttatatacttcttataggataatattatctattagtgtccttttttcactacaggcttattttcttgattttgcaacttaacctccaaatgctttcatattattattaactgatatttataaaaaagaaaaaaatagtatgtattgttactgacacgcattaatatgtcatcacttctatactttacaaggtctctttttttatataaatgtttgtttctgctttagaagagaaatattttctggagacatgttataactggctgtgaaaaacaaccatcattaaggttgacattctgcaccctcactgttaagtta

SEQ ID NO: 364199 - DNA, 500 bp, Homo sapiens
acacacaaaaaaaaaagaaatggaagaaatgatagtatgctcttcttttaaattaaatagaaatgctacgaaaacacatgtttttcctggagaggcttcrtaagcagcactgctgccgttagatggaggcatgtaagttccaaaacctagctctttagctcactagctggaaaacctgtggtaaattatataaatctactatgattccattttctcacaggtgaaagagtaatagtaatattaacttcccttatatggttgttgaagattaagtaatttatgcctaactactggcatatagtagatgcttaacacattgatgtttatcaatggcataataacaaacatctactattggggtatagcagaggcttaacattgatattattatacatttaataatcttatgaaattatcaaaatgaaaatataaacctaaaagacactcttttaaagtaattctttattagtcatatatttttagcaaatgtcagcaaattt

SEQ ID NO: 364200 - DNA, 500 bp, Homo sapiens
acacacaaaaaaaaaagaaatggaagaaatgatagtatgctcttcttttaaattaaatagaaatgctacgaaaacacatgtttttcctggagaggcttcgtaagcagcactgctgccrttagatggaggcatgtaagttccaaaacctagctctttagctcactagctggaaaacctgtggtaaattatataaatctactatgattccattttctcacaggtgaaagagtaatagtaatattaacttcccttatatggttgttgaagattaagtaatttatgcctaactactggcatatagtagatgcttaacacattgatgtttatcaatggcataataacaaacatctactattggggtatagcagaggcttaacattgatattattatacatttaataatcttatgaaattatcaaaatgaaaatataaacctaaaagacactcttttaaagtaattctttattagtcatatatttttagcaaatgtcagcaaattt

SEQ ID NO: 364201 - DNA, 647 bp, Homo sapiens
caaacctccacgcttcttcacccagcctcctccagtattaacattttgcaaatcgattgtacmatatcaaaaacaggaaaaggatattggcataatctatagagtgttttcaaatttcactagttacagatgcactcacttgtgtgtcttctgtatatgtgtgtgtttgtatgtagttctgtaaattgctttatatgtgcagcttcatgtaactaccaccacattaaagaaaagaaattaaccatcctcaaaaaactatattatctttttatagttattcctacccactccatctttaactcatggcaaccatggattttttctacttgtctataataatgatgtttaattaataatatataaatggcatcacacagtatgtattaatttggaattaacttttgtcacttaccctaattcccttgagtttcatctacttttttggttggttcctttttactgctaagtagtattttgtatgtttgtacaacagtttgtgaaaccacagaactctagacaaactctgactttttctttaatccctatgttaaatatgacattctattattttctggacacagcagcattgtttctgatgagagtatttcttatctttgattttctgcacataatatgtatttataatt

SEQ ID NO: 364202 - DNA, 647 bp, Homo sapiens
caaacctccacgcttcttcacccagcctcctccagtattaacattttgcaaatcgattgtaccatatcaaaaacaggaaaaggatattggcataatctatagagtgttttcaaatttcactagttacagatgcactcacttgtgtgtcttctgtatatgtgtgtgtttgtatgtagttctgtaaattgctttatatgtgcagcttcatgtaactaccaccacattaaagaaaagaaattaaccatcctcaaaaaactatattatctttttatagttattcctacccactccatctttaactcatggcaaccatggattttttctacttgtctataataatgatgtttaattaataatatataaatggcatcacacagtatgtattaatttggaattaacttttgtcacttaccctaattcccttgagtttcatctacttttttggttggttcctttttactgctaagtagtattttgtatgttkgtacaacagtttgtgaaaccacagaactctagacaaactctgactttttctttaatccctatgttaaatatgacattctattattttctggacacagcagcattgtttctgatgagagtatttcttatctttgattttctgcacataatatgtatttataatt

SEQ ID NO: 364203 - DNA, 647 bp, Homo sapiens
caaacctccacgcttcttcacccagcctcctccagtattaacattttgcaaatcgattgtaccatatcaaaaacaggaaaaggatattggcataatctatagagtgttttcaaatttcactagttacagatgcactcacttgtgtgtcttctgtatatgtgtgtgtttgtatgtagttctgtaaattgctttatatgtgcagcttcatgtaactaccaccacattaaagaaaagaaattaaccatcctcaaaaaactatattatctttttatagttattcctacccactccatctttaactcatggcaaccatggattttttctacttgtctataataatgatgtttaattaataatatataaatggcatcacacagtatgtattaatttggaattaacttttgtcacttaccctaattcccttgagtttcatctacttttttggttggttcctttttactgctaagtagtattttgtatgtttgtacaacagtttktgaaaccacagaactctagacaaactctgactttttctttaatccctatgttaaatatgacattctattattttctggacacagcagcattgtttctgatgagagtatttcttatctttgattttctgcacataatatgtatttataatt

SEQ ID NO: 364204 - DNA, 593 bp, Homo sapiens
tttgttcaatttaacagaaagtggggagctgaatgtacagaaataaggtaaagtttcagcttaacttgactttgatttgatagaggcagtcaagtttccaattctagttcagcgtgtagttggatttggcttttcagttcactaagcccagctagagaatcaatacaaattatcagtaatttgtcagcatttgataaatgacttaatgccagtgagctgccactgatctttatgtcatctttttctgccttggtcagcacaattcttaatgctctaaaaacctttaaaaagacagcaccataaaaatcrtattcttaagacttgtcccaagtttgtccagtttttgcttaaaaggactatagtacattataaaatgtaatgcattatgtttgactatacgataatgtagggctaacaataatattgtactactaggaaacatgtcactaggaggaaaaaccaggtgtagtaatgtaattaattcatgcaagcattttttccatattaatttcttgccaagtaccaggatttttttctttcagttatcttattttttacattttattcataactggttgaatcatttagcttag

SEQ ID NO: 364205 - DNA, 587 bp, Homo sapiens
gcttgaaaagcctaaaatactgactctctggccttttctggaaacacttgtttatgaggcccaagaatactgatcttccacactgtgaagacatgagcaccccttgccccaggaccttcatggccaccctttcatcagaggcctggaggtctctgagcctgctcctcccctggctagctctgctctcagttcaaatgcccgtttctctaagacgccatcggtatctgccaccccagcgggtactagccctgcttattgttctctgttatcaagccccatcctgttccttcgtcccctctctttccaagtgcacctttgagcctgcctgttcatatgcttacagagaactcgccatgttcattttattcccacgtcagtcctgtgtgtggcatggatctcgaagatacatcttgtttttcccacagattttggatggaccgacagagagtgaatgaatggctcatcgtcccctcctagctatcttttctagaatgttccacaggtgtttcaaacycatcatcatgtcccaaatggaagtcgctgccactgtatttgctattctttgccggtgagcatcctccggcttc

SEQ ID NO: 364206 - DNA, 582 bp, Homo sapiens
ctgtgacctgatcgagtgtggcccaaggcccccacataaacaaagaccctcttatcaggcaggacattccaaagcttaaagatcacctctgaggagccaagggcagaggccagacctctccttaggcaagactacactctgaggacacacacttcctaccttccaaacccagtacagcgtctgtctcagggcctttgcrtttatccttctcctggtccagcctttccctgggggttctcccagatttggttaaccagtgccgtcacctcctcctgcctgatagctgcttcaacctgtgaatgcataatcctcctcctgctccccacgtccatcttataaaccctggtgttccactgggccatcccatctcattgcctgaaatactgtaccaacccctccctgggccaagggccccagtccagccttcctggccacattcaccacactttcccagctgcctgaccagccttcctgccaggctccctgtcttggctgagctgcccttcctttcccacacattctctcctgccaggtctgtggcccatttagcctttgcaagtcatctcagctgcactggagacc

SEQ ID NO: 364207 - DNA, 582 bp, Homo sapiens
ctgtgacctgatcgagtgtggcccaaggcccccacataaacaaagaccctcttatcaggcaggacattccaaagcttaaagatcacctctgaggagccaagggcagaggccagacctctccttaggcaagactacactctgaggacacacacttcctaccttccaaacccagtacagcgtctgtctcagggcctttgcatttatccttctcctggtccagcctttccctgggggttctcccagatttggttaaccagtgccgtcacctcctcctgcctgatagctgcttcaacctgtgaatgcrtaatcctcctcctgctccccacgtccatcttataaaccctggtgttccactgggccatcccatctcattgcctgaaatactgtaccaacccctccctgggccaagggccccagtccagccttcctggccacattcaccacactttcccagctgcctgaccagccttcctgccaggctccctgtcttggctgagctgcccttcctttcccacacattctctcctgccaggtctgtggcccatttagcctttgcaagtcatctcagctgcactggagacc

SEQ ID NO: 364208 - DNA, 497 bp, Homo sapiens
acttttgtatgtggtgtaagataagcatccagtttcattcatctacatatgaatatccagttttcccaacaccgtttattgaagagatgatcttttccccattgtgtattcttagtgcccttgatgaagattagttgactgtgtatatgtaggttaatttctgagctctctattctgttccattctgtgtctgtttttatgccagtgccatgctgttttgattactatagctttgtaatgtagtttaaaatcaggaagtatgatgcctacagctttgttcttttttctcaaggttgctttggctgggtcttttgtggttccataaaatttttagaatgtttttcatctctataaaatttccattggagttttgattkctatgaaaaagtgccattggaatggctgttgccattgcaatttagatttcattcaatccataaattgctttgggaaatgtggacatgttaacaatattaattcatccattccataaacat

SEQ ID NO: 364209 - DNA, 568 bp, Homo sapiens
ttctgatcttatacaaaaagttttcagctttccactgttgagaatgatgttagctgtgggcttggcatacatggcctttattgagttgagcacattcccgctatacctaatttgttgagagtttttatcaagaagtgatgttggattttgtctaacgccttttctgcatctgctgaattaatcacaatttttacctttattctgtcaatgtggtgtatcacatttattgatctgtgtatgttgaaccattcttgcatcccagagataaatccaacttgattatggtgaatgatcctttcaatgtactattgaatttggtttgctagtagtaaatttttgcatctaygtttatcagggatattgtcctgtaattttctttttcttatagtagccttgtctaattttgtagttggaagtgtttcttgcttttcaattttttggaaccgtttgaggattgatgttaattcttctttaaaagcttggtagaattgacccatggaacattctggtcctgggcttttcttggttggttggaagattttttttattactgatttaatctccttac

SEQ ID NO: 364210 - DNA, 554 bp, Homo sapiens
taaaccctgaagctgttggctgagcatgaagcttttaagctcagaacctcagtaggaagtttgggagaactaccccatctccttggtgggagctgcagcccatatcaatgctgagtaacccacaggaaacacaggcttcctgacccatgaaagagtagtaggtgcattacattctgtggcctgtgaatcagagcmcagacctcacaccttcacaatgccattagatggatacaattcccgtggtgctggggagggaacactagcttctcactttgataaggcaccaggccagacctgccagagaccctggtggcacagacagatgaaacaggaagctgcagctggtggcaagatgcaacctctggcccaaagaatacaagcccaccgtaagtcctcacactttctcactaaggcagtttccactctgctcatgcagtgcccaacctgagcaacctgacagcaacctcacctgccatcatgggactgcagtacaagcaaataagctagaaggcaaagccacaggcaaagaaggaaactcaattccaaaagcatga

SEQ ID NO: 364211 - DNA, 554 bp, Homo sapiens
taaaccctgaagctgttggctgagcatgaagcttttaagctcagaacctcagtaggaagtttgggagaactaccccatctccttggtgggagctgcagcccatatcaatgctgagtaacccacaggaaacacaggcttcctgacccatgaaagagtagtaggtgcattacattctgtggcctgtgaatcagagcccagacctcacaccttcacaatgccattagatggatacaattsccgtggtgctggggagggaacactagcttctcactttgataaggcaccaggccagacctgccagagaccctggtggcacagacagatgaaacaggaagctgcagctggtggcaagatgcaacctctggcccaaagaatacaagcccaccgtaagtcctcacactttctcactaaggcagtttccactctgctcatgcagtgcccaacctgagcaacctgacagcaacctcacctgccatcatgggactgcagtacaagcaaataagctagaaggcaaagccacaggcaaagaaggaaactcaattccaaaagcatga

SEQ ID NO: 364212 - DNA, 554 bp, Homo sapiens
taaaccctgaagctgttggctgagcatgaagcttttaagctcagaacctcagtaggaagtttgggagaactaccccatctccttggtgggagctgcagcccatatcaatgctgagtaacccacaggaaacacaggcttcctgacccatgaaagagtagtaggtgcattacattctgtggcctgtgaatcagagcccagacctcacaccttcacaatgccattagatggatacaattcccgtggtgctggggagggaacactagcttctcactttgataaggcaccaggccagacctgccasagaccctggtggcacagacagatgaaacaggaagctgcagctggtggcaagatgcaacctctggcccaaagaatacaagcccaccgtaagtcctcacactttctcactaaggcagtttccactctgctcatgcagtgcccaacctgagcaacctgacagcaacctcacctgccatcatgggactgcagtacaagcaaataagctagaaggcaaagccacaggcaaagaaggaaactcaattccaaaagcatga

SEQ ID NO: 364213 - DNA, 593 bp, Homo sapiens
ttccgctcaactttctttatgtcagagctgctgcgcattctgctgccttcgcttgctggttagaaatcatagtccgtatttttaaactaaaggaagaaagtcctcatgtaatttagtggtggttatttgtcacctattcccgaaaacaaatgcccgtggcagtgaaggccagcagatttaccgggagggaaaagatctatattccctggagcaaagtgacgttaccagattgggtaattgctgcataagcaataaattacacgttgattaattgtgcttctagggctttctggagtatttttcatggggacagttgtgtacatgctcacagtgaattggaaaaggcaaggcctggcctggggacccactccaaacgggaagaaacaaagaccatcaacaagatttcagaacttcctacctatttcacgaaggcgtccctcagcaatgagggattcctgtgcacatcagatacacgcrtattctccacctataaaaatagacttgaaaataacttccatgagataccactacacacttttagaacggctaaagtcttagaagaatgctgacaaggacacagagcaacagccacc

SEQ ID NO: 364214 - DNA, 379 bp, Homo sapiens
acttgtatagtcacagtcgctaagagtgtgggattgcggggagacagacctataggccaatggaacaaaatagagaacccagaaacagacccacacgaataggcccagctggcttttgacaagggcaccagagtcatcacatggagcaaggaaagcattttcaacaaatgctctaacggagcaattggatgtccataggctaaaaaaaaaagaagaaaagaaactcgtctttttaattaaaayatcaactcaaaatggatcaaatacataaaataaaacatagaactctaaaacttttagaaacaattggagaaaaacttcagcatctacagctaggcaaagggttctaacacttgataccaaaagcacaatctgtaaa

SEQ ID NO: 364215 - DNA, 563 bp, Homo sapiens
  misc_feature (1)...(563): n = A,T,C or G
gacagccctttctgcagcagcccctaccctgtggctccatctcattatgttgttcatttcctgcgtgacatgtagcaaaatatgccagtgtcacgtgctggaatctaagccctataaaaacagggaccttgtttttctcatctgttggtgtatcccaaatacctagcaaaacctgacatatggcagacactccnataaatgtttgttaaatgagtaaattgggctgtaaactcttatgggaagccctgaaccactggtatgctgcagcctggacagagtccayttgttgtttcccctttacttatagcaggaggcttaaaatttgctttagaagatgcctgggatgtccaggggtggatacatgggcccttgacccataactcatttctccctgtttcatagatggcggttccatgaaattttttgtctcaaagaaggtatatcactatttttgaaatatctacaacccaccaatctgaacttgagaaagaaatcatacccttttagattgtatttacttgcaaagctaaagtgacggcaaccttcaagatggtattctcttc

SEQ ID NO: 364216 - DNA, 575 bp, Homo sapiens
tttcatagatggcggttccatgaaattttttgtctcaaagaaggtatatcactatttttgaaatatctacaacccaccaatctgaacttgagaaagaaatcatacccttttagattgtatttacttgcaaagctaaagtgacggcaaccttcaagatggtattctcttcaagatactcacaaatgcagtctaaaaacattctcagtattactccacgttaaggaagttttacaaatcaatggatttcttgactctagagtctgaggtaggaggttggacaagacagtctccaagttcttaaatttgtttgtttgtttttcttatttcatgggaacctcagtcacctcctctgctttcatcaaaggctgtgtgagacaattataatgctgcccagatataaagcaaatgagaacaaaagaggtggcagaggcagctgaaaggaaacgtggctgcctgcagakaatgggatgggtggaagttggcagtgatgacaaggtaggtgcatggtgctagagagccaggaatccatgaatacagagaacagggagagacagctggcttcatgttccaaaagc

SEQ ID NO: 364217 - DNA, 567 bp, Homo sapiens
  misc_feature (1)...(567): n = A,T,C or G
ggcagctgtcaatcatgatcactatccttggtggggaggktgaatgatgtggccccaataagggaacatttggagattgcaggtaaggactgagcctggggtgaaaagggggcttctgctctctgaactctcccaggcctcccggctctgccccaggggtcaggaaatatcactcctcgggacacagggagaatattgtctctggataatacagttctaaaagacagcccctagttggtccctccctgtgccagcactggggcagcagcctctgaaaacaaatgagtcataccatgcaggctgcaatggggcccgaaggtgacaggaaccaggactttccagtgacttttatgtcccctttcagaatggctgtaaagaaaacaagacataaaatgcctcccctgtataatttgctggtttataggtggtttcgtcactttttaaatggctacccaaggtgctctttacagtccccttatgactggtaatgaaagctccaggaagagcccagagagcccaggaatanagggaggttcccactccctgctgccctgtggccaggcggcg

SEQ ID NO: 364218 - DNA, 322 bp, Homo sapiens
ttgctcacctgcgtcgactgctcacaaagctctggtcaccatggaaagagcttcacctctgagaggtacaggtgctgcctccatttccccccaagcatccattcccmtaagttccagtaaatttaactttgctttgggggacaattccactggacttgcatgcaggctggtggatctgtcaatcaagaggctcccccctcacctgtacagggctacacatgtgacccaggctcaatcgactccctagaaatgtgatttgcatagaaatggaagatatttgtggatgccctcaggagaccgaccgtttctgcggtgcaggggc

SEQ ID NO: 364219 - DNA, 400 bp, Homo sapiens
tttctggacacaggagggcagtcagtagctactgggccggcccacaaacctgaatcgagaactgtggtggcggccggaggagggagatcagactggtattctcagcttccttacaccttgtccaaggtcacaaacccacaagtcaaggaaaaggaaatagcagggcccttaaacctatgggagggaggtctcacccttcatatgaaatcctgcctgaaatgagcactttttcttttttaaaaattttatttttattttactttaagttctgggatacacgtgcagaacgtgcagatttgttacayaggtacacacgtgtgcaatgctggtttgctgcacctattaacctgcatttaggttttaagccccacaggcattagctatttgtcctaatgatgag

SEQ ID NO: 364220 - DNA, 604 bp, Homo sapiens
ttacacaggtacacacgtgtgcaatgctggtttgctgcacctattaacctgcatttaggttttaagccccacaggcattagctatttgtcctaatgatgagcactttttctttctttttttttwaaaattttaatgatgttattttttttaggatattttttaaaggataaagaaacagatgaaattaattttaacgatgttatttaacttgacgtatccaaaacttaatcatttcagcatgtaatgagatttttacattctttttatcatactatgcctttgcaatcagtgtttttctttttttcatattgaaattcaaatgattattccctcttttggattaacttactctgcacatagtatgcgtccagtaaatgtttgtggtttatgtttagcatataaaagtgctttgagggcagatatctaattcattgttgtagcccagtgtttttcaaaggcttatcttggcatacacaatatgctttttttttttcctttttttttctttttaatactttaagttctgggatacatgtgcagaacatgtaggtttgttacataagtatacacgtgtcatagggggtttgctgcgcccatcaaccc

SEQ ID NO: 364221 - DNA, 604 bp, Homo sapiens
ttacacaggtacacacgtgtgcaatgctggtttgctgcacctattaacctgcatttaggttttaagccccacaggcattagctatttgtcctaatgatgagcactttttctttcttttttttttaaaattttaatgatgttattttttttaggatattttttaaaggataaagaaacagatgaaattaattttaacgatgttatttaacttgacgtatccaaaacttaatcatttcagcatgtaatgagatttttacattctttttatcatactatgcctttgcaatcagtgtttttctttttttcatattgaaattcaaatgattattccctcttttggattaacttactctgcacatagtatgcgtccagtaaatgtttgtggtttatgtttagcatataaaagtgctttgagggcagatatctaattcattgttgtagcccagtgtttttcaaaggcttatcttggcatacacaatatgctttttttttttccttttyttttctttttaatactttaagttctgggatacatgtgcagaacatgtaggtttgttacataagtatacacgtgtcatagggggtttgctgcgcccatcaaccc

SEQ ID NO: 364222 - DNA, 447 bp, Homo sapiens
ctctttcccgagaacttccctaggaaactgtcatcatctcagacagtgcactggacctgtggtcttctttcccagccagcaagctaagaaacaaagagcatgtccgtcttgccactgtttgccctcgtttataaagctggcgagcttgttgtatagaccgttaacacccacgtattgatttgcagggagaaatacacaggcattggaatcagaggactggcatatgcagagccggtccattctcccccctggaggaagactgacagagggggccagttgcaatcagaatgctgtttggtgagcatggaatcagaacaaggacaaatatttaacttgggagaamctgatgcttacatctcattgcagagatggtccttccaaggccctagaatatacaaaatccactgtggctccctctcccctggacaagacagggcataagacaat

SEQ ID NO: 364223 - DNA, 532 bp, Homo sapiens
cacagagacacacacacacacatatgccattgacatttaraaaataatatattttcggaaacattgtctttctgaaataaccaccttaaacaccagaataatgctatgttttaatcaggacactaaataaaagttcactattcaaaatttttctgaataaaggaaacaattttagtttcctatgaatgattcctgtagaatatattcacatgtcaagtatttaccatattattctcccacaaaacgatataatgtagaaatttttattaacatcttttacctcatataacactagtcagtcacaaagtcttgccaattccatttctgaaattgtttctgcatctttgcctttaccagttcttaatttctgtagccatttcatttccttagatttcttttagacctggctattatttccttttaatatgcctactgcagtatctcctgatagtctgtcttaaagctccaccctctaccattgcacatttacatgccaatctgagttatcttcctaaaatacagatttggttgt

SEQ ID NO: 364224 - DNA, 551 bp, Homo sapiens
tgcctgtaattccagctactccagaggctgaggcatgagaattgcttgaacccaggaggcagagtttgcagtgagccaagattatgccactgcactccagcctgggggacagagcaagactctgtctcaaaaaaaaaaaaaaaaaagtaaatagtaattttgcagtatattcccatgaaaattgtatgggcatttcttaccaataagttatgttaaagtgaactttattataaataaaactactaattgcttaaatataattcatcttgtacctattttctgaagtgagcaatgtttgagtgaagcaacaattaataaacagagaatgcaaatgactcattgaattattagacatgttatatatatggattggatatttctaacagcatacctgggattttttaatatgtatgaagctcagaggaatccttgtaattcattagattttttttaacttataaatctaagaatggtatattattactaaattttcaacacaaatgccatattacrtagtccatttgaaatcacacactatttagtattatcag

SEQ ID NO: 364225 - DNA, 609 bp, Homo sapiens
atttaattaaagctattagaaataataagggtgaaaataaacaactttgcaggaaaagtatgaggtttgaagaatgtgcttttgttcaagaaaaaaaaagtaattttacatgaaagtagaacccagtagaacctaaagtagaaccagaacaagaaagaggaaaatgtagtaaacaaacacacacaaacaaaatcacctggatggatataagaaagttgtaaaaaatttacagaaaagagatctcaagtagtcaagctagctaagatttggatttatgtctttttttctgaatgagtcttgacatcaaaagtatactaatgcaaaacccggatttgtttttctctttgttaaaatgaaaatgttttctttgattattggtctcttaataagagactgtaaaagggtttttccatttttagtaacttgcttaggaaaccaagattctgtgtcttattagaataatttcctgtgckttatgttaacctttatcatgtccttagttgagaaggctgagacttcatactttttaaagcagtaaagttttttgaaaatatttttgaatatattgccttcctaaaatcaaatcttaaatgaaatcctcttgttctt

SEQ ID NO: 364226 - DNA, 587 bp, Homo sapiens
gcactagttagttacactctgggaattagaaagaaccatgccaaatccctgaacaccaggcactaaggttgatgtaattatttccagggtcaggcattgcaggtttatactgcctggacatagaaaattgattccacattattttctcatttatttgttttgtcactggctcagtcttagagccacacttttgctgaacaccttgtctgttaagccaattcctttggccagccttctgagaaagtatgacatttgacacagggcttacttttctctgtttacagtatgtgcgtgcrtgagctgggggtaatggtgggggctggggggaggctttatgccatgccatattgctagcctattctttttttgtgtgattttagaaaacttttatggaacgtgtaacacacatgcagaaaaatacacatatcttaacttaataccatagtcttaactagtgttctaaaattataccatcatgacttgtggaaaagtggataaccatagcatttccaatgtttcagagaaatataggatgattcagtgaaaaaaaaaaaatatatataatatatatacacacacacacacat

SEQ ID NO: 364227 - DNA, 550 bp, Homo sapiens
tattaggttacattatacagtgacctcaaggaattttttcagatataaagttaatttaaagaaatattatttcggctgggcttgacccaatcaagtgattccttaaaagagggtctagaggtcasagattttcctattggtcttaaaggagtaagttaccatgctgtccaggacctgagagagagtcatgtggcagggaactaagggtggcctcaagctactgagaggagcctcagctgataggtagcaaagagatagggacctccatcttacaaattcaataactgaattctgctaacaaccaggtgatcttagaagagaaccctgaggtctgtaagggcatgcagcctagccaacaccttgattacagccttgtgagatcctgagcagaggacccaatgagactgtgcctgggattctgaaccatggaaactgtgagatggtaaatgggtgttgtttaaagttactgcatatgtggtaattttttacatagcaatagacaactaattctgtatcattcaaggttcagctagagaagcagaatcagtag

SEQ ID NO: 364228 - DNA, 595 bp, Homo sapiens
ttctactctggcttgttttttcaacttttggaattttttttctttatggttagtgattgctgtrtcctatttatggtgtctttgtctagtccagtgcaatgaagctagtcacctgtatttacttcaaaaagctttattatttcacctttaaatttagatatatactgtatctggagtttaatttcttgtattttatgagatagtggcaacatacattgttttcaaaatgactatctggtgccatttactaagaagaatggactttttatattacactgcagtgatatgcttgtcataaattattccttggcaatatatgtatgcctatttctagaacctttataatgttccatggatctattcgtctgcgctgtgtcaatatcacaatgccttaatatctatggctttgaaatataaatcaacaagtgttagtgtacgtccccaacttttaaaatttatgattgccttggatatcattgatccttccattttcttaaaatttagaatttgctcgtcattttctacacgataattctgagattttacttggttttgcatttaatctaaagatcaatttggggctacttgacatctt

SEQ ID NO: 364229 - DNA, 595 bp, Homo sapiens
ttctactctggcttgttttttcaacttttggaattttttttctttatggttagtgattgctgtgtcctatttatggtgtctttgtctagtccagtgcaatgaagctagtcacctgtatttacttcaaaaagctttattatttcacctttaaatttagatatatactgtatctggagtttaatttcttgtattttatgagatagtggcaacatacattgttttcaaaatgactatctggtgccatttactaagaagaatggactttttatattacactgcagtgatatgcttgtcataaattattccttggcaatatatgtatgcctatttctagaacctttataatgytccatggatctattcgtctgcgctgtgtcaatatcacaatgccttaatatctatggctttgaaatataaatcaacaagtgttagtgtacgtccccaacttttaaaatttatgattgccttggatatcattgatccttccattttcttaaaatttagaatttgctcgtcattttctacacgataattctgagattttacttggttttgcatttaatctaaagatcaatttggggctacttgacatctt

SEQ ID NO: 364230 - DNA, 610 bp, Homo sapiens
gttatctcagcaaaagaatggatttagagaccacattgggcactggagtctcaccacrcatagcaaggccccttccctgaccaggaagtttcccttgttacagagtggcatagattctctagctcttaccctgccaccttcctactgaggtatatatgttaacatttaggggtgagagctaaaactaaaatcctaagccacccaactaactgaacggacaatttcttggccaagtgtgccccagagagatcttaaaaactaaattcctgggcatgacaagttgggaggtcagacgtactccattatcctccttcatacgtctcaaggtcagacatatgtccattatggtttagacacaacagtgaccagcattcgtgttcaaatagagaccaaaagactgacagaatggagtctttgtggcaataagataccaaattataaacaagacttaagattatgccaggcaagggttaagtcatacacccctgcacttaaaggataaactatgttctaactggcccgatgatttttctttttctctggcagctaaacaagcactggcctcgagataaggaatagtaaaataattgcagctcattcactgcaagac

SEQ ID NO: 364231 - DNA, 610 bp, Homo sapiens
gttatctcagcaaaagaatggatttagagaccacattgggcactggagtctcaccacacatagcaaggccccttccctgaccaggaagtttcccttgttacagagtggcatagattctctagctcttaccctgccaccttcctactgaggtatatatgttaacatttaggggtgagagctaaaactaaaatcctaagccacccaactaactgaayggacaatttcttggccaagtgtgccccagagagatcttaaaaactaaattcctgggcatgacaagttgggaggtcagacgtactccattatcctccttcatacgtctcaaggtcagacatatgtccattatggtttagacacaacagtgaccagcattcgtgttcaaatagagaccaaaagactgacagaatggagtctttgtggcaataagataccaaattataaacaagacttaagattatgccaggcaagggttaagtcatacacccctgcacttaaaggataaactatgttctaactggcccgatgatttttctttttctctggcagctaaacaagcactggcctcgagataaggaatagtaaaataattgcagctcattcactgcaagac

SEQ ID NO: 364232 - DNA, 610 bp, Homo sapiens
gttatctcagcaaaagaatggatttagagaccacattgggcactggagtctcaccacacatagcaaggccccttccctgaccaggaagtttcccttgttacagagtggcatagattctctagctcttaccctgccaccttcctactgaggtatatatgttaacatttaggggtgagagctaaaactaaaatcctaagccacccaactaactgaacggacaatttcttggccaagtgtgcyccagagagatcttaaaaactaaattcctgggcatgacaagttgggaggtcagacgtactccattatcctccttcatacgtctcaaggtcagacatatgtccattatggtttagacacaacagtgaccagcattcgtgttcaaatagagaccaaaagactgacagaatggagtctttgtggcaataagataccaaattataaacaagacttaagattatgccaggcaagggttaagtcatacacccctgcacttaaaggataaactatgttctaactggcccgatgatttttctttttctctggcagctaaacaagcactggcctcgagataaggaatagtaaaataattgcagctcattcactgcaagac

SEQ ID NO: 364233 - DNA, 610 bp, Homo sapiens
gttatctcagcaaaagaatggatttagagaccacattgggcactggagtctcaccacacatagcaaggccccttccctgaccaggaagtttcccttgttacagagtggcatagattctctagctcttaccctgccaccttcctactgaggtatatatgttaacatttaggggtgagagctaaaactaaaatcctaagccacccaactaactgaacggacaatttcttggccaagtgtgccccagagagatcttaaaaactaaattcctgggcatgacaagttgggaggtcagacgtactccattatcctccttcatacgtctcaaggtcrgacatatgtccattatggtttagacacaacagtgaccagcattcgtgttcaaatagagaccaaaagactgacagaatggagtctttgtggcaataagataccaaattataaacaagacttaagattatgccaggcaagggttaagtcatacacccctgcacttaaaggataaactatgttctaactggcccgatgatttttctttttctctggcagctaaacaagcactggcctcgagataaggaatagtaaaataattgcagctcattcactgcaagac

SEQ ID NO: 364234 - DNA, 365 bp, Homo sapiens
acccctgcacttaaaggataaactatgttctaactggcccgatgatttttctttttctctggcagctaaacaagcactggcctcgagataaggaatagtaaaataattgcagctcatycactgcaagacactgactcacttacctcctgttctataagccataactacagctttgtggggtttttttccttgtaatttgtttggcttttgttgttgttgatttggtttgtaagactatttgtttcattttacgtttgggggtacatatgcaagttggttatatggatatattgcagaatgctgagatttgggattccagtgaacctattacagaaacagtgaacgtagtacccattgtgaagtat

SEQ ID NO: 364235 - DNA, 478 bp, Homo sapiens
ctattggtgaggagaaaaattcctgattctgccacaaaagggagtttcttaactctgccccagttcctgtgaaacatttttcaagttgtaagaaagataaactaggaaacaaaaaaggaagacttctttttgtaatgtatgagaattgtaataacttagggagaaacctgctttgaaacaccagcattggctgcagtgagaagagccaatagtactacagtggcagaaaggagcctgtgtgccattcttgatatctgcattaccaaaaggagcagttgacaaaggcataaaacgaaaakaagcttgcaaagacccattacaaaaggaaagttctcagtgagttgtggttctagtttctgaaatactgattgagggatcagaataaataccgttacaattgttaaccctttttggtgtggcctgggaatactgttatatgtactaattgatcctttcaactatttattgagcaactact

SEQ ID NO: 364236 - DNA, 634 bp, Homo sapiens
cgccccactcttctggtaccaatttactgagttagtcccattttcacattgctgataaaaacatacccaagagtgggaagaaaaaaagaggtttaattggacttacagttccacatggctggggaggccccagaatcatggcagaaaggtgaaaggcgcttctttcatggtgacggtaagakaaaatgaggaagatgcaaaagcagaaacccttgataaaactatcagatctcacgagacttattcacaccatgagaacattatgggggaaaccgcccccatgattcaaattatttcccaccaggtccttcccaccacacgtgggaattgtgggagtacaattcaagatgagatttgggtggggacacaaagccagacaatgtcacactcattcttcttgttgattaccagtaacatcctcccatatcacctgtattcttgctaatagttacatttatttcaatcaatcaacagtcactcatggggaagaaatggccacttgtgtcactcccatatccctgggccctttgacatggattcttgtgccttcacgggttggtgtctcctggatctgtgggtaatggatagttgtccattccacatccatagtctcaaatcccaggtccatgatctt

SEQ ID NO: 364237 - DNA, 634 bp, Homo sapiens
cgccccactcttctggtaccaatttactgagttagtcccattttcacattgctgataaaaacatacccaagagtgggaagaaaaaaagaggtttaattggacttacagttccacatggctggggaggccccagaatcatggcagaaaggtgaaaggcgcttctttcatggtgacggtaagagaaaatgaggaagatgcaaaagcagaaacccttgataaaactatcagatctcacgagacttattcacaccatgagaacaktatgggggaaaccgcccccatgattcaaattatttcccaccaggtccttcccaccacacgtgggaattgtgggagtacaattcaagatgagatttgggtggggacacaaagccagacaatgtcacactcattcttcttgttgattaccagtaacatcctcccatatcacctgtattcttgctaatagttacatttatttcaatcaatcaacagtcactcatggggaagaaatggccacttgtgtcactcccatatccctgggccctttgacatggattcttgtgccttcacgggttggtgtctcctggatctgtgggtaatggatagttgtccattccacatccatagtctcaaatcccaggtccatgatctt

SEQ ID NO: 364238 - DNA, 634 bp, Homo sapiens
cgccccactcttctggtaccaatttactgagttagtcccattttcacattgctgataaaaacatacccaagagtgggaagaaaaaaagaggtttaattggacttacagttccacatggctggggaggccccagaatcatggcagaaaggtgaaaggcgcttctttcatggtgacggtaagagaaaatgaggaagatgcaaaagcagaaacccttgataaaactatcagatctcacgagacttattcacaccatgagaacattatgggggaaaccgcccccatgattcaaattatttcccaccaggtccttcccaccacacgtgggaattgtgggagtacaattcaagatgagatttgggtggggacacaaagccagacaatgtcacactcattcttcttgttgattaccagtaacatcctcccatatcacctgtattcttgctaatagttacatttatttcaatcaatcaacagtcactcatggggaagaaatggccacttgtgtcactcccatatccctgggccctttgacrtggattcttgtgccttcacgggttggtgtctcctggatctgtgggtaatggatagttgtccattccacatccatagtctcaaatcccaggtccatgatctt

SEQ ID NO: 364239 - DNA, 560 bp, Homo sapiens
tgtgactaaactcagggcctcaaagcaatgttaaatttgttttatttatattttttattgttcttttaacatctagaatataaacaagctccttgaggaaagaaatcatctattttgttcatactctatgcctagtgtccagagtaaagcctgtacttaaggctttaataactaaattaaagcctatttaataataggctattattacctatttgagtacctatgtaataggtactcaagaaaatattttgagtgaatggatgaaagaatctcataaagcctatgcataaaataatmatagctgatgtctagtgaatgttcagttcatgtgagatattgttatctatgcttcatgtgtttgactgtgtatgctatttaatcctcaaaacaacagtgaaagataggtactgctattattcccatattgcagaagagaccactgagtcacaaagaaactttctagacacgtggccataaacctagttagctgcacggccagaatataaacccatgttagcttgctgctgagcctgttttcttactatttagaacaattataa

SEQ ID NO: 364240 - DNA, 516 bp, Homo sapiens
acagaataaataggacaaaatttcaaagaaaatgacatgtgaatagaagcatccaatatcttattatactcatttctcattaagctaaccaattaaatgttaaagtcacagagaaactaggaacaatgacaacctcattccggaaattcccagcagtatttagatataatgcaggtgggatcagatagaaatcagtcatcaagaaccaactctaaaaatccatttatatcaagaatttagtacaagaaaatctgcttaaaccctactaacattgcctaacttgtaaagataagagttgtactaaaaaatgtgccatgagtcagtcaaasgccaagtaaaggtaattttcaagaagaaaaagagaagcaaaaagagaaaaaggaaaatgaggtctgacattccatattttaccataaatgtaattttcaagaagaaaaaagcaaaaagaaaaaaacgaaaatgaggtctgacattccgtattttataatgaggtctgacattccatattttaccaca

SEQ ID NO: 364241 - DNA, 516 bp, Homo sapiens
acagaataaataggacaaaatttcaaagaaaatgacatgtgaatagaagcatccaatatcttattatactcatttctcattaagctaaccaattaaatgttaaagtcacagagaaactaggaacaatgacaacctcattccggaaattcccagcagtatttagatataatgcaggtgggatcagatagaaatcagtcatcaagaaccaactctaaaaatccatttatatcaagaatttagtacaagaaaatctgcttaaaccctactaacattgcctaacttgtaaagataagagttgtactaaaaaatgtgccatgagtcagtcaaacgccaagtaaaggtaattttcaagaagaaaaagagaagcaaaaagagaaaaaggaaaatgaggtctgacattccatattttaccataaatgtaattttcaagaagaaaaaagcaaaaagaaaaaaasgaaaatgaggtctgacattccgtattttataatgaggtctgacattccatattttaccaca

SEQ ID NO: 364242 - DNA, 499 bp, Homo sapiens
tgagcattttgtatcaagcrctatctagcctctctgctaggagacatcctcagttgtatctgggatcatgctcaaatcatttggtccttggcagcagagtcacattgctagaactttttcctgggtcagcttcaggcatgctaaatttgatgtcccaggagataatttgttgatttgttacagctatcttgtttgtgaccatctgccacctcagtagcacattagtagaattaatttcctgtcagagctgcatgtcttctctgggagcttttctaggagggaggctcctgtctttactcctctgaagttttaaacataacatatttgaattatgtcatataggcattcacttccatgctctagttctgagttggatctatcttaaagggttcttctgtcctggactgttccttaaaagcagccagtgctacctctttctcttcctttccctacaaacaggtagaattgaaggttagatggattcctgcagatctcctac

SEQ ID NO: 364243 - DNA, 552 bp, Homo sapiens
ttgtcatgtcacaggaagggattcaagagaaataaaacaagtacatgaggccccttgatgtatagactcagaactgggcattctattggccagagtcacagggccctccaaaagaaaaaataaaggaagagtgaaagggwcctaaagtgttactgggcaaaagggaggccaccaattgtaagtatccatgcaatcagtctacccccaataagttaccttctctgggtaaagattctttataaagccatcatttttatatttttatattttatcaatttaatccagtgaatttatacttcaagatctgaaaatgaagaaaatatttaaaataagaataaatgcataagctttccattgtagaccaagtttttaaagttgaaatataaaaaatttttaagtaatttgtgacatcaagaactgaaaaatattagaaaaattttcaaaagaagtagtaaaagaagggaaagaattgagtgggaaggtctgcaatttgattaataaaccatattttctcccgggcagtaataatatacttcagcacctaaaattctc

SEQ ID NO: 364244 - DNA, 545 bp, Homo sapiens
caaatacagttagcttctagaggttttataatttttgcattgtacatttagctgtatgatccattttcagttagtatttgtaggagcaagatttgtgtgtagattccttttttttttttttttttttttttgcatgtgcacatccagttgttccagcatcatttgttgaacaggctctcccttctccattgaattgctttgttcctttggtgtgggtctatttctgggctcttcattctgttccattgatccatgkgtctgttgttttgtcagttccatgctgtcttgatttctatggctttgtagtaagtcttggagtcagggggtgtcagtcctccagctttatagttgttttgtgctttcatttttggaaggttatcaattattgactcaatttctttaatagatataggcttatcaagattattgtttcttgtgtgagttttggtagtttatatctttcaaggaattggcctatttcatctaggttatcaaatttatggcaacagttgttcgtgatattcctttatcatccttttaatatc

SEQ ID NO: 364245 - DNA, 579 bp, Homo sapiens
tgccttcttctttggtttctcagctccttctgcatttgggggttgctttgtgataaatggccctttcacaaaacagcctgacttcttcttccactcctcacatataatcaatcaccaagcactgctgattctatcccctaaatctctgtcaagactttcaacttctcttcatctttactgccaytgcctggtccagactactgtcatcatttgcctggattcctgtacctgcttttaattggtctctctccctctagttttatccacaaaatctatccttcatacggtagatgggaaaaaaaagagactttttttaaatttttaaatttttttaaagatggtctcattctgtcacccaggctgctggagtgcagtggtgttatcatggctcactgcagctttgacctcctgggctcaagtaatcctcccacctcagcctcctaagtagctgggactacaggcatgtgccaccatgctaatttttttatttttaaatttgttgtagagatgaggtctccctaagttgcccaggctggtcgtgaactcctgggttccagtgatcctcctgcctacctccaa

SEQ ID NO: 364246 - DNA, 618 bp, Homo sapiens
aatttggaaatgtaatgaattctaaatacgtttctctattactaatattactaatatttctagaagtcccagagataaaaatgaatgcaactaggaagttcaaaggagactaccttgatttaatcttggcagcacctgcatcttcagatatcagtatgcagccacccaataacagccctgttgagaaggtgtgtaagtcacatactcttagcttaattttgttgttattgaagtaaaggacacatygtgcaatctctaggacatctaaggatatgtaaggaaaccaagtacagccaaatcaatggatgcctgaactgaacagtaagaaaccaagactactactgccagcctctcacagcactatctggtccctcatctctgcttatctccactctgctgtcttgtgcttactcgtggctttctagctattctacactttcatcttttttaatttttaactttcttttagagacagggtctctttctgtctaccaggctggagtgcagtggtgccatcatatatagctcactgtagcatcaacctcatgggctcaagtggtcctcctgcctcagcctcctgagtaggtgagactagaggtatatgccatcatgcccagc

SEQ ID NO: 364247 - DNA, 605 bp, Homo sapiens
ggttgtatcattgctcatttcctgtaagactattctgtttaaagatctgtaactccctgctcagctttcaagaccttctacatgctgctacctaccaccaaccaattcaatcccatctcccacaacctttcaaagaccttcactattccagccaggagtaaagactgtccctcaagtaacattctaatttgccctgctgtgcctttttactttttccaatatattgaaatatatcaattttcaatatatgctctttgattgtagcgactctgagaggtcaaggtagatgcggggaggaaagagataagggtctcctaaacagatcttgaggtggggaaacagtatgtgctgaggctctgtatcattctctactgcagcaggttctgggaaagtcccatttggcagagcttctggccaggacctatagccatatcacaaacttcaggcttgtcctcaaggtacacacaccattgtgttacacttgccaggtgtgggaataactaactggtagtggccaaatgaactacamataagctataacaaccaggatgagatgactaggtttgctgtaaaactgcctgcatatacagacaccaaaagccaca

SEQ ID NO: 364248 - DNA, 642 bp, Homo sapiens
aagaaaagtataaataaattttttttatttttattgttttaacattatgtttttaacttttttgtttttaagatgagaccccagaatgacttaaggctgagcatatagagtattctgtatgcacataaccccacctccaggggaagttagttttgagtaacctatatttctgtttatatttactaaaatgacgaatttaagagattcatgaattatggatgttaggatagattaatggagagggatatagtagagtcacaaaaatatgcatataagactgattattttgagtcacaatggattgtaaagttccaaaagtgtgggaagcagcaactttgcctgttcagaatttgagagaagtaggtattactactgtttattcacaaacccaattgtcacttcattcaacaaatactttctgggttcctgcttgtgtaccaggcaccagggtaggaactggagatgcaatagtgaatccracaaaatctttaaccctcatagagcattctattttttgtgcgaaagcagagagtaaaccttgagtatgacaagtcttggataaatgctctggtatttggggaggatggatatcattagatggagtgatctaggaagcactcttcaagaagtacatgtgagtgg

SEQ ID NO: 364249 - DNA, 485 bp, Homo sapiens
tctttttttcttagtctagctaaagatttaaaattttaatctttccaaaatatcaactcagtttcagtgatcttttctattgtttttctactctctatttcatttatttattctctggtctttgttttgttttccttctttctgctaattttgtgcttcatttatctgtctttctctagttccttacatgtaaagctagcttgtttatttgagagttttcttttttcttaatgtaggcatttatcagtataagcttaactgctttttctttatccctcaarttttggtatgttgggtttgcatttttatttgtcccaagatatttttcatttcccttttgatttcttctttaaccttatagttattcagaagtatgtcatttttgtgaattttacagtttttctcctgtcgttgacatctagtttcataccacctgtattagtctgttctcaggctgctgttaagaactgcctgagactgggtaa

SEQ ID NO: 364250 - DNA, 551 bp, Homo sapiens
aggctggtgtcctacaatccttgtttgtgtgctttctcacaatcctgcggagttgggccagctgtctgcatctgctcatgagccatctgcagaggctcatacctgtcattcacagaggcaaatgtgaggtggggtaagagggatttggcgaggtgtgtcaaatgtcatggctgcttttggttcagttacagtggtccataggcaaggcattccaagtgattcatggatggacttcctgatgaaatccacaaagtagttagtaggattcatggtcctttgttgttttctgaactctggctgctttgagtcccctytcactttcctgatcccagcccctttcaaccactcgactgtgccagtcaccaatattctgggtgggatgagaaagacatgggtctcatgagcagcatcccacatggctgagggagccagatgctcacttactacactctcacttttccttgtaggagaaatcacaggcccagggtgtctgtcttggcactgagctttgccaccttgtgggagggctgatatatgtaaagtgaagctac

SEQ ID NO: 364251 - DNA, 452 bp, Homo sapiens
gtataatttgtgcaagtgatcaaggttaaattgttgtcagttcagattaacccttggtcttatccaaaatcatagagggagtatccatatctctgttttaattacctatttttgctatggtcggaacatgtccccaaaaatttatatgttgaaatataatgatagtattaagagatggggcctttgtgaggtaattatatcatgatatakttgtaatcatgatagtattaagagatagggcctttttgaggtaattatatcatgagggtgcagctctgaaagatgggattagggacattttaaaggagttgagggagtagattcactgtcttccactctcttgccatgtgagaacacaacgttcatccccttttgttctttccatcccttttccaagtgatgacacctaggtggcccacctacaagaaacagtccttcaccacacactgaat

SEQ ID NO: 364252 - DNA, 472 bp, Homo sapiens
aacatttggggctggataattctttgctgtgtgcagctgtcctctacattgtaggatgtttaacagcatccctggtcgctcagtgtcagtagtttctccctcccccagttgtgacaaccagaggtgtctccagacatgccaattgtaatccaaggggcaaaatccctcccctccacacctaattcaggagtatcatcagggctttgcaagagaaggaaacaagcatgaggacataacacaatatgctgctagagagaaaagcagaggggagattataagacattgtgtgtcaagaccaaagaggatgggcattagccaagaccagtggaaaattcctgggagattcaagcagggcagtgccattgtgtttcaggaaaatctcttggcctttgtggtttgcaggaggtcagagttkcctacaaggagaatgggtgttccagtcttccaggcaagaaaagatgacagtcataac

SEQ ID NO: 364253 - DNA, 613 bp, Homo sapiens
aaggactctggctgcaacgctatttgttgataaagcaaaaattgattttcaacagaagttagaatgaggaaagtcaaatttggaggacagtgtaaaacctctaacattttcatgagctttgaaggtagactctgctgttcagagattgctcaagactaaactggtccctgccgaggtatcwatggactgtgagtagaacccaatttacaaagcacttgcacattgtttatctggatttttatttttctctttactgcccagttgctcaagccagaaattggacattatccttatttctctttctctccttcaatctgcacatccaatcaccaatttccatagcttggtggctttcaaattttagcatgcatcaaaattactttgtgggcttgttaaaacacaaattgcttggcctcagcttcagggtttctgggatagggtctgagaatttaaatttccaacaaattctcaagtgatcctgttgattcagagaccacactttgaaaaccactggtgtagatggattccttagcatctttcacattcatccgtttctatttctatgatgactaatttgagtcatcatggtacatcacttgtattattgcagtga

SEQ ID NO: 364254 - DNA, 648 bp, Homo sapiens
tgagtcatcatggtacatcacttgtattattgcagtgacctccttggaaacacaaatcagttaattcaggcccctgcttaagacttcagtggccctctggagcccaaaggatggtatccacacagaccatccataattagtcctagacttacttctctaaactcaactcttgccagatctgccctaaactccagtagtagtaatggatgtgttctcccaatggcctggagctctgtcacacctccaagcctctgttctatgccattttctctggaatattttccccactgtcttctgcacaacacctatkggcccttctgatctcagatttcaagtcatctttcatacaatactatctgcaatttctagggcttctgtaacaaattaccacaaatggggtagcttaaaacaactgaaatttatgatttctcagtttggaagctagaagtccaaaatcaaggtgtcttcagggccatggtccatctgaaagctctttcttgcctcttccgtttctggtggttgccagcaatctttggcatgtcttcatttcactctagtctctgcttctgttttcacatgacctttgctgtgtgtctgtgtgtctctctcttcttataggaacactagtcactggtgctagggcctatc

SEQ ID NO: 364255 - DNA, 590 bp, Homo sapiens
aagtggacctagtcaaacaaaagagcttctgcacagcaaaagaaactatcaacagagtacacagatgacctacagaatgggagaaaatattcacaaactatgcacccaatgagctctaatatccagaatctataaggaacttaaagcaacaagcaaaaaccaaataaccccattaaaaaatgggcaaaggacatgaacagacacttctgaaaagaagacatgcaagtggccaagaaacatatgacaaatgcatcacatcattactcatcacagaaatgcaaaatcacaactcgataacatctcacacctgtcaaaatggcattattaaagagtcaaaaaacaatagatgctggcaaggctgtgcagaaaagggagggcgtatacaccatcagtggggatgtsaattagttcagccactgtggaaagcagtttataaatttctcaaagaattcaaaacagaagcatcatttaattcaacaaccctattactgggtatatatccaaaagaaaaaaaactattagatctcatttgtcaattttagcttgtgttgacattgcttttggtattttagtcatgaagtccttgccca

SEQ ID NO: 364256 - DNA, 545 bp, Homo sapiens
taaacacatgtcatggacattttttgcacatactgtttcatcacccatgtagtaagcccagtatgtactagtagcccattacccatgtagtaagcctagttatcttcctgctcttctccctccttctaccctccccactcaggtagaccccagtgtctgttgtttccttctttgtgtccatgtgttcttatcattyaggtcccacttataagtgaaaacatgtggtatttggttttccgttcctgagttagtttgctatggataacagcctccacctccacctacgttcctgcaaaaggcatgatctcattcttttttatggctgcatagtatcccatggtgcatatcagcacattttctttatccagtctgtcattgacgggcttttaggttgatcccatgtctttgctattgtgagcagtgctgcagtgaacattcacatgcagttttaattgtgcatttattaacatttttcctgcattgtttatctgctattaatctcattcttcatttcagacattttatttttcatctctagaagttta

SEQ ID NO: 364257 - DNA, 619 bp, Homo sapiens
gctgagggacccccaaaaggcagcctrcccctgggttatatacctcagggtcacgtgacccactgggctaaggaactgaatgataatctttttcttaagacggtctggaacagagaccaggctcttctagccagtccttcttcatctcaggctgttgcatttccaacacattctacagttattcttaaaaaggaaaagtagaataggggagaactgggggatctagggtcacccaaagaactatcctgcaattagtccaagattacaggacctattcagaccaattaaacctgggagagagatcctcttcccttggtaacatgagtgacaatgaggtctgtttcaggctgcctactgtcaatttgtccatcatacagagaaagtctttctgtagtaggatagaatgaagtcaacaagtttaaaaaaaaaaaaaagccaacaaaaacaacgagtgagctggaaaatgatgacaatatatgatgacatagttaagccacccaaatcccaccatgcagaaaggccattcttccttggacttcctggccacatgagccaataaattaccttttcagcttaaatggatctaagataggttatttgtatttgcaatggaaaatgt

SEQ ID NO: 364258 - DNA, 613 bp, Homo sapiens
aggggagattgcatgttgctcaacccagaagatagaagaaggaatgacagggcccagaaagcctggaggagctgtgcaaaaggaatccatgcctgctttcttgtgagaacctggagaagcagtaagagcttgtccaccagttccttccagttacataggtccaagactattgcatttttatygcacattctgaagtccttcacccaacaagatgcagattcttcagaacaattcttacatgtctgagagaagctccaaacttcctccagttgggtctaatcatgggcttctaaaagaagattacccaagaatgaatcagattttagatcctcacttacatagaccaagagagagcactgcagagatcaacaacaggaacgacagtgccctggttctccctcccaacaccttccacctcctcatcatgcagagcctcctaaagttaaacccaatccttaagggaggagaaaccctgaattgactgagagatgtttctgctaaccagcaaaataggggatttgtaataaaactgttaaaaaataaaaaggtcttgtcataaccaagttaaattacttttcttacacatctaagtttggaatttaagatttaagcc

SEQ ID NO: 364259 - DNA, 613 bp, Homo sapiens
aggggagattgcatgttgctcaacccagaagatagaagaaggaatgacagggcccagaaagcctggaggagctgtgcaaaaggaatccatgcctgctttcttgtgagaacctggagaagcagtaagagcttgtccaccagttccttccagttacataggtccaagactattgcatttttatcgcacattctgaagtccttcacccaacaagatgcagattcttcagaacaattcttacatgtctgagagaagctccaaacttcctccagttgggtctaatcatgggcttctaaaagaagattacccaagaatgaatcagattttagatcctcacttacrtagaccaagagagagcactgcagagatcaacaacaggaacgacagtgccctggttctccctcccaacaccttccacctcctcatcatgcagagcctcctaaagttaaacccaatccttaagggaggagaaaccctgaattgactgagagatgtttctgctaaccagcaaaataggggatttgtaataaaactgttaaaaaataaaaaggtcttgtcataaccaagttaaattacttttcttacacatctaagtttggaatttaagatttaagcc

SEQ ID NO: 364260 - DNA, 515 bp, Homo sapiens
tgggagagacagagagaaaatatttgctaaaaaataatctaataaaacacatctttatttttatttttacagactatgacctttgtttatctcttccatacaatttagggcaattgagagtgcaaataggaatatgcacatgaagtaactcatggagagataaatagaataaggaaatataaactttttttgtaaattgtaaaatktcatgtgatattacaaataggaaaccatttatgaagcacccattatgaactgtggaaggtgaaatgttgagaataaattattcatacaagtctttctgactacaaagcctgctagtctacactgtataatgaattaaaaatatagtttttaataataaaaatcctagtgatgagggccttataattatctcttttgtgcaagacattttttggcagtgttcagggtaggttgaagagttggctgaaggagagaaataaagaggaataaaatctgagttctactctctagaagcataagcctagtagtag

SEQ ID NO: 364261 - DNA, 515 bp, Homo sapiens
tgggagagacagagagaaaatatttgctaaaaaataatctaataaaacacatctttatttttatttttacagactatgacctttgtttatctcttccatacaatttagggcaattgagagtgcaaataggaatatgcacatgaagtaactcatggagagataaatagaataaggaaatataaactttttttgtaaattgtaaaatttcatgtratattacaaataggaaaccatttatgaagcacccattatgaactgtggaaggtgaaatgttgagaataaattattcatacaagtctttctgactacaaagcctgctagtctacactgtataatgaattaaaaatatagtttttaataataaaaatcctagtgatgagggccttataattatctcttttgtgcaagacattttttggcagtgttcagggtaggttgaagagttggctgaaggagagaaataaagaggaataaaatctgagttctactctctagaagcataagcctagtagtag

SEQ ID NO: 364262 - DNA, 515 bp, Homo sapiens
tgggagagacagagagaaaatatttgctaaaaaataatctaataaaacacatctttatttttatttttacagactatgacctttgtttatctcttccatacaatttagggcaattgagagtgcaaataggaatatgcacatgaagtaactcatggagagataaatagaataaggaaatataaactttttttgtaaattgtaaaatttcatgtgatattacaaataggaaaccatttatgaagcacccattatgaactgtggaaggtgaaatgttgagaataaattattcatacaagtctttctgactacaaagcctgctagtctacactgtataatgaattaaaaatatagtttttaataataaaaatcctagtgatgagggccttataattatctcttttgtgcaagacattttttggcagtgttcagggtaggttgaagagttggctgaaggagagaaataaagaggaataaaatstgagttctactctctagaagcataagcctagtagtag

SEQ ID NO: 364263 - DNA, 585 bp, Homo sapiens
caaacccagcaggtatttgttatccgtgttccagtctctagagatacagcagtaaataagatgcatgcatatctttagttaaattccctggcaacaagaattcacaggattaaattaaattaaattaaattaaattaaattaaattacattttgaggctcagattccctttccaaaagatgtccctcagtcattcaagccaactctgccaatcttgacatgtacttgtatttttctcctactgatttcatgtttgcatctggatctgcagcatcggcagccggccacagcctcattccttgttgttaatgcacaagactaattcatctcctgccttmaggaattgaaaatgacattacaaagaaaaattgccccctgactcaagaaaactctgtcctggaccaatttcaaaaagttcagcttcctacagaacgatacaatttgacatcccaattaaagtaaccagagagaagagtcaaagagggaatgaaaggaagagactcacatttcaagccgaaaagaaaaaccatttagttgacttgcatggggatgaaagagacctcagccccagaagactaattaccta

SEQ ID NO: 364264 - DNA, 562 bp, Homo sapiens
tgggaggctgggcaccttatgcagacaacaaggatgtcatgggggagtgatagagtggccagtcccaccagaggaatactgctgactctttgaagaccactctcatcrcagcaaaagccttcagacatcatgcctgacagcctgctagttgagaatgccattttaataaaactgtattttaaaccccttgtcaattacatgctattgcagaattaaccaaggagcctaaagctttgtcatccaggaagtttgttatttaggcaacatttttattatttttctatttccctaaaaatcttaacccaatctttatattcttaccaaatttccttctgtcattcttccttagtggcaagcagtaccactcctaaaggtcttttggagtaaggctgtttaaggactattgccccctaaaatgactggttggcttatatttttgtatacatttataactttataaaaatgaaactttctccaagaagatattttttgaacatgaatgttttttaaacctgagtatcattaatcatcttttttgtccacaaagataaagcagatcatt

SEQ ID NO: 364265 - DNA, 658 bp, Homo sapiens
tgcttctttaatgtgtgcctctctcaggatctcattgagagcaggaccatcttgtatttatcatggtatcccccgaatttacattgactggagaaatatgttctaagtggttgaataaatgagtgaatgaatgaaaggtaaagagtargataagcacaaaagggaattgagaatattctgtaattaagttgtggggatggctgcacaactctatgcatatattgaaaaccaatggattgtacacacgaaatgagtgaattgtatggtatgtggactatatctaagtaaagctgtttataaaaagaaaattgagaaatagtaagtcatccagatggaagaacatattacataaggctagaaagaatctttaacatttcagcgtcaactcgaaatgtgctgaaagattgaatgatcaaaactcaacttaccatccaaagtctttatcccaatattgtcttcttactggatgcgtttgcttactttatttattcatttttttttaccagtcttcaaagtatgttaagattagttttctaaatgcttttgttttcactttcctgctgtgagtagcaatctaatctagactggatagcataataatttaggagaaaaggggagctcattccatacttggaaccatctctctacaggagacctg

SEQ ID NO: 364266 - DNA, 513 bp, Homo sapiens
taaaactaggttaatagcatctcttccttagtaacctcacagggctattgcaattacagcaaaaggtgatcagagaaggtccaggttctgtgaagcctgaaactaatagaatttgggggaccctctttaaggaaaaagatcacaaaattataaaaaaaaaagatagaaatttagaatatgaaaagaaatcataatacattatgaaaaaacctgtatccaccttcaaaaaacaacaacaacaacaaactaaaacaacaacaaccaaaaattactcccagctcaaatttatcatagccacttgccaaaaatacctgtggtcacaccaaagccagcagccagggggagcaacatgatagagaggaagttgaagtaaagaaagttgtcttaacaaacgacagttaaaatgcctactttgcaaattttataaaaaaatgcagactatatgaatacattgcaagcagtgttttccattgaaaggsgctagtaccattgaaaagcccagaagctaaagtt

SEQ ID NO: 364267 - DNA, 584 bp, Homo sapiens
acaagtggctacttctttttaggttccatgaatttgtttatttatgtaacatttcatcctgtgtgggattttgctgttgacactggactcacctttgccatccagcttcatgtgtcttgagtccagggaccatctcctataacccttatgcccagcayagtgatgaagcaaggcaggtgctcataaatatgcatgagttgattgatcagctaaaggacaacaacaatgacacgtgtttgtgtatgtgacagtagggaagtcttgcttttgggacttttaacatactaagcagtttctctaactccatttccctaattccctaatgcaaatgaagacttgcttggttcccacagagacactgaggcactttccactgcagatctgtggcttaaaatgcagcttgtttatgctgatcctgggcagataatggaacatggcttccttctctcttgttctagcgcatgctcatagtgcccagattctccattgtaccagctccctctctgacatcaatttcagtttcaatcttatctacttactccgattcctcatgttttatacatccttttcgggcactgaagact

SEQ ID NO: 364268 - DNA, 574 bp, Homo sapiens
ttgcagattctacaaatattaagtgaacagtaagaatattataaacaaacttaggtcaaaatttaattaaaacaaacacattccttgaaaataaagcttaccaaaactgacacaagataaaacagaaaatatcaatagttctacctctgttaaagaagttgaatttgctgttaacaatcttcacatgaagaaaattcctgggccaggtgggtttctagtgaatgctatcaaatatttaaggaataattattaccaattttatgcaatctctttcagaaagtagaaaaagaatacttccaaacttcttttgaggccttcaaaactctattcaaaacccagcaaagaaattacaaaacaaatacataaatgaaactacagatcaatatcgctcttgaacatggatacagaaatccttagcaaaatatcarttctagccctatataaaaaggattttatatcatgaccaagtggggtttatcctagaaatgcaaggttagtataacatttgaaagtcagtcagtttaattcatcataacaatagaataaaagaaaaaaatcatgtgataattttagt

SEQ ID NO: 364269 - DNA, 512 bp, Homo sapiens
ttgcatgtaatgttttgtgtttgtttgatgttttgattcctttctttaactctcattcatcttaaataagattactttatgttctttttcaaactgtcattcaaatacctcaagtttctatgacactaatcccactgttattttgtgtgtggactctaagccatttaaattgtttcttcatatgctttcttataacaagctcatcrttaggtgatatattttgttattgttttaactgagtattttgtgtgacctgaattctagaagtttctttcgagggttagtttgcatttgtttctgacaggaaccgcttgaggcctattgaatttttgggttagggtttccaacttacatgagtggtgtagttcaaaacatacacctcagtgcaacataaatcttgaatttgtaattattttttctgtcataagccaagtctagacaacagtctttgttttctacttgttacaatctataggtgttcacaacaaatgcagttcttcaagggtcccaga

SEQ ID NO: 364270 - DNA, 597 bp, Homo sapiens
ggatgctttttttggtcatccaggaaggcctatttgtgtaggagacatttagcttaaaacataaatgatcatggggaaaatacagcaagagaatgatccaagaaaaaatattgcaaatagaaagaatgacaagtgcatagctcctgagatgggaascaacatagcctatttgaggtatcgagtgaagtgaatatgaagaaataacaaatgatgagataaatgaggtaggtggaaattagattatagtagctttatggaccatggtaaggagtttggatttaatccttgttacaatgaaagttattggaagttagccaagtgatattatgttaccctcttttaaaatgatcatcctgaagactagtcaagaggaattcccaacaataaaccaggactgagagttattagtctggcttgggtgatgtgccattcttaaattagtcactatggccaggctaatgcaatgctttgattggcccatcttaggttatcctatttctgaggccaaatggtgaattcgactccatctgaactacatggactgaaactaggaatgagggtaatgttctcacattgaggtggtatttccagaagaag

SEQ ID NO: 364271 - DNA, 519 bp, Homo sapiens
gggaagatacaaacaacaaaaccacatctgctcattattcaggttgagcaaagagtggttactattrttgtaaaagtgttggagccctgttgtattctggaagctattgttcttacagtcaagagaatttatcttgccaacttgagaatagcatctaaacactaaatacaagtctgaactctgaacaagattcagagtttcttatccacacacatttactgagtactgatctgcacatttgggttctaaaatgattttcaaatacagaatatctcattaaataagatgaagatatgttttctattattttaattttgtaaattatggccaaagagaccacatttgaaaagagaaaatcttgtttgttattatgttgtaactgggtgagtagaggctaaaatacttgcatttctatagcacaaatattccttatgggaaattcaaatgtgtctcagtctttaaggatgtacttcttgagcaactttgaggaacccaaatatagtaaatcactagtattcc

SEQ ID NO: 364272 - DNA, 446 bp, Homo sapiens
tgctgttttcaaaaacatttgctccttaactatctgatattggcaaacctgtgttgacaggtggttttgaagmctggcacttttaagacttgtttaagaataagttcttcccagaaggttgtgacaacattgccagtgtgaaataattctgcagggtgctttttattaaagcggctgaaatttaagttcctaattttattccagtgaccaatcctccacaattgcatagaccttggagatagcatcttctttgtgactcatctctagagttcatctggtccctctatcaccagacatttaataagtgtatcctcagtgccaggcactgtgccagacaccagggctaaacagattgggttgggaagagctccagcaatgatgaccactcaaggtttgcctctcctcaaaccagtttcatgacaaatgttccattacagaaaattcgt

SEQ ID NO: 364273 - DNA, 626 bp, Homo sapiens
cttcagtaggcacctcatacacactttggaaaaaaattgttaactcattaagcttaatggccccagaagcatcccagaatgctacaggagctaaacctttaacaaagaacctcacttctaaggaggtagtattgaacctacaaaagagaaattctttcaagtggagatcagaaagctgagctattattatgaaagagccagaaacgaagtcattctttactaagggcagttaacaatttcagagatggattctacaaattatgtacaccagggaaaacacttaataatgatcatctggtaaaggccagctcctcaaaaagggccaggagaaaaagctatttaaattgggaatccttgtaagagcatatctgaatttgtgtgtgtgtgtgtgtgtgtgtgtgtgtgtgtgtgtgtgtgtgtgtatgctgcacacacaaaatattcatcctgaacatggtatgarttgaaaagtgctgaagacagtaaaagtatacttggtcatagggccttcaatcttcaattagtagtatgcaaataaaagactaaaaaattctagttttgtgatcatcagttcaacctagaaaatgtaaaactaaatgcaaaagtgagtcataattgcacataaa

SEQ ID NO: 364274 - DNA, 551 bp, Homo sapiens
ctgaactccacatttaatgcaataataagaatgttgagcttagtgtctggcttataataagagctcaattattattagtgatcataattattatcattccagtatagactaagctttgtatyatcagatttatatgcactattttatttaatttcatataaaaagctaaaaagactgaattgaaaatttttttcaagctaaagttagtagcaacaaattaatatctcaggaaacctagatatgaataaaaagaaatccagttccacatttgcctacagataatgcctttcatctgacaatctgagaccatcaaactgaattaggcatcgagcaaacatacagcatggcttacattgaatcacttttctaatagttcagatgtttgtcttcctaatttattatagccagacactcacttccagttcttttcccatcttttcttctggcattgcagtgcaagctcccattagtcatccagagatatattacttgtcttattcttgtccaaattatttgcaaagatgctgtaatttagtgtgggcaacttaggt

SEQ ID NO: 364275 - DNA, 557 bp, Homo sapiens
agttaaactaagcaacttgttatttgatttctgagaacctttaatgtgtgagggtacccagtgactctcttagaggcagatagaatagataggcttttctgagatcattaactaccttgggagtgcgggatacatttgcctagcacaatattttgaacactgaagatctcaagcattgttgaaggtccaagataggattttatgctttaatttgctttgtttcttagtcttgatggaaagggtgggtgtcatcctctgcaaaagtcaagataagtcaaactttctgtttgttgaactcctaataactctggtttaccctggagttcaagtctggtataaacagtcattttttaaggataccatttagaatttcttaaattaatgtgaaaatatatatattctgggcaagagcaacaaatyttattaataagcaccctatttatcactgtataatgtatgcagtctctggaaatacatacgaaggcatgaaaaagtggagctgatgaattacagaaaccttatacatattctaaatgcattaaacactttctactcac

SEQ ID NO: 364276 - DNA, 635 bp, Homo sapiens
ttactaatcatgagatacttcctctcatgattatggatgccttcatggagacaacatttgtaaccacaggctattttttttgctttatttttacacrtaagacatttgctattccaaagaccaaaattaatcaggagtttctgaaaatctgaagtgtgacaaatatgtagaattaacacctgttcctattattgtacataaccaaatctctggagttttttgaaggcatatgctaggtactttagataggggccttagaacaattttcttaaggaagcagaaagaatcagggaagagaaagttaggcacttcagaaaactttgaaaagtgctccaaacagataagtaatcaccatgtgataaacactgcatttcacagaccatctccttaacaagattcactttctgctgactcactcagatatatcaagtggtagaacttcaaaaataaaaaatgaagagaattaaggcatgatcccattaccctcctgagagaactgctgacctcactgacatcaatattcgaaagacttatgtaaatttctaaattgagtagctagaattcttttttatttttctcctacaagtatttcactgagaccctctctggataacttccatcttctatcattttct

SEQ ID NO: 364277 - DNA, 635 bp, Homo sapiens
ttactaatcatgagatacttcctctcatgattatggatgccttcatggagacaacatttgtaaccacaggctattttttttgctttatttttacacgtaagacatttgctattccaaagaccaaaattaatcaggagtttctgaaaatctgaagtgtgacaaatatgtagaattaacacctgttcctattattgtacataaccaaatctctggagttttttgaaggcatatgctaggtactttagataggggccttagaacaattttcttaaggaagcagraagaatcagggaagagaaagttaggcacttcagaaaactttgaaaagtgctccaaacagataagtaatcaccatgtgataaacactgcatttcacagaccatctccttaacaagattcactttctgctgactcactcagatatatcaagtggtagaacttcaaaaataaaaaatgaagagaattaaggcatgatcccattaccctcctgagagaactgctgacctcactgacatcaatattcgaaagacttatgtaaatttctaaattgagtagctagaattcttttttatttttctcctacaagtatttcactgagaccctctctggataacttccatcttctatcattttct

SEQ ID NO: 364278 - DNA, 553 bp, Homo sapiens
taacttctattaagctattgaaaccaccaaattttatccaaagcattttctctgttgaaattttatttatttattttatccttgrcattttttctaatgattttgagttcagtttgaaattcaacaatttggtatgtcagaaagatgattttgtgccccgccccccacaaaaaaaaacctagctttttatatggggcaagataaggttggttatgctgcagaaacaaattagttcaataaagtcatagcttattcaaaatctgggaatcctttaactacagggccagtttttaccaatagcgatttagtcatcctggctgctcccatcctgtggctgtttggtctgaattaggtactccacaattgctgcagcaaagcaagagaaatctacaataatcattcaatggctcctaaatatctgggcccgaagtcacacacatcattatggttacagctcattggccaaaactggtcatactgtgctgccctactgcaaagggctaagaaatgtgaggctagggcaggcataatagatagtcagtgagtcaatata

SEQ ID NO: 364279 - DNA, 553 bp, Homo sapiens
taacttctattaagctattgaaaccaccaaattttatccaaagcattttctctgttgaaattttatttatttattttatccttgacattttttctaatgattttgagttcagtttgaaattcaacaatttggtatgtcagaaagatgattttgtgccccgccccccacaaaaaaaaacctagctttttatatggggcaagataaggttggttatgctgcagaaacaaattagttcaataaagtcatagcttattcaaaatctgggaatcctttaactacagggccagtttttaccaatagcgatttagtcatcctggctgctcccatcctgtggctgtttggtctgaattaggtactccacaattgctgcagcaaagcaagagaaatctacaataatcattcaatggctcctaaatatctgggccckaagtcacacacatcattatggttacagctcattggccaaaactggtcatactgtgctgccctactgcaaagggctaagaaatgtgaggctagggcaggcataatagatagtcagtgagtcaatata

SEQ ID NO: 364280 - DNA, 640 bp, Homo sapiens
ctattactgtttgtttagtcaggacagggtgatgtatttcgttttctgtaagttctaatgtcactgaatgagagtaattatgtgcatataaacacacttcacagaaaaagatacacaggttataaatcactaaaaatcaagtattcacttaaaaatgttaagtgcaatatcactgggaatgataaagcctataaaagtacacaggttctgccctttctctagttcagaaaacagggcagccaattagatattcaaattatgtatattttctcctttaaagatgcatatagtcatatgtccctttggagaaagaagagaggatcaagacaaattggttatttgtgcatgtaatgctgagtttcctaagtccagggaagaattccagggagtcaccaatatcaaagaactgaaatttcctccttgaaagcaatgcaatgtwatctatgatctcaaaatgacctttcagaaacattccattatcaccctccttcttatggttttgtacagatacactatatctttgatcatctccactgttcaaaaattctgagaatttttgattctcacaagacccctgtaatattagacaaattgagctctgtgaaagggaatctattaaagtcatttattacagacaagg

SEQ ID NO: 364281 - DNA, 548 bp, Homo sapiens
ggtttaaatcctatcaggaagaaaccgacaagaacctctgaagtggaggtcactgtttgggccacttttaaaaaaataatttgaattagctactagaaactaatattatactcaactggcccacttatctcattaatgtctgtctggtccctgcagtgatttcagatttcaatccctataataatactttctcattttgttattgaagaactggattctcagagaattcagatgttctatttcaagtctcacagctgatagacagaaatgtattgggatgggaaaaatttaatatgctttatttcatcatattaatccccaaattcaggtatgtctctaccatttgactcatataactgtgagtttgaatgtctttaaattagtaatagtgttggagttayggggaaaaagtgactgctttccagtaattgtcatttgacatttcttcctcccaaagaaaagtacaaaagttaactcttttcttttctaatttaccacaattcaaatttaaaaactgaacattagagaagttagttagacatatatga

SEQ ID NO: 364282 - DNA, 548 bp, Homo sapiens
ggtttaaatcctatcaggaagaaaccgacaagaacctctgaagtggaggtcactgtttgggccacttttaaaaaaataatttgaattagctactagaaactaatattatactcaactggcccacttatctcattaatgtctgtctggtccctgcagtgatttcagatttcaatccctataataatactttctcattttgttattgaagaactggattctcagagaattcagatgttctatttcaagtctcacagctgatagacagaaatgtattgggatgggaaaaatttaatatgctttatttcatcatattaatccccaaattcaggtatgtctctaccatttgactcatataactgtgagtttgaatgtctttaaattagtaatagtgttggagttacggggaaaaagtgactgctttccagtaattgtcatttgacatttcttcctcccaaagaaaartacaaaagttaactcttttcttttctaatttaccacaattcaaatttaaaaactgaacattagagaagttagttagacatatatga

SEQ ID NO: 364283 - DNA, 528 bp, Homo sapiens
actcctggggaactgtttacagctactatgaacactgcttagaaatagtgtgcaatgcctgatttaacacttagtagcatgtacactgatgtgcaaaacattttcatctcaggtacttacataagcaattcattttccagcactcatagccagctgattacccagttggcactattccagtcaaattcaatgtttgattctaagtgttctagaattagataatctaaaccagcacctatatttgctttgtggaccctcctattcagaacaagagatacccactaacccacttattactggttaatactggtggttcattgtgtcacatatgtgatgtagctttccttgatgaagcaacttcagctaagaatccacarctcagcctggagggcacagcctttatagagggaaacagattaatacttactatgctggtgctttacatagtactatttatggttaattctgatggtgttctaatagaacatgcctgaatgcttggtctcttccaccgtgtagccactctag

SEQ ID NO: 364284 - DNA, 532 bp, Homo sapiens
tgcattagggcacatttttttgaaggtatgtctatgttctgctataaagcttgaaccttaaactgtgggcagtaagtattcatcgcttctcttaagcaggaaattagcaagattagatttgcaatttaggaaactaatttgataggtatgacatttgcttactcactttgttcctatctttatgataataccattttgttataatttctgttattttgtttgctgtctgaactacygtgcttttcaaactatggtctttgagcatacctttggcttccaagctagacctactgaatcagaatctctgcaggtgggccagagagtctgtgttttcacaaatttcctgtataacaagtgatttctatgtatcttaaaatttaagaaccactggtttagtggaaagaacataggctttagaatacatacaaaacctgattcagttccttatgagatatacaccattggcaagttacatagccaattcaagtctcagtttccccatctgtcaagtagaagtaataccccattgtgg

SEQ ID NO: 364285 - DNA, 556 bp, Homo sapiens
ttgctaacaccgggacaaaagaaagatgataataatcacagggtcggtgctccttggatcgcccacaggagctggtcaagttctttcttgtatctcaaaagcacaggaatatggctttgactttgcaatatccatctattctctgtcccttggacttttcattgcaatgttgaataattataccaatgaatctaggagtcagtgtcaaaccttgcccatatatactctgaaacactagttttgcacaaatgtccttcccttctaattctgtacttgtcttacagattgttttttccaatgctttatttactctacarcaagctagctacttttcctgaggcaaggaacttctgtggccataacttttctattttttactttcttctcactttacagaggcaaaaatatctttaaaaaaattaaataaaaattgtcactcacaggttttaaaactccggaaaagaatacaaagctcttgtgtttagagaagaaaaattttctttgttcctgatgagaagtaaagagaggaggagtagctggggtacagatagtacaa

SEQ ID NO: 364286 - DNA, 534 bp, Homo sapiens
tcaaagagacaaaaacaaacaaacaaaaacaaaagaaaaaaggaaaaagaaaagtagcagataatatgtaattgtacaaattgaaagcaattgtacagattgaaaacaattgtatataaagggtattatttgcagggaataaacaatagaaaaattgggttacaattaatatttcttgaaagtataccatgtgcaagccttaggtaaaacatgtgaatgtttatgaggttttaattgttcccataaaatgtagtcttgtgtgttctcatcatgtatacaaataacctctgcctwaaagaggttctgtgttaaagaacacagtcttgtgagatggtagcatttcctggaccattgtgtttgggggccaactaaaccaggggatgtttcttatcttctctgagttcaggcctagttagggccagttaagctcctcttgatcctatacttacttctggaagctgaatccctgtgtcctgttgcctttggtcaacccctcttcagaactgcattaacagatcaactcaagacttaaaa

SEQ ID NO: 364287 - DNA, 349 bp, Homo sapiens
tgcatacatttatcacaacactcttcacaatagcaaagacatagaaycaatgtaggtgcacatcggtggtggactggctaaagaaaatggggtgcatatatactatggaatactacatagccattaaaaaaaaaaaacaagatcacgtcctttgcagcaacatggatggagctggaggccattatcctaaccacattaacataggaacagcaaaccaaacaccacatattgtcaagtataggtggaaactaaacactaagtaagtgtggacacaaagaagggacatgaagaagagaccagggcctccttgagcttagaagatgggaggagggtgaggattgaaaaatta

SEQ ID NO: 364288 - DNA, 587 bp, Homo sapiens
gtgccactttgtgataaaacatattatactatgataaatatattttagtttaatatagggaaagggagcagccacagtcattttgaaagaatttctttcaaaacaaatttttttttaatagaaatgaaaagacaagcttcatttgttcaagaaatttacctagcttgaaccccattttctcaaaatttgatgtaaacagtatactatttttccctttaccatgatttcttatgaatcrattttaaaagaaaggatatcatgattctactattcttcttcctacctgaaggctttgctaaagtgcctgtaatttgtacatcagtctcagcactgtatgctttatttgagaaaatgtataactgtatgagcttcagcttcaggacattttgtatgtaatcattaaagcacaaaattgttgcctggaaccaaggatgattatttttctatttgttcggattctggcacacaaaatgatctatcttgattctctgtcctggcattattttgcttgcaaatcaggatgcagtataaaactttccatagatacaaacaaagccaaagaatttaagatagttttgttgagggaa

SEQ ID NO: 364289 - DNA, 547 bp, Homo sapiens
ccacaaaaattaaaaattacaaaattacaaaaaataaggaaaataaatttagagaatcatctgaagggtgaaactgaggggacattgggggaacagttattctccattcagcgttgtcagatttaagaaataaaaatgcaagatgcccagttcaaatttgaatttcagataagccacattttattaagaataagtatggcccaagtatagcatagtcagtctcagtttttattgtactccactcatcctgtttctaaattgagcaattcccattacaataacaccctaggcctccttctctctctccactcttttcactataggaacaaaaagtgattcattttacttgtggcttgggacaaggaaygggataagtgacgctcagtcctttctagtatctcttataagctcctgactgccgacgttccctattccattctaatccatgtggttatctcagcaataaagaccctgacatgattgtgaatctccactgactaggagagaatagagaagtctccacatctaggatgcagttatatggaag

SEQ ID NO: 364290 - DNA, 547 bp, Homo sapiens
ccacaaaaattaaaaattacaaaattacaaaaaataaggaaaataaatttagagaatcatctgaagggtgaaactgaggggacattgggggaacagttattctccattcagcgttgtcagatttaagaaataaaaatgcaagatgcccagttcaaatttgaatttcagataagccacattttattaagaataagtatggcccaagtatagcatagtcagtctcagtttttattgtactccactcatcctgtttctaaattgagcaattcccattacaataacaccctaggcctccttctctctctccactcttttcactataggaacaaaaagtgattcattttacttgtggcttgggacaaggaacgggataagtgacgctcagtcctttctagtrtctcttataagctcctgactgccgacgttccctattccattctaatccatgtggttatctcagcaataaagaccctgacatgattgtgaatctccactgactaggagagaatagagaagtctccacatctaggatgcagttatatggaag

SEQ ID NO: 364291 - DNA, 547 bp, Homo sapiens
ccacaaaaattaaaaattacaaaattacaaaaaataaggaaaataaatttagagaatcatctgaagggtgaaactgaggggacattgggggaacagttattctccattcagcgttgtcagatttaagaaataaaaatgcaagatgcccagttcaaatttgaatttcagataagccacattttattaagaataagtatggcccaagtatagcatagtcagtctcagtttttattgtactccactcatcctgtttctaaattgagcaattcccattacaataacaccctaggcctccttctctctctccactcttttcactataggaacaaaaagtgattcattttacttgtggcttgggacaaggaacgggataagtgacgctcagtcctttctagtatctcttataagctcctgactgccgaygttccctattccattctaatccatgtggttatctcagcaataaagaccctgacatgattgtgaatctccactgactaggagagaatagagaagtctccacatctaggatgcagttatatggaag

SEQ ID NO: 364292 - DNA, 584 bp, Homo sapiens
tgaatagtttgaggtcattcttccctcagccagtgacagaaagaggaagaaattccttcctagtaaatactgtgagcacatggaaatttgcatagtttatagtttattataaataatgtatcccacggagaaataagcttttccactctccttagctacttgaacttgaagaagtgtagaataataaatttaagataagtgcctaggaaaaagtgacttcccaaggcaggccaacattgcaggaaaagaaaataataaaatatgaaagaagatgactttggaatttggttttcttaattcttcttcttttagaagttatataaacacaaattgaaagtttaaattattaacatattctttattgttttctggttattgcagacatttatgatgatgytaacatataataaaaatctgcataccttgtattccataataagtatccagtcatttcttatgcattttattattcttattaaatctggaggtaaaagaaaatcatgctacttcaggtgctgttctgggtaaatatctagtctgtgtatataatatctatcacagacgacatctggcgcgggatagta

SEQ ID NO: 364293 - DNA, 638 bp, Homo sapiens
tgatatgaagtaaacatgttgatgcaaattaatttacataatttaaaatggcaaaattgacagaaaaaaatgacaaacaaatatgccaagagctttcacatacattgtgatgacttgcttggcttttcagtgtatagtggatacctacaattccataattatttcctatttaaacacattagcaggataattaaagatgggttataacaacagtgactgctgttgctattttactgacttcttacaacttgaaatcatacaycctctcatctcaaacttttaaatgtctcaaatactcgattaacctatattaatgtcaaaacacgtggctggatacatatgacgatccagattgataggaatctgttataacaaggggaatgttttggaatggatccagttagccatggagaatcaaaggtgagaacatacaggaagcagtgggaaatgagtgggagaagataatgtggatatacaagaaatatgtggtcgtccaggcaaaagacaatcagggcctggactagttaagtcaggcaagaataagaatgaaagaccatgtttagaatagatttttgaagtacaatttctaaaaaacaaaatggtgatatcaaatataaaaaccaaataaagaggtaaga

SEQ ID NO: 364294 - DNA, 551 bp, Homo sapiens
gcaacatgaagtgaggccgttcctacaagggaccatcccctcagtgcaggtggaatcagaagtagggtcaagcagtcagaggcagagctccagaggagttaggtactatcaacaaacaagcaccatgactctcctttacatcagcaataccagttagaaagygtagagaacaaaggggagacttcattgctgttcgcagatgatttatctaagaataaagattgtatttgctattgtggtttcctacaaatgtctcttttcttccttgttttcctaaccatgctttgagtaatgcaatagattcatttacatggggcatttttctcaccagtctacactgctctcctgcccctcagcaccataacttttgtcaggacaaattttaaaatcctatccatgctttaaggctcaagacagaacatctgctttaggacatattcatgattccccagttaaaattcattctcatgttgtcttctctgataaaagtggtctagcttaactcactacagtgtatttcttttcttttctttttttattttttagttttg

SEQ ID NO: 364295 - DNA, 606 bp, Homo sapiens
aactcacctgttaggcagtaacctcgataagctgaagttctggccaagggtgaagaaaatattaaatagattgcaataggaaaataatgaatttcaattttagcctttatcagcagagactatagcttgttttattaagctgcctaaactaataagaaatcagtcttattgtcaaagtgtatacagagtactatgaaaattcacagaaaagactatcatcctttagtaaggaagaggtatctgatttttctcttggcctgctcctattttcttggcctcaactctaattctagctgtgctacggctgtggcacacaggtccatggtggggtcggcttatttctcacagaaagcttcccacttcaagcccacaatmtgtttctccagcatgctgacacagggcatctgtgacaccatagctggggaaatgcatagaatcttgctcagacatacacacatacacagccagaagttcaggagttgccctggagcaaccctgaaacaacagggtcaggagaggatagctgaattgtctttccctgttagagtccctcatgccttctttttgatattgactctcaaataaaccgcatgcataactatattg

SEQ ID NO: 364296 - DNA, 540 bp, Homo sapiens
tatgggcaagctgaggtaggcaagctcctggcatattgggatcaaaacacacttttagaactaaagcgtggtactcctcaaagttgccatcttatgttgaaaaagtgccagagctcttggctttaatcctgcgctgtcagctgcagccccaaacatagctgatcatacgggtctcctgatcaaaaaactttcagtggctcagcacagcctacagagtaaaatagttgtcccaaaatctcagggacttagacatccaacagaaatttctgttcattctgcctctaaaacactctagactctraccacgtcttatcgtaacctaaggtgccattcaagtactcaaaaccccacataccactgtaccattctctctctctctctctctctctctctctctctctttctctctctttatcctctcccctcattcacataccatagagacagagatgagggtgagagacacatacttttttctctctctgtttttattatggaacatattaaacagataccaaattagacacaataaaaaacttg

SEQ ID NO: 364297 - DNA, 506 bp, Homo sapiens
ataacaaaaaagttttatgaataatttgatcttgctgtcactgggaggtagtatcatcatcacataaaaaagtgtagagcctgtgggaatcgctcaaaccccagttcaactctcactacattaaatacagtgcactataccagatatgttgcctcactttttagtcttaattttctctatcataaaatgaagaaaacaatttctgtccaatctgggttttatgtgrattagaaataatatatggggagtgcctgattcataataaggtcacgaaaaaacacagttggtggtttccatgatttgtatcttaatttgtgcctaaaataaccatggttattggtattatttctgttccataggtcttcatgagaacttgctctgccactccttatgatgggtgccctagtgatgcaagccaccaggagctcgaagccacatgggacagtccccactaacagcagacacagacccagaatgagacacaaaataaatgctattggagcatt

SEQ ID NO: 364298 - DNA, 386 bp, Homo sapiens
ggccagcatgaaagaagtagaaaaagaacacaaaagtcattaatgaattgtagtcctaataaataatcctaacagctgcacttcatgattacagattaggatacaggttcagtgctagattttctgtataactaagcagtttttactccttttaagaatcctatgtgtaagacatctgcttaactccatttcttagagcaacagagacttctgtgtattagcatacttatctaagatctaattctaagaagttaaagagcctgggttcaagagttagtttgattgaatgactatgaatcctgtgtttatgcatttatttttcatgctaacactgcattagtgtttktcaagatctttctgcaatgggagaatggataaggcatagt

SEQ ID NO: 364299 - DNA, 560 bp, Homo sapiens
ccaggcgtgagccaccacacccggcccccaaggtttctcttactatcctcagatccatatcctggagtcaagaacttcaatccattacttcacagtgtgaatatgggaagtgaagaagattattttgggcaaatgttaatcacaatgtcattacctgtggtaaaagtaattattttatgttgttgtttttatagttcctacattacctagcccatgtctccattgtgagtaaacagtcagggatcaggaacctctgtctgatccaagaacaaggtttatgcaatcacctacacgtgatcagtcatygatctgattcttctgcaacctggtgtgaaactagtgtaaatagttcaccagtaaccgaatgaactctggtgggggatgattctaggggaggattagttaagaaaatttctgaattcctatatgaacctgactggcggtcaactaactgggctaatattagccaactgccatgggctttcttcttagttctgttcctcactagttgtgtgacttgaatttaatgttttccattcattcatttattcattctttca

SEQ ID NO: 364300 - DNA, 609 bp, Homo sapiens
gcatattctaaatactttacacaataaactcttcaagttttaattatatttaatggcaatgtattgattttaaatagcaaaattaataacaaaagaaaacttagtaatattaatagtgctttgaygtagactttgtctgcatatgattacagatttgattaggagttttcaaatccaaatcccattcaaattctattcaacttctctgcatcacagtagggtcagagcatagtattggcaataatttatgaagatacctccaactgtattgatgttagacaacagccaggcattcagtttggaatttcttccttcttatctagtcactctgactcatttttcagattcaactcaaatagtacctatgctgtaattctatttttaatcttcttatgcatttttcaaccctcagaacagatgactttgcctattctacactttcaaggtagtacttaatgcaataatttctaatttcttacttactgtattttattatcaagctgttgcagcccaattggttcttcttgcctactgaccccaaaagccaatacaatgagaatagctggtgttgcagcaaagaaagagtttaataatatcatggccagccaa

SEQ ID NO: 364301 - DNA, 491 bp, Homo sapiens
gtctaacgcctgggactagttttattatggaaaaggattttagttcttccaccgaaaggagcggtagaagctcgtgcatcagagtctgaaccacaggagacttggatgcctgttcttttcaaagcactctcatattcactaaaggaaacaacaggtacatatcaagagattgtggtcatagaatccaaacactaagcttgtagctctaactctgccacagaatcarttgctgaaaagtagcttctggatttgttccacttcttcacaagtaggctgttttgaattttcataacctaccatcctgcttcctccaaacccagcctcctaaggaccagggactccctggcaggcacaggagtaaaattcaggacgctaacgcccaggcccaggctctgtctactccttatacttcatccacaggcttataaaagtcgttttgaggatgagtgctgtcttttcttgtggatggtgtttgatttttcttcctccta

SEQ ID NO: 364302 - DNA, 558 bp, Homo sapiens
cacttcatatataaggaaagaagagctcaattttaggcacttaactatttgccaaatgcagtccttagaacccataacataagttatccaatttaatctcccaacaactttggtgcagatgctattgtcatttacaaatgagaaaataaaccaagattaaataaattgtacaaaygacatttccatgtctcccaatgtggtactgacacatcagtaatactggacttgtaatattttactgcaatcaatttagtttatgtagcttttgcctctacagtgttggagcactttgaagacagtctcttttgatcttagctaaccagcatcttagacacattagctctacacattgaaaatgccattatgtgcagtaagtaggctatttaacttaaagtaacttgaggtactgacatggcattttttcaagtttccaaatgattctagtgtacaaccaggaacagaacccccactgacctgggttatagtaaatgttaagttacataaactcagtcttcatcttgctcttagtctctccatccataaaattggtacagtggt

SEQ ID NO: 364303 - DNA, 577 bp, Homo sapiens
tctcttgaccctgtaagaactttttatgttgcagatgccacaagatcttcatactagtaggtgccatagtggataaaaggttcataaatgccataaagagatatgctcaaaatactctggcagattagatgaagattagataaagatgaaaacgtctggtagttatgggtgttagtaaaagattcctatgttggttatttttgctcaggatgttgtttgtaagttattacacatgtttgcattctctatttctagctcttaaatctaatctttttattgggccaatcagtggtatcctctatatcctactctggatctgtgacmatttctacatagttagtcattaccttgtaaaggctactatcctactgatgaatgaatacttcttaaatgaaataaagagatacacagaaaaagtgagtttctaaaatattgtatagtccaaccagaaatgtctatttagataccattcctctatttctaaattatattatgctttgaactatttatctacttatttttgaaatctgactggtctaaaaatgtaacaggactttatttgagcaggtaccataag

SEQ ID NO: 364304 - DNA, 581 bp, Homo sapiens
tactgatgaatgaatacttcttaaatgaaataaagagatacacagaaaaagtgagtttctaaaatattgtatagtccaaccagaaatgtctatttagataccattcctctatttctaaattatattatgctttgaactatttatctacttatttttgaaatctgactggtctaaaaatgtaacaggactttatttgagcaggtaccataagacacacagacactaaactgatttccatgaagaaggaattatttttctaaattctaagaagcatgctactcagagccacctagagaagcacccaacagagatgacctggcagacagaaraaagaactatgagttggctggaatcttctcacagttttcacaggaaagaaacgggcaggcaaggttcaattatgaagagtagaaacttatgatcagaaagtttgaaaaattttgatgggctgtgggctatatgggtggtgagtagggcagggaatagtgccatggactgtactagtctgataaaaggagactggtgagaagtatggcctctggattggttggtttgcttatcaaatgtgtggtggcaggcaa

SEQ ID NO: 364305 - DNA, 499 bp, Homo sapiens
tagaaaataggacttgaggactctgcataagatgagcagtgaagaaaaaattcctacatccataggacatatacatctgtaggaaagtgaaaataaattatctgtgaccttatagagagaatatgagatactatgagaatccctccatggccacaaagtagaggggatatggtagaagggacatttgaagaagtggcttaaaataatttgacgagcttgcagtaattcacttatttaatttgtaacttgtaggaaacaaactgctttctttgtggactaggatggtagcactgccttaaaacatctttaagaatatgaaggctgagaataacatggtggatttagaaaagcacacaracataatccttcctgtagaagagctgctgttcagctttgattctctttatcttaaaatctctatccaaaggaactggcacccttgtcctgtttcagtcttagcatatttcctttgcctttctttatgctttattcataatat

SEQ ID NO: 364306 - DNA, 439 bp, Homo sapiens
aataaatgggcccaggaggcagacattatcctgcacatgattctcttaagaagcttaatgggaacaggaaattattagaaggtaagaggtgaaactgcattgggaataaaagttgtcttgttgtgtagataaagtatcccgggtaatttctggaagcggccctcagaagaatacatgaaaagtctgtctggcacagtgatgacttttagtctcttctcgtcatagtcgctggtttcaacttttttgrttatttgatgagactcttagagaagagttctaaagacaattgtatttcttttggaaagaaatctccttagtcagatagggaaactccagacaaagtccctccctgtgcttgtgggaagaagaaataagagaaggttggaaagttattggttctgaggcagcttttaagcccttcaaatttctttaaattcag

SEQ ID NO: 364307 - DNA, 623 bp, Homo sapiens
gtaggtgtaagtgcacagagatgaagcaaagtccatctctacaaggataacagcactgaagacttagattcataagcaaataaacaaaagatggcaacctgcataagaagataagggaactggtgtggctgatgatcagatgtttgggcagttgggagaataggaggggatgcatctgagagcttcttgagaagactggaaatacctgagtattatcagctaagtgagtggagaaaacaatggcataagaactgaagatcctcatcccaacccctctctctccttcctctctcccttcttgactctctctgtcccgctgcctaccagccatctttctctgtctgtctctgtctctgtttttgtctccgtgcctcattttctatttgtctgtytctctatctctctgttttctctctgtatgtgtctctatgtctctgtctttatctcccatcactttgcaggcaaggaagatagtggagagatggtataggttgagtaggttggtaaaattgaagtcattcaatttagctcataaattttatctccaaaaaattatcttatttagcatctgctgagtgtttttctgcccagagacgatacacagaacctttaactgagcctgg

SEQ ID NO: 364308 - DNA, 551 bp, Homo sapiens
cataacatgaacttaatcaaaagtaatactttattaaaagtcactgctaacaaagtgaatagcaaaaccacagcctgaaaaaaattaataatatgtacatgtcatacatgacatacacsagaatacagaaaagtgacataaatagtcaaaaaggaaaactacccacttaaaatcaggatcaacacatttgaaaaaacatttaaaaagaaagatatgctttggggtcaataaacatatgtaaaagtgcttgatattcctatcatcagggaaatgtaacgttagactgccttgagatacggctgtcctctcactggaatgaatgctgtttatacacactggcaacactgttagcaacgtgtggaacaagtaaaattctcctatgtttttggtaggtgtgtaaaattgtatagccattttggaaaacgattagtactttcttacaaagttgaactaatacctaatctgttactgagcaattatgccatgagatacatccatacaaagttgtgtacagcatagtctcagtagctttattcataaaagtctataag

SEQ ID NO: 364309 - DNA, 551 bp, Homo sapiens
cataacatgaacttaatcaaaagtaatactttattaaaagtcactgctaacaaagtgaatagcaaaaccacagcctgaaaaaaattaataatatgtacatgtcatacatgacatacaccagaatacagaaaagtgacataaatagtcaaaaaggaaaactacccacttaaaatcaggatcaacacatttgaaaaaacatttaaaaagaaagatatgctttggggtcaataaacakatgtaaaagtgcttgatattcctatcatcagggaaatgtaacgttagactgccttgagatacggctgtcctctcactggaatgaatgctgtttatacacactggcaacactgttagcaacgtgtggaacaagtaaaattctcctatgtttttggtaggtgtgtaaaattgtatagccattttggaaaacgattagtactttcttacaaagttgaactaatacctaatctgttactgagcaattatgccatgagatacatccatacaaagttgtgtacagcatagtctcagtagctttattcataaaagtctataag

SEQ ID NO: 364310 - DNA, 598 bp, Homo sapiens
gaggcccaggaaggggagtaaatgacaaagaccatagggtttatcagtggcagaacaggaatcagaggctcatctgttcagttccatgaccattgtctttcaacactcttttcagtttcctttacattgacatcataaagtattgcatcacagggtttctgagtaccactacttaacacttaaggttgtactcactatgtgccaatyctctaagtcctccgcatgggtgaaattatttagtctttgctaccagcctgtaggtaggtactcttatcactactggcattgcacaggtggggatttgaggcatgcgatggttaagcaatctacctaagggcacataactagtgaatggtagatttagcattgaatccaggcagtctgaatctagtagatgcgcttttaatcatttagttgggatgcttctatttcaactttagctaataggtggtgggactgcttccgtcatactataatgtgaggagaaataggaaagtctgtttaagtgtctttctcgtttgatttgccacatcttaaatatttcccataaagtgactcagatctgaagcagaacaatccttcatccagggagaccaaa

SEQ ID NO: 364311 - DNA, 585 bp, Homo sapiens
ggttcatgctggatgattctattgaggtaaaaagaagccagcagggttttggtagttgtgcagggtattaaaatgaattggatacaagaygactccttaatgcaggtctaaatccaaataaaacatttgctgagttatttagtgatgctggaaactagaggactgaagtggaaaagcagagtggagtttctggcactctcatagtactcacaagctggagggggcctgaaataaatgaggctggtttctttctcaagattgtcgtgagaatttgaaaccagtgagaagtaagctaaagaggtaggccaaaaatttctatgaagcaaaacttcgaaagcgaggttgcagaaatctgctaggccattaataaaagttcaggagcatatcacttgaagaatagaatgaatgagaagtaacctcactttgatcatctatgtcctctgtggttctattatatacttgtctggcatgtaataaaacttattagactgttgataataatgaagagaaaaggaaaaacaaacaatacaaacaaatactgataatccaaatattggagttatcagataagaactttaaaataac

SEQ ID NO: 364312 - DNA, 522 bp, Homo sapiens
agtttctggcaagatttttttaaaaaaagcaaaacaaggatactctaaacatttgaaaccacacatgaaggtagacacaatttggatctgaatgtggacatgtctaatagagcatttctctatgtggtgagttaaataacaatatccagttaactacatagaacgaggttcaaagtacagatcttgtcatgtaatgtgagtgactcacaatgcctcgagtatggaataagaaagagagaattgcaaaaaaaattatagatttagatgagattttgctaaygtttttgaactttttcttcctttatgtgaattgtgaattataaaaaaaaagaatgttcttacttagtcattgatcacttcatccttcatacatatatatatatatatatgcatgtacacatacaaaagaattagaacaaggattaatttctaatagcaatgtgtctcctttagctattctcattggttctagtagcctggaatagcatagctccgtgcatgcaatatatgatcaatagatgt

SEQ ID NO: 364313 - DNA, 522 bp, Homo sapiens
agtttctggcaagatttttttaaaaaaagcaaaacaaggatactctaaacatttgaaaccacacatgaaggtagacacaatttggatctgaatgtggacatgtctaatagagcatttctctatgtggtgagttaaataacaatatccagttaactacatagaacgaggttcaaagtacagatcttgtcatgtaatgtgagtgactcacaatgcctcgagtatggaataagaaagagagaattgcaaaaaaaattatagatttagatgagattttgctaatgwttttgaactttttcttcctttatgtgaattgtgaattataaaaaaaaagaatgttcttacttagtcattgatcacttcatccttcatacatatatatatatatatatgcatgtacacatacaaaagaattagaacaaggattaatttctaatagcaatgtgtctcctttagctattctcattggttctagtagcctggaatagcatagctccgtgcatgcaatatatgatcaatagatgt

SEQ ID NO: 364314 - DNA, 556 bp, Homo sapiens
ttgctaacaccgggacaaaagaaagatgataataatcacagggtcggtgctccttggatcgcccacaggagctggtcaagttctttcttgtrtctcaaaagcacaggaatatggctttgactttgcaatatccatctattctctgtcccttggacttttcattgcaatgttgaataattataccaatgaatctaggagtcagtgtcaaaccttgcccatatatactctgaaacactagttttgcacaaatgtccttcccttctaattctgtacttgtcttacagattgttttttccaatgctttatttactctacagcaagctagctacttttcctgaggcaaggaacttctgtggccataacttttctattttttactttcttctcactttacagaggcaaaaatatctttaaaaaaattaaataaaaattgtcactcacaggttttaaaactccggaaaagaatacaaagctcttgtgtttagagaagaaaaattttctttgttcctgatgagaagtaaagagaggaggagtagctggggtacagatagtacaa

SEQ ID NO: 364315 - DNA, 551 bp, Homo sapiens
tggtgcaatctcggctcactgcaacctccacatcccaggttcaagtgattctccggcctcrgcctcctgagtagctgggattacaggtgccaccacacccagataaattttgtattttagtagagacagggtttcattatgttggccaggctggtctcaaactcctgacctcaggtgatccacccacctcggcctcccaaagtgttgggattacagtcacgagccaccataacaggccacaattttttttttattaggtacagttttctgctaatcactaggagggaaacaggttaaagaaaacaacaacaaaaaataagtgatgaacaaataataaacatcagaaatcacaaaaatgccataaatcctataaagtatttattagagttgtgccctggtacctgacactgcttcttagatgttacgtcaaattctcttctcttcttgggaattacattacccaaatttagaatgacttaaaatgattcctttgattatagtgccagaggcagctatcactaaggggtagagaaaggaaaatatgatcaccc

SEQ ID NO: 364316 - DNA, 589 bp, Homo sapiens
gctctctaggttccccatggcaaatcctaggcaaaaaagagaagagaatgaaaatgtcaactttattaatggccacctaaatgcagatacctcagtaaaggtggattagaggacagaactgtatgtataatcaaaatgcaatggacacgatctaccactcttacagcctcccstttttcttccctccccacaataattcaacactaatttctctcgatttgcccacaattaggctaaatgtgacaaaacaaatgcttatccaatacaacaggaaagaccgtttatccttagggattaatatgcattttatctccctgtctgaatgtctcaagataacctagtgttacacagcagcttcttctagtgcgataggccctgagcctccctaaatagtgttggaatacaccagctacctgacatcttcagtatctttcattaacatatctcagcccctgagtcctgctaagggcccatgttgtgtgatttttgcagtcctaaaatttacagcaaaactctcaaagaaatgactaggaagattttaggagaagcccaacaccttattctgtataacttcgttaatttatatcta

SEQ ID NO: 364317 - DNA, 593 bp, Homo sapiens
aattcacttttattaaatcttgctccacatttttgccctacttagcagtaggctttattttgaagtctgtgaattatatatctttttctagttttgtttaattttttttttttttttttttaaagatggagtttcattcttgtttcccaggctggagtgcaatggcgcaatctcggctcaccgcagcatccccctcccsggggcaagcgattctgctgcctcagcctcccaagtagctgggaatgcatgtccagctaattttgtgtttttagtagagacagggtttatccatgttggtcaggttggtctggaactccagatctcaggtgatccgcctacctcagccacctcagcctcccaaagtgctaggattacaggtgtgagccaccgcgcccaaccaaatgattttttttttttttaattcctagaaggaaaggggatagataaccatttacacagctttgctcttttaggaagtccctgtattgttattttcatttgaaaaacaaatagttgactataggagattgggaaaagtgagaaacgagttttgtctattgagtctgattttctcaacatggtattaagcaatg

SEQ ID NO: 364318 - DNA, 593 bp, Homo sapiens
aattcacttttattaaatcttgctccacatttttgccctacttagcagtaggctttattttgaagtctgtgaattatatatctttttctagttttgtttaattttttttttttttttttttaaagatggagtttcattcttgtttcccaggctggagtgcaatggcgcaatctcggctcaccgcagcatccccctccccggggcaagcgattctgctgcctcagcctcccaagtagctgggaatgcatgtccagctaattttgtgtttttagtagagacagggtttatccatgttggtcaggttggtctggaactccagatctcaggtgatccgcctacctcagccacctcagcctcccaaagtgctaggattacaggtgtgagccaccgcrcccaaccaaatgattttttttttttttaattcctagaaggaaaggggatagataaccatttacacagctttgctcttttaggaagtccctgtattgttattttcatttgaaaaacaaatagttgactataggagattgggaaaagtgagaaacgagttttgtctattgagtctgattttctcaacatggtattaagcaatg

SEQ ID NO: 364319 - DNA, 556 bp, Homo sapiens
tgccttacctagcttcatgagcttagaaacagcatacaggtggaggtgaaaagccatttcatgcttcttcttctgtaagaagctaagatgttttctaaaagtaaaagtaaaagtaaagaagatttgactactagagagtaaagattaaaaaattgtatgaaaatgatcatatccaaatatgtgttttcttttccaaagtggtcatcatatttatttactaattccaatgaagttctgataaatattttggaattaattcctttgactcactctcagagctagatgatgagccctaggagggaagcagtcttcttacgttagagacagagcatattttgtctgaaatacttttgccaatttaagtgcctatcacttacatgaaattaatttggcctattgctagaaaccaagtctacttgctaaggatgsccatatgccaaaattaattgaatttcaacaatttgggcaagcttcaaagatattgcaaaagtagaaattagagaaaaactgaatatatgatttttgaaataaatgaatagaagccaaattttcagaa

SEQ ID NO: 364320 - DNA, 603 bp, Homo sapiens
atgtgttcctgaacttaaaataaaagttggaagtagaaaagaaaagaaaaagaaagtgaaagccagctctgggaacagaaacaaacaaaaaataacacttagcttaaaacacaaacacattgtacatttgtacaaaaactattttccttcttcatatccttattctataagctttttctatatttaaatttttaaatttattttttacttagtaaacttttttgctaaaagctaggacacaaacacaaacaaaaacacctaggtttttgctaaaacctaggcccacacagggtcaggatcataagtatcactgtcttccacctccacatcttgtcccactgagaggtcttcatgggcagtaacactcatggagctgtcatctcctaagataacaatgcttacttctgaaatacyttctgaaggacctgcctgaggctgttttacagttaactttttttttttataagtaaaaggagtacactctaaaaaagtatagtatagtaaatacataaaccaataatgttagatagttgttcattaccattattaagtgtatgtactacctataactgtatgcacgatatttttaaaagactggcagga

SEQ ID NO: 364321 - DNA, 603 bp, Homo sapiens
atgtgttcctgaacttaaaataaaagttggaagtagaaaagaaaagaaaaagaaagtgaaagccagctctgggaacagaaacaaacaaaaaataacacttagcttaaaacacaaacacattgtacatttgtacaaaaactattttccttcttcatatccttattctataagctttttctatatttaaatttttaaatttattttttacttagtaaacttttttgctaaaagctaggacacaaacacaaacaaaaacacctaggtttttgctaaaacctaggcccacacagggtcaggatcataagtatcactgtcttccacctccacatcttgtcccactgagaggtcttcatgggcagtaacactcatggagctgtcatctcctaagataacaatgcttacttctgaaatactttctgaaggacctgcctgaggctkttttacagttaactttttttttttataagtaaaaggagtacactctaaaaaagtatagtatagtaaatacataaaccaataatgttagatagttgttcattaccattattaagtgtatgtactacctataactgtatgcacgatatttttaaaagactggcagga

SEQ ID NO: 364322 - DNA, 599 bp, Homo sapiens
agccacgcaaaaataatgaatttttaaaacctgaacatttattgagattttattatatgcgaaattctgccattagtacttcatttaatcattacctccttccccaaaataagtattgaaacaaggagaatcatcaccaacattttacaggtgaaataaccatgtcacagagaagtgatataacttgcccatggccacattgctagtaaatgacagaggtattgtttacgccaggcagtctctcctgagatatggtcaaaccatgccaggcaaagctaatgtcactctccacttaaaaccagccacacgaccaaatggtggtggaggagacaaagcaaaaawaaattttgagttaatactgaattttttaaatgaatagaataaatacttaaaaatgaaaagtctctgttttcacaattgtcagtagctgaaaagatgtagagctgggatgagaattgttatgctgttatgccttcctactattatacctttgcaaagtgaagtttcaacagatacttgtgaatattggtgcttactggaaaaaatgaagccacttcatgtttatactctcctaagttggtgctcctcaacaagaaact

SEQ ID NO: 364323 - DNA, 585 bp, Homo sapiens
tttaacggactcacagttccacgtggttgtggaggcctcacaatcatggcagaaagcgaaaggcacatttcacatggtggcaggcaagggagaatatgagagccaagtgaaagaggaaactccttataaaaccaacggatctcgtgagacttattcgctaccacaagaacagtatgggggaagctgcccccatgattctccactgggtccctcccacaacatgtgggaattatgggagctataattcaagatgagatttggtgaggacacagccaaaccatatcaatgggctataatatcttcactcatataactggcagttagtgctgggtataggtcagttgccttctgctgaaaaagtctgatcgtgttccataaggctttcatgcttcaatagagtagaccaattttttttcataacactctcaagactgcattcaagaagaataaaagcagaagctgagtgcaacgtaagcccatrcttattctgccaaaatctactgatcgaagctcatcataagaccagcctatatttaaagggtggtataatggtttgaataatggcttctcaagatatacatctat

SEQ ID NO: 364324 - DNA, 639 bp, Homo sapiens
tagaaacaatatatttacaacttcaacatgcaattttttaatgctcaaattctcttatttatcagtttcatgcctttctaaaaaaagcgtattaataggaaaaamtttggtaacattttgtttttatagattaaactgttttacataaaaaagcagcatggctgagaaagatgaccttaattttaaaaattgatgatgcatttaaatgacttcaaaagatatgcttgacttattgattgaaagacagttttttacctcaaagtagctatttatatttttgtttatatttataatgatagtccctatagaacagttaatttacaaatcatgtatggaaaaattgatgttgcaggtattttaacaagttgtgtgattttttttttttagcaaggaaaattagccattaaagtagtaataagtgctggaaccatgcacagatgaaaccaaatcaatggggaaccaaagaatgtgagtggcatctcaaaacaggctcattgtaagcccatattattaccatcattaatcaccaatgaagtatccaagatattgtttcttaattgtctcagggtggtcaatgaaatggtaaaattcaaaattttgtgcaaagaaaatccagttgattttaatattcatgtttaa

SEQ ID NO: 364325 - DNA, 587 bp, Homo sapiens
ttatgggaagctcactgttgttattatgaaatccaatctttcrtcagatttcatgtaagaaatacaactcaacttttccaattactgctcagatatttttgctttctttaaaactccttggagttgaagcttagcttttatcagttgacttaatggcctcattaaactttcattaacttctagaaggacactttcatattctttatgcagtttatgactttacctagattataagtattgttagttgtgcatgccttcaaaaggcttatgctaagataaaggctaactctgtccttcaattactattaaattctccataggtaggttggaaggattgtatctgctgcattttggataaataagacaactgtatgcaccttatatcagtttattcttttgcattttccattaagtatttccagaaatgttgaaattttattaacataaagaagcaagactcagttagaaatgtcaaaactatttttattgaagtgataatcaattcctgttggcattgctaaaaacttccaaaaagtttattaattctacaaataataggttaagattatgtgacttgccaaaaacca

SEQ ID NO: 364326 - DNA, 616 bp, Homo sapiens
acacacacacacacacacacacttatattctttacactgaattaataaagcaaatgaacgaactaggctctaattcagagcaccagcagtaacgtagaagtttttttccttggtcatgttggagtactgcagcacacttaacaagttgtggtttaattttattactttcatacacttcattagcttagataaatttaagaggaaataatctgtgcatgtattatatcaaaaagattccaatctcttgagctgaaaatctattcataagattttactgcccctatatttaataaagaaggaatgaaattcttttattttctgaggggaaaatttttagatgatgtatttagatatctaattaaaatgcttatgtaccttgcctaattaaaaatagacacttattcaaaataacaggacatctaatgcatctatgtataaataactcagctaaaatgcctggaaacaaggaaaagcatggtaactgaactccgttcatgsattaaccttcaaatccctccacccactgcatattcacaagaaaaccttgtgtaaaacaagtcctgtcctcattagcctttagaaaaatctccaatggtggcacagcataaagcaaaaa

SEQ ID NO: 364327 - DNA, 637 bp, Homo sapiens
tttgacatcatgtatggaaagctcttcctatcaccaaatttgttcttaaaatttatattgccaacttttggacttgtaatattccaaacaaattttgggattgacttactaaattacttgaaaattacatttaggatgtttgattgcaaaaaaaaaaaaaaaaaaaaaaaaatggggcatggttcatggttctgtggttcttgcctatgatcccagccctttgggagccaaagcaggagcattgcttgatagcttgaggctcaragttcaagaccagcctgggcagcatatcaagacctagtctctggaaaccaaaaaaaaaaaaaagaaaaaagaaaagaaagaaaggaagaaaaaaaaagttagccaagcatattgacatgtgcctgtagccctggctacttgggaggctgaagtgggaagatcactggagcccagaagtttgaggttacaatgagctattattgaaccactgcactctagcctggctgcagagcgacaccctgtctctaaaaagagagagagagagagaattggttttatgtactttgagtctggtagatgtttaaagctgacttgattctgggatcttttgaaaggttcacataagcttccttgctgcgtccctcccaatgca

SEQ ID NO: 364328 - DNA, 551 bp, Homo sapiens
aaggattaacttctggattgaaaaagttattgataaatcacattcctagttgaatttaaggtggttatagatgttatcccccatgagatacaacagggcccatatcagatagtcagacactgacctttgcatgctatgatgacacagttagcattatcagaggagtaatgaagctaggcccatgtcttgagggtcccaagtcataatccacacctttgtttctcamtcctagtgcatatctaaattacttgtgcatcttttaacaagtatacatatctcagacatagagaatcagattcttcatgtacattatacattatttctttaatttgtgagagaagatactacagaggtagaaattaaggctctaggagactaagagacatatccactggccaaggtctaagctgatcaggtagcaaaaccagctccatgatctcagttattttttctttttatttactcttaatctctggttgtttctcccatggtacattgctaatctctaaacagcactatgtcatccccaaaattagtatcgtaccatgcaa

SEQ ID NO: 364329 - DNA, 569 bp, Homo sapiens
aaattcactttaggcacggaatacatttactgtttaaaattaagtgtgagtagatcaatcattcacagattgaatacaagacaagttaccttctcagttaatctaaagatctcaataatgcactcaaagtatttgggctgtgaaagattgttgcacaatatgtcagcttttaaaagggtcaaacttcaggaattcaacttagagctgatctgttgagagaaccatcaaatgaatcaagtggagaaaatttgagattaatwtatatataaaatatatattagaaaatagccaagaagtagctcatactatcttatggattaatacttaaaattaacataagtacaaccatgacaaaagtgttaaggaaaaaatatgccacatgaacaggtggtctaataagaaaaatttcatatttcattcatagataggcttcaacttttaaagaaaatttggtataattccatcaaacttttatcatcatttaatccataaacattatgcaaaaactaaatatttttctaaaacaattctaggcattaaagtatcattttggaggaaatgtattgcaa

SEQ ID NO: 364330 - DNA, 517 bp, Homo sapiens
ttgtgaactggctgctctttctctatttctccttgtgttcctcctgctaatacctactgacactatgctaagtacgatcacctattcaacagcccacggaaataccactggcacgatcckcatttttcagagaaagaaactgaatctcaaaagtgtaaagtcttgcagatcccagactaaaatactggttcttctaattccaattaggctttttttttttttttttttgtctcagtgatgaaattcccctgatgtagacattgagtgtcatatccattccgaactgaaataaaaatcctagacatccctggaacagtggttcccaaaccttgttgtaggtcccaatcactatggagttagtaaaaaacacagattcatgggcactggccctaagttcaaattcttccaaacttagatggacctaaggtatctgtatttttaacacgcttcacagctgaatcccatgcatagtacacttggaaagcatggatctcccccaagccttttattttctaga

SEQ ID NO: 364331 - DNA, 517 bp, Homo sapiens
ttgtgaactggctgctctttctctatttctccttgtgttcctcctgctaatacctactgacactatgctaagtacgatcacctattcaacagcccacggaaataccactggcacgatcctcatttttcagagaaagaaactgaatctcaaaagtgtaaagtcttgcagatcccagactaaaatactggttcttctaattccaattaggctttttttttttttttttttgtctcagtgatgaaattcccctgatgtagacattgagtgtcatatccattccgaactgaaataaaaatcctagacatccctggaacagtggttcccaaaccttgttgtaggtcccaatcactatggagttagtaaaaaacacagattcatgkgcactggccctaagttcaaattcttccaaacttagatggacctaaggtatctgtatttttaacacgcttcacagctgaatcccatgcatagtacacttggaaagcatggatctcccccaagccttttattttctaga

SEQ ID NO: 364332 - DNA, 559 bp, Homo sapiens
tttttattttctctagttccattaagggcactgagctttacattgagtaacacgttcaagactcccatatrtatttgaagcatttgacagaataagaaatattagaattcagagacatagttaatattttagaattcattaattcatttatcccccaattttttatcatgtattacaaaatgtgccaagcagttttctaggcaaaatattttatcaatccagtatgtttttttcctcctgggatgttagcataattataatattgctattgctaaaaccatgaattttccagtttgaataagactacatttgttccttgatagaatataatgatggagataattgaaatttacaaggaaaaaaccatttgccatatttagggatgaaaaatatttttatctgtcatccaatactgagtaatgacacatggtaggactgtgatgtagaggtcagtctgtagtagaaaggatgggtagaggggttgttaaggaattctgtcatgaaggtaggtcagaagtgttagggaccaacatttcatttctattgacaggctcaatca

SEQ ID NO: 364333 - DNA, 559 bp, Homo sapiens
tttttattttctctagttccattaagggcactgagctttacattgagtaacacgttcaagactcccatatatatttgaagcatttgacagaataagaaatattagaattcagagacatagttaatattttagaattcattaattcatttatcccccaattttttatcatgtattacaaaatgtgccaagcagttttctaggcaaaatattttatcaatccagtatgtttttttcctcctgggatgttagcataattataatattgctattgctaaaaccatgaattttccagtttgaataagactayatttgttccttgatagaatataatgatggagataattgaaatttacaaggaaaaaaccatttgccatatttagggatgaaaaatatttttatctgtcatccaatactgagtaatgacacatggtaggactgtgatgtagaggtcagtctgtagtagaaaggatgggtagaggggttgttaaggaattctgtcatgaaggtaggtcagaagtgttagggaccaacatttcatttctattgacaggctcaatca

SEQ ID NO: 364334 - DNA, 593 bp, Homo sapiens
taaaaattcttcctgtcttactgataatgacatggggtgctgaaatggcatacgttctgatattctaacattattctttgcatctctcaaactgaaactcatttcagcagtacaattttccacagtttgaggaatctcatgtttgttcatactttaaagtcttcatatttgctttccttttgtctgatatacaattttattatcttcttctatctaaaatgtcaaatgtctgcttaaaattatctcttccaataaggagataatgttaggcatttttaaaagttgttttattaactcaatgctcactttgataatattttgacatgccacacacaataattttatagtacttctctataacgrgatgatttttaaataatgcatgtaaaattctacttaattccaaccaatacgtgatttcattatattgtctcttgcaataaaaaatttaaaatactaatgactataatattttttgttttttgtattccaatataccctcagacaaaattttaagtggatgttaaagtattaactgtatgtgtgatgttgtacagcagatctctagaacttatttatcttgaataactgaa

SEQ ID NO: 364335 - DNA, 546 bp, Homo sapiens
ttttattttgttggtaatgcctatcctaacaaaagataatgtctcattgtggttttggtttgtatttacctgatggttagtgatgtcaggcatttttaaatatacctgttagacacttgtatattttctctggagaaatatctgttcaggttttttgccaatttttagttggattgttagatttttataggttatccaatttgttaaatgtaattgttcattgtagtttcttgtgatcctttttatttctgtggcatcagttgtaacatctcctctttcagtgcttaatgtatttatttgagttttctctttttcttagtccagttaaaggtttgtcaacttygtttatcttttcaaaatgttaactcaatttcattcattttactattttttaatttcacatttaattcatttctgctttaagctttatttactttgataacttttggcttagacgtcgcttgcttttctagttctttgatgattaaagatagattatttgagatctttttcttttttaggtaggaatttattgctgtaactttc

SEQ ID NO: 364336 - DNA, 479 bp, Homo sapiens
ggtcttacttaaactattattgtatagtacagcaaattattactaagattttattgaggataaaaatacaaatcaactattaccttaaggcctattacccaatttgtgggtcaactacagtagaaatttaatttagcrctgatttttctcttctaaaataagttttgatcaatcatggttttcgaaaataaatactattataatttaaaaattatcattattaacacgtatttaggaaagtaactctgcagctaaaatatttatgtgacctaagtattattaacgtatcttaataaagagtttcccaaagggaactcaggcagtaataggattagtttttatatgagatttaagtgagttgtaaaatctaataaacctgaattatgaaaaactgttcagagtatctagtcagttttatattatgcactgccactcagagagattatattaagtaatgtcataatttattgaaatcagtg

SEQ ID NO: 364337 - DNA, 596 bp, Homo sapiens
aggtgctggcagattcagtgtctggtgagggccctcttcttaatctgcagatggctatcttcttgctgtattctcacctggaggaaagtgagatcctgtatctgttttacaaaatcattaattccatcgtaagaattccaccctcaggaactactgtagccataattacctctcaaagactccacctacaaataccatcacattggagactagaacttcaacatgtgaatttggagggacaaaaacattcagtccttaagattgtccaaagagtaaaccatattgagacaggctttttcccttgacctgcccccttcgtgggcaggaactggagtggctcatttcactcagcccaccactggccactccttgcaacagggagccggcgagcaagcgaatgcgggaaccagagggaacgaactctgaaaccagccggccactcctctctggcccgagcargctctgtgtgcgccctacagcagtgtccaagcccccgccctcttggcacttgggttcttgttctgcgtccaggaagaattagatcacatgaagggattaaaaggtagtgtatgcagaggattttaatgggtgatggt

SEQ ID NO: 364338 - DNA, 596 bp, Homo sapiens
aggtgctggcagattcagtgtctggtgagggccctcttcttaatctgcagatggctatcttcttgctgtattctcacctggaggaaagtgagatcctgtatctgttttacaaaatcattaattccatcgtaagaattccaccctcaggaactactgtagccataattacctctcaaagactccacctacaaataccatcacattggagactagaacttcaacatgtgaatttggagggacaaaaacattcagtccttaagattgtccaaagagtaaaccatattgagacaggctttttcccttgacctgcccccttcgtgggcaggaactggagtggctcatttcactcagcccaccactggccactccttgcaacagggagccggcgagcaagcgaatgcgggaaccagagggaacgaactctgaaaccagccggccactcctctctggcccgagcaagctctgtgtgcgccctrcagcagtgtccaagcccccgccctcttggcacttgggttcttgttctgcgtccaggaagaattagatcacatgaagggattaaaaggtagtgtatgcagaggattttaatgggtgatggt

SEQ ID NO: 364339 - DNA, 551 bp, Homo sapiens
aacatatatgtacctattttcatactgttccacttgactacctcccattggcattgttatgcttagtatcacataacactctcctatcaacagtaaaataaaccccatattgcaaatgctcagtgatgtacacagggtgtgtattggcctctgtctaatgtagtctggtttctataggtttaagagtaataaagattatttcctttgctcatatattacagatggttgcattagtctgtcttttcattgctataaggaactacttgagactgggtaacttttatagaaaaagaggtttaattgactcacagttccacaggttgtacaggaagcttgtctgggaatgtttcaggaaacttaaaatcatggtgaaaggcaaaggggaagcagatatgtctaacatggccagagaaggtggaaaagggagcagcgggaggtgttacacatttttaaacaaccagatttcgtgagaaatcattcattatcacaagaagagcaagggggaaatctgccctcatkatctagtcacctcccaccaggtgtctgctcca

SEQ ID NO: 364340 - DNA, 596 bp, Homo sapiens
gtaaatcaaagttttcttaataaaatattgcactgaaacacatatctgttagaagaagtgagttattttattaaacatgtctataggaatttaggatgttttatgaaagttttataccagtatatactacaaacttggcaatagttccatttccccttagaaatgattggtctagctataaaaatccctcaagtcaatttctggtcttctatcatttcctaaaatttctgggrattaagttgtctttcatcaggctgacagaaaactagacctctggaaggggtatgggtgttcctttttagaaagtaagatcatcctgatgagtacactctagattttctgcttttctcaagtgttacagtgaaacctcaaagacttctattctgagttacttcttaaatcttacataagatatgcaagatagaaaatttatatacatttagaaaatatacaaatattctttattatattgaaaatattttatatagagtcactgaaatctaataaaatgcaaacattcatttgctcagcaaatttatattgagtatttattaagtgccagaaatattttaaggacagaaaatagattagtttat

SEQ ID NO: 364341 - DNA, 596 bp, Homo sapiens
gtaaatcaaagttttcttaataaaatattgcactgaaacacatatctgttagaagaagtgagttattttattaaacatgtctataggaatttaggatgttttatgaaagttttataccagtatatactacaaacttggcaatagttccatttccccttagaaatgattggtctagctataaaaatccctcaagtcaatttctggtcttctatcatttcctaaaatttctggggattaagttgtctttcatcaggctgacagaaaactagacctctggaaggggtatgggtgttcctttttagaaagtaagatyatcctgatgagtacactctagattttctgcttttctcaagtgttacagtgaaacctcaaagacttctattctgagttacttcttaaatcttacataagatatgcaagatagaaaatttatatacatttagaaaatatacaaatattctttattatattgaaaatattttatatagagtcactgaaatctaataaaatgcaaacattcatttgctcagcaaatttatattgagtatttattaagtgccagaaatattttaaggacagaaaatagattagtttat

SEQ ID NO: 364342 - DNA, 596 bp, Homo sapiens
gtaaatcaaagttttcttaataaaatattgcactgaaacacatatctgttagaagaagtgagttattttattaaacatgtctataggaatttaggatgttttatgaaagttttataccagtatatactacaaacttggcaatagttccatttccccttagaaatgattggtctagctataaaaatccctcaagtcaatttctggtcttctatcatttcctaaaatttctggggattaagttgtctttcatcaggctgacagaaaactagacctctggaaggggtatgggtgttcctttttagaaagtaagatcatcctgatgagtacactctagattttctgcttttctcaagtgttacagtgaaacctcaaagacttctattctgagttacttcttaaatcttacataagawatgcaagatagaaaatttatatacatttagaaaatatacaaatattctttattatattgaaaatattttatatagagtcactgaaatctaataaaatgcaaacattcatttgctcagcaaatttatattgagtatttattaagtgccagaaatattttaaggacagaaaatagattagtttat

SEQ ID NO: 364343 - DNA, 579 bp, Homo sapiens
taaacatttctgggactactggacactggctctgaattgacactaattccaggaaacaaaaaatcatcattgtgacccactagtcatagaatgggcttgatgaaaatcaggtgattaatggagatttaactagagtctatctctcagtggacctagtcagtccagaacccattctgtggttatttccccagttctagratgaataattggcatagatgtactcagcagtagacagaatctctacagtgactctctctcttacctgtagaatgagggctattatggtgggaaaagcaactggaggccattagaatggtctctacctagaaaaatagtaaaacaaaagcaatactgcattcctggaggacttgcagagatcactgccaccattaaggatttgaagggggcaggggtgatgatttccaccacaacatcattcaaatcaactatttggcctgtttggaaaacagatggatgttggagaatgacagtggattattgtaagcttaaccaggtggtgaccccaattacaactgcactatcagatgtggtttcattgcctgggcaaattaatatatc

SEQ ID NO: 364344 - DNA, 570 bp, Homo sapiens
tactcagcagtagacagaatctctacagtgactctctctcttacctgtagaatgagggctattatggtgggaaaagcaactggaggccattagaatggtctctacctagaaaaatagtaaaacaaaagcaatactgcattcctggaggacttgcagagatcactgccaccatyaaggatttgaagggggcaggggtgatgatttccaccacaacatcattcaaatcaactatttggcctgtttggaaaacagatggatgttggagaatgacagtggattattgtaagcttaaccaggtggtgaccccaattacaactgcactatcagatgtggtttcattgcctgggcaaattaatatatcccttgttacctgtattaatctagaaaatgcccttttctccatgccttttgataaggcctaccaaaatgagttttgtttcagctggcaaggccagtaatacatcttcactgttctacctcatggggatatcaactctccagacctgagtcataatttagttcacaggattcttgattacctttcctttccacaagatatcacactaatct

SEQ ID NO: 364345 - DNA, 579 bp, Homo sapiens
taaacatttctgggactactggacactggctctgaattgacactaattccaggaaacaaaaaatcatcattgtgacccactagtcatagaatgggcttgatgaaaatcaggtgattaatggagatttaactagagtctatctctcagtggacctagtcagtccagaacccattctgtggttatttccccagttctagaatgaataattggcatagatgtactcagcagtagacagaatctctacagtgactctctctcttacctgtagaatgagggctattatggtgggaaaagcaactggaggccattagaatggtctctacctagaaaaatagtaaaacaaaagcaatactgcattcctggaggacttgcagagatcactgccaccattaargatttgaagggggcaggggtgatgatttccaccacaacatcattcaaatcaactatttggcctgtttggaaaacagatggatgttggagaatgacagtggattattgtaagcttaaccaggtggtgaccccaattacaactgcactatcagatgtggtttcattgcctgggcaaattaatatatc

SEQ ID NO: 364346 - DNA, 570 bp, Homo sapiens
tactcagcagtagacagaatctctacagtgactctctctcttacctgtagaatgagggctattatggtgggaaaagcaactggaggccattagaatggtctctacctagaaaaatagtaaaacaaaagcaatactgcattcctggaggacttgcagagatcactgccaccattaaggatttgaagggggcaggggtgatgatttccaccacaacatcattcaaatcaactatttggcctgtttggaaaacagatggatgttggagaatgacagtggattattgtaagcttaaccaggtggtgaccccaattacaactgcactatcagatgtggtttcattgcctgggcaaattaatatatcccttgttacctgtwttaatctagaaaatgcccttttctccatgccttttgataaggcctaccaaaatgagttttgtttcagctggcaaggccagtaatacatcttcactgttctacctcatggggatatcaactctccagacctgagtcataatttagttcacaggattcttgattacctttcctttccacaagatatcacactaatct

SEQ ID NO: 364347 - DNA, 522 bp, Homo sapiens
taaaactttaagcagagcacctggatgtgcacttcatttggaaggaaaaatgaccagacgtgattatagaccaattctttgcctgtgtccaatattttgcctcaatatccaggaacttggaaggaagataattggaagagtgatggtaagaaattttgaagaagaggtatatggatagacctctccaaatgggcaaagactttgaagatatttgtcccatgtgaatacttaccaaagagtgacttcagtagaggaagatttaaataatgaagtggatagggtaacctattctgctgaaactarttgacctttttccccagacatccttgtcatcatacagtggactctttaaaaaagtgtccatggtggtaagggtggtgattatgcatgagctttgcaaaatggctttctacttactaaggccaacatggctaaaatcactgctgattaatgctaattttaagggccaattggacactactccactatgaagaaaaggaacagtatgcctggtatataaaa

SEQ ID NO: 364348 - DNA, 583 bp, Homo sapiens
gcagtcatgatgagttataacctgcattaatgaccacatctttattgattatatctgcaaagcttatttttaagtaaagtcatattcacagatactgaaaactgagactccaacataacttgttggaggacacaattcaacccataacacagactatgagagaaaaatatttttaaaaacaattgttattatctacattttatagatgaggaaatttgggtcttgagcacttaaatgatttaccagggtcagrtaattagtaagtggcaaagctatactttgaagccagaaagctgggctagaaatttattgtcttagtcttgagccatatcccagaaagtataaaacatatgttcatatgataatattaaattttcatcctttgcctctccttttaatctaggcaaaataagttccataaattgcagtgaaaatgaactggaataaacatccttaaacagaaatatgcacttaaacacaaatatgggttgtggaagtatatttaaaaaaacatactttccctccaaactaaaaacaacctttgcaagtatagtcagcttggaactcaaataccaaggaacag

SEQ ID NO: 364349 - DNA, 577 bp, Homo sapiens
agtttatgttcctagtattaaaaagagaaatgtccttcctrtcttttttatgtcattgtgtgagtatacaatcattgatgtatggccatcatgaataaagaaggaacaagtcaagggaattgctgaaatgctgcactgaaaccctgatgatgtagaaacagcaaaagaacaatacaaataaacacaaacaaataaacaacaaaaaaaaactatatcatttctgaccctgagctacttttaatgtgagacaataaaactcttattccttcaggccattttatttggatttttttactgctgacttactgaaactatctcatgtaaattatgcccatggtttataaaaaaggtaattcaggaggagatcctcattctatttgtgttggattttaaatttatgtatgtattttttagtttatctttcacttctaccaaaataggatttaaaacaacctaccaagacatatatttaataccacagaagggatatatttgctatataatttatatatataaaaaaacaagaaagcaaaaataaaggtaattgtaaattacattctaagatacacaactgaat

SEQ ID NO: 364350 - DNA, 577 bp, Homo sapiens
agtttatgttcctagtattaaaaagagaaatgtccttcctatcttttttatgtcattgtgtgagtatacaatcattgatgtatggccatcatgaataaagaaggaacaagtcaagggaattgctgaaatgctgcactgaaaccctgatgatgtagaaamagcaaaagaacaatacaaataaacacaaacaaataaacaacaaaaaaaaactatatcatttctgaccctgagctacttttaatgtgagacaataaaactcttattccttcaggccattttatttggatttttttactgctgacttactgaaactatctcatgtaaattatgcccatggtttataaaaaaggtaattcaggaggagatcctcattctatttgtgttggattttaaatttatgtatgtattttttagtttatctttcacttctaccaaaataggatttaaaacaacctaccaagacatatatttaataccacagaagggatatatttgctatataatttatatatataaaaaaacaagaaagcaaaaataaaggtaattgtaaattacattctaagatacacaactgaat

SEQ ID NO: 364351 - DNA, 529 bp, Homo sapiens
actgaaaaaaattaaaaattaagtagctgtaatacttactctgatttttaaaaatgcactcattcagattatcatctttacccaaaatttatttcattcttttatcagtcatctcatttttttggaattcttctttgtctttgtatttattttgaataatcaaagtaattaatgatacaccaagtgatattttttggttaactttagaaaaaaaatagataaattaaagtccagatgtgagtggaatatatttacctctaggttttataaaatttagtatcaatcttatggtattcctattttgttttttgtattgaaatgcatcatctttatcctgaccacattcagacactatgatatgatagataagtatatgtgtctctgtgtgtatttgaacgtgatacattgaaaaawttttttctactttatctgtgaaagttaaaaactaagatccaactacgattgtgccaagttaaaactgagaacaaatgtgacacatcaagatgtagaatccttgaactttagtttc

SEQ ID NO: 364352 - DNA, 422 bp, Homo sapiens
catctcaaaaaaaaaaaaaaaaaaaatgagttctaatctcagctctggattcacaaggattcatcccacctgaaagcactcagtggttgtctaacaggtggagccttgattataatctgcactttagctaccagagaatgaggataggaaatactggaccatctggaacttctgtaattaggagtagcgccatgcattccccaaatattaacgctatcgaagatttcatgaaaatataggattgyaatactatgcaatggatactctaataaatacagcaatatccattgcttatttgatgtgattttctgattaatggtaaggaataagataattgaattttgtttttgatttataaacagatcttacagaaatctacctaatggttgattaacatgtggacaaagatatcctgactactt

SEQ ID NO: 364353 - DNA, 548 bp, Homo sapiens
tctaaaatgtatggatatagaaaattctaaaataaaattattttaaatgttatactaagcaaatcaaaatctgaactggtgtagtaggccaaagtgtgttcccaccctctacctgcaaatttgtaggtggaagccctaagcctccatatgactatattagagctatggttcttaagaaggtgattaaggttaaatgtcacaaaacgtggatcccttttaagaagacgaagagtaactaaggctatctatccaccatgtgaggacccagagagaaggcagccaactacaagccagcaattcagctctaactaaaaaacccagccatgctagtcaactgacccgacttcacatctagacttaggtcagactgatccaaaaactgatcttccagtctctagaactgtaagaaaattcatctctcttagtctataggtgttttgttatggcattacaagctgattaatayagatggcatatcagtttaggtcaaatcatgagaaaaaaattacatagtaatttgaaaaagagaagcttagtatcaaaattat

SEQ ID NO: 364354 - DNA, 608 bp, Homo sapiens
gttaactatttacttagttaagcaatccattatgtgctgaatggtctgcaaagttgatgattctataacttcatatttattgagatccaatttactgaaattattgtttcttgaaaggaatataggacctgaactcagttataggcttraatttaaactctgccactaaataaatgaccgatattcagaaatttatttatctcatttttaaacctgtttccttacttagaaaatgaacataattgcctctgagatgtttttcttgggaagttactctgcccagtatttaattacttatcaacagtttatttttccttcataacatccttcttgatgttcattgatcattcaacaaacttcagtagattaatgtgtgagtccaattctgtatttcttgctgacatatttttctttttatgtgctttaactctatagattttattgatcatgtaactcttaagtaaagatcaaagttctcttcctgagtcaactaaatggtcttgtgagagatgggacctatatttataacccgacgtacactagcaaagcaactattcttaatgttaccttaatcagaaattctactgtttttctttaaatttattcaa

SEQ ID NO: 364355 - DNA, 608 bp, Homo sapiens
gttaactatttacttagttaagcaatccattatgtgctgaatggtctgcaaagttgatgattctataacttcatatttattgagatccaatttactgaaattattgtttcttgaaaggaatataggacctgaactcagttataggcttaaatttaaactctgccactaaataaatgacsgatattcagaaatttatttatctcatttttaaacctgtttccttacttagaaaatgaacataattgcctctgagatgtttttcttgggaagttactctgcccagtatttaattacttatcaacagtttatttttccttcataacatccttcttgatgttcattgatcattcaacaaacttcagtagattaatgtgtgagtccaattctgtatttcttgctgacatatttttctttttatgtgctttaactctatagattttattgatcatgtaactcttaagtaaagatcaaagttctcttcctgagtcaactaaatggtcttgtgagagatgggacctatatttataacccgacgtacactagcaaagcaactattcttaatgttaccttaatcagaaattctactgtttttctttaaatttattcaa

SEQ ID NO: 364356 - DNA, 569 bp, Homo sapiens
caagttttttattttttgtattttgtctaaattttgtagtttttatttatatgagagttaatttaaataaaactatttaatttacttttgaaatgatcttatcaaatccccacagaaatccccacagaatgcctattgattaagtaaatttaagttaattagacttactgtagtaaggaagaatgtcacattaatggaattktaatattggcatgaaaggtagaaatcaggagagaatatttctacaatcttaggacctaggcaggatgactttaaaaggatcttgcaatgtggaaaactggctaggtatatgaagagtttatatgttaggttttgtcttggtggtcagagtgaggcaaaaatttaaaatgagtatttaaggtgttagtttttgtttttgtttttgttttgagacagagtttccctctgtcacccaggctagaatgcagtggcatgatcttggctcactgcaaactccacctcccaggttcaagggattctcctgcctcagtcccccagtagctgggtttacaggcacgcaccatgatgcccaactaatttttgtattt

SEQ ID NO: 364357 - DNA, 569 bp, Homo sapiens
caagttttttattttttgtattttgtctaaattttgtagtttttatttatatgagagttaatttaaataaaactatttaatttacttttgaaatgatcttatcaaatccccacagaaatccccacagaatgcctattgattaagtaaatttaagttaattagacttactgtagtaaggaagaatgtcacattaatggaattttaatattggcatgaaaggtagaaatcaggagagaatatttctacaatcttaggacctaggcaggatgactttaaaaggatcttgcaatgtggaaaactggctaggtatatgaagagtttatatgttaggttttgtcttggtggtcagagtgaggcaaaaatttaaaatgagtatttaaggtgttagtttttgtttttgtttttgttttgagacagagtttccctctgtcacccaggctagaatgcagtggcatgatcttggctcactgcaaactccacctcccaggttcaagggattctcctgcctcagtcccccagtagctgggtttacaggcacrcaccatgatgcccaactaatttttgtattt

SEQ ID NO: 364358 - DNA, 594 bp, Homo sapiens
tccaattgataagcaatgacatcataattacttcaagctctagatcgatctgttgattcttgatggagcaagaacatttaacatattgatttttctcatttaagtcattttcttagcatctttgagtcccttcattctattcagtcttgactgaatgtatttaataatatgtagctgatctttctaatgttttctcatatgttctatattgtctagtagacttcttccaattgacaaatagtatcagaatgtccacaaagaaacaggatagtgtgtaatatatatgattatggatgctatggaattgaaggtgtgctttctgaggaagcccttcaggaagagggttattagacartgatgagggtaagtattttcgtaaggttggtaagaaatatagagacagctggtaactaaggaaaatggctgtactaaggaaaatcactaccaatctaacaagtttgctgaacaattttatttgtctaagtttgtttggagattgtgctagttacatagacttcaatttcaagcacaaacaactgaaaaattatttacattgttctcttttttggggcattctaccatttttatatagag

SEQ ID NO: 364359 - DNA, 621 bp, Homo sapiens
aacaaaagaaatggcattttacatgaaacgaaactgacaaatatccacagtgttcaaattaaaaatctaacagatgtgattattttgaattcccgaagaagcagattccgagacaaagatatgaatccaaataatttactttggagattttcccatgaaatacccgcagacgagtgcaaaagtgaaaacamaaataaaggaatataatagaaaatatgttatcaagcaacttattgtgagcaagtaggactcaatgcttctggggaattctgaaaaaaagttgtacagtctgtacctcaaaacttcgttctctgatgggttacggagctaaatcgtatgtatagccactttcagcagtcattggttgaaagcgacttcaaaggggtgttaattccctggtacttctggcctgccatgcatgcatgctgagtgagctctgcagccagattaagtggatgctgacattgctatttggctaagtacgtctgaaatagtaaacactactagagcatcaacagtgtctgctacagtgatattgaactcagaagtattaaaaacatgccaaaaaatgaactttatatatggttctagaaaatctaaagattaattctcatatttgaa

SEQ ID NO: 364360 - DNA, 547 bp, Homo sapiens
ggcaatattaactggccactggttttcaagagactaaagatgtaattcggaaggctgacaccaatgaccggaattattatggggcatacctgagaaagccatgatgcccaaaacttyggacaagaaagctatagtcctggcctaagttactatcaaaaatatgaccacctattagcctaaattgctggagtccaggacatgtgagtcatcagaagtctaccaggagagcttatccagcaagaatccgggtcacttgtagtttcagaataatctcaatgagatgagaaaacttgtatacttttttttcttccccagcggaaatatgcattaatatcacaacttgagtaggaataaagagcaccttcttggaccacaaagtcacctttgactccctccatcttccatatctttcacaacatatcaactgcccagttcttctaattccacctcctgtacagctcttgaatgagcccactcttttccaacacacctttcactactagaccattacagaagcctcctaatcagtcgcttaccttccactttg

SEQ ID NO: 364361 - DNA, 547 bp, Homo sapiens
ggcaatattaactggccactggttttcaagagactaaagatgtaattcggaaggctgacaccaatgaccggaattattatggggcatacctgagaaagccatgatgcccaaaacttcggacaagaaagctatagtcctggcctaagttactatcaaaaatatgaccacctattagcctaaattgctggagtccaggacatgtgagtcatcagaagtctaccaggagagcttatccagcaagaatccgggtcacttgtagtttcagaataatctcaatgagatgagaaaacttgtatacttttttttcttccccagcggaaatatgcattaatatcacaacttgagtaggaataaagagcaccttcttggaccacaaagtcacctttgactccctccatcttccatatcyttcacaacatatcaactgcccagttcttctaattccacctcctgtacagctcttgaatgagcccactcttttccaacacacctttcactactagaccattacagaagcctcctaatcagtcgcttaccttccactttg

SEQ ID NO: 364362 - DNA, 548 bp, Homo sapiens
aatcacacttatgcaggattttgtactacaggagtttataaaacccgaatcattgatagcacaaattgcatttaacaattccctaaacttccagaatctggacttttgggagctcaaaagccaagaatcaacccctctaagtttctctttgcatttctattgtacccttcctaaggcagtgaaagggagttaggccaaggttattttaaatctagcagggttgtgagttggggaagaagaggcataattaacaaaatttcactctctctttctttttataaagagtttttgttacactggtggagtctcactgcacttaccatgtgactccagtatataaaacacaactccaactatgttcaaaatatgcatacacataggcgttatatttccatggtgaggaggaggggattgctacacacagtgaaatatgcaaggcaaatgaactasaaagaaatacagccatatgtgaacaggaatatctctggatggtgagattagagatgattaatttgattctcaatactttcatgtatgttccactatca

SEQ ID NO: 364363 - DNA, 513 bp, Homo sapiens
ggaagactgtctgataattgtacctctgtcctcctgctgtcttgttagacatgtaacaagatctrtgataccctgtggggggtggtataataagaactcaaggatgttttattcatctttgtagctatagtgtgtgctcaaatggtaatagctgatgtttgagataggtcccattactctccctgtttttcagatggagacactggggtacacagaagtcaagtggtcccttcaaggctataaggagatagagcctggtttcacatcctgacattattgttccagagtccatgcacttaaccattgtactgtcctacttcaattgaatgacttaattataactgaaagggataaagaatcaaactgtgttgcaaaggaatctcatttggagttgtttccttctaagcatattgaaatattgagtttttttgactcaaatcctgggtgttgtgatttaaaaatgaaatagagagatttcagctgggattttaatttatgctgtgtttttcatgg

SEQ ID NO: 364364 - DNA, 513 bp, Homo sapiens
ggaagactgtctgataattgtacctctgtcctcctgctgtcttgttagacatgtaacaagatctgtgataccctgtggggggtggtataataagaactcaaggatgttttattcatctttgtagctatagtgtgtgctcaaatggtaatagctgatgtttgagataggtcccattactctccctgtttttcagatggagacactggggtacacagaagtcaagtggtcccttcaaggctataaggagatagagcctggtttcacatcctgacattattgttccagagtccatgcacttaaccattgtactgtcctacttcaawtgaatgacttaattataactgaaagggataaagaatcaaactgtgttgcaaaggaatctcatttggagttgtttccttctaagcatattgaaatattgagtttttttgactcaaatcctgggtgttgtgatttaaaaatgaaatagagagatttcagctgggattttaatttatgctgtgtttttcatgg

SEQ ID NO: 364365 - DNA, 513 bp, Homo sapiens
ggaagactgtctgataattgtacctctgtcctcctgctgtcttgttagacatgtaacaagatctgtgataccctgtggggggtggtataataagaactcaaggatgttttattcatctttgtagctatagtgtgtgctcaaatggtaatagctgatgtttgagataggtcccattactctccctgtttttcagatggagacactggggtacacagaagtcaagtggtcccttcaaggctataaggagatagagcctggtttcacatcctgacattattgttccagagtccatgcacttaaccattgtactgtcctacttcaattgaatgacttaattataactgaaagggataaagaatcaaactgtgttgcaaaggaatctcatttggagttgtttccttctaagcatattgaaatattgagtytttttgactcaaatcctgggtgttgtgatttaaaaatgaaatagagagatttcagctgggattttaatttatgctgtgtttttcatgg

SEQ ID NO: 364366 - DNA, 435 bp, Homo sapiens
ttgtttaaaattgcagttgaaagctctgctcttgtctgcagctgatctargtgcaatggttttggcacctatccagtggaaagtttgctcaactttagtttttcagccagaattgtgtaagctgaaccaattgagatgcctatggtgttggttattatttgtgctgttgtcggtccctttcaattagagcacaaacaagatcaatttttttccttgcaaattgatgtggatggtctgccactgtgggcttcatcttcaacatcatctcatcttttcttaaaatgaattatccatttgtaaactgtggatttctctgagccattgcccccataaacttttggtaaagcatcagtgatttcaccacaaatttgatatttgttcttgtttcgattttagcagaattcatgttgctcgattagaagttcttttcaaact

SEQ ID NO: 364367 - DNA, 491 bp, Homo sapiens
agtgggcaaagctagactgtgtgtcaaacctttccatggctaacaatccagtctgtgaaatcactcagatacccatcacttccctccttgacaggcttctattcacactgcacagagagggtgtaatgaccaaaaaaagttcctacaactccaatcctcataaggaaatcctcataaggaaatctggccaaaagctgacccgtgatagacttacaatcagttcaccatagatacaaaattgggcacaattatcactacaaaaaggttagtttccacttcacacacctgaggtaggtaaaaactgaatcccaaattggagatgcaattttcccattatgcaaagtggttgctgcattcctgggtggaaaaaaaaatccccaaaccagtattgccaaaactgaatttactagaaaccttgactccaaatgacactggggartgtgctcctcttttcagattcatgaaatgctttcatgtcatttaagaagcaa

SEQ ID NO: 364368 - DNA, 625 bp, Homo sapiens
atttaagaagcaaaatgcaaaagaaaaaagtgggcattgtctacacttcagacatggaggctttagtctgacaatcccagatcctatctccaactcaaaacaaatctgttccatggcaagaaagtactttagagaattagtctttgctgtatttgtatatgctaattaagctccaaakgagaaactgctgatgataaatcgctgacaaagaagccatttttaaaaaattttactaatttatagatatatcagattatatcggtttaggtcacacttactttatatacccatgtgtaaaaataggatgaaaatgattacatttgaaagtgcctggggttgttaaagtaaaaataggaacaatcttcattgaagagggggaaaaacatccttaaaaggatactgaatagaagggtgtctgtaaggcacggagaagaaggagaaaatgtcctggattatgaaaccacaatagaattctgctcagaaattgcatgttatcaattcagttgatcagataccaataaatccatttactagaaactgatttcggaggaaacagacttgtaactataattcaaattcattcctttaaagcacgtactaccagtgcactctatcaagggtgggc

SEQ ID NO: 364369 - DNA, 625 bp, Homo sapiens
atttaagaagcaaaatgcaaaagaaaaaagtgggcattgtctacacttcagacatggaggctttagtctgacaatcccagatcctatctccaactcaaaacaaatctgttccatggcaagaaagtactttagagaattagtctttgctgtatttgtatatgctaattaagctccaaaggagaaactgctgatgataaatcgctgacaaagaagccatttttaaaaaattttactaatttatagatatatcagattatatcggtttaggtcacacttactttatatacccatgtgtaaaaataggatgaaaatgattacatttgaaagtgcctggggttgttaaagtaaaaataggaacaatcttcattgaagagggggaaaaacatccttaaaaggatactgaatagaagggtgtctgtaaggcayggagaagaaggagaaaatgtcctggattatgaaaccacaatagaattctgctcagaaattgcatgttatcaattcagttgatcagataccaataaatccatttactagaaactgatttcggaggaaacagacttgtaactataattcaaattcattcctttaaagcacgtactaccagtgcactctatcaagggtgggc

SEQ ID NO: 364370 - DNA, 579 bp, Homo sapiens
aactgtaccctcagaaaaatttataattctatcatgctttattaacaaggcatatggtccaggaacrgtggctcatgctttgtaatcccaacactttgggaggctgaggagggcggattacaaggtcaggagttcgagaccagcttggcctacatggtgaaaccccatctctattaaaaatacaaaattagcggggtgtgttggagcatgcctataatcccagctactcaggaggctgaagcaggagaatcacttgaacctgggaggcggaggttgcggtgagccaagatcgtgccactgcacagcctgggcaaaaagagtgaatgaaattccatctcaaaaaacaaacaaacaaacaacaacaacaaaataaacaaggcatatgatctcccagcaacagaatatgcgattttaactgttttatcattgcttaattcacttgacctaaattttatgcactgtaccccttccctccaccctcacattggtcatcctagtgaccaatgtatacaagtgaataacagcaggacagttagggctagagagatcttccttcaaaccaagttaactcatttattt

SEQ ID NO: 364371 - DNA, 604 bp, Homo sapiens
aggaggggagaaatgaaaaaggaatttaatagataaaaagaaacataaaagaccaattgtattagactgtatattcagttttgtatattgctataaagaaatacctaaatccaaggcaggcagatgacttgaggtcagaagtttgagaccagcctggccaacatggtgcaaccccgtctctactaaaaatacaaaaattagccgagtgcggtggtgcatgcctgtaatcccagctactccggaggctgagccagaaaaatcacttgaacccaggaggcggaggtcgcagtgagttgagatggcaccactgcactccagcctgggcaacagagcgagactctgtctcaaaaaagtaaaaaataaataataaataaataaaaagaaatacctgaggctgggtaatttataaagaaaaggsgtttaactggctcacagttccacagggtgtacaggaagcatgatgctggcatctgctgggcttctggggaggcctcaggaagtttacaatcatggtagaaggtgaagggagagcaggtacatcttacaatggcaggagtatgaggaagatagagtgtgagggtagaggtgatactcacttttaaac

SEQ ID NO: 364372 - DNA, 584 bp, Homo sapiens
atttggcaaagacaatgaatcctacttataggtctggttttgggaatgaacctttaccaaaggaggggaaaggctactgatcccatgatcccataacaggattgccaytaagcacttttttatttgaggtaaggccaagcatttggttgtggcactggcgggacaactataaagaaaccaatgttccactgcttattaagctccagagtctcattaatgccctttacaaacttaggagaggtgtactactctaccttacataataaagaaaattgaattttaaaacattgaagtcatttatccaaagtcgtttagctagagagttggaagagtcaggattcgggcccaggacaacctaataccagatacatgaggctgtggtgcctttcctctaaccttaagttgctttgagaagtttgagctcctgctctttagaaatattcaaccagaggctgtatggccttttggaattaattttgtaaagaacttaatcactggctggggaatgctagtgattccttccccatgaaatctactgatatttccattatatgagtcaatggacagtcttcaacatgggttgc

SEQ ID NO: 364373 - DNA, 592 bp, Homo sapiens
gtgggggtgggaactgcctcattttttctttayggtaactcactatccagggctcacaataccccagaatggctgcatttcactaggtataagccacttccagcacccagcgcctgccaggagggcagtctatgaacaatcacagctcaagtggttcctttccccctccaacgagaatcacaaatgcctcctgaagtgggtcccactaacagttcagctccttgaacacccatttcttccttctcagattttgaaagtctaaatagttggttagtgatgataaaggagatacatgtagcagaggcgacttgcaaggcattaattcattctccgaacaccagcctctcctacgaatctcattactgcacagcaggtggacaagtgaagtacaaagaatgggaaggcggaaaaaaaaaacaggaagaaaaaacacacagatctccaaaggatgccatcattattttacattataatgatcccaagaaaagggtgaactactcattgttcatttgttcattcactggagaatcataagcagggcccagggaaacaaaaatgctatcagtaacaataattactttgtttctatttg

SEQ ID NO: 364374 - DNA, 592 bp, Homo sapiens
ttaattttaagaaaaaaattcttagaactcctgcgcccatgttttgagacaatgaatgcatctttttccccattatgaaaatccaatatacccagagcctgcttctcattttaatgaatacttttttatgtagagcaagtaagggcttcagagccagacacatcagaatgtgacttggggctccaccatgaatgttcatatgggctttggggcaagctctgtggtctctgagcctctctgtcctcatcgctgaaataaagaccccagtcgcttttcccagaattcttcagacgattaaaggagatattgtgtgtgagtgaatgtgtctgtgcattccccagtgtctgctggggtgcatgcacaacagctgactttattcaagaygccacctacaaccacactacttcatgcgctctcaaccttttactgaattccatttccaatgaactgtcctaagactcatatctgatttccacaggattctgctgagctggtaaccttctctttccctgcatctgtgaaaacctacagcatttgtcatacagtcaatcagaatgtaggaaacaggcttaagaagatgctgttaattgca

SEQ ID NO: 364375 - DNA, 586 bp, Homo sapiens
gggcttatgtggtttttaaaatttaggaatgctatggtagtcacttcaattttctttttcaacaatcattttaatcagyttctgaaaatttgtgtgcattcaagtgcatgacgacataaaaattcatttaaaaaaaaaaggcacaagtagctaacactttgtagaaatgcgcctctatggtgagctaaatctctctccttcttttcagttatcctctagaccccgtctcatcacagtctgcagtagatgtgcacttctcatatttacctacccttcccaataatccctattttccttctagacccaagacacggctttctactactgcacagactcctccgcggtttccctcaaatcccccaaccaattaaaaatggttctgcttggctaatttctagagacctttgctgaggttaaggatcagtcacaattcatcttatattactttcacacaaacactagataggacagaaatgcagagaatttcagaagattttgcaaaaactctcattgtcatggttttaagtcaaactaagttcttatcaaggcctatttgaagaaaaaaaaatttctaagcttacatttg

SEQ ID NO: 364376 - DNA, 586 bp, Homo sapiens
gggcttatgtggtttttaaaatttaggaatgctatggtagtcacttcaattttctttttcaacaatcattttaatcagttyctgaaaatttgtgtgcattcaagtgcatgacgacataaaaattcatttaaaaaaaaaaggcacaagtagctaacactttgtagaaatgcgcctctatggtgagctaaatctctctccttcttttcagttatcctctagaccccgtctcatcacagtctgcagtagatgtgcacttctcatatttacctacccttcccaataatccctattttccttctagacccaagacacggctttctactactgcacagactcctccgcggtttccctcaaatcccccaaccaattaaaaatggttctgcttggctaatttctagagacctttgctgaggttaaggatcagtcacaattcatcttatattactttcacacaaacactagataggacagaaatgcagagaatttcagaagattttgcaaaaactctcattgtcatggttttaagtcaaactaagttcttatcaaggcctatttgaagaaaaaaaaatttctaagcttacatttg

SEQ ID NO: 364377 - DNA, 554 bp, Homo sapiens
aaaccatggcaactgttgacatgaatgagctaaatctgagcggaactcttaaaagcctcactgggatatttagcaactattccagaaagactaaggcrccataccatagcctctgccttccctgaaattacccagcctccattcactgacttaacaaatgtgcgcccagcacctcctgggtgccaagcacagtggtctgaatgggaaactgtcgaaaatgagccaaagtcctctctctcaatgagctggcaaacagcatcacaacagactgtgccaaataaggacagaagaaggcttgaggtggttaggagtccagaatatcctggagaggagtgaaagataaggaggatccagacaggggatgagaagggaaagagatgtggaggggaaatggaaatgcaaaggtccagagacaaagcaaatctgacagcattactgacttcatgttgactacagcgtaatggatgggtgggtggggggaacagtatgggatggaaatgaaaacgcaagcaggagccagagaccacaggactctctcagccatggtaataagt

SEQ ID NO: 364378 - DNA, 516 bp, Homo sapiens
gactgcctcctccctgaggaactggtattgtcttctggccacagacagctatgagaaaagcctccagcctaggattgtctgcgatgggctgattctctcaagttggcaatgacgctcctagaagcacaaaggctgagakcatcccatggttcctctgcatttttgttaagttgctccttaactgctgctgcgctctattattctccatccatctctgtctcttttcattttaacatctgtgtatttcattattctgcaaagtaggggacactcctgtctggtcaaggaaaccatgactcttctttttatcattctaaatttgcaccgggtacagggcatcgatctttgctggaattggtttctctgggttgcaggaatcatggcaaaatgcagcatcctccttctgtgagatgctccttgagttgactttcctgggctacatggtctcctttgactaaggaccttgacaaagggcaagggcaggctctcgctcttaggactgtcctacttgccagt

SEQ ID NO: 364379 - DNA, 631 bp, Homo sapiens
ttatgtagtattgagtgttacagattatccagcattattatacagtattagctattattactattcccatttattattattatcatttcagacactttctgcccagcagtggatgcttaattaatacgtggggaatggccagaatgcaaaaggaactcagaaagagtgggacccactcagcctggggaagccaaggagtacttcataaacctgtgctattttagttgggtatgaaagattattaggagtgtgttagtgaaaaaaaagagggaaggacactccagacaagaggaatggcatgaactgaagctcagagttgaaacaggttatggcttgtacagaaatctgggagaagttaggacacctgggacatgggctatgcggcaggagatgygtctgggagcgaggcagacaggagtctggaattatcctggaagccaacagacatctttctaaaggaaagtgatgagtcagatttgttttttctgaagaaactttttatatgaactcacaaagatatcatgaggctattgaaagtcaaggaaatctcctcatccccccaacagccctgagggagcagaagagagacaagcccataatattcttcgtacttttagaaagaaagacacta

SEQ ID NO: 364380 - DNA, 631 bp, Homo sapiens
ttatgtagtattgagtgttacagattatccagcattattatacagtattagctattattactattcccatttattattattatcatttcagacactttctgcccagcagtggatgcttaattaatacgtggggaatggccagaatgcaaaaggaactcagaaagagtgggacccactcagcctggggaagccaaggagtacttcataaacctgtgctattttagttgggtatgaaagattattaggagtgtgttagtgaaaaaaaagagggaaggacactccagacaagaggaatggcatgaactgaagctcagagttgaaacaggttatggcttgtacagaaatctgggagaagttaggacacctgggacatgggctatgcggcaggagatgcgtctgggagcgaggcagacaggagtctggaattatcctggaagccaacagacatctttctaaaggaaagtgatgagtcagatttgttttttstgaagaaactttttatatgaactcacaaagatatcatgaggctattgaaagtcaaggaaatctcctcatccccccaacagccctgagggagcagaagagagacaagcccataatattcttcgtacttttagaaagaaagacacta

SEQ ID NO: 364381 - DNA, 524 bp, Homo sapiens
aggcaaaatttccaccaagcaagtttgggattaggaaattataatgtaaaggggtttttaaaggttatttattttggctatttgtaatgcacacacatatgtggataaagaggtttttgtgtgcatatacattggaatgaaaattctagagaatttataagcaggaaactaagatattcccaaccgctgcttctacagacaaatcttgaggggtgaggaaagatctaaaaagataataaataaatgtgggttaggtaactgagcctctggaggcttttcactacttggtggaaaaacttcctgacagtggatccaagtccctgggattaagaccagatgtgrgcacagagattcagggagaacagaatagtttccacctaaaaaaagagtctttcagtaaaggtatcatccaactgcatgaaaggtgatatctaagggatgactcctaacaagcagtagaaaaaagtaagaaaaaaaaaaaaaagaaaatgagtgaagagtgtaagaatcacagacagttttca

SEQ ID NO: 364382 - DNA, 616 bp, Homo sapiens
tgcgatctatttgatttctttaggagataatacgcatgaaagaactttaaaagcaaaacaaagcaataacccatatcatgtcaccatcccattacttagcactccctgttcaaaacagtttgcttttgaggccaccaaactaactgcaatgcatctgcctggacttagcagaaggaatgctctgctgaacattccccctacccagacatcaaaagaggctggcaatgtaagatttgtccarccaacttccttactcagtgagactcagtctagtcctatgacagatgagtttcaaaattcagtgagcaccagactcccctgggctgcttgtttagatgcagattcctgggctccactctgtttctaagaattctattccagcagcttttcagtcatccccaaatctgcattaacaaatgagtaatgtgacccatcaagcacagtttagaaagtactggttgggcactgtccctaagagcccaggagcccaaggtggcaaagagcttagccctttattttgtggttattcgagagacgactcaaaacttagtttgtttcacttttctttttctttttcttttctttctttttgtttggcagcaccatgctgagccac

SEQ ID NO: 364383 - DNA, 532 bp, Homo sapiens
ctttctttttccatgaaagtccttccaccctgcaatggactggatgtttttgtcctcctgaaattcttctgttgagtccctagtctccaatctgatggtaataggaggcagggctcttgggagctggttagatcatgagggtggagccctcattaatgagattagtgccattatgaaaaaggcccaagggagctcaggcatcctttacaccatatgaggacacagtgagaagacggctgtccacaaaccaggacgcgagccctcaccaaacaccaaatctgtcagtgcsttggtcttggactttcccactccagaactgagagaaataagtgttgctgtttataagccacccagttagtggtatttgaatggattaagatactgtcactctgagaagattaaatgaaaaaaataaagcagagggtcttcaactctacatccttctaaagggacactcagtataggctctgagtgccagtagtgacgaaaaatagagaggatgcagcagtcaggtcttgaatcaaggcagcca

SEQ ID NO: 364384 - DNA, 551 bp, Homo sapiens
cttctgtcccagcttcaagggagggagcaccgggaccccaggtagatagtctgattcttctcacctcctgggcagggggtgggggtgtcaatgggaactcgacagcattgtagttggagtggggctccccatcctaggctgtcccccagcccactcctcagaaccagactatcaagagatccctggattccatctcctgaaaatggttcagggaagaggaggtgytaattttgactaatgtgctgtaaacctgaacatccacagtatttctgaaacagaactgtcacctgttagaaaggagaatctatggagaatcacccagctcatctttgacacctgaaaaagcctggatcaaaaactctcgccaaccctggaggctctctctcttacatggcacaatgcatccctggggaaggcagaagatggaaaagtgtatcgtattaagtgcctgctatgcaccaggagccagcactttcatatgtattctcaccctgccccttttcacatctgctcccatttcccagatgaaggaactgagattccaagaagag

SEQ ID NO: 364385 - DNA, 507 bp, Homo sapiens
agggaggggaacatcacacactggggcctgttgggggtgggggacgaagggagggagagcattaggacaaatacctaatgcacgcgggtcttaaaacctagatgacaggttgatgggtgcagcaaaccaccatggcacatgtatacctatgtaacacacctgcactttytgcacatgtatcccagaacttaaaataaaatttaaaaagaacttaccatgtaaccaaaaaccacctgtttctcaaaaactactgaaataaattttttgaaatgaaaaaaaaaaaaaaacccatcagatctcgtgagacttattcactatcatgagaacagcacaggaaaaacccacccccatgattcaattacctcccaccaggtcccacccatgaccacatgagggttattacaattcaaggtgagatttgggtggggacacagagccaaaccatatcagacagctaatcagtggccaaagtatatcagacagcaaatcagtagaagtgaggacaag

SEQ ID NO: 364386 - DNA, 608 bp, Homo sapiens
tcctgggaatttgacagacatgcattctctctggccccatcctggacctactgaatcagaatcttcattttaacagatccccagatgatttgtgtgtacattacaatttgagaagtactgggctagaagatcatgtttccaaccatttacagtatttataataaaaggcttgaagtctagacattgtaaaagtcagatagctttaaagtaaagggtcaaagaggaagaattaagaaacaaagtagaaataacagggaaatttgaaataagtcatctctcttattaatcaatatacaccttaccaatagtggaaaataaataaatatttgtcaaacaaatggacaaaagaatacatgaatgaaatgggctctttgtaacagaggttttctaacaaactggcttctatttrcaaggaaagcctttaggcaaaagagaaaaatttcatttccaccctccagagtccaggtcacctttcccccttccatgtctcactgagaggcactgccatgccgatgtgattaccttgtgacagtgtctcacttgaatactcatgtcttgctctaggctcccactgtaactcatgttgacatggagcaatgtttcatttc

SEQ ID NO: 364387 - DNA, 552 bp, Homo sapiens
tcaggtgattgagaccatcctgggtaacactgtgacattccatctctactaaaaatacaaaaaactagctgggcatggtggtgggcacctgtaatcccagctactcgggaggctgagacaggagaatggcgtgaacccgggaggcggagcttgcagtgagctgagattgcgccactgcactccagcctgggcgacagagcaagactctgtctcaaaaaaaaaaaaaaaaaaaaagttatataactcacaatcaaagatcatgtagccatgtagctagaaagttgcagagctggggtttaacttaagtggtccaactccagagttgttgctcttaatcaccccaccacagtgcttgttgaggaaatgaatgtggaatktgaatgatgaattcacactcatccttccttagggtagcctttgtaggattgggattcagtctgatctgggttcaaattttgtaactgactcacattttatgatttacttgcttgtgtgatggggttatggtgtgggagcaccaaaaatctcttgtcttataaagagttcacttct

SEQ ID NO: 364388 - DNA, 512 bp, Homo sapiens
aatgctgccagggatgtggggtttcctcagttttacaaatggaaaattgaagctcagagagggtagctcacttgtctgaagttgccacagctagttatggttataagagaattaggcattagaacccaagtctggctcactcctgagctcatgctctttttaacagactgtcttcccagaagggaggacaagggattgggcttcactgtctggtttccttgccttcccccatcctgcaccctcaaaccacttcttctgtgctggccaccctggtttttgactgtgctctgtgcctttggcccttccttagttgcaaaagccagggggccctaccaagtcacagccttggctatcctcaactgagcccatctgarccttgctcagccttctgcagccccatgttgaggggcgaggaggcagatggtgtggactattctaaggaagacagctttactgtggctttcctcaccctgacttcttagggagttagtactcaaaaaatatctgaccta

SEQ ID NO: 364389 - DNA, 445 bp, Homo sapiens
ataggcagacacacccctgccacactgactcaggcatactgggtagacaggaacatgcccaggttttggggaaaactgatgttgtttccagctgggtctgcctattaccaacaaacataggatttgcattcactgcaaaatgtctgaaagagtagcaggaggagarggaaagactgggagagcttgttcaggcgagaagaaacacagctgctgtctccacacccacatctcttccatccaaggacgtcagagccccaccactggctgctgattaaagctcctggctgcctgccagggaggctgctgctgggggaggtgctcaggttgccaaggggcagcagcagctggagccagccagacaccggccaagaggtggtcttggctacaagtccagtgcctgctcagcgcctcacgttcgtaagtgctggttacttccctgaagcca

SEQ ID NO: 364390 - DNA, 582 bp, Homo sapiens
ccccaacaaagtaaacagcatcctctcctcttccctgggtcatacaaaagtgagaagcaacaaagcacaaagatctacttccgaagtgggaaaccgggggaatacagggcaacgcagggctgaggagcaggctgttgmaatagcaaggacactgtctttcttaaacagtattgctccttccactgtattgttatcttctctctagctgtaaggtttgaccccctcacctgttttctagtttgtcctgcccctttatgctacctcaaacctgcttttaacaatttggtattgtggcaacccggtcaggagattaaatcctgaagtttctctggtaatttttctgtcaatccatcaccaaaaaaggaacatccttcctctccctctgatcataatcgcattggacattcacaggtaccttaaagaatagtcaaatacacaaaaacacatgtgcacacactcactagaatgagaagcaataagacgtgcagtgcagaatacttactctaaatctatctgcagccctaacctcctccctactctcaagctctagtctggcacctccatctgcctaccagacatttc

SEQ ID NO: 364391 - DNA, 539 bp, Homo sapiens
gagcactttccacaaatgaggcttcctttgatcctcaccacagctcctatgaggaagagcaggcaagtaatcccactttatttatgtggaaactgagtcagaaaagataagtgaattggccagatcatgttggagaaaacacagatcagacaatgaggacatctgacctctggtttctacttggccaatagggtcyaaggctgaaatcacctcacccctctgggctctgctgccttcacgagtaaatgaagtaggctaatccaaggggccccccagcccaagtgactcgcactcttcaactctaccaatcttccatgctatgcagaagagccaggtctaaaactcaggcataaacccgtgctggactatcaggccagtgctctttccacttcccctgccatgccacttctaataaaaggcagtagaaaagcccccaaagcagctcttcaacaaatcactccctcagcagctaggacttggcctctgggtacctcttcccccaacttcctgccccatccccagggcaagttacccaggga

SEQ ID NO: 364392 - DNA, 539 bp, Homo sapiens
gagcactttccacaaatgaggcttcctttgatcctcaccacagctcctatgaggaagagcaggcaagtaatcccactttatttatgtggaaactgagtcagaaaagataagtgaattggccagatcatgttggagaaaacacagatcagacaatgaggacatctgacctctggtttctacttggccaatagggtctaaggctgaaatcacctcacccctctgggctctgctgccttcacgagtaaatgaagtaggctaatccaaggggccccccagcccaagtgactcgcactcttsaactctaccaatcttccatgctatgcagaagagccaggtctaaaactcaggcataaacccgtgctggactatcaggccagtgctctttccacttcccctgccatgccacttctaataaaaggcagtagaaaagcccccaaagcagctcttcaacaaatcactccctcagcagctaggacttggcctctgggtacctcttcccccaacttcctgccccatccccagggcaagttacccaggga

SEQ ID NO: 364393 - DNA, 620 bp, Homo sapiens
ggctatcgtgaataatgctgcaatgaatatggctgtgaaagcttaatttatttttttaaaaaggacacctccaaatagatgtggaagctatggtcagagaaagctcagaacttgtgtaagtccctcctgtgccagtgcaagccygggcatgagctcaggtcctgccttcaccctcctcacagctgggagttggtcaaggtcctacctcttgggatggttcaccctgtaagctagaggaagagtgagacagggaaggtgcacagaaaggagccaagttgacatcagcctggcacatggtcctctttgtcatccatcagcctctgcagtatttcccacagtcgggttctcccagccctgtccccaccagcccagtgccctggtctggcttctggtggctgtgagcagctgggatctgagtttaatggaagtaaccatcttattttcttataaattcactgtttcttttagtcttttcaggactagtttaggtctctcttgggttagcagaacccatccatctagtcactggctgtcctgatagagcaggtccctttctaggctggaggctgtgggtggggcccagcatcactcctactatctagcttggatggtttcccact

SEQ ID NO: 364394 - DNA, 591 bp, Homo sapiens
gagagggagacctgggacccaggggaaggacctacaggtggggatggagggtgagggacaggtctgataggggaagtgaggcagggacctccaggggaagggacacccaggccctgagtgcccctgtgccccctccctgcccagcccctggccatgcttgccatcstggggaggtgcctcgtgggagatgtggagcacaaacatcacggccagtggagccagagtcacctgacctgcaataatgtgcctttctgccccagcggagacagagggcattgtgtgtgcggctgcggcctgagactcgcagcacagcctgcctctcagaaaagcatgattgtcttgggcaacctctgcggcctggggctgccgaccagtacgtcataacaaacccagagcgggcgaagggacaaccaccctctagggacagagccgctttgagactccagtcttagaggccccaaggagccagggcagaaacgggaagcaggccgaggtgggggctttgggacaaaatgggtaattcggagcggtaggaactttttcaaagaccctggcatagggcgtcacagaatctacagccaggatttgtca

SEQ ID NO: 364395 - DNA, 591 bp, Homo sapiens
gagagggagacctgggacccaggggaaggacctacaggtggggatggagggtgagggacaggtctgataggggaagtgaggcagggacctccaggggaagggacacccaggccctgagtgcccctgtgccccctccctgcccagcccctggccatgcttgccatcgtggggaggtgcctcgtgggagatgtggagcacaaacatcacggccagtggagccagagtcacctgaccygcaataatgtgcctttctgccccagcggagacagagggcattgtgtgtgcggctgcggcctgagactcgcagcacagcctgcctctcagaaaagcatgattgtcttgggcaacctctgcggcctggggctgccgaccagtacgtcataacaaacccagagcgggcgaagggacaaccaccctctagggacagagccgctttgagactccagtcttagaggccccaaggagccagggcagaaacgggaagcaggccgaggtgggggctttgggacaaaatgggtaattcggagcggtaggaactttttcaaagaccctggcatagggcgtcacagaatctacagccaggatttgtca

SEQ ID NO: 364396 - DNA, 591 bp, Homo sapiens
gagagggagacctgggacccaggggaaggacctacaggtggggatggagggtgagggacaggtctgataggggaagtgaggcagggacctccaggggaagggacacccaggccctgagtgcccctgtgccccctccctgcccagcccctggccatgcttgccatcgtggggaggtgcctcgtgggagatgtggagcacaaacatcacggccagtggagccagagtcacctgacctgcaataatgygcctttctgccccagcggagacagagggcattgtgtgtgcggctgcggcctgagactcgcagcacagcctgcctctcagaaaagcatgattgtcttgggcaacctctgcggcctggggctgccgaccagtacgtcataacaaacccagagcgggcgaagggacaaccaccctctagggacagagccgctttgagactccagtcttagaggccccaaggagccagggcagaaacgggaagcaggccgaggtgggggctttgggacaaaatgggtaattcggagcggtaggaactttttcaaagaccctggcatagggcgtcacagaatctacagccaggatttgtca

SEQ ID NO: 364397 - DNA, 511 bp, Homo sapiens
ctactcagccataagaagaatgaaataaatgtcttttgcagcaacttggaagggactggaggccattattctaagtgaactaactcaggaatggaaagccaaataaaaccacattctcactcataatagggagttaagctatgggtgcacaaatgcagacagagtagtataatggacatcggagaatcagaagtgggagagtgtgggaggaggatgagggatgagaaactacctactgaggtacaatgtgtactactcgggtgataggcacactaaaatcccagacttcaccaccatacaattcatccatttaaccraaaaccacttgtatacctaaagctatgaaattaaaaaaaaagttttcaaaaacaataaaactgtataaattttttgaaaattactttgggtttagaaaagtgaccagttcatgctctgttgcttgaactataaattaacacaaacattcttgtgaaaaattaagaaatattgatcaaaggtctttttaaaaagt

SEQ ID NO: 364398 - DNA, 511 bp, Homo sapiens
ctactcagccataagaagaatgaaataaatgtcttttgcagcaacttggaagggactggaggccattattctaagtgaactaactcaggaatggaaagccaaataaaaccacattctcactcataatagggagttaagctatgggtgcacaaatgcagacagagtagtataatggacatcggagaatcagaagtgggagagtgtgggaggaggatgagggatgagaaactacctactgaggtacaatgtgtactactcgggtgataggcacactaaaatcccagacttcaccaccatacaattcatccatttaaccgaaaaccacttgtatacctaaagctatgaaattaaaaaaaaagttttcaaaaasaataaaactgtataaattttttgaaaattactttgggtttagaaaagtgaccagttcatgctctgttgcttgaactataaattaacacaaacattcttgtgaaaaattaagaaatattgatcaaaggtctttttaaaaagt

SEQ ID NO: 364399 - DNA, 587 bp, Homo sapiens
ttcattacctccaaaaaatcacactagctccccagctataaattctcaccagattaaagtgtaatgacwtgctttatcacagacatgtgattcagaatctcaatggcaacaaagctcaatgagattaaaaagaaagttgaaatccactccaaggaagccagtataaccatccaaaagttgaaacacgacagagccatttttaaaaagaatcaaactgaacctctggagctgcaaaattcaacacaggagggaccttcaaaaccagatgagaccaagcggagggaaggattacagagctcaaagaccagtcttttgagtcagcccagtcagacaaaaataaagaaaaaaccattttaaaaatgaacaaaacatctgaggaatgtgggattttgtaaagacactaatctatgactcattggcatggctgaaagagaaggagagagaggaagcaacatggaaaacatgtctgaggatatagtccatgaaatttccccaatctcattacagaggttgatggaaaaattcaagaaattcagagaacctctacaaccatccccaagatacacagcccatcagactttccaagg

SEQ ID NO: 364400 - DNA, 587 bp, Homo sapiens
ttcattacctccaaaaaatcacactagctccccagctataaattctcaccagattaaagtgtaatgacatgctttatcacagacatgtgattcagaatctcartggcaacaaagctcaatgagattaaaaagaaagttgaaatccactccaaggaagccagtataaccatccaaaagttgaaacacgacagagccatttttaaaaagaatcaaactgaacctctggagctgcaaaattcaacacaggagggaccttcaaaaccagatgagaccaagcggagggaaggattacagagctcaaagaccagtcttttgagtcagcccagtcagacaaaaataaagaaaaaaccattttaaaaatgaacaaaacatctgaggaatgtgggattttgtaaagacactaatctatgactcattggcatggctgaaagagaaggagagagaggaagcaacatggaaaacatgtctgaggatatagtccatgaaatttccccaatctcattacagaggttgatggaaaaattcaagaaattcagagaacctctacaaccatccccaagatacacagcccatcagactttccaagg

SEQ ID NO: 364401 - DNA, 587 bp, Homo sapiens
ttcattacctccaaaaaatcacactagctccccagctataaattctcaccagattaaagtgtaatgacatgctttatcacagacatgtgattcagaatctcaatggcaacaaagctcaatgagattaaaaagaaagttgaaatccactccaaggaagccagtataaccatccaaaagttgaaacacgacagagccatttttaaaaagaatcaaactgaacytctggagctgcaaaattcaacacaggagggaccttcaaaaccagatgagaccaagcggagggaaggattacagagctcaaagaccagtcttttgagtcagcccagtcagacaaaaataaagaaaaaaccattttaaaaatgaacaaaacatctgaggaatgtgggattttgtaaagacactaatctatgactcattggcatggctgaaagagaaggagagagaggaagcaacatggaaaacatgtctgaggatatagtccatgaaatttccccaatctcattacagaggttgatggaaaaattcaagaaattcagagaacctctacaaccatccccaagatacacagcccatcagactttccaagg

SEQ ID NO: 364402 - DNA, 587 bp, Homo sapiens
ttcattacctccaaaaaatcacactagctccccagctataaattctcaccagattaaagtgtaatgacatgctttatcacagacatgtgattcagaatctcaatggcaacaaagctcaatgagattaaaaagaaagttgaaatccactccaaggaagccagtataaccatccaaaagttgaaacacgacagagccatttttaaaaagaatcaaactgaacctctggagctgcaaaattcaacacaggagggaccttcaaaaccagatgagaccaagcggagggaaggattacagagctcaaagaccagtcttttgagtcagcccagtcagacaaaaataaagaaaaaaccattttaaaaatgaacaaaacatctgaggaatgtgggattttgtaaagacactaatctatgactcattggcatggctgaaagagaaggagagagaggaagcaacatggaaaacatgtctgaggatatagtccatgaaatttccccaatctcattacagaggtygatggaaaaattcaagaaattcagagaacctctacaaccatccccaagatacacagcccatcagactttccaagg

SEQ ID NO: 364403 - DNA, 605 bp, Homo sapiens
ctgggctcccattaccaggcccaggtcccttccctgcaccactcccggggccttcagttgcatgctctgttgtccccctggcctcagtgagaagcccaggccagggccctgcccttcttcttccacaacctaccagggccagggccaaggccctcactgtccctatgccccttcctcatggctgagccccctgagccctcagagatctgctatacaactgcccagaggccaggccaggtgccctcttgccctgtggccacaaccctcagatctcaccaaggcaggccccaagggaacagggccagatcctcaggctgcccctcctctccagcttacttggagaccacagtgctgagagcccacgggcctgctctrgtcccctctctgtccctaccccctctcctgagctccctaaatgtgtcatgaggctgtgccctaaccctgaccacaggctggaccgacaggagagcctgggaggagttctgaccctggagaggaggttggcccagccagggagacatgtcctgcttcagagaggcctttctaaaaacaaaacccatccctgaggtgagattggtggctggggtcggggggacagaggactt

SEQ ID NO: 364404 - DNA, 595 bp, Homo sapiens
tatgtaaaattttccgactatagttattgatttttctttcagtcgttataccttcttgatctcacattccttttataagtttataatgtgtccagacaaggtgttgtagatttatttttcctcgttccttcctgctgattactatgaacactagaaataacaaacaagaactctgacaggtaggaaaaggaaattggactgggtagacagggaccccaggactggaggaacatcatgttagtggggcatcttataacyccaagcctagcaatagaagatggcccacgtagacttattcctccccctgtggaacaagggccccactaacaacaccaggtaagcctggagggattgattggaaaccccactaaccataagcagccagaggggatcccatcaggcctgagactctcctctcccatctagagcaacaggtggttgggcagtaccatcacaggggacctgccacagcaatcagaagcccaatcagacctgggaattcctattctcccacccgaaacacacagacacacagacacacacacacacacacacacacacacacacacacacccctagagacaccaggtggttg

SEQ ID NO: 364405 - DNA, 595 bp, Homo sapiens
tatgtaaaattttccgactatagttattgatttttctttcagtcgttataccttcttgatctcacattccttttataagtttataatgtgtccagacaaggtgttgtagatttatttttcctcgttccttcctgctgattactatgaacactagaaataacaaacaagaactctgacaggtaggaaaaggaaattggactgggtagacagggaccccaggactggaggaacatcatgttagtggggcatcttataactccaagcctagcaatagaagatggcccacgtagacttattcctccccctgtggaacaagggccccactaacaacaccaggtargcctggagggattgattggaaaccccactaaccataagcagccagaggggatcccatcaggcctgagactctcctctcccatctagagcaacaggtggttgggcagtaccatcacaggggacctgccacagcaatcagaagcccaatcagacctgggaattcctattctcccacccgaaacacacagacacacagacacacacacacacacacacacacacacacacacacacccctagagacaccaggtggttg

SEQ ID NO: 364406 - DNA, 595 bp, Homo sapiens
tatgtaaaattttccgactatagttattgatttttctttcagtcgttataccttcttgatctcacattccttttataagtttataatgtgtccagacaaggtgttgtagatttatttttcctcgttccttcctgctgattactatgaacactagaaataacaaacaagaactctgacaggtaggaaaaggaaattggactgggtagacagggaccccaggactggaggaacatcatgttagtggggcatcttataactccaagcctagcaatagaagatggcccacgtagacttattcctccccctgtggaacaagggccccactaacaacaccaggtaagcctggagggattgattggaaaccccactaaccataagcagccagaggggatcccatcaggcctgagactctcctctcccatctagagcaacaggtggwtgggcagtaccatcacaggggacctgccacagcaatcagaagcccaatcagacctgggaattcctattctcccacccgaaacacacagacacacagacacacacacacacacacacacacacacacacacacacccctagagacaccaggtggttg

SEQ ID NO: 364407 - DNA, 595 bp, Homo sapiens
tatgtaaaattttccgactatagttattgatttttctttcagtcgttataccttcttgatctcacattccttttataagtttataatgtgtccagacaaggtgttgtagatttatttttcctcgttccttcctgctgattactatgaacactagaaataacaaacaagaactctgacaggtaggaaaaggaaattggactgggtagacagggaccccaggactggaggaacatcatgttagtggggcatcttataactccaagcctagcaatagaagatggcccacgtagacttattcctccccctgtggaacaagggccccactaacaacaccaggtaagcctggagggattgattggaaaccccactaaccataagcagccagaggggatcccatcaggcctgagactctcctctcccatctagagcaacaggtggttgggcagtaccatcacaggggacctgccacagcaatcasaagcccaatcagacctgggaattcctattctcccacccgaaacacacagacacacagacacacacacacacacacacacacacacacacacacacccctagagacaccaggtggttg

SEQ ID NO: 364408 - DNA, 533 bp, Homo sapiens
ggataaaaatgtaataaatgaaattactattttaaaacaaatgaaaaataccaaatatattaaatttttrgagtatttcaaacaatatcagagttaatatcagagcttttaattatcccatatacttcgatttgtgagttctaccaacttctctttaagcttctgaagaagaaaaaaagatgaagtactcatgaattgaagggagtatagctcagtaaattaactcacattagcttggcataatggaaagcatcctagctctattaccagcagctatttattctctgacaagttgcttctcttaggctcaatgtattcttctaaaaagcaaggattttcctgccttatttcactaggttgttaaaaagatttaacaagaaaacgttttgtaaatgctcagagaaacagtgaagcaatgaaataatttgttcttgagctttattgaggaaatggttttggaatcacaaataaaacccaatgtgtattttttccagaggttctaatattcaaatgttgcagttttccaaaactgt

SEQ ID NO: 364409 - DNA, 506 bp, Homo sapiens
ttaatatcagagcttttaattatcccatatacttcratttgtgagttctaccaacttctctttaagcttctgaagaagaaaaaaagatgaagtactcatgaattgaagggagtatagctcagtaaattaactcacattagcttggcataatggaaagcatcctagctctattaccagcagctatttattctctgacaagttgcttctcttaggctcaatgtattcttctaaaaagcaaggattttcctgccttatttcactaggttgttaaaaagatttaacaagaaaacgttttgtaaatgctcagagaaacagtgaagcaatgaaataatttgttcttgagctttattgaggaaatggttttggaatcacaaataaaacccaatgtgtattttttccagaggttctaatattcaaatgttgcagttttccaaaactgttattaagttctagttttattagttctattctttgtggcttataatttggggcatcacagctagttc

SEQ ID NO: 364410 - DNA, 533 bp, Homo sapiens
ggataaaaatgtaataaatgaaattactattttaaaacaaatgaaaaataccaaatatattaaatttttggagtatttcaaacaatatcagagttaatatcagagcttttaattatcccatatacttcgatttgtgagttctaccaacttctctttaagcttctgaagaagaaaaaaagatgaagtactcatgaattgaagggagtatagctcagtaaattaactcacattagcttggcataatggaaagcrtcctagctctattaccagcagctatttattctctgacaagttgcttctcttaggctcaatgtattcttctaaaaagcaaggattttcctgccttatttcactaggttgttaaaaagatttaacaagaaaacgttttgtaaatgctcagagaaacagtgaagcaatgaaataatttgttcttgagctttattgaggaaatggttttggaatcacaaataaaacccaatgtgtattttttccagaggttctaatattcaaatgttgcagttttccaaaactgt

SEQ ID NO: 364411 - DNA, 506 bp, Homo sapiens
ttaatatcagagcttttaattatcccatatacttcgatttgtgagttctaccaacttctctttaagcttctgaagaagaaaaaaagatgaagtactcatgaattgaagggagtatagctcagtaaattaactcacattagcttggcataatggaaagcatcctagctctattaccagcagctatttattctctgacaagttgcttctcttaggctcaatgtattcttctaaaaagcaaggattttmctgccttatttcactaggttgttaaaaagatttaacaagaaaacgttttgtaaatgctcagagaaacagtgaagcaatgaaataatttgttcttgagctttattgaggaaatggttttggaatcacaaataaaacccaatgtgtattttttccagaggttctaatattcaaatgttgcagttttccaaaactgttattaagttctagttttattagttctattctttgtggcttataatttggggcatcacagctagttc

SEQ ID NO: 364412 - DNA, 485 bp, Homo sapiens
aggcacctgtaatcccagctactcgggaggctgaggcaggagaatcactagaatccaggagacggaggttgcagtgagccgagatcatgccactgcactctagcctgggtaacagagaaaagactcggtctcaaaaaaaaaaaaatgctagtgacatttgtgwatgtctcagtggcctaggctaagaggtggtgatggcggtcatgtggcttttgcacagggctgtttctcaagtcaggggctcatttgtgtacatggtgggtcagccaacttggggtttggctcactggggttggggctatgggactgttaactctgggtggggacacgaatgcattgttgcttggccagcctagagggtgcctgccagtgatggcctgtggcactgtttctcagaccctggacacaggagcacagctgcttggctgtcctgggaacatgtcttctaggcgaagcctgtggagctgttatttaggcttgcaaca

SEQ ID NO: 364413 - DNA, 485 bp, Homo sapiens
aggcacctgtaatcccagctactcgggaggctgaggcaggagaatcactagaatccaggagacggaggttgcagtgagccgagatcatgccactgcactctagcctgggtaacagagaaaagactcggtctcaaaaaaaaaaaaatgctagtgacatttgtgaatgtctcagtggcctaggctaagaggtggtgatggcggtcatgtggcttttgcacagggctgtttctcaagtcaggggctcatttgtgtacatggtgggtcagccaacttgrggtttggctcactggggttggggctatgggactgttaactctgggtggggacacgaatgcattgttgcttggccagcctagagggtgcctgccagtgatggcctgtggcactgtttctcagaccctggacacaggagcacagctgcttggctgtcctgggaacatgtcttctaggcgaagcctgtggagctgttatttaggcttgcaaca

SEQ ID NO: 364414 - DNA, 594 bp, Homo sapiens
ctgcctgcctactgcctttacatcctggcactgtgtaaccatagccaagtttcttctgggcttcagtttcctaattttacaaaagagattaataatggtacctacgttgctacaatgtgcrttaatgcacataaacggcccaaaccagtacctggtacagaataagcactcaggaaaggtcatttaatcatcagttaattattattctcaatattttctgcatatcaacattaaccaagactttatggtgctttctttctatactttgttttacgaggaaaaaaaggtatgatcaatatgtttggtcatactcccaaatcccaacttccccacaagatgcctgtcccctccctgtactcgacactgacagtcagtgggggctaaggtagagttaggaactcctaagttccaggacttccagaaatcagagggcctgagggcaggatattataggaaagtcaaacagactagagatagactatggaagtcccttctaatctggggcatccctttgtatctccttaagagaaagcactttttaagagaaaactgaaagagagccaaggagcagtctctaattctgccagaaatgag

SEQ ID NO: 364415 - DNA, 584 bp, Homo sapiens
aacttgcatattttttgacctctcctttcagaattgtgatataaatgagttcagtgatacatgtacaagtgcttggtacaaggccaggtgcagcggctcacgcctgtaatcccagcactttgggaggccgaggtgggtggatcacttgagcccaggagttccagaccagcctgggcagcatggcgaaaccccatctctacaaaaagtacaaatamatttagctgcgtgtgggggtgtgtgcctctagttcagctacccaggaggctgaagtgggaggatcacctgagcccaggaggccaaggctacagtgagtcttgattgcgtcactgccctctaacctgagtgatggagtggagaccctatctcgaaaaaaaaaaaaaaagcctaatataatgcttagatttagcatttatgaataaatgtaattcttatataactgatgataaaaatgttagaaaaataaatagctatagaatattctcaggaaaaaaagaacttcaagaacgttggaacatttcctctgtccagatatatgcaaagctacagcttttactatagggtggtgtataggttagatgtcagag

SEQ ID NO: 364416 - DNA, 584 bp, Homo sapiens
aacttgcatattttttgacctctcctttcagaattgtgatataaatgagttcagtgatacatgtacaagtgcttggtacaaggccaggtgcagcggctcacgcctgtaatcccagcactttgggaggccgaggtgggtggatcacttgagcccaggagttccagaccagcctgggcagcatggcgaaaccccatctctacaaaaagtacaaataaatttagctgcgtgtgggggtgtgtgcctctagttcagctacccaggaggcygaagtgggaggatcacctgagcccaggaggccaaggctacagtgagtcttgattgcgtcactgccctctaacctgagtgatggagtggagaccctatctcgaaaaaaaaaaaaaaagcctaatataatgcttagatttagcatttatgaataaatgtaattcttatataactgatgataaaaatgttagaaaaataaatagctatagaatattctcaggaaaaaaagaacttcaagaacgttggaacatttcctctgtccagatatatgcaaagctacagcttttactatagggtggtgtataggttagatgtcagag

SEQ ID NO: 364417 - DNA, 584 bp, Homo sapiens
aacttgcatattttttgacctctcctttcagaattgtgatataaatgagttcagtgatacatgtacaagtgcttggtacaaggccaggtgcagcggctcacgcctgtaatcccagcactttgggaggccgaggtgggtggatcacttgagcccaggagttccagaccagcctgggcagcatggcgaaaccccatctctacaaaaagtacaaataaatttagctgcgtgtgggggtgtgtgcctctagttcagctacccaggaggctgaagtgggaggatcacctgagcccrggaggccaaggctacagtgagtcttgattgcgtcactgccctctaacctgagtgatggagtggagaccctatctcgaaaaaaaaaaaaaaagcctaatataatgcttagatttagcatttatgaataaatgtaattcttatataactgatgataaaaatgttagaaaaataaatagctatagaatattctcaggaaaaaaagaacttcaagaacgttggaacatttcctctgtccagatatatgcaaagctacagcttttactatagggtggtgtataggttagatgtcagag

SEQ ID NO: 364418 - DNA, 584 bp, Homo sapiens
aacttgcatattttttgacctctcctttcagaattgtgatataaatgagttcagtgatacatgtacaagtgcttggtacaaggccaggtgcagcggctcacgcctgtaatcccagcactttgggaggccgaggtgggtggatcacttgagcccaggagttccagaccagcctgggcagcatggcgaaaccccatctctacaaaaagtacaaataaatttagctgcgtgtgggggtgtgtgcctctagttcagctacccaggaggctgaagtgggaggatcacctgagcccaggaggccaaggctacagtgagtcttgattgcgtcactgccctctaacctgagtgatggagtggagaccctatctcgaaaaaaaaaaaaaaagcctaatataatgcttagatttagcatttatgaataaatgtaattcttatataactgatgakaaaaatgttagaaaaataaatagctatagaatattctcaggaaaaaaagaacttcaagaacgttggaacatttcctctgtccagatatatgcaaagctacagcttttactatagggtggtgtataggttagatgtcagag

SEQ ID NO: 364419 - DNA, 578 bp, Homo sapiens
catgttagttgtaggtttatcagagatgctctttatcatgctgatggygttcccttgtattctttggttactgagagggatttttttttttttaaatcaggaatgaatgttgtattttatcaaatgcctctatctactgagatgatcatatggttcttctcttttagttttttaatgtggtgaatacttatattttactgtcaaacaaaccgtgtatttagggataaaccccacttgtttatgatgtattatccttctaatgtatcattggatttgatttgccaaagctttatttagagcgttttaaaagactattttttagagtagtttagcttcacagcaaaattgaaagtaaggcacagagattatccctgtactccctgcccccacacgtgcatagcctccacaattatcaatatcctcaccagagtgctacacttgatctcattgatgttcctgaattgataatcataatcacccaaagtccatagtttatattagggttcagtctcggtgtcttatattctgtgaatttggacaaaagtataaggacatgtatttatcactgtagtattatc

SEQ ID NO: 364420 - DNA, 578 bp, Homo sapiens
catgttagttgtaggtttatcagagatgctctttatcatgctgatggcgttcccttgtattctttggttactgagagggatttttttttttttaaatcaggaatgaatgttgtattttatcaaatgcctctatctactgagatgatcatatggttcttctcttttagttttttaatgtggtgaatacttatattttactgtcaaacaaaccgtgtatttagggataaaccccacttgtttatgatgtattatccttctaatgtatcattggatttgatttgccaaagctttatttagagcgttttaaaagactattttttagagtagtttagcttcacagcaaaattgaaagtaaggcacagagattatccctgtactccctgcccccacacgtgcatagcctccacaattatcaatatcctcaccagagtgctacacttgayctcattgatgttcctgaattgataatcataatcacccaaagtccatagtttatattagggttcagtctcggtgtcttatattctgtgaatttggacaaaagtataaggacatgtatttatcactgtagtattatc

SEQ ID NO: 364421 - DNA, 578 bp, Homo sapiens
catgttagttgtaggtttatcagagatgctctttatcatgctgatggcgttcccttgtattctttggttactgagagggatttttttttttttaaatcaggaatgaatgttgtattttatcaaatgcctctatctactgagatgatcatatggttcttctcttttagttttttaatgtggtgaatacttatattttactgtcaaacaaaccgtgtatttagggataaaccccacttgtttatgatgtattatccttctaatgtatcattggatttgatttgccaaagctttatttagagcgttttaaaagactattttttagagtagtttagcttcacagcaaaattgaaagtaaggcacagagattatccctgtactccctgcccccacacgtgcatagcctccacaattatcaatatcctcaccagagtgctacacttgatctcattgatgttcctgaattgataatcataatcayccaaagtccatagtttatattagggttcagtctcggtgtcttatattctgtgaatttggacaaaagtataaggacatgtatttatcactgtagtattatc

SEQ ID NO: 364422 - DNA, 578 bp, Homo sapiens
gagggacaactgggaatatgattgcccagcttcctagaaaagagtggactaacgatcaagaaaccaagagcaggctagggaataagccttgctgattcctgaaccctcaaagccccccttaccatatctcttcacctcctgaacaaacttgcctgctaggtattcacagcttcctttttctcttagaaagagccccattctactcagcaytagctacttcagccctgggctgaagtttgcgacttcctactgaaaagaaacaagaagcacctggccaccaaggagcaaacaggcgctgtcctgtgcacccgtctcagaaccacccacctatgtccagtggtccctgaaatggctctctgaagggaaggctccacaccaagagataaaaacccagactttgggccccataaagaacttccccttatttgggaggcaacctctagtaccctgtagtactctttccgtgttgattttttctgcactccttcccctgtcccaaagtctattgagaaggggacacaggaacttttgaagcactttgaactgcacagaaatacacgtgtgaagaagcagtaact

SEQ ID NO: 364423 - DNA, 596 bp, Homo sapiens
gtcactttttatgtatgcagattcctgggcttcatcctagacctatcacttctgaatccctgggagccagggcctaggagccttcaggtgtgacaagccctccaagagaacagatgcgcatgaaagtatttatggccctctggggcctcaagctctggagagctttgcctcaatcgggagagtcctagtcactgcttagcagagtttggctctactccctgccccgcccacccctgctcagtcccaggcccagtccccyattatctcacactagaaccagtggccttgctctctgcctgccaatctggagatcttgatctgaagtgtcaacctggccctgatacttcctgactataaattctgcaggggtttcccattccctgcaggatcaagtctgacaaagtattcaaagccactctcttcagcctcagatctcctgccactccctctcctagttgggaacactccaactaggcttatattatgctgaggtctctgaatgttccctgaggctacatgtctctgagcttctgtaggcacagtaccctccaccagaatgacctttcccctcttctactactcttccagtctcagcc

SEQ ID NO: 364424 - DNA, 596 bp, Homo sapiens
gtcactttttatgtatgcagattcctgggcttcatcctagacctatcacttctgaatccctgggagccagggcctaggagccttcaggtgtgacaagccctccaagagaacagatgcgcatgaaagtatttatggccctctggggcctcaagctctggagagctttgcctcaatcgggagagtcctagtcactgcttagcagagtttggctctactccctgccccgcccacccctgctcagtcccaggcccagtcccctattatctcacactagaaccagtggccttgctctctgcctgccaatctggagatcttgatctgaagtgtcaacctggccctgatacttcctgactataaattctgcaggggtttcccattccctgcaggatcaagtctgacaaagyattcaaagccactctcttcagcctcagatctcctgccactccctctcctagttgggaacactccaactaggcttatattatgctgaggtctctgaatgttccctgaggctacatgtctctgagcttctgtaggcacagtaccctccaccagaatgacctttcccctcttctactactcttccagtctcagcc

SEQ ID NO: 364425 - DNA, 567 bp, Homo sapiens
tcctaggagttctttcattaaatgccccaatcccagctcctcctcccatggtccatggaacacagaaggctgggactcagcggccgcacaagcctgaagccccaccccttagctggcctgaaaacttcagtcagtgaccatgcggggcactagaacctcctgccaccaatcaacaggaagcaaggagagatgcccgggtatcctcagagagggaggggccatgcagaggggctggcagattttctcggtgtggggaatgagggatagggcacaggaagggacsttctcaagggtctagggtcatgtttcaggaggaagataagcaccaagccaagttctaccaggtatatgcctggctcctgcacctcccatggtccttcccattcagccgggcttcctgtctcctggcctttctataggtgctcaaagcatcctgtgattctctttatcatggcttataattctctgcttgccaagtggtttgattaatgtctgtgtcccctataaaccatgactctacacggtggcattctaaggatggcagaatccccagaatcctatacttgt

SEQ ID NO: 364426 - DNA, 573 bp, Homo sapiens
caatgtctctaaaaggaaaggaaacaattcctttatataaatgcacaaacaatggctaagtaccaaactacgtaccaagcattcaagtgagggcaacataaaacaacctctgtgcctcctaccattactaccagcaacacacacctagtgaagtcacccagccctgcccccatctctgagatgagaccagaccagtccattcatttggcacaacatatgtyagtttgaataccttctaacatgcaaccaaatttcagggaaaataggggatatttagtgagctcaaaaactccaacttcccaaatggatatgggaggctccaatcagccaacacagttccaataaggagagtagctgtcttctctctcaatgcctaaacaacaccgcttccaggcgctttttcactaacagtcctgatgatcagccaggttgaaggctacagtcttttagagaccccatggaggaagatgctgtctttactctcagatcaggaccagtgattctgaacctatttgggctgtggctcctcttgagagtttttatgaaaactatggctcctcttctcagaaaaat

SEQ ID NO: 364427 - DNA, 597 bp, Homo sapiens
aaggttggcattcctatttaggtgcttctttgtttcatgtaagaatagcttatcttcctgcgctagttatactgtttgcccccagactcccacccatcarattcactctttgcccttccctgtcctgcctggaaccctgtacattgacctctgtgggttccctcatcctctggcttctgactgtggttcattcagcagaagcttggcatgggggtaggaggaagagcagaaaggagagactagattgtttcttcccccttctttctccctactttagtgccacattcttgcaggagctgcctgacggccccttcgatgtggctccagtacttactgggatctggtgacacttcttcttcacctcacccctgtatgtcgagggaagggaatgttttaccactcttgcaggcccctgggtgtctctactgagtcttgtttcccttaacttggcccacatctttgtagatagtccctttaataagttattttcagtaaactgttttgaatagaatagtatttcctgcttgggactctgcctgatacattttgcctctagtggttttcaattttcttaatggctggaagatgtacttccaa

SEQ ID NO: 364428 - DNA, 411 bp, Homo sapiens
gaactcactctaacacgtagaatacagcaatttgacttaataattagcctttaaatttatagtcttgtattatcactttagtggtttgaattattttgtattttaatatatttaaatgaattagtcctatacaaattgactaatttgacatgtggaggtgtttttattcaattttcagaagtttagctttaaaaaaatttctaaacttcgatatctggtgagtgccagtgtttttatcttattaaaaggtgacagaccacactatattcaactgattttttttttaacaagratgcaaaatcagcttaaaggaaggatatctttttcaacaaatggtgctagagcaattggacattcacaggtacaaaaactaagactgacctaaatttatactttatataaaatttagct

SEQ ID NO: 364429 - DNA, 471 bp, Homo sapiens
tcctatacaaattgactaatttgacatgtggaggtgtttttattcaattttcagaagtttagctttaaaaaaatttctaaacttcgatatctggtgagtgccagtgtttttatcttattaaaaggtgacagaccacactatattcaactgattttttttttaacaagaatgcaaaatcagcttaaaggaaggatatctttttcaacaaatggtgctagagcaattggacattcacaggtacaaaaactaagactgacctaaatttatactttatayaaaatttagctcacataaatcacaggcttaaatgtaaaatgtaatattataaaacttaaagttgtgtatggtagctcgtgcctgtaatcccagctactactcaagtggctgaggtggaaggatcacttcaatccagcagttagtggctgcagtgagcaatgatggcaccactgcactacagcttgggtgaaacct

SEQ ID NO: 364430 - DNA, 501 bp, Homo sapiens
ttagtggggatgtttctattgaaaacacagagttaggaagtcataaaatgttcttgcaatataaggtaataataccacyggcgtttatcttatgttttcatgttctaagtgcatgcatctgagtaaaaggatctgggctgcagtccagtctgagagatgccagcaaaggcttcctaggccaattcagtccagtaaatccctcttcaatcttctctcccacacagacagcagtgatgagcatgcccgtgaactcacatgattattttggggaaaatgaaagagttgtattctttttgaggtagtaattccactttcaggggcaaatacattttgattattttatcacccttcagtgagttgtttttgttctttaatcaaggatgtatgtttgaagtaagaagtaaagcataaagtatacgattttgtgtgtgtgtgtgtgtttatcttgctatacctgtagggaatgtttaattctgccttggaagtggccaaatttgaaga

SEQ ID NO: 364431 - DNA, 501 bp, Homo sapiens
ttagtggggatgtttctattgaaaacacagagttaggaagtcataaaatgttcttgcaatataaggtaataataccaccggcgtttatcttatgttttcatgttctaagtgcatgcatctgagtaaaaggatctgggctgcagtccagtctgagagatgccagcaaaggcttcctaggccaattcagtccagtaaatccctcttcaatcttctctyccacacagacagcagtgatgagcatgcccgtgaactcacatgattattttggggaaaatgaaagagttgtattctttttgaggtagtaattccactttcaggggcaaatacattttgattattttatcacccttcagtgagttgtttttgttctttaatcaaggatgtatgtttgaagtaagaagtaaagcataaagtatacgattttgtgtgtgtgtgtgtgtttatcttgctatacctgtagggaatgtttaattctgccttggaagtggccaaatttgaaga

SEQ ID NO: 364432 - DNA, 586 bp, Homo sapiens
agtggtaaacagctatttaggaattgaggctgttactcctgacttccatgtgagactgccacggaactcatattgaaaatatgtcattttatccactaggttttgtttcctactttttaaattggtgttaagaaagggaaaaaaatcacaagtttgtctaactcagtagaaaaaccgacaaagcatttgcagacaacttggcaagggtacagagaaacggatgtactgttttacagtatttggggagggtggtttgagcagcatttattgacaatttcattagtggggatgtttctattgaaaacacagagttaggaagtcataaaatgttcttgcaatataaggtaataataccaccggcgtttatcttatgttttcatgttctaagtgcatgcatctgagtaaaaggatctgggctgcagtccagtctgagagatgccagcaaaggcttcctaggccaattcagtccagtaaatccctcttcaatcttctctcccacacagacagcagtgatgagcatgcycgtgaactcacatgattattttggggaaaatgaaagagttgtattctttttgaggtagtaatt

SEQ ID NO: 364433 - DNA, 501 bp, Homo sapiens
ttagtggggatgtttctattgaaaacacagagttaggaagtcataaaatgttcttgcaatataaggtaataataccaccggcgtttatcttatgttttcatgttctaagtgcatgcatctgagtaaaaggatctgggctgcagtccagtctgagagatgccagcaaaggcttcctaggccaattcagtccagtaaatccctcttcaatcttctctcccacacagacagcagtgatgagcatgcccrtgaactcacatgattattttggggaaaatgaaagagttgtattctttttgaggtagtaattccactttcaggggcaaatacattttgattattttatcacccttcagtgagttgtttttgttctttaatcaaggatgtatgtttgaagtaagaagtaaagcataaagtatacgattttgtgtgtgtgtgtgtgtttatcttgctatacctgtagggaatgtttaattctgccttggaagtggccaaatttgaaga

SEQ ID NO: 364434 - DNA, 483 bp, Homo sapiens
agtttccttagcgagctttcccttcaaatactttgcagccaggtagagaagtttggagtgaaggttttgttctttgtttctttgcagtatggatatgaatcttcttttgaaaatgttaaagtaaattacctcttttcagatattgtcttcatgcgaacttggtatcctgtttccatcccagccttctataacccagtaacatctttgttgaaaccagtgggtgagaaagacacctggtcaggaatgtggaccacgggccacctcgggctcgcccatggtgtcagactaaagacaaacaaggactctctgtataaggtactggtcgtgtgtgtgttagtggagatgaagcctgtgccctacagacagggagtcacrcagacacttttctataatttcttacgtactttgaatgttcaagtataaagtctaatgttaaatttgattgaacaattgtatatttgtgggatattttggaatggaaca

SEQ ID NO: 364435 - DNA, 562 bp, Homo sapiens
taccatctcacatagttagatttttgtttgtgtgacaggaacagctaaaatctacttatttaacaaaaatcccaaagacaatatatttttattaactatagccctcatgatgtacactagatctctaacttgttcatcctacatgtctgctactttgtattattttaatgtacatctccccatttcctaytggtcatttcctatttggcccatttttcaactgggttgtttttctgctattaagttgtaagagttctttactgatttttggatattaacactttatcagatatgtggtttgcaaatatttcttccagtctataggttcccctttcattttgttggttgttcctttgctgtgcagaagctttttagtttgatgcagtcctccttgtttatgtttacatttgtagcctggcttgtggtgcgatatccaaaaaattattgctaaggccaatgtcaagaggctttccccctatgttttcttctaggagttttatggtttcaggtcttatttgggtctttggtcttgtatctgttttgagttgatttttgtgtatgg

SEQ ID NO: 364436 - DNA, 562 bp, Homo sapiens
taccatctcacatagttagatttttgtttgtgtgacaggaacagctaaaatctacttatttaacaaaaatcccaaagacaatatatttttattaactatagccctcatgatgtacactagatctctaacttgttcatcctacatgtctgctactttgtattattttaatgtacatctccccatttcctactggtcatttcctatttggcccatttttcaactgggttgtttttctgctattaagttgtaagagttctttactgatttttggatattaacactttatcagatatgtggtttgcaaatatttcttccagtctrtaggttcccctttcattttgttggttgttcctttgctgtgcagaagctttttagtttgatgcagtcctccttgtttatgtttacatttgtagcctggcttgtggtgcgatatccaaaaaattattgctaaggccaatgtcaagaggctttccccctatgttttcttctaggagttttatggtttcaggtcttatttgggtctttggtcttgtatctgttttgagttgatttttgtgtatgg

SEQ ID NO: 364437 - DNA, 467 bp, Homo sapiens
ctcccgaagtggtccaggtccaggagggcacgttgcagcagcagctggtccatgggggtggggcacaatgtcagttccttctctgaggggagtgctggggctactgggcccctcttgcttccttatccctgcagggagacatcccctctgcttcaggctgatccctctgggggaatgggtggtgggggccagatgtttccttccctcctttatgtgactgtcctgttttccgggctctactggatttctgctactccttgatgcactctggggctctcctttagtgactttcatcaaaatatagctgtttgctgctttggctgtctttgtcaggggatgagtgcaaggggytattgatcagccccttgctggcatcactccctcttaaacttttcactggatactcttttgaactattttttcccccaccatatacatgtattttttaaacgttaatgtgctaattt

SEQ ID NO: 364438 - DNA, 467 bp, Homo sapiens
ctcccgaagtggtccaggtccaggagggcacgttgcagcagcagctggtccatgggggtggggcacaatgtcagttccttctctgaggggagtgctggggctactgggcccctcttgcttccttatccctgcagggagacatcccctctgcttcaggctgatccctctgggggaatgggtggtgggggccagatgtttccttccctcctttatgtgactgtcctgttttccgggctctactggatttctgctactccttgatgcactctggggctctcctttagtgactttcatcaaaatatagctgtttgctgctttggctgtctttgtcaggggatgagtgcaaggggttattgatcagcccctwgctggcatcactccctcttaaacttttcactggatactcttttgaactattttttcccccaccatatacatgtattttttaaacgttaatgtgctaattt

SEQ ID NO: 364439 - DNA, 491 bp, Homo sapiens
taaacgttaatgtgctaatttctactgaagcaatgtggatttttctgaaagttttaatgttttaataagctttttattgaaatgttaatgtacatacagaagagtgcccgaatcataagtgtgcatctagatgaactgtagcacaccaggctgccacgccctggaccaagcagtagccttgacctgtggcctctcccaggcactgctgccccaaccyacaaaatagctactttcccagttcctgatgtagatttgttctgcctggttttgacttctataaaatacagcacattctatttagcctggcttctttggttcagtattacagaacacatccatgttcttgtctatggcagacattgatttatcgtcattgttgagttccattatatgactgtgtcaccatttttccattgatgagtaaaatgatttcctatttttggctgttatcccacggccctgaacactaggtctggatatgggacttgcag

SEQ ID NO: 364440 - DNA, 453 bp, Homo sapiens
agaatgcttctgtctagttttcaggggaagatatttcctttttcaccataggcctgaaagcgctccaaatgtccacatccagatactacaaaaagagtgtttcaaacctgctctatgaaagggaatgttcaactctgtgacttgaatgcaaacatcacaaagaagtttctgggaatgctgctgtctgctttttatatgtaatcccgtttccaacgaaatcctcaaagctagacaaatatccacttgcagattccacaaaaagagtgtttcaaaactgctctctcaaaagaaaggttcaactctgttagctgagtagatacatcatgaaaaagtttctgacattgcttctatctagcttttattggaagatatttcctttttcaccgtagtcctgagagcgctcaaaatgtccacttccagatactaccaaawgagtgtttccaacctgctcta

SEQ ID NO: 364441 - DNA, 193 bp, Homo sapiens
cggaatcgaatataccatgcttctgtgatgacagttatttcatgctggttgtcacaattttacatgaaaaactaatgaaaaaatgtttttaactgtttctgaaaataagtttccaaaacagttttacattcraaataggagaaagatgtctttgtgttccttaatctgatgagattttcacactctgcacatg

SEQ ID NO: 364442 - DNA, 193 bp, Homo sapiens
cggaatcgaatataccatgcttctgtgatgacagttatttcatgctggttgtcacaattttacatgaaaaactaatgaaaaaatgtttttaactgtttctgaaaataagtttccaaaacagttttacattcaaaatakgagaaagatgtctttgtgttccttaatctgatgagattttcacactctgcacatg

SEQ ID NO: 364443 - DNA, 394 bp, Homo sapiens
tccttcccccagtgttgtagtgagcaaggaatatatttaacttcaaataaaagacaaaaacaaatgctggataaagctgacagaaagaaatgcaactgtaggtgctctggcaatatagaaatgatacaactaagaaaaatggaagaaaaggraagagaaagtattcctcagaatgattttactgactgctcatctgtaatgcctgggagtcaaaggatattgtttatagaaatgtaagcatacttaatggcaccaggggaaacaaagttaatatgattaaatcaaattgtgggatgaaaaatcacatagggaggacaagaaagagaatacagctaataccattgttcttagtttagagacattagctactgtccaaagaaagagatgattttat

SEQ ID NO: 364444 - DNA, 394 bp, Homo sapiens
tccttcccccagtgttgtagtgagcaaggaatatatttaacttcaaataaaagacaaaaacaaatgctggataaagctgacagaaagaaatgcaactgtaggtgctctggcaatatagaaatgatacaactaagaaaaatggaagaaaaggaaagagaaagtattcctcagaatgattttactgactgctcatctgtaatgcctgggagycaaaggatattgtttatagaaatgtaagcatacttaatggcaccaggggaaacaaagttaatatgattaaatcaaattgtgggatgaaaaatcacatagggaggacaagaaagagaatacagctaataccattgttcttagtttagagacattagctactgtccaaagaaagagatgattttat

SEQ ID NO: 364445 - DNA, 394 bp, Homo sapiens
tccttcccccagtgttgtagtgagcaaggaatatatttaacttcaaataaaagacaaaaacaaatgctggataaagctgacagaaagaaatgcaactgtaggtgctctggcaatatagaaatgatacaactaagaaaaatggaagaaaaggaaagagaaagtattcctcagaatgattttactgactgctcatctgtaatgcctgggagtcaaaggatattgtttatagaaatgtaagcatacttaatggcaccaggggaaacaaagttaatatgattaaatcaaaytgtgggatgaaaaatcacatagggaggacaagaaagagaatacagctaataccattgttcttagtttagagacattagctactgtccaaagaaagagatgattttat

SEQ ID NO: 364446 - DNA, 476 bp, Homo sapiens
aacctagcacttagtagatactcaaaaattatttgctgaataaaaaagggttaaacatgtaatatacacaaaatgtactggaaaaaatgcaccaaataattttgttataccagtttaatgtaaatattgcctttaaaagataatatagttttcaggtgtctacagtgattttgtaatatttgtgcacatataaaataatatttccaaaaatgtaatccagtggggaaatatactttctaaattctagatttataatttagggtttaaattataaaatcattaaataagacacaagtgaaatatagtcaaatatccccttggaaaaaaattaagtggcctctaaagtgaggtattmatatatgtaattttacaatcccctagtgatagaattaattaaatatgccaccaaattgattaattcctacagtgttaaaagagaagcactaacaatgccagtgaccatgtaacatggattt

SEQ ID NO: 364447 - DNA, 476 bp, Homo sapiens
aacctagcacttagtagatactcaaaaattatttgctgaataaaaaagggttaaacatgtaatatacacaaaatgtactggaaaaaatgcaccaaataattttgttataccagtttaatgtaaatattgcctttaaaagataatatagttttcaggtgtctacagtgattttgtaatatttgtgcacatataaaataatatttccaaaaatgtaatccagtggggaaatatactttctaaattctagatttataatttagggtttaaattataaaatcattaaataagacacaagtgaaatatagtcaaatatccccttggaaaaaaattaagtggcctctaaagtgaggtattcatatatgtaattttacaatccmctagtgatagaattaattaaatatgccaccaaattgattaattcctacagtgttaaaagagaagcactaacaatgccagtgaccatgtaacatggattt

SEQ ID NO: 364448 - DNA, 476 bp, Homo sapiens
aacctagcacttagtagatactcaaaaattatttgctgaataaaaaagggttaaacatgtaatatacacaaaatgtactggaaaaaatgcaccaaataattttgttataccagtttaatgtaaatattgcctttaaaagataatatagttttcaggtgtctacagtgattttgtaatatttgtgcacatataaaataatatttccaaaaatgtaatccagtggggaaatatactttctaaattctagatttataatttagggtttaaattataaaatcattaaataagacacaagtgaaatatagtcaaatatccccttggaaaaaaattaagtggcctctaaagtgaggtattcatatatgtaattttacaatcccctagtgatagaaktaattaaatatgccaccaaattgattaattcctacagtgttaaaagagaagcactaacaatgccagtgaccatgtaacatggattt

SEQ ID NO: 364449 - DNA, 476 bp, Homo sapiens
aacctagcacttagtagatactcaaaaattatttgctgaataaaaaagggttaaacatgtaatatacacaaaatgtactggaaaaaatgcaccaaataattttgttataccagtttaatgtaaatattgcctttaaaagataatatagttttcaggtgtctacagtgattttgtaatatttgtgcacatataaaataatatttccaaaaatgtaatccagtggggaaatatactttctaaattctagatttataatttagggtttaaattataaaatcattaaataagacacaagtgaaatatagtcaaatatccccttggaaaaaaattaagtggcctctaaagtgaggtattcatatatgtaattttacaatcccctagtgatagaattaattaaatatgccaccaaattgattaaytcctacagtgttaaaagagaagcactaacaatgccagtgaccatgtaacatggattt

SEQ ID NO: 364450 - DNA, 430 bp, Homo sapiens
ggaggggtatgtctctgtgcactggaagagagggaggactaaatcactgggaagtcttatgataaagaagccattggcttaaatcagcaaagcaagccrtcccttggtttaaggtgtttttcctggccatcctgtcttgactagaactttacctacaccttcctttttggtttaggcaaattatagtatctaaacctgaagtctcagctctgtgtctttgagatataaatgttctaccatgtcttctctggaacctgataactatctatctctttaaaatggaagtctagggagatgactcatcagaaaaagaagaaaaaagaggtatttggaaattgtgcaaattaaagcagcccctgatgccaaagtctacacattcctgagtgagtcagttctggccagttctagctgggtcaagagagctctgctg

SEQ ID NO: 364451 - DNA, 430 bp, Homo sapiens
ggaggggtatgtctctgtgcactggaagagagggaggactaaatcactgggaagtcttatgataaagaagccattggcttaaatcagcaaagcaagccatcccttggtttaaggtgtttttcctggccatcctgtcttgactagaactttacctacaccttcctttttggtttaggcaaattatagtatctaaamctgaagtctcagctctgtgtctttgagatataaatgttctaccatgtcttctctggaacctgataactatctatctctttaaaatggaagtctagggagatgactcatcagaaaaagaagaaaaaagaggtatttggaaattgtgcaaattaaagcagcccctgatgccaaagtctacacattcctgagtgagtcagttctggccagttctagctgggtcaagagagctctgctg

SEQ ID NO: 364452 - DNA, 430 bp, Homo sapiens
ggaggggtatgtctctgtgcactggaagagagggaggactaaatcactgggaagtcttatgataaagaagccattggcttaaatcagcaaagcaagccatcccttggtttaaggtgtttttcctggccatcctgtcttgactagaactttacctacaccttcctttttggtttaggcaaattatagtatctaaacctgaagtctcagctctgtgtctttgagatataaatgttctaccatgtcttctctggaacctgataactatctatctctttaaaatgsaagtctagggagatgactcatcagaaaaagaagaaaaaagaggtatttggaaattgtgcaaattaaagcagcccctgatgccaaagtctacacattcctgagtgagtcagttctggccagttctagctgggtcaagagagctctgctg

SEQ ID NO: 364453 - DNA, 430 bp, Homo sapiens
ggaggggtatgtctctgtgcactggaagagagggaggactaaatcactgggaagtcttatgataaagaagccattggcttaaatcagcaaagcaagccatcccttggtttaaggtgtttttcctggccatcctgtcttgactagaactttacctacaccttcctttttggtttaggcaaattatagtatctaaacctgaagtctcagctctgtgtctttgagatataaatgttctaccatgtcttctctggaacctgataactatctatctctttaaaatggaagtctagggagatgactcatcagaaaaagaagaaaaaagaggtatttggaaattgtgcaaattaaagmagcccctgatgccaaagtctacacattcctgagtgagtcagttctggccagttctagctgggtcaagagagctctgctg

SEQ ID NO: 364454 - DNA, 541 bp, Homo sapiens
gtctcgaactcctgacctcaagtgagccacccgcttctgcctcccaaagtactgggattacwggcgtgagtcactgtgcccggccaagattctgttttgatagaacacttgtgtctctctcaccttgtatttagaaaagttagaaagtaaaggataatgtatatagaaagctttttgaagactcttaagaagttcataaatatggggcactgtgactatgcatatgaaaatatttcctatcagttggcagttaccacctcttatagtggcatggaacctcttgagttaaaccaaggctcagtgagatttggtgatttaggtagtgtcattttatgaacaagggggaccctactcaggtcttttattttattatacttctctttgacattcactccagttaaagaactctttcaaaagacctcatgcctggtctcacggagattcaaaggtgtttgagtccttccttattatgcccttggaagatgctttgaggaccccagtgatgaatcccaagaactctgtctccattatccctggtata

SEQ ID NO: 364455 - DNA, 541 bp, Homo sapiens
gtctcgaactcctgacctcaagtgagccacccgcttctgcctcccaaagtactgggattactggcgtgagtcactgtgcccggccaagattctgttttgatagaacacttgtgtctctctcaccttgtatttagaaaagttagaaagtaaaggataaygtatatagaaagctttttgaagactcttaagaagttcataaatatggggcactgtgactatgcatatgaaaatatttcctatcagttggcagttaccacctcttatagtggcatggaacctcttgagttaaaccaaggctcagtgagatttggtgatttaggtagtgtcattttatgaacaagggggaccctactcaggtcttttattttattatacttctctttgacattcactccagttaaagaactctttcaaaagacctcatgcctggtctcacggagattcaaaggtgtttgagtccttccttattatgcccttggaagatgctttgaggaccccagtgatgaatcccaagaactctgtctccattatccctggtata

SEQ ID NO: 364456 - DNA, 541 bp, Homo sapiens
gtctcgaactcctgacctcaagtgagccacccgcttctgcctcccaaagtactgggattactggcgtgagtcactgtgcccggccaagattctgttttgatagaacacttgtgtctctctcaccttgtatttagaaaagttagaaagtaaaggataatgtatatagaaagctttttgaagactcttaagaagttcataaatatggggcactrtgactatgcatatgaaaatatttcctatcagttggcagttaccacctcttatagtggcatggaacctcttgagttaaaccaaggctcagtgagatttggtgatttaggtagtgtcattttatgaacaagggggaccctactcaggtcttttattttattatacttctctttgacattcactccagttaaagaactctttcaaaagacctcatgcctggtctcacggagattcaaaggtgtttgagtccttccttattatgcccttggaagatgctttgaggaccccagtgatgaatcccaagaactctgtctccattatccctggtata

SEQ ID NO: 364457 - DNA, 496 bp, Homo sapiens
tatactgtaatcaaaatataaccaaacacaacttatcattaaaagtaagtggacttgactcttattagaggaaaaaatattgtcagattaaatcgaaaagcaaatcttaattctatgctggatataagataaagtgttacagaaagtttagaaataaaagtataggcaatgaataaaaggatcttctcttcatgcgttaggagtataaaacagtacgtaaacacatcatacgttttctgtttttacacttaaatggctggagatgttacaccactagtatgaatttacttcagatatataaaggatacactttcatgtggttagaaacaacaatgataacagttaaggtgaaaataacatctgcattgacgctaggaagaaagagccattgttgggtacayagtgatcacattaccatggagcaatctgttcccaactgaaatgtccttgcccttctactgaaatcatgtaagattctgcaaaagtagtgtttact

SEQ ID NO: 364458 - DNA, 617 bp, Homo sapiens
aaattcaggtatgctagtctttttgagtattgcttaaagccatgggaaaagagctctctgtgagttccaagacagatgcaaggactggcattcatgcacagcttctaacagataaatctgaagagttcttagtatgcatgttgactgaaattactttagaagtaatttttctcctggtgataaaaggcatgtaaggctattttaggaaattgaaaaatgcaaaaaggtataaagaaaaagaaaagataatcattaatagtacrttagtaaacaagatttgactaaagatatgactttcctcccgcttgttttcttatgcatataaagggataggaaatatgtatgtgtgtatgtgtgtgtataggatcatgcactatatatagcttgcttctttttccgttatgataattttcccatgtcatgaattacggcttgcaagtgcttattcttaaagggctgcattatttttcattatttggatttattatttaattggagctctattattgaacatttagattgcttccaaaattttttgctcttgttaatatattgtaataaacttctgtgaaacacatactcttcacctgctacttacatatgacttctgtaagcag

SEQ ID NO: 364459 - DNA, 617 bp, Homo sapiens
aaattcaggtatgctagtctttttgagtattgcttaaagccatgggaaaagagctctctgtgagttccaagacagatgcaaggactggcattcatgcacagcttctaacagataaatctgaagagttcttagtatgcatgttgactgaaattactttagaagtaatttttctcctggtgataaaaggcatgtaaggctattttaggaaattgaaaaatgcaaaaaggtataaagaaaaagaaaagataatcattaatagtacattagtaaacaagayttgactaaagatatgactttcctcccgcttgttttcttatgcatataaagggataggaaatatgtatgtgtgtatgtgtgtgtataggatcatgcactatatatagcttgcttctttttccgttatgataattttcccatgtcatgaattacggcttgcaagtgcttattcttaaagggctgcattatttttcattatttggatttattatttaattggagctctattattgaacatttagattgcttccaaaattttttgctcttgttaatatattgtaataaacttctgtgaaacacatactcttcacctgctacttacatatgacttctgtaagcag

SEQ ID NO: 364460 - DNA, 617 bp, Homo sapiens
aaattcaggtatgctagtctttttgagtattgcttaaagccatgggaaaagagctctctgtgagttccaagacagatgcaaggactggcattcatgcacagcttctaacagataaatctgaagagttcttagtatgcatgttgactgaaattactttagaagtaatttttctcctggtgataaaaggcatgtaaggctattttaggaaattgaaaaatgcaaaaaggtataaagaaaaagaaaagataatcattaatagtacattagtaaacaagatttgactaaagatatgactttcctcccgcttgttttcttatgcatataaagggataggaaatatgtatgtrtgtatgtgtgtgtataggatcatgcactatatatagcttgcttctttttccgttatgataattttcccatgtcatgaattacggcttgcaagtgcttattcttaaagggctgcattatttttcattatttggatttattatttaattggagctctattattgaacatttagattgcttccaaaattttttgctcttgttaatatattgtaataaacttctgtgaaacacatactcttcacctgctacttacatatgacttctgtaagcag

SEQ ID NO: 364461 - DNA, 617 bp, Homo sapiens
aaattcaggtatgctagtctttttgagtattgcttaaagccatgggaaaagagctctctgtgagttccaagacagatgcaaggactggcattcatgcacagcttctaacagataaatctgaagagttcttagtatgcatgttgactgaaattactttagaagtaatttttctcctggtgataaaaggcatgtaaggctattttaggaaattgaaaaatgcaaaaaggtataaagaaaaagaaaagataatcattaatagtacattagtaaacaagatttgactaaagatatgactttcctcccgcttgttttcttatgcatataaagggataggaaatatgtatgtgtgtatgtgtgtgtataggatcatgcactatatatagcttgcttctttttccrttatgataattttcccatgtcatgaattacggcttgcaagtgcttattcttaaagggctgcattatttttcattatttggatttattatttaattggagctctattattgaacatttagattgcttccaaaattttttgctcttgttaatatattgtaataaacttctgtgaaacacatactcttcacctgctacttacatatgacttctgtaagcag

SEQ ID NO: 364462 - DNA, 404 bp, Homo sapiens
ccataaacaggcattgctatttctgtcacagttatatttgtcattctgtattaatacatctatatgctgatttctattgaagcatggttaattttgtttgcttctaagcaatgtagctaccctaytgatgctgataaaattaaatttctgaacctataagactgaggattgggcctaggttgtggtaaattggcaagataatggatgctaccctgtcaagagccctctgaagagaaaagtctgccacccttcaccaggtagaaactcctggcagtgccacattttccagtttgacgccctgtgataccctgaaaagacagatgtttgactcttttcaaataatattttaacatattttaagacgcaaaggcattgtgtcggacttttttcttaagaatatattt

SEQ ID NO: 364463 - DNA, 404 bp, Homo sapiens
ccataaacaggcattgctatttctgtcacagttatatttgtcattctgtattaatacatctatatgctgatttctattgaagcatggttaattttgtttgcttctaagcaatgtagctaccctactgatgctgataaaawtaaatttctgaacctataagactgaggattgggcctaggttgtggtaaattggcaagataatggatgctaccctgtcaagagccctctgaagagaaaagtctgccacccttcaccaggtagaaactcctggcagtgccacattttccagtttgacgccctgtgataccctgaaaagacagatgtttgactcttttcaaataatattttaacatattttaagacgcaaaggcattgtgtcggacttttttcttaagaatatattt

SEQ ID NO: 364464 - DNA, 404 bp, Homo sapiens
ccataaacaggcattgctatttctgtcacagttatatttgtcattctgtattaatacatctatatgctgatttctattgaagcatggttaattttgtttgcttctaagcaatgtagctaccctactgatgctgataaaattaaatttctgaacctataagactgaggattgggcctwggttgtggtaaattggcaagataatggatgctaccctgtcaagagccctctgaagagaaaagtctgccacccttcaccaggtagaaactcctggcagtgccacattttccagtttgacgccctgtgataccctgaaaagacagatgtttgactcttttcaaataatattttaacatattttaagacgcaaaggcattgtgtcggacttttttcttaagaatatattt

SEQ ID NO: 364465 - DNA, 484 bp, Homo sapiens
ggttctaaattccaatctagtcttccacatcattttgaaggtataatattacttgtcaaagtgggatgatagaagatatgtgtggacataaattgttgwcaaggaaaaaaactaaaataagaaaataagagaaaaaatatatgtatgtacagtggttagctagaaatatgccttttaaatatttggcatgtggtatgtgggcctcaatgtgtactattgcactagcttcccaaatattaaaggatgtcttttaaaagaaaaacctcttgctaaaaggttaacagttaaaataaccagagtggcacaggtaccagtcattaagtgaaacctttcatcttcccagaatagtgcctgttcccaagccagcttctttgaaaatcacttttctctcctttactatttagtttacagattgtatagtaacaatacagaaaccacaatagtagcaaaaaaaataaagaatatttttaaatgaaaactcaca

SEQ ID NO: 364466 - DNA, 484 bp, Homo sapiens
ggttctaaattccaatctagtcttccacatcattttgaaggtataatattacttgtcaaagtgggatgatagaagatatgtgtggacataaattgttgtcaaggaaaaaaactaaaataagaaaataagagaaaaaatatatgtatgtacagtggttagctagaaatrtgccttttaaatatttggcatgtggtatgtgggcctcaatgtgtactattgcactagcttcccaaatattaaaggatgtcttttaaaagaaaaacctcttgctaaaaggttaacagttaaaataaccagagtggcacaggtaccagtcattaagtgaaacctttcatcttcccagaatagtgcctgttcccaagccagcttctttgaaaatcacttttctctcctttactatttagtttacagattgtatagtaacaatacagaaaccacaatagtagcaaaaaaaataaagaatatttttaaatgaaaactcaca

SEQ ID NO: 364467 - DNA, 484 bp, Homo sapiens
ggttctaaattccaatctagtcttccacatcattttgaaggtataatattacttgtcaaagtgggatgatagaagatatgtgtggacataaattgttgtcaaggaaaaaaactaaaataagaaaataagagaaaaaatatatgtatgtacagtggttagctagaaatatgccttttaaatatttggcatgtggtatgtgggcctcaatgtgtactattgcactagcttcccaaatattaaaggatgtcttttaaaagaaaaacctcttgctaaaaggttaacagttaaaataaccagagtggcacaggtaccagtcattaagtgaaacctttcatcttcccagaatagtrcctgttcccaagccagcttctttgaaaatcacttttctctcctttactatttagtttacagattgtatagtaacaatacagaaaccacaatagtagcaaaaaaaataaagaatatttttaaatgaaaactcaca

SEQ ID NO: 364468 - DNA, 590 bp, Homo sapiens
tagtaacaatacagaaaccacaatagtagcaaaaaaaataaagaatatttttaaatgaaaactcacatcctaactctaccaaaacatgaaaattaaacctgaatgcctcccattcctgatatatttttcacctaaatattcagctctgggattgcattgtttttggattgagtggaaattattgcctggtcttgaaatcttccataatgtgtgtgtgtgtgtgcgtgtgtgcgtgtgtgcgtgtgtgtgtgtgtatgtatgtatgtgtggtgaatatayttctttttgttcagagcaaagattttttcaatatgtatatttattttaggcagattatgctagtaattttctacaaatgtgctttttaaaaaataacctttaatttaaaaaaaattattcttactcagtggcccacaattgttaaaaacgctactaatggagctgggtatggtgacacacacctgtcatcccagctacttgggagactgaggcaggggtattgcttaaacttgggaatgtgaaaccagcctgggcaacgtagtgagatcccaatctcaaaaatcaatcaatcattaaaaaataaaataaaa

SEQ ID NO: 364469 - DNA, 590 bp, Homo sapiens
tagtaacaatacagaaaccacaatagtagcaaaaaaaataaagaatatttttaaatgaaaactcacatcctaactctaccaaaacatgaaaattaaacctgaatgcctcccattcctgatatatttttcacctaaatattcagctctgggattgcattgtttttggattgagtggaaattattgcctggtcttgaaatcttccataatgtgtgtgtgtgtgtgcgtgtgtgcgtgtgtgcgtgtgtgtgtgtgtatgtatgtatgtgtggtgaatatacttctttttgttcrgagcaaagattttttcaatatgtatatttattttaggcagattatgctagtaattttctacaaatgtgctttttaaaaaataacctttaatttaaaaaaaattattcttactcagtggcccacaattgttaaaaacgctactaatggagctgggtatggtgacacacacctgtcatcccagctacttgggagactgaggcaggggtattgcttaaacttgggaatgtgaaaccagcctgggcaacgtagtgagatcccaatctcaaaaatcaatcaatcattaaaaaataaaataaaa

SEQ ID NO: 364470 - DNA, 590 bp, Homo sapiens
tagtaacaatacagaaaccacaatagtagcaaaaaaaataaagaatatttttaaatgaaaactcacatcctaactctaccaaaacatgaaaattaaacctgaatgcctcccattcctgatatatttttcacctaaatattcagctctgggattgcattgtttttggattgagtggaaattattgcctggtcttgaaatcttccataatgtgtgtgtgtgtgtgcgtgtgtgcgtgtgtgcgtgtgtgtgtgtgtatgtatgtatgtgtggtgaatatacttctttttgttcagagcaaagattttttcaatatgtatatttattttaggcagattatgctagtaattttctacaaatgtgctttttaaaaaataacctttaatttaaaaaaaattattcttactcagtggcccacaattgttaaaaacgctactaatggagctgggtatggtgacacacacctgtcatcccagctacttgggagactgaggcaggggtattgcttaaacttgggaatgtgaaaccagcctgggcaacrtagtgagatcccaatctcaaaaatcaatcaatcattaaaaaataaaataaaa

SEQ ID NO: 364471 - DNA, 560 bp, Homo sapiens
  misc_feature (1)...(560): n = A,T,C or G
nnnnnnnnnnnnntatgttaaaaggtgtgagggtatcaatattgttgtggctattggggaggaaaacattagtaaaaccagtaagttaaagctcttgctttaaactttggctttaatttaacaaatgttctatggagtgacagtatgtatgtaaccatgctatgcccattcacagatgcagtagagggaagaatttctcaaagacaactgttctaasactcaaattaaaccgtactgggtttgaaaagagaaagtccaggaattaccaaatattttagatatcagataaaagagaatgccaggtatgcgatgataatcagcaatggttgttcacacaatacatcaaatcagtatttgaattagcttttgaattacaaggacaaatggatcaagtctagactctttagtagataaatcttattaggctgagatgtgttttcccctgtttttccacaaggagattacaaatttgcaaacctcagctgctctcattttatgctctcaccaagccaaaagctgaagttcatcaatcagtgtgtctaagtgttcactggttatat

SEQ ID NO: 364472 - DNA, 560 bp, Homo sapiens
  misc_feature (1)...(560): n = A,T,C or G
nnnnnnnnnnnnntatgttaaaaggtgtgagggtatcaatattgttgtggctattggggaggaaaacattagtaaaaccagtaagttaaagctcttgctttaaactttggctttaatttaacaaatgttctatggagtgacagtatgtatgtaaccatgctatgcccattcacagatgcagtagagggaagaatttctcaaagacaactgttctaacactcaaattaaaccgtactgggtttgaaaagagaaagtccaggaattaccaaatattttagatatcagatamaagagaatgccaggtatgcgatgataatcagcaatggttgttcacacaatacatcaaatcagtatttgaattagcttttgaattacaaggacaaatggatcaagtctagactctttagtagataaatcttattaggctgagatgtgttttcccctgtttttccacaaggagattacaaatttgcaaacctcagctgctctcattttatgctctcaccaagccaaaagctgaagttcatcaatcagtgtgtctaagtgttcactggttatat

SEQ ID NO: 364473 - DNA, 560 bp, Homo sapiens
  misc_feature (1)...(560): n = A,T,C or G
nnnnnnnnnnnnntatgttaaaaggtgtgagggtatcaatattgttgtggctattggggaggaaaacattagtaaaaccagtaagttaaagctcttgctttaaactttggctttaatttaacaaatgttctatggagtgacagtatgtatgtaaccatgctatgcccattcacagatgcagtagagggaagaatttctcaaagacaactgttctaacactcaaattaaaccgtactgggtttgaaaagagaaagtccaggaattaccaaatattttagatatcagataaaagagaatgmcaggtatgcgatgataatcagcaatggttgttcacacaatacatcaaatcagtatttgaattagcttttgaattacaaggacaaatggatcaagtctagactctttagtagataaatcttattaggctgagatgtgttttcccctgtttttccacaaggagattacaaatttgcaaacctcagctgctctcattttatgctctcaccaagccaaaagctgaagttcatcaatcagtgtgtctaagtgttcactggttatat

SEQ ID NO: 364474 - DNA, 560 bp, Homo sapiens
  misc_feature (1)...(560): n = A,T,C or G
nnnnnnnnnnnnntatgttaaaaggtgtgagggtatcaatattgttgtggctattggggaggaaaacattagtaaaaccagtaagttaaagctcttgctttaaactttggctttaatttaacaaatgttctatggagtgacagtatgtatgtaaccatgctatgcccattcacagatgcagtagagggaagaatttctcaaagacaactgttctaacactcaaattaaaccgtactgggtttgaaaagagaaagtccaggaattaccaaatattttagatatcagataaaagagaatgccaggtatgcgatgataatcagcaatggttgttcacacaatacatcaaatcagtatttgaattagcttttgaattacaaggacaaatggatcaagtctagactctttagtagataaatcttattaggctgagatgtgttttcccctgtttttccacaaggagattacaaatttgcaaacctcagctgctctcattttatgctctcaccaagccaaaagctgaagttcatcaatmagtgtgtctaagtgttcactggttatat

SEQ ID NO: 364475 - DNA, 552 bp, Homo sapiens
caatcataactagagtaggtaatttcatctctgtctyatgcaggttactttttctcagggtctcaggaatgtagccttctcacacttctgttcttttcctggctgtgttggtgagctcagtgatattcctccttcaccttcaagagcagttttgtttttgtttttcctgttttcatactcccagcatcaggagtattctaagtgtggcagtttttgttgccttcccctacatattaagtggaatatcttggtctatttggactcttataacaaaataacataaactgggtgactaaaaaacaacagatatttcttttttcatacttcttgaggctgtaagatctcaggtcaagatgctcacaaattcagtgttgatgagagcccatttcatggttcatagatggtgccttctttctatgtcctcacatagtggaaggcacacaagaactccattgagcttcttttataaaggcactaatccgattcataagggctcggcccccaagacctggtcacctcccaagtgttctgctctccctgatctgtgtcata

SEQ ID NO: 364476 - DNA, 552 bp, Homo sapiens
caatcataactagagtaggtaatttcatctctgtcttatgcaggttactttttctcagggtctcaggaatgtagccttctcacacttctgttcttttcctggctgtgttrgtgagctcagtgatattcctccttcaccttcaagagcagttttgtttttgtttttcctgttttcatactcccagcatcaggagtattctaagtgtggcagtttttgttgccttcccctacatattaagtggaatatcttggtctatttggactcttataacaaaataacataaactgggtgactaaaaaacaacagatatttcttttttcatacttcttgaggctgtaagatctcaggtcaagatgctcacaaattcagtgttgatgagagcccatttcatggttcatagatggtgccttctttctatgtcctcacatagtggaaggcacacaagaactccattgagcttcttttataaaggcactaatccgattcataagggctcggcccccaagacctggtcacctcccaagtgttctgctctccctgatctgtgtcata

SEQ ID NO: 364477 - DNA, 643 bp, Homo sapiens
atgcaggttactttttctcagggtctcaggaatgtagccttctcacacttctgttcttttcctggctgtgttggtgarctcagtgatattcctccttcaccttcaagagcagttttgtttttgtttttcctgttttcatactcccagcatcaggagtattctaagtgtggcagtttttgttgccttcccctacatattaagtggaatatcttggtctatttggactcttataacaaaataacataaactgggtgactaaaaaacaacagatatttcttttttcatacttcttgaggctgtaagatctcaggtcaagatgctcacaaattcagtgttgatgagagcccatttcatggttcatagatggtgccttctttctatgtcctcacatagtggaaggcacacaagaactccattgagcttcttttataaaggcactaatccgattcataagggctcggcccccaagacctggtcacctcccaagtgttctgctctccctgatctgtgtcatatacagactctcttggattccttaccaattgcttgagagatcacagtgggtttgtggagaaaaagttttcaagatgatggatctttcccaacttctgcagctgtcagccgtctcccaatctgaccagcc

SEQ ID NO: 364478 - DNA, 561 bp, Homo sapiens
gtcatgactttgaggttagtttggttctttcattgttgtcaggttaggaaccctattccatcccagatctccaaaacccagactttttggggggttgaaattttaggctttctctttgaattgtagttttatcttctttcagttaccatttgcattttcataatgattaatgagactaagctttttttgtgtagttgactgtacctttggatttttttcccaaatacctttttatttcttcttttctttatggttttagaaaacgtagtttacataattgcagcttgattcttttactcagttaatggcatgcttaatggagagaaaaaatattatttycctttttaattactgtgcttttttcttttttaaggaaatgtttcattatgttaaatttcagtgttattctacttagctattccttaaatattatagtatttcggatttcacatgtaaatttgtaacatatcttgagtttattatgtatagagtaaggctattttctctttttttaaggtaaaaatcacataatataaaattaataacaaccattttaaagca

SEQ ID NO: 364479 - DNA, 561 bp, Homo sapiens
gtcatgactttgaggttagtttggttctttcattgttgtcaggttaggaaccctattccatcccagatctccaaaacccagactttttggggggttgaaattttaggctttctctttgaattgtagttttatcttctttcagttaccatttgcattttcataatgattaatgagactaagctttttttgtgtagttgactgtacctttggatttttttcccaaatacctttttatttcttcttttctttatggttttagaaaacgtagtttacataattgcagcttgattcttttactcagttaatggcatgcttaatggagagaaaaaatattattttcctttttaattactgtgcttttttcttttttaaggaaatgtttcattatgttaaatttcagtgttattctacttagctattccttaaatattatartatttcggatttcacatgtaaatttgtaacatatcttgagtttattatgtatagagtaaggctattttctctttttttaaggtaaaaatcacataatataaaattaataacaaccattttaaagca

SEQ ID NO: 364480 - DNA, 561 bp, Homo sapiens
gtcatgactttgaggttagtttggttctttcattgttgtcaggttaggaaccctattccatcccagatctccaaaacccagactttttggggggttgaaattttaggctttctctttgaattgtagttttatcttctttcagttaccatttgcattttcataatgattaatgagactaagctttttttgtgtagttgactgtacctttggatttttttcccaaatacctttttatttcttcttttctttatggttttagaaaacgtagtttacataattgcagcttgattcttttactcagttaatggcatgcttaatggagagaaaaaatattattttcctttttaattactgtgcttttttcttttttaaggaaatgtttcattatgttaaatttcagtgttattctacttagctattccttaaatattatagtatttyggatttcacatgtaaatttgtaacatatcttgagtttattatgtatagagtaaggctattttctctttttttaaggtaaaaatcacataatataaaattaataacaaccattttaaagca

SEQ ID NO: 364481 - DNA, 640 bp, Homo sapiens
aacccattatgcataaagttgttacaccctattctgcttccctgagccctaatgaccactaatctaatttacatcccaattgatttgccaattcctgatgtttcatgtgaataaaatcaagygatatttgtccttttgtgcacttaacataatgctttcaaatttcaccaatattataccatatataagtacttcattctttgttatagctgaaaatttggtgtccatttatgagtcaacaagcatatggattgtttccactttttgactgtatgaatattactgctgtaaatattcatgcacatgtttattttttgagcacctatgttttgtaagattaacagctgacttaagagaaacaatggaaggcaagaggcagtagaataatatattcaaaagatgcaaaggaaaagaaactctcagccacgaattccttatccagcaattatttttcaaaaatgaagataacacaaagacttacccagataaacagaaatattaactgaagttgttgctggcagacctaccacgttaaaaaaaaaactctaaaataaattcctaaggctaaaagcaagttacagaagacagtcgcttgaatccacatttttaaaaaagcactggtataggtaatattgacatt

SEQ ID NO: 364482 - DNA, 640 bp, Homo sapiens
aacccattatgcataaagttgttacaccctattctgcttccctgagccctaatgaccactaatctaatttacatcccaattgatttgccaattcctgatgtttcatgtgaataaaatcaagtratatttgtccttttgtgcacttaacataatgctttcaaatttcaccaatattataccatatataagtacttcattctttgttatagctgaaaatttggtgtccatttatgagtcaacaagcatatggattgtttccactttttgactgtatgaatattactgctgtaaatattcatgcacatgtttattttttgagcacctatgttttgtaagattaacagctgacttaagagaaacaatggaaggcaagaggcagtagaataatatattcaaaagatgcaaaggaaaagaaactctcagccacgaattccttatccagcaattatttttcaaaaatgaagataacacaaagacttacccagataaacagaaatattaactgaagttgttgctggcagacctaccacgttaaaaaaaaaactctaaaataaattcctaaggctaaaagcaagttacagaagacagtcgcttgaatccacatttttaaaaaagcactggtataggtaatattgacatt

SEQ ID NO: 364483 - DNA, 640 bp, Homo sapiens
aacccattatgcataaagttgttacaccctattctgcttccctgagccctaatgaccactaatctaatttacatcccaattgatttgccaattcctgatgtttcatgtgaataaaatcaagtgatatttgtccttttgtgcacttaacataatgctttcaaatttcaccaatattataccatatataagtacttcattctttgttatagctgaaaatttggtgtccakttatgagtcaacaagcatatggattgtttccactttttgactgtatgaatattactgctgtaaatattcatgcacatgtttattttttgagcacctatgttttgtaagattaacagctgacttaagagaaacaatggaaggcaagaggcagtagaataatatattcaaaagatgcaaaggaaaagaaactctcagccacgaattccttatccagcaattatttttcaaaaatgaagataacacaaagacttacccagataaacagaaatattaactgaagttgttgctggcagacctaccacgttaaaaaaaaaactctaaaataaattcctaaggctaaaagcaagttacagaagacagtcgcttgaatccacatttttaaaaaagcactggtataggtaatattgacatt

SEQ ID NO: 364484 - DNA, 640 bp, Homo sapiens
aacccattatgcataaagttgttacaccctattctgcttccctgagccctaatgaccactaatctaatttacatcccaattgatttgccaattcctgatgtttcatgtgaataaaatcaagtgatatttgtccttttgtgcacttaacataatgctttcaaatttcaccaatattataccatatataagtacttcattctttgttatagctgaaaatttggtgtccatttatgagtcaacaagcatatggattgtttccactttttgactgtatgaatattactgctgtaaatattcatgcacatgtttattttttgagcacctatgttttgtaagattaacagctgacttaagagaaacaatggaaggcaagaggcagtagaataatatattcaaaagatgcaaaggaaaaraaactctcagccacgaattccttatccagcaattatttttcaaaaatgaagataacacaaagacttacccagataaacagaaatattaactgaagttgttgctggcagacctaccacgttaaaaaaaaaactctaaaataaattcctaaggctaaaagcaagttacagaagacagtcgcttgaatccacatttttaaaaaagcactggtataggtaatattgacatt

SEQ ID NO: 364485 - DNA, 595 bp, Homo sapiens
tattgctgagtttttgacatgtagaaatgtaatacgtctataacatattttccagtaacatcaaaaaggaggtagttggaagaaaaatgtattgtgataaggtaatmactctagatggtaaagtaataattactaaaatgtattgttggctttgtaactttaatagatgtaatgtgtaaagtgataatactttaaaatggaggaaataaaagagatttatataagaatgatgtttctatgtattactaaaagtttactagtataaattggaagatgatttgaataattaattttccatatacctatatggtaaacttacaacaacaacaaacattcccaaaaatatataataaaataattcattagtaatctaaagttccctattttagaaaatattctttcattgcaaaataaagcaataaagaaaaatatttgagaaatatataaaacaaacggtaaaatggcagacataaatagaattataccaattataatcttaaatgtgagcagattaaaatccattccagaggcagagattgtcagactggattaaaacaagtgatcccaatatacgctgagatgcaaggatactaat

SEQ ID NO: 364486 - DNA, 595 bp, Homo sapiens
tattgctgagtttttgacatgtagaaatgtaatacgtctataacatattttccagtaacatcaaaaaggaggtagttggaagaaaaatgtattgtgataaggtaatcactctagatggtaaagtaataattactaaaatgtattgttggctttgtaactttaatagatgtaatgtgtaaagtgataatactttaaaatggaggaaakaaaagagatttatataagaatgatgtttctatgtattactaaaagtttactagtataaattggaagatgatttgaataattaattttccatatacctatatggtaaacttacaacaacaacaaacattcccaaaaatatataataaaataattcattagtaatctaaagttccctattttagaaaatattctttcattgcaaaataaagcaataaagaaaaatatttgagaaatatataaaacaaacggtaaaatggcagacataaatagaattataccaattataatcttaaatgtgagcagattaaaatccattccagaggcagagattgtcagactggattaaaacaagtgatcccaatatacgctgagatgcaaggatactaat

SEQ ID NO: 364487 - DNA, 595 bp, Homo sapiens
tattgctgagtttttgacatgtagaaatgtaatacgtctataacatattttccagtaacatcaaaaaggaggtagttggaagaaaaatgtattgtgataaggtaatcactctagatggtaaagtaataattactaaaatgtattgttggctttgtaactttaatagatgtaatgtgtaaagtgataatactttaaaatggaggaaataaaagagatttatataagaatgatgtttctatgtattactaaaagtttactagtataaattggaagatgrtttgaataattaattttccatatacctatatggtaaacttacaacaacaacaaacattcccaaaaatatataataaaataattcattagtaatctaaagttccctattttagaaaatattctttcattgcaaaataaagcaataaagaaaaatatttgagaaatatataaaacaaacggtaaaatggcagacataaatagaattataccaattataatcttaaatgtgagcagattaaaatccattccagaggcagagattgtcagactggattaaaacaagtgatcccaatatacgctgagatgcaaggatactaat

SEQ ID NO: 364488 - DNA, 595 bp, Homo sapiens
tattgctgagtttttgacatgtagaaatgtaatacgtctataacatattttccagtaacatcaaaaaggaggtagttggaagaaaaatgtattgtgataaggtaatcactctagatggtaaagtaataattactaaaatgtattgttggctttgtaactttaatagatgtaatgtgtaaagtgataatactttaaaatggaggaaataaaagagatttatataagaatgatgtttctatgtattactaaaagtttactagtataaattggaagatgatttgaataattaattttccatatacctatatggtaaacttacaacaacaacaaacattcccaaaaatatataataaaataattcattagtaatctaaagttccctattttagaaaatattctttcattgcaaaataaagcaataaagaaaawtatttgagaaatatataaaacaaacggtaaaatggcagacataaatagaattataccaattataatcttaaatgtgagcagattaaaatccattccagaggcagagattgtcagactggattaaaacaagtgatcccaatatacgctgagatgcaaggatactaat

SEQ ID NO: 364489 - DNA, 581 bp, Homo sapiens
cagaagaagtcatgagcttgaagataagaaaatggaaaatattgactctgagaaacagataaaaaatgagcagagactaaggaatctgtgggacatcatcaaayagaccgacattcatattctggaaggataaattatgttgttgaaaactttagcattctttcttttcacctttctttcttcctccctctccctcctcctcctttttacttttcttcctcttcccttctcttcttctttctctccttcattatccctttcgctctgtttctctttctccctttctcttttttcttttctttcaattttctccattactaagagatgtttgcatacccttaccatgtgagttgatatggttatttctccctttaatcctcttttgacatttatagtctctctaagtaaagagataacccaaacataagcctcacaaacaggcttccataccattcttaatttggtcctgtaattcttcattgctgtattaactttctgatgcttttaaggatgttttacaacaaattgtttagttttttccactggaatgtttattctcaattatctaattcatattgtaa

SEQ ID NO: 364490 - DNA, 581 bp, Homo sapiens
cagaagaagtcatgagcttgaagataagaaaatggaaaatattgactctgagaaacagataaaaaatgagcagagactaaggaatctgtgggacatcatcaaacagaccracattcatattctggaaggataaattatgttgttgaaaactttagcattctttcttttcacctttctttcttcctccctctccctcctcctcctttttacttttcttcctcttcccttctcttcttctttctctccttcattatccctttcgctctgtttctctttctccctttctcttttttcttttctttcaattttctccattactaagagatgtttgcatacccttaccatgtgagttgatatggttatttctccctttaatcctcttttgacatttatagtctctctaagtaaagagataacccaaacataagcctcacaaacaggcttccataccattcttaatttggtcctgtaattcttcattgctgtattaactttctgatgcttttaaggatgttttacaacaaattgtttagttttttccactggaatgtttattctcaattatctaattcatattgtaa

SEQ ID NO: 364491 - DNA, 271 bp, Homo sapiens
cattcttaacgaaacacccaaatatcttaataattgggcaaaatctaaatatcagagagataattttatcttgaagattgttaaattataatggtgattcactacctygccacgtctctgagtcaaaaattaggtctttgtttaggaatcaatggtactctgcaacttggaaataggaagattttagaagactcaaacactgactttcttgtgcgcaaaaaaaaaagacgtattgagataagacaagtccttccttgcaaggatacctcta

SEQ ID NO: 364492 - DNA, 271 bp, Homo sapiens
cattcttaacgaaacacccaaatatcttaataattgggcaaaatctaaatatcagagagataattttatcttgaagattgttaaattataatggtgattcactaccttgccacgtctctgagtcaaaaattaggtytttgtttaggaatcaatggtactctgcaacttggaaataggaagattttagaagactcaaacactgactttcttgtgcgcaaaaaaaaaagacgtattgagataagacaagtccttccttgcaaggatacctcta

SEQ ID NO: 364493 - DNA, 271 bp, Homo sapiens
cattcttaacgaaacacccaaatatcttaataattgggcaaaatctaaatatcagagagataattttatcttgaagattgttaaattataatggtgattcactaccttgccacgtctctgagtcaaaaattaggtctttgtttaggaatcaatggtactctgcaacttggaaataggaagattttagaagactcaaacaytgactttcttgtgcgcaaaaaaaaaagacgtattgagataagacaagtccttccttgcaaggatacctcta

SEQ ID NO: 364494 - DNA, 414 bp, Homo sapiens
ctcatacaccacctcccctaacgttaatatagcttccaggtcagtaaccagtgtcagagagcagcccatgcaactacaaattcaatagatgtcgaacacagggtcaagcctagaataagaagtcttagctaattaagtatgctttkttccccaaattcatattaacaaaaacttggatatgtcagagaatgcattctaagttcgctcaacctaggagggagaaacataattttaaattaagagctgaagcattcttgtcctaacaaaaagcaaggaaaacgaaatatcacaccacaggagggatttcacaaattagtgtcaacatcaaaaccttaaaataggcaaggagaatgcagattcacaatgaactcttgtacttgttttgttcagagaagagatggttctgagagaatg

SEQ ID NO: 364495 - DNA, 414 bp, Homo sapiens
ctcatacaccacctcccctaacgttaatatagcttccaggtcagtaaccagtgtcagagagcagcccatgcaactacaaattcaatagatgtcgaacacagggtcaagcctagaataagaagtcttagctaattaagtatgcttttttccccaaattcatattaacaaaaacttggatatgtcagagaatgcattctaagttcrctcaacctaggagggagaaacataattttaaattaagagctgaagcattcttgtcctaacaaaaagcaaggaaaacgaaatatcacaccacaggagggatttcacaaattagtgtcaacatcaaaaccttaaaataggcaaggagaatgcagattcacaatgaactcttgtacttgttttgttcagagaagagatggttctgagagaatg

SEQ ID NO: 364496 - DNA, 368 bp, Homo sapiens
cagggtcaagcctagaataagaagtcttagctaattaagtatgcttttttccccaaattcatattaacaaaaacttggatatgtcagagaatgcattctaagttcgctcaacctaggagggagaaacataattttaaattaagagctgaagcattcttgtcctaacamaaagcaaggaaaacgaaatatcacaccacaggagggatttcacaaattagtgtcaacatcaaaaccttaaaataggcaaggagaatgcagattcacaatgaactcttgtacttgttttgttcagagaagagatggttctgagagaatgacagtgaactaaccccagctggtttagttggtgctttcaactgctgcttctg

SEQ ID NO: 364497 - DNA, 368 bp, Homo sapiens
cagggtcaagcctagaataagaagtcttagctaattaagtatgcttttttccccaaattcatattaacaaaaacttggatatgtcagagaatgcattctaagttcgctcaacctaggagggagaaacataattttaaattaagagctgaagcattcttgtcctaacaaaaagcaaggaaaacgaaatatcacaccacaggagggatttcacaaattwgtgtcaacatcaaaaccttaaaataggcaaggagaatgcagattcacaatgaactcttgtacttgttttgttcagagaagagatggttctgagagaatgacagtgaactaaccccagctggtttagttggtgctttcaactgctgcttctg

SEQ ID NO: 364498 - DNA, 368 bp, Homo sapiens
cagggtcaagcctagaataagaagtcttagctaattaagtatgcttttttccccaaattcatattaacaaaaacttggatatgtcagagaatgcattctaagttcgctcaacctaggagggagaaacataattttaaattaagagctgaagcattcttgtcctaacaaaaagcaaggaaaacgaaatatcacaccacaggagggatttcacaaattagygtcaacatcaaaaccttaaaataggcaaggagaatgcagattcacaatgaactcttgtacttgttttgttcagagaagagatggttctgagagaatgacagtgaactaaccccagctggtttagttggtgctttcaactgctgcttctg

SEQ ID NO: 364499 - DNA, 414 bp, Homo sapiens
ctcatacaccacctcccctaacgttaatatagcttccaggtcagtaaccagtgtcagagagcagcccatgcaactacaaattcaatagatgtcgaacacagggtcaagcctagaataagaagtcttagctaattaagtatgcttttttccccaaattcatattaacaaaaacttggatatgtcagagaatgcattctaagttcgctcaacctaggagggagaaacataattttaaattaagagctgaagcattcttgtcctaacaaaaagcaaggaaaacgaaatatcacaccacaggagggatttcacaaattagtgtcaacatcaaaaccttaaaataggcaaggaraatgcagattcacaatgaactcttgtacttgttttgttcagagaagagatggttctgagagaatg

SEQ ID NO: 364500 - DNA, 414 bp, Homo sapiens
ctcatacaccacctcccctaacgttaatatagcttccaggtcagtaaccagtgtcagagagcagcccatgcaactacaaattcaatagatgtcgaacacagggtcaagcctagaataagaagtcttagctaattaagtatgcttttttccccaaattcatattaacaaaaacttggatatgtcagagaatgcattctaagttcgctcaacctaggagggagaaacataattttaaattaagagctgaagcattcttgtcctaacaaaaagcaaggaaaacgaaatatcacaccacaggagggatttcacaaattagtgtcaacatcaaaaccttaaaataggcaaggagaatgcagattyacaatgaactcttgtacttgttttgttcagagaagagatggttctgagagaatg

SEQ ID NO: 364501 - DNA, 608 bp, Homo sapiens
atggttattaattttttcctcttatttgcattgttcaatgtagtaaatactaactgtatatggctacttcaattcaaattaattacaatgaaatatacttaaatattgaatttttttagtcactgttggttcattattgaatatcttcagctaagatttcccatctaaatacactaagaggtggcttagttaactggtcgtccacaaatattgaggctgatgttaactcctgatatattctctgcaaatagaatattcatgagcctcctcctgaaatcagcagcctagagatagttttataaattggatacaagttggaaatctatatactctcagtttttgaaatattagcttcccagggaagaaaatcaaattcrtaagatatgttaggacgatttaactcaagatgttcaaaactgaaatgacgtattctacaatatgtgataaaaccaccccctaacaacttaaagcaaaacagggattgaccttaaagacctgccttttcctcatcccccagccaatcagttgtcaaatcttgcattttatttcgaaaggtccttatccccctagtctcttgtttctagactcggcacatatttaagtttgtt

SEQ ID NO: 364502 - DNA, 592 bp, Homo sapiens
tggtttagttggtgctttcaactgctgcttctgatcaactcctttagctagaataaattgatgaggattttggcatgtggtattagagatggttattaattttttcctcttatttgcattgttcaatgtagtaaatactaactgtatatggctacttcaattcaaattaattacaatgaaatatacttaaatattgaatttttttagtcactgttggttcattattgaatatcttcagctaagatttcccatctaaatacactaagaggtggcttagttaactggtcgtccacaaatattgaggctgatgttaactcctgatatattctctgcaaatagaatattcatgagcctcctcctgaaatcagcagcctagagatagttttataaattggatacaagttggaaatctatatactctcagtttttgaaatattagcttcccagggaagaaaatcaaattcgtaagatatgttaggacgatttaactyaagatgttcaaaactgaaatgacgtattctacaatatgtgataaaaccaccccctaacaacttaaagcaaaacagggattgaccttaaagacctgcctttt

SEQ ID NO: 364503 - DNA, 420 bp, Homo sapiens
ttaactcaagatgttcaaaactgaaatgacgtattctacaatatrtgataaaaccaccccctaacaacttaaagcaaaacagggattgaccttaaagacctgccttttcctcatcccccagccaatcagttgtcaaatcttgcattttatttcgaaaggtccttatccccctagtctcttgtttctagactcggcacatatttaagtttgttacctctatctactgacttttttctcttcaaacggtatctatgcctgccaaatgtgaatatacaaaaatcaaatcagaatgtgtcattctgatttaaactgcttattagttaaaaccctcaagataacatctgggttcttggctgcaatgagtgaaacctacttacatctttttttgtctttggctgcacatttcctatcatatcacac

SEQ ID NO: 364504 - DNA, 420 bp, Homo sapiens
ttaactcaagatgttcaaaactgaaatgacgtattctacaatatgtgataaaaccaccccctaacaacttaaagcaaaacagggattgaccttaaagacctgccttttcctcatcccccagccaatcagttgtcaaatcttgcattttatttcgaaaggtccttatccccctagtctcttgtttctagactcggcacatatttaagtttgttacctctatctactgacttttttctcttcaaacggtatctatgcctgccaaatgtgaatatacaaaaawcaaatcagaatgtgtcattctgatttaaactgcttattagttaaaaccctcaagataacatctgggttcttggctgcaatgagtgaaacctacttacatctttttttgtctttggctgcacatttcctatcatatcacac

SEQ ID NO: 364505 - DNA, 420 bp, Homo sapiens
ttaactcaagatgttcaaaactgaaatgacgtattctacaatatgtgataaaaccaccccctaacaacttaaagcaaaacagggattgaccttaaagacctgccttttcctcatcccccagccaatcagttgtcaaatcttgcattttatttcgaaaggtccttatccccctagtctcttgtttctagactcggcacatatttaagtttgttacctctatctactgacttttttctcttcaaacggtatctatgcctgccaaatgtgaatatacaaaaatcaaatcagaatgtgycattctgatttaaactgcttattagttaaaaccctcaagataacatctgggttcttggctgcaatgagtgaaacctacttacatctttttttgtctttggctgcacatttcctatcatatcacac

SEQ ID NO: 364506 - DNA, 583 bp, Homo sapiens
tctattgctccaactgctctttactaaaggtaatttgtctttttaacctcatcaggctccttttaagctctcaaactgaccttatttttttttttacagattsaatgcattaagtcaatttattatttatgatgaatttatttatgtatttattttcgctatcacaagtagaaaaagcctataagttgctatgccaaaaacctgcctctagatggcaaacaaaccccacaatacacaaaagagagccaaattcttagaaaccctgggaaaggaagagggctactgtcccattaacaacttggagcccttaaggcaagaatgaggtggaacatctggaacatctgggaggagacaccagggtgcggagtagtggggaacctgctctgtgctctgagactgaaagcccagccttgcctctcaccgctgccttgactgtgtccccatctgctgtgaagtgaatggtgtcttctaaattcatgctgagccctaattgctgaaaagtgtaagacatgcaatggggggattatgtgcatcttcccgacaccaacatgatgctcaggaaggagacttcttgttttctctt

SEQ ID NO: 364507 - DNA, 539 bp, Homo sapiens
aatgtcattgattaaagaatcatctattgctccaactgctctttactaaaggtaatttgtctttttaacctcatcaggctccttttaagctctcaaactgaccttatttttttttttacagattgaatgcattaagtcaatttattatttatgatgaatttatttatgtatttattttygctatcacaagtagaaaaagcctataagttgctatgccaaaaacctgcctctagatggcaaacaaaccccacaatacacaaaagagagccaaattcttagaaaccctgggaaaggaagagggctactgtcccattaacaacttggagcccttaaggcaagaatgaggtggaacatctggaacatctgggaggagacaccagggtgcggagtagtggggaacctgctctgtgctctgagactgaaagcccagccttgcctctcaccgctgccttgactgtgtccccatctgctgtgaagtgaatggtgtcttctaaattcatgctgagccctaattgctgaaaagtgtaagacatgcaatg

SEQ ID NO: 364508 - DNA, 539 bp, Homo sapiens
aatgtcattgattaaagaatcatctattgctccaactgctctttactaaaggtaatttgtctttttaacctcatcaggctccttttaagctctcaaactgaccttatttttttttttacagattgaatgcattaagtcaatttattatttatgatgaatttatttatgtatttattttcgctatcacaagtagaaaaagcctataagttgcyatgccaaaaacctgcctctagatggcaaacaaaccccacaatacacaaaagagagccaaattcttagaaaccctgggaaaggaagagggctactgtcccattaacaacttggagcccttaaggcaagaatgaggtggaacatctggaacatctgggaggagacaccagggtgcggagtagtggggaacctgctctgtgctctgagactgaaagcccagccttgcctctcaccgctgccttgactgtgtccccatctgctgtgaagtgaatggtgtcttctaaattcatgctgagccctaattgctgaaaagtgtaagacatgcaatg

SEQ ID NO: 364509 - DNA, 583 bp, Homo sapiens
tctattgctccaactgctctttactaaaggtaatttgtctttttaacctcatcaggctccttttaagctctcaaactgaccttatttttttttttacagattgaatgcattaagtcaatttattatttatgatgaatttatttatgtatttattttcgctatcacaagtagaaaaagcctataagttgctatgccaaaaacctgcctctagatggcaaacaaaccccrcaatacacaaaagagagccaaattcttagaaaccctgggaaaggaagagggctactgtcccattaacaacttggagcccttaaggcaagaatgaggtggaacatctggaacatctgggaggagacaccagggtgcggagtagtggggaacctgctctgtgctctgagactgaaagcccagccttgcctctcaccgctgccttgactgtgtccccatctgctgtgaagtgaatggtgtcttctaaattcatgctgagccctaattgctgaaaagtgtaagacatgcaatggggggattatgtgcatcttcccgacaccaacatgatgctcaggaaggagacttcttgttttctctt

SEQ ID NO: 364510 - DNA, 634 bp, Homo sapiens
tactcctaaaatgtcattgattaaagaatcatctattgctccaactgctctttactaaaggtaatttgtctttttaacctcatcaggctccttttaagctctcaaactgaccttatttttttttttacagattgaatgcattaagtcaatttattatttatgatgaatttatttatgtatttattttcgctatcacaagtagaaaaagcctataagttgctatgccaaaaacctgcctctagatggcaaacaaaccccacaatacacaaaagagagccaaattcttagaaaccctgggaaaggaagagggctactgtcccattaacaactkggagcccttaaggcaagaatgaggtggaacatctggaacatctgggaggagacaccagggtgcggagtagtggggaacctgctctgtgctctgagactgaaagcccagccttgcctctcaccgctgccttgactgtgtccccatctgctgtgaagtgaatggtgtcttctaaattcatgctgagccctaattgctgaaaagtgtaagacatgcaatggggggattatgtgcatcttcccgacaccaacatgatgctcaggaaggagacttcttgttttctcttaggattcttttactaaccaa

SEQ ID NO: 364511 - DNA, 583 bp, Homo sapiens
tctattgctccaactgctctttactaaaggtaatttgtctttttaacctcatcaggctccttttaagctctcaaactgaccttatttttttttttacagattgaatgcattaagtcaatttattatttatgatgaatttatttatgtatttattttcgctatcacaagtagaaaaagcctataagttgctatgccaaaaacctgcctctagatggcaaacaaaccccacaatacacaaaagagagccaaattcttagaaaccctgggaaaggaagagggctactgtcccattaacaacttggagcccttaaggcaagaatgaggtggaacatctggaacatctgggaggagacacmagggtgcggagtagtggggaacctgctctgtgctctgagactgaaagcccagccttgcctctcaccgctgccttgactgtgtccccatctgctgtgaagtgaatggtgtcttctaaattcatgctgagccctaattgctgaaaagtgtaagacatgcaatggggggattatgtgcatcttcccgacaccaacatgatgctcaggaaggagacttcttgttttctctt

SEQ ID NO: 364512 - DNA, 598 bp, Homo sapiens
aacatctgggaggagacaccagggtgcggagtagtggggaacctgctctgtgctctgagactgaaagcccagccttgcctctcaccgctgccttgactgtgtccccatctgctgtgaagtgaatggtgtcttctaaattcatgctgagccctaattgctgaaaagtgtaagacatgcaatggggggattatgtgcatcttcccgacaccaacatgatgctcaggaaggagacttcttgttttctcttaggattcttttactaaccaagattttgcctctactrcatatttccctttgctgattgtccctcccttttgacagaagatggcccagggcattcactactaagtctcaacctcttacccaaagccctcagtctagtgttgctctttccttcatgctatttttgtttgtttcttttcttgtaatcatcttggcaataaaataatcacttttttctttctacctattaaagatgttaccttagttaattacagtggtttccttcagaatgataaatggtctttcaaaatgatgtaaagagatctaaatccgtgtgctccagaagttgaatgaagatctgtctagcacgggtgcc

SEQ ID NO: 364513 - DNA, 598 bp, Homo sapiens
aacatctgggaggagacaccagggtgcggagtagtggggaacctgctctgtgctctgagactgaaagcccagccttgcctctcaccgctgccttgactgtgtccccatctgctgtgaagtgaatggtgtcttctaaattcatgctgagccctaattgctgaaaagtgtaagacatgcaatggggggattatgtgcatcttcccgacaccaacatgatgctcaggaaggagacttcttgttttctcttaggattcttttactaaccaagattttgcctctactacatatttccctttgctgattgtccctcccttttgacagaagatggcccagggcattcactactaagtctcaacctcttacccaaagccctcagtctagtgttgctctttccttcatgctatttttgtttstttcttttcttgtaatcatcttggcaataaaataatcacttttttctttctacctattaaagatgttaccttagttaattacagtggtttccttcagaatgataaatggtctttcaaaatgatgtaaagagatctaaatccgtgtgctccagaagttgaatgaagatctgtctagcacgggtgcc

SEQ ID NO: 364514 - DNA, 598 bp, Homo sapiens
aacatctgggaggagacaccagggtgcggagtagtggggaacctgctctgtgctctgagactgaaagcccagccttgcctctcaccgctgccttgactgtgtccccatctgctgtgaagtgaatggtgtcttctaaattcatgctgagccctaattgctgaaaagtgtaagacatgcaatggggggattatgtgcatcttcccgacaccaacatgatgctcaggaaggagacttcttgttttctcttaggattcttttactaaccaagattttgcctctactacatatttccctttgctgattgtccctcccttttgacagaagatggcccagggcattcactactaagtctcaacctcttacccaaagccctcagtctagtgttgctctttccttcatgctatttttgtttgtttcttttcttgtaatcatcttggcaataaaataatcacttttttctttctacctattaaagatgttaccttagttaattacagtggtttccttcagaatgataartggtctttcaaaatgatgtaaagagatctaaatccgtgtgctccagaagttgaatgaagatctgtctagcacgggtgcc

SEQ ID NO: 364515 - DNA, 524 bp, Homo sapiens
tgtaaattaaggagcctgaaacagggagatggtcttagattaatcaactgggacttaaatgcaaactcaagtgtcctaaaaaaaaacaagaggtagagagacatttagcatagactgaagtggagaaggyagtgtgaacacagagacagagattgcagtgatgtgtccacatcccgggagagagaagccaccagaagctggaagagctaaatcagactgctccctagagcttcagaaggagccagaactgatgactccaagatcttagcccagtgaaactgatctggacttctgaactatgagagattccattcctgttgtttgaagctaccacatttttgagaacttgtcacagtagcccgaggacactaacacaaacggggctccgggaaaatccagactaaaggtgttgtgttggtttgcaatctccttgcttaactttctgatactagacgtaaatagattggtgaaaaattttgtgattgaagaaatgtacatgaaacctacagtgtacagagaagcat

SEQ ID NO: 364516 - DNA, 573 bp, Homo sapiens
gcttttgcaggtgtaaattaaggagcctgaaacagggagatggtcttagattaatcaactgggacttaaatgcaaactcaagtgtcctaaaaaaaaacaagaggtagagagacatttagcatagactgaagtggagaaggtagtgtgaacacagagacagagattgcagtgatgtgtccacatcccgggagagagaagccaccagaagctggaagagctaaatcagactgctccctagagcttcagaaggagccagaactgatgactccaagatcttagcccagtgaaactgatctggacttctgaactrtgagagattccattcctgttgtttgaagctaccacatttttgagaacttgtcacagtagcccgaggacactaacacaaacggggctccgggaaaatccagactaaaggtgttgtgttggtttgcaatctccttgcttaactttctgatactagacgtaaatagattggtgaaaaattttgtgattgaagaaatgtacatgaaacctacagtgtacagagaagcatctgttagttataagataaatattgataattttagttga

SEQ ID NO: 364517 - DNA, 524 bp, Homo sapiens
tgtaaattaaggagcctgaaacagggagatggtcttagattaatcaactgggacttaaatgcaaactcaagtgtcctaaaaaaaaacaagaggtagagagacatttagcatagactgaagtggagaaggtagtgtgaacacagagacagagattgcagtgatgtgtccacatcccgggagagagaagccaccagaagctggaagagctaaatcagactgctccctagagcttcagaaggagccagaactgatgactccaagatcttagcccagtgaaactgatctggacttctgaactatgagagattccattcctgttgtttgaagctaccacatttttgagaacttgtyacagtagcccgaggacactaacacaaacggggctccgggaaaatccagactaaaggtgttgtgttggtttgcaatctccttgcttaactttctgatactagacgtaaatagattggtgaaaaattttgtgattgaagaaatgtacatgaaacctacagtgtacagagaagcat

SEQ ID NO: 364518 - DNA, 507 bp, Homo sapiens
cataaaaggggcactagatactcttctcatgtatgtgtgtgtgtctgtctatacatgtatgtacacttcatggtgcatcagctggcggaaccctcaggacagcccttcacatcctcagtgccccatttcacacatgaggaaactgttcatgacagcacatggctgatttgcataaaagtcacgtggtcagcagttgttgaagctgaacttggaatctaggtctgtctgaccttaactatgttccttccacagagccacgttcattccatagaggmacccaccacctataaaaccaggaaagagacaaagccagaagtgcagggtggatttcttaacacaagctcactgcgacctctagtcctcatcacgctgacactaagcttaaacccagacccttctacagttttgtctacaaagcacaatttgcccaaagcctttacaaacaccaacaccctttctttcagatatggcagcagggtcacatcttatacggccctgaccacattt

SEQ ID NO: 364519 - DNA, 507 bp, Homo sapiens
cataaaaggggcactagatactcttctcatgtatgtgtgtgtgtctgtctatacatgtatgtacacttcatggtgcatcagctggcggaaccctcaggacagcccttcacatcctcagtgccccatttcacacatgaggaaactgttcatgacagcacatggctgatttgcataaaagtcacgtggtcagcagttgttgaagctgaacttggaatctaggtctgtctgaccttaactatgttccttccacagagccacgttcattccatagaggaacccaccacctataaaaccaggaaagagacaaagccagaagtgcagggtggatttcttaacacaagctcactgcgacctctagtcctcatcacgctgacactaagcttaaacccagacccttctacagttttgtctacaaagcacaatttgcccaaagcctttacaaacaccaacascctttctttcagatatggcagcagggtcacatcttatacggccctgaccacattt

SEQ ID NO: 364520 - DNA, 295 bp, Homo sapiens
catctaatttgccctacaaatgttaaaacagcaaacccgcatccccttcctcttctcatgtgctgtgagggatgacctccaggctctcagataccaagattgtacaagacctaacccagagaattactcaagacactttctacgtaagaagaattgtggtrctagctctcctcatagaaaaatgttttctgtctcttgttgaaattgacagcaaacacaacaacacagaactatttgggagaacagaggacagtgatacactagggaagtaaaacacaccccttccccttgcatt

SEQ ID NO: 364521 - DNA, 488 bp, Homo sapiens
acaaatgttaaaacagcaaacccgcatccccttcctcttctcatgtgctgtgagggatgacctccaggctctcagataccaagattgtacaagacctaacccagagaattactcaagacactttctacgtaagaagaattgtggtgctagctctcctcatagaaaaatgttttctgtctcttgttgaaattgacagcaaacacaamaacacagaactatttgggagaacagaggacagtgatacactagggaagtaaaacacaccccttccccttgcattggtttcctgttgctgctgtaacaaattaccacaaccttactgctccacataacacaagtgtattatcttacatttctggaggtcagaagtctcaatgaagtaaaatcaaggagtaatagggctctattcattctaggcttcgagagagaatccaatatcgagcattccatctttctgatgttcccacattcctagcagcatggcccct

SEQ ID NO: 364522 - DNA, 295 bp, Homo sapiens
catctaatttgccctacaaatgttaaaacagcaaacccgcatccccttcctcttctcatgtgctgtgagggatgacctccaggctctcagataccaagattgtacaagacctaacccagagaattactcaagacactttctacgtaagaagaattgtggtgctagctctcctcatagaaaaatgttttctgtctcttgttgaaattgacagcaaacacaacaacacagaactayttgggagaacagaggacagtgatacactagggaagtaaaacacaccccttccccttgcatt

SEQ ID NO: 364523 - DNA, 488 bp, Homo sapiens
acaaatgttaaaacagcaaacccgcatccccttcctcttctcatgtgctgtgagggatgacctccaggctctcagataccaagattgtacaagacctaacccagagaattactcaagacactttctacgtaagaagaattgtggtgctagctctcctcatagaaaaatgttttctgtctcttgttgaaattgacagcaaacacaacaacacagaactatttgggagaacagaggacagtgatacactagggaagtaaaacacaccccttccccttgcattggtttcctgttgctgctgtaacaaattaccacaaccttactgctccmcataacacaagtgtattatcttacatttctggaggtcagaagtctcaatgaagtaaaatcaaggagtaatagggctctattcattctaggcttcgagagagaatccaatatcgagcattccatctttctgatgttcccacattcctagcagcatggcccct

SEQ ID NO: 364524 - DNA, 552 bp, Homo sapiens
attgacagcaaacacaacaacacagaactatttgggagaacagaggacagtgatacactagggaagtaaaacacaccccttccccttgcattggtttcctgttgctgctgtaacaaattaccacaaccttactgctccacataacacaagtgtattatcttacatttctggaggtcagaagtctcaatgaagtaaaatcaaggagtaatagggctctattcattctaggcttcgagagagaatccaatatcgagcattccatctttctgatgttcccacattcctarcagcatggccccttcctccatcactccagtttccctgtccattgtcccaggtcccctctggctgttaccttcctccttccctattataaggacccttgtgattatgatggtctcacccagataattcaggatactctcctgaccccaaaattctcaaccatgtctgccaagttatttttgacatattcataagtaatgatcatagattccaaatattacgacaatgatgtctttagtgggtgtattattcattccacaaacaacc

SEQ ID NO: 364525 - DNA, 439 bp, Homo sapiens
attcaaaccaacgatgccctccaagaatgaggatttttccaatgcattaggttgggtcccctcagtgagaaggatgccaaagattcgcatgcgggcagtatatttacaaagttcgggaaacaagcaagtgagcaagggaggggaggagggaaagggaaagtgaaaggtgcctcagaaggagccacctctgaggatgacgagagctcaagcccacatagaaacacaggaaaaatgcctctgttattccacatgagaggtgagggagctgsgggatgtgtacacctcccttgtcatcactgattggcagccgtcctaggggatgctaattccaggccgtgaggtctgcctcatttgcagcctgagctgcttccccaggttcagacagagcagtgaaggggagaaagggccatagagagtcagctgaagtataatgactaga

SEQ ID NO: 364526 - DNA, 439 bp, Homo sapiens
attcaaaccaacgatgccctccaagaatgaggatttttccaatgcattaggttgggtcccctcagtgagaaggatgccaaagattcgcatgcgggcagtatatttacaaagttcgggaaacaagcaagtgagcaagggaggggaggagggaaagggaaagtgaaaggtgcctcagaaggagccacctctgaggatgacgagagctcaagcccacatagaaacacaggaaaaatgcctctgttattccacatgagaggtgagggagctgcgggatgtgtacacctcccttgtcatcactgattggcagccgtcctaggggatgctaattccaggccgtgaggtctgcctcatttgcagcctgagctgcttccccaggttcagacagagcagtgaaggggagaaagggccatagagagtcagctgaagtataatgwctaga

SEQ ID NO: 364527 - DNA, 589 bp, Homo sapiens
tgtgaggctgggctgccccagtgctccttctggtgcctctatctgctgagggaagttctcaaactcagtcaggtttggaaagtcatcgggagattttcctagaggaggccagggaggttcctctgaacsctaagcctctttcgccctcatccccagcagaaaagacgtgacaatgcctgtcctgactgaataaagaagagagataagtccagctgaggagtctgtgttatgggataatcggaatttgtacagcaaaagagaagctattctcagtatttcaaggagaaattattcaagttgaataaattagagtctaagccacagtctttccgaagcctatggagtgttattcatgaagcaggtactagacacaggggattctcaggtgctacttcagaagccaggatgcacctgcccctggcggtatgtgctgaacaccgtgtgatgatcctcagtcctgtctgggaagcccagggctgggggtgctgatgctctcagctgcctgcagcacatctccaggtgattctccagtccacacctaactgcatgtgttttacttcaggtgtcagtgtacatgaatccaccactc

SEQ ID NO: 364528 - DNA, 589 bp, Homo sapiens
tgtgaggctgggctgccccagtgctccttctggtgcctctatctgctgagggaagttctcaaactcagtcaggtttggaaagtcatcgggagattttcctagaggaggccagggaggttcctctgaaccctaagcctctttcgccctcatccccagcagaaaagacgtgacaatgcctgtcctgactgaataaagaagagagataagtccagctgaggagtctgtgttatgggataatyggaatttgtacagcaaaagagaagctattctcagtatttcaaggagaaattattcaagttgaataaattagagtctaagccacagtctttccgaagcctatggagtgttattcatgaagcaggtactagacacaggggattctcaggtgctacttcagaagccaggatgcacctgcccctggcggtatgtgctgaacaccgtgtgatgatcctcagtcctgtctgggaagcccagggctgggggtgctgatgctctcagctgcctgcagcacatctccaggtgattctccagtccacacctaactgcatgtgttttacttcaggtgtcagtgtacatgaatccaccactc

SEQ ID NO: 364529 - DNA, 589 bp, Homo sapiens
tgtgaggctgggctgccccagtgctccttctggtgcctctatctgctgagggaagttctcaaactcagtcaggtttggaaagtcatcgggagattttcctagaggaggccagggaggttcctctgaaccctaagcctctttcgccctcatccccagcagaaaagacgtgacaatgcctgtcctgactgaataaagaagagagataagtccagctgaggagtctgtgttatgggataatcggaatttgtacagcaaaagagaagctattctcagtatttcaaggagaaattattcaagttgaataaattagagtctaarccacagtctttccgaagcctatggagtgttattcatgaagcaggtactagacacaggggattctcaggtgctacttcagaagccaggatgcacctgcccctggcggtatgtgctgaacaccgtgtgatgatcctcagtcctgtctgggaagcccagggctgggggtgctgatgctctcagctgcctgcagcacatctccaggtgattctccagtccacacctaactgcatgtgttttacttcaggtgtcagtgtacatgaatccaccactc

SEQ ID NO: 364530 - DNA, 589 bp, Homo sapiens
tgtgaggctgggctgccccagtgctccttctggtgcctctatctgctgagggaagttctcaaactcagtcaggtttggaaagtcatcgggagattttcctagaggaggccagggaggttcctctgaaccctaagcctctttcgccctcatccccagcagaaaagacgtgacaatgcctgtcctgactgaataaagaagagagataagtccagctgaggagtctgtgttatgggataatcggaatttgtacagcaaaagagaagctattctcagtatttcaaggagaaattattcaagttgaataaattagagtctaagccacagtctttccgaagcctatggagtgttattcatgaagcaggtactagacacaggggattctcaggtgctacttcagaagccaggatgcacctgcccctggyggtatgtgctgaacaccgtgtgatgatcctcagtcctgtctgggaagcccagggctgggggtgctgatgctctcagctgcctgcagcacatctccaggtgattctccagtccacacctaactgcatgtgttttacttcaggtgtcagtgtacatgaatccaccactc

SEQ ID NO: 364531 - DNA, 546 bp, Homo sapiens
agaatattaaggttggagttcttttgttggttttggggtttctggatttggctgctaaatatgattagatcccaaaatgctaaggactctacttttaatagtgtagagaayattgacagttcttggcatgaaaggtttaaagagctatgcaaaacaaattcatttgacactaatgaatcatcgctcgtgagaggcaaggagtttagtgactctgtacctaatacccttgacaaacaccttgcaaaatagatttgtgaggacagcacctgcatctttgaagagccctgtaaaggctcttctctgtatgtcagatctaatggtgagaactgcagtcactcagttacaaaagttaaatacaatttggaataattggatcctgaagtggcaggggccaagtggtagcactcaaccctcaaaggcacggtgggtgtagctaccgtaatgggcagaaaagacaaagcagcaatctgaacagtctgactcatgtagagctctggcattggctaactaatcacagtgttcctagaagtgaaactgacaggaaga

SEQ ID NO: 364532 - DNA, 546 bp, Homo sapiens
agaatattaaggttggagttcttttgttggttttggggtttctggatttggctgctaaatatgattagatcccaaaatgctaaggactctacttttaatagtgtagagaatattgacagttcttggcatgaaaggtttaaagagctatgcaaaacaaattcattygacactaatgaatcatcgctcgtgagaggcaaggagtttagtgactctgtacctaatacccttgacaaacaccttgcaaaatagatttgtgaggacagcacctgcatctttgaagagccctgtaaaggctcttctctgtatgtcagatctaatggtgagaactgcagtcactcagttacaaaagttaaatacaatttggaataattggatcctgaagtggcaggggccaagtggtagcactcaaccctcaaaggcacggtgggtgtagctaccgtaatgggcagaaaagacaaagcagcaatctgaacagtctgactcatgtagagctctggcattggctaactaatcacagtgttcctagaagtgaaactgacaggaaga

SEQ ID NO: 364533 - DNA, 546 bp, Homo sapiens
agaatattaaggttggagttcttttgttggttttggggtttctggatttggctgctaaatatgattagatcccaaaatgctaaggactctacttttaatagtgtagagaatattgacagttcttggcatgaaaggtttaaagagctatgcaaaacaaattcatttgacactaatgaatcatcgctcgtgagaggcaaggagtttagtgactctgtacctaatacccttgrcaaacaccttgcaaaatagatttgtgaggacagcacctgcatctttgaagagccctgtaaaggctcttctctgtatgtcagatctaatggtgagaactgcagtcactcagttacaaaagttaaatacaatttggaataattggatcctgaagtggcaggggccaagtggtagcactcaaccctcaaaggcacggtgggtgtagctaccgtaatgggcagaaaagacaaagcagcaatctgaacagtctgactcatgtagagctctggcattggctaactaatcacagtgttcctagaagtgaaactgacaggaaga

SEQ ID NO: 364534 - DNA, 546 bp, Homo sapiens
agaatattaaggttggagttcttttgttggttttggggtttctggatttggctgctaaatatgattagatcccaaaatgctaaggactctacttttaatagtgtagagaatattgacagttcttggcatgaaaggtttaaagagctatgcaaaacaaattcatttgacactaatgaatcatcgctcgtgagaggcaaggagtttagtgactctgtacctaatacccttgacaaacaccttgcaaaatagatttgtgaggacagcacctgcatctttgaagagccctgtaaaggctcttctctgtatgtcagwtctaatggtgagaactgcagtcactcagttacaaaagttaaatacaatttggaataattggatcctgaagtggcaggggccaagtggtagcactcaaccctcaaaggcacggtgggtgtagctaccgtaatgggcagaaaagacaaagcagcaatctgaacagtctgactcatgtagagctctggcattggctaactaatcacagtgttcctagaagtgaaactgacaggaaga

SEQ ID NO: 364535 - DNA, 315 bp, Homo sapiens
atggtggcagggatggaggctatgcatggattcagcaaggtggacttccactcaccaaggctgaactgtctgtggccactgctgagtgcccaatttgccagcagcagcagcagagactaacagtgaaccctttgtatggcatcatttccyggggtgatcgaccagctacccggtagcaagttgattatattggaactcttccaccatggaaaggagagaggtttgtcctcattggaacaggcacttactcaggatatgggcttgcccacctgcatgcaatgcttctgccaagactaccatttatggactcaagga

SEQ ID NO: 364536 - DNA, 315 bp, Homo sapiens
atggtggcagggatggaggctatgcatggattcagcaaggtggacttccactcaccaaggctgaactgtctgtggccactgctgagtgcccaatttgccagcagcagcagcagagactaacagtgaaccctttgtatggcatcatttcctggggtgatcgaccagctacccggtagcargttgattatattggaactcttccaccatggaaaggagagaggtttgtcctcattggaacaggcacttactcaggatatgggcttgcccacctgcatgcaatgcttctgccaagactaccatttatggactcaagga

SEQ ID NO: 364537 - DNA, 315 bp, Homo sapiens
atggtggcagggatggaggctatgcatggattcagcaaggtggacttccactcaccaaggctgaactgtctgtggccactgctgagtgcccaatttgccagcagcagcagcagagactaacagtgaaccctttgtatggcatcatttcctggggtgatcgaccagctacccggtagcaagttgattatattggaactcttccaccatggaaaggagagaggtttgtcctcattggaacaggcacttactcaggatatgggyttgcccacctgcatgcaatgcttctgccaagactaccatttatggactcaagga

SEQ ID NO: 364538 - DNA, 315 bp, Homo sapiens
atggtggcagggatggaggctatgcatggattcagcaaggtggacttccactcaccaaggctgaactgtctgtggccactgctgagtgcccaatttgccagcagcagcagcagagactaacagtgaaccctttgtatggcatcatttcctggggtgatcgaccagctacccggtagcaagttgattatattggaactcttccaccatggaaaggagagaggtttgtcctcattggaacaggcacttactcaggatatgggcttgccyacctgcatgcaatgcttctgccaagactaccatttatggactcaagga

SEQ ID NO: 364539 - DNA, 362 bp, Homo sapiens
gtgtgggttcaagttcacaaggggtgggcttgtgatggttaataatgagtgtcaacttgattggattgaaggatgtaaagtattcatcctgggtgtgtctgtgagggtgttgccaaaaaaagattaacatgtgagtcagtgggctgggaaaggcagacccacccttaatctgtgtggrcacaatccaatcagctgccaacccagccatactataagcaggcagaaaaatgtgaaaagagacgggcctcgcctcccagcctacatctttctcccatgctggatgcttcttgccctcgaacatggactccaagttcttcagttttggaactctggctggctctttttgctcctcatccagcaga

SEQ ID NO: 364540 - DNA, 582 bp, Homo sapiens
aagttcttcagttttggaactctggctggctctttttgctcctcatccagcagatgrcctattgtgagacttggtgattgtgtgagttaatacttaataaacttcctgtataagccagtgacatctagagggacagaactaacaggatatatacatatatatatacatacacacacacatatatatatgcacacacacacacacacatatatatatttatttacaaaggggagtttattaacttacaggatcataagttacacaatgggctgtctgcaaactgatgagaaaggagagccatggagtccaatgtttgagggcaggaagaaaccagcatgggagaaaaaagatgtaggctgggaggctaggccagtctctccttttcaaatttttctgcctgctttatatttgctggcagcagattagattgtgcccaccagattaagggtgggtctgccttccccagcccactgactcaaatgttaatctctttcggcaacactctcacagacacaccctggatcaatacttcatatccctcaatcctatcaagttgacagtcattattaaccatctcactcc

SEQ ID NO: 364541 - DNA, 582 bp, Homo sapiens
aagttcttcagttttggaactctggctggctctttttgctcctcatccagcagatggcctattgtgagacttggtgattgtgtgagttaatacttaataaacttcctgtatwagccagtgacatctagagggacagaactaacaggatatatacatatatatatacatacacacacacatatatatatgcacacacacacacacacatatatatatttatttacaaaggggagtttattaacttacaggatcataagttacacaatgggctgtctgcaaactgatgagaaaggagagccatggagtccaatgtttgagggcaggaagaaaccagcatgggagaaaaaagatgtaggctgggaggctaggccagtctctccttttcaaatttttctgcctgctttatatttgctggcagcagattagattgtgcccaccagattaagggtgggtctgccttccccagcccactgactcaaatgttaatctctttcggcaacactctcacagacacaccctggatcaatacttcatatccctcaatcctatcaagttgacagtcattattaaccatctcactcc

SEQ ID NO: 364542 - DNA, 582 bp, Homo sapiens
aagttcttcagttttggaactctggctggctctttttgctcctcatccagcagatggcctattgtgagacttggtgattgtgtgagttaatacttaataaacttcctgtataagccagtgrcatctagagggacagaactaacaggatatatacatatatatatacatacacacacacatatatatatgcacacacacacacacacatatatatatttatttacaaaggggagtttattaacttacaggatcataagttacacaatgggctgtctgcaaactgatgagaaaggagagccatggagtccaatgtttgagggcaggaagaaaccagcatgggagaaaaaagatgtaggctgggaggctaggccagtctctccttttcaaatttttctgcctgctttatatttgctggcagcagattagattgtgcccaccagattaagggtgggtctgccttccccagcccactgactcaaatgttaatctctttcggcaacactctcacagacacaccctggatcaatacttcatatccctcaatcctatcaagttgacagtcattattaaccatctcactcc

SEQ ID NO: 364543 - DNA, 582 bp, Homo sapiens
gtatgtgggcatggtggcatgcccctgtgatcccagctactccataggcttagggggcagaatcacttgtgcttgagaattcaaggttgcaaggagccatgatcacaccactgcacttcatgctgggtaactgagaccctgtgatttttcgcctacattttacagaattttttttttttgcctctttcttctattaatttatgttttgtccattcattttctgcaawcctttagagggcaaataggaagtttccctttttaacgtggtggctcacgcctgtaatcccagcactttgggaggccgaggtgagcagaccacctgaggttgggagttcgagactagcctgaccaacatagagaaaccccgcctccactaaaaaaaatacaaaattggcaggctgtggtggtgtgcacctgtgatcccagctactcaggaggctgaggcaagagaattgcttggacctgggaggcggaggttgcagtgagcccagattgtgccaccacactccagcctgggtgacaagagcgaaactccgtctcaaaaaaaaaaaaaaaaagaaacaaaaacaaacaaagaaaaaa

SEQ ID NO: 364544 - DNA, 582 bp, Homo sapiens
gtatgtgggcatggtggcatgcccctgtgatcccagctactccataggcttagggggcagaatcacttgtgcttgagaattcaaggttgcaaggagccatgatcacaccactgcacttcatgctgggtaactgagaccctgtgatttttcgcctacattttacagaattttttttttttgcctctttcttctattaatttatgttttgtccattcattttctgcaaacctttagagggcaaataggaagtttccctttttaacgtggtggctcacgcctgtaatcccagcactttgggaggccsaggtgagcagaccacctgaggttgggagttcgagactagcctgaccaacatagagaaaccccgcctccactaaaaaaaatacaaaattggcaggctgtggtggtgtgcacctgtgatcccagctactcaggaggctgaggcaagagaattgcttggacctgggaggcggaggttgcagtgagcccagattgtgccaccacactccagcctgggtgacaagagcgaaactccgtctcaaaaaaaaaaaaaaaaagaaacaaaaacaaacaaagaaaaaa

SEQ ID NO: 364545 - DNA, 582 bp, Homo sapiens
gtatgtgggcatggtggcatgcccctgtgatcccagctactccataggcttagggggcagaatcacttgtgcttgagaattcaaggttgcaaggagccatgatcacaccactgcacttcatgctgggtaactgagaccctgtgatttttcgcctacattttacagaattttttttttttgcctctttcttctattaatttatgttttgtccattcattttctgcaaacctttagagggcaaataggaagtttccctttttaacgtggtggctcacgcctgtaatcccagcactttgggaggccgaggtgagcagaccacctgaggttgggagttcgagactagcctgaccaacatagagaaaccccgcctccactaaaaaaaatacaaaattrgcaggctgtggtggtgtgcacctgtgatcccagctactcaggaggctgaggcaagagaattgcttggacctgggaggcggaggttgcagtgagcccagattgtgccaccacactccagcctgggtgacaagagcgaaactccgtctcaaaaaaaaaaaaaaaaagaaacaaaaacaaacaaagaaaaaa

SEQ ID NO: 364546 - DNA, 582 bp, Homo sapiens
gtatgtgggcatggtggcatgcccctgtgatcccagctactccataggcttagggggcagaatcacttgtgcttgagaattcaaggttgcaaggagccatgatcacaccactgcacttcatgctgggtaactgagaccctgtgatttttcgcctacattttacagaattttttttttttgcctctttcttctattaatttatgttttgtccattcattttctgcaaacctttagagggcaaataggaagtttccctttttaacgtggtggctcacgcctgtaatcccagcactttgggaggccgaggtgagcagaccacctgaggttgggagttcgagactagcctgaccaacatagagaaaccccgcctccactaaaaaaaatacaaaattggcaggctgtggtggtgtgcacctgtgatcccagctactcaggaggctgaggcaagagaattgcttggacctgggaggcggaggttgcagtgagcccagattgtgccacyacactccagcctgggtgacaagagcgaaactccgtctcaaaaaaaaaaaaaaaaagaaacaaaaacaaacaaagaaaaaa

SEQ ID NO: 364547 - DNA, 245 bp, Homo sapiens
gtgttcagcagtttctttgttatttcaaagagtggcatctgcttcagcagggtcagtttttaatgtatttgttttgtttcttttttctctgtctggtgttsttttctattttattataattttttaaatttgagggatgaggttttcatagtactgaatatcaaacaatgaatccgcatgaatgattcacctaatttccctggttttagtcctctatacaggttttatatagcaaaagaaccatt

SEQ ID NO: 364548 - DNA, 245 bp, Homo sapiens
gtgttcagcagtttctttgttatttcaaagagtggcatctgcttcagcagggtcagtttttaatgtatttgttttgtttcttttttctctgtctggtgttcttttctattttattataattttttaaatttgagggatgaggttttcatagyactgaatatcaaacaatgaatccgcatgaatgattcacctaatttccctggttttagtcctctatacaggttttatatagcaaaagaaccatt

SEQ ID NO: 364549 - DNA, 578 bp, Homo sapiens
cctactgcctcactgaattaaaggcgtgttcagcagtttctttgttatttcaaagagtggcatctgcttcagcagggtcagtttttaatgtatttgttttgtttcttttttctctgtctggtgttcttttctattttattataattttttaaatttgagggatgaggttttcatagtactgaatatcaaacaatgaatccrcatgaatgattcacctaatttccctggttttagtcctctatacaggttttatatagcaaaagaaccatttaaagacttgggttacaaatgtattttattttacctctggcatgccttgggctgagaaagcattatatggtggcacaatatttgtaacattctcatagccatctggtggtggttcgaggtatgacattttgaaaatctagcaagaattaaaatatgtcaagttagagagaaaaattccagattattattaagatataattcattttgccccaagtatatacttcagattaagcatcctggaactaggttctataattaaatagataaattacactgacaacaatgagaaagagccttatcattattat

SEQ ID NO: 364550 - DNA, 578 bp, Homo sapiens
cctactgcctcactgaattaaaggcgtgttcagcagtttctttgttatttcaaagagtggcatctgcttcagcagggtcagtttttaatgtatttgttttgtttcttttttctctgtctggtgttcttttctattttattataattttttaaatttgagggatgaggttttcatagtactgaatatcaaacaatgaatccgcatgaatgattcacctaatttccytggttttagtcctctatacaggttttatatagcaaaagaaccatttaaagacttgggttacaaatgtattttattttacctctggcatgccttgggctgagaaagcattatatggtggcacaatatttgtaacattctcatagccatctggtggtggttcgaggtatgacattttgaaaatctagcaagaattaaaatatgtcaagttagagagaaaaattccagattattattaagatataattcattttgccccaagtatatacttcagattaagcatcctggaactaggttctataattaaatagataaattacactgacaacaatgagaaagagccttatcattattat

SEQ ID NO: 364551 - DNA, 578 bp, Homo sapiens
cctactgcctcactgaattaaaggcgtgttcagcagtttctttgttatttcaaagagtggcatctgcttcagcagggtcagtttttaatgtatttgttttgtttcttttttctctgtctggtgttcttttctattttattataattttttaaatttgagggatgaggttttcatagtactgaatatcaaacaatgaatccgcatgaatgattcacctaatttccctggttttagtcctctatacaggttttatatagcaaaagaaccatttaaagacttgrgttacaaatgtattttattttacctctggcatgccttgggctgagaaagcattatatggtggcacaatatttgtaacattctcatagccatctggtggtggttcgaggtatgacattttgaaaatctagcaagaattaaaatatgtcaagttagagagaaaaattccagattattattaagatataattcattttgccccaagtatatacttcagattaagcatcctggaactaggttctataattaaatagataaattacactgacaacaatgagaaagagccttatcattattat

SEQ ID NO: 364552 - DNA, 578 bp, Homo sapiens
cctactgcctcactgaattaaaggcgtgttcagcagtttctttgttatttcaaagagtggcatctgcttcagcagggtcagtttttaatgtatttgttttgtttcttttttctctgtctggtgttcttttctattttattataattttttaaatttgagggatgaggttttcatagtactgaatatcaaacaatgaatccgcatgaatgattcacctaatttccctggttttagtcctctatacaggttttatatagcaaaagaaccatttaaagacttgggttacaaatgtattttattttacctctggcatgccttgggctgagaaagcattatatggtggcacaatatttgtaacattctcatagccatctggtggtggttcgaggtatgacrttttgaaaatctagcaagaattaaaatatgtcaagttagagagaaaaattccagattattattaagatataattcattttgccccaagtatatacttcagattaagcatcctggaactaggttctataattaaatagataaattacactgacaacaatgagaaagagccttatcattattat

SEQ ID NO: 364553 - DNA, 561 bp, Homo sapiens
tgtaacattctcatagccatctggtggtggttcgaggtatgacattttgaaaatctagcaagaattaaaatatgtcaagttagagagaaaaattccagattattattaagwtataattcattttgccccaagtatatacttcagattaagcatcctggaactaggttctataattaaatagataaattacactgacaacaatgagaaagagccttatcattattattgtcttcctaataatagaaacttttataaatgcatgcaatctcaggtaaccaaaagtttccttataaagtgtaacagcagagcttcaaaggtggcactttggcaagcctctttttttgactatgccttttcagcttcctttgtgggctccttttctttcatctttatttaaataatatttccctatgttttatccccagcccattgcttgcctctgtactgcctccctgcgagacttcattaagtatcagaattttaccaatagctcatatgcttatgatgcttaccttttcagattcgtatatttaaatgttttgtggttatttcatcctggat

SEQ ID NO: 364554 - DNA, 561 bp, Homo sapiens
tgtaacattctcatagccatctggtggtggttcgaggtatgacattttgaaaatctagcaagaattaaaatatgtcaagttagagagaaaaattccagattattattaagatataattcattttgccccaagtatatacttcagattaagcatcctggaactaggttctataattaaatagataaattacactgacaacaatgagaaagarccttatcattattattgtcttcctaataatagaaacttttataaatgcatgcaatctcaggtaaccaaaagtttccttataaagtgtaacagcagagcttcaaaggtggcactttggcaagcctctttttttgactatgccttttcagcttcctttgtgggctccttttctttcatctttatttaaataatatttccctatgttttatccccagcccattgcttgcctctgtactgcctccctgcgagacttcattaagtatcagaattttaccaatagctcatatgcttatgatgcttaccttttcagattcgtatatttaaatgttttgtggttatttcatcctggat

SEQ ID NO: 364555 - DNA, 561 bp, Homo sapiens
tgtaacattctcatagccatctggtggtggttcgaggtatgacattttgaaaatctagcaagaattaaaatatgtcaagttagagagaaaaattccagattattattaagatataattcattttgccccaagtatatacttcagattaagcatcctggaactaggttctataattaaatagataaattacactgacaacaatgagaaagagccttaycattattattgtcttcctaataatagaaacttttataaatgcatgcaatctcaggtaaccaaaagtttccttataaagtgtaacagcagagcttcaaaggtggcactttggcaagcctctttttttgactatgccttttcagcttcctttgtgggctccttttctttcatctttatttaaataatatttccctatgttttatccccagcccattgcttgcctctgtactgcctccctgcgagacttcattaagtatcagaattttaccaatagctcatatgcttatgatgcttaccttttcagattcgtatatttaaatgttttgtggttatttcatcctggat

SEQ ID NO: 364556 - DNA, 504 bp, Homo sapiens
gttctataattaaatagataaattacactgacaacaatgagaaagagccttatcattattattgtcttcctaataatagaaacttttataaatgcatgcaatcycaggtaaccaaaagtttccttataaagtgtaacagcagagcttcaaaggtggcactttggcaagcctctttttttgactatgccttttcagcttcctttgtgggctccttttctttcatctttatttaaataatatttccctatgttttatccccagcccattgcttgcctctgtactgcctccctgcgagacttcattaagtatcagaattttaccaatagctcatatgcttatgatgcttaccttttcagattcgtatatttaaatgttttgtggttatttcatcctggatgtccaaactcaacatgttaaaattcaaatttatcatctctcaccccgggcctgcttttggtctgcatttcctacctctattaatagcttcagtcattagccaccgac

SEQ ID NO: 364557 - DNA, 504 bp, Homo sapiens
gttctataattaaatagataaattacactgacaacaatgagaaagagccttatcattattattgtcttcctaataatagaaacttttataaatgcatgcaatctcaggtaaccaaaagtttccttataaagtgtaacagcagagcttcaaaggtggcactttggcaagccyctttttttgactatgccttttcagcttcctttgtgggctccttttctttcatctttatttaaataatatttccctatgttttatccccagcccattgcttgcctctgtactgcctccctgcgagacttcattaagtatcagaattttaccaatagctcatatgcttatgatgcttaccttttcagattcgtatatttaaatgttttgtggttatttcatcctggatgtccaaactcaacatgttaaaattcaaatttatcatctctcaccccgggcctgcttttggtctgcatttcctacctctattaatagcttcagtcattagccaccgac

SEQ ID NO: 364558 - DNA, 504 bp, Homo sapiens
gttctataattaaatagataaattacactgacaacaatgagaaagagccttatcattattattgtcttcctaataatagaaacttttataaatgcatgcaatctcaggtaaccaaaagtttccttataaagtgtaacagcagagcttcaaaggtggcactttggcaagcctctttttttgactatgccttttcagcttcctttgtgggytccttttctttcatctttatttaaataatatttccctatgttttatccccagcccattgcttgcctctgtactgcctccctgcgagacttcattaagtatcagaattttaccaatagctcatatgcttatgatgcttaccttttcagattcgtatatttaaatgttttgtggttatttcatcctggatgtccaaactcaacatgttaaaattcaaatttatcatctctcaccccgggcctgcttttggtctgcatttcctacctctattaatagcttcagtcattagccaccgac

SEQ ID NO: 364559 - DNA, 507 bp, Homo sapiens
atgccttttcagcttcctttgtgggctccttttctttcatctttatttaaataatatttccctatgttttatccccagcccattgcttgcctctgtactgcctcccygcgagacttcattaagtatcagaattttaccaatagctcatatgcttatgatgcttaccttttcagattcgtatatttaaatgttttgtggttatttcatcctggatgtccaaactcaacatgttaaaattcaaatttatcatctctcaccccgggcctgcttttggtctgcatttcctacctctattaatagcttcagtcattagccaccgacaccagacagtctcggagtcatcctgaactctatcttcccctccttccccaagtcaatcactaatcaagtcctgctaatacatttccttactatttctgaaatccatccctcttcctcattcctactaacatcctaatttaaaactttattatcttttacctggaccatcgtcttaagacaacaact

SEQ ID NO: 364560 - DNA, 561 bp, Homo sapiens
tgtaacattctcatagccatctggtggtggttcgaggtatgacattttgaaaatctagcaagaattaaaatatgtcaagttagagagaaaaattccagattattattaagatataattcattttgccccaagtatatacttcagattaagcatcctggaactaggttctataattaaatagataaattacactgacaacaatgagaaagagccttatcattattattgtcttcctaataatagaaacttttataaatgcatgcaatctcaggtaaccaaaagtttccttataaagtgtaacagcagagcttcaaaggtggcactttggcaagcctctttttttgactatgccttttcagcttcctttgtgggctccttttctttcatctttatttaaataatatttccctatgttttatccccagcccattgcttgcctctgtactgcctccctgcragacttcattaagtatcagaattttaccaatagctcatatgcttatgatgcttaccttttcagattcgtatatttaaatgttttgtggttatttcatcctggat

SEQ ID NO: 364561 - DNA, 507 bp, Homo sapiens
atgccttttcagcttcctttgtgggctccttttctttcatctttatttaaataatatttccctatgttttatccccagcccattgcttgcctctgtactgcctccctgcgagacttcattaagtatcagaattttaccaatagctcatatgcttatgatgcttaccttttcagattcgtatatttaaatgttttgtgrttatttcatcctggatgtccaaactcaacatgttaaaattcaaatttatcatctctcaccccgggcctgcttttggtctgcatttcctacctctattaatagcttcagtcattagccaccgacaccagacagtctcggagtcatcctgaactctatcttcccctccttccccaagtcaatcactaatcaagtcctgctaatacatttccttactatttctgaaatccatccctcttcctcattcctactaacatcctaatttaaaactttattatcttttacctggaccatcgtcttaagacaacaact

SEQ ID NO: 364562 - DNA, 507 bp, Homo sapiens
atgccttttcagcttcctttgtgggctccttttctttcatctttatttaaataatatttccctatgttttatccccagcccattgcttgcctctgtactgcctccctgcgagacttcattaagtatcagaattttaccaatagctcatatgcttatgatgcttaccttttcagattcgtatatttaaatgttttgtggttatttcatcctggatgtccaaactcwacatgttaaaattcaaatttatcatctctcaccccgggcctgcttttggtctgcatttcctacctctattaatagcttcagtcattagccaccgacaccagacagtctcggagtcatcctgaactctatcttcccctccttccccaagtcaatcactaatcaagtcctgctaatacatttccttactatttctgaaatccatccctcttcctcattcctactaacatcctaatttaaaactttattatcttttacctggaccatcgtcttaagacaacaact

SEQ ID NO: 364563 - DNA, 507 bp, Homo sapiens
atgccttttcagcttcctttgtgggctccttttctttcatctttatttaaataatatttccctatgttttatccccagcccattgcttgcctctgtactgcctccctgcgagacttcattaagtatcagaattttaccaatagctcatatgcttatgatgcttaccttttcagattcgtatatttaaatgttttgtggttatttcatcctggatgtccaaactcaacatgttaaaattcaaatttatcatctctcacccygggcctgcttttggtctgcatttcctacctctattaatagcttcagtcattagccaccgacaccagacagtctcggagtcatcctgaactctatcttcccctccttccccaagtcaatcactaatcaagtcctgctaatacatttccttactatttctgaaatccatccctcttcctcattcctactaacatcctaatttaaaactttattatcttttacctggaccatcgtcttaagacaacaact

SEQ ID NO: 364564 - DNA, 429 bp, Homo sapiens
attttaccaatagctcatatgcttatgatgcttaccttttcagattcgtatatttaaatgttttgtggttatttcatcctggatgtccaaactcaacatgttaaaattcaaatttatcatctctcaccccgggcctgcttttggtctgcattwcctacctctattaatagcttcagtcattagccaccgacaccagacagtctcggagtcatcctgaactctatcttcccctccttccccaagtcaatcactaatcaagtcctgctaatacatttccttactatttctgaaatccatccctcttcctcattcctactaacatcctaatttaaaactttattatcttttacctggaccatcgtcttaagacaacaactttaacccgttgcttagcctaggtgtaatccacagaggatcttgtctgtctaa

SEQ ID NO: 364565 - DNA, 429 bp, Homo sapiens
attttaccaatagctcatatgcttatgatgcttaccttttcagattcgtatatttaaatgttttgtggttatttcatcctggatgtccaaactcaacatgttaaaattcaaatttatcatctctcaccccgggcctgcttttggtctgcatttcctacctctattaatagcttcagtcattagccaccgacaccagacagtctcggagtcatcctgaactctatcttcccctccttccccaagtcaatcactaatcaagtcctgctaatacatttccttactatttctgaaatccatccstcttcctcattcctactaacatcctaatttaaaactttattatcttttacctggaccatcgtcttaagacaacaactttaacccgttgcttagcctaggtgtaatccacagaggatcttgtctgtctaa

SEQ ID NO: 364566 - DNA, 428 bp, Homo sapiens
gacccttttctgggtaaataatgaactctaatcatactcttcatagcacttaccatactaatttgaagtctgaagtaytccattgtctgcctcactttacttaggcaaaggaaccatgtcctagtctcattctggcctcaggacttcagcctgggcgacagtgggagactgtgtgtcaaaaaaaaaaaaattgccaatgattgaagcctaatactgaagattctggtttattaataattagtctgttgctgggtgttaattgagctccccaagtgattactcatgtaggacttcaaaacaataatttagaaccttgtgactcaaaatctgggcaaaaataagcggcatcagtatcacctgggagcagcttcaggtctcactttagatttactctgaatctaaatattatatttttattaaaaaaatta

SEQ ID NO: 364567 - DNA, 428 bp, Homo sapiens
gacccttttctgggtaaataatgaactctaatcatactcttcatagcacttaccatactaatttgaagtctgaagtactccattktctgcctcactttacttaggcaaaggaaccatgtcctagtctcattctggcctcaggacttcagcctgggcgacagtgggagactgtgtgtcaaaaaaaaaaaaattgccaatgattgaagcctaatactgaagattctggtttattaataattagtctgttgctgggtgttaattgagctccccaagtgattactcatgtaggacttcaaaacaataatttagaaccttgtgactcaaaatctgggcaaaaataagcggcatcagtatcacctgggagcagcttcaggtctcactttagatttactctgaatctaaatattatatttttattaaaaaaatta

SEQ ID NO: 364568 - DNA, 428 bp, Homo sapiens
gacccttttctgggtaaataatgaactctaatcatactcttcatagcacttaccatactaatttgaagtctgaagtactccattgtctgcctcastttacttaggcaaaggaaccatgtcctagtctcattctggcctcaggacttcagcctgggcgacagtgggagactgtgtgtcaaaaaaaaaaaaattgccaatgattgaagcctaatactgaagattctggtttattaataattagtctgttgctgggtgttaattgagctccccaagtgattactcatgtaggacttcaaaacaataatttagaaccttgtgactcaaaatctgggcaaaaataagcggcatcagtatcacctgggagcagcttcaggtctcactttagatttactctgaatctaaatattatatttttattaaaaaaatta

SEQ ID NO: 364569 - DNA, 568 bp, Homo sapiens
tgagtgagaacatgtggtgttgaaatttctattcctggcttattttgcttaacataatatcctccagttccatccatgttgctgagaatgacaggattttatttattcttttttatcgctaaatagcattccttggtgtatatataccatattttaaaartccattcatctgttgttggaaactaggttgattccatatcttggctattgtgaacactgttgcaataaacatggggatgcagatgtctctgcaatataatgcttttctttcctttggataagttcccagtagtgggattgcttgaggtgtttcaatactgttctccatactggctgcactaatttacattcctaccaacagtgcataagagttcctttttctccagctactcaggaggctgagggaggagaactatttgaaccctagaagcagagggagccagattacaccaccactgcactccagcctggatggagagtgagactctgtcaaaaaaaagtcccttttcttcacgtctttgtcagcatttgttatttttgtctcttccataatagccatcctaactgg

SEQ ID NO: 364570 - DNA, 568 bp, Homo sapiens
tgagtgagaacatgtggtgttgaaatttctattcctggcttattttgcttaacataatatcctccagttccatccatgttgctgagaatgacaggattttatttattcttttttatcgctaaatagcattccttggtgtatatataccatattttaaaagtccattcatctgttgttggaaactaggttgattccatatcttggctattgtgaacactgttgcaataaacatggggatgcagatgtctctgcaatataatgcttttctttcctttggataarttcccagtagtgggattgcttgaggtgtttcaatactgttctccatactggctgcactaatttacattcctaccaacagtgcataagagttcctttttctccagctactcaggaggctgagggaggagaactatttgaaccctagaagcagagggagccagattacaccaccactgcactccagcctggatggagagtgagactctgtcaaaaaaaagtcccttttcttcacgtctttgtcagcatttgttatttttgtctcttccataatagccatcctaactgg

SEQ ID NO: 364571 - DNA, 568 bp, Homo sapiens
tgagtgagaacatgtggtgttgaaatttctattcctggcttattttgcttaacataatatcctccagttccatccatgttgctgagaatgacaggattttatttattcttttttatcgctaaatagcattccttggtgtatatataccatattttaaaagtccattcatctgttgttggaaactaggttgattccatatcttggctattgtgaacactgttgcaataaacatggggatgcagatgtctctgcaatataatgcttttctttcctttggataagttcccagtagtgggattgcttgaggtgtttcaatactgttctccatacyggctgcactaatttacattcctaccaacagtgcataagagttcctttttctccagctactcaggaggctgagggaggagaactatttgaaccctagaagcagagggagccagattacaccaccactgcactccagcctggatggagagtgagactctgtcaaaaaaaagtcccttttcttcacgtctttgtcagcatttgttatttttgtctcttccataatagccatcctaactgg

SEQ ID NO: 364572 - DNA, 568 bp, Homo sapiens
tgagtgagaacatgtggtgttgaaatttctattcctggcttattttgcttaacataatatcctccagttccatccatgttgctgagaatgacaggattttatttattcttttttatcgctaaatagcattccttggtgtatatataccatattttaaaagtccattcatctgttgttggaaactaggttgattccatatcttggctattgtgaacactgttgcaataaacatggggatgcagatgtctctgcaatataatgcttttctttcctttggataagttcccagtagtgggattgcttgaggtgtttcaatactgttctccatactggctgcactaatttacattcctaccaacagtgcataagagttcctttttctccagctactcaggaggctgagggaggagaactatttgaaccctagaagcagagggagccagattacaccaccactgcactccagcctggayggagagtgagactctgtcaaaaaaaagtcccttttcttcacgtctttgtcagcatttgttatttttgtctcttccataatagccatcctaactgg

SEQ ID NO: 364573 - DNA, 378 bp, Homo sapiens
tatgaaagaaaaaaaaggcttctctacagttgcttaggccyggtgccatggcacacacctataaatcccagcgctgtgggaggccatggcaagaggatcctttgagcccaggagtttgagaccagcgtggacaacaaagtgagacctcatctctacaaaaaataaaaaagaaattagctggccatggtggtgcgtgcctgtggtcctagctacgcgagaggctgaggaaggaggatcacttgagccagggaggtggaggtttcactgaaccatattcacgccactccactgcagcctgggcaacagagctagaccttgtctcaaaaaattaagttagttaaattaaacataaagttgcattgtatctaagaaattggg

SEQ ID NO: 364574 - DNA, 378 bp, Homo sapiens
tatgaaagaaaaaaaaggcttctctacagttgcttaggcccggtgccatggcacacacctataaatcccagcgctgtgggaggccatggcaagaggatcctttgagcccaggagtttgagaccagcrtggacaacaaagtgagacctcatctctacaaaaaataaaaaagaaattagctggccatggtggtgcgtgcctgtggtcctagctacgcgagaggctgaggaaggaggatcacttgagccagggaggtggaggtttcactgaaccatattcacgccactccactgcagcctgggcaacagagctagaccttgtctcaaaaaattaagttagttaaattaaacataaagttgcattgtatctaagaaattggg

SEQ ID NO: 364575 - DNA, 378 bp, Homo sapiens
tatgaaagaaaaaaaaggcttctctacagttgcttaggcccggtgccatggcacacacctataaatcccagcgctgtgggaggccatggcaagaggatcctttgagcccaggagtttgagaccagcgtggacaacaaagtgagacctcatctctacaaaaaataaaaaagaaattagctggccatggtggtgcgtgcctgtggtcctagctackcgagaggctgaggaaggaggatcacttgagccagggaggtggaggtttcactgaaccatattcacgccactccactgcagcctgggcaacagagctagaccttgtctcaaaaaattaagttagttaaattaaacataaagttgcattgtatctaagaaattggg

SEQ ID NO: 364576 - DNA, 585 bp, Homo sapiens
atggtggtgcgtgcctgtggtcctagctacgcgagaggctgaggaaggaggatcacttgagccagggaggtggaggtttcactgaaccatattsacgccactccactgcagcctgggcaacagagctagaccttgtctcaaaaaattaagttagttaaattaaacataaagttgcattgtatctaagaaattgggaaagcaggaaatgcttctgtttttcttttgagttgaacaatgagaacacatggacacagggaggggaacatcacataccggggcctgtcaggggggtgggaggctgggggagtgatagcattaggagaaatacctaatgtagatgatgggttgatgggtgcagtaaaccaccatggcatgtgtatacctatgtaacaaacctccacgttctgtacatgtatctcagaacttaaaatgtaataataacaataataaaaacgacaaaaaaaggaaatgcttcttgttagaacagattacataacctcattgctttttataatagcctataataacagaatatccacaaggtggcagtaatatatcagtttcatcctctgaaattaaaacttt

SEQ ID NO: 364577 - DNA, 378 bp, Homo sapiens
tatgaaagaaaaaaaaggcttctctacagttgcttaggcccggtgccatggcacacacctataaatcccagcgctgtgggaggccatggcaagaggatcctttgagcccaggagtttgagaccagcgtggacaacaaagtgagacctcatctctacaaaaaataaaaaagaaattagctggccatggtggtgcgtgcctgtggtcctagctacgcgagaggctgaggaaggaggatcacttgagccagggaggtggaggtttcactgaaccatattcacgccactccactscagcctgggcaacagagctagaccttgtctcaaaaaattaagttagttaaattaaacataaagttgcattgtatctaagaaattggg

SEQ ID NO: 364578 - DNA, 332 bp, Homo sapiens
tagcattaggagaaatacctaatgtagatgatgggttgatggktgcagtaaaccaccatggcatgtgtatacctatgtaacaaacctccacgttctgtacatgtatctcagaacttaaaatgtaataataacaataataaaaacgacaaaaaaaggaaatgcttcttgttagaacagattacataacctcattgctttttataatagcctataataacagaatatccacaaggtggcagtaatatatcagtttcatcctctgaaattaaaacttttgcctattcagtaatacaatggatcttttgaactcactctaacacgtagaatacagc

SEQ ID NO: 364579 - DNA, 332 bp, Homo sapiens
tagcattaggagaaatacctaatgtagatgatgggttgatgggtgcagtaaaccaccatggcatgtgtatacctatgtaacaaacctccacgttctgtacatgtatctcagaacttaaaatgtaataataacaataataaaaacgacaaaaaaaggaaatgcttcttgttagaacagattacatamcctcattgctttttataatagcctataataacagaatatccacaaggtggcagtaatatatcagtttcatcctctgaaattaaaacttttgcctattcagtaatacaatggatcttttgaactcactctaacacgtagaatacagc

SEQ ID NO: 364580 - DNA, 332 bp, Homo sapiens
tagcattaggagaaatacctaatgtagatgatgggttgatgggtgcagtaaaccaccatggcatgtgtatacctatgtaacaaacctccacgttctgtacatgtatctcagaacttaaaatgtaataataacaataataaaaacgacaaaaaaaggaaatgcttcttgttagaacagattacataacctcattgctttttataatagcctrtaataacagaatatccacaaggtggcagtaatatatcagtttcatcctctgaaattaaaacttttgcctattcagtaatacaatggatcttttgaactcactctaacacgtagaatacagc

SEQ ID NO: 364581 - DNA, 550 bp, Homo sapiens
gtatatgccatgtgcagatgagaagagggcatattctattgttgttcagcatagtgctctgtagatttctgttaggtctatttggacaagtgttgagtttaggtcccaaatgtctttgttagttttctgcctaggcgatctgtctaacactgtcagtagggtgttgaagtctcccactactattatatgtttatttaaatctcttcggccgggcatgatgcctcacgcctgtaatcacagcacttagggaggccaaggcaggtggatcacgaggtcaggagatcgagaccattctggctaacatggtgaaaccctgtctctactaaaaaatacaaaaaaattagctgggcatggtggcgggygcctgtagtcccagctactcgagaggctgaggcagaagaatggcacgaacccagaaggtggagcttgcagtgagctgagatcgtgccaccgcactccagcctgggtgactgagcaagactctgtctcaaaaaataaaaaaattaaagaaaaaaaatctcttcataggtctctcagaactagtttcata

SEQ ID NO: 364582 - DNA, 550 bp, Homo sapiens
gtatatgccatgtgcagatgagaagagggcatattctattgttgttcagcatagtgctctgtagatttctgttaggtctatttggacaagtgttgagtttaggtcccaaatgtctttgttagttttctgcctaggcgatctgtctaacactgtcagtagggtgttgaagtctcccactactattatatgtttatttaaatctcttcggccgggcatgatgcctcacgcctgtaatcacagcacttagggaggccaaggcaggtggatcacgaggtcaggagatcgagaccattctggctaacatggtgaaaccctgtctctactaaaaaatacaaaaaaattagctgggcatggtggcgggcgcctgtagtcccagctactcgagaggctgaggcagaagaatggcacgaacccagaaggtggagcttgcagtgagcygagatcgtgccaccgcactccagcctgggtgactgagcaagactctgtctcaaaaaataaaaaaattaaagaaaaaaaatctcttcataggtctctcagaactagtttcata

SEQ ID NO: 364583 - DNA, 430 bp, Homo sapiens
aaactcttttattattattatgactgttataatgatccgtgaccaatgagctttgatctttgatgttactattgagacttcacaaatgcacctacataagacagtgaacktaattgattaatgtttcatgtgttctaagaactctattcactggctgttcccctatctctctctcctcaggcctccctactccctaagacacaataatattaaaattaggccagttaataacactacaaagacctccaagtgttcaagagaaaggaaagatcgcacatctttaactttaaattaaaaggtagacaatcatgccttattgtggaagacatctcaaaagctgagataggccaaaagggagaccttttgtgcaaacggccaaattgtgagtactaaagaaaagttcttgaaagagaccagaagttcttgaaag

SEQ ID NO: 364584 - DNA, 479 bp, Homo sapiens
gttggttattctcccaatatttcaaactcttttattattattatgactgttataatgatccgtgaccaatgagctttgatctttgatgttactattgagacttcacaaatgcacctacataagacagtgaacttaattgattaatgtttcatgtgttctaagaactctattcactggctgttcccctatctctctctcctcaggcctccctactccctaagacacaataatattaaaattaggycagttaataacactacaaagacctccaagtgttcaagagaaaggaaagatcgcacatctttaactttaaattaaaaggtagacaatcatgccttattgtggaagacatctcaaaagctgagataggccaaaagggagaccttttgtgcaaacggccaaattgtgagtactaaagaaaagttcttgaaagagaccagaagttcttgaaagaggccatgcactctagtgaatgcatg

SEQ ID NO: 364585 - DNA, 546 bp, Homo sapiens
aggcttactgatgatatataaagttgatgggtctggatagaagatcaagccaactacatttccttaaacccaaacctaatccagagtagggccctaactctcttcaattttgtaaaggctaaaagaagtgaagaagctacagaataagtatgagactaacagaggttgcttcatgagatttaaggaaagaagtcatctccataacaaaacagtgcaaggcgaasgaacaagtgctgatgtagaagctgcagcaaattgttcagatctagctaagacaatggatgaaggtggctacacaaaacaacaaattttcaatgttgacataacagctttccattggaagaagatgttatctagggctttctagcaagagaggagaggtcaacgtctggcttcaaagcttcaaagaacaggctgactctcttgttagggactaatgcaactggtgactttaagttggagccaatgttaatttccattctgaaaaccctagagcccttaagcattatgctgtatcttactctgcctgtgctctataaatggaac

SEQ ID NO: 364586 - DNA, 546 bp, Homo sapiens
aggcttactgatgatatataaagttgatgggtctggatagaagatcaagccaactacatttccttaaacccaaacctaatccagagtagggccctaactctcttcaattttgtaaaggctaaaagaagtgaagaagctacagaataagtatgagactaacagaggttgcttcatgagatttaaggaaagaagtcatctccataacaaaacagtgcaaggcgaacgaacaagtgctgatgtagaagctgcagcaaattgttcagatctagctaagacaatggatgaaggtggctacacaaaacaacaaattttcaatgttgacataacagctttccattggaagaagatgttatctagggctttctagcaagagaggagargtcaacgtctggcttcaaagcttcaaagaacaggctgactctcttgttagggactaatgcaactggtgactttaagttggagccaatgttaatttccattctgaaaaccctagagcccttaagcattatgctgtatcttactctgcctgtgctctataaatggaac

SEQ ID NO: 364587 - DNA, 609 bp, Homo sapiens
ttaatacttaggagtactgctgccaagatcatttatgaacacgtttttgtgtgaatataagttttgttttgtttttctctgttagaaatgtgattcctgtgtcattgggtaagtgactttataagaaaaagacaaactttataagaaaaagacaaactcttttgtggtagagttttatcgttttgcattctttttagcaatctataatatttcccattgctccatatcttttccagcatttggtattgtcagctcttcttttttaatggatagtgatgttgagcacatattcatgtgcttatttgttaaccatatagtttctttgatgaagtgattgttcaaatctttctcctcattttaaaaaagcattttttttttcaattgagctttgggaattcattatatattctagagatgtcattttcattctcttgtcagtgtcttttgcaatrcaaaaattttggagttgatgtgatcagtttacatttcatcagaagacatttagtcttttgttttcctctatatgttttatagctttacatttcataaataactctatgatccatttccagttaatctttatataagatgtgaggtttagatgaaaga

SEQ ID NO: 364588 - DNA, 415 bp, Homo sapiens
ctactattttccctatatacttacataaattctaataaatacatttattaaaaattgtggtgttttataaggaaatagtctaaattttcctcaatakagaaagtatgatatctaatatatataggcatatatatgaatatatatatattttttcattcacagttcgtagctcataactctcataaccattgttacagtattttgttataatgttggggcaatttgggccttagaagcgacctcaggaaacaaaatctctctctctgaccctctcctgtccttcttttacctgcccatgtcaggactttaatctgattgtgggtcataagaccctcattccagagagggtcctgccccatactctggaagaagatatgttgcacaaagactaagaaggacctaacagacacgactt

SEQ ID NO: 364589 - DNA, 445 bp, Homo sapiens
aatctgattgtgggtcataagaccctcattccagagagggtcctgccccatactctggaagaagatatgttgcacaaagactaagaaggacctaacagacacgacttgctgggtttagatcatacccttttcatccaattacattttgatgcaattgtccatgtttcagtgaaccaattaagtctccataaagacccaaaggacagagttcggcgattccagaaaactgaccstgtgattcctccagattcctggaggatagcatacccagggagggcatggaagctccctgcaccttccgccataccttaccttatgcatctctttatctgtagtctttgtactatcctttctaataaactggcaaaaataagtttttccctgagttctgtgagctgctccagcaaattaatcaaacccaaagagaaggtcacagaaaccacaa

SEQ ID NO: 364590 - DNA, 445 bp, Homo sapiens
aatctgattgtgggtcataagaccctcattccagagagggtcctgccccatactctggaagaagatatgttgcacaaagactaagaaggacctaacagacacgacttgctgggtttagatcatacccttttcatccaattacattttgatgcaattgtccatgtttcagtgaaccaattaagtctccataaagacccaaaggacagagttcggcgattccagaaaactgaccgtgtgattcctccagattcctggaggatagcatacccagggagggcatggaagctccctgcaccttccrccataccttaccttatgcatctctttatctgtagtctttgtactatcctttctaataaactggcaaaaataagtttttccctgagttctgtgagctgctccagcaaattaatcaaacccaaagagaaggtcacagaaaccacaa

SEQ ID NO: 364591 - DNA, 559 bp, Homo sapiens
atctgtgagatgcagctaaagcagtatttagaatatttatttattcgtttgtctatttatttatttattgagacagggtctccctctgtttcccaggctgcagtgcattggcatgatcatggatcactgaagcatctaactcctgaagtgaaaacatcctcccacctcagcctcctgcatagctggaaccacatctggcttacttatgactttaaatgtgtgtattagaagaaaaaaatatctaaactaaattatctaagtgtccatcgtaagaarctagaaaatgaagagcaaattaaacattaataagtagaagtggggaaaaagtaaagatcagaactgagactaatgaaataaaaaatggaaaaccaataaaaaaaattatgacacaaaaagctggttctttcctcactagattaatcaaaattacaaaaaacacccattttaccaaaggaaaaatatacctcaatcatgttgtttaaaaaaaaaaaatttagcaagcagaacttggcaatatataacttgtaaattccactgactttccccagaattgcaatgc

SEQ ID NO: 364592 - DNA, 591 bp, Homo sapiens
ggcttacttatgactttaaatgtgtgtattagaagaaaaaaatatctaaactaaattatctaagtgtccatcgtaagaaactagaaaatgaagagcaaattaaacattaataagtagaagtggggaaaaagtaaagatcagaactgagactaatgaaataaaaaatggaaaaccaataaaaaaaattatgacacaaaaagctggttctttcctcactagattaatcaaaattacaaaaaacacccattttaccaaaggaaaaatatacctcaatcatgttgtttaaaaaaaaaaaatttagcaagcagaacttggcaatatataacttgtaaattccactgactttccccagaattgcaatgctagaaggtraaacaatctttattcccacagagaccaaaaatgtgtttcataaaattcaaaactattcctgatttaaaaaatattttaagcatgggaataaataaatatttccttaactttatcaaaaaaaaatctgccgaaacaaaaaccctcgtcaatagtgaataaaattctaagtatatttacattaatattcacctggcaaaatgtattcatctttcaaaattc

SEQ ID NO: 364593 - DNA, 591 bp, Homo sapiens
ggcttacttatgactttaaatgtgtgtattagaagaaaaaaatatctaaactaaattatctaagtgtccatcgtaagaaactagaaaatgaagagcaaattaaacattaataagtagaagtggggaaaaagtaaagatcagaactgagactaatgaaataaaaaatggaaaaccaataaaaaaaattatgacacaaaaagctggttctttcctcactagattaatcaaaattacaaaaaacacccattttaccaaaggaaaaatatacctcaatcatgttgtttaaaaaaaaaaaatttagcaagcagaacttggcaatatataacttgtaaattccactgactttccccagaattgcaatgctagaaggtaaaacaatctttattcccacagagaccaaaaatgtgtttcataaaattcaaaactattcctgatttwaaaaatattttaagcatgggaataaataaatatttccttaactttatcaaaaaaaaatctgccgaaacaaaaaccctcgtcaatagtgaataaaattctaagtatatttacattaatattcacctggcaaaatgtattcatctttcaaaattc

SEQ ID NO: 364594 - DNA, 635 bp, Homo sapiens
gttcagcttttcctacagggcaactttacttcaaataaaagggatattataatttagaaatctgaaagaaagaaaaagaagagacagagtctttctcaaaaggagaaatgctctgtgaacgtcgcttaggatgaaaaatatcttgttttatgctgtaatacttgtatctgccttagaaactatgtataaagaagtaggcaaaaatgtattgtcctaacccttataaagtttacattttagtgtaagataaagatttaaattcttaattacataattaagaatttaattagtatagtggtaatttctaagtagaagtattcatatcaaaagagactatcaaaggcctaggggtcagggaaaggtttggtaagtaaatgacatcttaatggaaatgtcaaagatcgcttggtatgttactgaacaagtcaatagtatgcttgagagcaatgatttaggaaagagcatggagcaagtgaggaaccaacggactggaattcatcaagcaatgaggasagttgtgtgaaataccggatgaggatcttagaatttatcctaacacctcacacatactatagactatcatatatcctaattgttctatcagtcaagatatgctagtttatgctgaataacaa

SEQ ID NO: 364595 - DNA, 635 bp, Homo sapiens
gttcagcttttcctacagggcaactttacttcaaataaaagggatattataatttagaaatctgaaagaaagaaaaagaagagacagagtctttctcaaaaggagaaatgctctgtgaacgtcgcttaggatgaaaaatatcttgttttatgctgtaatacttgtatctgccttagaaactatgtataaagaagtaggcaaaaatgtattgtcctaacccttataaagtttacattttagtgtaagataaagatttaaattcttaattacataattaagaatttaattagtatagtggtaatttctaagtagaagtattcatatcaaaagagactatcaaaggcctaggggtcagggaaaggtttggtaagtaaatgacatcttaatggaaatgtcaaagatcgcttggtatgttactgaacaagtcaatagtatgcttgagagcaatgatttaggaaagagcatggagcaagtgaggaaccaacggactggaattcatcaagcaatgaggacagttgtgtgaaataccggatgaggatcttagaatttatcctaacacctcacacatactatagactatcatatatcctaattgttctatcagtcargatatgctagtttatgctgaataacaa

SEQ ID NO: 364596 - DNA, 585 bp, Homo sapiens
aactaaacattctcttatcatatgatctagcaattgcactcctttgtatttactgaaagaagttgaaaacttatatctacacaaaaacctgcacataggtgtctattgcaacctgatttataattgcaaaaacttggaagtaaccaagatattcttcagtagatgaatrgataaactgtggtacaatcagacaagaaattattcagtgcttaaaagaaataagttatcaagccacgagaagacacggagaaaccttagatgcatattcctaaatgaaagaagataatctggaaaaactgcatactgtgtgattcagctatatgacataatggaaaggcagaactatgagacagtaaaaagatcagtagttgccagtggggagtgggcagagaggaggatagagagagcacagaggatttttaggacagtgaaactattatttaggatattataatggtagatacatctcattatatacttatccaaacccatagaatgtacaacaccaaaagtaaactctaatgtaaactgtgggctgtggcaataatgaggtattaatgtaggttccttgactgtaaaataaac

SEQ ID NO: 364597 - DNA, 498 bp, Homo sapiens
agtataaggaggtggtctgcagcagctgaaaacctttacaaatgcttcaagtcaggcttgttggcacggtaaggaagctagtgatgtactgatgccaaattctgttcctgtttctttccctttgctgccatgaaaaaaattaaccaaggctttaagagctgccattgacataaacatgatttaatagctctttagcatttccaggaccacagcattagcaagagccttggagatrtttaagagtagaatcttgaaattcgttctctggcaagttattttaaaaccagatgttgtaagcgtacttcagtacagctgcctattaggtgacagtacttcaaacacatagaacgtgagggaaatgtacttgctgttttctttataggatggcaactgtcacctgcctctcctaagtgtgtgagtagattttcctggttgatgcctgctctttcttctgttttccatgcttctctcaagcgtggtgatgaaagacctgtttaa

SEQ ID NO: 364598 - DNA, 498 bp, Homo sapiens
agtataaggaggtggtctgcagcagctgaaaacctttacaaatgcttcaagtcaggcttgttggcacggtaaggaagctagtgatgtactgatgccaaattctgttcctgtttctttccctttgctgccatgaaaaaaattaaccaaggctttaagagctgccattgacataaacatgatttaatagctctttagcatttccaggaccacagcattagcaagagccttggagatgtttaagagtagaatcttgaaattcgttctctggcaagttattttaaaaccagatgttgtaagcgtacttcagtacagctgcctattaggtgmcagtacttcaaacacatagaacgtgagggaaatgtacttgctgttttctttataggatggcaactgtcacctgcctctcctaagtgtgtgagtagattttcctggttgatgcctgctctttcttctgttttccatgcttctctcaagcgtggtgatgaaagacctgtttaa

SEQ ID NO: 364599 - DNA, 418 bp, Homo sapiens
gcataaatttgggatagaggctatccaagtgtgaagttcaactcccagctcctctactttacttgcaacatgaacttagattccttgaccctctgttcctcagtctgtcctctgtaacatgagggaaaccacacayacgcatgcacacacacacacgtacacacacacatacacacacacaaaagacaggcatatggcaaccattcaacaacttaaaagtcatagtttagtaagaattagttaaaatgtctctttcttatcactggatctattcatagttttcatccctagttatctaaaaggtttcttaaaaattagcattgaaatttattaaatattttctttatctataaataagatttttcttaatttgttaatgtaaaaaattacaccaataagatatctgtatttgaggaat

SEQ ID NO: 364600 - DNA, 418 bp, Homo sapiens
gcataaatttgggatagaggctatccaagtgtgaagttcaactcccagctcctctactttacttgcaacatgaacttagattccttgaccctctgttcctcagtctgtcctctgtaacatgagggaaaccacacatacgcatgcacacacacacacgtacacacacacatacacacacacaaaagacaggcatatggcaaccattcaacaacttaaaastcatagtttagtaagaattagttaaaatgtctctttcttatcactggatctattcatagttttcatccctagttatctaaaaggtttcttaaaaattagcattgaaatttattaaatattttctttatctataaataagatttttcttaatttgttaatgtaaaaaattacaccaataagatatctgtatttgaggaat

SEQ ID NO: 364601 - DNA, 488 bp, Homo sapiens
gaccaccaaagtttgtgccacagtcaaggatggaaggggtcctaacacattcccattcaaatcacctatttggcctgtggctaaggcagatggatcttgtggaatgacataaacttaattaggtaatgattataactgcagttgtatttccagatgtagttgctttattggaacaaaccaacacagcctcttttttgtagttttaggctgctgatgtcataaatactttttctctatacttgttagtaagaaccactagaagcagtaatgcacgtagcattccttaagactatttcaactctccagctctctgctacagtgtagtccaccaggaagttgtttgcttctccactctatgggacatcaagcaagtctactacatagataggccaccaagaacttgtttgcttctccattctaygggacatcaagcaagcctactatatagatatcattctgattgaacccaataagcagaaggtagaaaa

SEQ ID NO: 364602 - DNA, 542 bp, Homo sapiens
ttgttagtaagaaccactagaagcagtaatgcacgtagcattccttaagactatttcaactctccagctctctgctacagtgtagtccaccaggaagttgtttgcttctccactctatgggacatcaagcaagtctactacatagataggccaccaagaacttgtttgcttctccattctatgggacatcaagcaagcctactatatagatatcattctgattgaacccaataagcagaaggtagaaaatactctagatatcttgtccagagatatgcatgccagaggcttgaagaataaaccctataaacattcaygagcatgtaatatctgtggaatttgtaggaattagggcctggtgcatattgaaacatctcttatcagatggaaaacatgtttctgtatctgacacctgctatctctaagaggtggagctctgtattttggttccaatagatacctgatttgggcatcttactttaaaccatttaccaaataatccaataagctctcagttttgagtcaggcccagattacaaggt

SEQ ID NO: 364603 - DNA, 391 bp, Homo sapiens
tgtaactaaaatagttttagtactttgaaaattttatgtctaattatttcatgccacatgccatctgaatcttacccttcctcacatgtcttacaatatacctaattaaaagtttactttttgttgtcggtgctatagatcattcttacgaaacaaaaggaaagaaaaataagaatgcaaaataattgtcctactctatttctctgataatttgatgttataatttaagtagcttcataacttcaggcttgagaccttaggttaattcagtaatatagaataaagaggaaaaacaaaaggccataaawaaaaagggaaagaaacttcatatcttgaatgggattcacaaggcctttaaaaaggggaatgagaatgatggtttccagcttca

SEQ ID NO: 364604 - DNA, 632 bp, Homo sapiens
aaggaatttaaaccatagggttccattctagacctactgaatctgtgtttaaataagttttccaagtgattatgacgcatgctcaagtttgagaattctttttcatccgtttgcaactaagacccctgattggcttatcaaccaatcactgccttcatttgttaggaggatgcatttcgctgggcaacctaattaaaggccaatacaactactaaggctcatagaaaccttggtagttggcagattcaaagaaaaactagaaagagatcagaatatattttatttggaaataaatgaaaacaaactaaaatgcatttcaataccttttattctgagttcataaagtgaaacttttatagaaggctgtgttattgtggtttgtttttatttatttgacttaattgcttacacttgtaaatgaaagaatttgttgaaattttattattatgtgccttctaaagcacttggctttgtctagagtctgagaaaattatttaattcagtcacatttttctattgtagaatcaaaaattagaatgtgaaaagtaaaaagggaaggtaattttgatattttaactttaactatctgagygtgttgttaactaatatttgaaagagatgattataaattt

SEQ ID NO: 364605 - DNA, 519 bp, Homo sapiens
tatgttgtttatttagccttttcctctagaacataaggttattggtaatttctaagaagataaagccatttcattcatatattcatgcaaatagtacaactggcatatatatcatatatatkaacataccatattatatatatatatatatatatatatatataatttcttaaagaaactataaaatcacaggagaaaattacacaataaaacatttaataaattcatacttaaaagttaaatgtgccatatgtttctctaatactgagacacaatggagtgcattaagaaactcattaagtcaatgaaaatggcagctgagctctatcgagatatctattcacttcacttttgagatagaaaaacagaaaaatagtggacacattccatttattctcaggtttgaactaatcatgttagcaaagggtcagtgcaatgcaagatgagaatgtatatttcttctcagcatctaatttgataaacttcactttaatagtttctgtttatttttgcagcaaa

SEQ ID NO: 364606 - DNA, 466 bp, Homo sapiens
ctgatagagctgaaaaactcactactagaactttttcatacaatcagaagtattaacagtagaatagaccaagctgaggaaagatctcacatcttgaagactggttccttgaatcaattcagtcagataaaaataaaggaaaaaaagaataaaaaagactgaacaaaacctctgagaaatataggattatgtaaayggaacaaatctgtaactcattggtgtctctgaaaaagaggaagagaaagcaagccagttggaagtcatatttaaggatactgtccatgaaaatttccccaaccttgctacataagtcaacaatcatattcaggaaatgtacaaaacccctgtaagatactatacaggatgatgatccccaagacacataatcatcagattctccaaagtcaacacgaaaaaaaaatattaaaagcagccaaaggaaaggggcagatcacacacaaaggga

SEQ ID NO: 364607 - DNA, 596 bp, Homo sapiens
actgaaaactaaaaagtttattgacagaaattaaagatttaaacagatggagacatataccatgttcatgggtcagaagactcaacatttttaaaatgataatcctcactaaattgatctataaattgatgcaatcccaatcaaaatttycatttttaaaatatacatggtcaaactcataaaattcatatggaaatgcaaagacctataatggccaaaacatctctgaaaaagaataaagtcacaaggttaacataaccttttttcaataattattacaaagttatagtaatcaaaacaatggaatattggtgtaagcatagaaaaatcaaccattgtggtagaagaaagagtttagaaagagaaccacacataaacatacagctcattccagacaaaagtggaaagacaacttagtgaagaaaggataattttttcccaacaaatgttgctagaacaattggatttctgtatgcaaaacaaagctaaataaaaaaaactttgatccatacttctcaccacataaaaattagctcaaaatggtttatagacctaaatataagtaataaaaccataaaacatagagcacttttgtg

SEQ ID NO: 364608 - DNA, 596 bp, Homo sapiens
actgaaaactaaaaagtttattgacagaaattaaagatttaaacagatggagacatataccatgttcatgggtcagaagactcaacatttttaaaatgataatcctcactaaattgatctataaattgatgcaatcccaatcaaaatttccatttttaaaatatacatggtcaaactcataaaattcatatggaaatgcaaagacctataatggccaaaacatctctgaaaaagaataaagtcacaaggttaacatwaccttttttcaataattattacaaagttatagtaatcaaaacaatggaatattggtgtaagcatagaaaaatcaaccattgtggtagaagaaagagtttagaaagagaaccacacataaacatacagctcattccagacaaaagtggaaagacaacttagtgaagaaaggataattttttcccaacaaatgttgctagaacaattggatttctgtatgcaaaacaaagctaaataaaaaaaactttgatccatacttctcaccacataaaaattagctcaaaatggtttatagacctaaatataagtaataaaaccataaaacatagagcacttttgtg

SEQ ID NO: 364609 - DNA, 596 bp, Homo sapiens
actgaaaactaaaaagtttattgacagaaattaaagatttaaacagatggagacatataccatgttcatgggtcagaagactcaacatttttaaaatgataatcctcactaaattgatctataaattgatgcaatcccaatcaaaatttccatttttaaaatatacatggtcaaactcataaaattcatatggaaatgcaaagacctataatggccaaaacatctctgaaaaagaataaagtcacaaggttaacataaccttttttcaataattattacaaagttatagtaatcaaaacaatggaatattggtgtaagcatagaaaaatcaaccattgtggtagaagaaagagtttagaaagagaamcacacataaacatacagctcattccagacaaaagtggaaagacaacttagtgaagaaaggataattttttcccaacaaatgttgctagaacaattggatttctgtatgcaaaacaaagctaaataaaaaaaactttgatccatacttctcaccacataaaaattagctcaaaatggtttatagacctaaatataagtaataaaaccataaaacatagagcacttttgtg

SEQ ID NO: 364610 - DNA, 569 bp, Homo sapiens
tttactgtactgtcctgggccttcacattcactcaccactcactcactgatttatccagagcaaccttcaatcctgcagactctattcatggtaaataccctgtgtaggtgcaccattttttatcttttacaccatatttttaccatacctttttatgtttagatatgtttaaaaacaaaaatacttgccattgtgttataattgcctatagtattcagtataataacatacggtacagagttgtagcctaggagctataggctataccatatagctaggtgtgtagtaggctataccatctctgtttgtgtaagtacactctatggtgtttgcacartgatgacatcacctaatgatgcatttctcagaagggattccagtctctaaggtgatgtatcactacgccagtcccaaaaactagagtcaaaatatgaacctctcaggagctattgctctaagcactaataaggcatactgagaatgaaaacatcatttatggacatccacaaccaaaaagcagccaaaccacagtacaacttgctcagtaactttgaaaattccctggcct

SEQ ID NO: 364611 - DNA, 569 bp, Homo sapiens
tttactgtactgtcctgggccttcacattcactcaccactcactcactgatttatccagagcaaccttcaatcctgcagactctattcatggtaaataccctgtgtaggtgcaccattttttatcttttacaccatatttttaccatacctttttatgtttagatatgtttaaaaacaaaaatacttgccattgtgttataattgcctatagtattcagtataataacatacggtacagagttgtagcctaggagctataggctataccatatagctaggtgtgtagtaggctataccatctctgtttgtgtaagtacactctatggtgtttgcacaatgatgacatcacctaatgatgcatttctcagaagggattccartctctaaggtgatgtatcactacgccagtcccaaaaactagagtcaaaatatgaacctctcaggagctattgctctaagcactaataaggcatactgagaatgaaaacatcatttatggacatccacaaccaaaaagcagccaaaccacagtacaacttgctcagtaactttgaaaattccctggcct

SEQ ID NO: 364612 - DNA, 520 bp, Homo sapiens
gtctccaaaattacattagaaatgtcctttctttgaccaacttttacatagatttccccagacgatgaatacagatggaattattcaataaaagaaaacctgatttcacaagttcttgcccacacgaaaaytccagttttccctacagtgttccttcccaccaaaaacgaaagctcaaactggcatacaagctacacctattgcataatgactgtcaagttcttcagtgttctttaacccttccatcaatccttttaaccttagttaccgacaaatgccagatttaacatatttataaagagactaatatctcccgataatggttttcatttctttatataattacttaatgtatttttaattattgtaagtactcttcaccatttcactgacttcaaatgcaactaaaaccaaggagaccattcacagaacacttaggttatgattctgaaaagtaaatggtaccaagtagattgggaaagaaaaccagaattcaaaggaccactaaactagaagagaa

SEQ ID NO: 364613 - DNA, 574 bp, Homo sapiens
tatattgcttacttttcgagatctctttgtcataattaccggaatttgttctgattttgaaagcaaaaactgaggtttcctgttctgtaattagtatttattcattcagtagattactttttaaaggacccttagtccactagaaagacaaatgaacacaggttgccataaaaaaaggatatttcaaatctagtaaaggggacaagatagttgaataagaatcaaaatacatgataaatgctacattgttgacacaaagtactgaagaaaaagctatataatagtgtatactaaaaataagccttacaatagttttagtctctatgacttcaatctaaatttggagactagtactcaacctctctcccttctcacacaatgtgacatcataaatcaaatcaattcttcaaaatggtattcccaataagcagatagagggcctcaaaactgccatccttggaagctactggtgttcagacattttatgacttttctttttaaaataattgtgaagsctccattttagtgaatatctttagttttgctcttctttctttgtaacaaaaggatagtt

SEQ ID NO: 364614 - DNA, 539 bp, Homo sapiens
gtcttctctgttacactgtgtttttcatggagtcaagaattccatgtstgtcttgttttctttcttttttatctattttttattttttaagttccaggatacatgtgcaaaatgtgcaggtttgttatataggtaaacatgtgccttggtggtttgctacgcctatcaacctgtcatctaggttttaagcctcacatgcattaggtatttgtcctaatgctctccctccccttgacccccaccacttaacaggccccagtgcgtgttgttcccctccctgtgtccatgtgttctcattgttcaactcccacctaagagtgagaacatgcagtgtttggttttctgttcatgtgttagtttgctgaggatgatgacttccagcttcatccatgtccctgcaaaggacatgaactcattattttttatggctgcatagtattccatggtgcgtatgtaccacattgtctttatccactctatcattgatggacatttgggttggttccatgcctttgctgttgtaactggtgttgcaatca

SEQ ID NO: 364615 - DNA, 603 bp, Homo sapiens
accaatatggtgccacaaatggaaaattccacacctaatttcacatacacaaagtttgcttcatgaacaaaattattacaaatatataaaattatctttaggtatgtgtataaggtgtctataaaacagaaatagagttattgttcaggacttgggtcccatcctcacgatatctcattatgaagatgcaaaaatattacaaaatctaaaatccaaaacacttctggaatraagtatttcagatgagggatatccaacccatattattttgaatagaaagggtaacagctaccttgtactgtcctttatcttaaaggaaaagctttcagtttttcgtcatcgagtatgatctttactgtgggctcttcatatacaacctttgttatgttaaggtaatttccttctattactagttttgttagtgttttatcatgaaagggtgttgaattttgccaaatgctttttcctatcttctttccagcttttccaaccaagaatgtctttctcaaggaccttagagccatctctttgaaatgtaatcatggaggaagaaagcaccctgatctcccagtctgtctggaagagcaagagcctaattttgat

SEQ ID NO: 364616 - DNA, 347 bp, Homo sapiens
atattgcatacctttgtgattctgagatgatataatagtatacttttcactattccagcacctgcatttctgaataatcttttaaatttgagttattcattaaaatgtcttggagtgtataaatattactaattaataggagtgaattaattatattatccagcattatttttgagtgagcagtaccacattctgggaagtcttccctrtatttgatttttttttccccctcttctccagaacaaaaagagagtaaatgtgagtcatgccagaatggacaagaagaactgatctccaaatcccatcagctttacctaggatcatcttctaggtctaatggtgtcatt

SEQ ID NO: 364617 - DNA, 561 bp, Homo sapiens
ttgtttctacctgtctctaatcaattctcttcacactagagtgaggtacttctaaaatgttgatcacatcatgccactctattgtttatccctctttccctgcttcttctttaacttggaataaaatctaaacttttactatggcctctaactacatggtctagcccagtgcatctctgccaggtatactgccactaaccttagaatctgccactgatacatactgtgctcaaacagctccatccatattgcttccaggaaaaggaagggctttttctcaactttcaggtcacagagcaaatttaatttcctctgagagaccttttctgactacactatgtcaagtagactctgaactccagcttctatcattatyccctaggtagccaagaggaaatgggaaaaagaataaaaatgtaaggatttttattttaccagagaaatgtcatttattccgtagttacaaaatgaaaggaaaataagagcacagatctaaagacacaaaaagatttggtggtgagaagattcccttttaactgtctcagggcagttggcatggtt

SEQ ID NO: 364618 - DNA, 489 bp, Homo sapiens
ggcatcttaacaatattgatttttcctatccaagggcatggaatgtttttccrtttgtttgtgtcatctctgatttccttcagcagtgttttgtaattctcactgtagagctccttcacttctctggttagctatcttcttaagtattcaattctttttctgactattatgaatgggagtgtgttgttgatttggctctaatcttggatgctactagtgtatagaaatggtactgatttttgtacattaattttgtatccagaaacttgatattgtttcttgatccagaaacttctgttgtctccagaaacatgaagatgtttatcagatctaggagcctttgtgcagagactgcaggtttttctaggtatagaatcatattgcttgctaatattgtttggctgagtccccacccaaatctcatcttgaattcctccatattgtgggagggacctgatgggagataattgaatgatgggggcaggtctt

SEQ ID NO: 364619 - DNA, 616 bp, Homo sapiens
gccacagtaatacagtggagatgaaaaggacagaatcagtaaaatacagatcaatagaaattactcaatctaaaaaacagaaagaaaacagaataacaactcactcccccaacccccmcaaagcccccagaatttcggaagctagtgggacaatagcaataaagcaagcattcattctaagcacatttccagaaggagatgagagagtgaacctgaaaaatttattgaagaaataaaggctggaaatcccccaaatttggcaaaagacataaacctatgaaaaaagaagctaagaaaataccaaattagataaatcccaagaaatctatgccaagctacatcatatttgtacttctgaaaactgaagacaaaaagaaaaagaaacttgaaaacagcctgagacaagcaacacactacttatatgggagtatcaatttgaatgacagtggatttttcatctgataccatggaggccagaagtaagtggcataatttttttcaagtactaaaagaaaataaatataatccatgaatcccatattcaggaaaaatattgtcagaaatggaggagaagcaaagacattctcagttgaaggcaacctaagaaaatttgttg

SEQ ID NO: 364620 - DNA, 563 bp, Homo sapiens
gtaatgtcattaaggtcatcaaatgttgcagagtgggaagtcctagactctcttttcctccacaaacacatcaattcaacaacaattcatggacaaattccctgtataggcaattcagaaagtaattgaaagtctcctgcacccttgtcaaatgtgaaactatactcaccaaagctgatagggaaatttgggacaccctcttaccggaatccttaccccaggcacaacaccatatgattagaaagagactgccaaaccctcagcttttccgcggagaaagaattggttcatgcctctagcacattcaggagctcagagtagcttgtcttgccagccacatggggggagaayagagatggctgtttggccttgtagattctacagttcctcctttcccatcagcacagagagatcagatgaaaaatctcagctctcaactccctcctgggagagaaagagttgatccttgtgtccagcgttctaacttctctggggctgccccagagaactggtatctgttttgtcagccttagacctctaacgggtgttgtgcagtctaactg

SEQ ID NO: 364621 - DNA, 563 bp, Homo sapiens
gtaatgtcattaaggtcatcaaatgttgcagagtgggaagtcctagactctcttttcctccacaaacacatcaattcaacaacaattcatggacaaattccctgtataggcaattcagaaagtaattgaaagtctcctgcacccttgtcaaatgtgaaactatactcaccaaagctgatagggaaatttgggacaccctcttaccggaatccttaccccaggcacaacaccatatgattagaaagagactgccaaaccctcagcttttccgcggagaaagaattggttcatgcctctagcacattcaggagctcagagtagcttgtcttgccagccacatggggggagaatagagatggctgtttggccttgtagattctacagttcctcctttcccatcagcacagagagatcagatgaaaaatctcagctctcaactycctcctgggagagaaagagttgatccttgtgtccagcgttctaacttctctggggctgccccagagaactggtatctgttttgtcagccttagacctctaacgggtgttgtgcagtctaactg

SEQ ID NO: 364622 - DNA, 622 bp, Homo sapiens
caggacactgtattactgtaatggtgttgaggaaatcacttttaattctaacataaaagttaaaagacaaaagtattaaaatacctataactaaamtttgttaaagatatacaatataaatagatgtgaattatgacaactatagcataaagtatatgtgtggagggggacaagctaaagtgtagtgttattgtgtgtgccataaatcaagtcgttatcagctttaaatggatttatgtctaagatattttatgtaaacctcaaggtaaccacatacatacacaaaaacccatgcacacagttacacacacagaaaacataaaagaaccaaaacataccaatagaaaaaactcaacaaaatacaaagagagacagcaagagaggaaaagacaaaagaattacaagaaattgtcaattaagaatgctatatcccacaaaactgtcttaaaaaataaaagagagttaaacactttcccaggcaaagaaaagctgagggagttcatcactattagacctccctcacaagaaatcctacagagagtgctaacagaaaacaacaatatgacaatagtacattcttccatataaataattacttttaataaaaatgaattaaactcta

SEQ ID NO: 364623 - DNA, 647 bp, Homo sapiens
tattgtgttagcatatttaatattctgagaagttttgaagcaatgaaattcacctaatcttacttatcctagtgttgagtgtaaatataatgtatatgtatagtttataaagatacattatacacacatacacacacacacacgtgcacacataatgtcatggaacacagttggagaaattctgggctagagcaaataagtccgttgatgcaaaaaaattgaacatatttgttttaagaaatccagacaatactaggtcgggcgccatggctcccacctgtaatcccagcactttgggaggctgagatgggcagctcacttgagctcaggggttcgagacccacctaggcaacatagtgagactccatctcattaaaaaaaaaaaatacaggtaacactgacgtagccttttagcttaaataatattgtgaattatttgaagagaaaataaaaattaactataatcctaccaccccgttataataattgctaacacatttcacatatatacacttaaaaaataaaaatgagaacacaccattcattttgtttggtgatctggatcccycacccttttaactctgaccccatgtgccaggggacacttggagatgccagacttgcctactggggagacttccgggttg

SEQ ID NO: 364624 - DNA, 548 bp, Homo sapiens
atatgagcacttagcctaccttcacccctcctgtggggtaaaaatcaaagtgtgcctgcttttcttttagccacagaggctgatgatccacgatcctctctggtttagtggctccaagagactaagaagttctagagttgacatgggcttctgttcttttctttggtggctccctgactaagaattggctccagagcttgctccagaacactcagggggaactgaatttcaactcccattaggcaatcccctgactactaaggacctactactctcctttatctctctcttctccattctgagcctgctcagaaacagagattttccctggacaaagytgcctggtagtaaatgtaacaaagaagggtcctttcagcatccaccatctcccctccgggccctggtttttttgttccctataccctccaggttccttgtttcatgtcaagacccattttcaggttccatttgggaaaaagtagtacactttcattgtaaagtgtaaataaataatagctagctattgtcttatttttattagatatgta

SEQ ID NO: 364625 - DNA, 583 bp, Homo sapiens
agtaaaatccagaaaagacagagtttactttgaactggaaagatgaatgtgtctgttatcatcagtaaaaaaggagtttgagagttaagtatacttatagaaatactttagttcactgattccaagatgcacgttttttcacatcttaacatatctgaaattgagatacggctcaaaaatccatggtgtatcatagtttagttggcagtgatttctctttcttaatagtacacaaaataacactgcatcttacaaatgatggtgtcttaaattctatgaaatacagtataatggaatttgtatctttgcatacttgggatttgtaaatctcactttttgccagtgaaaatgctagtaattcaagacctgtagctcagctattcttggcattcctaactcttcttttattcacagtgacacctttacttttagtcccacaagcctagggaatgacagcttaaggttgtgggggcacctaagatcraaggagctggtcacagctgcttggagctgaatgccacttggggctagggcagcaatggcataggggtcacaggcctacttctgatctatctttaacatt

SEQ ID NO: 364626 - DNA, 496 bp, Homo sapiens
atagtccttaaaatttaggtcagacatcatcatctgctttgtagctttttccctgcctttgctcagaagaatgaagcaattcactgtgtatatatcaagaaaatatttatcatattgtgtgctaacagcttgtttaattggcagtttctttcattggattatgacttctttgaagtaaaaaactctgtcttcctcaattttgcttctttagagtaacagtaaatcctcatttaatgtctgtccaaaaggagmatgaaaagtagagaaggaaggatgaaaagaaggaaagatcatggatagcaccagggttattatggtccaaaggagccaggcatggaacagccaaatataattcaagtgagtggtaaaaagtacaatttggaaatctagagcccagggtcctatgacatggcaagaggaagccagtttgtgtttgctctgggttaggaggtaaagcattcatccaatcaacaagagaggcaaggcaagcaaagag

SEQ ID NO: 364627 - DNA, 651 bp, Homo sapiens
gggcagttactaatcaaggagcataaaatttcagttaatcaagatgaataagttctagagctcttctatacaacattatacctatagtcaataatactgcattgcacacttaaaaattgaagagggttgatttcatgttaaatgctctttccacaataaactgaaattaataaggtaaaamcaaaatgacaaaaaataaaaaactccaatctaataatggataaaactgactatgtattatgaacaagtgggatgtattccagcagtacaaggctaggtgaatatttgaaaatcaatcagtataatctaccctatcaataagctaaaaaaagaaaaatcacatgaatacattagttaatgcagaaaatgtacttgacaatatttgataagccctcatattaaaaactttcagcatacaaggaatggatggggaacttccttgtattcataaatggtttctacaaaacacttataactaacatcatacttaatgatgaataatggaatgatttccttctaagatcaagatgaaagcaaggaagcccaccttcacttcaataaaagcccaccttcacctcaatatgacaagaagaagatatgataggcatacagactggaaatgaccaaataaattagtttatatttgtaaat

SEQ ID NO: 364628 - DNA, 651 bp, Homo sapiens
gggcagttactaatcaaggagcataaaatttcagttaatcaagatgaataagttctagagctcttctatacaacattatacctatagtcaataatactgcattgcacacttaaaaattgaagagggttgatttcatgttaaatgctctttccacaataaactgaaattaataaggtaaaaccaaaatgacaaaaaataaaaaactccaatctaataatggataaaactgactatgtattatgaacaagtgggatgtattccagcagtacaaggctaggtgaatatttgaaaatcaatcagtataatctaccctatcaataagctaaaaaragaaaaatcacatgaatacattagttaatgcagaaaatgtacttgacaatatttgataagccctcatattaaaaactttcagcatacaaggaatggatggggaacttccttgtattcataaatggtttctacaaaacacttataactaacatcatacttaatgatgaataatggaatgatttccttctaagatcaagatgaaagcaaggaagcccaccttcacttcaataaaagcccaccttcacctcaatatgacaagaagaagatatgataggcatacagactggaaatgaccaaataaattagtttatatttgtaaat

SEQ ID NO: 364629 - DNA, 568 bp, Homo sapiens
ttgtttttttttaagctgtctatttccatgaatatttctcccttcgcttcttgtatcattttttggatttccttgcattaggtttcacctttctctggtccctccctgattagcttagtaactaacctcctgaattctttttcaggtaagtcagggatttcttcttggtttggatccattgctggtgaactagtgtgattttggggtgggtagaagagcctcgttttgtcatattatcarggttggttttctgtttccttctcatttgcgtaggctatgtcagagggaaggtctaggtctgaaggctgttgttcagattcttttgtcccacagggtgttcccttgatgcagtactctcctccttttcctatggatgtggcttcctgtgagccaaactgcagtgattattgtctcttttctgggtctagccacccagcgagtctacccagctctgggctagtactgggggttgtctgcacagagtcctgtgatgtgaaccatctatggatctctcagctgtggataccagcacctattccagtggaggtggcagagggtgcaatggact

SEQ ID NO: 364630 - DNA, 610 bp, Homo sapiens
agataagaatgacccaacacaatgtatgcgaggaatgcttccaagcatcctctgcttgtccaagaaagaccccatctgaaaaatggttttaaaataargcagtctatgagggaagaaataagtacttacttaccgctatgatgattacaggatgttgaatattgtctgaggtggaggaataaaggttggttgtccaaactgatcattagaacaaatggccataaagcaagttcctggaacaaacaggtaaagtcagggactaccaggagccagtaacatgattccagtgagccacagatctggaaagaggacatgacatagacgtcagaaagaatttctaagagaaacagccaccaacatcgcaggtgtgattagcttttcagagctgtgtgttcccatttgtgagcacagtggcattctccaggaccaaggaaatacccattgctaagtcatatttaccccaagccaaatacttctagaagtctaagtactttgattcattactttatggctgattatctttatcaaattcttcataaatattattttaaaatgaaagaactgtaggcagaatactactgatttttatctctatgtattagctgatact

SEQ ID NO: 364631 - DNA, 610 bp, Homo sapiens
agataagaatgacccaacacaatgtatgcgaggaatgcttccaagcatcctctgcttgtccaagaaagaccccatctgaaaaatggttttaaaataaggcagtctatgagggaagaaataagtacttacttaccgctatgatgattacaggatgttgaatattgtctgaggtggaggaataaaggttggttgtccaaactgatcattagaacaaatggccataaagcaagttcctggaacaaacaggtaaagtcagggactaccaggagccagtaacatgattccagtgagccacagatctggaaagaggacatgacatagacrtcagaaagaatttctaagagaaacagccaccaacatcgcaggtgtgattagcttttcagagctgtgtgttcccatttgtgagcacagtggcattctccaggaccaaggaaatacccattgctaagtcatatttaccccaagccaaatacttctagaagtctaagtactttgattcattactttatggctgattatctttatcaaattcttcataaatattattttaaaatgaaagaactgtaggcagaatactactgatttttatctctatgtattagctgatact

SEQ ID NO: 364632 - DNA, 610 bp, Homo sapiens
agataagaatgacccaacacaatgtatgcgaggaatgcttccaagcatcctctgcttgtccaagaaagaccccatctgaaaaatggttttaaaataaggcagtctatgagggaagaaataagtacttacttaccgctatgatgattacaggatgttgaatattgtctgaggtggaggaataaaggttggttgtccaaactgatcattagaacaaatggccataaagcaagttcctggaacaaacaggtaaagtcagggactaccaggagccagtaacatgattccagtgagccacagatctggaaagaggacatgacatagacgtcagaaagaatttctaagagaaacagccaccaacatcgcaggtgtgattagcttttcagagctgtgtgttcccatttgtgagcacagtggcaytctccaggaccaaggaaatacccattgctaagtcatatttaccccaagccaaatacttctagaagtctaagtactttgattcattactttatggctgattatctttatcaaattcttcataaatattattttaaaatgaaagaactgtaggcagaatactactgatttttatctctatgtattagctgatact

SEQ ID NO: 364633 - DNA, 611 bp, Homo sapiens
  misc_feature (1)...(611): n = A,T,C or G
gttcccatttgtgagcacagtggcattctccaggaccaaggaaatacccattgctaagtcatatttaccccaagccaaatacttctagaagtctaagtactttgattcattactttatggctgattatctttatcaaattcttcataaatattattttaaaatgaaagaactgtaggcagaatactactgatttttatctctatgtattagctgatactcctttcagtattaatattctattaccttttggaggaatgtgaatgggtctttcctcatttgcttcattttcacgtatccctgaactctcatgaatggatgtttttctttttctagaaagaatatatgcgtgcacagattaaaatgttttctaacggaaaatcagtcctactaatggcwttttacttaattattggaagaaaaataagaataaacaaaaaaattcccatttaggtatttatatcttctaatatagcaagcagaaaataattttaaagttgctaagattaacttgtcactcttaacccaaagaaagcctattcagttatgtcactaaccctgaatagaaaatatatccacacatcttcattacncaacagtctggctgccagga

SEQ ID NO: 364634 - DNA, 516 bp, Homo sapiens
actattttaacatgtcttaaacaattttagcccaaaaagtaccttgtactaatcagctcttcacagttattttttaagtacttttatatgcctacttacacatggtactacactagatggagtttattacagtatttctattttctagataaggaaattacacgcagtgaggttagctcaaatagtccctgtcactagtaaatgaccctgacaaactacagtagtctgaacacttgtcccaggattgtctccaccacaccaatcgcattcagataaacctctttctttctatccggatcacagctaatgaaaaagagagagagagagagagctagaactrccaatgaaaggcaaaatacgatatttacaatgcctaaataatatttcaatatgttccacatgaacacaagatttgggttagagaataggctttgcatttggcaactcaaatagctcgaagatcctgagagctatgctggccaatagaataatgactagccacaggcagctactgag

SEQ ID NO: 364635 - DNA, 628 bp, Homo sapiens
catggtactacactagatggagtttattacagtatttctattttctagataaggaaattacacgcagtgaggttagctcaaatagtccctgtcactagtaaatgaccctgacaaactacagtagtctgaacacttgtcccaggattgtctccaccacaccaatcgcattcagataaacctctttctttctatccggatcacagctaatgaaaaagagagagagagagagagctagaactaccaatgaaaggcaaaatacgatatttacaatgcctaaatartatttcaatatgttccacatgaacacaagatttgggttagagaataggctttgcatttggcaactcaaatagctcgaagatcctgagagctatgctggccaatagaataatgactagccacaggcagctactgagcactggaaaagtgactaatgccaaatgtcaaaatgataatattttggatatactgagtccaataaaatacattataaaaatgtattccccgtgtctaattttcatgtggctactaaaagtccttttgaatccagtaagcattatatttctattaggctgagctgtaaggtcatgataatctgaaaactaggttccctctccatacctgtgtg

SEQ ID NO: 364636 - DNA, 516 bp, Homo sapiens
actattttaacatgtcttaaacaattttagcccaaaaagtaccttgtactaatcagctcttcacagttattttttaagtacttttatatgcctacttacacatggtactacactagatggagtttattacagtatttctattttctagataaggaaattacacgcagtgaggttagctcaaatagtccctgtcactagtaaatgaccctgacaaactacagtagtctgaacacttgtcccaggattgtctccaccacaccaatcgcattcagataaacctctttctttctatccggatcacagctaatgaaaaagagagagagagagagagctagaactaccaatgaaaggcaaaatacgatatttacaatgcctaaataatatttcaatatgttccacatgaacacaagatttgrgttagagaataggctttgcatttggcaactcaaatagctcgaagatcctgagagctatgctggccaatagaataatgactagccacaggcagctactgag

SEQ ID NO: 364637 - DNA, 570 bp, Homo sapiens
actgatataggggttaaggagaaattatttaggcagacagtgaggataaataagtccttggtaaggttttcctttttatgaaaagcagcccccaagtcattttcttttataacaaggagtagcttgtaaaatcgagctgcagacatagacaaacaagttcaaagcttgcgtgggtgaatgctggcagttgtaccaataggaaaaagccacttgggactaggcatgttcacaatggtggctccattttcccttctttttgcaggccacatgtacagtaaggaacagaaaacgtagtcatgccaagtggaaagyccatttgcataataagattagggtggggtgtccagccttccccacacgctatgtaaacgtcacacctggtccagccaatctctgggccctatgtaactcagacaccgcctcctcaagcctgtctataaaatccggtgcactctgctgcaggccggaattcccagtccggcgtccctctctctcgcaagaaaggctccgttctcctttctctttcttttgactattatatatctgctctgaaactcactacctgcgtgt

SEQ ID NO: 364638 - DNA, 542 bp, Homo sapiens
gcctggtcatcatcaaccccatacccaattcttcatcattctctttcctccgccacagcaaacactcaggtcatgtactgagggaagagggacagagagggagatggatattttgatagagattaaaaaagagatgaaaagagagcatgaatgattgtcaccactttaaggaaagctaccctttccacatccaactgtgacgtggatgagaaataagcctttgcrttaagccactgagatttttggagggttgtttgttacagaagctagcattattgttattattgttgttgttgtttgtagagatggagtctcactttgttccccagggtggtctcaaactcctggcctcaagctaacctcctgcctaggcctcccaaagtgctgggattacagacataagccattgtgtccagccctgaagccagcattatatatcctaacttatatgtctgcatcattccaagtgacgtgcacccctctcccatatgcccaaatgctagaggctttttttctctctagggagagattgaacactacct

SEQ ID NO: 364639 - DNA, 542 bp, Homo sapiens
gcctggtcatcatcaaccccatacccaattcttcatcattctctttcctccgccacagcaaacactcaggtcatgtactgagggaagagggacagagagggagatggatattttgatagagattaaaaaagagatgaaaagagagcatgaatgattgtcaccactttaaggaaagctaccctttccacatccaactgtgacgtggatgagaaataagcctttgcattaagccactgagatttttggagggttgtttgttacagaagctagcattattgttattattgttgttgttgtttgtagagatggagtctcactttgttccccagggtggtctcaaactcctggcctcaagctaacctcctgcctaggcctcccaaagtgctgggattacagacataagccattgtgtccagccctgaagccagcattatatatcctaacttatatgtctgcatcattycaagtgacgtgcacccctctcccatatgcccaaatgctagaggctttttttctctctagggagagattgaacactacct

SEQ ID NO: 364640 - DNA, 535 bp, Homo sapiens
agcaaacaaacaaacaaagcacatctgggttccaactgggctattcaataggcccatgtgttctctgcccatttatttcaataacttgaatgctgaatgcagtatgtgtagtaattaggatctcagactctggagccagactgcctgatttcaagccctgactccacccttaactaagaaaacctggacaagttgtcactggacctcttcatgactaagtttttcctcatctgtgtgatgagaagaataatcttataattatatgaattaatatatttaagtatttagcacattgccttacacatggtaggaactatgtatgtatttgccattatttcttgatgtgaagaaataccttgcattgaatatatttcacttgccatcttgaaataaaagagagccaataaaaatagatggrggggtggggggccgggcgcagtggctcacacctgtaatcccagcactttgggaagccgaaacgggaggatcacaaggtcaggagatcgagaccagcctggccaatgtagtgaaaccc

SEQ ID NO: 364641 - DNA, 520 bp, Homo sapiens
aggccacattcccaggtggcaggtgaacatgaaaatttgggagacactttacaacttattgcagcagccatgagaccacacatgcaggagccaaacatcgggctctgaggagccagcttcgtggccacctctgctgccactgccaagctgtcaagcatagccaatggcagccctcaggtgcctactcttggccccacaggacctgagagttcacccacatttccgttctgcctgccttagctctctcyatggatcaggtgggcatatggcaaagttcacattttgaagtgagaataacatttattttgaacccatgctccactgaacaagagtctgagaaggcagcatgtacgtcctgcttcccagagggctgcccttgactcatggaaaaacactcagaggaaaatgccgagctagggtaccatgacctcccattagatgcgctggctggaaaacatgacacacagagataaggagtaggaaggccgcaggggagcaggcctcgggggcaccatgctgc

SEQ ID NO: 364642 - DNA, 520 bp, Homo sapiens
aggccacattcccaggtggcaggtgaacatgaaaatttgggagacactttacaacttattgcagcagccatgagaccacacatgcaggagccaaacatcgggctctgaggagccagcttcgtggccacctctgctgccactgccaagctgtcaagcatagccaatggcagccctcaggtgcctactcttggccccacaggacctgagagttcacccacatttccgttctgcctgccttagctctctctatggatcaggtgggcatatggcaaagttcacattttgaagtgagaataacatttattttgaacccatgctccactgaacaagagtctgagaaggcagcatgtacgtcctgcttcccagagggctgcccttgactcatggaaaaacactcagaggaaaatgccgagctagrgtaccatgacctcccattagatgcgctggctggaaaacatgacacacagagataaggagtaggaaggccgcaggggagcaggcctcgggggcaccatgctgc

SEQ ID NO: 364643 - DNA, 520 bp, Homo sapiens
aggccacattcccaggtggcaggtgaacatgaaaatttgggagacactttacaacttattgcagcagccatgagaccacacatgcaggagccaaacatcgggctctgaggagccagcttcgtggccacctctgctgccactgccaagctgtcaagcatagccaatggcagccctcaggtgcctactcttggccccacaggacctgagagttcacccacatttccgttctgcctgccttagctctctctatggatcaggtgggcatatggcaaagttcacattttgaagtgagaataacatttattttgaacccatgctccactgaacaagagtctgagaaggcagcatgtacgtcctgcttcccagagggctgcccttgactcatggaaaaacactcagaggaaaatgccgagctagggtaccatgacctcccattagatgcgctggctggaaaacatgacacacaragataaggagtaggaaggccgcaggggagcaggcctcgggggcaccatgctgc

SEQ ID NO: 364644 - DNA, 321 bp, Homo sapiens
tctcgaactcctgagctcaagtgatctgcctgcctcagcctcccacagtgctgggattacaggcatgagtcaccataccccacccaattacgtttttaagcacttaatatataagtatttaatacaactaataaactcagtaagttccagtagtatttaaaatgcatttwaaaaaaaaacatttttaggcaaggagaggaaactagactaataaatcctattcatctaaaagtgttctgaatgttagagagacctcaaaatactgtctagctcatctctcagccttgaagctgatatactgtaattcaaactttattgatg

SEQ ID NO: 364645 - DNA, 535 bp, Homo sapiens
tctattgaatttaccatattagtaaaataaaaaaraaaaactatatgatcatctcaacagagacagaaaaagcatgtgacaaaatgtaacatccattcctgaaaaaactcttagcaaactaggaatagaaaggacatttttcaacctgataaagggcatctacaaaagtatctacaactaacatcatacttcatagtgaaagactgaattcttttcctctaatatcaagaataagggaaatatgcctgctttcccctcttctattcaacattagaaattctgattagtgcaaccagacaagaaaaagaagtaaaaaaaaaaaaaattggaaaggaagaagtaaaattgtcatttgtagagtacatgactgtctatgtagaatggtctttttcaacctctgctggacatttttttcctgataattctttgttgtgggggactgtcctgtgtattgtaagatgtttagcagaatctctggcctctgcccactagatgcccatagcactgcccctcctccctccaagaggtgacaacc

SEQ ID NO: 364646 - DNA, 586 bp, Homo sapiens
caaaataaaaaagcacaacttccaggtatcaaaatgacttgagttcacaaactatcctcaaaaatggatatctcacacaaagaaagaaaagtggagatctctrggtacaatggtttctttagtcaggggtaggggaaataaaaaattgaatatcactggaataccatgttgctcttgtaggaaagtagaacagtttccttcagtgccaaagaaaatgtctctttacaggaccctgacggtcctatcagtaggtcatgtatctttgtacataaggaaacaacagttatttaatcgttctcttaccatttgaagaataatgggaagattcagtcccctaaaatctctacctgagtacaaaagggaaattccctatggtgtcttgtaactggtgtcttctccaacttcctctagtgcttctaactccacattttcagataagttcccccttgtttcatagttaccgactggctctgttcttggaggccatagaatctgcagtgtgaacctcccagcctcagccactatcccttgtcctcttgtttacttaattaatatgatgtgttcatttccgctgctgctggtagtg

SEQ ID NO: 364647 - DNA, 531 bp, Homo sapiens
aaatgtagatcattgtgtctctgcatgcccaatctgtctcttcactatatagccagactgtccctcctggcatctacaagcccatgcctccctattcaatcagaaggacatacaatgaggggaaagaaagaatttttaaaaagacaaaattttttcacaattcagcacagctctaatctgacatgacaaggccaagtccatcttttcacactgacaattacttaaagggcatcgatgccatggcaccattaaagtaatagcaaagatgaattgtacgacattgtggatcaatgtgytaagtgttgttcaacttgttcaatgaaataaagcattgaatcattaaccttaccaatgtcaatgtatagtcactatcaaattccactaaatgaacatccacgaccctcattaaaaagtgcactttgaagcaactaatatattaataccttattggccaataagaaaaggagaagctctccagggcagggtaaagaatctggacagaagctaagaacatttgatggagagcggaag

SEQ ID NO: 364648 - DNA, 517 bp, Homo sapiens
cttcaggatgttatggatctcttgcagtttcctgctgtcttacgaattttctgtcacgtggcatctcttttctcccttgctttattctttggcatcccttttctccacctcaggcttccagataatcagcctcatgatgccaggtgacttgctcccgttcagcataattgagtcttcacattcacttgaaacttggggccctttggagctggccaatcctggtaattaaaatgtmcccttcatctttaattgcttcatttaacatctagtgcaatggtttaggagggcatgtgccctctgcaacgatctggtgtgccccagataactgacaagcagcacctcttgcccctggctcaggaagattagtctgtttgggggctgggcatcttcaaattccagccatcctttgacccactgtgctttctcacttgcttgggaaatgtaattttaatttcctctgccttcctgggtgtcaagtggggacagtgtctgccccaccctcacatacagagaagat

SEQ ID NO: 364649 - DNA, 588 bp, Homo sapiens
actaactaaagccacctgagtttgatccagtattcacctcatcaactagcttttattgagatctattatatgtttaaagaaattctcctgccaactagacctcaagaaactttggttccagtggaagcacacacgtgtgccccaatccacaaccgcccccctacacaacatgcatgtgctagcaaacatagagcagaattgtaatgcagtaggagttcaaagaggagacaatgctggttttgttttgccagagccttcgggaacgtttaatggagaggacaacatttcagcataacattgaatgcctgacaggttttacgtartttggaagaagagaatgagcattacaagctcaggtggggacaatttagagaaagagagcaaaaccttagttgttgggaagagaatgagcaaaatgtgtgtgtgtgcatgtgtgtgtgtgtgtgtgcacgcacgcacatgcgtgtgtgtttagtgaggcataaaagaggaagtgtgtaaggataccagactagaaaaacctatatattttttcttatctgtagaataagagcctttttgtgccttccctacctgacctgtcctggg

SEQ ID NO: 364650 - DNA, 588 bp, Homo sapiens
actaactaaagccacctgagtttgatccagtattcacctcatcaactagcttttattgagatctattatatgtttaaagaaattctcctgccaactagacctcaagaaactttggttccagtggaagcacacacgtgtgccccaatccacaaccgcccccctacacaacatgcatgtgctagcaaacatagagcagaattgtaatgcagtaggagttcaaagaggagacaatgctggttttgttttgccagagccttcgggaacgtttaatggagaggacaacatttcagcataacattgaatgcctgacaggttttacgtaatttggaagaagagaatgagcattacaagctcaggtggggacaatttagagaaagagagcaaaaccttagttgttgggaagagaatgagcaaaatgtgtgtgtgtgcatgtgtgtgtgtgtgtgtgcacgcacgcrcatgcgtgtgtgtttagtgaggcataaaagaggaagtgtgtaaggataccagactagaaaaacctatatattttttcttatctgtagaataagagcctttttgtgccttccctacctgacctgtcctggg

SEQ ID NO: 364651 - DNA, 371 bp, Homo sapiens
ctgggagactggaaacttaaaaggtactgctgttttttcttcactttttgatcttgtcctgaacttttttgtgcatatgttttttattgccatgctaataacacgcagagcagtggccttgcagtgaaagaatgctcggggccccgggagaactcgctgaaattccatgccacaygatatctctgtggaggcagtgagtgcagtcctgcagattggagatactaaattttggagcctcaaggtaactagagaaacagctttgtttgtgaacaggaataaattctctgcttaaaaatgaaatcttaactttcagttaatgtctaacagaagcttataagctttctctgataggtgatctacctttgaactca

SEQ ID NO: 364652 - DNA, 534 bp, Homo sapiens
gacttggatgaggatattttaacccatattctcacttggcttatgtagaatgaggcattggataatatggtaaatccctcctcatgggattagatctataaaattttaccaaaatctatcccacctcccttaactttctctcacctttatttcttctgccaccctcctctctgtggacaaggcagagtagaaggtaaaggaaatagctttagggctataatcctgtttctaccctctcataagaagagtgaccttggaaaagtccccggctttatctgagtcatactttgcygatattaatcggaataaaagtaatatctgtgccccaaggcatttgtgaacatcgaatgagaaaatggatgggcaagcatcctgtaaatgtcagctgtggttttttgtggttgttgctgctgttagaaaaaacgagcagtgatctcaaaggtggaagtttccccatagtgatagcaattgtgtgtccactcgctgtcccatgggagaatctgagcaaggctgagaatactgctggggctggca

SEQ ID NO: 364653 - DNA, 303 bp, Homo sapiens
ccctgagacagctaggaaagctttgttttggttttgacagatggggaaaccaaggcagaaagagtaattgagccaggggccctgaggactggtgcattctggttctcatcccacccaagcctgccaatgtctcttctccatggagcagaagaatggatggtctctttctctctccccctgtaaktaaatcagaccggccccacttcagtaaaaacaacatttgtttagggagaaaaggggaactcaccgtgtggtgcggccttccctttgagctgccctgacagaaacaacaccgggcccatg

SEQ ID NO: 364654 - DNA, 507 bp, Homo sapiens
ggctaatgctttccatttcaaagctcctttaatctgaagagacatttcacaaatatctcttctccaggcatcccctctcccatcccattaataatataataatgctgccttaaattgaaagagtagaagtagattggagtggtgtgtgcaaattcactcatccatcctcccaggtctgaattcagacctgccaccccagtgatctgcaaataacaaataagacctccactttttgaaatgtactctgtggasccactttgcttttaggaaacctaacatatgaagcacttagcaaacaggcaaatctccttcattacgaaaggtttgggggaaaagggacctgctaatggaagcctatactgggggttggggagcctgggttcaacttcactcatggctcattaatgcatgagcatatttattctactgtaaacaagtagcccctctgctaagggttgagattaacaggtgaacaaaacacaatctccttcgagcattccaggcctg

SEQ ID NO: 364655 - DNA, 495 bp, Homo sapiens
gtaatacgataagtggaaaaatggtttatctaaccatgattattaactagttaaagaggaaaataaatcataagcctattagtatctagtacttgttcaaagttgctaaaggaactgtgagcattttgtgcaagtgccttaataaacccagaaagccgctggtaataacagtgctttattgcatgtctactattagccaggtactgttctaggcactttataaacattttttaggttgctagctagtacataygtcagtaaggattttctgacaagggatggaatagagagtagccagctgttcataagaaattccatgaatccaaagcacatgctcctctggcctatggctgcaggcatgggtgttgagaggatacctgcttattttagaagtgggtaagatacactctgatggagaaaagactggacttagcaaagacccggttacaagtctcaggtcttccactcccaagctgaccgactgtgggtatgttt

SEQ ID NO: 364656 - DNA, 618 bp, Homo sapiens
agctcctcacgtatttgcagacagcagttcttctgaggtcttttctgttcctggccaagttcctccaaacattccttatatgccacaatgtccagaccctttgtcctcataaatggattgtgcccacattggcaatatctttcatataatggtattcttgaagctgartacagaattctggtcattgctgggccttcttagattgtgatgttcttctatcagtgtgaccaaagatggctctcacctctttgattgctaccaaccttggtcaaatcactcatgctttgagaccaaatcccccttctattcaatgggaacaataaaacttacatggtgaagccatcaaatgatttgggtgagcttcaaaggtgaacgatatatgaagggatttgttatagcacaaaaatgagagtttgggttcaattgtactgatactgagcttatgtagtctgctacaaaccttgttatttttcctctgtaaatattgcaactagcccatttattttgccacacttataactgtaaagtttcatttgttagcttttcttgacattccagtttgtagacaatcttgattttgccaaccagtttactggccatcactttctgctttgtgtg

SEQ ID NO: 364657 - DNA, 585 bp, Homo sapiens
tctttcatataatggtattcttgaagctgagtacagaattctggtcattgctgggccttcttagattgtgatgttcttctatcagtgtgaccaaagatggctctcacctctttgattgctaccaaccttggtcaaatcactcatgctttgagaccaaatcccccttctattcaatgggaacaataaaacttacatggtgaagccatcaaatgatttgggtgagcttcaaaggtgaacgatatatgaagggatttgttatagcacaaaaatgagagtttgggttcaattgtactgatactgagcttatgtagtctgctacaaaccttgttatttttcctctgtaaatattgcaactagcccatttattttgccacrcttataactgtaaagtttcatttgttagcttttcttgacattccagtttgtagacaatcttgattttgccaaccagtttactggccatcactttctgctttgtgtgatccacaaattcaagaagcatggattctgtggttttacctaaatgataaacacaaatgttgaacattttccttcacaagaactcttcagttagcttctccctat

SEQ ID NO: 364658 - DNA, 569 bp, Homo sapiens
gtcttgctattcaatttcttaatcccaattatacagtgccctttactctgaggtcatgctgggaccagagctggttatgtgccatatggaaggtgacatttcttggggggataaattaatgaatctgctactaaattcttaaaatcattttgttagtcccagcctctgttttaataaagtgggtcattgcataaaaatctgcaaccacatacctgtagcttgttttcctaatgctggtcttttttaaatgattagttggattatcctttgagtgaaaaaaggtgggtctctcccacttgctcacaacactcagagaacctgtattcaacttctaattttatgcttggccaactactctttctttttagttgtgttaaaatatacataacgtaaagtttatcattttaaccatttttaagyatacagttcattggtcctaagtacatttacattattgtgcaatcattaccactccaggactttttcatcatcccaaattgaaatgctgtactcagtaaatgataatgtcccaattgcccctttactctaggtcctggcagccaccatac

SEQ ID NO: 364659 - DNA, 591 bp, Homo sapiens
gggcaaggtgctgaagctattcaagtaagtattcagattgcagcctgacagtagtgctttgattacagatttggaacttgagatattatcaatcaaattgtaggaaggtaggaagcagcagcataccttgactctctggagatgagacaagattgactgcagctgtggtttgtggacttarcatctacatgcgggctgctacgcttgctaagaaatcccaaaggggtttttagaggaaagattggctccagaagtcagatcacaagagcaatagctacctggccatatgcagggattgaagatcaatgggtgaaagatcaatctgaataaatgagctattaatacatacaacaggtcctcagcaattaatctccaggtggatgacagcccaccagttacagtgatctgctgatggtgattgacgtaatggggtcgtctgccgtgccaggctgctgagttagtgatattcacatttattttcttgcttggattgaatggtttctggggcaatctggaatttggtgctgaaaacgtactgctcagaagaccaaaatagtttattctctaagagtaggcaaagctgagcagatc

SEQ ID NO: 364660 - DNA, 596 bp, Homo sapiens
gcaaacacaaatctttgataaaaattacatgaaaatcttgttcaagagacaaagcaaaatttcacctttaccttagtgtattattgtttttttagcaaatctttttaaaatttttattattttattttatttttccagaagttattggggtacaggtggtatttctacttacttacatgagtaaattctttagtggtgatttgtgagattttggtgcacccctcacccaagcagtatacactgcaccatatttgtagccttttacccctctccccctcccactttttcccccaagtccccaaagtccattgtatcattcttatgcctttgtatcgtcatagcttagttcccacagatcagtgagaacacgcgatgtttggttttccatttctgagttacttcacttagaataatagtttccaatctcayccaggtcactgcaatggtgttaatttattcctttttatggctgagtagtatcccatcatatatatgtgatatatctatgatatatgatatatatcagtttatatatatatcacagtttctttacccattcattgattgatgggcatttcggttggttccacaatttt

SEQ ID NO: 364661 - DNA, 525 bp, Homo sapiens
tttctagcttatgtgtgcaaaggtgttcatagtagccttgaatgatcttttgtatttcagtggtgtcagttgtaacatctcctgtttcttttcttagtgaggttatttggattttctctcttcttttcttggttaattttgctatgggtctatccattttatttatcttttcaaagaaccagctttttgtttcatttatgttttgtattttttttgtttcaatttcatttagttctgctttgattttggttatttcctttcttctgctgggtttgggtttggtttgttcttgtttctctagttcsttgaggtgtgactatagattgtctgtttttgctctttcagtctttctgatgtaggcgtgtagggctatgaactttcctcttagcactgcttttgctgcatcccagaggttttgataggttgtgtcactattgtcatttacttcaaataatttttaaatttccatcttgattttgtttttgacccaatgctcattcaggagcaggttacttaatttccacg

SEQ ID NO: 364662 - DNA, 608 bp, Homo sapiens
ggaatttttgagcctctcttgtgatccactgggttccctcctggggaaagcaggtattcaataggtaaaytcttcttcaatgttgttacctacggaacaaacttatgaccttcattcctcacatccaaaaatctccaaacttctaagacatcatatttcaactaaatttctattttgttttccttttgtggtatttctttggtataaataattcgtatcctattttgatgtcttttagttttaaatctattttagccccacacctcatatgcctttggttttccttcctagctgtttttccagtatttgtctcccataacagaggtcaaaagcattttcttaaaaggtctaattagtaaatactttaggctttgcgtacactttggtctctgtcaccgctactcaattctgccattgtaacacaaaagcagccagagacaatatatacatgaataagcatggctgtgttataatcaacctttatttacaaaaacagacgagggcagatttggcttgtgggcagtagtttgccaacccctgtcctataggaactgaaagaagaggacagagtcgcctgacaattaagcctgccagcctctacagatttt

SEQ ID NO: 364663 - DNA, 538 bp, Homo sapiens
ctttttggtggcttagtttctgccattccctttgaatatgaagaagaaggtgatagacgaccccaggctttcagggatcttctattccattagattggagctgtcaggaattaaagaattgattaagcaattatttagtcaattaaaatagtgatagatgctactgtggggaaacaagtgttaaaaagcaggtgcagtttcaattcatttagtacctatggaatacttggactgtgcaatgcaccttacatactttaacttatttaattttcttaataacactttgaggcaggctctgttcttacccccatttaatagcacagacaggtgaagtaacttattcaaagccttataagcagtgggtgacagagccaggatagaatgtcaagaagtgtgctctggagcctggaatattaaagcactgttagaaatgaatatggagagtatcgacctagggagtaatgttttgttgacattagawtggatgaaaggagatgacaggagagtggaaagaaagcacacgtggcagaggcaagtt

SEQ ID NO: 364664 - DNA, 568 bp, Homo sapiens
ttttgttttgctttctacaatcttttaaaaatgtagaaatcatttttcatttacgggccatacaaaaacaagtcatgggtagggcaagtggctttatccttcatagagttagcctttttctccctgagcttaccaagtcaggacagtttttctattagaacattgaagcaacacaagaatcaacgaatgtttcagtaagtcttgttagagaagatcagccagattccacagtaaacagactgacagtcacagcctcctttgcagcagcctacaagagttccattaaatgctgaccagccaggcccaaaatgtcaatgtctgctctgtgaatagtccctttttatagaatggcacatcctgtagrgagccaatatcttaacttcatcattctggtctcagtaacttacataagatcttccccccaaaagatctgtgataaaatagggaaggtgactcaagatctttgactgcctggtcttaaatctaaatcaatcaacaagttaagagtctatttaacacctcttccctaacctctagtgttgcatttgggatacaagagaacaaaagc

SEQ ID NO: 364665 - DNA, 300 bp, Homo sapiens
cacctcagcctcctgagtagctgggaccacaggtgtgcaccaaaatgcccacctaattttcgtatcttttatagagatggggtttctccatgttgactargctggtctcaaactccttggctcaagcggtctgcccgcctcagcctcccaaagtgctgggattacaggcatgacccaccatgcctggccccaagttaggatttaagaccagttctgcctgacttaaagcttgtgccttctaatgttgacccatcctacttttactttcagggaataactaatatctaagttttcagagaa

SEQ ID NO: 364666 - DNA, 581 bp, Homo sapiens
tgggagcatgccatgtgtgctgctttgaaatatttttatctcagttgatgtattgtcagtatctgccatatcactaaagaatcctctgtatttaaaaattcttaattgacctggcatggtggtctgtacctgtgatcccagctactcaggaggctaaggctgaaggatttcatgagctcaggaatttgaggctgcagtgagctatgttcacaccactgcactggtgtgaacctgtgcccagagagcctgggcgagagtgagaccctgtctttaaaaaaataaaataaaattattatttcatttaaaaataaaagttatttaaaataaaataattattttattaaaaaataattattttattaaaaaataaaataaaatacaattattatttttttcttttttctttattttaaattaaatccataatttttttycctcttattatgaaaattatacatacttattatgtaggtctatctatatgggtgtgtgtgtaagatacagattgtctttgtgtatatatatgtactaattttaggttagatttccaatttaaaatatttagtataattaattttgca

SEQ ID NO: 364667 - DNA, 561 bp, Homo sapiens
atgtcagttggaggtggctttgcatttctctgaagaggaaatcccagagtcaactcacaacccatctgccattgcagctgcagtggtactgccctaactaccctcaggctggggtagggacaaagggcctggttgataggctggcamctccagcacaccaaagctaccacatggagaggagtccagtctctctttcttgtgagtccccacctccaactcttcaccaggcagggcccacaacttaggactgcagatgagtcaccccacacacagctaagaacacttactggaagtggttctgagattccctggggatgggctcccagaggcaaccaaaagtccctcctctacagccacagcagcagttttcctgctgcccttgttctggggaataaacaaagagccttagggctttacctgcacttacagcatgccacagtcaccatacttagaggaatccagtctctcttccctgtgagccctcgacacccaactcctcaataagtggagtccccagctcaggccacgagctcagctgccactacccctggctgaacattc

SEQ ID NO: 364668 - DNA, 561 bp, Homo sapiens
atgtcagttggaggtggctttgcatttctctgaagaggaaatcccagagtcaactcacaacccatctgccattgcagctgcagtggtactgccctaactaccctcaggctggggtagggacaaagggcctggttgataggctggcaactccagcacaccaaagctaccacatggagaggagtccagtctctctttcttgtgagtccccacctccaactcttcaccaggcagggcccacaacttaggactgcagatgagtcaccccacacacagctaagaacacttactggaagtggttctgagattccctggggatgggctcccagaggcaaccaraagtccctcctctacagccacagcagcagttttcctgctgcccttgttctggggaataaacaaagagccttagggctttacctgcacttacagcatgccacagtcaccatacttagaggaatccagtctctcttccctgtgagccctcgacacccaactcctcaataagtggagtccccagctcaggccacgagctcagctgccactacccctggctgaacattc

SEQ ID NO: 364669 - DNA, 446 bp, Homo sapiens
agaacatgaacagacactttcctctgtctctgtctctttctctgcctcggtcccggccccccccccccccccccttttttttttttttttttttgagacaagctcttgctctgttgcccagtctggagtgcagtggtgcaatcttggctcactgaaatctccatctccggggctaaagccatcctcccatctcagcctccagagtagctgggatcacaggcacataccaacacaccaagctaatttttgtaattttggtggagatggagttttgccatgttgcccaggctcatctcaaacttctgaggtcaaacgatccacctgtctcagycccgcaaaatgctgggattataggtaaaagccactgtgcttggccaacagacacttttcagaagaaaccatatagggggccaggaagcatatgaaaaaaggcccaactttactaa

SEQ ID NO: 364670 - DNA, 446 bp, Homo sapiens
agaacatgaacagacactttcctctgtctctgtctctttctctgcctcggtcccggccccccccccccccccccttttttttttttttttttttgagacaagctcttgctctgttgcccagtctggagtgcagtggtgcaatcttggctcactgaaatctccatctccggggctaaagccatcctcccatctcagcctccagagtagctgggatcacaggcacataccaacacaccaagctaatttttgtaattttggtggagatggagttttgccatgttgcccaggctcatctcaaacttctgaggtcaaacgatccacctgtctcagccccgcaaaatgctgggattataggtaaaagccactgtgcttggccaacagacacttttcagaagaaaccatatakggggccaggaagcatatgaaaaaaggcccaactttactaa

SEQ ID NO: 364671 - DNA, 446 bp, Homo sapiens
agaacatgaacagacactttcctctgtctctgtctctttctctgcctcggtcccggccccccccccccccccccttttttttttttttttttttgagacaagctcttgctctgttgcccagtctggagtgcagtggtgcaatcttggctcactgaaatctccatctccggggctaaagccatcctcccatctcagcctccagagtagctgggatcacaggcacataccaacacaccaagctaatttttgtaattttggtggagatggagttttgccatgttgcccaggctcatctcaaacttctgaggtcaaacgatccacctgtctcagccccgcaaaatgctgggattataggtaaaagccactgtgcttggccaacagacacttttcagaagaaaccatataggkggccaggaagcatatgaaaaaaggcccaactttactaa

SEQ ID NO: 364672 - DNA, 558 bp, Homo sapiens
acatatccaccaaaagacatgtccgagaatgttcatagcaactccatacataagagccaaaacctgaaaacaactcaaatgtctatccataggaacttatataaataaatttgaatatattcatataacagaatactactcagcaatataaagaatgtaccttttctatatgcaacaacatgaatgattctcacagaaataatattgagcaaaaggaggtagtcacaagagtatattctgtgtgattctattcatacaaagctgaatagggaaatttagctacggaagaaaagctaaaaaataaatatggtatcaataaaataaattagtaatkagtactaatgatagtacttctatcattatagactaaatgagcaaagctttttaagtgatggaaatgttctaatctagatctaagtggtggttacttgggtgtatatatatatgtgagaatttattgaactgttttcttaatattcgtatactttacagtatataagtaatgcctcagttaaaaggttaaaagaagattatcaagtataaattcttgttttcctc

SEQ ID NO: 364673 - DNA, 511 bp, Homo sapiens
tattcaccaattatgtaagaatcatatgttaaatgtatgagttgctttctatgaatccttttacaaaacaaaattttatacacacacacatacatatayacacatacatatgtatatacttatatacacacatatatacacacatacatacatcggtataatcactctctaattcgtctcttttatatgatgttttccaattttatgactcatctgtacagctgatacattatgcctagaactgacaatactgtagtggccagctttctactttaagacagggttaaagtatttcccctctaatctgtaccaagaaaacctcacaatatctacaattttaagaaatcttgccatttgagtctttgttgcaacttagacattgcctcagagtccctaaagaggatctgatttccctgagatttatttcaacacaaaaccgtagaatcagataatccccacccagatgctaccatgctgctgccttggggtttgggatttagccttgggggct

SEQ ID NO: 364674 - DNA, 545 bp, Homo sapiens
gctaagattttttaatgctatttttatatgttcaagttatatacattgtaccaagaaaaataagcaagttagttcttacagttttgtcttgtcacaaataaggctgcaattgaaatgctatctcatacatggcatttatgaaaagcctaagaaatatttgctaatattcaaaaatattagcaaataaaattggaaagcaaggtctctttttctgatgcagatattgacagttgtaatattcatattagcaaagtagaaccgagcaaacagcttttacacaactatatccaaaaggatttgattgagtctatttattgagcaaataattatkgacttaaaacaatctactaaggcactgtgctaagcactggggataaaatgaacaagaaagatgagtctttgtcctcacaaaatttatattattgtgggtgaaaccaaaaagtacatgaacaagtgacaacaaggaagtgataatgaaatgtttctatcgagccatgaaaagacatacctgcatcttaaatgcatattgctaagtgaaagaagcc

SEQ ID NO: 364675 - DNA, 578 bp, Homo sapiens
aatactatgtaacagcatgctatcactcatctcttcccaactctgagctgagtggcatcacattggtagcttgaaattagcatgatgggagtatttacaccacagaaattggacacttctataatacaaakcagcacttaatttattgttttgttgatggtctagatttgagaaagtgaggggaaaatgttaataatgcagattaatttttaaagtgtatcatgccatgctgggcatgattgctcacatttgtaatcccagcactttggagggccaaggcaggtggatcacttgaagccaggaattcaagtctagactcagcaaaaaagcaagaccccatctctacaaaataaaataaaatacaataaaattagttgagtgtgatggcacaggcctgtagtcctggctactctggaggctgaggtgggagagtcacctgaacccaggaatttgaggctgcagtgagctatgatcacaccactgcactccaacctggttgacagagcaagaccttgtctcaaaatgataataataataaaaaaagtgtttcatgtctatagccattatgttgattgcaa

SEQ ID NO: 364676 - DNA, 542 bp, Homo sapiens
aattttcatagcttctacctcccagttgcctgggttagtctaacttctggcagattgatcttgggcaaaaagcttcactgagagttagtgtctgtgtgctttggttgaatagccaccttaatactgacttacatagtgggtaggtttttgatacctcaaataaggataaaactccataataaaggacccaaagcaaatacttttaaaacttaggtgatttttcatcacctaaaacataaatagctttatttagcaaaatcccagtggaatctaccacacatkcttttataataacccttttttgggagtcaaagtattgtttttttattagccacatataaatatcatctcattttctgttgcagtgtgactgcaaggcatgttgtggtggaaatcattagaactgggaagctctggaatggaaatttggaatcgtgtcattctaggctcttaaagagaatattagggataatactgttgtaaaaaataaatataaacacctaattttgtatgaagttttgctatttaaattttaactatgt

SEQ ID NO: 364677 - DNA, 492 bp, Homo sapiens
ctagctggaatagtctactacatacctaggctatattgtatagcccattgctcctaggatacaaacctgcatagcctgttactatactgaatrctgtaggcaattgtaacaccatgcctaaacatatctaaatacagaaaaggtaaggtaaaaatgctataatcttctttttaaacttttattttaagttcaggggtacaactataggtttgttacataggtaaacttgtgtcttaggggtttgttgtacagattatttcatcatccagatattaagcctagtacccattagttatatttcttaatcctctccctcttcccatcctcaactctccaaaaggccccagtgtgtgttgttcccttctgtgtgtccatgtgttctcatcatttagctgccacttataagtgagaacatacagtatttggttttctgttcctgtgttagtttgctaaggataaaggcctccagatccaatcatgttcccgcagaag

SEQ ID NO: 364678 - DNA, 486 bp, Homo sapiens
ctagctggaatagtctactacatacctaggctatattgtatagcccattgctcctaggatacaaacctgcatagcctgttactatactgaatgctgtaggcaattgtaacaccatgcctaaacatatctaaatacagaaaaggtaaggtaaaaatgctataatcttctttttaaacttttattttaagttcaggggtacaactataggtttgttacataggtaaacttgtgtcwtaggggtttgttgtacagattatttcatcatccagatattaagcctagtacccattagttatatttcttaatcctctccctcttcccatcctcaactctccaaaaggccccagtgtgtgttgttcccttctgtgtgtccatgtgttctcatcatttagctgccacttataagtgagaacatacagtatttggttttctgttcctgtgttagtttgctaaggataaaggcctccagatccaatcatgttcccg

SEQ ID NO: 364679 - DNA, 618 bp, Homo sapiens
ctcacgtctgtaatcccagcactttaggaggtcaaggggggcggatcactggaagtcaagagtttgagaccagcctgtttaacatggcaaagcctcatctctactaaaaatacaaaaattagtggggtatggtggcacgtgcctgtagtcccagctactcatgaggctgaggcaggagaatcacttgaacctgggaggcagaagttgaagtgagctgagatcccgccagtgtactccagcctgggtgacagaatgagacttcaagtcaaaaaagaagaaaaaawaaataaataaagaaagaaaaaaaataaaaagaaaaataatgaaagacaataacaaccctaaaaaggttcacccagaaatcaaatccttcagaaatgatataatttgttcaactacagagtttacataattttttaaaaccttaaagatataccattttaggaaaagaaatttcaattagtttatatgaatgtttaataatagttaattgttactactacatgaaaaaatcttggttatatttgcctctttttaatgaatttcaattaattaatgtattttagtcatttttttgcccttgtccacataaagtcagagtcaaaatattctagtttt

SEQ ID NO: 364680 - DNA, 504 bp, Homo sapiens
cctttttgtccccctttttgttcattcctttttgtcccccttttgcacccatgtgagggtgcagcaagaggcaccatcttggaaacagcagcyttcaccaggcattgaatctgctggcaccttgatcttggactaaccagcctccagaactgtgataaataaattcctgttatttataaattacccagtatcgaatattttgttgtagcagaaacagactaagataccatatatccctttcactacatgtatatccctcaacaatgtagtattgctcctcaacaatatagtattgctcaacaatatagtatccctcagcaatatagtattgctttctatgttgttcaactttacataaatgatttcatacagctatacaaccttataaaacttgatttttcagttaactttgtgagatgcacctatgttaattcatgtagctttagcacattccttttcatcatgtataggattctattttgtaaatatagctaaaagtgttca

SEQ ID NO: 364681 - DNA, 616 bp, Homo sapiens
agggtcagccttacattagtgtattcttgctgaatctttgactgacataccagatgttcatcacaggcacactttacttctattatgctgatttatgccgtctagttttgtttgttttctatttgtgtttctacggaatccattctcttgtgataaatgtggaaattttggttgttttaattttatgattgtaccctccattatctttgaattcctctaactggaacattattaaacttgtctcttataagtgctgtactctcatttgtcattgtactactaaaggaccttaatcctttggtatttgaggtattcttggaagtccttttaggaacatgcatttcactgatggatttgactgggactttggaaatataatggttttatgttaatcttgcccattagtgttttatgtcttaagactagagacttggttcctcctcctgaaatttttagccctatttcctataaagactcatagctagcttgatttggtgtctgcaataagtaagagatttggtcacttatcttttctctctcttgccattgggtggattctatgagctgatttttctttggcttccwttaaacacacttttatttctagaattaaaga

SEQ ID NO: 364682 - DNA, 558 bp, Homo sapiens
ttaattttagtgattctatagatcctatccaagctttattaagatgccaagcacccacccactcccataacccccayagtacccctgaattagtgtcatagaatgtgagacaatcagagagcatcttaatgcctccatggtgagtgcaaggacactactgtcctcttcttttggtggaatttatggttgctgttattgctatgtgttttaagctttttggtacatattaccaaaataatggggctctatctttcacttttgcaaagggtctcctgggggcaatcaatcattaaagaaagcccagggaagaggataaagtctgaaaatttcatctgtctttctgataacctgagtctggaaagccttaccaagcaatgggctcttagtgtaccagtaagccaaaagcatgcctcaaaaacttcagttgtcttcctacaatgcctggaaattataatgctattagctgaggttcataggatggaatatgcagggtgatttccttgagtgacaactgtctaggacacatctttactttggtgtctaatggcatctcaacct

SEQ ID NO: 364683 - DNA, 631 bp, Homo sapiens
tagagtagtcaaatttatacaggcagaaagtagaatggtagttggcagggtctgggtagagggggaatgagaaattctcatttaatgagtacagagttttgcaagatggagagttctggagatggatgatggtgatatttgcacaacagtatgaatgtatttaatgccactgaactgtacacttaaaaatggttatgatgataatttttatattatgagtatttaccacaaataaaaataacttttaaaaaccctgttgttctaaaacaatgttctttttcagaggaagtacttattagttcaaaacaatgtacatgtcagttctctgcttcatataatttgttttcactggaagaaaatatgttggaaatatttatgccccctagtttcctcctctccccaaataataaatgataggagggtggtgtaatcttgtcttttctacttgggtgatctaattttggtttaaacacatgtgttaataggtgtactttttttctgtttttagattccatttgaaagaaaacatttctctgcttcactagtacactctggctacattctttatggcctrttctttgttgggtgagactctctaaaattaatgcctactctttattgattgcccacc

SEQ ID NO: 364684 - DNA, 604 bp, Homo sapiens
aaatcagaaataaggaaaagagttattgaaatttgacacataaaatagccattatatagagatgcttagggtcaatgcttcccctgttgctcagggagataatgtatatagtggtaataataatattaaaaataaagacatatgatagtagctaatatatattgatcaattatataataaaaatcataatcacttattggctgctttctaaatgccaggtactattctaagtgttttacttaaattaatttaacccccctmatctatggggtagatagtatgtattactcctatattgcagatgaggaaactgagacacaaagaatataatcaacttacctaaaatcaaatggacaacagttagcagaggtagaattcaaactcaggcattttggctccaaagtctgcttttaattagtttgttatgtgttacttcatttaatcttcacagcaaccctctaggttagttactatcattaatcacattttctaaatgaaggaattgaaacttagaaagcttaattttctcaacatcatacagcaggatgcataatccaaagaaaagtccttttgatgacaaagtccacactcttaactatgacag

SEQ ID NO: 364685 - DNA, 618 bp, Homo sapiens
aatacaaatttctgctaggaggatgtggtcgttaaggatcttccaattcctctagagtccatgattctttggttaacactgtcttttatgcctgcagtgtcaggaaggaaagccgtgaatctgtgcgttttgtgtcatgagcccaacctcgaagctgtttgtggggacagaggtcaacccagtgccctggcacccagcacacatcagagcatccagaggtccagggtacgctggacattccagggatagctcagtctctggctaaagacagctgcgtgttcttccccaacctttttctcagaaatcaggctcttcacagagactcgcaaaaaggatgtagactttctctgccctccacccccgacttaaatatcttacttttttaatgatgggagaggagttttggtatccaggattatgtcttaatttttgcatgataatgaaaaaatagcaccgatttttcacttctccaccacagacatccaktccacaaactcaagctatggcttgaatgttagaaaagatgaaatggcaggtgtcagcaaggagtggagggcgaggttccttttgcactagccaggggctgtgggatctcaaagtgctcataggaaggcaaca

SEQ ID NO: 364686 - DNA, 569 bp, Homo sapiens
tttgttttgttttgttttgcagcatttttgtgacagtagctggytgctgcagggagtttcaaatgttttttaatgtgctacatatagaaaaaaagagttgacttgtggttcttcaaagagccttctcaggatcagtgagcaggagttagagcagggtttctcaacctcaccactattgacacctggggccagatgattcttggttgggggctgacatgtgtgttatggggtgtttaacagcacccctggcctctgtccactagatgccagaagcacccctgtcccccagttgtgataacccaaaatgtctacagacattgacatattccctctatgggccaaatcatcccagctgaaaatcactactgagttaaaagaaggcagatttgggttcggtttgagaaggaactttctcatagtggccatttaatgaaatgaaattggaagtattttggaccatgtgggttatcttcattgtgtagaggacgggatcagacaacttctagcaaacctcccaatgctgactccacagtgatgagctaatttgaggagagtgtttcataattctt

SEQ ID NO: 364687 - DNA, 604 bp, Homo sapiens
tgtacaattgtatacattttgaaaacaaaacacaaaccttggaagaaattttgcattttctataagtatctttgagccatggtcctgggtttctgggtgcaaagccactgggctctgtctgycattagagacgcttcagtagaaaaccctgagaagccctgagttaagtactttcatcttatttagcacggatgcactgacttcttagaaactgcgtatctggtatcaaacatgaatgcctttggccagtttaaatgagttcccattttctttttgaaactccatcctcattttcctactgatagatttggcttactgctttgaggctctgaagtttgaggctgcttgctttaggaaaatctagctccttgccatggctgcacattggttctcctgaaagtgtaagggcttattttctcttggaaattctgggtccttataaacccaaaatctgatgtgctcattcaggtcttagggcttccagacccagagctcaccatgcacctgcacccagcagtgactcttctgcctttcccagggagcgaggcttcattgtcagaggaaggggcaggagggacatcttgtcctttgcccaatccctgaa

SEQ ID NO: 364688 - DNA, 606 bp, Homo sapiens
gaaacaatgaagtaatatatttcaaaagagacagaaatgttcctgtaccttgatgcccatcaatcctattttgcagagttgagctaaacaaaatgacactaaagaaaaaaaaagctacgtgcataaagatacctcttgcatcatagtcatcataatttttaacagtgaaaagactggaaatagcccaactatctcacagcaggggactctaaaggaaattacactcagacagatggaaattatgatgatgaagactatttagccaaaggaaatgcttataacataatgctcacgagacacaaagtttattgtgactacactataaaaatcacataaatgtatggataaggatatataagggaacagagagaaaggaaaatcactayttattagggtattatttttattagagtgttgctgatgtaataaaaatctcctagaggaaatttccttcaaaacccctgattcgttttgttcccatctggtctgtggtccttattgcattgtgccttgagtgtaataatttgtgtcctagttttagccccgtttggaccataaactcttcaagggcaaggactatgttttacttttctttgtctcacctga

SEQ ID NO: 364689 - DNA, 612 bp, Homo sapiens
cagcttctttgcacgtacactgctgagtcattctccaggggcctcccactgtctggcacacatggtaggacttttagaagtacaaaaaagggagttctacccctacatcctcatagctgagtcaccaggctgactgcatggatggctcctccctggagagaggaggaccatctgactgccaagatggggccagcgccacctctttgagcccctcctagggtgctgaaacagcagctgaatggctgctgggcttagcatggctgaggtggcatcatgagagagaggctggggatgatgtgacatggaccttccccgccggaaatcagtcccgcatcaatcccgctgagcccggcagcttcacttgctgtgaactgaggacagctgcaggtcaggttgtcatgtgagctaaggacaaactccagcctgctaaggtatcagaatatgtgccctgtgggggatgaagatgaccggaaggaggcaggaagggttgtgggcacrttcaggtccttggtgtgggtgctgcagtcagtttttgagcattcatccagctgtttgcttatggtctacacacttttcggtatatatttcatattcaataaaagagttacaaag

SEQ ID NO: 364690 - DNA, 561 bp, Homo sapiens
ttcctttttgagtaagaaaggaatttaaaaaacacaaggactgcaagctctcgtcccaagggcctcacaggccagaatgtcctttctagcctggttcttcagaccaaggtgaagtcaggtctcatctccctggtgctttcctggcatccaggaaccagatatctggttccataaccatggcctcctcagccaagcccctgaagtctcccagagagcaggcaaataggcaaattctctggttccctgtctagcccatgggggctgagcctagtttggggttcaggagtggaggcctgagcctaggaagaaacttggggctgagctatttgggattgacaccagcctagcctcatgcagcgcccttttcccactggggcagcatcaagccttggaaccgcaggtgcagcgggctggcaggtgaggaggaaggacgagctgtggggctgtcctgccagggcctttcaggcctctggctgtgctccgacttgaccmttctgctacctgctggtcttgagccccgggcattcaggtgagggcagggcatggcttctgcaagagctg

SEQ ID NO: 364691 - DNA, 583 bp, Homo sapiens
attttcggtctagtaaataattgctcttaacaactataactaaagatagtccaggaagtgagcttcaatacttataattaatagcatacatcataaaatttactgtatactaatggaaaccctgaataagtagaaaacaatagaaataatctagatttttaaaaaaaatttttgactttctttttctggtaactaaataaaaagaaacaaaatgaaatacatcaattgcaatcactatatcttaaactttgtaacttttacaaaatatattttacaaaaaatatttaactttcactgggccatctcctaataatatgcctagcactaatgttttcaccctgcctaattaacctttttcaaagatttttaaccaacagaatcatgaccatctcagagacaactactccamaacatctacagacaacgttactcctacagtcaatctgagagcaaaggataaagatagcccaggaagtgagtttcaatacttataattaatagcatacatcataaaatttactgtatactaatggaaaccctgaataagtagaaagcaatagaaataatctagattttaaaaaga

SEQ ID NO: 364692 - DNA, 589 bp, Homo sapiens
tatggtttttgctaatagtgattttctgtattcatcacttgtgtaacatgtattaattggtattgtaatctaagaaagaactgtccctttctctctgtttatttamagttactctattatttgaacaaatatacattaattgactaggttattatccactagtttttttttgtcaaatggtttttatgtagacattggagccacattatgttggctcctgtgttttttggacatctttacaacattatttgaggacatcctttttagcaccacaagatactccaggctcttcttatactttccattatttaaggatcaaacaattgaaaaccaagatgtgcatgttaacatacataacatctatttctatgttaatttatgtgtgtatgaatatggatacctccaactgcaatccaacaccatagagttcatgttaatcttccttttcctcatttgtaaatactttcttaaagagtgagaaaactggcttttgttatccacaacacattatttgtccaatactagatagagtattagtttctattgctgacatgaaagattactacaaattttatgtcataaaataata

SEQ ID NO: 364693 - DNA, 459 bp, Homo sapiens
gagatactggtaatccagcagtagtgagcacatgtaagcagacagatgttgctttccaaacaaaaactattctttattaaaaaaacaaacaaacaaacaaaaaaacaaaactagcgctctctggcgatatggctaatgctttattggagaagggcacaacagtgatggcaatgttagtgtctttttttaaatcattgaactgtgtacttaaaaatggtgcattttgtgataatgtattttttccctaataacaccratttgaaaattttagaacataatattagaaacaatgatatttttaaaaataagccatttaagaaaaaacaaacaacaacaacaacaaaacagctgttgatgggttccaccaagttgaatgagaaagccctagtgatgaaggtgtaagagaggaggctgataagatgtttctagttggatgcttgttgaattgcagtccaatca

SEQ ID NO: 364694 - DNA, 459 bp, Homo sapiens
gagatactggtaatccagcagtagtgagcacatgtaagcagacagatgttgctttccaaacaaaaactattctttattaaaaaaacaaacaaacaaacaaaaaaacaaaactagcgctctctggcgatatggctaatgctttattggagaagggcacaacagtgatggcaatgttagtgtctttttttaaatcattgaactgtgtacttaaaaatggtgcattttgtgataatgtattttttccctaataacaccaatttgaaaattttagaacataatattagaaacaatkatatttttaaaaataagccatttaagaaaaaacaaacaacaacaacaacaaaacagctgttgatgggttccaccaagttgaatgagaaagccctagtgatgaaggtgtaagagaggaggctgataagatgtttctagttggatgcttgttgaattgcagtccaatca

SEQ ID NO: 364695 - DNA, 235 bp, Homo sapiens
attaaaaggagaagtacttacaatggcaaattttagtgtgcttggyattctgtttcaagtaaagctgaaaaatatgcataaacacaattttgttctttataggagcttttttattatagtcattaggacctgtagttataatctccttagtctcaatagagtctgttttaaaaattttctctcgtgcaatttgtgtgtatatgttgtcataacaactttaaaataaattgtaaca

SEQ ID NO: 364696 - DNA, 586 bp, Homo sapiens
tatataatagcaaaattaataaatatttcaaacctcattacttcttaatcattttattatattttattatgatctgtgctctttaagttattgatatctattaaatttatatggtggaaatgccatgtaatagcacaatattgcttatctgttccccaattctcactcagggaagtcatgttactagcttaaacttggtcatggtgggaacattcatttcatggaaactaacaaatgctacgaatcagagcactcttctccaccgtgaattgctggttggtaaacaatttccaacacagcactgcatgtaactttacataaagccatctttccttcaagatgaaaaaccatttttcctttgtcaccaacactaaagtaagagagtgtaatccttcctaggaatatgtacagrtggatctcctgccttgccggggatcccagggccagaatatgtgaaactcctggttctctgtgtgaccctaagcagctgctctgcagagactccactcagatctgtgtatcagacccatagccctgttggcgtggcctcactaggggatctcctgatccacgggttgcaaagatc

SEQ ID NO: 364697 - DNA, 557 bp, Homo sapiens
tgataaagagtagaagacttcaatcatatttcgagatgtcttgcaaacaaacgttaataaaatgctttgatgagaaaggaaaggaggctgagtctgatcaactacacagatatttattgcaatgatttacttctttagaatattccagtgttttggggagtatcactttttcatctataatatactttagttacatggaggaatcacagacattaataaaaaaaaagaacttccatgaggttttaaaaatargaaagtatgtccttagcaaactaatgcaggaacagaaaaccaaatactgcatgtgctcacttataagtgggagctaaatgatgagaacttaccaacacaaagaagggaaaaacagacattggggtctgcttgagtggggagggtgggagaagggagaggagcagaaaagatcactattgggtactgggcttaatacctgggtgatgacataatctgtacaacaaacacctgtgacacgagtttacctatgtaacaaaccttcacatataccctcgaacccaaaatataagttttacaaaagctac

SEQ ID NO: 364698 - DNA, 557 bp, Homo sapiens
tgataaagagtagaagacttcaatcatatttcgagatgtcttgcaaacaaacgttaataaaatgctttgatgagaaaggaaaggaggctgagtctgatcaactacacagatatttattgcaatgatttacttctttagaatattccagtgttttggggagtatcactttttcatctataatatactttagttacatggaggaatcacagacattaataaaaaaaaagaacttccatgaggttttaaaaataggaaagtatgtccttagcaaactaatgcaggaacaraaaaccaaatactgcatgtgctcacttataagtgggagctaaatgatgagaacttaccaacacaaagaagggaaaaacagacattggggtctgcttgagtggggagggtgggagaagggagaggagcagaaaagatcactattgggtactgggcttaatacctgggtgatgacataatctgtacaacaaacacctgtgacacgagtttacctatgtaacaaaccttcacatataccctcgaacccaaaatataagttttacaaaagctac

SEQ ID NO: 364699 - DNA, 557 bp, Homo sapiens
tgataaagagtagaagacttcaatcatatttcgagatgtcttgcaaacaaacgttaataaaatgctttgatgagaaaggaaaggaggctgagtctgatcaactacacagatatttattgcaatgatttacttctttagaatattccagtgttttggggagtatcactttttcatctataatatactttagttacatggaggaatcacagacattaataaaaaaaaagaacttccatgaggttttaaaaataggaaagtatgtccttagcaaactaatgcaggaacagaaaaccaaatactgcaygtgctcacttataagtgggagctaaatgatgagaacttaccaacacaaagaagggaaaaacagacattggggtctgcttgagtggggagggtgggagaagggagaggagcagaaaagatcactattgggtactgggcttaatacctgggtgatgacataatctgtacaacaaacacctgtgacacgagtttacctatgtaacaaaccttcacatataccctcgaacccaaaatataagttttacaaaagctac

SEQ ID NO: 364700 - DNA, 557 bp, Homo sapiens
tgataaagagtagaagacttcaatcatatttcgagatgtcttgcaaacaaacgttaataaaatgctttgatgagaaaggaaaggaggctgagtctgatcaactacacagatatttattgcaatgatttacttctttagaatattccagtgttttggggagtatcactttttcatctataatatactttagttacatggaggaatcacagacattaataaaaaaaaagaacttccatgaggttttaaaaataggaaagtatgtccttagcaaactaatgcaggaacagaaaaccaaatactgcatgtgctcacttataagtgggagctaaatgatgagaacttaccaacacaaagaagggaaaarcagacattggggtctgcttgagtggggagggtgggagaagggagaggagcagaaaagatcactattgggtactgggcttaatacctgggtgatgacataatctgtacaacaaacacctgtgacacgagtttacctatgtaacaaaccttcacatataccctcgaacccaaaatataagttttacaaaagctac

SEQ ID NO: 364701 - DNA, 436 bp, Homo sapiens
gatgaagtgtgaactatagtggtgtttttgggccttttgtggtaatgcatacaaactgacagtcttgtcttgtgagggtaggtttcataagacctttttgcaaactaaatcctgtgtatcttcaaagcttttttgcctgtaataagtcagatgctaatgtatccagcactgatgatcatgaggtttttgtaaagcagtgcttgaaaagagattgttgaccgttagctatgatatgagatgggccccagagaaagaggtggctggcgaaggtgttttccttagttatggggtgagagtgggagaaaaataacattttgactgagaatataggatttatatctctaagccyaaaaatactggggtggtttttttttttttttttttttggtacaattctgggtagtctgcaagtaatattgagtcagcacattttagg

SEQ ID NO: 364702 - DNA, 436 bp, Homo sapiens
gatgaagtgtgaactatagtggtgtttttgggccttttgtggtaatgcatacaaactgacagtcttgtcttgtgagggtaggtttcataagacctttttgcaaactaaatcctgtgtatcttcaaagcttttttgcctgtaataagtcagatgctaatgtatccagcactgatgatcatgaggtttttgtaaagcagtgcttgaaaagagattgttgaccgttagctatgatatgagatgggccccagagaaagaggtggctggcgaaggtgttttccttagttatggggtgagagtgggagaaaaataacattttgactgagaatataggatttatatctctaagcccaaaaatactgggktggtttttttttttttttttttttggtacaattctgggtagtctgcaagtaatattgagtcagcacattttagg

SEQ ID NO: 364703 - DNA, 625 bp, Homo sapiens
cattactctgtaatgtccattcatttaatattaaccattctggtgaatatagaggggtatctcactgtggttttaaactgcattccctatggactaataatactaagcctacttttttttttttttagtagaattagactggtgaaaagatctcaccttgctaatttactcaaaaattatatactgaaatatgggaartgtgcagggctcctgaaagtgaagaggagagaaaaatatggtttcatccttcctgtcctctggcagttgattattggacggtctcctttttctgggaaccagcttgggccagtgctaagttaaccgatgtagttaacttgacccatgttctttattctttcatgcagatttgagttaccatctagtgcatcttgatttcagctggaagaattccccttagcatttgttgtaggcaggtctgctagctacaattctcacagttttggtttatgaggaatatcttctttctctttcatttctcaaggggagttttgccagatatggtagtttttgctgggctttttcctttcagggatgtgagtacatcaacccattgccttctgggcaccatagttactggtgagaagtctgctgttcatcttactga

SEQ ID NO: 364704 - DNA, 625 bp, Homo sapiens
cattactctgtaatgtccattcatttaatattaaccattctggtgaatatagaggggtatctcactgtggttttaaactgcattccctatggactaataatactaagcctacttttttttttttttagtagaattagactggtgaaaagatctcaccttgctaatttactcaaaaattatatactgaaatatgggaaatgtgcagggctcctgaaagtgaagaggagagaaaaatatggtttcatccttcctgtcctctggcagttgattattggacggtctcctttttctgggaaccagcttgggccagtgctaagttaaccgatgtagttaacttgacccatgttctttattctttcatgcagatttgagttaccatctagtgcatcttgatttcagctggaagaattccccttagcatttgttgtaggcaggtctgctagctacaattctcacagttttggtttatgaggaatatcttctttctctttcatttctcaaggggagttttgccagatatggtagtttttgytgggctttttcctttcagggatgtgagtacatcaacccattgccttctgggcaccatagttactggtgagaagtctgctgttcatcttactga

SEQ ID NO: 364705 - DNA, 625 bp, Homo sapiens
cattactctgtaatgtccattcatttaatattaaccattctggtgaatatagaggggtatctcactgtggttttaaactgcattccctatggactaataatactaagcctacttttttttttttttagtagaattagactggtgaaaagatctcaccttgctaatttactcaaaaattatatactgaaatatgggaaatgtgcagggctcctgaaagtgaagaggagagaaaaatatggtttcatccttcctgtcctctggcagttgattattggacggtctcctttttctgggaaccagcttgggccagtgctaagttaaccgatgtagttaacttgacccatgttctttattctttcatgcagatttgagttaccatctagtgcatcttgatttcagctggaagaattccccttagcatttgttgtaggcaggtctgctagctacaattctcacagttttggtttatgaggaatatcttctttctctttcatttctcaaggggagttttgccagatatggtagtttttgctgggctttttcctttcagggatgtgagtacatcaacccattgccttctgggcaccatagttwctggtgagaagtctgctgttcatcttactga

SEQ ID NO: 364706 - DNA, 553 bp, Homo sapiens
agagatggagttttgccatgtttgccaggctggtcttgaactcctaatctcaagtgatctgcccgcctcagcctcccaaagtgctgggattacaggtgggagccaccacgcctggccctgcccagctaattttttgatagagatagggtcttgctatgttgtccaggctttttgcccaatttaaaaaaaaattcccttacgatgatgatctatattccacagatgagttttttgtttgtttgttttttgtttttttttttgagagggagtctcgcaatctttcccaggctggagtgcagtggcacgttctcagctcacttcaacctctgcctcctgagttcaagygattgtcctgcctcaccctcccaagtagctgggattacaggtgcccaacacgcccagctaattttttttttttgtatttttagtagagatggggtttcactatgttggccaggctggtctaaaactcctgccctcgtgatccagccgccttggcctcccaaagtgctgggattacaggtgtgagtcactgcactcggctccagataag

SEQ ID NO: 364707 - DNA, 544 bp, Homo sapiens
tttgctgctagcggctcttgtaaactcagtggttatacagcaaagcctttgcaaagtcttttattttagagctctttttcagacaagaaatgattatactttttcttcaaatcatttattcaatcataatgataaatatggctttcactattctgatgaagcagagctaccatcagtgtgaaataataatagccgttgtttagtgagcatctactacattccagtcaattcagattttttctctagatttttggtgaccttctgattactattaatttacattttttttattgttctctacatgtcaaacaaaacaaagcaacaatatcaaaaacccacatgctttttcttcatactgtctatattattgaatgacagacaaacatctgtccttcaagtcaaatattaattaatcatagactcctttctcttyttcttcaccccgccttatctaattggccactgtcttagcttttttttttttttttttttttaaagatggagtcttaccctgttgcctagtctggagtgcagtggtgtgatc

SEQ ID NO: 364708 - DNA, 555 bp, Homo sapiens
tgaggcctgctagtctgattttgcagcagggagtaaggaaagccaatacttaactttgtaagctgctaaatattaaatgtttagtaaaatggggtttatagtaatgttttttttgagacagagtctcactctgttgccaggctggagtacagtggctcagtctcggctcactgcaacctctgcctcygggttcaagcggttctccttcctcagcctcctgagtagctgggattagaggcgcctgccaccacacccagctaatttttgtatttttagtagagacggggtttcaccacgttggccaggctggtgtcaatctcctgacctggtgatccgcccgcctcagcctcccaaagtgctgggaatacaggcgttagccaccgtgcccggccagtaatattttttcttaaaaagagaatatcaaaataaagaggagagtcaggagtagagggtatcaccaagccttttttagagtcacctaatttgttacatgtttttcttaaaattaccaaccatcaaaaagaagaattttgatctatatctatgcctaagaga

SEQ ID NO: 364709 - DNA, 595 bp, Homo sapiens
catggtgttttggtgaactttagcttaccagctgaaaattatggaattcatttcatatagcttccactataaatactattttgatccaagcctgttaataacactaagcatggtgactctcaaccatgactgcacagtgggattgcctgggaagctttaacatacactgatacctgggtctcatatcccagagattgacttaagtggtttggggtgcaacccaggtattgcagttttctttcttaaagttccacaggtgattctaatgtagtcatggttgagagctactgaccttgagaagcatgattttttagaggtggctaacccgttctggtctactggtttacatgcagtagagatagttggggaagataatttttgcttaaaataggaaagcaactgacacaatcgcatggtaggcatgcagggtttagaacagtaagaaactgaagattataccatataacactgtgaatttattaaatayattccagagtgggttatcagccaagatgtgctagatcaactgtgtatggtgctgctaatgagttcacagaaacctagaggtttttacttgcccaaggtcacaccacta

SEQ ID NO: 364710 - DNA, 586 bp, Homo sapiens
agaccagcctgggcaacatggtgaaaaccccatatctacaaaaaattagctaggcatttagcaatatgaaatttatttttggttaaggtatgcatcccttttaaacaaatggataatacattttcccaacaatgtttagtaaacaatctgcaattcrggccattgatttgagatgtcaactttatcttacattgaatttttataaatacgtaaaatatatcctttaataaaatacatcctttctgttaaaaaaaaaattagctaggcatgatggtgtacacttgtagtcccagctacacaggaggctgaggcaggaggattgcttaagcccagaagttcgaggctgcagtgagccacaatcacgccaccgcactccagcctgggagacagagtgagaccctgtctcaaaacaaaaacaaaaagcttcctggcctcaggaacacagtctatttggggagagagacaagacaagagccaactgaaaatacgttaatgatagataaaaatcatgagggcttcaagagctcagagaagactaacgtggctgagggaaaaggtttattgggaaagtggtatatagttgaga

SEQ ID NO: 364711 - DNA, 570 bp, Homo sapiens
ttcttaaaggttgatttttgagattttttttcctaacggcttactatttgagtcaccttggttatttatatataatgtaatacttgttcttttttgttgaatatgcattcaaattttgcataagaatgcaggtgacctgtaactctaaagtgccaatttttctcacactgacaagtaaacatagaagtcttttcttactgcctattaacttattttgatagggaaaaaatataaacacgattacatttttatgttccttcaggtgattttgaatcagatcagttgttcattcaggcctgaacatcctcagaaatcaagatragtagtctatatctagatataaaggtaaatgcaaatgtttaaagagtcagctgattgagatatggcaacaagctattgaaaatgatctacaccttacatctatgccttagaacagttgcaaactaattgtagtactttattgttactcagaggtgttctgtgaaatcttttttcaagtggaaattctaaaatttaatctcccataacctattaaaatgtacatctcaagacctacattcaatttacagt

SEQ ID NO: 364712 - DNA, 543 bp, Homo sapiens
cttctggcctccaaaactgtgaggatatagatttctgttgttaaatttatattctgtgatgttttgtcatggcagccctcacaaactaatatactcatgggccagaggcaagctccatggaagtgagctctttggggtttgtcttaacagggattccacccaagaggatcgttctagatagataatgggaccatagcagcaggactgggasgggagcaggaagttagttatgagcatcaggaaaattgactttgtggcactccagcagcacagaattttctagtaatccatataagaatcccacaagagaaaatgtaagctcaccatctgccgtactcagggaataccaattccagattataactgtaaaagctgaatgaaaatctttctgtcctcttaactctctttcctcccctaagttacctaccttggggatcagtgaaagtgaaagtagcagagtactaaataagtggagagaaaaacagaggcatcaaccactgcatcctttctcattacagcttgccacgtctgaagtagacctgg

SEQ ID NO: 364713 - DNA, 543 bp, Homo sapiens
cttctggcctccaaaactgtgaggatatagatttctgttgttaaatttatattctgtgatgttttgtcatggcagccctcacaaactaatatactcatgggccagaggcaagctccatggaagtgagctctttggggtttgtcttaacagggattccacccaagaggatcgttctagatagataatgggaccatagcagcaggactgggaggggagcaggaagttagttatgagcatcaggaaaattgactttgtggcactccagcagcacagawttttctagtaatccatataagaatcccacaagagaaaatgtaagctcaccatctgccgtactcagggaataccaattccagattataactgtaaaagctgaatgaaaatctttctgtcctcttaactctctttcctcccctaagttacctaccttggggatcagtgaaagtgaaagtagcagagtactaaataagtggagagaaaaacagaggcatcaaccactgcatcctttctcattacagcttgccacgtctgaagtagacctgg

SEQ ID NO: 364714 - DNA, 543 bp, Homo sapiens
cttctggcctccaaaactgtgaggatatagatttctgttgttaaatttatattctgtgatgttttgtcatggcagccctcacaaactaatatactcatgggccagaggcaagctccatggaagtgagctctttggggtttgtcttaacagggattccacccaagaggatcgttctagatagataatgggaccatagcagcaggactgggaggggagcaggaagttagttatgagcatcaggaaaattgactttgtggcactccagcagcacagaattttctagtaatccatataagaatcccacaagagaaaatgtaagctcaccatctgccgtactcagggaataccaattccagattataactgtaaaagctgaatgaaaatctttctgtcctcttaactctctttcctcccctaagttacctamcttggggatcagtgaaagtgaaagtagcagagtactaaataagtggagagaaaaacagaggcatcaaccactgcatcctttctcattacagcttgccacgtctgaagtagacctgg

SEQ ID NO: 364715 - DNA, 553 bp, Homo sapiens
acaaaagatgttaaagtaatccaaaatagtggtaggtttgtcaattattcttataatttgtcagttttcactttttgtttcagcatcaatgtgcctgttttaagattattaattgtatgttattgttatgtaattacactcttcaccttaatgttaacgttttttgtattaaaatctattttgtctgatattaataaattcactagttttattctgattagtatttttctagtatttctttttcacatccttttactttcaacattttatgccctcgtgttaaaatattctcttaaaaatgacatacagctgacttatttatctatttaattacttatttatgtagtcaatctctgtctgaataagtaagcttattttaattcctgagttgattgattgagtttttctgccagagtataagtccctgagacatggaaatctctgtctgttcaccataggcttaaatagtgcctgacaaatagtaagtgctaaatagatctttgtygatttctgtgttatgtttggttatttctgccatattataggctttagt

SEQ ID NO: 364716 - DNA, 561 bp, Homo sapiens
tttctgtgttatgtttggttatttctgccatattataggctttagtccacatgcttttcccccctcctaacctgccttctctcatattcttcaagatttcttttattcattttttctttatttacaataacattaaatgtgattgtaaacatagayatcttaacaaaatcgtagtttcatgattatcaactgagcaagataaaggtcatagaatactttaacgaaaatcaccccctaatattatacataatatatcggtatgctaacctgatattttccctgacaccatccttaaattaattattatggtcataaatgtgtttacataatcaacatttatctataattattatatacacatgtctaccaattttttctcgcatttcagttcttctgaattttatttccttctttctaaagtgcatcctttggaagttcccaaagtgagagtctgttggaagtatactcccttcatttctgattgtctaaaatgtctctaattcaccctagttcttagataacagttcaacaggttataaatttctaatctaaaatattggt

SEQ ID NO: 364717 - DNA, 561 bp, Homo sapiens
tttctgtgttatgtttggttatttctgccatattataggctttagtccacatgcttttcccccctcctaacctgccttctctcatattcttcaagatttcttttattcattttttctttatttacaataacattaaatgtgattgtaaacatagacatcttaacaaaatcgtagtttcatgattatcaactgagcaagataaakgtcatagaatactttaacgaaaatcaccccctaatattatacataatatatcggtatgctaacctgatattttccctgacaccatccttaaattaattattatggtcataaatgtgtttacataatcaacatttatctataattattatatacacatgtctaccaattttttctcgcatttcagttcttctgaattttatttccttctttctaaagtgcatcctttggaagttcccaaagtgagagtctgttggaagtatactcccttcatttctgattgtctaaaatgtctctaattcaccctagttcttagataacagttcaacaggttataaatttctaatctaaaatattggt

SEQ ID NO: 364718 - DNA, 600 bp, Homo sapiens
ccatcctcaatggcacaggatatcttcatcatctctggaagttctatctgacgacgctgatctagactgtaagctacaggagcctaccattacagtgcctcctacaacatctggtaatagttgttgctcagtaaatttttaataaacactttgcctatttaagtgatcagtaattcatatctgctgtgtttgggctttccttcggttatccatcttccttcccccttactgcctgcccctagtcatttgacaatcattcataaggagactcagctttgataatgctctgggttcaggagtttcartagttggtggtcactgaagaagtttttcggtctctggacttttgtaacaagccttcttctatgcctaattgcctgattctaatatctggaattttttcctgagactgagtctctacctattgcagcccaaatcaagtttataggttcctgccttgattataattccagattctgatgattattggagttctagccatgctcctgcaagactatcaagtaattgatgggaatttttcttgaggtttactgccttcctgctagtctgaaatttcaaatattgcctgttcctagattc

SEQ ID NO: 364719 - DNA, 613 bp, Homo sapiens
tttttaaaattgtaaaacaactatgccaaaatattctcatgtcaaatgttattggtctgagcttcatgtcaaaccaatatttaatttgattgattgatttaacaaatctgtatcaagctgctttttgcaatgcattttgatggtggtgcattttgaaagcagattaactagaggtggtatacaatttaagtacyttatagtctgtagcttttcctggtaatagtttgcgctagaatatatgctccttgaagacaggcaatgtctattttgttcactcctgtatctccaacatgtagcacagtgccttacatacagtcactaagtaagtatttgttgaatgagtatgaatgacaaatacaatttgagcataaataataaaggtatccactaacttaagaagactctggacactattgccaaggtttcaagcttgaatgaccatggtgcagtttatggagtcactcatgacaataacattgtgggtgctattttttgctttgaatgttagaagcagtaaatgcctcctggtaggcctaatagcaaaaagaaaaggggttgttgcaatagtgacaatcatgtaaagagaaggagttgtaaaagagtcttagcctgt

SEQ ID NO: 364720 - DNA, 613 bp, Homo sapiens
tttttaaaattgtaaaacaactatgccaaaatattctcatgtcaaatgttattggtctgagcttcatgtcaaaccaatatttaatttgattgattgatttaacaaatctgtatcaagctgctttttgcaatgcattttgatggtggtgcattttgaaagcagattaactagaggtggtatacaatttaagtaccttatagtctgtagcttttcctggtaatagtttgcgctagaatatatgctccttgaagacaggcaatgtctattttgttcactcctgtatctccaacatgtagcacagtgccttacatacagtcactaagtaagtatttgttgaatgagtatgaatgacaaatacaatttgagcrtaaataataaaggtatccactaacttaagaagactctggacactattgccaaggtttcaagcttgaatgaccatggtgcagtttatggagtcactcatgacaataacattgtgggtgctattttttgctttgaatgttagaagcagtaaatgcctcctggtaggcctaatagcaaaaagaaaaggggttgttgcaatagtgacaatcatgtaaagagaaggagttgtaaaagagtcttagcctgt

SEQ ID NO: 364721 - DNA, 595 bp, Homo sapiens
aggtctaaaaattaatcaagcttggatgtcttctctccagatcctgcatttctggcacagaaatttgtctcagtctgagtgagaggatgccaggcaaatccacagcactaaatgtggctccaattaacagyatcttttattctctcctcaaagggaggttggcccctggatctggctcctcgcaggcattgaacagtatgtgcgtaaccctcagagtggagcagaaacacacctcttgttttgtttctggatttactattttgagtggatttaagaaaaaaaaaaacgctttttttattattattttcctcacttcccaatgcttttacttcaggtacatgcacacaaacatataataatctcatcacacacacatacacacacatatcacctatgtaaaacaggatttaaccatttaacaggaatggctgtgcatgtaacagccttgggagtcagaattctctggatgaagtaaacaatcatccatcaagcatttattgagctcttacttaaaactcagcttattgacactacaggggaggcaaaatccttgccccaggataggaatggaaagatggcaagggacttactctac

SEQ ID NO: 364722 - DNA, 601 bp, Homo sapiens
ctgtaacttacttgtataggatcctccatctctgttccttagttttccatctatatccagaaagaatacagagcctaaatctgcaaatccttaaccattaattcagctcccactcacaggacagtgggcaagttatagccttctgagaagcatgatgtgtccttgcccacatcacttttagatcccatgattttctgttaccattgartcccaaggtcccttggagttttaagaactaggcttaaagtaaatagaaaaaggggtcttaaaaaaaagcaccaactgttaagttggaacacttctatttcttcttgtcatagaatcaaacagctaagcaacactctgtctgcaactaagaagaaaaagttatttgctcttcatttataaagcctaaacctggcattgagaagatcagcatttaacctggtatgacatacagtattgtcttgttctgctatgcctctggatcactgattgaagactaaatgaggaaaataaaactttgttacattaaaagtaatgagaaaagtgctccagcatatactttcggacctgtgagttttcctgaggagaaatgccactttaaaatttcatctaatat

SEQ ID NO: 364723 - DNA, 587 bp, Homo sapiens
tcccatttttaaaaccatcagatctcctgagacccattcactatcacaagaacagcatgggaaagacctgcccccatgattcaactaccttccaccaggtctctcccacaacacatgggaattcaagatgagatytggatggggacacaaccaaaccatattagtactacaccctgatgatcttccctataccctttcctttcttccccgctcagtcttcaaattctcaactcaaaatgtcctcattctttaaaaccttcacccagtcacttcccttccccaacatccaggcagacttaatcatactttacttgatcttcgtgtaacactttcttcataccaccagcataactctggtcatgtcatatcatataagaatgaattgtgtacacattatttttctccattacagtgtgtacttttagagagcaaggattttttttctttttgtccccaaagctcctccagtttctaaaatagagtgaattctccatgaatatttataggaaagaaggggaagatgaaagagaaggaaagagtgtttagcaattgggtttaaaatctaaaacaactggtttttagcctag

SEQ ID NO: 364724 - DNA, 598 bp, Homo sapiens
aaacagtaatggaccttagataatctttctttggtttagatattgcagcgtgaaagcaggaggagagataattgagtcactcaaaatcttctattaagcaatcactgtttagatagcagcatacagggtattactaggattaattctctaggttaacccacacttgtaagttgcaaagtaaaatctattattgaaggtcatcaaaccttataagatatataatgtttaaatgcttggcatacagatatacatccacatatatttaaatatttttctgctgggtatataagtacaaaaatatccaatgaaatttcattttatagggtttcaaatagagaaarattacactttagaaaggaatgtcaataatgctagtttgaggctctttgtatatattttgaaaaataagtatttccagtaaaaaaaaaaatatagatgtgtgattaagaagacttaagtgcagagaattcccctgtatttttcatttaaatcttgaatgtgcttttcaggaagacaggatcaacattttgccggcttcttaaattaacattttctttgcttcctcttatctcagaggagcattaatcatctaaaatag

SEQ ID NO: 364725 - DNA, 493 bp, Homo sapiens
ttgaggctctttgtatatattttgaaaaataagtatttccagtaaaaaaaaaaatatagatgtgtgattaagaagacttaagtgcagagaattcccctgtatttttcatttaaatcttgaatgtgcttttcaggaagacaggatcaacattttgccggcttcttaaattaacattttctttgcttcctcttatctcagaggagcattaatcatctaaaayaggctacaatatgcactttgaaagctccatacttactatacttctgagtgccttatgaatggcaggataaacatttaaccttttagaaggtgttcttttgcacacaaccataaagtttagaaagtattattgccagttttgacttggtaattccttgattcatagacttatttcatagttttcatctttagtatgcatagttttattatttggctagtcatacaacttcctgtgcttactctgaatatcagtatttatttaacatgcttttag

SEQ ID NO: 364726 - DNA, 530 bp, Homo sapiens
caaaatctcacctttgttcataccgctaaagaggaacagaagcaaagttccaaattatttgtactggagttttgcctgtgttatgtgatttagggaagagaatggggaggygatgaaaagtagatatcctttacttaattatattttgcttaggccggaaataaaattgtgttccctctgtatacatctcttttgctctttccttgatcagggattcctttgagctttctccatttggaaatgtcctactcatcctttaaaatccaactcaaatagcacatcttctatgttaaacatgcctgcttgggtctcttggcatagatttttatttgattttgaattttacaacaacacacagatagttctgtaatttaactgtttatatttctcttcccactagactatatgctttttgagagcaagcactatctccttgccatttttgtatatcccacgcttgctaccttttcacactgccttgtgcatagtatatgttcagtaaatatttgtggaataaatgaatgaataaa

SEQ ID NO: 364727 - DNA, 594 bp, Homo sapiens
tgtcgtttcttatgattataaaccgtgaacatgraacaagatatcagcatttaaaacctcagcttgtttatgaaaaacactcagcagcaggctttttggctttaacctttttaatattctggatgctaattgtccagaccatctcacccttccaggttaatgaggtggctaacaggccacaaaagaaaatgactgcccaatcaaattatgataaacaagcaaaaccagaaaacaaaaagcaaaacaaatggaaaggttgcaagttacacaggcttttattgtcttcaaggaatgtacagcaacattaccattccgttgtctccttgtgatggattgcaaaaagaatcagaaaaggcacaacatgaatctgctctcaggacaatgatcgtaatcaaaataggaaatggtacaaatgtaagccattctccttgcagtttaaagattataaatcccttattcatctgttatgatccagggcctacttgtgatttttatggttctttacacgcttggaattttaaaactataatgtgaaggggctacagctgttctctttctgatcttgatgtttaatccccgcttgtagcattgcac

SEQ ID NO: 364728 - DNA, 568 bp, Homo sapiens
tttctgttactaaacttagaaaaaaaatcaccttatctttgttcttcattttgcctaaaccccaaatgggttctgttcaccttatgaagggtgagtgaagtaaaataatttgtactgtgtgactcagtagagtagatgctcaaatgaacagagcagctttgcctggatggaaaaattagttttatagttggcttgctgcagctttttctctgggaaatatgaactcagtcacaaaagattggattaatggggagagtttggcttagtgcaaccaatggcagcatcagaaaaacatctgcaaaaacatgaaatatagactgtagatgaacagactcatctatatatgtgagggatagctgtatttgytatgtagttaaatatccataaaataaattttaagctctatggaaataaagcactaagcatagacactattgttatctgtattttctgttggacacctcatcataaccacagccaacagatcatgaaggaacattgcaaagcagtttcttaaaaagaaaaatcatagagatttaaaaacttttttagaaagatgcagatttgt

SEQ ID NO: 364729 - DNA, 673 bp, Homo sapiens
ctcatcataaccacagccaacagatcatgaaggaacattgcaaagcagtttcttaaaaagaaaaatcatagagatttaaaaacttttttagaaagatgcagatttgttggggtctatcattacttttctataagtttcattttctcctctcttttctggtgtctgtgtcatttccctgaactttgtccataacaaaatgttctgacatttaggttaaagcaaaatctcatttttaaggtcctgattgtttagtgtgagataggaccatgtaagttttatatgactcctttttactgatcagtttcagactttcgtttctacagtaccttcgtaatgccaacactttgtcattacttctttctcaatcrtgttctgagttttattttgtactctttttaatgctaatacttctatcttggaagttatccacaaattcacatcagcaagaaaatagcaaaaggtggcaactttgaagcaaagttgttattattattgcccccccataaataataaaatggtctctacttttaaaaacagatagtatattttgatttttatatttgatatctgagaaagtcatatgtatactatatagataataaattgtacaataaattatatttccctttgaccttcattataatttcagagttatagacagaaatagaaaaaa

SEQ ID NO: 364730 - DNA, 569 bp, Homo sapiens
tactattagtagttagtttggttgtgatgaaacaacttttaatctgttttattcctgttaacctcagaaacaaaataactgtttttgaccactattattattatctacggctttggaactttaggacaaagtaataagacctgaaataaaaatgagagatataaacattggaagtaaagagaccaccgtattattacttaataatagatggttgtagaaaatccargaggataaactgaaaatcagttagtatagacaagagttcactaaggtatcaaaaaagaaaatatataaaactcaatacaaacgtgtaagatttaaagcttgacatggtggtacgtgtcaatagtcctacctacttagaaggttgaggtgtgaggattgcttgaggccaggagttcaatgatgtaatgtgctgtgagcacacctgcgaatagccactcaaaatagcccattgtttgagaccccatctcaaccaaacacacaaccaacaaaccatgtaagattaaaaaacccaaaatatgtagatatgataaaatatgcagtatattgtaaacaatggttgatcc

SEQ ID NO: 364731 - DNA, 657 bp, Homo sapiens
tgagacagctgtcacaaaagcttgcccagtcagtgatgatggcagttgtcttagtctgttttcacactgctataaagaactgcctgagactgggcaatttatgaagaaaagaggtttaattgactcacagtttctgaggcttaacaggaagcgtgtctgagaggcctcagaaacttactataatgtgagaagggagaaggggaagcaagcacgtcttaccatggtggagcaggaaagagagagcacgagcaaaggggaagtgccacacactttcaaacaaccagatctcgtgagaactcactatcacaagaatagcaagacagaagtctgcctccatgattcaatcacctcccaccaggcccctcccctgatatgtggggattacaaagagatgagatttgggtgggaatgcagagccaaactgtatcagcaattaatacaaaawatcatattcccttgggaatttatataatatatacaaggatttagtcagtgataaggggagcagaagatagaataccctcatggaaaaggttgacaggaggaaaataaagcagtagatgctacgagtaagagaaaattatgattattgtaagctaaatcatacagcacaggggaggatatagttggttagtaggtagagtaggagtaattagg

SEQ ID NO: 364732 - DNA, 490 bp, Homo sapiens
ttcgcataaataatatattgttttaaattagacctttaaaaattacttttcattgaaatttataaccttgttcttgttcagtcatcatttaccagtaagaataatacattcttatgttgtctaaaacatgaagttaacatttctcattttattctttcttctttaaattattgtaattttatcatgatcaagagttttcaaaatcagactattttcctctttgtaactagttttcttgaatagaaaaagttatagaattaaacagtcttcagccccaatatttatgaaagtgttaaagccagkttggttataagacgataaatcatctaatatttgcaccgcagaattcttcttagaatcagaaaattgttcccaaggtaaagaaatccctcatctatggggctaaattctcttttcttaaaatattaaaacgttgatcttcccaatgggaagtatggtgctctggcattgctccatctaatggagttca

SEQ ID NO: 364733 - DNA, 490 bp, Homo sapiens
ttcgcataaataatatattgttttaaattagacctttaaaaattacttttcattgaaatttataaccttgttcttgttcagtcatcatttaccagtaagaataatacattcttatgttgtctaaaacatgaagttaacatttctcattttattctttcttctttaaattattgtaattttatcatgatcaagagttttcaaaatcagactattttcctctttgtaactagttttcttgaatagaaaaagttatagaattaaacagtcttcagccccaatatttatgaaagtgttaaagccagtttggttataagacgataaatcatctaatatttgcaccgcagaattcttcttagaatcagaaaatygttcccaaggtaaagaaatccctcatctatggggctaaattctcttttcttaaaatattaaaacgttgatcttcccaatgggaagtatggtgctctggcattgctccatctaatggagttca

SEQ ID NO: 364734 - DNA, 588 bp, Homo sapiens
tacccaataattgaggtccttgtagcctagactacctttcaagtttatttagaaccccagagcttctttagcccatggtggtggggctagccagaattcaggttctgaccgctgggatggagaattcttccctggctagggctgatctaaatgctccctccatgggtgctgactgggttctgcccccatgttgctttccaytgtgacaaggcagcactgagttccaatacaaagtcccacaattactgtattctccctccaccacgcacacagtctctctctactgccagggaatggggaaggggtgacatcagcaattcaagactatcttcccttccctcttttgtgcttctttcctttatgtgatgttaaaatcaaggactataatggtccatctaattttttgttcttatgaaggtatttcttgtatggatagttgttcagtttggtgttcccatgagggagacaatcactggagagttctatttggacatcttgctctgcctcctccttattagctctttgatgttcttagaaaaatctactttttagatttcttcaaggaatattagttgtcttcagaaagaa

SEQ ID NO: 364735 - DNA, 588 bp, Homo sapiens
tacccaataattgaggtccttgtagcctagactacctttcaagtttatttagaaccccagagcttctttagcccatggtggtggggctagccagaattcaggttctgaccgctgggatggagaattcttccctggctagggctgatctaaatgctccctccatgggtgctgactgggttctgcccccatgttgctttccattgtgacaaggcagcactgagttccaatacraagtcccacaattactgtattctccctccaccacgcacacagtctctctctactgccagggaatggggaaggggtgacatcagcaattcaagactatcttcccttccctcttttgtgcttctttcctttatgtgatgttaaaatcaaggactataatggtccatctaattttttgttcttatgaaggtatttcttgtatggatagttgttcagtttggtgttcccatgagggagacaatcactggagagttctatttggacatcttgctctgcctcctccttattagctctttgatgttcttagaaaaatctactttttagatttcttcaaggaatattagttgtcttcagaaagaa

SEQ ID NO: 364736 - DNA, 588 bp, Homo sapiens
tacccaataattgaggtccttgtagcctagactacctttcaagtttatttagaaccccagagcttctttagcccatggtggtggggctagccagaattcaggttctgaccgctgggatggagaattcttccctggctagggctgatctaaatgctccctccatgggtgctgactgggttctgcccccatgttgctttccattgtgacaaggcagcactgagttccaatacaaagtcccacaattactgtattctccctccaccacgcacacagtctctctctactgccagggaatggggraggggtgacatcagcaattcaagactatcttcccttccctcttttgtgcttctttcctttatgtgatgttaaaatcaaggactataatggtccatctaattttttgttcttatgaaggtatttcttgtatggatagttgttcagtttggtgttcccatgagggagacaatcactggagagttctatttggacatcttgctctgcctcctccttattagctctttgatgttcttagaaaaatctactttttagatttcttcaaggaatattagttgtcttcagaaagaa

SEQ ID NO: 364737 - DNA, 588 bp, Homo sapiens
tacccaataattgaggtccttgtagcctagactacctttcaagtttatttagaaccccagagcttctttagcccatggtggtggggctagccagaattcaggttctgaccgctgggatggagaattcttccctggctagggctgatctaaatgctccctccatgggtgctgactgggttctgcccccatgttgctttccattgtgacaaggcagcactgagttccaatacaaagtcccacaattactgtattctccctccaccacgcacacagtctctctctactgccagggaatggggaaggggtgacatcagcaattcaagactatcttcccttccctcttttgtgcttctttcctttatgtgatgttaaaatcaagkactataatggtccatctaattttttgttcttatgaaggtatttcttgtatggatagttgttcagtttggtgttcccatgagggagacaatcactggagagttctatttggacatcttgctctgcctcctccttattagctctttgatgttcttagaaaaatctactttttagatttcttcaaggaatattagttgtcttcagaaagaa

SEQ ID NO: 364738 - DNA, 632 bp, Homo sapiens
agctttgctgaatatgatttcactgtagatgatgggatttattcctggattctctattctgttccataggtctatatgtctgttcttgtgccagtaccatgctgttttggttactgtagtacatttgaagtcaggtaatgtgattcttccagttttgttctttatgctcaggatagctttagctattctgggtcttttgtggtcccatatacattttaggattattttttctatttctgtgaagaatgtcattggtattttgctagggattgctctgaatctgcagattgcttcgcgtagtatgaagattttaacagtattgattttttaaaacattccatgaacatggaatatctttccatttttttgtgtcttcttcaacttattacatccatttttttaattgtagagatatttcatttctttggtttactcctaggtattttattttatttgtaactattgaaatcaagaaagtaattccatttaccttttcaagtttttttgctattgatatayagaaatgctactgatattttgtaggttgattttgtatcctacaactttactgactttaacaattctaatagttttttggtggagtttttaggtttttccaaatctaagatgat

SEQ ID NO: 364739 - DNA, 531 bp, Homo sapiens
aactattagaccagcttagatttaaagtgggaggcctcaaaaaatattgatttttttctagacaaacacactctacccagacacatactgttgcyaagtgaatgaacaaatgaataagagattcagagaaagacgaagtttaatcagggcatctgaaataagaaggaggtaatcagtggagcagagaaaagattttgacagtttaacacttttgtgtattcattcaacaaatagttattatttgcctgggagggtactccactaagcagctggtatttattggagagcaaatcagagcagcctctgttctcatgaggaccgttctaatgagaagacagagcacaagcaaataaagacacacaaaattgcagcgtgtcttaagtgctatgaaaggaaagtactagggcgtatgaaggaataaccagggcaaaaattgatgttcagttgggtaggcatgaaatgtttctctgaggaggaggcatttaaacagtattgctggattcagatatttaaaaacaaggggaaagaaga

SEQ ID NO: 364740 - DNA, 576 bp, Homo sapiens
tttggaatctcctaagtcaaatcttggcttagttatctgactctgcaaaagcatctgaaccttcctaaacctccttattttcagctgtaacatgaaaataagaatctttgtaaggttttaaaatcatgtatataaagtacctagacttacatgaaattatatatttctatatattataatttcaaataattatacaaaattatattttataaattattcatataatttatatatttctagtatactatatactagaaatatatctagtatataatatatactaaaatatatttatcactttttttgtacttttggggacatggaatcctacacaattccaggaggcagcctttattttgcaatccatgtaatttgtgtaacatttacattttacctttgtgagtgggggagcagcaagttaggrcacattattttatatgaaaagtgatataaatggtccccgtgtagttatacaaggaggcatgccctgtttaactagatacctaggacagtcctctcaatgaaaacaactaaatattctgggagagttttaggttaatcactgaaaaaaagaat

SEQ ID NO: 364741 - DNA, 576 bp, Homo sapiens
tttggaatctcctaagtcaaatcttggcttagttatctgactctgcaaaagcatctgaaccttcctaaacctccttattttcagctgtaacatgaaaataagaatctttgtaaggttttaaaatcatgtatataaagtacctagacttacatgaaattatatatttctatatattataatttcaaataattatacaaaattatattttataaattattcatataatttatatatttctagtatactatatactagaaatatatctagtatataatatatactaaaatatatttatcactttttttgtacttttggggacatggaatcctacacaattccaggaggcagcctttattttgcaatccatgtaatttgtgtaacatttacattttacctttgtgagtgggggagcagcaagttagggsacattattttatatgaaaagtgatataaatggtccccgtgtagttatacaaggaggcatgccctgtttaactagatacctaggacagtcctctcaatgaaaacaactaaatattctgggagagttttaggttaatcactgaaaaaaagaat

SEQ ID NO: 364742 - DNA, 672 bp, Homo sapiens
atcatgtcattttaatggaatccaataacaaatttttgatcaattgcataatcaattggttggtttttgtttttataggagaaaattaaattagtaatagtgaacaataaagaaaataatacaattagatcatctaccccactcatgcccctcttattctgtgtcttaggacactggrtttttttaatttcaaagattttattttaataagttgtaataactgtacttatttgctttttacttggttttggagatgcccatcaaagcttcatgagggcatggattatatcttactggttgatttagtacagatttcacatttgttcaatggccagagataaaaggacagaactgtgtaagttttatacaattttaaaaccaaaagtcattagattggtcagttcctttaacctataaagacccttttgtggcaaaatgttccctgaatttcaccacttggagtttatacaacccaaccacacaaaagcaaagcatactatatcaacatccaggataattatgaaaatcaagaccattaatctttatgactgagggaaagttaaccttctttacctatactgccattaattaattttatgcctttaaaagattacatctgataaatcagctataatcacaactttgaactccaaacataattaaccaaatggc

SEQ ID NO: 364743 - DNA, 581 bp, Homo sapiens
ttttgctgaataattaaaagaattctatcctctcaaaatggtgatggcaaaactctcagccaaaataagggttgaattatcttatcatatatacaggtatgtatatcatatgatacattgagatacatacaagtatataaattgggtatctattgggtatatactaaagaattcattataatgaaactgctactargaggatctattgctctgggacagagtcccaacttttaaaacatgtggcaagaatccagtagatttaagcactcttctccttttatatttgctttctgtattctagaaagttttctgtaattgtccaaacaatatttatgcacatattaaggtcatttattttagacagtcaatgttgcaaactgataggctactgggcaaattatgttcacaaaatatacttttgagccagtattcttcaagattgaattttattgcttttagatgggaatctctgtggctttccagaagcttttccctcccctgatgtgctacacccagccatttggaagctttctctcactaaggttatctgtttggcctctgaaggcagctgagatggctac

SEQ ID NO: 364744 - DNA, 581 bp, Homo sapiens
ttttgctgaataattaaaagaattctatcctctcaaaatggtgatggcaaaactctcagccaaaataagggttgaattatcttatcatatatacaggtatgtatatcatatgatacattgagatacatacaagtatataaattgggtatctattgggtatatactaaagaattcattataatgaaactgctactaagaggatctattgctctgggacagagtcccaacttttaaaacatgtggcaagaatccagtagatttaagcactcttctccttttatatttgctttctgtattctagaaakttttctgtaattgtccaaacaatatttatgcacatattaaggtcatttattttagacagtcaatgttgcaaactgataggctactgggcaaattatgttcacaaaatatacttttgagccagtattcttcaagattgaattttattgcttttagatgggaatctctgtggctttccagaagcttttccctcccctgatgtgctacacccagccatttggaagctttctctcactaaggttatctgtttggcctctgaaggcagctgagatggctac

SEQ ID NO: 364745 - DNA, 552 bp, Homo sapiens
ggctgtaaacttcatagcctcaccttggccctgataaccaatattaagtagaagctcccaaactctgcccactgaatggcaacctctgaatgtattcatgtggcacaaaaaaagattcatgtggcacgaaacaagagtacttcaaggccagaatagagtagttgttaagagcgtgattctagagccagtgtgtccagctcaaataattctgcccctctggcaattatttgtcctttcaatgttatttttttttcctgtaaaataagaataatagaatttacttcagaatggtattgtgaggattaaatgaagtaatacaacagagaaacagtgcctggtatatagtaaacactaggtaaatagtaaacgcttggtaagagtttctattaacattaacatatttgttatcacatcaaaataatatgcttctcacaacaagcttgctggaatagacaagaggttttggggttagggcagggagactacattatagtaatcccaggaaaasaatgttaggactaaagcttacgtccttgaagtaaggaagaaaac

SEQ ID NO: 364746 - DNA, 524 bp, Homo sapiens
ccatgactgccaactgtcccagcatctgaccagctggcaggcctggcccacagggggcttaggggagcggagtttgttcttggaaatcgatgccccacttcctgcaggccagcggtgrgtatccgtgtgacttgagggcgagtcgtttaaaacatgttttagattagaaacaccccgcagatggaataacatgtgaaatgtgctggattttgaagataaaataagagacttcaaaggcccctcaagctgtgagagcagttgcttgtttgacaagctctgtccccccaggccaaggtcactgtcctccgtggtagggcggcccaggtggaaggtgggagacttcctggacattttccaggctggggagccaggggagcaggggcctcactggagggtgagggctcccatttatggtcaccaagtgcatccccagcaagcttccacatggattttttttttttttttttttttttttgagatggagcccaggctggagcacagtagtgcgatctcagctcactgca

SEQ ID NO: 364747 - DNA, 576 bp, Homo sapiens
atttgtgccctattcttccctgaaagtcacttaggaataaaggcagtatgggcaaatccaggagtttcaacttctagaactcctgctcctatgtcagtcgcctttgacattttactctcctgattctgtgtgtatatgtatgtatgcatatgtgcacacgcacacataaacacacacacacacacacacacacacacctttctctctcttaccctgtcataaggcagttttccaaagaactttacattttttwaaaaatccccaattacaaaaatactatataaacattgtagaaaattccaaaaataccaaaaaaaaacagaaaaataaaataaaaattatctttgttaattgccatattatactcctttgtcctcatcttatgtaaacctcacataataagttatcatctgaaaagctattctcctgtatcttggctcaccggtctggtcatgtattcacggtgctgaagcagaatgacccagcctccccttatgtggagtggtactgggcatttctctccaaagccctgcctcagttccagtcagcagttaagtaaacagtgaactactacta

SEQ ID NO: 364748 - DNA, 576 bp, Homo sapiens
atttgtgccctattcttccctgaaagtcacttaggaataaaggcagtatgggcaaatccaggagtttcaacttctagaactcctgctcctatgtcagtcgcctttgacattttactctcctgattctgtgtgtatatgtatgtatgcatatgtgcacacgcacacataaacacacacacacacacacacacacacacctttctctctcttaccctgtcataaggcagttttccaaagaactttacatttttttaaaaatccccaattacaaaaatactatataaacattgtagaaaattccaaaaatacmaaaaaaaaacagaaaaataaaataaaaattatctttgttaattgccatattatactcctttgtcctcatcttatgtaaacctcacataataagttatcatctgaaaagctattctcctgtatcttggctcaccggtctggtcatgtattcacggtgctgaagcagaatgacccagcctccccttatgtggagtggtactgggcatttctctccaaagccctgcctcagttccagtcagcagttaagtaaacagtgaactactacta

SEQ ID NO: 364749 - DNA, 625 bp, Homo sapiens
tcaaggactcttaggtgctgttggagttatatgaaataatcaaaataagaccccccacccattgtttacagaaatagaaaattatagtacttacaatatacaaaatgcagaggatacagtagtgattagtaataatagtagcaaaycatttatatagcataggaatatttgccagacacaatccctgagtgctttacactcctttaaccatcatgacaaccctatgtggaaagttcaaggtaaagcctgttttttatggagcttacattctcaaggtatgttcaggtattttagtccctgcaggcatcagtcacttcatctgaagaatatgattaaatgaactccatggccatctacaactttaacatgcccagtgtactagtactggtgtctctattgccttgttgttaaattttagggaggatccaggtattggggtattagcctttaaagcgtagccagagtgaattcttcacaagctcttgccttgccctgggatgcagcattgacatttaccagactagatctaccatgcttcttctgagtcttgagtgccacaaagagaaacaagtgcaaaatggagacactaaaatgtaaggatttaatgggcttcttaaaaataaaa

SEQ ID NO: 364750 - DNA, 624 bp, Homo sapiens
gatgcctgtaagtggctttgataagttagaaaccacaatttcaatgtataaagtagaattgggaaacaatagtgactttttttttttwatcaactatcttgtgaattagactttcttattcagagtgtttggattttacagttttaaattgaaagtatgtcaaagtatgagactagagttggtaaatcacgcttttatccatctataaaatagtctatgcctcagtacatgacaaaatcttgacttctgttattcattggacaaatatttctcaagcacctactacgtgtcaggcaatgtgccatacactgagttgagtctggattaaattacggatctagctaatgccagttctaaactaaaccagggatcaaattaaagtgtatgttttacaattcctaatttatcacaatggaaaactactaacacacaaaggaatagtgtttccctccccataagggtttttctgacattttgaaaaagaatagctttgtccacaactatttaccaagtcacagtcatgacctgagtcggagcgttttcagttacataggtggctaaaaatagcatctgcctcccgatcggctgccgaagatcagactgataggagtgtgttgattttat

SEQ ID NO: 364751 - DNA, 624 bp, Homo sapiens
gatgcctgtaagtggctttgataagttagaaaccacaatttcaatgtataaagtagaattgggaaacaatagtgacttttttttttttatcaactatcttgtgaattagactttcttattcagagtgtttggattttacagttttaaattgaaagtatgtcaaagtrtgagactagagttggtaaatcacgcttttatccatctataaaatagtctatgcctcagtacatgacaaaatcttgacttctgttattcattggacaaatatttctcaagcacctactacgtgtcaggcaatgtgccatacactgagttgagtctggattaaattacggatctagctaatgccagttctaaactaaaccagggatcaaattaaagtgtatgttttacaattcctaatttatcacaatggaaaactactaacacacaaaggaatagtgtttccctccccataagggtttttctgacattttgaaaaagaatagctttgtccacaactatttaccaagtcacagtcatgacctgagtcggagcgttttcagttacataggtggctaaaaatagcatctgcctcccgatcggctgccgaagatcagactgataggagtgtgttgattttat

SEQ ID NO: 364752 - DNA, 528 bp, Homo sapiens
gtacacaacttagccaagctgtgtaatttagtttagcstagtgttcagatgtggattgaggcccacccgatccaaaagatgatgaggcagcctccagtagggacgattccaaaggtgtgtgtcacacaagctcaggttagagttggttacctggtactttgtctttcaagcttaggcactcctccttaattcagagatgcccacacggtgccctggtagcctctgtaggtctttacatctcctctgtcataacactgaacctgagcaaccccaaaccacccaacttttagacttagaagcaatgtaactcagtggatgagtatgcgtactttggaattagactgcttgagttcaaatgctgccctggcccttggagttacgtgacttgaagcatgtagctgaacttctttgggtctccaatttcctaatttgtacaatgggctgttgagaggattaaatgaagtgatgtgtgaaaagtgcctggcatcaagcaacaaaagacagcacagtgcctaaagctcagcagtc

SEQ ID NO: 364753 - DNA, 528 bp, Homo sapiens
gtacacaacttagccaagctgtgtaatttagtttagcctagtgttcagatgtggattgaggcccacccgatccaawagatgatgaggcagcctccagtagggacgattccaaaggtgtgtgtcacacaagctcaggttagagttggttacctggtactttgtctttcaagcttaggcactcctccttaattcagagatgcccacacggtgccctggtagcctctgtaggtctttacatctcctctgtcataacactgaacctgagcaaccccaaaccacccaacttttagacttagaagcaatgtaactcagtggatgagtatgcgtactttggaattagactgcttgagttcaaatgctgccctggcccttggagttacgtgacttgaagcatgtagctgaacttctttgggtctccaatttcctaatttgtacaatgggctgttgagaggattaaatgaagtgatgtgtgaaaagtgcctggcatcaagcaacaaaagacagcacagtgcctaaagctcagcagtc

SEQ ID NO: 364754 - DNA, 528 bp, Homo sapiens
gtacacaacttagccaagctgtgtaatttagtttagcctagtgttcagatgtggattgaggcccacccgatccaaaagatgatgaggcagcctccagtagggacgattccaaaggtgtgtgtcacacaagctcaggttagagttggttacctggtactttgtctttcaagcttaggcactcctccttaattcagagatgcccacacggtgccctggtagcctctgtaggtctttacatctcctctgtcataacactgaacctgagcaaccccaaaccacccaacttttagacttagaagcaatgtaactcagtggatgagtatgcgtactttggaattagactgcttgagttcaaatgctgccctggcccttggagttaygtgacttgaagcatgtagctgaacttctttgggtctccaatttcctaatttgtacaatgggctgttgagaggattaaatgaagtgatgtgtgaaaagtgcctggcatcaagcaacaaaagacagcacagtgcctaaagctcagcagtc

SEQ ID NO: 364755 - DNA, 410 bp, Homo sapiens
aattcagactctgttccctttggctactacttctgcttatagcaggaagcctcgctcccagcagtaaatgcagaatcctttccttaacctaccactgtctgcttcaggtggaaggracaggaagcctgttccatgaacctggggggagaacctggctgtagaccactttggctttctgatagaacgcttgccctttattccccacagaacagcgtcctctccaccagcacaaatcgaagcaggaattccccacttttggagcgggccagcctcggccaggcctccatccagaatggcaaagacaggtgagagacccgggccctgcctgcctcactccctaggagccatgtctcacagggtgatgtctgtcagcagcaccgtctcctgtccctgccagcgcattgctccct

SEQ ID NO: 364756 - DNA, 635 bp, Homo sapiens
gactgagtcctaaccaataggattacgagtgatgtatggcacttcctgatctggtccataaaacctcccaccgttatttatctatctgtttcttcttcctctgggtggatacagatgacatcaagataccaggtgatagaggaaacccaagatggaaaaagcccggatagctgaatcatcctttgaaagataactacctggtgacctcaaccctaacctggactcttctgtatgagacataaacttctattatgactgagccatttcatatttgagtatacagtagtcccctcttatccatgatttttttcccatggtttcagtcacccacgatcaaccatcgtccaaaatgttaaatgaaaaattccagaaataagcaatctataattttcagttgtggactgagtagtatgtggaaatcttgtgccatcttgcccgagacatgaatcattcctttgtccagtgtatccatgctgtagatgctacccacccattagtcatttaatagagckcggtgatcagatctactgttaaggtatcacagtgtttgtgttcaagtaaaccttattttacttaatattgtccccaatgtgcaaaagtagggatgctgacaattcagatatgccacagagaag

SEQ ID NO: 364757 - DNA, 483 bp, Homo sapiens
gcagaagttagtcacaatttgtgatacattttattacagcatattattaccattttcctattttattattattgctgttaatctcttacttcacctcatttataaattaagctttatcataggcatgtatgtgtaggaaaaaacacagtatttatagggttcagtactacttgyggtttcaggcatccactgggggtcttgaaatatatcactcgtggatgaggggaaagactactggatttatttccactgcttaattcatctttaatatatgcatgaattttagtaattatattcataataacaatactagaaataataatagcagttaatattaagctcctactaaaatattagaaactgttctgagcatattacatagatttattaatgaaaggcccctctcagaacctctctacactttacacaaggcacaaatgagtctagatgttctgtagtacaaattcgactaggggaagaaaa

SEQ ID NO: 364758 - DNA, 483 bp, Homo sapiens
gcagaagttagtcacaatttgtgatacattttattacagcatattattaccattttcctattttattattattgctgttaatctcttacttcacctcatttataaattaagctttatcataggcatgtatgtgtaggaaaaaacacagtatttatagggttcagtactacttgtggtttcaggcatccactgggggtcttgaaatatatcactcgtggatgaggggaaagactactggatttatttccactgcttaattcatctttaatatatgcatgaattttagtaattatattcataataacaatactagaaataataatagcagttaatattaagctcctactaaaatattagaaactgttctgagcatattacatagatttattaatgaaagscccctctcagaacctctctacactttacacaaggcacaaatgagtctagatgttctgtagtacaaattcgactaggggaagaaaa

SEQ ID NO: 364759 - DNA, 483 bp, Homo sapiens
gcagaagttagtcacaatttgtgatacattttattacagcatattattaccattttcctattttattattattgctgttaatctcttacttcacctcatttataaattaagctttatcataggcatgtatgtgtaggaaaaaacacagtatttatagggttcagtactacttgtggtttcaggcatccactgggggtcttgaaatatatcactcgtggatgaggggaaagactactggatttatttccactgcttaattcatctttaatatatgcatgaattttagtaattatattcataataacaatactagaaataataatagcagttaatattaagctcctactaaaatattagaaactgttctgagcatattacatagatttattaatgaaaggcccctctcagaacctctctacactttacacaaggcacaaatgagtctagatgttctrtagtacaaattcgactaggggaagaaaa

SEQ ID NO: 364760 - DNA, 588 bp, Homo sapiens
tgtcctcaataagtctgtgtctcctctgaaacaaggatggacagttaacatcggactttggtcaggaaggcagaaaaggtaagaagggggccaattttcctcagggatgtcagacaaacgaactgctatatttaaagccaagggctttgggagtgcctacctgttctgttaccatcttcccttttatgctcaccacctcactcataactacttaatcatttacctctcacagactccctcttgcacacattctctgtgctaggtacacagccaagcrctgaggttgcagcagggaatggacccaagccccagctttcacagggttgatactacagccactcaaaacagggatgtcatgaggctgcagcatcttaaatatcttagaggaaaacattctttaaaatttctttaacaacaagcctaataaaatgaagaacattttgcaggggtaaggggttgatgttgaggaggaagataatatgttaggcattaacattggatttgttcagaacaattattaataacaaacacatgctaatatttaggatcggggtcagtaaactacttctgtaaaggaccagattataa

SEQ ID NO: 364761 - DNA, 612 bp, Homo sapiens
tccttctaaaccaagtgcattggagcattattttttaaatcaaggcataataagcacatagtgaatgtgcagatcttacatatagagtttaagaaattttgacatatgctcacatgtgtgcaatgtctgtatcaagataaatttccatccctctggatggaaggttctctcatgttcttcctcmgttctcctcccctacagactgtgagtcaaccagtgttctgatttttattgtctaagattaattttatctagtctaaaagtttatataaatgaacctacccttttgtatctatcgcagtataatatttttagattcatccatgtcgttgtatgttttaatagtctttttactgctgagaagtagtcaatggtactaatatatctctatttatctatttttctttggtggatggacatttggttatttccgagtggggctttataaataaaactgctatgaagatttttatacaaaattttgtagatacatactttcatttctctttgggaaattgctggatcacagagtgtgtgtgtgtatgtgtgtatgtatatatatatattcaacttcataagaactgtctaacctttttacggagtggttttacc

SEQ ID NO: 364762 - DNA, 612 bp, Homo sapiens
tccttctaaaccaagtgcattggagcattattttttaaatcaaggcataataagcacatagtgaatgtgcagatcttacatatagagtttaagaaattttgacatatgctcacatgtgtgcaatgtctgtatcaagataaatttccatccctctggatggaaggttctctcatgttcttcctccgttctcctcccctacagactgtsagtcaaccagtgttctgatttttattgtctaagattaattttatctagtctaaaagtttatataaatgaacctacccttttgtatctatcgcagtataatatttttagattcatccatgtcgttgtatgttttaatagtctttttactgctgagaagtagtcaatggtactaatatatctctatttatctatttttctttggtggatggacatttggttatttccgagtggggctttataaataaaactgctatgaagatttttatacaaaattttgtagatacatactttcatttctctttgggaaattgctggatcacagagtgtgtgtgtgtatgtgtgtatgtatatatatatattcaacttcataagaactgtctaacctttttacggagtggttttacc

SEQ ID NO: 364763 - DNA, 612 bp, Homo sapiens
tccttctaaaccaagtgcattggagcattattttttaaatcaaggcataataagcacatagtgaatgtgcagatcttacatatagagtttaagaaattttgacatatgctcacatgtgtgcaatgtctgtatcaagataaatttccatccctctggatggaaggttctctcatgttcttcctccgttctcctcccctacagactgtgagtcaaccagtgttctgatttttattgtctaagattaattttatctagtctaaaagtttatataaatgaacctacccttttgtatctatckcagtataatatttttagattcatccatgtcgttgtatgttttaatagtctttttactgctgagaagtagtcaatggtactaatatatctctatttatctatttttctttggtggatggacatttggttatttccgagtggggctttataaataaaactgctatgaagatttttatacaaaattttgtagatacatactttcatttctctttgggaaattgctggatcacagagtgtgtgtgtgtatgtgtgtatgtatatatatatattcaacttcataagaactgtctaacctttttacggagtggttttacc

SEQ ID NO: 364764 - DNA, 550 bp, Homo sapiens
tatgtaatgtgttttttccttctggctgcttttagactttttatcttttagcattttaaatattatatcattaggtatgatttttctttttttctgattggsattcattcagatccttgaatttaaatagttaaaatgtattctgatataattttatggaagattactgattattttttgctcaaatatttcttcttaccaaatctgtcttttcttaggggatcctaattgcatgtatggtaacctattttatgttgtcccacagatcactaaagctctattttatttccatttttagcatcgtgcttgattttagatagcttcctgtcattcttcaacctctctgatctcttttggcatttgaagtctgctaatgttcatccagtgatttttttttttccagacagtatttttcatttctagaattttcatttggctctcttatagtttgtatttgtctgttggggtttgccatttgttaactcattatgtccatcttttatttaaactattgaatatatttacaataacttttgaaatcattgttcac

SEQ ID NO: 364765 - DNA, 639 bp, Homo sapiens
aaactcaattctgtaaaacagaagaatgtagctctgggacaaggtgccaaagaaacccagagaatctggccagatcccccctccccaccctgaatgcaaacaagcacacttaggagttagttggctgcatggcttgtagtgatgccttttcgacatcctaaccagaccattgctctccgaagcagccctacaaacaaagataactcagattgttggcaccacactcaggtactggtgtgggcacaaagcctgaggtccaggtggccagttctggggtttcatcacttagagacatttgttgtccctttccactggaataatcttcaagcttgtgtttttatctcattctgcatcacatttccagtgttggcacacagtaggccatcaataaataatgctgaaaaaaaatgaagacttaaaggaaaagatggtctattagtctagttgtttcttttccggcatgtaattaatagaggtaaattcagagtaaaaatgctatacrtttttacggtagaatggagagggtttgggatttggcgctacagacatatggcttcaaattctaacctcaggtactgattagtggtatggctttgtgagagtttcataacagctctgaccctcagttctgtccacagc

SEQ ID NO: 364766 - DNA, 639 bp, Homo sapiens
aaactcaattctgtaaaacagaagaatgtagctctgggacaaggtgccaaagaaacccagagaatctggccagatcccccctccccaccctgaatgcaaacaagcacacttaggagttagttggctgcatggcttgtagtgatgccttttcgacatcctaaccagaccattgctctccgaagcagccctacaaacaaagataactcagattgttggcaccacactcaggtactggtgtgggcacaaagcctgaggtccaggtggccagttctggggtttcatcacttagagacatttgttgtccctttccactggaataatcttcaagcttgtgtttttatctcattctgcatcacatttccagtgttggcacacagtaggccatcaataaataatgctgaaaaaaaatgaagacttaaaggaaaagatggtctattagtctagttgtttcttttccggcatgtaattaatagaggtaaattcagagtaaaaatgctatacatttttacggtagaatggagagggtttgggatttggcgctacagacatatggcttcaaattctaacctcaggtactgattagtggtatggctttgtgagwgtttcataacagctctgaccctcagttctgtccacagc

SEQ ID NO: 364767 - DNA, 307 bp, Homo sapiens
atgagtttgggctctcaagttctaagagattctatttttytgtacctgaatgttggctgcatcacttccttcaatgtatctcagatatattccttaacttctttaatctcagtttttttatccacatgatggaatagctaccttgagagaaaaaaaaaaaaaaaaaaaaaaaaaaggctggacgcagcggctcacaactgtaattccagcactttgggagactgagcatgtcagattgcttgagctacggagttggagaccagcctgggcaacatggcgaaaccctgtctctatagaaaatacaaaa

SEQ ID NO: 364768 - DNA, 548 bp, Homo sapiens
caagcctttatttgcacctactatgagaaagacattgcatttttaagctaaatggagaaacatcctttaagtcacaatgctctggtcctctcgacacacaactgagagatctgaaatatatccaggcagctattctttttttcttgtgacaaggtctccctgtgcggcccaggctggagtgcagtggtgcgatcttgactcactgcaaactccacctcccaggttcaagcgattctcccgccttagcctcctgagtagccgggattacaggcatacgccaccacatccagctaatttttgwatttttagtagagacggggtttcaccatgttggccagactggtccaaacagctattcttgactcccattgtgagcgcaggagcagaggctcaaaaacaccctcagagcaacacaggctcagccaagagtgactagatcctacggcttaagaaaaacaaggatttctaaaatcagtcacctgattttagtagagacatacattttaccaacatttaaagcatctactttcaactattcatgaggagaa

SEQ ID NO: 364769 - DNA, 605 bp, Homo sapiens
ttatttgcacctactatgagaaagacattgcatttttaagctaaatggagaaacatcctttaagtcacaatgctctggtcctctcgacacacaactgagagatctgaaatatatccaggcagctattctttttttcttgtgacaaggtctccctgtgcggcccaggctggagtgcagtggtgcgatcttgactcactgcaaactccacctcccaggttcaagcgattctcccgccttagcctcctgagtagccgggattacaggcatacgccaccacatccagctaatttttgtatttttagtagasacggggtttcaccatgttggccagactggtccaaacagctattcttgactcccattgtgagcgcaggagcagaggctcaaaaacaccctcagagcaacacaggctcagccaagagtgactagatcctacggcttaagaaaaacaaggatttctaaaatcagtcacctgattttagtagagacatacattttaccaacatttaaagcatctactttcaactattcatgaggagaaaaggtctgggagaacaacacccatgtacgttcttgaatatacgtttgtcggtaatgtaagctag

SEQ ID NO: 364770 - DNA, 605 bp, Homo sapiens
ttatttgcacctactatgagaaagacattgcatttttaagctaaatggagaaacatcctttaagtcacaatgctctggtcctctcgacacacaactgagagatctgaaatatatccaggcagctattctttttttcttgtgacaaggtctccctgtgcggcccaggctggagtgcagtggtgcgatcttgactcactgcaaactccacctcccaggttcaagcgattctcccgccttagcctcctgagtagccgggattacaggcatacgccaccacatccagctaatttttgtatttttagtagagacggggtttcaccatgttggccagactggtccaaacagctrttcttgactcccattgtgagcgcaggagcagaggctcaaaaacaccctcagagcaacacaggctcagccaagagtgactagatcctacggcttaagaaaaacaaggatttctaaaatcagtcacctgattttagtagagacatacattttaccaacatttaaagcatctactttcaactattcatgaggagaaaaggtctgggagaacaacacccatgtacgttcttgaatatacgtttgtcggtaatgtaagctag

SEQ ID NO: 364771 - DNA, 548 bp, Homo sapiens
caagcctttatttgcacctactatgagaaagacattgcatttttaagctaaatggagaaacatcctttaagtcacaatgctctggtcctctcgacacacaactgagagatctgaaatatatccaggcagctattctttttttcttgtgacaaggtctccctgtgcggcccaggctggagtgcagtggtgcgatcttgactcactgcaaactccacctcccaggttcaagcgattctcccgccttagcctcctgagtagccgggattacaggcatacgccaccacatccagctaatttttgtatttttagtagagacggggtttcaccatgttggccagactggtccaaacagctattcttgactcccattgtgagcgcaggagcagaggctcaaaaacaccctcagagcaacacargctcagccaagagtgactagatcctacggcttaagaaaaacaaggatttctaaaatcagtcacctgattttagtagagacatacattttaccaacatttaaagcatctactttcaactattcatgaggagaa

SEQ ID NO: 364772 - DNA, 567 bp, Homo sapiens
gactgtaatgggtttcactgagtactgcttatgggttgcaaaatactatgttcattgcatgaggtaatgtattgtcccacgaaatgacaattgaactatttttttataaacattgctaccacaacacaatctagtccttatgccttagtgaacttttataaatacatttgcagaataaattcttagaaggcaagttactagaacaaagggtgggttcagttgcaattccagcatattaccctccctgccccctgctgaaataccctcccttccatctatgttccatcaattttatactttcaccaacagtatataaaagtgactgtgtctcacacagcctgaccagtgctatgtattttgaagcttttcaccctcagccaatctgataggagaataatggaatatcagtgttgtttatagtgaacactgcttttgaatatgcagtagtgcctgargttctcatctctgcttcacttcagatccacgtaatcagtgaataagacagtctcattctggggtggaattaactttataaaccaacaagggatacttagcatttatgtagca

SEQ ID NO: 364773 - DNA, 555 bp, Homo sapiens
caaaatgtgtccacattctaagggggaggcctcataatattttcactaaaatgatcagttctctttccttgggaatttgtaggaaaagcttaccggccaggaagagggcaactaaactagtttgggacctgctctatgtttctgtttcttaacagttttatggtatgagaacagaaagcgtggctaggtgtgttaaataacactgagctagtccagtggttctcaatatgggtgtatggggagaggggtttggaaggggaagcacttttgtcccaaggatacattgctaaaatatatgggcacatatttttatttggttgtcacaacttggcgagggtggtgctagtggcacctagtgagttgaggccggggatgctgctcaacatcctacaatgcacgggacaacccttcgcaacaaaacatatcatgccccaaatgtcagtartgctaaattaagaaaccctactgtggcccatgaaagcaaagggttacattcctatagtagaaggtgaaggagcagcagcctccagagtaaatacctggggatgagaatat

SEQ ID NO: 364774 - DNA, 555 bp, Homo sapiens
caaaatgtgtccacattctaagggggaggcctcataatattttcactaaaatgatcagttctctttccttgggaatttgtaggaaaagcttaccggccaggaagagggcaactaaactagtttgggacctgctctatgtttctgtttcttaacagttttatggtatgagaacagaaagcgtggctaggtgtgttaaataacactgagctagtccagtggttctcaatatgggtgtatggggagaggggtttggaaggggaagcacttttgtcccaaggatacattgctaaaatatatgggcacatatttttatttggttgtcacaacttggcgagggtggtgctagtggcacctagtgagttgaggccggggatgctgctcaacatcctacaatgcacgggacaacccttcgcaacaaaacatatcatgccccaaatgtcagtagtgctaaattaagaaaccctactgtggccyatgaaagcaaagggttacattcctatagtagaaggtgaaggagcagcagcctccagagtaaatacctggggatgagaatat

SEQ ID NO: 364775 - DNA, 623 bp, Homo sapiens
tattcttcctctcccctgtctttctcaatcttgcacaggctcaggcagaaggtaattattattttccagtaacataataatagaaaaggtattgactagcaatacaatctacttgatcaccctgcatgactccattctagcactgaaagctcaatttgatggcatgagatatctgtctctcagaggaataaagggctttccaacggcactataactgaaggatgtgatttgtcttgcctgacaccatattccataygtccccaaattcagtggccctgtctcatacatcatcaggcagatattttcactctgatatgatttcttgggcccagtgttctatgaaagctaaatgcaactaaaggatttctgacttctactctgtcccatgttaatttccttttcccatttggatgaaatagtagtgtgaccctcattgcccattcctaaaatgaaaagcagcactgctgtgccacacgtgacttattcactactttatggactcacacctctcaaaggattacctttaatacacaaggtatcctggagtgctaaatggtgcttcagggtgtcaatgaagtgggtgagaaataggtcagagtcacgtggagaaaaggcaactcccc

SEQ ID NO: 364776 - DNA, 563 bp, Homo sapiens
ctcacctcaattatggctgtttcccccacaaactggcttatacagacagaaaartgaagagggcttggcaattatgtaggacattaagtgataggatcccagaatttcagaaatgaatgtctccctataaatcatatgggggggaagatgtattttagagagaaggaaactggggctcagagaagccatgtcttgcccatattgcccagcctgcttgggtacaaccaggataggaattcaggtcacctgaccccaggactcactcttcctactatgcctaatttgctgccccatcaaaactcgctcccccttccaaactctccatccttctcttattaattttggattcttcctgtttattttctcccatatcctgtcacttattacagccaatatattgtctctttatagtttctgagtaagttattcttttccattcctaatggcagaattctacttaagggctacataactcagtgataggctaggactggcttgtacagctcttgagagcccattgttaaattttcaagagttttgctagctggcttttaaagacagct

SEQ ID NO: 364777 - DNA, 563 bp, Homo sapiens
ctcacctcaattatggctgtttcccccacaaactggcttatacagacagaaaaatgaagagggcttggcaattatgtaggacattaagtgataggatcccagaatttcagaaatgaatgtctcccwataaatcatatgggggggaagatgtattttagagagaaggaaactggggctcagagaagccatgtcttgcccatattgcccagcctgcttgggtacaaccaggataggaattcaggtcacctgaccccaggactcactcttcctactatgcctaatttgctgccccatcaaaactcgctcccccttccaaactctccatccttctcttattaattttggattcttcctgtttattttctcccatatcctgtcacttattacagccaatatattgtctctttatagtttctgagtaagttattcttttccattcctaatggcagaattctacttaagggctacataactcagtgataggctaggactggcttgtacagctcttgagagcccattgttaaattttcaagagttttgctagctggcttttaaagacagct

SEQ ID NO: 364778 - DNA, 563 bp, Homo sapiens
ctcacctcaattatggctgtttcccccacaaactggcttatacagacagaaaaatgaagagggcttggcaattatgtaggacattaagtgataggatcccagaatttcagaaatgaatgtctccctataaatcatatgggggggaagatgtattttagagagaaggaaactggggctcagagargccatgtcttgcccatattgcccagcctgcttgggtacaaccaggataggaattcaggtcacctgaccccaggactcactcttcctactatgcctaatttgctgccccatcaaaactcgctcccccttccaaactctccatccttctcttattaattttggattcttcctgtttattttctcccatatcctgtcacttattacagccaatatattgtctctttatagtttctgagtaagttattcttttccattcctaatggcagaattctacttaagggctacataactcagtgataggctaggactggcttgtacagctcttgagagcccattgttaaattttcaagagttttgctagctggcttttaaagacagct

SEQ ID NO: 364779 - DNA, 563 bp, Homo sapiens
ctcacctcaattatggctgtttcccccacaaactggcttatacagacagaaaaatgaagagggcttggcaattatgtaggacattaagtgataggatcccagaatttcagaaatgaatgtctccctataaatcatatgggggggaagatgtattttagagagaaggaaactggggctcagagaagccatgtcttgcccatattgcccagcctgcttgggtacaaccaggataggaattcaggtcacctgaccccaggactcactcttcctactatgcctaatttgctgccccatcaaaactcgctcccccttccaaactctccatccttctcttattaattttggattcttcctgtttattttctcccatatcctgtcacttattacagccaatatattgtctctttatagtttctgagtaagttattcttttccatkcctaatggcagaattctacttaagggctacataactcagtgataggctaggactggcttgtacagctcttgagagcccattgttaaattttcaagagttttgctagctggcttttaaagacagct

SEQ ID NO: 364780 - DNA, 574 bp, Homo sapiens
atgcctaatttgctgccccatcaaaactcgctcccccttccaaactctccatccttctcttattaattttggattcttcctgtttattttctcccatatcctgtcacttattacagccaatatattgtctctttatagtttctgagtaagttattcttttccattcctaatggcagaattctacttaagggctacataactcagtgataggctaggactggcttgtacagctcttgagagcccattgttaaattttcaagagttttgctagctggcttttaaagacagctattattaaaaattaaattctataaacttacaayaaatgatatgaataagaaaaatgaaaactaaaactcatcgcttcctaatcatcttactacgatctatgcccttgagactatttttgtttattgtgttacagaattgctacatatttcagctatcttcccaaatccatggttaatgatgtcatgttggggtaacctgaaattagataaggtgggagtatttataccacaaaaattgggcaaatgctacaaatagtatttttttctctccatagagatacacg

SEQ ID NO: 364781 - DNA, 574 bp, Homo sapiens
atgcctaatttgctgccccatcaaaactcgctcccccttccaaactctccatccttctcttattaattttggattcttcctgtttattttctcccatatcctgtcacttattacagccaatatattgtctctttatagtttctgagtaagttattcttttccattcctaatggcagaattctacttaagggctacataactcagtgataggctaggactggcttgtacagctcttgagagcccattgttaaattttcaagagttttgctagctggcttttaaagacagctattattaaaaattaaattctataaacttacaataaatgataygaataagaaaaatgaaaactaaaactcatcgcttcctaatcatcttactacgatctatgcccttgagactatttttgtttattgtgttacagaattgctacatatttcagctatcttcccaaatccatggttaatgatgtcatgttggggtaacctgaaattagataaggtgggagtatttataccacaaaaattgggcaaatgctacaaatagtatttttttctctccatagagatacacg

SEQ ID NO: 364782 - DNA, 501 bp, Homo sapiens
caagggttgcatgtcacaaaaggtcccaaggttatggtaacatcaggctcttaaattaggcctactatggacttgagacccaggcaggccaagtagccacagaaaggggactccttactgaaagaactgaagctgttctgggctattagagtagctgcctatcaatacccatatctccctccctctacccatttgtccctccaatttgtaatccatgcagcagctaaagtgatttgggcaaatctgatcaatcttctttgcttagggtctggtgatgatcttctgttgctccgagtatgaatataaagctccttagttctctgaggttctgcactatcaggccactcctgacatatctgtcctcatctccractgtccactcctgtttcagccaccctagctcccttcaccagctctttcccaccatgctgcttcttgccactcatctttacacaatgccattccctcttcctggagtactcattgtcatcttgttaacta

SEQ ID NO: 364783 - DNA, 612 bp, Homo sapiens
tgtgtatatatatatatacacactactgtatatatatactayttgattactactgtcaagcaaattatgctatccatcaccttccatagatacctttttgtgtatgtgcatatggtaaaagcacctaaagtctattcttttagcaaattttcagtatacagtattattaactatactcctgcagtacattagttctctaggcttattcatgctacacaactacaagtctgccttctctgaccttctctccttcctaccctggtaaccaccattctactctttgtttctatgtattgaatggtgttaggattccacataaatgagactgtgaagtatttttctatgtctggcttatttcacttagcataatgttctccagatttatctgtattgtcccaaatggaaagatctcttccttttttaaagcctgaatattcatatatatatacataccatgatttctttatccattcatcagttaatggacacctaggctgcttccgtatcttggctattgtgaatagtgtaatattaaaatacaaatgttttcatctaaattgtgtagctaaataatcatcttactaactgattaattacatatacaattttgaa

SEQ ID NO: 364784 - DNA, 612 bp, Homo sapiens
tgtgtatatatatatatacacactactgtatatatatactatttgattactactgtcaagcaaattatgctatccatcaccttccatagatacctttttgtgtatgtgcatatggtaaaagcacctaaagtctattcttttagcaaattttcagtatacagtattattaactatactcctgcagtacattagttctctaggcttattcatgctacacaactacaagtctgccttctctgaccttctctccttcctaccctggtaaccaccattctactctttgtttctatgtattgaatggtgttaggattccacataaatgagactgtgaagtatttttctatgtctggcttatttcacttagcataatgttctccagatttatctgtattgtcccaaatggaaagatctcttccttttttaaagcctgaatattcatatatatatacataccatgrtttctttatccattcatcagttaatggacacctaggctgcttccgtatcttggctattgtgaatagtgtaatattaaaatacaaatgttttcatctaaattgtgtagctaaataatcatcttactaactgattaattacatatacaattttgaa

SEQ ID NO: 364785 - DNA, 612 bp, Homo sapiens
tgtgtatatatatatatacacactactgtatatatatactatttgattactactgtcaagcaaattatgctatccatcaccttccatagatacctttttgtgtatgtgcatatggtaaaagcacctaaagtctattcttttagcaaattttcagtatacagtattattaactatactcctgcagtacattagttctctaggcttattcatgctacacaactacaagtctgccttctctgaccttctctccttcctaccctggtaaccaccattctactctttgtttctatgtattgaatggtgttaggattccacataaatgagactgtgaagtatttttctatgtctggcttatttcacttagcataatgttctccagatttatctgtattgtcccaaatggaaagatctcttccttttttaaagcctgaatattcatatatatatacataccatgatttctttatccattcatcagttaatggrcacctaggctgcttccgtatcttggctattgtgaatagtgtaatattaaaatacaaatgttttcatctaaattgtgtagctaaataatcatcttactaactgattaattacatatacaattttgaa

SEQ ID NO: 364786 - DNA, 515 bp, Homo sapiens
ctctgataggatagatgggtcaacatccaatgtggagactcccactgggcacactactgcttccaagctctctcwcaggcatctgccagcctgtagatcctgtagatagctgaatttcccttgagaaccaaatcctaggccagtcattcgcttggcttgggaggattccataatatgtagcatggaaactgttgtacaaggagttgcctaccaccgcttttctcaaaaacaagcaatggtccaagcagacctttagtccaatacatttataccttacgtttgggaatatacatgaaaagaccttaggtgaagcctgacttcagcatgtgtgtgcattgctagcagatgtaacaactttgggttgagcattgactccctaaaaacccctatttacattactactctcatagtttatagaagtaaaatctcagtgttttatacattgtaatatatgtgcatttctgcctattattttttctgaaagtcatatttgaactctgtttctttagcagatg

SEQ ID NO: 364787 - DNA, 515 bp, Homo sapiens
ctctgataggatagatgggtcaacatccaatgtggagactcccactgggcacactactgcttccaagctctctctcaggcatctgccagcctgtagatcctgtagatagctgaatttcccttgagaaccaaatcctaggccagtcattcgcttggcttgggaggattccataatatgtagcatggaaactgttgtacaaggagttgcctaccaccgcttttctcaaaaacaagcaatggtccaagcagacctttagtccaatacatttatacmttacgtttgggaatatacatgaaaagaccttaggtgaagcctgacttcagcatgtgtgtgcattgctagcagatgtaacaactttgggttgagcattgactccctaaaaacccctatttacattactactctcatagtttatagaagtaaaatctcagtgttttatacattgtaatatatgtgcatttctgcctattattttttctgaaagtcatatttgaactctgtttctttagcagatg

SEQ ID NO: 364788 - DNA, 620 bp, Homo sapiens
tccagcgttaagataggccctgacctgaggattataaggaaagaaagaaaaaagaagcttctaagtactttcaaagaactgtctaaagatgctttatgcctaaaaaccaaagtagaatccagcctcattgaatcctatgtgcataaaaatagaagagaggagaataagattatttgcaaagatcaagcggtatatctttgaattagtaaaggaaaaagttttattgttaatagagcttygttacctacatgtataaaaataagactacacattcaatttaatcaatatttttaaagatactattattcattaggaacagtgagctattagatgatagatagatcaagaaagttacagttcagaaaagaccatgagacaagcatataaacaaaataatgcaagataagctatcataagtacagagagaaaggggtatgatagaggagagaacatggccaagctaagaatttatgcagatgagaaactacttctatgcttgaagggaggaagcatcttaaatggactgtgaaagaaacaggtacaaaaatggtgagaaatggattctgtgtgaaaagactttctcacaaaagctatgttatcctaccaatttctctaaccct

SEQ ID NO: 364789 - DNA, 598 bp, Homo sapiens
ctgttttctctcacacaaaccaaagcctgcctttaagtctaaatgactcagtatgccttgataagaggacagatctctgaagactagctttgtcttctattgctgcattaccctaggtgattcatgrcaactgaataaggaatcagactaggaatgatatgttgtgccaattttcctcttcctgattttaaattgaaattattgcatagacaagaagtaagcaaatataattttttaacataagaataagagcaactttacaggttgtttcattaaatttgtgggtccactaaagatagaccagccagaaatcatcctttctgatgctttaataataatttttctcattcattcaatcaacgaaccagtgttttttgaatgcttaaatgtgctaggcactgtgcttagcacagggaatacagcaataaacagggcagatagagcccgcgtcctacagcatggcagagaacaaactgttcaataagtaactaaaatcaaatatgataatctacttcccaagtaataactgcgcctgaaggtgtgtaacaggaatatgtaaccaaatctaagaagccactgagtcctcccaagagaggaa

SEQ ID NO: 364790 - DNA, 590 bp, Homo sapiens
gtttattgtagccatttgctatacctgaacaaatgagtaggttttcaaatataaagttaatttccttagtattgacacaagagcagtgttttttttkttgttgttttttttttgtttgtttgttttatcactttttcacttgtggtgttaggctgcgctgagttacacccatttatctgacctaccacctgtcctgtgctgcaccctgcatttgaaagatggatgggggtcagggtgcataagacccataatagcagccaatgtttgttgagcattgtctgtaccaaggactatcctaagttctcttaacatcgattactttgcttaatcctcacaatacacccatggagcatacactactacttcattcatcttacagttgacaaaactgtagcaaacacagttagacaatttgccaaggtcaaatggaggaacaagggttcaaacttctgaaaaatctgatttcaaagcatattctccttaccaccgacccctcagtcctcaccagctcactgccagtagatgaccatagaacagaaccaagcatcctgttcaaacaagttcaaacccaaggtattctgaggaatcta

SEQ ID NO: 364791 - DNA, 551 bp, Homo sapiens
gcagtgttttttttgttgttgttttttttttgtttgtttgttttatcactttttcacttgtggtgttaggctgcgctgagttacacccatttatctgacctaccacctgtcctgtgctgcaccctgcatttgaaagatggatgggggtcagggtgcataagacccataatagcagccaatgtttgttgagcattgtctgtaccaaggactatcctaagttctcttaacatcgattactttgcttaatcctcacaatacacccatggagcatacactactactwcattcatcttacagttgacaaaactgtagcaaacacagttagacaatttgccaaggtcaaatggaggaacaagggttcaaacttctgaaaaatctgatttcaaagcatattctccttaccaccgacccctcagtcctcaccagctcactgccagtagatgaccatagaacagaaccaagcatcctgttcaaacaagttcaaacccaaggtattctgaggaatctactaagcaagatatcaaactgaaatctaactgtaataatattgc

SEQ ID NO: 364792 - DNA, 551 bp, Homo sapiens
gcagtgttttttttgttgttgttttttttttgtttgtttgttttatcactttttcacttgtggtgttaggctgcgctgagttacacccatttatctgacctaccacctgtcctgtgctgcaccctgcatttgaaagatggatgggggtcagggtgcataagacccataatagcagccaatgtttgttgagcattgtctgtaccaaggactatcctaagttctcttaacatcgattactttgcttaatcctcacaatacacccatggagcatacactactacttcattcatcttacagttgacaaaactgtagcamacacagttagacaatttgccaaggtcaaatggaggaacaagggttcaaacttctgaaaaatctgatttcaaagcatattctccttaccaccgacccctcagtcctcaccagctcactgccagtagatgaccatagaacagaaccaagcatcctgttcaaacaagttcaaacccaaggtattctgaggaatctactaagcaagatatcaaactgaaatctaactgtaataatattgc

SEQ ID NO: 364793 - DNA, 289 bp, Homo sapiens
aaaacgggaaactctgggacctccattcccatttgtctgtattataatggacctaaaatgactttctggggaggatcttgtgttgcctgggtctactcctatggctcattgctaagcaaaaccaggtatccttccaccaagacatatctcattgttaaacactttaacttcagcaagatattaatttcaccctcarcttggctgaaaaagcacatggcttagcacttcctgacaaaacagagcagctatcctccatgtacttctcaaggaatataaccttaaactcatt

SEQ ID NO: 364794 - DNA, 589 bp, Homo sapiens
atctttgctcagacaaagtggtctttccttttggcataaattacacagaatttgtatatacgtactgtttaacaaaagtcagggatcacacagacacaaggtgtraaagagatactccacattccatcctgggatagatggcagatcatgataaagtgacaaatctggaccacatcaggttgaacctgatgaaaaaatgcctttttcccccacaacattgattttccattaattttatcttggtagatgtactggtccatatggggaactgtataggaaagagctgatgagggttatcactgcgtttatgatgaggacaccattcatgacattatacagtgtcctctctagaaaaagttattggagaaatttctctttggtctcaatatcaggcaggatggagcctctccaagcaattggtttcatttcacttatgaacactataaatcatgtttgcctcctatcttggactgctagaaagctcagtgtcaaatatgtgacacttctttacaaaggagataagacttcagtgatgtgctggttctactcctgaccttatttcacccttcaattgtaactttctctttcc

SEQ ID NO: 364795 - DNA, 589 bp, Homo sapiens
atctttgctcagacaaagtggtctttccttttggcataaattacacagaatttgtatatacgtactgtttaacaaaagtcagggatcacacagacacaaggtgtgaaagagatactccacattccatcctgggatagatggcagatcatgataaagtgacaaatctggaccacatcaggttgaacctgatgaaaaaatgcctttttcccccacaacattgattttccattaattttatcttggtagatgtactggtccatatggggaactgtataggaaagagctgatgagggttatcactgcgtttatgatgaggacaccattcatgacattatacagtgtcctctctagaaaaagttawtggagaaatttctctttggtctcaatatcaggcaggatggagcctctccaagcaattggtttcatttcacttatgaacactataaatcatgtttgcctcctatcttggactgctagaaagctcagtgtcaaatatgtgacacttctttacaaaggagataagacttcagtgatgtgctggttctactcctgaccttatttcacccttcaattgtaactttctctttcc

SEQ ID NO: 364796 - DNA, 602 bp, Homo sapiens
aattgaaataaataccaaacttgactacttagagttctgaggattaaataatttaatagatacaaaatatgttaccgatgaaagccacgtgactgtttctgcttttcaaattctttcttgtggagcctggactgcactgcaacctatggccgagtaaaacagtggtaacttgcagtcaagtaccatttaagtgagaaatcctctgaaacgtctatggactgcttatctccttgttcagtattcaggaatactttcctgtgaatgcagctatgttacttacctggtttgtattcttaccttagattgttgtagctattgtaaagcaaaagtaagatcaagcccatgtaactactttttgggttcttttctctcactktgtaaatacagggtgtttttccagacgggagtgcggtggcacagtcttagctcactgcagcctcgaacttctgagctcaagtgatcctcctgcctcagcctcccaagtggcagggattacacacgagccactgtgccaaacccgtgaagtttttgagttgtacttttgtactaaagtcatgactactttttctgcaactgacactatgagctgcaaatacgactga

SEQ ID NO: 364797 - DNA, 509 bp, Homo sapiens
tattctgttccattggtctatgtgcctatttttataccattaccatgctgttttggtgactatggccttacagtatagtttgaaatcaggtaatgtgatgcctccagatttgctcttcttggttagtcttgctttttttttttttttttcctccatatgaattttaraattctttttttctaattctgtgaagaatgatattggtattttgatgagaattgcattgaatttgtagattgcttttggcagtgtggtcattttcacaatattgactctatccatccatgagcatgggatgtatttccatttgtttgtgtcatctatgatttctttcagtagtgtttggtggttttccttgtagagatctttcacctccttggttatgtatattcctaagtattttattttatttttttgcagctattgtaaaaggggttgagttttttatttgattctcagttcggttgctgttggcatatagaagggctactgatttgtgtacattaatt

SEQ ID NO: 364798 - DNA, 509 bp, Homo sapiens
tattctgttccattggtctatgtgcctatttttataccattaccatgctgttttggtgactatggccttacagtatagtttgaaatcaggtaatgtgatgcctccagatttgctcttcttggttagtcttgctttttttttttttttttcctccatatgaattttagaattctttttttctaattctgtgaagaatgatattggtattttgatgagaattgcattgaatttgtagattgcttttggcagtgtggtcattttcacaatattgactctatccatccatgagcatgggatgtatytccatttgtttgtgtcatctatgatttctttcagtagtgtttggtggttttccttgtagagatctttcacctccttggttatgtatattcctaagtattttattttatttttttgcagctattgtaaaaggggttgagttttttatttgattctcagttcggttgctgttggcatatagaagggctactgatttgtgtacattaatt

SEQ ID NO: 364799 - DNA, 552 bp, Homo sapiens
gaagcttagtttcactggatacaaaattcttgattgataattgttttgtttgaggaggctgaagataggaccccagtcccttctagcttgtagggtttctgctgagaaatctgctgttaatctaataggttttcttttacaggttacctggtgcttttgtcccacagttcttaagattctttcctttgtcttaactttagataacctggtgacagtgtgctaaggcgatgatctttttgcgatgaatttccaaggtgttctttatgcttcttgtatttggatgtctagatctctagcaaggccagggaagttttcctctattattcccccaaatgtgttttccaaacttatagatttctcttctttctcagtaataccaaacatttttaggtttggtcatttaacatartcccagaattcttggaggctttattcatattttcttattctttttttctttgtctttgttggactgggttactttgaagactttgtcttcaaactctgaatttctttcttccatttgtttaattctattgctgagactttcca

SEQ ID NO: 364800 - DNA, 588 bp, Homo sapiens
aatctgctgttaatctaataggttttcttttacaggttacctggtgcttttgtcccacagttcttaagattctttcctttgtcttaactttagataacctggtgacagtgtgctaaggcgatgatctttttgcgatgaatttccaaggtgttctttatgcttcttgtatttggatgtctagatctctagcaaggccagggaagttttcctctattattcccccaaatgtgttttccaaacttatagatttctcttctttctcagtaataccaaacatttttaggtttggtcatttaacatagtcccagaattcttggaggctttattcatattttcttattctttttttctttgtctttgttggactgggttacttygaagactttgtcttcaaactctgaatttctttcttccatttgtttaattctattgctgagactttccagagcattttgcatttctataagtgtgtccattgtttcctgaaattttgattgttttttatttatgctatctatttgcttgaatagttctccctttacttgttgtaccattttttggattttcttacattgggctttgcctttc

SEQ ID NO: 364801 - DNA, 481 bp, Homo sapiens
gttattttttaccgtgtcctttgatatggtttggatctgtgaacccacccaaatctcatgttgaattgcaatccctagtgttggaggtgaggcctggtcagaggtgattgaatcacgggatgggtttctcatgaatgatttagcaccatcctctaggtgatattttcaagatagtgagtgagggattgtgagacctggctgtgtaaaagtgtgtagcacctccccccagctctcttcctcctgtgctagtyatgtaaagtgtctaactccccctttgccttctgccaggcttgaaagtttcctgaggcctccctggaaactgagcagatgctgccatgctttctgtacagcctgcagaaccatgaaccaattaaacctcttttctttataaattacccaatctcaggtatttctttacagcaatacgagaatggactaatacatcctgttatcaaatatcatgtccaatgttacctaaagc

SEQ ID NO: 364802 - DNA, 465 bp, Homo sapiens
gacatcataaatgttcttcagcacttggcttatttcagttaccatagtgtcctccaggttcatccatactacaagaaatatttaggtagtctttagataaaaataaaataacagtcagaaatctggatctacacaaagaaataagaagcactgagcatggtgactacataaataaataaatatatatatattgttttatgtaactatctttaaaataaaattgtttaaacaaaaaaaatgtagtagtgtgtggttcagaasatacgtaaagctaaaatgtaggaaaacaatagcataaatatcaggagggaagaagtggaagtacaccattataaggttttaatattatactttaagtggtataatattaattaagagtagactgaaaggttaaagttatatactataaacgttaaaataacttaatatttttaaaaaccacaaagaattatataggcaatcatt

SEQ ID NO: 364803 - DNA, 465 bp, Homo sapiens
gacatcataaatgttcttcagcacttggcttatttcagttaccatagtgtcctccaggttcatccatactacaagaaatatttaggtagtctttagataaaaataaaataacagtcagaaatctggatctacacaaagaaataagaagcactgagcatggtgactacataaataaataaatatatatatattgttttatgtaactatctttaaaataaaattgtttaaacaaaaaaaatgtagtagtgtgtggttcagaagatacgtaaagctaaaatgtaggaaaacaatagcataaatatcaggagggaagaagtggaagtacaccattataaggttttaatattatactttaagtggtataatattaattaagagtagactgaaaggttaaagttatatactataaacgttaaaataacttaatatttttaraaaccacaaagaattatataggcaatcatt

SEQ ID NO: 364804 - DNA, 592 bp, Homo sapiens
ttttttaaaacctcatcctatttttttaaataaaaatgcccactaaaatactgcatttttcaaatgcgcccaaaggagtctaggcttagtgtagttgggaggcaaggcgaagctgagttgacaggttggctgtttgaagggctcatggtaagggtaatagtaggtggagatcccaggatgggacagatcaagagcacagayggggtttggagaagctcagggcaagaaactagggaattcctttctccttgatcactcgcctaaaggaggaaggagaaaaaagagccagggagggaggcaaagaaagtgaagttcgtgtgtgtgtgtattaggggtggggtgcagggggtcgaggagaactggaaggacagatgccaggacagccatctccaggagaaagacagcagcactcagtgaaggctctctgttccaaattgcactgagggaaatggaccaaatatgtacagcagagtgaaagaccacccataactgggattccacaactgaaagacaaacatctgcaaattcccttcatatagttaaacatttatggtcccttttaaatatgtaggaattggacttactaataatt

SEQ ID NO: 364805 - DNA, 497 bp, Homo sapiens
tggaatctattgtgtatagaaccccccccccccaaaaaagatgaaacccaaattctgactgagtctgtggaaattcagttcattttcttaccagaatccttcttgtgaaaactgatcagagcttaccttgctgcttttctgtgccacttayggaatttgaggtgatgactttggccctgacatcctcttgccaaattctcccttgttctacttgccacacctatttttggctagcctctgagatatcccacctggaggctgctaaccaaagctacaggcaagatgttgcctacagatctggcatgatgtggaggtggatgagcagattatgcagcaggcaatgcatggagagactgacaacaacagcaaattccaagtgtttctaagtcatcatctgggctcaactagcatgtagcacataattcaccaatcacctacaatttatattagatgcacatagtttagattaaaaagaagcaggctgagtgagatggcca

SEQ ID NO: 364806 - DNA, 481 bp, Homo sapiens
tgctttgctacaagaaaatattacatttgttcttcctttccaattattggaaactgtagaggtacaagtagaagattttaaaataagacaaccaattatacagtggaagacgagacattaaaaaataagctggatgcagtggctcatgcctgtaatcccagcactttggaaggtggaggcaggaggatcacttgaagccaggagtttgagatcagcctggccaataaagggggaccctgtctttacgtaaaatatattatgcaagcatgatggtgtgtgtctatagtcctggctagtaggagactgaggtgggaggatcacttgarcctgggaggttgaggctgcagtgagccatgatacacactactgcattccagtctgggtgacagagcaagatcctgaagaagatgccccaagaagatgcattaattcttctgccttgtgcatgaggtagaggacagacatgaatgggaaacctggg

SEQ ID NO: 364807 - DNA, 632 bp, Homo sapiens
atgggcacagaaacgcatgatacaccagccttcccttctcctcgctgttttccttttaggggagttagcagaatattgcatgttgccagaagagacctcccatggtgcagtctccttgttcacagcacggaagctgccagaataggaaacagagtgggaagacggagcagtggagcgagggtggcccaggacacgcgaggggcccgccatagccatccagcctggtcctgagacctgagtaagtggtgctccagaaaagaaactgggcattttagttacctgttagccctttcatttgtgcaggtgatgtgttcttagtcccattttgattaataattaacattmgctcagtttacaaaacacttttccttgtgttattttattgggccttctcaacaacctggaatatatttatcatctttttaccggataggggaagagaactgaggttcaaagaaattaatccaaagccatgaaagccagtaggtgggaaaaacagaacttgaatttaggttttctggttccaaattctatgttttttctatgaaaaacaccctctcccttaccctgatgatttcaagtaaactaaaattttaagccatgttcaatttctaagaagagataaaaaatat

SEQ ID NO: 364808 - DNA, 596 bp, Homo sapiens
atgattacctatagtttaatatattgccttttacttgagtttatgggcacagaaacgcatgatacaccagccttcccttctcctcgctgttttccttttaggggagttagcagaatattgcatgttgccagaagagacctcccatggtgcagtctccttgttcacagcacggaagctgccagaataggaaacagagtgggaagacggagcagtggagcgagggtggcccaggacacgcgaggggcccgccatagccatccagcctggtcctgagacctgagtaagtggtgctccagaaaagaaactgggcattttagttacctgttagccctttcatttgtgcaggtgatgtgttcttagtcccattttgattaataattaacattcgctcagtttacaaaacacttttccttgtgttattttattgggccttctcaacaacctggaatatatttatcatctttttacyggataggggaagagaactgaggttcaaagaaattaatccaaagccatgaaagccagtaggtgggaaaaacagaacttgaatttaggttttctggttccaaattctatgttttttctatgaaaaacac

SEQ ID NO: 364809 - DNA, 632 bp, Homo sapiens
atgggcacagaaacgcatgatacaccagccttcccttctcctcgctgttttccttttaggggagttagcagaatattgcatgttgccagaagagacctcccatggtgcagtctccttgttcacagcacggaagctgccagaataggaaacagagtgggaagacggagcagtggagcgagggtggcccaggacacgcgaggggcccgccatagccatccagcctggtcctgagacctgagtaagtggtgctccagaaaagaaactgggcattttagttacctgttagccctttcatttgtgcaggtgatgtgttcttagtcccattttgattaataattaacattcgctcagtttacaaaacacttttccttgtgttattttattgggccttctcaacaacctggaatatatttatcatctttttaccggataggggaagagaactgaggttcaaagaaattaatccaaagccatgaaagccmgtaggtgggaaaaacagaacttgaatttaggttttctggttccaaattctatgttttttctatgaaaaacaccctctcccttaccctgatgatttcaagtaaactaaaattttaagccatgttcaatttctaagaagagataaaaaatat

SEQ ID NO: 364810 - DNA, 574 bp, Homo sapiens
atgctgctaatttactgactctttgttctctctgtcagctgtgccctgaataaagcttaatctcttaagcagaagagaaaaataaaatgtcattgaccagcaattaagctatcagctcagatgaaacctggacccagttcattacatgaaagggatgcttgcaacattctttaatttgagatttgtggctccaacaatggatttttggctttgatattgctgccacacctttggaacaataatattgggaaattcactgtcctttctctgtattcagcccacagaggccagatttctgcattcaaggccaaacctgctctttctatcaactctgtaaaatcatctcctatcaccagcattcctgccaagttacccatttagaactgtctctttctttttcacacaaagccatatgtgaatgcataagagatgatatacttaaacccatcagaatcgttccttttttaccccaaaaatggaaratctgccttaaaattcctgaacagtaacttctaactcattagcaattaccaattgcttttttccctagttaaaccagactataaaatctatt

SEQ ID NO: 364811 - DNA, 244 bp, Homo sapiens
tcacaattgctacacccccgatataacaaacacagggacaatgaaacaacacactctggctcttagaatgagaaccagaatgatagaatgctagccaaaaaaaatcaaacaatcacatagaagtcatytactgtattattatttcttggataacaccatgaaaagtctacctgtcactcccagactcaaacgcagtattctagggtttgttatttaactatttctagtaaggattacattctca

SEQ ID NO: 364812 - DNA, 591 bp, Homo sapiens
aattgctgatcttctaggattttttaactgcaaaaattgcaaatttcatattttgcaaaaattgcacatttcatagactagtaactcccgaatcaagttacattagctttcctggacttagcatagktttaaaaataatgagtgacaactgagaattttttaagttagaggaaatttctgattttaaaatgacataataaagctggcactacccccttcttctcttagaaaccaccccaaaacaaagataaaagaaaacacaaataaaaccacatctttgatgaaactagaagacatatgtgagccccaacatacaaaatatgaggaggagcagccaaaggcagtgagtgtcaaagagggtgcaggaagatgctgcaagagaatgcctgtgtggcaaatctcagcaaaagtggcaaagcacagactgcaaagtaggcgatatatactagtgggaaaaaccaataattcctgatttagaataagctctgatgatcagaatagcaccaaggagaagcaaggaaggcaaagctaaatgataaactaataatcatgccatatttgtaggaagcagtgtgcccatgaggcagggta

SEQ ID NO: 364813 - DNA, 591 bp, Homo sapiens
aattgctgatcttctaggattttttaactgcaaaaattgcaaatttcatattttgcaaaaattgcacatttcatagactagtaactcccgaatcaagttacattagctttcctggacttagcataggtttaaaaataatgagtgacaactgagaattttttaagttagaggaaatttctgattttaaaatgacataataaagctggcactacccccttcttctcttagaaaccaccccaaaacaaagataaaagaaaacacaaatmaaaccacatctttgatgaaactagaagacatatgtgagccccaacatacaaaatatgaggaggagcagccaaaggcagtgagtgtcaaagagggtgcaggaagatgctgcaagagaatgcctgtgtggcaaatctcagcaaaagtggcaaagcacagactgcaaagtaggcgatatatactagtgggaaaaaccaataattcctgatttagaataagctctgatgatcagaatagcaccaaggagaagcaaggaaggcaaagctaaatgataaactaataatcatgccatatttgtaggaagcagtgtgcccatgaggcagggta

SEQ ID NO: 364814 - DNA, 627 bp, Homo sapiens
ggggtggggagagctatttgaataaaaaaagaaagaagagctgtttttacacaaactctctttgaaacgctgggagtacaaagcagcattgttttgagaggcatacaacagaaaaacacaaaatggggagagagaggtcctctgcacctgggcacagagtgcagtgatttgaatgtcaggggctttggcactttggtgtttcctgcacatcagtggcgcaccagttccagtgacagctgccaacacagctgatttattctgtagtggcaagaggaaaagggaggggagaggaggtgaggtgaggggagaggagaagaaggtcttgccagtggcaaggagtggggctgaaaaatttggaagcagtgggaaatggtacccttggcctggataccagcaccctttctctcaggttggagccgaagtagcatccagtgtcagctatattgatgttctggcacgatacaatggcttaggtttaccccgccagcrtgggtgcctggccagtgggtcacccaccaagggaccatctcatggctgaatggaggctcacactcacacctcacaggcagacagcaccagtgctgccagggcagagatgtgggaaatgaccatgagttgtgcttgaca

SEQ ID NO: 364815 - DNA, 587 bp, Homo sapiens
ttagatataaaactggttaatgtccttcacaacaataaaaccatagcctttagaatttttttaataggctgagattatttgcaactccattagaaaaaaaatttacaaaccagcatgtaatttagcaaagctgggttctaatcaatagtaaacaatatgtcaaacaaaagtacattcctgtagagtagaagttggcagccaccttttgtttttgtaaataaagttttatttacaccattcatgctcattcatttacatattgtctttggctgttttcatgctacaatggtatttttgaccaactacagcagagaccatatggaccacaagactaaaatatttactatctggtcctttgcactaaaastttgtcaacccctgccatagagaattaaatatccatcaagcatacctgttagacaatgctctggtatgacaatgagaacacatgcagaactctttgccttatttccatgtttgggacgatttttttttttaaatatctctttcactgtcactttcttcctacccatttccagactcttaccagagcaatccttcaaaagcacacatcttacattgtcaat

SEQ ID NO: 364816 - DNA, 595 bp, Homo sapiens
caagactaaaatatttactatctggtcctttgcactaaaactttgtcaacccctgccatagagaattaaatatccatcaagcatacctgttagacaatgctctggtatgacaatgagaacacatgcagaactctttgccttatttccatgtttgggacgatttttttttttaaatatctctttcactgtcactttcttcctacccatttccagactcttaccagagcaatccttcaaaagcacacatcttacattgtcaattccctgcttaaaatctttcaaagtatccattacttagtaattcagttgtacaaattcctgagttcttgcaacccccagtcactttatctggggggaagatccactagaacaatatgtgtgaaagtctgtgtaccccacaaagcagcgcacaaaggtttgtaattgcatctatgactagcatggttagtttttgtcccacatctcaagacaacagaaagactttgggcgttcttggtttgagggaactgagagtgagaaaagattaataggtcaaagggtatatacagttgcaattctataggrcaaatcagtctaaagacctaaactacagcgg

SEQ ID NO: 364817 - DNA, 568 bp, Homo sapiens
aatgaaaactcattaaaccaaaatctcaagatagggaagatgacaaatacaagaaagaatggtgagcaataaatcttgtggtatttcatagttaaatataagagaatgatgaatgcttgactgggaattgtaatatgagttaagtaaggattattaaaacagaagaggcatattaagaaaatatgggataatagcatcaacattctgaatttactcagcaaaacccagaaagtatacatgtgtgagagagaaggggtgggttgtggggtcagattccacaagggagcaggaaaatgaagaagttaaaacatttaaagccttcatcactgtgcagagtacatggccaagtaaaacaatgaggcaaggggaagaattaggaagagttattgaatttttatgtagcaatagagaagtatttgactgtaaagatggctawcatctgcaacaattaagaggcctattgtttgatcatttattcaacaaatagttattgagcatccaggatatgccaggtatttttctaagtgctggagataaatcagtaaataagaaagtaaataaaacagag

SEQ ID NO: 364818 - DNA, 547 bp, Homo sapiens
ccaattaacacctttttttcctccttagtggaaaaagtgatgctcagacttcctgaattcaggggtatgaggatgcctggtggggtcatcacctttgtcgggggccagttgcaatttagagaaactcatatctttaaggctgtaaatgacgaatccctaaatcctagtgggctccagagaagagatgatggagagaaaaagaagtgggggaagcgggagaagagaaatgctttgaggaaaggtgctcccccagagaaattctgtcgatgataataccagctggtgtgcatggagtactgactgtcagccactactctagtgccttgtattatctcaattatcacagtcacccaacaagggaggacctctttttgcctccattttactaataaagaaactgaggcacagaggagttrtgtaagtgcccaaggttgcacaggtgaggcctagtagagcttatgtttttgcttctgtcagttcaacctcaacacctgtgcactatttctgatacagcagtttacagtttacaaagtgtgttttcatcaac

SEQ ID NO: 364819 - DNA, 547 bp, Homo sapiens
ccaattaacacctttttttcctccttagtggaaaaagtgatgctcagacttcctgaattcaggggtatgaggatgcctggtggggtcatcacctttgtcgggggccagttgcaatttagagaaactcatatctttaaggctgtaaatgacgaatccctaaatcctagtgggctccagagaagagatgatggagagaaaaagaagtgggggaagcgggagaagagaaatgctttgaggaaaggtgctcccccagagaaattctgtcgatgataataccagctggtgtgcatggagtactgactgtcagccactactctagtgccttgtattatctcaattatcacagtcacccaacaagggaggacctctttttgcctccattttactaataaagaaactgaggcacagaggagttgtgtaagtgcccaagsttgcacaggtgaggcctagtagagcttatgtttttgcttctgtcagttcaacctcaacacctgtgcactatttctgatacagcagtttacagtttacaaagtgtgttttcatcaac

SEQ ID NO: 364820 - DNA, 614 bp, Homo sapiens
caccttttcttcccagcgtcttcttaaactgtggtctgatagaaaatgcagaagcatcatccttataatatttataagatagattattttaattcttatacagagcagctctagaggtagacgttagtgttaactccatctcatcaatgagaaaaccatagaccaatttcagctcctgagaaattaaatggctcaaagaactcttccaaacagcagcctcatttttcagacactacagtcaagacccacagagaagaagtaagtaaaatagctgaaatcggatggactctgaagtwcgtgcttttttctttaatctctgtgtgaaatagctcttctaagaaatgagcacacgagcatttaaaatggacactttggacagtcacaatacacagtcactccaggttttaactgctccgtaaacacagtcttctgcttcagaagatgcaaacctgaaggtctcctgcatatctcacagaggacacatattctgacacccaacagaaaatgaaagcaactccttgtccaagactcgtaaagttagcacctttgcttagaggcactgttttctctgaagctggaaactcactgaaaaccagacctgctgtgctgagaaa

SEQ ID NO: 364821 - DNA, 614 bp, Homo sapiens
caccttttcttcccagcgtcttcttaaactgtggtctgatagaaaatgcagaagcatcatccttataatatttataagatagattattttaattcttatacagagcagctctagaggtagacgttagtgttaactccatctcatcaatgagaaaaccatagaccaatttcagctcctgagaaattaaatggctcaaagaactcttccaaacagcagcctcatttttcagacactacagtcaagacccacagagaagaagtaagtaaaatagctgaaatcggatggactctgaagttmgtgcttttttctttaatctctgtgtgaaatagctcttctaagaaatgagcacacgagcatttaaaatggacactttggacagtcacaatacacagtcactccaggttttaactgctccgtaaacacagtcttctgcttcagaagatgcaaacctgaaggtctcctgcatatctcacagaggacacatattctgacacccaacagaaaatgaaagcaactccttgtccaagactcgtaaagttagcacctttgcttagaggcactgttttctctgaagctggaaactcactgaaaaccagacctgctgtgctgagaaa

SEQ ID NO: 364822 - DNA, 654 bp, Homo sapiens
gcctagtcccggggtcacgggggcttagtggacaacttcttcacagaaagccatcatagaagaaaatatagaagagccaggagcctatggagaagggagatcccatgccccaatcaatgacattcagattcaatttttcacattgtgtcaacaaaatagaatatgtttggaagaaaaatktgactgtttagccattgagacaccagacgtgagccactgatcttcctaaagagacagacaggtaaaagggtgcttgtccatcattctgcactgctcaccgtaattcaggggcaaggatcatggtgactgcttatgccgtaggtgcatcttggaagcacaaggctctatatggcattgaaaacattcatgggatttacctatgttgatactggctacagagcttacactccgcctgttcagctgttgcatggtcaccttccaaacacaaatctggagtcaccaatgtcaaaaatgtccctggtcctaatccagtctttacacttctaggaatctgctctaaagaaatagtggttagtctcggaaaagcacagaagatgtccactgagccacagtttataatgaagaactgatagagtaataataataattattattattatttgttaactttttaggtcacatgtcaggcactgt

SEQ ID NO: 364823 - DNA, 560 bp, Homo sapiens
aacatctggctctatccaacctgcctctcctcacccacacaagtaatcacttttattaatttcttgtgtatccttctagactcacttcaggcaaacaaaaacatgtattctgactttccttctttctttctaacatgaaaagagaagactatggttgacctttgaaccactcagaggttaggagcaccagcccctctcacagtcaaaactctgcatatagcttttgattctcccaaaacctaactactgatagcctactgttgayggcaagtcttaccaataacagttgattaacacatattttgtatatgtattatataccttagtcttatgatatagtaagctagagaacacaaaatgttattaagaaaatcacaaggaagagaaaatatatttacaattcattaagtggaagtggattatcataaaggtcttcatccttatcatcttcactttgcataggctgagggagggggagaaaaaaggggttggtcttactgtctcaggggtataagcagcgtcatgcaatttaaacttgttttgctcaagagtcaactgta

SEQ ID NO: 364824 - DNA, 609 bp, Homo sapiens
cctgctgcaataaaccctgggacattcctctgccactgaggctgggaagccaggagtgtcagcatgccgaagtcccatgcactggccagccatcaggtctgagaaactactctcagtgagtgcaggggtgctgagtgtttctccctaggctggccacaggctctcagttggttcaacagcaataggagaaagagaacaaaattcaggtgcccaccaggagccaatcacaacatccctgacagagagctgtatccaccaggaaaaccaagttcaccacgatgttaaaaaataaaaagaaaaagaaaggcttttgtaaaggactagctaaagaggtgtggacagagatarggcaatgaataagaaatcaataaacctgaagatgtgactgaattcctgccatctcatgataaaatttgaatggagaaggagttgcttcttatggaggagcaaagaaagttgattcttcagatggactgtactcttggtagtaaagatgctgtgaacactgtcaaaatgccaacaaaggatttaaaacataacataaacttagttgataaagcagtagcagagattgagaagactcactccaattttgaaacaggttctact

SEQ ID NO: 364825 - DNA, 584 bp, Homo sapiens
atccctggtctaataaaacccaagctgtagcccacaattgttcctaacaccctctttcctgatgcgctggcatccagctttctttcttcactttcctctttttcagagggaccaccaggctcaagccaatctcctgttgcctttttttctttgtctacttaccccactgtgtcctgtgttttatgtgtgtccagatcatcctaaagcctggagggaggctcacrtcattttcgcctttggattctccatagccttgagtacatccagggtaaatgtgtaataaaccatggattcaacttttcctggctgtgaaaggagaaattaacattagtgttgtttgttgtgggttttatctaatgtggtttgttcattcacacctccaacaactcttcactgggggccaggaaagaagtgatcctaagtacttgtccttatggcttacagtctcactgaatcctcctcactatccttatggtttgtttttattaacccaaagttaaccaaacaggaagcagagcgactgaacagagaaggccaccatgtttgcaggtgaggcttctgggacttgaacccaggtttgtaag

SEQ ID NO: 364826 - DNA, 624 bp, Homo sapiens
ccaccatgtttgcaggtgaggcttctgggacttgaacccaggtttgtaagtcatgggggcaggtgtcctggggaatggccatctctgtggtactttctggctgggctcccttggctgcgttgccagcacagccaatgcacatcacttgtctgttgctgtaactgcagccacccacttcctccccactgtggcagcatttctagaacctggcaagggacagctgtggacccaagccaggcccattacaagagtgttttttctcctctctaaagtggcctatcctgaaatgtgtgatgctgtctctacatggccataatttgaagttccctcccttttaataatccttttaaagaaaaatcacagcaacacccacatgatttgtgattaccagagtaaaaaccactttttttttcccatcatcctggcatctggagatgagcaaagcagaggaacagagtgttacgtgctgtctccaaacaccttgtcccaggcaggcgttccctccagcacagccagcccagcagttgggaggctgctgccctggtccccactctgccatggaaagaacttgtgccaattgcttcattcycacactgattttcccaataaacacacactgcaccc

SEQ ID NO: 364827 - DNA, 606 bp, Homo sapiens
ggttggtcttactgtctcaggggtataagcagcgtcatgcaatttaaacttgttttgctcaagagtcaactgtacattctcatttttctccttgctctggtcgcttcatactctacattggagatccttccatgtcaggatatggaaagtttccttattcttttcttattcttttcccactgatgaaaacgcagattgtacacctattatgttgtagatgtgcagttgtgtctataggacaaattggtaaattccaagaattgatggaaaaacatttataatatagtgtaatatcttcctcctttcaaatgtaagccccatgagggttaggacatctgtcttcccctctgtgcctccagcccctggtatggagcatggtactcagcacacaccagggtamtcaccctccaaccatacagcttgacttgaaaaggggtatcaataaccagtgctatcctctttttaactcctttttacataagctgtactaagtgaaccttcttactgtattcccttaaaagctagtcctatcataggcagaggcaactcaaaattccaggaaatgatttatttgaatgctccagtcaggtttccaagaactaacct

SEQ ID NO: 364828 - DNA, 575 bp, Homo sapiens
ccacaaactgggtgatttaaacaacagaaattccttttctcataattctgggggctggaagtccaagatcaaggtgtaggcaaggttatttcttctgaagcctcccttattggcttgtagatggctgtcttctccctgtgtcttcagagagtcttccatctgtgtgtgtctgtgtcttaatctccacttataaaatcaccagattggattaaagcccatctaatgacctcattttaccttaattacctcttttatttatttattaatttttttttgagayggagttttgctcttgttgcccaggctggagtgcaatggtgcaatcttggctcactgcaacctctgcctcctgggttcatgccactctcctgtctcagcctcccaagtagctggaattacaggcatgcgccaccacgccaggctgattttgtatttttagtagagacatggtttctccatgttggtcagactggtctcaaactcccaacctcagatgatctgcccacctcggcctcccaaagtgctgggactacgggcgtgagccaccacgcccagctcccttaattaacctcttt

SEQ ID NO: 364829 - DNA, 575 bp, Homo sapiens
ccacaaactgggtgatttaaacaacagaaattccttttctcataattctgggggctggaagtccaagatcaaggtgtaggcaaggttatttcttctgaagcctcccttattggcttgtagatggctgtcttctccctgtgtcttcagagagtcttccatctgtgtgtgtctgtgtcttaatctccacttataaaatcaccagattggattaaagcccatctaatgacctcattttaccttaattacctcttttatttatttattaatttttttttgagacggagttttgctcttgttgcccaggctggagtgcaatggtgcaatcttggctcactgcaacctctgcctcctgggttcatgccactctcctgtctcagcctcccaagtagctggaattacaggcatgcgccaccaygccaggctgattttgtatttttagtagagacatggtttctccatgttggtcagactggtctcaaactcccaacctcagatgatctgcccacctcggcctcccaaagtgctgggactacgggcgtgagccaccacgcccagctcccttaattaacctcttt

SEQ ID NO: 364830 - DNA, 622 bp, Homo sapiens
taggccagaagtccatgatcaagctgttggcagagttggttccttctgaggcccttgaggaagactctcttccatgcctctcccttacttctgatggtttgctggcaaccttcaggatttcttggctcatagatgtgtcaccttgatctttgccttcatgtcacatggtgtcctctctccgtgtgtgtgttcacgtatccaaatttcccctttcaataaggatgccagtcatattgggctggtggtagaggcctcctctaatgacctcattttaacttgattctctctgtaaaaagcctatttccaaataagggcacattctgargtactgggggttggaatttcaatatgccattttgggggatataattcaacccacaacaccaggcatgtcctagcttgcacccaggggttatttgaaacattgataagtgcaagagagagtgtgataagaaactggaagcacagatgatgaggacctcagctggggaagtcatattccttcaactcttcctagaagccagcaagataaaagatatccctgagccaaacaaatgcttgtatctgggaataagagtaaggtcctgagaaaaatataagggttggagtagctgttatcctc

SEQ ID NO: 364831 - DNA, 618 bp, Homo sapiens
ggagtagctgttatcctcccagtcagtgcttttgggtgagttggtctgacttagaggcacaggttggtytatagcagcgggctctttgttagtcgagatcagcttctcaggaatgaaatcagaagtaagtgttggggtgtcacaagtctattcttagcttccacttaccagctagtgcagcctggaaggtggacatggactgtgtgttagagagtttagggcaggatcagaaatgccaagaacttggctgaaggcctgatctttattggatgcagagcccttgtgatggcctgagttgctcagtattggttgctttcccagtgtttgaaggacaatcttggtctagtgttcatttggtccaatggtctattcctatgacatcatactgcctaattccagttatgaatataagatatgaagtggatgctgtaatgtgccaccaagatccctcttcagggataaatgatattccagtgcctgaaaatgcttctggccttctctggaaatcgtcttgtgctggagggagttgccttaacccaacaccatgctccctttctggggcaacctgcatccaatgactgcttaatgcagaaagcccataaccttttctggaaagtg

SEQ ID NO: 364832 - DNA, 606 bp, Homo sapiens
ggagtagctgttatcctcccagtcagtgcttttgggtgagttggtctgacttagaggcacaggttggtttatagcagcgggctctttgttagtcgagatcagcttctcaggaatgaaatcagaagtaagtgttggggtgtcacaagtctattcttagcttccacttaccagctagtgcagcctggaaggtggacatggactgtgtgttasagagtttagggcaggatcagaaatgccaagaacttggctgaaggcctgatctttattggatgcagagcccttgtgatggcctgagttgctcagtattggttgctttcccagtgtttgaaggacaatcttggtctagtgttcatttggtccaatggtctattcctatgacatcatactgcctaattccagttatgaatataagatatgaagtggatgctgtaatgtgccaccaagatccctcttcagggataaatgatattccagtgcctgaaaatgcttctggccttctctggaaatcgtcttgtgctggagggagttgccttaacccaacaccatgctccctttctggggcaacctgcatccaatgactgcttaatgcagaaagcccataacctt

SEQ ID NO: 364833 - DNA, 604 bp, Homo sapiens
gggctttttgttttcttaatattgaattttgagtgttctttgtatattccagatacaaggtctttatcggatttgtgctttgtgaatattttccctcagtccgagtcttttcattcttttaacagtgtgtctttataaatttattcttttttttcttttatggatcatgattgtggtatcatatctaggaaatctttgcctgatccaagggctacacagatttttcctcatgttggttttctaaaagttttatggtttagattttacattaggttttcatctgatctatgtttgagtatatttttctatatgaaatgaggtataaacaaaaggttttttttgcttatgaatatctaattgtttcagcaccattttttaaaaagactgtcttttctccatggaattgccatttattctttgtcaaaaatcmgttatctatataatgtgagtctatttcagtattctctatttcattccattaatctatttgatatttgtctaatcaataataatcacactgtcttgatgactatacttttataatgaaagcaggtagtgatagtgttacaactttcttctttattgaaattgttttaattatgtt

SEQ ID NO: 364834 - DNA, 604 bp, Homo sapiens
gggctttttgttttcttaatattgaattttgagtgttctttgtatattccagatacaaggtctttatcggatttgtgctttgtgaatattttccctcagtccgagtcttttcattcttttaacagtgtgtctttataaatttattcttttttttcttttatggatcatgattgtggtatcatatctaggaaatctttgcctgatccaagggctacacagatttttcctcatgttggttttctaaaagttttatggtttagattttacattaggttttcatctgatctatgtttgagtatatttttctatatgaaatgaggtataaacaaaaggttttttttgcttatgaatatctaattgtttcagcaccattttttaaaaagactgtcttttctccatggaattgccatttattctttgtcaaaaatcagttrtctatataatgtgagtctatttcagtattctctatttcattccattaatctatttgatatttgtctaatcaataataatcacactgtcttgatgactatacttttataatgaaagcaggtagtgatagtgttacaactttcttctttattgaaattgttttaattatgtt

SEQ ID NO: 364835 - DNA, 604 bp, Homo sapiens
gggctttttgttttcttaatattgaattttgagtgttctttgtatattccagatacaaggtctttatcggatttgtgctttgtgaatattttccctcagtccgagtcttttcattcttttaacagtgtgtctttataaatttattcttttttttcttttatggatcatgattgtggtatcatatctaggaaatctttgcctgatccaagggctacacagatttttcctcatgttggttttctaaaagttttatggtttagattttacattaggttttcatctgatctatgtttgagtatatttttctatatgaaatgaggtataaacaaaaggttttttttgcttatgaatatctaattgtttcagcaccattttttaaaaagactgtcttttctccatggaattgccatttattctttgtcaaaaatcagttatctatataatgtgagtctatttcagtattctctatttcattccattaatctatttgatatttgtctaatcaataataatcacactgtcttgatgactatacttttataatgaaagcaggtagtgmtagtgttacaactttcttctttattgaaattgttttaattatgtt

SEQ ID NO: 364836 - DNA, 592 bp, Homo sapiens
tctccttgtggaacatagaaaaggagtgaagaaaggtagttttggtctcctgcctaggccccacaatctttcctagtggacccaaagctcagggataccttgggttgcaatacttcactgggtatggtaggctcagtgaagttgttratcctcagcggggcagtttattctgtttttaaaactgtagtcagtttctcttcaaccattatgcaagaggatatgggagaagccacacatcaagaggcaccttttggaaatctaccagcaaggttgatggagcaacctggaaatacaaggctaacagcagacaagggttccaaaaggcctcactcagacctgtctttctgcttctctcatgcggaggttcacagctaccttactgctcaaaaagggactttcttctcagatgagacctcctgactacctccccaatctggcagtttgacaaaattccgtagattttaaggtgctcatggtgtgaaagtgttgggaaccttccagactgagtctctttcagttcttcaagagttacacgcttgttatctgcaggcctttgcccatgtggtcatctcaccttggaacactctcccta

SEQ ID NO: 364837 - DNA, 570 bp, Homo sapiens
gttgccctcccttgtgccttcattgcccactgctccccattgcagataatgcctctttcattatctagctaatgaacagtctggagaggagagagaaaaagacatgaactcttggaatcatgtaacattttacatttatatctgttatttactttatagccaggcattgttcaaagtactgtacacagctgataatattagaagatggataggtgagtgagattgcaggcccttgataagtcaggtgkgttgtttgcacagagagactatgaccagggaaggcctaacctataggttttggagtattcaaaggtttgagggacatgagagagtaaagcatccttagtagcacaggttgagtaaagccttctcttgtccctggtatctgactgcagcagcttctccagctgcttctccaaaggcatccaatggctagctgtaatttacatagccaccctctttattttttttcttcttaggtttatttattcactttttattaaagtataacatggctacaaaaaaatacacctaagtggcaattggatgaaattttacaaaacatacaca

SEQ ID NO: 364838 - DNA, 549 bp, Homo sapiens
tattgtctctgtagcccacaagtttaacctttatcttgatttctaacagcacataataattttgcctgtttctgttcttcaaatrtagttagcgttttatatctgcaagttctgcatccacagattcaggcaaccacagattgaaaatattaaaaaaaagacacaatgataaaaataatataaattaaaaaatacagtatgacaactatttatatagcatttacattgtgttaggtattataagtaatctagagatgatttaagtatacaggaggatgcgtgtaggttatatgcaaacactatgccatttaatataagggacttagacatctgtggattttggtgtctttggggggtcctagaaccaatcccttgcagctactgagggacgactgtaaatggaattatctaatatatgtatgtgtcttttgtgtttgatgagctcccttttaaaatataacttaggatttatgcttcttgtatgccgtgataagaacacattaaaaagataataaaaaatcttaaagggtatgtagatgaaaaaagtag

SEQ ID NO: 364839 - DNA, 631 bp, Homo sapiens
catttctcgcagttatatggatcaactcaatgagttggctgacaaatcaacacttaaagccctcagcaccttggtggtacgtggtgggtatctgctaagtgttctaaaggattaggtgctaggtggaaaggagcaaaaggagacatagcacagtgtccaygtccaaccccacttcccaggaaattgctgaggcctcagataattgttttatgatggtgattataatggaaatcacaaatatatatttgtccctaaagtatgtctggcactgcactaggcatttttccacagatggcctcatttttagagttctcaacaaccttgcaaatgctgcatttcatagattctaagactcttgtttccacatgttaacatctttaagatcaggctgaatcttacagtctatgtgatgagagccttatattgtgatttaattgtcaaggttattttttgtttctcttttgctaactgtacataaaacaatggtgaatcttacagtgtgtggtgtgttagatttgatgaaatacagtagatgtgactttccatgctctccagatgagaaaacagatactctgagaggccaaacaagctgtctgacatcatatgctggtaaatgcctggtgtgacatac

SEQ ID NO: 364840 - DNA, 629 bp, Homo sapiens
ccatgagggctccacccctgcagcagacttctgcctagacaaccaggtgtttccatatatcctctgaaacctaggtggagttcccaaatctcaattcttgacttctctgcatttgcaggaccaacattatgtggaagctgccaaggctaggggcttacaccctctgaggcaacagtctgagctgtaccctggcctcttttagccaagcctggagcggctgggatgcasggcaccaaatcccagggctgcacataggaggggggccctggacccagcccatgaaaaattttttgcctaagcctctgggcctgtgatgggaggggcggccatgaagttttctgacatgccttgaagacattttccccattgtcttgacgattaacatttggctcctcattacttttacaaatttctgcagtagcttccatttctccccagaaaattgtttttgcttttctatcacatcactaggctgcaaactttccaaacatttatgctctgcttcttcttgaactctttgccacttagaaatttattctgccagatatcctaaatgacctctctcaagttcaaagttccacaatctctagggcaggggcaaaatgccaccagtctttttgcatagcaag

SEQ ID NO: 364841 - DNA, 585 bp, Homo sapiens
ttttgggtatctttatagcagcaccctgctctctgcagtaccaatttactgtattagtccattctcatgctgctataaggacatacccaagactggataatttataaaagaaggaggtttaattaactcacagtttcacagggctggggaggcctcaggaaaattaccatcatggtgaaaggggaagcaaacatgtccttcttctcatggtggcagaatgagagcagaatgagaagaagaatgacagccgagcaaagaggaaagcactttataagatcatcagatcttatgtgacttactcactaccataagaaccgcatgggggaaactgcccccatgattcaattgyctcctaccaggtcgctctcaccacacatggaagttatggaaactacaattcaagataagatttgggtggggacatagccaaatcatatcaatgggagtgcaacatttctgaacccaaaatgctaagaactgctttgcaccccctcaggtaatgatcaatgttctaggggccaggaaaaaaagcactgggtactaggcatttttagtataattttctatgtccttgtcataactatt

SEQ ID NO: 364842 - DNA, 595 bp, Homo sapiens
ctccctaggacctgcccctgaggtcatttgctatccctcttccctactttaccctggtctgcctggcttgctttctgttgtttgactrtatcaacctcatttctgcctcagggcctttttacttgctgttttctatagcacaaatacccttatatctgcttatttatggctgccttcttttaaatcatgtctcatttcaaatgagaggtcatctcctcagagagaccttctctgattacactctgtgatgtagcaaccctgcctttccacaaccccctctaatttccaagttctattttttccacattttacttatctttacttgatgtttgtttgcttgtttattgtttatccttccccccgacaccaataaaatgtaagcttcctgagagcaggggcttgtttagtcttgtatttccagcatgtgcaacagcatgtggcacctagtagagagtcaataaatgccttgaaatggtgctttaaaacttcttacctccatgctccacggcacagtcttcattccagagagtccataaaacgacacctccttggaggtgatgagggttaggaagtgtatggtaacagagtagtgtag

SEQ ID NO: 364843 - DNA, 595 bp, Homo sapiens
ctccctaggacctgcccctgaggtcatttgctatccctcttccctactttaccctggtctgcctggcttgctttctgttgtttgactgtatcaacctcatttctgcctcagggcctttttacttgctgttttctatagcacaaatacccttatatctgcttatttatggctgccttcttttaaatcatgtctcatttcaaatgagaggtcatctcctcagagagaccttctctgattacactctgtgatgtagcaaccctgcctttccacaaccccctctaatttccaagttctattttttccacattttacttatctttacttgatgtttgtttgcttgtttattgtttatccttccccccgacaccaataaaatgtaagcttcctgagagcaggggcttgtttagtcttgtatttccagcatgtgcaacagcatgtggcacctagtagagagtcaataaatgccttgaaatggtgctttaaaacttcttacctccatgctccacggcacrgtcttcattccagagagtccataaaacgacacctccttggaggtgatgagggttaggaagtgtatggtaacagagtagtgtag

SEQ ID NO: 364844 - DNA, 474 bp, Homo sapiens
tgctgttagaattttttgagtctcatcaaaacttcacagaaatcctagctaagtttttctttccattcrggtgtaacctctgaacgccccctgcaaactcttccttttccttaattatccttttgaccttcagagtgcatttgccaggggttctgaatagatccttagttgcaaatgtagtgtgttatttctaagacttgtattttataaagtacatcataaaattctatctcagggcccaggtggttaagagaatatttcaaatgttctacttattttcagaagcaaggggggctaatcctaaaaaaaaattcctttacatattggccaagtccctgatgtacagttggaccacatcataaaatgctcttaaatggttatggccagtgtcagtggattgaatcatctccctatgcagatgatgagtctttgggattggggctgttcccaaacccagataactttagaatgcaa

SEQ ID NO: 364845 - DNA, 570 bp, Homo sapiens
caaagcttgcatcttctactttagtgtgaacttgctgaactctagttgctttcactgcagggaagggactttagacccatctctgcttgatggttttgtgaacccggatggtcactttcctctctgtcttgatttttcccaaatgtagaatgaaggtggaaaaatcacagattctccacattctgatggggagaaggttttgctttyttccagagaaccagtgattctgatcatctacaatgttttacctcttactctaggtgtcactgacaattttagcagtgtagcatcgctccaaattatcttttatctactatatcagccaaactagataggatgggtaatttcatgtgtcaccttgactgagctaagggatgcccaaatatctggtgtaaacattatttctgggtgtatctgtgaaggtgttcctggaagagattagtatttgaataggtagactgagtaaagaagattccaccctcaccagtaagggtaggtgtcatctaatctgtagatggccaaaatagaacaaaaaggcagaggaagggtgaataatctctctttgcttgg

SEQ ID NO: 364846 - DNA, 563 bp, Homo sapiens
ctttcactgcagggaagggactttagacccatctctgcttgatggttttgtgaacccggatggtcactttcctctctgtcttgatttttcccaaatgtagaatgaaggtggaaaaatcacagattctccacattctgatggggagaaggttttgcttttttccagagaaccagtgattctgatcatctacaatgttttacctcttactctaggtgtcactgacaattttagcagtgtagcatcgctccaaattatcttttatctactatatcagccaaactagataggatgggtaatttcatgtgtcaccttgactgagctaagggatgcccaaatatctggtgtaaacattatttctgggtgtatctgtgaaggtgttcctggaagagattagtatttgaataggtagactgagtaaagaagatyccaccctcaccagtaagggtaggtgtcatctaatctgtagatggccaaaatagaacaaaaaggcagaggaagggtgaataatctctctttgcttgggctggtgcatccatcttctcctgcccccagatatcagtagt

SEQ ID NO: 364847 - DNA, 594 bp, Homo sapiens
atgtttcctgccaaaccatgaaatttaaatagtctgagtcgtgtcccattacttttatcatgccaagtgcaatcccacctgatatggtttggctgtgtccccacccaaatctcatcttgaattgtagttcccataatccccacatgtcgtgggagggacctactaggagataattgaatcatggggatggttacctccatgctgttcttatgatagtgagtgagttctcatgagatctgatggttttataaggggcttccttaaccctgctttgccctgcacttctccttgctgccaccatgtgaagcaggagtatttgcttccccttctgccatgattgtaagtttcctgaggccttcccagtcatgctgaactgtgagtcaattaaaactctttcctttataaatttcccagtctttggtaggtctttattagtagtgtgagaacagattaatatagtaaattggttctgcagagagtgtggcgctgctgtaaagatacctgaaaatgtggaagtgactttggaattgggtaacaggcagggaaagacaggaaratgtgggaaagtttggaacttcctagagacttgttgaa

SEQ ID NO: 364848 - DNA, 577 bp, Homo sapiens
cctcccatcataggtccaaaggcccaggatggaaaaatggtttactgggctgcccagggccccctctcctctatgcagcctcagaacaaagtgccttgcatcccagctgattcagctccagctgtggctaaaaggggccaaggtamagctcaggacattgctttggagggtgcaagccccaggccttggttagttacatgtggtgttgggcctgtgagtacacagaagtcaagaattgaggtttgagaacatccgcctagatttcagaggatgtatggaaacacctggatgtctaggcagaagtttgctgcaggggcagagccttgatggagaacctctgctagggcagtgcagaagggaaatgtggggtcagagcccccccaaagagtccctactgaggcactgcctagtgaagttgtgagaagagggccagtgtcctccagacaccagaatggtagatccacccacagctcgcaccatgcacctggaatagccacagacactcaatgccagcccatggaagcagtcaggaaggaggctgtaccctgcaaggccacagggttggagctgcccaaga

SEQ ID NO: 364849 - DNA, 613 bp, Homo sapiens
tgtgctttgttctgctctgagcaatttttgatacataatacaaagactttcatttcccagaggtgaaggcacaggtaagacttttcttcaattttaattggaaatctatcaaatttgaggtttttccatttttaatttatcaggttgagaagcaaaatctttcaaagcataaactccatttttggattatgataagcgaggtttttttttatgaaaagttagggaacccctgaacaggtcttatgaccagtgagttaggaaaaggtacttaatgttcataaatggtaattatatactttaayacagttaatcttcaaaagactctacagagatacctaggtacttcgattgggtaccatggtataataaaaatctctacccccagtttctggcacagagctttcaaagccctttaaattacttaagtgatagaagtgtcttttgatattcatcacatatctgacttaatgccaaaaaagtgactcaaggtgggcttttagatagtttccagggaggggctggaaacacgtgtaattagagagttggaacttcagccccagcctctgacctctcgagaagggagaagcctggagattgagttcaatcaccaagg

SEQ ID NO: 364850 - DNA, 529 bp, Homo sapiens
tgaaacataagcaacatgtcacagttttattcggaaatgttactaaaggtcagagcaaaagggagcatgtaaggctgccctgggcccttctcaaactctctccagaagcaactatgggctttgatgtgctgcagcctcactcgagggtcttaacaagctcttcttggttctcatggaggcagaggctaccaccactatcctgggagtgtttgagcactccatagtttgcaaaatgctttcacatctgtgtctcagcaactatttccttagggcccacacctgcctataaagaagggattgaagtttcccattgggcagaggaaagamctggggctgggaggagtaaagcaacttacacaaaagtcaccagccagtgcgtggctgcccagcttgtctttcttttgtaattgtccactctaccatttattaatttagaaatagaaaaacttgtcaatttgcttgaagaggaataaatctgaactcatagcatctttccttccatttttaagataaaaaaatattaggagtt

SEQ ID NO: 364851 - DNA, 499 bp, Homo sapiens
gaaaaacaacttacatttcttatacacttacataggtatgtaaggtacacttacttacatagtagagaatgggtaatcagcaaatcttatctgccttctcccttttttgctgggtccagccaaatagaagaacaccattagtccctcagtggaccaggcttttgtgtgcttccttctttcatgaacccctttcacttttgtcagcttgattttgttttaagcaaccccatggtgcatttctcctccttgactcagctcaaatgaacrccttttctgttattccttcttgacctttgcctcagcatctcatggacagcgatactccctgccctgcctccttaaggccccaaggattttggtcagggaccagacttgttgacggatagattggattgacttttctccaaattatgagcgaatcagatgattatcctatttgaagagaaccctgctctccaattgtgtaaatataaattatacacacacagagttgtctact

SEQ ID NO: 364852 - DNA, 611 bp, Homo sapiens
aagcattttttatgtaaggctgtgatggcctttgtgtaaagttgcagtttctgtagagtctgagatagttttgttattaagcatacaagcataagaactctatagccttttccggctctatttgtcagggattttttataacactagtgactcagttttgattttgacaacattcaggcatgaaggaggcacatatgccatcttaacaccttcctggtaggacccatgtcacttctactcatactccactagagagaacttattctcatggccacatataatgccaagatggggctgggaaatgtagaccctggtttggaagtcacatctgttccagctatgatcttattaccagaggagagaacaaattttggtggaaagcttacagctcctgccacactcccatgagggcagtgactttgccttattcctcctccacatatccccagtgtccaatagagtgctcagtaatttcaaccctcttaccacctccaaggccacccttaatgcactcacagtgccaaccccaatgatgtatactcccctttctgattaattctgtcccttartacttactattacctaacacattatatatttcatttttttga

SEQ ID NO: 364853 - DNA, 590 bp, Homo sapiens
gtgcaagtctggccctgatagatctgttagatggcgtgcaagctgttttacatggtttgttttctgattccatttatctatgtgccctactttttaaaaattgtcttcaagattcaagactttgttacctgcaaattttcagttatcttatgaggaacattttatactaaggcagtaatatgaaataaaggaaagaaaaccatgttcagagccgaagatctgggttctaggcctgtttctctactcatttgtcacaggaccttgggcaaatgacctatatttacaaattcccagttyactcccagagctggaatgttctgtgtggcccaggctccagctgctttcctctggatggggcagtctcccatcacccagcctccctgccttcacgtcaccccatccatcccaccctacaacttttaaagggtacctccatgatgtccctcccttcctccaaagtgatcctgggggcttcattttacatgtcttcccctctctgagactcaggtcctcataggaagaacatgaaaaacaacaggctacaactggatggttgtaaaggtctgatgagatctgtaatatgttgttct

SEQ ID NO: 364854 - DNA, 572 bp, Homo sapiens
tgctgttgccttctggaaatgttaaatcttttttttaacaaggggcctgcatttttattttgcactgggcctcacaattatgtagcttgttctgaccaggtgtctctgctctccaaacctctgctttttccttcatcatctgctgtacaaaagcccatacatatccttgatctccatccatccccacagccacagacttctaaccagtctctccatgagacagactgaaaaatgggcccctaaagatgatcatgtcctaacccccaaaacctgtgaatatgtgacctgacatggtttgcagctgtgattaaggggtcttragaggggaagatcatgctggatgatctggagggccagatggaatcacaacagtccttataagagggatacaggaagaattagagtcagaggagttggtgatagaacgaaagaagcagggatgggaccgatatgctttgcagatgaaggaaggaactcccaaccaagaaatacatgtagctacaggagctgagaaatgtatggaagtagattcacccctcagagcctttggagggaaccagccctgctgacac

SEQ ID NO: 364855 - DNA, 571 bp, Homo sapiens
cttgtgcatatgggaaaactgaggcttaacaagttcaagaattcttacctctatgtggagctggaaaagctaaatgaactgtctggggagcatgtgccatgcctgctccatggcaggtgatcctcagcctgatgtcttctcagggcctgtctgtttagtctctaagacctcaccctgctgtctcctccctactgtgtggcttgcctccctccccctagttctgatggctcttgctgacagaatctgtgaagtaccatgtgaagggcacacacaaggccagatctctgtgaggggatggtcagggaggacttcctggaggaaagccataacargttatcagcctccaagatggtccccagtggtcctgcctcctggtactcactccattgtgtagtcccctcccacactgtccctgggtgggaccagtggtatatggcagaagtgatgatatgtcacttctaatattaggttataaatactacttttctgtgttggtgcctcttgctttctcttgatcacctgccctgggggaagccagctgccatgttgtggggctgtggccaggaactga

SEQ ID NO: 364856 - DNA, 605 bp, Homo sapiens
gattcgaagagctcaatctgtgtaaagttcaccgacagctgttaaggatttgaatttagttccgttccaccaaggtctgaggcagtgccccccacaatgggctacatgaatgaataaggagtcagagttcagagaccctcattcaaacacatgttttaaggtgcccattacatgcctgacactatggggataaggaagcaacaggagtggagtccctgtctcaagagttgaktggggaagacatcacacgatatcatatttgtttgtttacctgggacagagggaagcacaaaacgttgtgagaattgaggcctgagcttaacctatgatgggcaatcagggaaagcttcttggaggagggaatacctaaactgaggcctcttacagagaggttgaagttagacaaacaagaggagtgaagggtgtcaaggtgtatgtacaagccaggtttaagagagctgggcattcttcagagccttgctcctccaaatgtgcttccaggctggagcggcagctctggcatcccttgggagtttgttaggtttggtccaccccagatctacagaatcaggatcataatcaggtggtttacctgcacatttaaa

SEQ ID NO: 364857 - DNA, 605 bp, Homo sapiens
gattcgaagagctcaatctgtgtaaagttcaccgacagctgttaaggatttgaatttagttccgttccaccaaggtctgaggcagtgccccccacaatgggctacatgaatgaataaggagtcagagttcagagaccctcattcaaacacatgttttaaggtgcccattacatgcctgacactatggggataaggaagcaacaggagtggagtccctgtctcaagagttgattggggaagacatcacacgatatcatatttgtttgtttacctgggacagagggaagcacaaaacgttgtgagaattgaggcctgagcttaacctatgatgggcaatcagggaaagcttcttggaggagggaatacctaaactgaggcctcttacagagaggttgaagttagacaaacaagaggagtgaagggtgtcaaggtgtatgtacaagccaggtttaagagagctgggcattcttcagagccttgctcctccaaatgtgcttccaggctggagcggcagctctggcatcccttgggagtttgttaggtttggtccaccccagatctacagaaycaggatcataatcaggtggtttacctgcacatttaaa

SEQ ID NO: 364858 - DNA, 501 bp, Homo sapiens
ctgccctcacctgcttctctactgctcagaggaatcctatctccatctgaccctttctctagaggagaggatttaggctcaggcctaactaagagatcatgttaccaatgagatcgtggaggagctcatgattccacgtgagaggctgttggccaagcttgggagacagcagggctggcagcataggggcagattcgcattccgcagacctgggttcaaagcttatcaatgtcatccactccctgagtgtccttggttgaaactttcatccgtgtgggcctcagtttattcatctgtaaaatgtagataatagcacagtgctgtgtaggttgtgaggatttttwaaaagtcactcacatttatttagcatttactatataaaaagcactacacaaaagaccttacttgccatattgcatttaattctcacaacagcctcatagctaggtgttattattatgcctattttacagatgggaaaactaaggcagtaaaattaag

SEQ ID NO: 364859 - DNA, 604 bp, Homo sapiens
aacaaagccactcctggtaccaatttccagtcttagtccatttttggctgctataatataatatcatagactaggtagtttataaaaaacagagatcaattttctacagttctggaggctggaatgtccaaggctgaaggactacatctggtgagggcctttttgctgcgtcaaacatgatggaaaagcaggtgggcatacgagacaagagagaaaggcactagcaaccaaactcactttacagcaacccactcttgttataactaacctgctcctgtgataataatattaattcattcatgagggcrctgccatcatgacccaatcacctcttattaggtcccacctcccaacactgttgcattggggattaagtttccaacacaggaacttctagggaaagcattcaaaccacagcatagaccaagttgcaatgtattcaggatggtatctgggttctctgttctgtcatatcagtcagtctatccttgctgtattacttcagtgtgttaatgctatatacagctttttaagccatctgatccgataaaaatttatataatctaggtacaaatctttttaagtttcataaaaacttcctgtt

SEQ ID NO: 364860 - DNA, 604 bp, Homo sapiens
aacaaagccactcctggtaccaatttccagtcttagtccatttttggctgctataatataatatcatagactaggtagtttataaaaaacagagatcaattttctacagttctggaggctggaatgtccaaggctgaaggactacatctggtgagggcctttttgctgcgtcaaacatgatggaaaagcaggtgggcatacgagacaagagagaaaggcactagcaaccaaactcactttacagcaacccactcttgttataactaacctgctcctgtgataataatattaattcattcatgagggcgctgccatcatgacccaatcacctcttattmggtcccacctcccaacactgttgcattggggattaagtttccaacacaggaacttctagggaaagcattcaaaccacagcatagaccaagttgcaatgtattcaggatggtatctgggttctctgttctgtcatatcagtcagtctatccttgctgtattacttcagtgtgttaatgctatatacagctttttaagccatctgatccgataaaaatttatataatctaggtacaaatctttttaagtttcataaaaacttcctgtt

SEQ ID NO: 364861 - DNA, 590 bp, Homo sapiens
cagactatttttcaaactttcaaactttaaaagatgagactagtatttacatatgaggttccacacagtctctatcatccttggaagaccaaatgatagaaacttcactrtaaggaggaaccaagatgcattttcttggttccaacaacactttagtttctgcagtcaccagcttcaaatttctcaagggaggcatgacattttactaaaaatttaattctagttcactgtaatttcaaaagctgtgcttatccactgaggtagcctgggttcatcagatctacttatttgaagagggaacttggccaatatccttaatttccctgggcctcagttgtttcttctgtgaaatgaagacaattgtactcacactgcagggctgcttaggaggggaaataagataagaaatataaaggcactttaaagtgtaaagggctctttcaatgtaggggattattatcacacattcttctaggccatgttatttattaaggaggtgtttttggcatgcagatataacagcaaaggagattcattcatttattcagtcaagaaatatcctagttatctactctatattgctcattatt

SEQ ID NO: 364862 - DNA, 505 bp, Homo sapiens
agctgggtgaatgaaatcatctgtaactcttaatttcactccacattataaatctataatgccctctagtgactgatgggttaattgtasattttagaagctactgggccaattggcagacatgtattgagtacctaataaaagaaatcctcagtgccgactgagcactatatgaactgacggtctactagagcaacagcacatataccaaagaatcactgtactctgggtgctatgtaaagcaaaaggccagggaaagttgcaacagcaggagtgggaataaacagaccaaggttctgccagccactagctggacacattttctagctaccctaagcctcattttctcatctataaaaacgggggtcataacacctatttctcaggattgttggaagaattaaaagagaaagtatttgctccaggcatgtgctttgttcctcacggagtaggccctcaacaaaagctaccttcttttctctctgcctgccttcctcgctcatga

SEQ ID NO: 364863 - DNA, 593 bp, Homo sapiens
gctagaaggagaaagttcttggcgccatgacaggagtatctaataaatattaggggtcaagaaatggtattcatgctgaaacaaggaagatgcttagccaaaggaaggatggagagaagagagttccaggcagagggaacagtatgtgcaaagtccccaaggcaggaaggagtttgkatgttcaaagggctagaagaaggcaggggtggcagacggacacaaaatgaggctggtagggtagacatgggccagatcatttaggactcaggagcagagcgtgtggaaaagaaaataatgggagctagaaagggaagtcagaggcaggtcttgaatgccacactgagaagtttgtgctgtatcgttgaggtacaaggagccaagacaggattttggcatgtcacttcagcaattaaaaataaaaacaaccagaagtgtgcacgtctgatgaagggaaatggtccagcctggaaagagttaaccccttccttctctcaaaatcttcataagcccaagcactctgaaaaataataagctatcatttatcagcaaggttctgcaaggtagcatttaaaactgaaaaaaggcaataaatc

SEQ ID NO: 364864 - DNA, 531 bp, Homo sapiens
gttgcctgccaaataaaagtctttatatgtcaactgctaacatgaacgaattattcaaactttccaactgttacagtttgcaagaattggacaataactgagattattgtcagcattaaataaaacaacacatatacagcctgacacatactgggtgcttaggaaatagaaagacattccctcccctttctttacttcccttttcctccctctggagaggtcttcatttcacaagaagatgaatcarcattctaggaacctggcaggagttgctgtgagaggtgcaccctgcccagtcagtatgtggccttggtcttggctccaagacttaaaatttaaaaaagaaatatgactggcatgcccctcactcctaatttcccatttgctattcatgccttaccaattccatgaagggcagaggacttccaaggaaaaggatattggggagaggagggaaagagcagtatgggaagatctcatgttttttctctgcagctccaagagcttatgactagtttaataaaaaaaaaa

SEQ ID NO: 364865 - DNA, 531 bp, Homo sapiens
gttgcctgccaaataaaagtctttatatgtcaactgctaacatgaacgaattattcaaactttccaactgttacagtttgcaagaattggacaataactgagattattgtcagcattaaataaaacaacacatatacagcctgacacatactgggtgcttaggaaatagaaagacattccctcccctttctttacttcccttttcctccctctggagaggtcttcatttcacaagaagatgaatcagcattctaggaacctggcaggagttgctgtgagaggtgcaccctgcccagtcagtatgtggccttggtcttggctccaagacttaaaatttaaaaaagaaatatgactggcatgcccctcactcctaatttcccatttgctattcatgccttaccaattccatgaagggcagaggacttccaaggaaaaggatattggggagaggagggaaagagcagtatgggaagatctcatrttttttctctgcagctccaagagcttatgactagtttaataaaaaaaaaa

SEQ ID NO: 364866 - DNA, 600 bp, Homo sapiens
gccataactacagggatggacattagcaatgctggaattaggtcaactttggtgagaagcctatgttattgaacccatgtgtgagcgtctgtccaacccatcaatagcacagaccaatgctgagcctagggtattgcatcatttccaaggaaggtattcagcctctggtttgatcagaccccttgaatcatatagggggcaatgatttatccttgctggaagaggtatcaatatgtatatggatttgacttccctgaccacagtgtttctataacaccacatcagtagatatcagaataccttattctccatcatgaaatcctgcacgacattgcttatgatgaaggagttcattttatatgaaagaagtggaacagtggcctcatgaccatgaatcttcccacgaactttatcactcagaagcagacagtctaatagaatggtaaaakaacctattgaagagtcagttatggtgcttgctagaaaacaatacttgcaaagttgggatgctatgctacaagatgcaatatatgttctgaactactagttcacatttgatatcatttttctatagccagaattcttgggtgtgagaaccaa

SEQ ID NO: 364867 - DNA, 527 bp, Homo sapiens
tacttcagttacaacaaagtaataaggtttggctytcctttgaaaaatcctttggaaaacatcacagaatgagagcacattacaatcagggaagactacaggaataagattgacagccttattttaaaagctggaattaagtcttgccaacttgctcattaggtattttttttatacatgaaaatgaagtaatggggtgttttctttttttttgctttctgtcctaggctggagtgcagtgcattgcagcaggctcccccaggctcaagcagtcctcccacctcagcctcttgagtacctgggaccacaggtgctcaccaacacacctagcttgtttttaattttttataaagacaaggtcttgttacgttgcccaggttggtcttgaattcctggcctcaagcaatcctcccacctcagggctcccaaagtgatggggttacaggtgtgatccacttcacctagccagattgtaagatttttaatgtactttaataaacctttcattttcccagagcacagaaatt

SEQ ID NO: 364868 - DNA, 452 bp, Homo sapiens
cccaggccagtcccagcccaggccagccggcagccagccaggacaaaggctcccaagcccatctgacagatggaaaaattgtggtcctcaaagaagataggacccgccccactggcttggcttagcagcctattgctctctggccacatctctccgccttgcccctaccttgcttcccagaatcctccacagggccagtaggtctccacctgccagcctgtccaccagcaaccccctaccccagtgtcccctgacagtacttatcctcaccaccagtcatccagtcattcattcattcacttttgtctgcccaactagcctatcagcccatctcccamcaaatccagcccattgccaagggttatgggggcctcaaagaggaaagagcaaggcctgtgcccagcaagcatttaaggagtcccttctgtgtgccagatagtgtggaaggtgca

SEQ ID NO: 364869 - DNA, 452 bp, Homo sapiens
cccaggccagtcccagcccaggccagccggcagccagccaggacaaaggctcccaagcccatctgacagatggaaaaattgtggtcctcaaagaagataggacccgccccactggcttggcttagcagcctattgctctctggccacatctctccgccttgcccctaccttgcttcccagaatcctccacagggccagtaggtctccacctgccagcctgtccaccagcaaccccctaccccagtgtcccctgacagtacttatcctcaccaccagtcatccagtcattcattcattcacttttgtctgcccaactagcctatcagcccatctcccaccamatccagcccattgccaagggttatgggggcctcaaagaggaaagagcaaggcctgtgcccagcaagcatttaaggagtcccttctgtgtgccagatagtgtggaaggtgca

SEQ ID NO: 364870 - DNA, 567 bp, Homo sapiens
atttgcgatctaattgagctggcgggggattaggcggcagaatgcaattacaggggctggagcggggccagggcactgacaccccaagatgtggcctggcccaggtgacytggcccagtcagtctctggccagagacactagacttggggttgggagtatgggtacagggaaaggttgggaccagactgcttctcaacatacagaggactgtggggttccagctccatgtaatacccagaagcaagaagttttcctgggaatcctcccccagggaacaagcctatggactctcatctggggatctggcagccagacacacatgctctcacaggctccgttcatacatgtgcaagcatgtgctcacactctcaggtaagccccacatatccacattcacctgcataggggcaggcttcccagcatggagacacacaggctggccctttgctgccactggctccaccaaatggtgggttgtgggggcacaaccccctccctccagaaaacccacccatgaccttaaaatccttttattcccgtaatcacatgctaccattgccgtggat

SEQ ID NO: 364871 - DNA, 567 bp, Homo sapiens
atttgcgatctaattgagctggcgggggattaggcggcagaatgcaattacaggggctggagcggggccagggcactgacaccccaagatgtggcctggcccaggtgacctggcccagtcagtctctggccagagacactagacttggggttgggagtatgggtacagggaaaggttgggaccagactgcttctcaacatacagaggactgtggggttccagctccatgtaatacccagaagcaagaagttttcctgggaatcctcccccagggaacaagcctatggactctcatctggggatctggcagccagacacacatgctctcacaggctccgttcatacatgtgcaagcatgtgctcacactcycaggtaagccccacatatccacattcacctgcataggggcaggcttcccagcatggagacacacaggctggccctttgctgccactggctccaccaaatggtgggttgtgggggcacaaccccctccctccagaaaacccacccatgaccttaaaatccttttattcccgtaatcacatgctaccattgccgtggat

SEQ ID NO: 364872 - DNA, 478 bp, Homo sapiens
gagactgtgcactagagtgctttccctcctgtcttcctgggcaggaagaggaagaaaatgtctccagagggagccccctccccaaccccctggtttaaaggctgtgagttaggggactctgtacygtttagccaacccatagtgccttcctccctcccaccttcctggaggggacagttgctcagtgctcaggtggcccagctgtcagctggttgggccggcaggacctgtgtccataatcctctctcttactcggcagtagcagtagcccccactagctctgccagccccaacaccagcccaaaaccgacctagagggaggcagcagagacactgccagggtgccacgggaagggaaaaggctggtcatccatgctggctaaccctatctcaagctgactagatagaaggacacctaggcagcccagtgcccactgaccgtgtctgctcccccgcccccatgactcgtagcctcagc

SEQ ID NO: 364873 - DNA, 553 bp, Homo sapiens
cagaattgagaacaagtggctcagggcagggagaggtgtgcctgggaaaatggcagttgtcactcctcgcatccttagaagttgggaaaggaacatggtacattcaccaaggctgctgctgctctttcctgtacagcagtcacaggaggcctgggctggacactcaatggcctcttcttggcttttccaaatgggatcaaccatttgctttcagagtacaatgttgggcaatcaggctcctcrgctctggaaaaaaccattctaccaataacaacttacacaggacgttaagaacaaacacacaaaccaccactcaatcaaggaaaactattaagctgctgtcttggcactaaggtattcatatagttttacatctgctaagaggcagattacgctgtgtctctgatcagataaagatccacaaatagtttaatttaatgaaaagtgactgctcatcacaaaaatgtctgcctttgccttacccagaccaggagtagacatagaaagagcaaagctggttggtgattgtattatacattcagccagaggacaa

SEQ ID NO: 364874 - DNA, 566 bp, Homo sapiens
ggatctttaaaaagtttaagtcagatctcccagcttaaaacccactgaaggctgccatggcactttgcataaaccctgrcccctcagggggcctgcaaagcccagccctataggcataccctttgggcttacaaaggccttcccctcaccttcaagaggcacgttctttgcagccttggagcctttgcagccttggagcctctgtgcctgctgtgccctctgcctggcatgctctgccccctctcctttgcttggctggcttttcctggtctttcaggctccagctcagatgtcttctcctcagaggcctcccctgacgacaatagctcatatggacccctccctgaagtcagtctcacatgacctactttaatgtcctcatggctcctcatgctctctgaagtgatcatggtcaactatttgtttacttgaacgtgactagaacgcaagttctgggaggctggggacaagactgtgctctcgtgttcccatggtctaaatagtgcctagcacgtagtaggcactcagtaaacatctgaacaatatgtagttggtgtgacctggat

SEQ ID NO: 364875 - DNA, 561 bp, Homo sapiens
aaatgtaaaatgagacaaagacaaaaataatgtataacaattgtaaacatatatgcacccaacaccagagaccccagatatataaagcaaacattattgawgggagagatagactccaatataataatagatgtggacttgaacatcctgctactctcagcatggaacagattatctagacagaaaattaataaagaagtgttaaacttaaactatagtgtagaccaaatggacctaacggacatttacagaacatttcatccaacagctgcataatacacatttttctcatcagtacatggtatgaatattcttcaggactgatcgtatgttatcccacaaaacaagggtcaacaaattttttaaaaatctaaatcatatcaagtatattttttgactgtaacagataaaattagaaataaataacaagagaaactttcaaaattgtacgaatacatggaaattaaacatgttcctgagtgtccaatgggtctatgaagaaataggccaatgggtctataaagaaattaagaacaaaatttaaacataattttttttttg

SEQ ID NO: 364876 - DNA, 561 bp, Homo sapiens
aaatgtaaaatgagacaaagacaaaaataatgtataacaattgtaaacatatatgcacccaacaccagagaccccagatatataaagcaaacattattgatgggagagatagactccaatataataatagatgtggacttgaacatcctrctactctcagcatggaacagattatctagacagaaaattaataaagaagtgttaaacttaaactatagtgtagaccaaatggacctaacggacatttacagaacatttcatccaacagctgcataatacacatttttctcatcagtacatggtatgaatattcttcaggactgatcgtatgttatcccacaaaacaagggtcaacaaattttttaaaaatctaaatcatatcaagtatattttttgactgtaacagataaaattagaaataaataacaagagaaactttcaaaattgtacgaatacatggaaattaaacatgttcctgagtgtccaatgggtctatgaagaaataggccaatgggtctataaagaaattaagaacaaaatttaaacataattttttttttg

SEQ ID NO: 364877 - DNA, 561 bp, Homo sapiens
aaatgtaaaatgagacaaagacaaaaataatgtataacaattgtaaacatatatgcacccaacaccagagaccccagatatataaagcaaacattattgatgggagagatagactccaatataataatagatgtggacttgaacatcctgctactctcagcatkgaacagattatctagacagaaaattaataaagaagtgttaaacttaaactatagtgtagaccaaatggacctaacggacatttacagaacatttcatccaacagctgcataatacacatttttctcatcagtacatggtatgaatattcttcaggactgatcgtatgttatcccacaaaacaagggtcaacaaattttttaaaaatctaaatcatatcaagtatattttttgactgtaacagataaaattagaaataaataacaagagaaactttcaaaattgtacgaatacatggaaattaaacatgttcctgagtgtccaatgggtctatgaagaaataggccaatgggtctataaagaaattaagaacaaaatttaaacataattttttttttg

SEQ ID NO: 364878 - DNA, 514 bp, Homo sapiens
tacaatatatcaagagagttttcagtatttaaaaggaggaaaagagagacctctcattcaagaagacgtataaatggcaaataaacccatgagacaatgttgtacatcattacccattagttaaatgcacgtagctgttaaagtgtggaaaaatgccgacaacaccgaatgcctattgagaatacaaagaatctggggtgctcacacactgctggtgggaatgtacaaacagtctggggaaaaatttggtagtttctttaaatactcaacatgatttcacaatgcagctrttgccctcttgcgcttttatctcaggtaaatgaagatttatgctcacacagaaacctgcacacacatattcaaagcagctttaggtgtcatctgccaaaactagtatcagtccaaataccctttaccaggtggttaattaagcaagctgtggtatatccacaacatgacatactacccagcgataaaagggaacaaactattggtataaacaacaactgggata

SEQ ID NO: 364879 - DNA, 309 bp, Homo sapiens
agtagggtggagaaatgaaaaccagggcctgtgcatcccctgaaaatcacagtgagtggaggataggcagggaggagctcagagactgaaaaacaacagggatccctgctggtgaggccccagcagcaaacacagaagaacaattcacagaaacaaacgctcttgctagacttcagttggcatgtgtatgttatacagtatgtgttatacatattccctagtatataagcctgttcatacttatgagcatgtgyattatctatagctattatacacagaacgagagagagagagtgtgaattgataatt

SEQ ID NO: 364880 - DNA, 562 bp, Homo sapiens
tattatgcaaaattattcagaataaaacatgcatattctaaaaaaaaaaaggtaacatgcggacagtgttgcaaaactccaggtgggagctgtgactgtcatgtaaaaatgacatatgtaaaagttataaaatatacaactaaagtatttgaaggagaaaggtgtcatttgggggagatttattctcaaagtcataaggaaaaaaaaagggaagtgattccacctgttccttctagaggttctcatttgcattgccatgtttaatggcaatttatgtgctgtattacaaacaatttaaataaaaaaaaaaagacgacaagctcttgccttctggaaaatagaccagttagaaaaatgaygcacagttgcagaaataaatatgttcattgagttgttagaaccatttaagttcaaaaacagcaataaaggaaggcacataaaagaagtcatatttccttttatttattcgcatgatatatacttaaatctttaagaatctattcatttattctatcttgagataaaactaatctacaacaaaatgcataatcttaagtttaca

SEQ ID NO: 364881 - DNA, 579 bp, Homo sapiens
tactatgatgatgttccataaataagagggacctttaaattccatacggtttgctactggattgcaattaatattctgcagaaaacactctgctgtagctgttcaggaaatatttcttaaaaatagtggaaaacatttagatttcagacagctaactttttatctcccaaaatagcagaccaaaactcttattgcctgtgtaagatatttacacaacttcttatatgcttattcgtatgaaagcaatgttgtctagcttgtatgtctgccttttttctcatgtgctatttgactaccatctgtattctgaacttaaggcttaaaaactttaatcacaaactagaatagataaggtgtgttccagggctgccatagctactacatgtgggaagtgttaatgaacagattaaaatggcccagaaatcagtacatgcttccattttcgctgaagagagagtgagtaaaagcaacagtttcttgtgcaactsaccacactgtgcctgctcttagattctcattttttttccctgagactttcactcagaaatccctaaactaattgatatattttcatcacct

SEQ ID NO: 364882 - DNA, 520 bp, Homo sapiens
tttcttactaagtttggagaattctttgtgtagtcaagatattagtgctttgtagaatacatggtttgcagctattttttctcagtctgcggcttgtcttttcactttcttcatgtgggtttcaacacatggcaaaagcttttaattttgatgaagtctagtttatgggctttcccataaaggccagtgcttttgctgtcaactctaaggattctttgcctagctgtactttacagaggagtccttctatacatattcctaaaagttttacagttttacatattacatttaagtctcttatcccttttgagttagtttttgtatatggcatgagacagaggttgaggttcacggtttgcctggcagttcgtgtatccaactgttcagtagcatttgttgaaaggactcgcctttctccattgaaytgcttttctgccttcatcaaaaactagttagatgtatttgtgtgggtctatttctgagctctctgttctgttacactgatgtgtgtctagtcttc

SEQ ID NO: 364883 - DNA, 578 bp, Homo sapiens
cctagcctctgcaagtctgcctcttcctcaaagagatccacctgtgaaagcacagccttgggcctgatctgtttccatcttttctctttttttccatcattttcttgttctcctgaaaccacaaatacagttctatttgaagtcagacttaatgagttactttccacttcaataatattcatagactctccatgccctacagaagtcgctgattttattcatatatttatatgaatacattatatatatttttatgaataaatatgttgttcacatatttatttataatagaaactttccaccaaaaggaatcttgtgcagaaacccccagtaggaaggaggggagtaaattggggcagtccagctgcataggagagattccaatcctgatgaccagcccccatctcaccctcagaaaaaccctggggtcctcacagtgtgatcgctggacactgcagcatgaatctctgcctatggccatagaccagcactcgaggcatttgatcatcatctaccttcagtgattcacacccctcaatcctccagacctcttttkttctctttgcacctcagtttat

SEQ ID NO: 364884 - DNA, 615 bp, Homo sapiens
ttatttatttgcattcttctgattcctagtcagcactggaatattttttaaagtttattgggttagggttatttatatatatatataaatttatatatgtatatttattattagcattccaataactttagtaattagttatatatatgttattatataatatataacacataatatattatataataacatatatawtataatatatataatatattatatataatctatatatttaattagttatgtatataaatttatatatatataaatttatataaatatatatttattattagcattatgtctttctctatatatatctataatagatatataaatatctctatataatatataataataaatataaatataaatatctctctctatatagagatagatataaaatgtatctgcatagctcattttctcatagatctgttggcttattagtgttgcatttcttctctcttccagtagcagagtatgattatttcatgtgtatattacatggagaatgcaactatttttggttgtctgaccctttattttacatctttaatagaataacttttagtgtgcatatagcaaaattgatcaatgttttttcat

SEQ ID NO: 364885 - DNA, 615 bp, Homo sapiens
ttatttatttgcattcttctgattcctagtcagcactggaatattttttaaagtttattgggttagggttatttatatatatatataaatttatatatgtatatttattattagcattccaataactttagtaattagttatatatatgttattatataatatataacacataatatattatataataacatatataatataatatatataatatattatatataatctatatatttaattagttatgtatataaatttatatatatataaatttatataaatatatatttattattagcattatgtctttctctatatatatctataatagatatataaatatctctatataatatataataataaatataaatataaatatctctctctatatagagatagatataaaatgtatctgcatagctcattttctcatagatctgttggcttattagtgttgcatttcttctctcttccagtagcagagtatgattatttcatgtgtatattwcatggagaatgcaactatttttggttgtctgaccctttattttacatctttaatagaataacttttagtgtgcatatagcaaaattgatcaatgttttttcat

SEQ ID NO: 364886 - DNA, 561 bp, Homo sapiens
gttatagtcatgtatccaacaccaaaatcatggtatggaggcttctcattcctccacaatttcctccatatccattttcagtccattttttctccctttcccttgctcctggcaaccagtgatctgatttctgtcaccatagctttctctcttccagaatttcatataaatggaatcatagggtacacacatttttgtctctggtttctttcactgagtgtaatgattctgagattcatccatttggttccctgtatcagtagttatgaactttttgttgctcaatggtcctccactgtgtggctttggcaccatttgtctatcttatcaccagctgactcaatggtcctccactctstggctttggcaccatttgtctatcttgtcaccagctgatgggcatttgggttgtttccagtttggggctattatgaagaaagtcttacgaatgttccatcccaggtctttgtgtggaaatgtgtttttatttcactcgggtgaacacttaggggtggaattgttggatcacagaataggcacatactttttggtgaatgggta

SEQ ID NO: 364887 - DNA, 639 bp, Homo sapiens
gtgccgcttttgtattcccagtttgtcttttcccggaagtcagcatgtcactttcagttttaaaaggctatttaactggtattcatcttgccgcctccctgacccatcccatccccatgccttttttccagtagtgcatgcctctcttccatcccttgtatgagagttaaattatactttacttgaattttcttctatctctacttgatttacctcatttccaccaataaacaactgacaaaacttgtttattaatgttctcccttcatgtttccggtaacatatgacccatagtcttgctaaaattaagaggaaacacatcacatctctcactttacttttgctctatctacaacgataacttgttcaatgackttgaaaatttgctcctatttattcataacattggagaaaacaaatattttattccatacaattgtcatttcctaccagcctaccaccacgcccacagtgagataagatatcggctgctcttctgcagcacctcttacttcctgccttgacatgacttcactgtgtcacacttctttcaaatgttagtagatgcttgatagtatcacagactcgaatgtgatcatgtaagagatcactgtgtgaattccatgttctgctaaattt

SEQ ID NO: 364888 - DNA, 639 bp, Homo sapiens
gtgccgcttttgtattcccagtttgtcttttcccggaagtcagcatgtcactttcagttttaaaaggctatttaactggtattcatcttgccgcctccctgacccatcccatccccatgccttttttccagtagtgcatgcctctcttccatcccttgtatgagagttaaattatactttacttgaattttcttctatctctacttgatttacctcatttccaccaataaacaactgacaaaacttgtttattaatgttctcccttcatgtttccggtaacatatgacccatagtcttgctaaaattaagaggaaacacatcacatctctcactttacttttgctctatctacaacgataacttgttcaatgacgttgaaaatttgctcctatttattcataacattggagaaaacaaatattttattccatacaattgtcatttcctaccagcctrccaccacgcccacagtgagataagatatcggctgctcttctgcagcacctcttacttcctgccttgacatgacttcactgtgtcacacttctttcaaatgttagtagatgcttgatagtatcacagactcgaatgtgatcatgtaagagatcactgtgtgaattccatgttctgctaaattt

SEQ ID NO: 364889 - DNA, 639 bp, Homo sapiens
gtgccgcttttgtattcccagtttgtcttttcccggaagtcagcatgtcactttcagttttaaaaggctatttaactggtattcatcttgccgcctccctgacccatcccatccccatgccttttttccagtagtgcatgcctctcttccatcccttgtatgagagttaaattatactttacttgaattttcttctatctctacttgatttacctcatttccaccaataaacaactgacaaaacttgtttattaatgttctcccttcatgtttccggtaacatatgacccatagtcttgctaaaattaagaggaaacacatcacatctctcactttacttttgctctatctacaacgataacttgttcaatgacgttgaaaatttgctcctatttattcataacattggagaaaacaaatattttattccatacaattgtcatttcctaccagcctaccaccacgcccacagtgagataagatatcggctgctcttctgcagcacctcttacttcctgccttgacatgacttyactgtgtcacacttctttcaaatgttagtagatgcttgatagtatcacagactcgaatgtgatcatgtaagagatcactgtgtgaattccatgttctgctaaattt

SEQ ID NO: 364890 - DNA, 470 bp, Homo sapiens
tccaagtcgagagttgaacagtggctaccaggggctaggaagagtgtgggggttgggggggggcaaggggggatggggggagatggagggcaaggaaagagggggctgctttttaggccattttsaaaccacaggtgggctgagacagggaaaactaagccaggtcttctcaggaatcctttccagtggatgggggacatccagcttctttagctgtcttgagctgagactaattctctctgtagcagggcagcacaaagagaattacggtaatttatgtaccatttaaagctgacaaaagggacttggcagggcctgagggcggggatgtcagtaatacttaaaggtccagagaaccatctgggagattttagcatgaaataccaagtttcttgcttcctgccagctgatgccgccgtcccaagactgctgtgttttagaggaattgcgcttttcactgcctgtgcaaa

SEQ ID NO: 364891 - DNA, 470 bp, Homo sapiens
tccaagtcgagagttgaacagtggctaccaggggctaggaagagtgtgggggttgggggggggcaaggggggatggggggagatggagggcaaggaaagagggggctgctttttaggccattttgaaaccacaggtgggctgagacagggaaaactaagccaggtcttctcaggaatcctttccagtggatgggggacatccagcttctttagctgtcttgagctgagactaattctctctgtagcagggcagcacaaagagaattacggtaatttatgtaccatttaaagctgacaaaagggacttggcagggcctgagggcggggatgtcagtaatacttaaagktccagagaaccatctgggagattttagcatgaaataccaagtttcttgcttcctgccagctgatgccgccgtcccaagactgctgtgttttagaggaattgcgcttttcactgcctgtgcaaa

SEQ ID NO: 364892 - DNA, 470 bp, Homo sapiens
tccaagtcgagagttgaacagtggctaccaggggctaggaagagtgtgggggttgggggggggcaaggggggatggggggagatggagggcaaggaaagagggggctgctttttaggccattttgaaaccacaggtgggctgagacagggaaaactaagccaggtcttctcaggaatcctttccagtggatgggggacatccagcttctttagctgtcttgagctgagactaattctctctgtagcagggcagcacaaagagaattacggtaatttatgtaccatttaaagctgacaaaagggacttggcagggcctgagggcggggatgtcagtaatacttaaaggtccagagaaccatctgggagattytagcatgaaataccaagtttcttgcttcctgccagctgatgccgccgtcccaagactgctgtgttttagaggaattgcgcttttcactgcctgtgcaaa

SEQ ID NO: 364893 - DNA, 531 bp, Homo sapiens
gtgtgaatcctcttcttcatagcagtgcattgaattgtagtttataagagactcctagtgtttatatgtggggctaaacatctcarataaagcaaggatatcccagaattaatgacatatttttctaactccctttctttgtgtgtgggtgtgtgtgttcaaagtacttttttctaggttgaaattcagtctttgtaatttcacactgtatactgtgggctattggtatgtgttgcatacagatataaaagcttatatgtgtaatttttgttaatttattaggttttatttttagagcagtttgcacagcaaaattgatcagaagacatagtttccccgtaccccctgcccccacacatgcacaacctccccactgtaagcatcctcaccagatgctttcagcatggtgtgtttgttacatttgatgaacatgcattcatgctgttcatgcatgatgaacattgattcatgctgaattaccaaagtccatagtgcacgttagggctcactccggctgctatttactctgtg

SEQ ID NO: 364894 - DNA, 531 bp, Homo sapiens
gtgtgaatcctcttcttcatagcagtgcattgaattgtagtttataagagactcctagtgtttatatgtggggctaaacatctcagataaagcaaggatatcccagaattaatgacatatttttctaactccctttctttgtgtgtgggtgtgtgtgttcaaagtacttttttctaggttgaaattcagtcttygtaatttcacactgtatactgtgggctattggtatgtgttgcatacagatataaaagcttatatgtgtaatttttgttaatttattaggttttatttttagagcagtttgcacagcaaaattgatcagaagacatagtttccccgtaccccctgcccccacacatgcacaacctccccactgtaagcatcctcaccagatgctttcagcatggtgtgtttgttacatttgatgaacatgcattcatgctgttcatgcatgatgaacattgattcatgctgaattaccaaagtccatagtgcacgttagggctcactccggctgctatttactctgtg

SEQ ID NO: 364895 - DNA, 531 bp, Homo sapiens
gtgtgaatcctcttcttcatagcagtgcattgaattgtagtttataagagactcctagtgtttatatgtggggctaaacatctcagataaagcaaggatatcccagaattaatgacatatttttctaactccctttctttgtgtgtgggtgtgtgtgttcaaagtacttttttctaggttgaaattcagtctttgtaatttcacactgtatactgtgggctattggtatgtgttgcatacagatataaaagcttatatgtgtaatttttgttaatttattaggttttatttttagagcagtttgcacagcaaaattgatcagaagacatagtttccccgtaccccctgcccccacacatgcacaacctccccactgtaagcatcctcaccagatgctttcagcatggtgtgtttgttacakttgatgaacatgcattcatgctgttcatgcatgatgaacattgattcatgctgaattaccaaagtccatagtgcacgttagggctcactccggctgctatttactctgtg

SEQ ID NO: 364896 - DNA, 536 bp, Homo sapiens
aaaagcaatctatatttccaccagaacataatcaagtatcctttcatgggcctaagtatttgcaataacacctgttttgccactaatacagctatctacactatagggggcaagagtacatattccttaccttgttatataagtctaatagacccggatttatcttaaacataatgttaccgcgtttgcttgggactgacatctcataaacgagaacttaacactttcgtgttaccacttgaatgggacatttccatcaaaatggctgatatgaattctgagatgcaaatccatgggacagttatttctgtgaacctgaatagccccagtgagacatattttattgtagaaacttgcctattggtacctgctggctaattggactagatcctattatctagatcaytaaattagctcccatttaatctttaaccagactgccctctttgttcatcacagccacactattatttctgatttaagttttctagggaccagacaagccaaaaagtccagaaaaatgtgttagaactaca

SEQ ID NO: 364897 - DNA, 537 bp, Homo sapiens
gagtgtctcacacctgtaatcccagcactttgggtgaggaggcagatcacctggaggtcaggagttcgagaccagcctgggcaacatggtgaaaccccatctctactaaaaatacaaaattagctgggtgtggtggtgccctcctgtaatcccagctgctcrggaggctgagacaggagaattgcttgaatccgggactcggaggttgcagtgagctgagatcacaccatgcacttcagcctgggtgacagagggaaactgtgtttcaaaaaaaaaaaaaaagtacatattgtctacaaatcaagagtttgcttttgttaacaaagttactgaggcctacattccaaatgttaggcttccattcctgtaggaaactgagagttaaataatcattaaatcagggactagagaggatttatgttttctaggactataacagtttcttagaatcttttggcgctcactgtattctaatactgctgtttggccctctgaaaccctaattttaaagagagaaatgaatcgtaagggaaggca

SEQ ID NO: 364898 - DNA, 580 bp, Homo sapiens
aaattatttataatttaacatcaaacaaaaacttggccacttcatagaaaaagaaacaagagtggctatgatcatatgaaaagattctaaatatctttagtcatcagaaacatgcaaattaaaaactaccacacacccattagaattgttaaaattaaaaattktacaagcaagtattcataatgaggtggagcaattgggactctcatgtcttgctgacaagagtgtaaaatggtacaattgctttgataattatttggaaatttcttataaaattaaacatacagtaagtcctcacttaacattgttggtaggttttgtaactttaagcaaaatgatgtagagcaggtcctcgaatgatgtaaactccttgtttccttataacattgatgagaagaaaaattgtctttgttttgagttttgcttaaagttgcagttttcaagaatctcctgatgatcttaagtgaggacttactgtacacatatgctatggtccaacaattctattcctaagtatttaccaagataaacaaaacaaaatttaaaaaaactacccatatccacaaagcactagtttaga

SEQ ID NO: 364899 - DNA, 580 bp, Homo sapiens
aaattatttataatttaacatcaaacaaaaacttggccacttcatagaaaaagaaacaagagtggctatgatcatatgaaaagattctaaatatctttagtcatcagaaacatgcaaattaaaaactaccacacacccattagaattgttaaaattaaaaattgtacaagcaagtattcataatgaggtggagcaattgggactctcatgtcttgctgacaagagtgtaaaatggtacaattgctttgataattatttggaaatttcttataaaattaaacatacagtaagtcctcacttaacattgttggtaggttttgtaactttaagcaaaatgatgtagagcaggtcctcgaatgatgtaaactmcttgtttccttataacattgatgagaagaaaaattgtctttgttttgagttttgcttaaagttgcagttttcaagaatctcctgatgatcttaagtgaggacttactgtacacatatgctatggtccaacaattctattcctaagtatttaccaagataaacaaaacaaaatttaaaaaaactacccatatccacaaagcactagtttaga

SEQ ID NO: 364900 - DNA, 543 bp, Homo sapiens
  misc_feature (1)...(543): n = A,T,C or G
gtgctctaattatttccctaaaatgctaagtaatcataaatgtatgttggagtaaccagaaaagttatcaggtatatactagttaaacatttttctccccctttttttattttctaagatgactaaaatagatgaagtcacttcccaattatcagatcatgcaagttgtctcccaggagagcagtatacctgggcagaaaggtaagcaacatttctaagagagaaaggacagagatcaccaaacatttcccttttgaggtanacatggaccaggtgggtgattattttgttaacctaaataacaaaaggggctctctaatattttttaaaagctrcttatttggaaataggatactgcaatggggataatcctgccataacaaactatacgcatattcagagaataaagaagacaaaggtttttttaaataaaaaatgaggaggattacataattgttttaaaattgttatctttggatacaaagatgaataataagggtgactagagtctgtggttggacagacagttgctcaatagatgtc

SEQ ID NO: 364901 - DNA, 566 bp, Homo sapiens
atcctactttcccacatgtgacagacttcttatgccttcacgcttagtggactcccactgcttctgagacagtcctgtggcagaaatctgaaatatgtacagaacaatggaggtgagataccaccaacttcaggtcatgttaacatggaacttttcaatgcattaaaggtcaaagttaatttggtggtcaaaaggatgtgatattgggcagcagaaaacgtcaatcaaaatccatcccattaattactcacatattctggtgccccaaattaaatctcctctttagaatatttcaaaatagtggtcaggtacaatctcaataaaatacttatttaagaaggctgttgtaacaaattagtcttctatagaagctgtcttatcatctccctcttttactawccttactagctttcctttactttcagtgaatacttcagctgatctagaatgctaaccttgtggagtggcccagactgccatatctgaaagatctgggctattggtttcattgtccttgctgccaggtatggttgctgaaaatacctaaacaaggttattacaggcca

SEQ ID NO: 364902 - DNA, 566 bp, Homo sapiens
atcctactttcccacatgtgacagacttcttatgccttcacgcttagtggactcccactgcttctgagacagtcctgtggcagaaatctgaaatatgtacagaacaatggaggtgagataccaccaacttcaggtcatgttaacatggaacttttcaatgcattaaaggtcaaagttaatttggtggtcaaaaggatgtgatattgggcagcagaaaacgtcaatcaaaatccatcccattaattactcacatattctggtgccccaaattaaatctcctctttagaatatttcaaaatagtggtcaggtacaatctcaataaaatacttatttaagaaggctgttgtaacaaattagtcttctatagaagctgtcttatcatctccctcttttactatccttactagctttcctttactttcagtgaatacttcagctgatctagaatgctaaccttgtggagtgrcccagactgccatatctgaaagatctgggctattggtttcattgtccttgctgccaggtatggttgctgaaaatacctaaacaaggttattacaggcca

SEQ ID NO: 364903 - DNA, 516 bp, Homo sapiens
  misc_feature (1)...(516): n = A,T,C or G
gcataagccatgcactnnggctctcaatcatatatgtgtgctatcccaaagtannagatntagttctcttagtctgaaccagtgtgagggagcaaagtatgctttccttgtttgccctccaaactctcaaacccatagatcacagattgaaagagmtgaaattaaacagctaaagcagctttttctatactagcattcttccatctaagttatgatttaagagatttttcccaaagacagaggaatctagatgaacttttcaaatccaaagagctcatatagcacatattttatacatgcagagaatcatttgtgctattttagttaaacttagaatgttgggaatattgacatggatcttaccagataaaagtataaatgcagtgaatactctgcttggtgtatcagtcaaagtaatgaaaatcagtctgacacaaattactaatctctccatatgtgatatgagggtcagaaagctcatgttttatggctgaattgatacgttttgccaatata

SEQ ID NO: 364904 - DNA, 516 bp, Homo sapiens
  misc_feature (1)...(516): n = A,T,C or G
gcataagccatgcactnnggctctcaatcatatatgtgtgctatcccaaagtannagatntagttctcttagtctgaaccagtgtgagggagcaaagtatgctttccttgtttgccctccaaactctcaaacccatagatcacagattgaaagagctgaaattaaacagctaaagcagctttttctatactagcattcttccatctaagttatgatttaagagatttttcccaaagacagargaatctagatgaacttttcaaatccaaagagctcatatagcacatattttatacatgcagagaatcatttgtgctattttagttaaacttagaatgttgggaatattgacatggatcttaccagataaaagtataaatgcagtgaatactctgcttggtgtatcagtcaaagtaatgaaaatcagtctgacacaaattactaatctctccatatgtgatatgagggtcagaaagctcatgttttatggctgaattgatacgttttgccaatata

SEQ ID NO: 364905 - DNA, 516 bp, Homo sapiens
  misc_feature (1)...(516): n = A,T,C or G
gcataagccatgcactnnggctctcaatcatatatgtgtgctatcccaaagtannagatntagttctcttagtctgaaccagtgtgagggagcaaagtatgctttccttgtttgccctccaaactctcaaacccatagatcacagattgaaagagctgaaattaaacagctaaagcagctttttctatactagcattcttccatctaagttatgatttaagagatttttcccaaagacagaggaatctagatgaacttttcaaatccaaagagctcatatagcacatattttatacatgcagagaatcatttgtgctattttagttaaacttagaatgttgggaatattgacatggatcttaccagataaaagtataaatgcagtgaatactctgcttggtgtatcagtcaaagtaatgaaaatcagtctgacacaarttactaatctctccatatgtgatatgagggtcagaaagctcatgttttatggctgaattgatacgttttgccaatata

SEQ ID NO: 364906 - DNA, 590 bp, Homo sapiens
  misc_feature (1)...(590): n = A,T,C or G
ggtaaagacttacctctcactctaacacaaacaaaattacaaagagacttaaagaaaaaaaaagttaggatagtatatttctttatccttrcactgctataaaganatacctaagactgggtaatttataaagaaaagagggtaaagtggctcacagttatgcaggctgtacaggttgcatggctggggaggtctcagggaactttgaatcatggcagaggttgaaagggaagcaggcacattttacatgacccagagcaggaggaggagagagaagggagtggtgctacacacttttaaacaactagatctcttgataactcactcactattatgagaccaccaccaaaggatccaatcctttgatccaatcacctcccacctggccccacctccaacactaggaattataatttgacatgagatttggtggggggacactgacccataccatatcagatagtttaacgctatctgaataaaaatgtaaaaaaattcttacctttctaaaaccacattatacttacttttggatgaagatttaaaaagctgatttattctgaaagtttattcactaagttgaagcttgt

SEQ ID NO: 364907 - DNA, 457 bp, Homo sapiens
catagactttaaaccagcaggtataaaaaagacaaagaagggcattacataayagtaaggggttcaattcaacaaaagatctaactattataaatatacatgcaccaaacacaggagcaccaagatttataaagaaacttctgaaagacctatgaagagagttagattcccaaacaaaaatagtgggagatttcaacaccctactgacagtattacacagatcatcaggcaaaaaaattaaaaaaaaaaaaaattcatgagctgaactcaatacttgaccacatggacaaaatgaaaatctacagataccctaaaacaacagaatatatattatcctctctaccacatgacacgtactctaaaattgaccacacaattggccacacaacaatcctcagcaaattaaaaaaacaaaaaaaaccaaacaaattatatcagccacattctcagaccatgg

SEQ ID NO: 364908 - DNA, 445 bp, Homo sapiens
atggcagaaggtgaaggggaagcaagaaaccctcttcacaaggtggcaggaagaagtgctgagcaaagagggaagagccccttataaaaccatcagatctcgtgagaactcactcactatcaagagaacagcatgtgggaaacygcccccatgattcaattgcttccacttggtctctcctttgacacatggggtttatgaggattacaattcaagatgagatttgggtggggacacaaagcctaaacatatcaacaagtatatggagaaacaggccaggcgtggtggctcccacctgtaatcccagcagagaaacattaaggaagagccaaatagttggaaagctataacatgttcatggattagaagacttactgttataaagatgtcaattcactcccaaaatgatctatagatgtaaggtaataccagtcaaaatcccaac

SEQ ID NO: 364909 - DNA, 445 bp, Homo sapiens
atggcagaaggtgaaggggaagcaagaaaccctcttcacaaggtggcaggaagaagtgctgagcaaagagggaagagccccttataaaaccatcagatctcgtgagaactcactcactatcaagagaacagcatgtgggaaaccgcccccatgattcaattgcttccacttggtctctcctttgacacatggggtttatgaggattacaattcaagatgagatttgggtggggacacaaagcctaaacatatcaacaagtatatkgagaaacaggccaggcgtggtggctcccacctgtaatcccagcagagaaacattaaggaagagccaaatagttggaaagctataacatgttcatggattagaagacttactgttataaagatgtcaattcactcccaaaatgatctatagatgtaaggtaataccagtcaaaatcccaac

SEQ ID NO: 364910 - DNA, 547 bp, Homo sapiens
caaggatactgcacactgccctaattccctttgaaaaccctctagctcagcttcagacagccaatacaattttactgggtgacgctttgaattggccttcaacatctgatttccacattgtcttcctcggcaatgacaactgaaagttagcattgagttaaaactactttgacgtgaactacaagatgyggaagtagcacctcttagatttaccacttttctccatgatactgggcaggggagagtgaaatgagagcaaagtctccaccatgagaaatggaaaaggtaaaggaaaacagagacactgagtcgcttaaaataatatgggagctgttacatctgtcaggaataacatgttacataagttgagtttcatgaatcagcagtttagtcagtaatttacattaatttttttcaaaaagagaaaacatgagaactggaaaaggtaaagtggtttctgaaacaagacaggtttcaaaggtattttattccactcccacacagaagaacgttgacaggcagatgactcagtctggcttcattaagg

SEQ ID NO: 364911 - DNA, 561 bp, Homo sapiens
aattgcaaaacacacttaaggaatttcaaagtacaattaaaaacattataaataggctgtaacaagcagaagaaaaagtttcagaacttgaagactgatcttttgaactaactcagtctgacaaaataaagagaaaatatatttttttaaatgagcaaagtgttcaagaaagatggattatgttaagcaactaatcctatgaattattggcattcctgagaaagcaagagaaagaaaaaaacctggaaagtatatttaagaaaataattcaagtaaactttcctattctcactagagaggtagaaatccagatataagaatacagagaacaactgaaaaataacatataagctgaacatcaccagggcatatagtcaccagactgtccaaggtcaacactaaaggaaaaatcttaaaggcagatagcaaaaaagggcagattgcatacaaaaggagttccattaggctaacaatggtcttctcrgcaggaacctgacaaatcagaagagattaggggcctattttaatcattcttaaaaaaaaaaaaaaaaagaaaggaag

SEQ ID NO: 364912 - DNA, 528 bp, Homo sapiens
caaaaaaatgaaaaaaaagatttcatgctcatggattggaagaatcaatattgttaaaatgaccatattacccaaagcccaaagcaatttacagattcaatactattcctatcaaactatcaatgccattattcacagaattagwactaaaacttctaaaatgtatatggaaccataaagagcctgaatagccaaagcaatccttagcagagagaacaaagctggaggcatcaaattactcaacttcagactatattttaaggctacaatagcaaaaacagcatggtacttgttggtacaaaacagacacctagaccaatgcaacagaatagaaaacccagaaatagagtcacatatctactacagtcatctaatcttcaacatagttgacaaaaatgagcaacaaggaaaggagtgcctattaataaatggttctgaaatagctgactagctatgtgcagaagaatgacactggacccctacatttcaccatatacaaaaattaactcaaggtgaattaagatttaa

SEQ ID NO: 364913 - DNA, 466 bp, Homo sapiens
tctgtaaacaaaacaaagcaaacaaaggaacaacaaagaattcccttttcttctgttttcatttagccccacaatcctaaggcagaagagactcataacacaattgtatcatcttagggaaattgacacaacactgaattactggggcaagtgtyagtttttcctctaaatgaagaaaatctcctgctccacctccccataatagctcttttccagaaactgagtttttagaaattcatccataccatgtgttcctctgtgaccatgttaacttcttctttcctctggcgactaagggtgagcatttcacacataatgctagtggtcttttctcaacttttccctcacatgttcaatattgttgcaaattaaacacactttagattcagtgaaaaagaagtaaagggattatactaaaataaacttgttgtatcgttcacactttttaacaaagtttaaaaagatt

SEQ ID NO: 364914 - DNA, 508 bp, Homo sapiens
aacccattcccatcacaagcaaaagttcattaacccattcttatcacatcggagaggctttagttcaaaattatttctcacaaagcagaggyttaggggctttacttaaatcgtattttaataaagaaccataaatcctatatagtgaaaagacaaaggagagagaagttttcatcttttaaaagatgggaaaatatgggagaatagtaaaaccgcttcccagatgtctctggtgtgtctgagggtgccttccccgggccaatgagaaagtgttgtctccagtaagaaaatatgtattgcttaccaccaggcaaacagaggctgaggaagagtgtttccctgcatttttagtgtctttaacttaacaatttcttaatattttggggagaattattttcatttacgtaatgtcaaacaaaaattattaactattttctttgctttccagccttaagtctagacattgggagacaactgaggaaaaagtcattgaaacaactatcacaaa

SEQ ID NO: 364915 - DNA, 588 bp, Homo sapiens
atatttctatactgggctatgacatgcattgcctaaagcagcatcatttacagcacatttcatggtaggtaacccagaagttatacttcaggaacttctccattaaatattttggaaaacagaacagtatgtcttgaggctcaatctagtgcatggtattgtatctttgcagttcatagaaacacattttaatgattggcccagggaggaagccctcagtgtcaacggacaggaatgagatttgccagtttgtgttcagagagaatgaacaggataattaaagcaatgcatactctttttgaattatcataatcaccatcatcatcatcattgagttattggatattttcatcattattatacattacrtatcattgatatactttagtttatatgaattttgagatagatactttctccttttctaaattttcccccttctattccaaatatttgtttaaaatcactttcaatagattaataattcagctagtgaatatatatttttggtctaggtatatcaagatattctttttgttatacttgtaactgagaattactatgttgatattcatgttagaaaatttt

SEQ ID NO: 364916 - DNA, 588 bp, Homo sapiens
atatttctatactgggctatgacatgcattgcctaaagcagcatcatttacagcacatttcatggtaggtaacccagaagttatacttcaggaacttctccattaaatattttggaaaacagaacagtatgtcttgaggctcaatctagtgcatggtattgtatctttgcagttcatagaaacacattttaatgattggcccagggaggaagccctcagtgtcaacggacaggaatgagatttgccagtttgtgttcagagagaatgaacaggataattaaagcaatgcatactctttttgaattatcataatcaccatcatcatcatcattgagttattggatattttcatcattattatacattacgtatcattgatatactttagtttatatgaattttgagatagatactttctccttttctaaawtttcccccttctattccaaatatttgtttaaaatcactttcaatagattaataattcagctagtgaatatatatttttggtctaggtatatcaagatattctttttgttatacttgtaactgagaattactatgttgatattcatgttagaaaatttt

SEQ ID NO: 364917 - DNA, 561 bp, Homo sapiens
gaatcgaattctttgtttcactaagagtgtttacaaatggacaggctcattgaagaagttggtgttagtagggctaatcaattaaattctttaaattcttgagcatcttgcattgttcttttggtagtccaaaatatgatttgaatttcttaatgaaaagatccttcgtaaccatgcatcttctatatagttaaatgctctgtccataagaaaggcaacagttgggaatgtcctcatcacatgcataagaaattggataatacttagcagtttatatttcttctccaccttgccctctgcttggscctcaacccaaatactcaatttcctggttagattttttgttttgttttaccttctattctgaatctaacatatgatagcaaatgaacaattttctgctcttcttagaaatgttgctatttgatgtaagctcattgtaagaaattagagaaaagactttcaaaaagtagtatttaaaatagtatctcactacacttgttaaatagacattaaacagtcagagttttggcaatatgtcagacgtaacttagagtaaac

SEQ ID NO: 364918 - DNA, 561 bp, Homo sapiens
gaatcgaattctttgtttcactaagagtgtttacaaatggacaggctcattgaagaagttggtgttagtagggctaatcaattaaattctttaaattcttgagcatcttgcattgttcttttggtagtccaaaatatgatttgaatttcttaatgaaaagatccttcgtaaccatgcatcttctatatagttaaatgctctgtccataagaaaggcaacagttgggaatgtcctcatcacatgcataagaaattggataatacttagcagtttatatttcttctccaccttgccctctgcttgggcctcaacccaaatwctcaatttcctggttagattttttgttttgttttaccttctattctgaatctaacatatgatagcaaatgaacaattttctgctcttcttagaaatgttgctatttgatgtaagctcattgtaagaaattagagaaaagactttcaaaaagtagtatttaaaatagtatctcactacacttgttaaatagacattaaacagtcagagttttggcaatatgtcagacgtaacttagagtaaac

SEQ ID NO: 364919 - DNA, 416 bp, Homo sapiens
tttttgttttgttttaccttctattctgaatctaacatatgatagcaaatgaacaattttctgctcttcttagaaatgttgctatttgatgtaagctcattgtaagaaattagagaaaagactttcaaaaagtagtatttaaaatrgtatctcactacacttgttaaatagacattaaacagtcagagttttggcaatatgtcagacgtaacttagagtaaacatcatttactcttcttgaaaagtatacaaatcttgatcttgttttttgtcattctcaggccttattctccttaaataaactgttttttctttgtgtattattgtgcttggcttttgctgtctggatcttttaccactccatgctccagccttccttgcatgctctgtatcctgaggctggcccctagcaccta

SEQ ID NO: 364920 - DNA, 556 bp, Homo sapiens
ttgtggttcacataaatgaaaaagagatgacaaaaaattctgagtaagagcatccactaagtaaaaggaaaatcagaataaagtaaaataaaataaatgcttcaggaaggataatgtagcctataatttcaaatgctgcttaatagtcaatgtaccatctaagggttttctgaagtcagcacaatagagattattgatgacttaagagggtgatktcaatggggaagtaaggttgaatgtcaaattattgtgggttgagaaacaaaaggaagaaaaattatttaagattcctgaccaaataaaaatatactactcagcttcgtgctgacatgcaaatctagacaataaatgacaaagaaggggcacaaagagaaaattgagtgttcattaacaccactagattgcttaaggctattctctcattcaaatgaatctgcagcttcttgttaatgtactatcatgaaattctaatatttgatgcatttcagataaaatactgttgtaagatcatatacttttttttttgagacaagatctccctctgttacccaggcta

SEQ ID NO: 364921 - DNA, 558 bp, Homo sapiens
atgatggactattcacagtcaattttaatcagagtttagatgtctatggtttttaaatgatttctgttgttttgtagatctcatttcacagagttgcaaacaaaaaaacaaacaaaaattgttctgattctgatctgaaacatgctgcataataatattcacagcctcctttttgggaaaagtttgcattcctgataaagtgcmtaagaaactttctgataaatttaataggataaagaacacttctggagaagtggtgatccacaaacccatattatgtcaatcacatatcttattattttattcaaacacatattcccatgtttccaacctaatagttatctaaagtttctcttttgtataattctgatgaagaagaactcttataattggcctatagaatcctctttttggcaacatgtttgaatgaaacttgctcttttctataattatccaaaatttttgtttcttttgttttgtttgaaacaggagcagcattaactaaagctccaagtgattttaattagaaatgtaacatgtagcaaacaacaaagaaat

SEQ ID NO: 364922 - DNA, 522 bp, Homo sapiens
gcaaaaacagagatattttacaaaaagataattaygagcaaatatctcttataaagatatatgtaaaattctcaacataacacaagaaaatcaaattcaacaacatataaaaattaacacaacaaagtcacatttactctagctatgcagtgccagtttaatttaaaaatcaaacaatgtaacctaccacaatagacaaaagaagaaaaattatactgttaccagaaaatcaggtgttcagtctaggtcctgctgctggccacaaagaaagccaatcactgagacaacaattattgccaagaaggctataattgggtgttgcagccaaggaaatgggagatcagtctcaaatctataaccttgatggactaaaattgggggtttatgttgcagggaagaaatgtaacaatgtgtagggaaacaggaactcagaaggcttcaggaagcaatcatgatgaatgagactcagcatcccgttgtctggtggtggtgatttggtgagtttcaattcattgatccatt

SEQ ID NO: 364923 - DNA, 522 bp, Homo sapiens
gcaaaaacagagatattttacaaaaagataattacgagcaaatatctcttataaagatatatgtaaaattctcaacataacacaagaaaatcaaattcaacaacatataaaaattaacacaacaaagtcacatttactctagctatgcagtgccagtttaatttaaaaatcaaacaatgtaacctaccacaatagacaaaagaagaaaaattrtactgttaccagaaaatcaggtgttcagtctaggtcctgctgctggccacaaagaaagccaatcactgagacaacaattattgccaagaaggctataattgggtgttgcagccaaggaaatgggagatcagtctcaaatctataaccttgatggactaaaattgggggtttatgttgcagggaagaaatgtaacaatgtgtagggaaacaggaactcagaaggcttcaggaagcaatcatgatgaatgagactcagcatcccgttgtctggtggtggtgatttggtgagtttcaattcattgatccatt

SEQ ID NO: 364924 - DNA, 522 bp, Homo sapiens
gcaaaaacagagatattttacaaaaagataattacgagcaaatatctcttataaagatatatgtaaaattctcaacataacacaagaaaatcaaattcaacaacatataaaaattaacacaacaaagtcacatttactctagctatgcagtgccagtttaatttaaaaatcaaacaatgtaacctaccacaatagacaaaagaagaaaaattatactgttaccagaaaatcaggtgttcagtctaggtcctgctgctggccacaaagaaagccaatcactgagacaacaattattgccaagaaggctataattgggtgttgcagccaaggaaatgggagatcagtctcaaatctataaccttgatggactaaaattgggggtttatgttgcagggaagaaatgtaacaatgtgtagggaaacaggaactcagaaggcttcaggaagcaatcatgatgaatgagactcagcatcccrttgtctggtggtggtgatttggtgagtttcaattcattgatccatt

SEQ ID NO: 364925 - DNA, 577 bp, Homo sapiens
gccgaatatggtgaaaataatcttaaaaaaaagaataccaccacaaaaggttgtgctttacattatttagtgttttgaagtttgagttatggcaaaacaatttgttcattgtcagaagaagggttgtattgaagggtggtaatgactgggaagcacaaaagcaactgctgatctgctgaaaatattacatttattgatttggatgctgattacacaggaaaatttaatttattaaaatccattcacatggatctttatgatctttacatgtcagtctacatattactcttctctaaagcttctgcttaaattaaaaaaaaagtcttaaacataagttgtggtstaagtgatcttctttcatatggtaccactaaatccactgaagatgaatatgtttctgtctttggagttccactgtctactctgctcaacctgcagcagtggtttgggttcagatcaattaaactcataacacagggttttttaagttgacttagttttaagaaataatttaagacaggcaatgatgcagcattcaaagccatagtatagcaggatatttgagattctgtagtgc

SEQ ID NO: 364926 - DNA, 575 bp, Homo sapiens
aaatctttaaatacccctatgacctggaagctcctgttttgagttatcccacatttctggcctgagccaacatgtattttacatgtattgactaatgtctgtctgtgtctgcctgtaacttctacaatgtacaaaatcaagagcacttgagactgtgcctcggaccttgatcactcacatttggctcaaaataaacctctttaaatatatcatttatatttaaattatatttaatgtcattatattaaatatatatartttaatgacattatatttaatgtcaatgaaaattctttttcattgacattaagaaacaaatatttaataaattataccatataccctcacatacaaacatacacaattgtcaagatgtaaacatatttatattaagggaggaaagcactgattgaataaaataaattgtttctagtttctagttaccggttctggaaaagaaaaaaaaaattacaaagtagtaaaccaaagtaaatgctataatatatatttcagaagagattattgacttttgacttgagagacttaaaaattagacacagtgcagatgctatcat

SEQ ID NO: 364927 - DNA, 594 bp, Homo sapiens
cctggagtcaggcgctgagcaggccgggttctcctcttgactgccccagccaaattccacgtggttctgccaggcagtggcctgcatgctggtgcttgtcagtgcattcctccagatgtcaagccacttgtgtccagagtcttccactaatgttcttctctcagatatccaactgcctatgtgtctgcctgctagggtctcagggattttacaggcacaggatgggggcgtggcaggctagggtggtcktgggaaatgcaacatttgggcagaaaaacaaaaatgcctcttctcacctaggtccatggatgtgtccggaactggttcctttcggtgggttcttggtcttgctgacttcaagaatgaagccgtggaccttcacagtgagtgttacagctcttaaagatggtgtgtccgtagtttgttccctcagatgtgtccagagtttcttcctcctgctgggttcatggtcttgctgacttcaggagtgaagctgcagaccctcgcagtgagtgttacagctcttaaaagtagtgtggacccaaagagtgagcagcggcaagatttattgtgaagagcgaaaaaacaaagctt

SEQ ID NO: 364928 - DNA, 594 bp, Homo sapiens
cctggagtcaggcgctgagcaggccgggttctcctcttgactgccccagccaaattccacgtggttctgccaggcagtggcctgcatgctggtgcttgtcagtgcattcctccagatgtcaagccacttgtgtccagagtcttccactaatgttcttctctcagatatccaactgcctatgtgtctgcctgctagggtctcagggattttacaggcacaggatgggggcgtggcaggctagggtggtcgtgggaaatgcaacatttgggcagaaaaacaaaaatgcctcttctcacctaggtcsatggatgtgtccggaactggttcctttcggtgggttcttggtcttgctgacttcaagaatgaagccgtggaccttcacagtgagtgttacagctcttaaagatggtgtgtccgtagtttgttccctcagatgtgtccagagtttcttcctcctgctgggttcatggtcttgctgacttcaggagtgaagctgcagaccctcgcagtgagtgttacagctcttaaaagtagtgtggacccaaagagtgagcagcggcaagatttattgtgaagagcgaaaaaacaaagctt

SEQ ID NO: 364929 - DNA, 594 bp, Homo sapiens
cctggagtcaggcgctgagcaggccgggttctcctcttgactgccccagccaaattccacgtggttctgccaggcagtggcctgcatgctggtgcttgtcagtgcattcctccagatgtcaagccacttgtgtccagagtcttccactaatgttcttctctcagatatccaactgcctatgtgtctgcctgctagggtctcagggattttacaggcacaggatgggggcgtggcaggctagggtggtcgtgggaaatgcaacatttgggcagaaaaacaaaaatgcctcttctcacctaggtccatggatgtgtccggaactgkttcctttcggtgggttcttggtcttgctgacttcaagaatgaagccgtggaccttcacagtgagtgttacagctcttaaagatggtgtgtccgtagtttgttccctcagatgtgtccagagtttcttcctcctgctgggttcatggtcttgctgacttcaggagtgaagctgcagaccctcgcagtgagtgttacagctcttaaaagtagtgtggacccaaagagtgagcagcggcaagatttattgtgaagagcgaaaaaacaaagctt

SEQ ID NO: 364930 - DNA, 594 bp, Homo sapiens
cctggagtcaggcgctgagcaggccgggttctcctcttgactgccccagccaaattccacgtggttctgccaggcagtggcctgcatgctggtgcttgtcagtgcattcctccagatgtcaagccacttgtgtccagagtcttccactaatgttcttctctcagatatccaactgcctatgtgtctgcctgctagggtctcagggattttacaggcacaggatgggggcgtggcaggctagggtggtcgtgggaaatgcaacatttgggcagaaaaacaaaaatgcctcttctcacctaggtccatggatgtgtccggaactggttcctttcggtgggttcttggtcttgctgacttcaagaatgaagccgtggaccttcacagtgagtgttacagctcttaaagatggtgtgtccgtagtttgttccctcagatgtgtccagagtttcttcctcctgctgggttcatggtcttgctgacttcaggagtgaagctgcagaccctcrcagtgagtgttacagctcttaaaagtagtgtggacccaaagagtgagcagcggcaagatttattgtgaagagcgaaaaaacaaagctt

SEQ ID NO: 364931 - DNA, 545 bp, Homo sapiens
ttttgtctgtgatctaatattgatttgtaatttctgtgatttattgtacttcaacacacctctcactggttacattaaaagctacttttctaacgcaaatttttgcttactgaagatcagcaatgccaccaatctcttctaattaattttattttcatttttaaatgttttgctgtttaaatatttataaaatttcaaatgcatgtaatactagatggcatatataataactcagtatacctatcacccagtcrcaacaattatcaggggatatccagtatgtatcacctgtactccacctacctatccccagactattttgaaacaaatctcagttatcacattaattcattataaatatttcagtgagtctctgtaaaagatcacgacttttattaaaaaatcactataataccataatcacacctaaaatattaacaataataccttaatatcatcatatatcagtgttgacatttccttaattggcttataatttattttccaatttgtttgaattgggattcaaataagattcttaaatt

SEQ ID NO: 364932 - DNA, 545 bp, Homo sapiens
ttttgtctgtgatctaatattgatttgtaatttctgtgatttattgtacttcaacacacctctcactggttacattaaaagctacttttctaacgcaaatttttgcttactgaagatcagcaatgccaccaatctcttctaattaattttattttcatttttaaatgttttgctgtttaaatatttataaaatttcaaatgcatgtaatactagatggcatatataataactcagtatacctatcacccagtcgcaacaattatcaggggatatccagtatgtrtcacctgtactccacctacctatccccagactattttgaaacaaatctcagttatcacattaattcattataaatatttcagtgagtctctgtaaaagatcacgacttttattaaaaaatcactataataccataatcacacctaaaatattaacaataataccttaatatcatcatatatcagtgttgacatttccttaattggcttataatttattttccaatttgtttgaattgggattcaaataagattcttaaatt

SEQ ID NO: 364933 - DNA, 545 bp, Homo sapiens
ttttgtctgtgatctaatattgatttgtaatttctgtgatttattgtacttcaacacacctctcactggttacattaaaagctacttttctaacgcaaatttttgcttactgaagatcagcaatgccaccaatctcttctaattaattttattttcatttttaaatgttttgctgtttaaatatttataaaatttcaaatgcatgtaatactagatggcatatataataactcagtatacctatcacccagtcgcaacaattatcaggggatatccagtatgtatcacctgtactccacctacctatccccagactattttgaaacaaatctcagttatcacattaattcattataaatatttcagtgagtctctgtaaaagatcacgacttttattaaaaaatcactataataccataatcacacctaaaatattaacaataataccttaatatcatcatatatcagtgttgacatttccttaattgscttataatttattttccaatttgtttgaattgggattcaaataagattcttaaatt

SEQ ID NO: 364934 - DNA, 514 bp, Homo sapiens
tatttcttggcatcttcagtttctggtattgtccttttcctgttttatatttgtttgttttttattttaaatattctaatatgtgtattgtattttgcattgttgtttaaactttcaattatatgatgataaatgatagcatctttcctatagtaatttgctatttgtgtatctactttggtaaggggttggtttagatatatttccatttttagttatttgctattttcttcttacttcattttaagaattctttttatattttgtatacaagtcctttaacaggtacatgttttgtaaatattttctccctgactgtggtgtgtcttttaattttttaccagtgtgttttcaagagttatagtttttaattttattaaagccatatttaacattttactttcttttatgaacacatttttggtgttgtagctaaaaactcattgccaaacctgargtcatctagatttttgtcttatacattcttatagatgttttgcaattttttaagtct

SEQ ID NO: 364935 - DNA, 470 bp, Homo sapiens
taattttatgcccttgcctcttcaggaaataaatgaatatcccattgctctccatagggaaagcccttgctgactggcttctcctgccccgtccactctccctggcagcatggtggggccacagtggaactgccagctttcccgtcagggactccaggagccctgagagtcccttctgaagggtgygttagacagcggcttcaatcttcctgactgtaacagcaagaagcccatgttccactgcctgtgggcatatacatatgtgtaaaaccaaaaaccaatttaacaaaatatgtacatacgtacatacgtacatatgtgtgtatttgcgaatgtatggatatatgcattgtgtatgcatatataataataggaaaggtatatctgaatattgcttactctttttttaaccttttttctttttctttttttttttttgagacagagtctccttatatttcccaggctgg

SEQ ID NO: 364936 - DNA, 551 bp, Homo sapiens
acatcagctagttagagttgaccatttcacttttattaacataaaactttatggaaagatgcatggctatcctatttcaggcatagagaatcataaataagttctttaaaaaaatacatcatacacacacacacacacacacacaaatatatacttatacagactccagtaatttatctttttaagatttatttttataataacataattactttcataattattttaataatactytcatttttattaaaaaatctgaaatccaatccactgccataatcactctacatatttttcatgtggatatcaatgtatattttcttgttccggaaatattttgagaatcctatgagttcttgctacatatggcacataatatgcaatcatattactttattcccatttcaaactgaaagcatagataaaacaaacacaattttccaatacaatgaaaatgtttaatattccttaagtaaaacctatttgcatttcttatatgtaaaaagatacccccttgttgggcaggacagtccaactaggacctccagaca

SEQ ID NO: 364937 - DNA, 523 bp, Homo sapiens
ttatattaatttcagatagaagaagaaaagttttcagggataaaaatggtrttacatatgacaaaatattcaattatccaaaaaataacagtttaacacgtataagcctagcaataaagcatcaaaatatgaggcaaaatcctatagaactatcttccactgggtccctccacaacacgtgggaaatagatgaatctactagtttacttggagatttcaatactctctgtcaattacattctatatttatgaatgtaaagaatcactagtgtcaaggtatccagatgtcaggtctttccatcttaatctatagctataatagaatgcaatacccattgcaacaccagaaagttttttttgtggatattggcaaattgattcggaagtttctatggagagacataagacccaagatatgcaacataataataaaagagaagaacaaagttgaagactgatgctacctgacttcaagacttactatagagatacagtagcaagacaatgcggtactggcaaaaac

SEQ ID NO: 364938 - DNA, 523 bp, Homo sapiens
ttatattaatttcagatagaagaagaaaagttttcagggataaaaatggtattacatatgacaaaatattcaattatccaaaaaataacagtttaacacgtataagcctagcaataaagcatcaaaatatgaggcaaaatcctatagaactatcttccactgggtccctccacaacacgtgggaaatagatgaatctactagtttacttggagatttcaatactctctgtcaattacattctatatttatgaatgtaaagaatcactagtgtcaaggtatccagatgtcaggtctttccatcttaatctatagctataatagaatgcaatacccattgcaacaccagaaagttttttttgtggatattggcaaattgattckgaagtttctatggagagacataagacccaagatatgcaacataataataaaagagaagaacaaagttgaagactgatgctacctgacttcaagacttactatagagatacagtagcaagacaatgcggtactggcaaaaac

SEQ ID NO: 364939 - DNA, 650 bp, Homo sapiens
tgggcataaggtcaagtcacaaatttcagctggcatttgacattattggatcaatagtatctctaaagttacttttacattaattataaccatttaaatcagtttcccattataaatcaattatttatttgacttattgaattttagatttaataaacataatagaaaaacaatgttgccaaagcaaattcctgcatttaggatctagaaatcctttctacctaaggagaccatgaagggatatacgttgggtgatacatatcagagttcagtggaaacatcatgattgtgagaatgagcaaatataacaatgttctttttagttgtcccatagtaacattccatgtccagtaatttgttaatgtgtaggacaaactggaatcaagtacttaatttgatcacatctaaaactaaattgtacagcaatagatgaaatgacacctggagctatmaactgtacctaaataagaggctctcgtaattcaggggacaagtgaaaccacttcagttttaaatagatgagaggctgtgaagagataggattggaatttagtggtagaaaagggctaggaaaatgtcattattgtaactttctagaacaatttttaaaatctttttgttttcctgcatgctatgtgagtaatgtagtt

SEQ ID NO: 364940 - DNA, 615 bp, Homo sapiens
acattggatgttgctattataaatacctgaaaatgtgaaggggctttcgagttggataatgggtggaagctaaaaacattttgaggcaaatgatagaaaatacctaaatctgcataaacagactgttagtagaaatgcggatgctcaaaagcacttctggcaaggacttagaagaaataaaggaacctattattggaaactggtgggaaggcaatctttattatgtagtgacaagtatatcacaatttagttagctaaattgtgttctacggttatttcagaagcaggwattataagcaatgaatttagatgtttacctgaggagatttccaaccaaactactaaaggtgtagcctgcttatatcaaaatgtaagaggacagtagtttattaaggaaaaaatagttatgcaaaaagaaattaacacgatgatttgggaaattctcagcttatccacattacaaaaaaaaaaatgataacattaaaagagttaactgtgaggaaaccacattgaggtgatggaccatggtgcagctgggcacctgttactagcaccgaggagactacatgcatgggctcattgattcactcaaccatcttatagaaggcaggaata

SEQ ID NO: 364941 - DNA, 621 bp, Homo sapiens
ctttgccttatcttgggagtttgccctttgtctcaggcaatgagtggtgaagacttataaatagggagtgacatggtcagacttgtgcctttaaaagtctaccctagtagctggggggaggttggattggaggagggagaagacttggggaaagatcagagcggaggcagatgagatcaggaatgggtggraaagggcaatggagaggcagtaggagagatatcagtccccacagggcagaagaactggattttaatgaaacattatcttaggaggatcagttaattagctcttgatctctgtggctttgatttcctccttttgctgactcgcctcctttccattgcgtcttggagttcccaggctcctctgtgggaaagagatattagtttacctctaattgctctgctggaagcatgtgcctccatccatctccaccctatggtggagtggcttggtagggatgcctggaatgctgcattcagctgtaacattgggagggctgagcctctgtctctttccatgtaattgcagggcttctcattttccatgtgcatttcatcattgtttggccacagaccctggaagtcagtggctttgaaggtccaggccacaaagagg

SEQ ID NO: 364942 - DNA, 583 bp, Homo sapiens
ggggcatatgtaatccccatcttttcaaatactgtggtcatgccaggtatccccaggttgaggagcctctgttttgccatctctggggttattaagtctccagctcttggccaggatggggaaatgggtctgggtatctgactgctttttaacagctttcaatctccctttattttaggtgccacctttctcctacttcccatattgctagttgctgagcttctgggggatcctggggtggatgctggtyctcctgttgctgctatgagcagtcagttttcgtgggtttgttaagtctattatcagtggttcttctgctatctacctaccaaggttttttgctgtggtctccttttgtgttctcattctcaagggtttataatttaaaaaccctcacatatgtatgcccctttagagtcacgttagtggatatgaagagtgtgatggcagatgtctttttcctaggggactgtacttgtagagtaggaggagggtcctccaacctcattttctacagatgaataactggaacaacatacacagaactcagaccaggagccctggctaatgcatgacagagctc

SEQ ID NO: 364943 - DNA, 589 bp, Homo sapiens
tgaggattaaatgatgtaatgtgtatagagctctggcatatctgatatgtgataagctctcaataggtgttactgtttttatatcaacattaaatactctgtaaacaggatcttaagtggctccatttaattcggttatatagatgtactgtaatttatgtaactatttcctggtgtatatttagaatcttttccattttccactatttagagtgtgatatagtagataattcttttgcctgttattcctatttaggaaaaattcctataagcgaatgtagtcattttaaggctctttttttttttaagctctgtcctttaatggatgcaaatagggtttttaaggcatattataactaagtgcccctcctgctaaaggttctaacaaaacttttcacttcaccagtgttctctgtactaaatgcccatttcattggaaccactccaaactgaagggtggaatattagtgatatgtctacatagatttasgtgcgccatcacataaggcttgtactgtacaagcttgggtgaacaatcctgtgtgtgagtggaataaagtaatatttttatggagtaagtaaacagtaa

SEQ ID NO: 364944 - DNA, 589 bp, Homo sapiens
tgaggattaaatgatgtaatgtgtatagagctctggcatatctgatatgtgataagctctcaataggtgttactgtttttatatcaacattaaatactctgtaaacaggatcttaagtggctccatttaattcggttatatagatgtactgtaatttatgtaactatttcctggtgtatatttagaatcttttccattttccactatttagagtgtgatatagtagataattcttttgcctgttattcctatttaggaaaaattcctataagcgaatgtagtcattttaaggctctttttttttttaagctctgtcctttaatggatgcaaatagggtttttaaggcatattataactaagtgcccctcctgctaaaggttctaacaaaacttttcacttcaccagtgttctctgtactaaatgcccatttcattggaaccactccaaactgaagggtggaatattagtgatatgtctacatagatttacstgcgccatcacataaggcttgtactgtacaagcttgggtgaacaatcctgtgtgtgagtggaataaagtaatatttttatggagtaagtaaacagtaa

SEQ ID NO: 364945 - DNA, 597 bp, Homo sapiens
ggctttctgttttcacaagacagacgtctgtcccgctgctctctccccatctcctaccccacatcctgtcttagccgcagtctccagaacccatgatgaactgtgatctgccgtggtcctgccgtggtcctgccgtggagcctgtccctacacatgaccttggagcctcttggccttcagagcagaggcaaacccaccacagggcagctgcgttttaggaagagcaaatgaaactccacaccattcttctagatctctggtgttctctttggtttcatttttttwaaaaattaccttctttgggtggggattgagggtggaggggagggtgtttgggaaagataaatagacataaatatataacaatcacttcttgaagaagtataattgtaaataagccatgtaaaatgcctttttaaaatttaattttctagctggctccaattcaaattgaggatttatgtattaggccacttacttggttggcaagtgcaggaactcagttaaaatgcagttgaagaatgtcatctcccgaattgctgtcactttggcgagggagtggatatagggcatgtcacaaaagaacaaaataacccg

SEQ ID NO: 364946 - DNA, 605 bp, Homo sapiens
tttttattttagaaagcaagaaaaaatgagaaatagtgagctaaaacttcattggggaagctagaaaataaaaccagagtaaacacaaagaaaattataaaaggaaagctatartaaagttaaaaaccaggcatttgcaaagtaaaacacagagaaaccatagagataattaagaaacccaaaattgtttacaaaaaaactaaaacaaagcaacagaaaaacaatacttcctggaaaacaaggaaaggtctggaaatgtttacagagcagaggggactaaggagatgagacgattaaactcaatatatcctggatagaatcctgaaacagaaaaagagcattgtgggaaaactaattactgtaaatccaaataaagtgtgaagttttagttgagcaatgtatcaaagtttgttcattagttgtgactaatgtaccatgataaggtaagatattatcaatatgggaaagtgggtgaagtgtctatgagatctccctgcactatatttgaatcttttctataaatctaaaattatgctaaaattaaaattatattttagcaaataattattatgggtatgtgagtgtgtgtatgtgtgtgtgtatat

SEQ ID NO: 364947 - DNA, 605 bp, Homo sapiens
tttttattttagaaagcaagaaaaaatgagaaatagtgagctaaaacttcattggggaagctagaaaataaaaccagagtaaacacaaagaaaattataaaaggaaagctatagtaaagttaaaaaccaggcatttgcaaagtaaaacacagagaaaccatagagataattaagaaacccaaaattgtttacaaaaaaactaaaacaaagcaacagaaaaacaatacttcctggaaaacaaggaaaggtctggaaatgtttacagagcagaggggactaaggagatgagacgattaaactcaatatatcctggatagaatcctgaaacagaaaaagagcattgtgggaaaactaattactgtaamtccaaataaagtgtgaagttttagttgagcaatgtatcaaagtttgttcattagttgtgactaatgtaccatgataaggtaagatattatcaatatgggaaagtgggtgaagtgtctatgagatctccctgcactatatttgaatcttttctataaatctaaaattatgctaaaattaaaattatattttagcaaataattattatgggtatgtgagtgtgtgtatgtgtgtgtgtatat

SEQ ID NO: 364948 - DNA, 332 bp, Homo sapiens
gtgtatattcattagctattatctttgtggttccagtggaaattattacatttatcatcctaaagttatagcactctaatttgaatttataccagaataactttaataatatacaaaaattattgtcctttgccactctatccctaatccttatgtcacaaaatataactttattcattgtatgtccaaaaatataaattwatgtattttttaatgaacaattatccctcagtatctgtgggggattgattcagaacccctcacagacaccaaaatctatcaacgctcaagtctcttatataaaactattagtatttgtatataaccaaatc

SEQ ID NO: 364949 - DNA, 596 bp, Homo sapiens
ctacccttttttattactttttggcaccacaatatggtccagattcattttgactttcccctaccccagccatgaaatcaccaattcttcaaagagccctagttccttttttgaagaatgagatttagmaaccaaaatgtgagcactgtatatgcacgttgctagtggggtgccactgtgtcaaggccctcttaggagacagaactaggaaataaatgtatgactactagtggatgcatcatgtttatacacatatcatattcatttctgcgtgtatttatctatccatgtatctatctataaaatgaggtcattctgatagttttgattccaaatcaacaccaaaggatttatgctagtaactgcccccaagcaattatttataaatattttcaccaaaggtgagactctaggattccattatctacaacatatttatttacatgttcaactccagtaaacaggtgaagtagttttacaaacccatttccctatggaaacaaattaaccagccagagtacagctttttgtttgtttcttaacaggttttgaacccctgaatggaagcataatcaatgtgaatattctctgctctt

SEQ ID NO: 364950 - DNA, 585 bp, Homo sapiens
gttgccatgatgtagcttagcaatctggtatactagttgaagacacaaaggtgagactctgacttgacacattctgaatgacacattctgtaataaattccatgcaagccaaatggaataatcatcataggttttttctcagtgagattcacccatagccagaggtctctgacatgtgggaagaactgaacttcagtataagccaaaagtttaaactttgcctctcactgtcctttgaggttgaaagcatatgtttatttttttaagtgtgttctgttggttctgtatctgtaataggaagagcctttccttagcagatgacagtagtgggtatagaaggacaatartaatatagatagagactgagaacactgctattgccttactagacctttgcacttcatttcattgattaaaacaaacaaacaaacaaacaaaaacacacaaaaagcagtgccactcaccttaaaagcaaaagatctgataatggtgctgtaaagttggagaaaagcagtatgataggccaatcttattgttttgctttgagtatgcacttttctgtctcttgggttaaagtggtgtgcc

SEQ ID NO: 364951 - DNA, 620 bp, Homo sapiens
ggctactcctgtgcaaaagttcttggagtttcataagattttcaaattgtatatggtaactaccactgaaagatgttagggaataacaccaaattgccatttgatcttggacaaagcaccccatttgccaggcttcaagtgcctccatgaatggtttggactgaagtcacaggaattttccaaatgataaaggttatgagattataaaataaagctcagtgttgcaatttatgttttacactagtgtgtatctttctcattaacctaaattcttgggttattgttttccctctatcattgcccttggcagagaacagtacttcgtgcattccccaaacgacaagcttccttttgactctgcaaaggcaatcacgcataaaaacaacaaaggagaaayactaattatttgagggctgaaaacacaccagagtgagaccctgtttaaaagatttacaaagagatttataccagccaggtcattgcaaaatgagaaattgactcacagtattgaagtagacatccccagaagggtttggtttcatattgcctgccttttgagaaactcagatatgctgattaaatattttgctgttgctgactttcagaagcctgttgctaca

SEQ ID NO: 364952 - DNA, 584 bp, Homo sapiens
attaggctgacagtgattaagtaagttgcctaaactcccatcactagaaaaattgaacttaggtctgtttgatgctaaagtttgttctaacttggtttatactcaaggcagaacaaggcaataattagaatgcttaaggcaggaaactgtagtggtaggtccaggrcccatctgctccatgtctcctgcagtttctctggaagcagctttgcacctgagtgttgaaggatccatctgggactccagaagtcatatcttctaatctttcccagtgaactgagtgaggcttgggcagatggtgatttctatgcctctgctacaggtgattgcactgacaaggttcctctacagaaccatgccaagccgatgccaggcccctgccatatgcagacctccagcctttcaactctatgctcattaacttatccaaagagccatttggagaacaagccagtgggaagacttggagccctgactaaatgcactccagttacaggtctgtcttccacctgtcagtttgcattcagacaaggatgataatctgattaggtgaattgggaattatcaagattcactccctctcc

SEQ ID NO: 364953 - DNA, 548 bp, Homo sapiens
aggtatgttgggagtcagctaaatttaggttgagtttaatgagatatatttatgtgatttgtggttatgtctatagtcaggtgactgttagccagctcctaataggaatggcttctgggaacccctctcctgttcactatgttgactcacccaatattatggcagaaagttgtgggaccagggattatattaaaatataatcccaaagtgttcaataccaaaatatatggtaaagacagagaaacatggttagatatatagagaaccagaagctactctgtggaaaattcttccaatcatcatatatgtaaagccatggttgaaatgaggttcttttccatacttagtcaaagcaaaagtttgctcttgtcaagaacatacttaataatrtagcatataaatttataaattcatcagaaataaattttgtgattgcttgataattcaattaataaaaataatcatttgaacacattggaaaataaacaattttcttgttaatatgacatgaaatactgacatggacaaaataacataaaacttatatt

SEQ ID NO: 364954 - DNA, 548 bp, Homo sapiens
agtgaccattgagggcagaaacagcctgtgcttagatattgtacttagatcccttaatccatttttattggcacttacatctgttttcctccagagaggctaatcagaatgatttgagaggtttttaaataatttctcatggacaccaatgagaaacagagccactacaatcaaggaaaattttatcatttctgtctttgctttcttcacacatcaacccttttctttctggtcatggatatattatgatgtgagcctagaatggccgtgaccatcaagcacacttttaaattttatgtaaaaggttcatatatgacattataaagatggctttattattattattactaatattattattattttgagacgaagtcttgctctgtcgcccaggctggggtacagtggcacgatctgggctcactgaaacctctgcctcscaggttcaagcggttctcctgcctcagcatcccaagtagctgagattacaggcatgcaccaccaagactggctaatttttgtatctttagtagagacggggtttcccc

SEQ ID NO: 364955 - DNA, 562 bp, Homo sapiens
ggacttgcatggagactgtggcccctttgtttttgccagtttctcccattttgaaaaggtgtatttacccaatgcccgtaccctcattgtatctaggaaataactaacttgtttttgattttacaggctcctaggtggaagagacttgccttgtctcagataagactttggacttggacttttgagttaatgctggaatgagttaagactttgggggactgttggaagggcatagttatgttttgaattgtgagaacattagatttgggaggggctggggcagaatgatatggttgggttgtgtctccatccaaatctcatcttgaattgtagcttccataatccccatgtgtcatcggagggacccactgggagggaattgaatcatgggggtggttttatcccatgctattctcatgataatgaatatacctcaagagatctgatgattttataaagggcagttctcctgcacacactctcttgcctgctgccacgyaagacgtgactttgctcctcctttgccttccaccatgattgtgaggcctccctagccacgtgg

SEQ ID NO: 364956 - DNA, 577 bp, Homo sapiens
caccacacttctggtagtggcctcctggctgagttgtagtagaatctgtaaactcaatgaaattcaatgcaaaagttgtatataatcatctacatttttctgtgtagctggcccggaatttttatgagatgtatcatgagttcatggtcccaaatgggttaaaaaacactacctagaagatatctaaggaagatattacaattaatagctggttcaattctccttcttacttgccccccttgtagttaagaaggccatgtaactaattctgggaggtgatccatgagcacacgtgacatctgtcacttccaaggctaagctgtgcattttgaatctgtttgcctgggtttctgggtaactacatggaacagaggccctgctaatccacaataggtaataacatagtaagaaataaatcttaagccagaatagatgaatgacaagcagattgaagtagtaatttaaaaaccttccaacaaagaaaaacccaggaccagatggctttayagctgaattctaccacactttcaaaaaataattaatattaatacttcttaaactctttcaaaaaataaag

SEQ ID NO: 364957 - DNA, 621 bp, Homo sapiens
gtgggaccactgtgccccatgaaggacatgggttattatttrttgagaactcctatcacatgccttgcactttatctatttaggaaacattcgcagtgtacatcagaacatatcaatagcacctttgggacgtgctatgtaccacatgttcagaggttgatcaaccaagcagacttggccttagatacttatgagaaaggcagttatttgtgatttaatttgagagactctatgtatgctcccaggacatagacaacttcccaatgagtttataacccaccctaaagttctaccattgaaattatatccctttgtccaatttaaaaatataaattaccctgggaaggacataaatcaatcacaagtcactcccatcattgagggaaagtgacacttgagagaattattttttgtaagttgggtgagggcaatgtattaaaaacctggagcttttgtgagagaagagaaaaaggtgagggaaaaaaggggtcacttgggagtgagaacatgcctggaaaacccacctttaaatccctcagaaatgcatgaattagtaaaagaaggtacaattatcactgacattttacatgtgagaaaaagaatggaagttggagcagctaa

SEQ ID NO: 364958 - DNA, 621 bp, Homo sapiens
gtgggaccactgtgccccatgaaggacatgggttattatttattgagaactcctatcacatgccttgcactttatctatttaggaaacattcgcagtgtacatcagaacatatcaatagcacctttgggacgtgctatgtaccacatgttcagaggttgatcaaccaagcagacttggccttagatacttatgagaaaggcagttatttgtgatttaatttgagagactctatgtatgctcccaggacatagacaacttcccaatgagtttataacccaccctaaagttctaccattgaaattatatccctttgtccaatttaaaaatataaattaccctgggaaggacataaatcaatcacmagtcactcccatcattgagggaaagtgacacttgagagaattattttttgtaagttgggtgagggcaatgtattaaaaacctggagcttttgtgagagaagagaaaaaggtgagggaaaaaaggggtcacttgggagtgagaacatgcctggaaaacccacctttaaatccctcagaaatgcatgaattagtaaaagaaggtacaattatcactgacattttacatgtgagaaaaagaatggaagttggagcagctaa

SEQ ID NO: 364959 - DNA, 566 bp, Homo sapiens
gaaacaaattcattcagctgctcttagccayattacatactttgtgtgtgcaaatggaaccaagtgcagtttaagtcaatgcagattgactgatcaaaccaggtgcttttattgcaaactcagactagacagtgacatgtcaatatatttcagtcttggctaatatctatggtcctatttactttattctccaactagcttccattctgctccatctactttctgttttgtttgttttgtatcttctgttctcaggtctgtgtctttactctggagatttctttttaatggatcgttttcctttttataattagattttctgttttctaagaatttggagaatctcccttctagattcttcttttaaagaccgtagcttcagcctcttaggagcaaatggccagcaacagccctaggagaggcaattcaagaagacaaatcatcaacctaggtgcccatcaagagtggactggataaggaaaatgtacatatacaccacagaattctacaaagccataaaaaagaacaaaataatttcctatacagtaacatggatactgctggag

SEQ ID NO: 364960 - DNA, 656 bp, Homo sapiens
ctgttaagttacttttagccagtctcagagagataagcatttagattttgctttttccagcccatagagagaccatggtgtggccactctgatagcattgtttatatttatctttgattatattgaaacaaattcattcagctgctcttagccacattacatactttgtgtgtgcaaatggaaccaagtgcagtttaagtcaatgcagattgactgatcaaaccaggtgcttttattgcaaactcagactagacmgtgacatgtcaatatatttcagtcttggctaatatctatggtcctatttactttattctccaactagcttccattctgctccatctactttctgttttgtttgttttgtatcttctgttctcaggtctgtgtctttactctggagatttctttttaatggatcgttttcctttttataattagattttctgttttctaagaatttggagaatctcccttctagattcttcttttaaagaccgtagcttcagcctcttaggagcaaatggccagcaacagccctaggagaggcaattcaagaagacaaatcatcaacctaggtgcccatcaagagtggactggataaggaaaatgtacatatacaccacagaattctacaaagccataaaaaagaacaaaat

SEQ ID NO: 364961 - DNA, 566 bp, Homo sapiens
gaaacaaattcattcagctgctcttagccacattacatactttgtgtgtgcaaatggaaccaagtgcagtttaagtcaatgcagattgactgatcaaaccaggtgcttttattgcaaactcagactagacagtgacatgtcaatatatttcagtcttggctaatatctatggtcctatttactttattctccaactagcttccattctgctccatctactttctgttttgtttgttttgtatcttctgttctcaggtctgtgtctttactctgsagatttctttttaatggatcgttttcctttttataattagattttctgttttctaagaatttggagaatctcccttctagattcttcttttaaagaccgtagcttcagcctcttaggagcaaatggccagcaacagccctaggagaggcaattcaagaagacaaatcatcaacctaggtgcccatcaagagtggactggataaggaaaatgtacatatacaccacagaattctacaaagccataaaaaagaacaaaataatttcctatacagtaacatggatactgctggag

SEQ ID NO: 364962 - DNA, 566 bp, Homo sapiens
gaaacaaattcattcagctgctcttagccacattacatactttgtgtgtgcaaatggaaccaagtgcagtttaagtcaatgcagattgactgatcaaaccaggtgcttttattgcaaactcagactagacagtgacatgtcaatatatttcagtcttggctaatatctatggtcctatttactttattctccaactagcttccattctgctccatctactttctgttttgtttgttttgtatcttctgttctcaggtctgtgtctttactctggagatttctttttaatggatcgttttcctttttataattagattttctgttttctaagaatttggagaatctcccttctagattcttcttttaaagaccgtagcttcagcctcttaggagcaaatggccagcaacagccctwggagaggcaattcaagaagacaaatcatcaacctaggtgcccatcaagagtggactggataaggaaaatgtacatatacaccacagaattctacaaagccataaaaaagaacaaaataatttcctatacagtaacatggatactgctggag

SEQ ID NO: 364963 - DNA, 656 bp, Homo sapiens
ctgttaagttacttttagccagtctcagagagataagcatttagattttgctttttccagcccatagagagaccatggtgtggccactctgatagcattgtttatatttatctttgattatattgaaacaaattcattcagctgctcttagccacattacatactttgtgtgtgcaaatggaaccaagtgcagtttaagtcaatgcagattgactgatcaaaccaggtgcttttattgcaaactcagactagacagtgacatgtcaatatatttcagtcttggctaatatctatggtcctatttactttattctccaactagcttccattctgctccatctactttctgttttgtttgttttgtatcttctgttctcaggtctgtgtctttactctggagatttctttttaatggatcgttttcctttttataattagattttctgttttctaagaatttggagaatctcccttctagattcttcttttaaagaccgtagcttcagcctcttaggagcaaatggccagcaacagccctaggagaggcaattcaagaagacaaatcatcaacctaggtgcycatcaagagtggactggataaggaaaatgtacatatacaccacagaattctacaaagccataaaaaagaacaaaat

SEQ ID NO: 364964 - DNA, 534 bp, Homo sapiens
ccgtagcttcagcctcttaggagcaaatggccagcaacagccctaggagaggcaattcaagaagacaaatcatcaacctaggtgcccatcaagagtggactggataaggaaaatgtacatatacaccacagaattctacaaagccataaaaaagaacaaaataatttcctatacagtaacatggatactgctggaggctattaacctaaggaaattaatgcaataacagaaaatcaaatactatatcttcttacttataagtgagagctaaacaatgaatacacatagacacaaagacaggaacaagacactggggactactagatgcaggagggagagaggaggcattggctgaaaaactacctactgagtaccatgctcaccacctgggtgacgagactatccatttcccagtccccagagtcaggcaatgtacccatgtaacaaccctgcacatgtaccccccraatccaaaatttaaaaaaaataagaaagaaaaaaataagccaccaagagtgtagtgggggataaaag

SEQ ID NO: 364965 - DNA, 631 bp, Homo sapiens
tgcctccagttttgtccatgttgctgcaaatgacataatttcattctttactatgaccaaatagtattccattgtgtatatatgccatgttttctttgtccattcgtccattgatgaacacttagactgattttatatctttgctattgagaatagtgctgcaataaacatggcggtggagatgtcactttgatatactgatttccttttctttgaataaatacccagtagtgggattgctggattacatgttagttctatttttacttttttgagaaatcttcaagcttttttctatagtggctgtactaatttacattcccaccaaaagtatacaagagttgcattttctctacatcctctccagcatctgttattttttgtcattttagcaatagcaattctaactgaggtaagattgtatcttatcatggttttgatttgaattttcctaatrattagatatgttgagcattttttatatacttgttggccatttgtatttcttattttctgacattatctcttcatgcctgttgcccaccttttaatgagattggtttttgtttgtttgctttgttttgttttttactgttaggttgtttcagttccttgtatactgtgaatatta

SEQ ID NO: 364966 - DNA, 556 bp, Homo sapiens
atttgccctccccccatcccttgtactctttacattacgttttgtttcattgtttgattgttcgggtttctttttcctgttgttgtgctcttttcagccacaggacctttgtacatgctattcctttttatgtttaaaytttttctatgttctcttgttttagctaactgaagaccttacttacttcctcgcttcttgtagatgaaaagtgatttaatatacatcataatgttatgtatattatgaacaatgatgatcattacagcactatattacatagtaaaaaatggaaaacataaatatgtactcatattggaataattaaagaagttatagtataacctatgttggagtatcatgcatcactttaaacatgcttttaacatttcaataaacttgtttttctaaataaattttattgtgtatgtttgagatttacatcatgatgtcatgggatacatatagacagtaaaatggttactacgatgaagcaaattaacatatctaccatcttacatatttacttttctagggacaagagcatttaaaatctgct

SEQ ID NO: 364967 - DNA, 556 bp, Homo sapiens
atttgccctccccccatcccttgtactctttacattacgttttgtttcattgtttgattgttcgggtttctttttcctgttgttgtgctcttttcagccacaggacctttgtacatgctattcctttttatgtttaaactttttctatgttctcttgttttagctaactgaagaccttacttacttcctcgcttcttgtagatgaaaartgatttaatatacatcataatgttatgtatattatgaacaatgatgatcattacagcactatattacatagtaaaaaatggaaaacataaatatgtactcatattggaataattaaagaagttatagtataacctatgttggagtatcatgcatcactttaaacatgcttttaacatttcaataaacttgtttttctaaataaattttattgtgtatgtttgagatttacatcatgatgtcatgggatacatatagacagtaaaatggttactacgatgaagcaaattaacatatctaccatcttacatatttacttttctagggacaagagcatttaaaatctgct

SEQ ID NO: 364968 - DNA, 556 bp, Homo sapiens
atttgccctccccccatcccttgtactctttacattacgttttgtttcattgtttgattgttcgggtttctttttcctgttgttgtgctcttttcagccacaggacctttgtacatgctattcctttttatgtttaaactttttctatgttctcttgttttagctaactgaagaccttacttacttcctcgcttcttgtagatgaaaagtgwtttaatatacatcataatgttatgtatattatgaacaatgatgatcattacagcactatattacatagtaaaaaatggaaaacataaatatgtactcatattggaataattaaagaagttatagtataacctatgttggagtatcatgcatcactttaaacatgcttttaacatttcaataaacttgtttttctaaataaattttattgtgtatgtttgagatttacatcatgatgtcatgggatacatatagacagtaaaatggttactacgatgaagcaaattaacatatctaccatcttacatatttacttttctagggacaagagcatttaaaatctgct

SEQ ID NO: 364969 - DNA, 556 bp, Homo sapiens
atttgccctccccccatcccttgtactctttacattacgttttgtttcattgtttgattgttcgggtttctttttcctgttgttgtgctcttttcagccacaggacctttgtacatgctattcctttttatgtttaaactttttctatgttctcttgttttagctaactgaagaccttacttacttcctcgcttcttgtagatgaaaagtgatttaatatacatcataatgttatgtatattatgaacaatgatgatcattacagcactatattacatagtaaaaaatggaaaacataaatatgtactcatattggaataattaaagaagttatagtataacctatgttggagtatcatgcatcactttaaacatgcttttaacatttcaataaacttgtttttctaaataaattttattgtgtatgtttgagatttacatcatgrtgtcatgggatacatatagacagtaaaatggttactacgatgaagcaaattaacatatctaccatcttacatatttacttttctagggacaagagcatttaaaatctgct

SEQ ID NO: 364970 - DNA, 580 bp, Homo sapiens
aaatcggtaacaagggtccagcttggtggctcatgcctgtaatcccagcattttgggaggctgaggagggtggatcaccgaggtcaggggtttgagactagcttggcccacatggcgaaacctcatctctactaaaagtacaacaacaacaacaacaacaaaattagccgggcgtggtggtgggcacatgtaatcccagctactacagaggctgaggcagaagaatcacttgaatctgggaggtggaggttgcagtgagctgagattgcatcactgcacaccagcctggatgacagagcaagrctgtgtccagagagaaagaaagtgagagagagagagtgagaagaaaactagcgttcagtaagaagttacagcatagcaggcatttccatattcttgatctcagaacaatcctttttataggaggaggaatctctgaggctaagtgattttccaaaaggaatatagctagtaaatggttatgctagaattttaactcaggtctgcctacttataaaactcaagttttaattaatatcttattcttacatttacatgatccttcatttattcattcatt

SEQ ID NO: 364971 - DNA, 640 bp, Homo sapiens
tttgctttttttcttggaaattctaaaaagatttaggatgattatatgctcttgatgaattaatacagtcatcattatgagtgactccttggtctatgataatattcagtgctataaaatcgactttctctaggccaggtgcagtggctcatgcctgtaatctcagaactttgggaggccaaggtgggaggatcacttgagcctgggagtttamgaccagcctgggcaacatagtgagaccctgtttctaataaataaaaaaatagcggagcatggtggctcttgccttttgtcccagctacttgggaagctgaggtgggaggatcacttgagcccaagaggtcaaggctgcagtgacccacacacttcagagcaacagagcgagaccctgtctcaaaaaagaaaaattaaaaattgacttcgtctgatataatatagacattccatttttctggactagaattagcattatatatgttttatcatccttttgtttttcatcgatttgagtttttatatttaaagtgtattccttttaagaagcatatagttgatacactcttttatataaaaataaaatgtgataatctccaccttttaattgggatatttaccctagtcacccttaatgtgatcattg

SEQ ID NO: 364972 - DNA, 580 bp, Homo sapiens
aaatcggtaacaagggtccagcttggtggctcatgcctgtaatcccagcattttgggaggctgaggagggtggatcaccgaggtcaggggtttgagactagcttggcccacatggcgaaacctcatctctactaaaagtacaacaacaacaacaacaacaaaattagccgggcgtggtggtgggcacatgtaatcccagctactacagaggctgaggcagaagaatcacttgaatctgggaggtggaggttgcagtgagctgagattgcatcactgcacaccagcctggatgacagagcaaggctgtgtccagagagaaagaaagtgagagagagagagtgagaagaaaactagcgttcagtaagaagttacagcatagcaggcatttccatattcttgatctcagaacaatcctttttataggaggaggaatctctgaggctaagtgattttccaaaaggaatatagctagtaaatggttatgctagaattttaactcaggtctrcctacttataaaactcaagttttaattaatatcttattcttacatttacatgatccttcatttattcattcatt

SEQ ID NO: 364973 - DNA, 566 bp, Homo sapiens
aattcagcaagtgtaatggatggtcacaaattatctggagtgagcctcaccttgcccagtccttccagctatgcttgagaatagaagatatttctcatgcaggtctctgatgctctgatccatagtaatccaaagatgtcttggtcacataaaggtccagtttagtggcctcatgrtgatatggacaaagacattatcaagaatagaattcttgactaggaagcattgaaagatagtttgggagcaagagatccaaccttagaggaaacaggcaagccactgatttcacctggtttgcttttgttattttaaagggcaagagtttcgtaagaatggaactccagaggaaattttcataaactctgagatggctttcggcactcaatagcacttcatgagtttttcaggatttcagcatgaaagggaggagctttgcccagagggtcccagttgcctgtagacacatctttccatgaccctgaggctgcactaggatttatatagccacacaaaactgctcttaatggattttcttccccatctttaagttttattctcccttaagt

SEQ ID NO: 364974 - DNA, 566 bp, Homo sapiens
aattcagcaagtgtaatggatggtcacaaattatctggagtgagcctcaccttgcccagtccttccagctatgcttgagaatagaagatatttctcatgcaggtctctgatgctctgatccatagtaatccaaagatgtcttggtcacataaaggtccagtttagtggcctcatggtgatatggacaaagacattatcaagaatagaattcttgactaggaagcattgaaagatagtttgggagcaagagatccaaccttagaggaaacaggcaagccactgatttcacctggtttgcttttgttattttaaagggcaagagtttcgtaagaatggaactcyagaggaaattttcataaactctgagatggctttcggcactcaatagcacttcatgagtttttcaggatttcagcatgaaagggaggagctttgcccagagggtcccagttgcctgtagacacatctttccatgaccctgaggctgcactaggatttatatagccacacaaaactgctcttaatggattttcttccccatctttaagttttattctcccttaagt

SEQ ID NO: 364975 - DNA, 604 bp, Homo sapiens
taaagtccataaatgttgatgtccacacactgtgacatttttaagtagaaaagtcaaatggtagtacctggtacaccaggttgtcaagaaatctaaaagtagaaagagatatttaagtcatctaatgtatattttaaattattcattcattcattgatttgttaaataattattgttttctgctatttgtcatgtactgtgccagggactgggaatttagcaataaatgaaagaggtgacttatatgaataattcacattaacgatacagatttgggaaatgattgggctataaattgggtggatacctgattaaatagttactttctgggaagacattacagttgagtagagacttgcatgaacagcaggagccaaccacattaataaraaagggacatattccaaatggagagaaatataaagataagtctcaaagtcaagaaagaccttggttttgtcaagaacagatagatcaacatgcctggaaatgtttattccatgatgattctagtttttttttatcatttaaaaatataaagaatttatttttaccaagacactaaaaaccaggactatctaaaacaaaaggccactgtgaaaag

SEQ ID NO: 364976 - DNA, 613 bp, Homo sapiens
ggcaaataaacacatgaaaagctgctcaacataatttgtcctttgggaaacacagattaaaagaacaataagataccattgcatacctagcagaatggcttaaaaaaaaatkcagtaccaaatactagagaggatgcagagcagcagggaccattgttgatccaaatgcaaaatggtactgctactttggaagacagtttagcagtttctttcaaagttaaacatagccttaccatattatccagcaattgtacacctagatatttacctagtttctataaatataagaaaacatatatttatacaatacctgcacataaatgggtataaaagctgtactcataatgacaaaaaaaactgaaaaaagacattcttcaataggtgaatggataactaaatagtggtacatttatagactggaatactagtcaataatatagtgacgtgagctatcaaaacctcaaaggactgaacttcaaatgcacgttgctaagtgaaaaaagccagtctgaactacatatgatataatttcaattagatgacatgcaaaaggcaaatcaataaagatggtaattgatcaatagttgcaagagacatagcaatgactgattct

SEQ ID NO: 364977 - DNA, 568 bp, Homo sapiens
tcatgttttcaacatatacctctaaatgctgaatggataatacatcaaatagggacaagagagagtgtgtagaaaatgggggagtgggactggctattgagccaggcaaaaggtatataaagtctggcgctcgaaacaaaacaggtggattacaaaggagatgtctccacagcctagaggtgctaggactaagcagctactgtacatgcctatttcacattggccattggctgtgcactctaacaatgctactttacttgttgcctactaggctctgtgaggttgggacccccattttatagatgggaactcaaagaaataaagtgacttgtttttcatcccatctaataatagggagtagaaacaggatttgaacctaggagtcacatctgaagttcatgttgtccccattatatctcactatctctagcctggggagcttagatgctcatgttaccaggcaccagaatrggtcgtaagcacaggactctagtctgggctactgttctatctcctaaatctagaatagttcttggcaaataacaggcttctaaaaatgtgtctgagt

SEQ ID NO: 364978 - DNA, 625 bp, Homo sapiens
gaagctccttccagggagggtctacagaccttgatttatcaccagggagaaggtagtgcagagtggctgctttctcattctgcattgccaaagtcacacaactttcttgcaggaagaatctgcaagtcagatttcttgctgtggcaaggcagagaagaaagcaagaaggcctaggagtgttcaccgtcacatttatactttaccaaacaatctgtccagggagaatagcaggtrggatttgttgctagaacaagcctgtgaagcaagcatactatgtctggtgatagaaggggagtgctctctcttccattcaggatttcagagatctaactccctgattttctctagtgagtggtggcagaaatttgctattagaacaagccagggaagaaaatgtgggaagtgtttttcttctcatttaggcttgtaagtattctgactctctgtctccttccagacagagactgcagggaattttgctagagcaagtcagagaaaatgtcttggggagtgttgtctctacttagctcacaggggtctgtctccagcctactttgagagaataattgcagaaatcactgaaagaagtgaaaaaaggcacagtgactgtcgttcttctcattta

SEQ ID NO: 364979 - DNA, 542 bp, Homo sapiens
atacgactcttccccatattgagtcacacctaagatcagaaggactctgcttatgctctgcagctaaagaaaaccacccctccagcatcggcttgcagcctctctacataaactggccttggccttcccctgcagagccaaacaccttgcaatcttctctaactctgtctctgtcctctgggaatcatgcctaactatccttcttaaaggccttttccttccactgcatatcaactctaaacacatgctgaggaaacttccagccccaacaactgggaaccaacccaaccagcctctgaatcccagtttargcccagctggactcaggctgcagttatgaagggaccccagtgtctgccatgtggtcagtgcttagtgacagggaacagagacccagacagagttgttggcactctactcaacttgtctaacagaagacacactctcatccatccctctctctcctctagattgcttcctcatctctgggcttacagggatgatcttttcccttctttcccctacaccattccctcctcctt

SEQ ID NO: 364980 - DNA, 500 bp, Homo sapiens
agcctggtagatctccctaaggattttaatctttttattatttttctaaagaacaatggggagccattgaaggacyttaatcaggagtggttgtaaagattaggatagatggagagacagctcttcctctgaaaaagctggaaaggaaacaggaggggtgaagatggagcaagttttttgtgtgaaagggacaggatattagccaagataggctgttacattgtgttaacaaacaaaactaaagtcatagtggcttttaacaaaagtaagtttatttattgctcatcttatttccatttggaactgaattccctcaggaatcccggctgatagaagaaccaccctcttaaatgtttcctgcatgccagagggtcactcggctttgggaaattgcactccagcaattgtgtgctttcacctggatgtgtcacacattgtttctgctcgccacttatagtgaagagttagtcatgcctcccaccccttcacaagaaggacca

SEQ ID NO: 364981 - DNA, 574 bp, Homo sapiens
acatgcaatgtacctagaacatggtaggtgcataacaaagtagccaatggaaactgtttgccatactgatttctaagcagaattacacttaaggctaagtcaacatttctcaagcccgacaccttaacactttgggccagagagttccttgctgtgaggactcccccgtgcattataggctgtttagcagcatacctggactctatccagtagcaccctacccccagcttgcgttaaccaaaaacgtctccagacactgtctctaatgtccttggaggaagggggagggggagaaataattccctgttgagaacctcttggctgttttcaggatccaggctataacctcttaactgtcagcccctgaatgcaaggattatagttatccaaggatgtgttgtattgctctagaccaggggttccaaaacttaactgattaatgaagccacttgggtgctttgcataaaacaaaccaaaaaaagcaccagtgcytcagcctcagaaagacaaataccacatgatctcacttatctatggaatctagtaaagttgaactcatggaagtagagagtag

SEQ ID NO: 364982 - DNA, 499 bp, Homo sapiens
atttattgcacaacatggtaactataataaataaaaatgtattatatatttcaaaataagtaagaaagtaaattttcatgtctcaccatagaaatgataggtaagcaaggtgataaatatgttaattaatttgatttaatcataacatattgtatacatatatcaaaacatccattgtaccccataaatacatacaactattttcatgcaygtccgtgtgaagagaccaccaaacaggctttgtgtgagcaacatggctgtttatttcacctgggtgcaggcaggctgaatccgaaaagagagtcagcgaagggtggtggattatcattagttcttataggttttgggataggcggtgaagttaagaacaatgttttgcgggcaggggtggatctcacaaagtacattctcaagggtggggagaattacaaagaaacttcttaagggtgggggagattacaaagcaccctcttaagggtgggggagattacaaagtaca

SEQ ID NO: 364983 - DNA, 601 bp, Homo sapiens
acttctattcagtagaattccatgcccaccaaataacccaagagaaccttacgtgttcacaattgtgggattttatcctatcataaatgttctaaataatttgtccacatagggtaaggtgtacactcctgagaattgaactcaattttcagatattgaagtcttttgtctttgtctccactctracatgtttttaatgtcagcatgcatttcagtggacttgaaaattctcattttatagctcaacatcagagatcaagaacaatgcagtgatttatttgagtggggctgtagctatgtaattaattttgaaggcgcttatactcatctcagacaaggatatcatatctttggaaattttgttgttgtagttttacttttcattagtttgtttgctttttgctaactggaactaaaagcaagttagtctgaaaatacccattagcttatgtcttggaagcaatggacacctggcaagaaaggacaccagaaagggagcacgtaaatgccacgttttaattcaggaggctgtgtggagagtaattagggaacattgatgaagaagtgcacttgtaatatatgagtaacaatatgggagttg

SEQ ID NO: 364984 - DNA, 613 bp, Homo sapiens
atgatcttttgcgattttgagcacccagggacctctcagagagcagcagcatctgggtttggcactggggccttcagagccactgatatgtccagtagtatggtgctgcccagagaaatgatggcaccaggggaagtagaggtggagctcacagggtggccttgactcaaatcacatggtagtgtggtctcaatggtgagattctactctcctgtgcctgaaactaggtgagtgccctcttaatatttcgcgcattgttgaatgcagaactcaccctttyttggctgttcataatacaatagtaggtttttatctcttactaatttgggtccggaagtccacttctttatttggaaagaaaaaatcgaagcattttcaaagaactgatgtgctgagttgggccatcatgtttattatatcattttcccctaaaggcttcaatttaccaaaaactgtactttaatacttgatcatgctgttccctgtcttaatttttttttaaacatagctgcatttgcagagaaccccttgtggattaagaagcctagaaacatccatgttggtatctgcactgagagggtcctctgaatgcatcagaggtatgcattggtac

SEQ ID NO: 364985 - DNA, 442 bp, Homo sapiens
actcaattgcaactccttctgaagctttttctggattttccaacctcaggaaccactcccttgttcagatcattcagcactttcggtcaattccaaactgtctcacaaagtatcgtgcaaggatgccgcaaaaatcccaccaakgtttgcttctaatttcataagatgctggagtgaatgtgagcctgaacatgccaccagaccttccaaatatttgtgttcatggaagtagccacattgatcaactgtatcattataaatgagtagtataaatagaaatgtaagatcaatctgtatcaacacatggtcacttttgtaattgttttaaaatgtgtgagctcttgtttggaaatgagtcccactgctaaaaacaaaacaaaacaaaatacaagtttgaaaaacactgctttctatcatgcagctgataattaactttaatgtc

SEQ ID NO: 364986 - DNA, 503 bp, Homo sapiens
aataaatggaaaaaaatccagaaaaatacatcctgcaattagcttcagagatatacaatttctaagaagattcttgcccagggtatagcaagaacagaaaaagaaaaagccttatttgtacttaaaaattggatgaatattgkagttctctcttccatatgcaaatctctgtagcattttgctattaatctgccataaactctcaactcttcctgagactgaactagcaggtcaggacaacacagaggctgcagttgtcaatgcagcatgtcagtttttgaaagcaagtgtgtgttcacgtgagagagagactaacctacctctctgtgcaggcctggaccagttctaccagagtcccagttggattctcaccactgagcactgacttggcaccttgtcagaactcaacaatatacatagaatgaatgagtgagtgagtgaataagtgactgaatgcattcacccttccaagacatcacgctgtgactggcccatgtatatat

SEQ ID NO: 364987 - DNA, 570 bp, Homo sapiens
taagcaccaggttgagataacctggtgaaggctgagaccaggaatccaggaagacctccagtagggcaaactaggccagaggtcagtgagtcataccatgggtcatatattctaggaagccaaagataatcctaactaagaggtcagtccggagaaaaccggaggttattaatttcttggttattgaccaagcacaaaccaagccagtgatatgggaacttcataaatgtgtgtgtccgtgtgtgttgtgtgtatgtgtacatgtgtgtgttgtatgtgtacatggtgtrtgtgttccacgtatgtgtacatatgtgtgtgtgcgcactcatggtgttgggaaaagcagaacagataaaaggagggagggcagccgagagaggaaacttggtactggggacagtgccctctcaagtatgacaaaaaccttttaaagtgttgggtttggggataataaaagtaaaacactgctgattatagaattttaaaaaatatagaagagcagaagaacaaaaatattagcattaattccaccatctaagaatagttcatttttttaattttttattt

SEQ ID NO: 364988 - DNA, 619 bp, Homo sapiens
ttggtctttttaattttagccaattataatcagtgtatagtggtacctcatcttggtctttattttcacttccctaacaattcatcatgttgatcatcttttcaagtgcttattttgccatccatatagcttcttcatcagagcatatgatcaagtcttttgctgtattttcttatttttgagttttcagagttctttatatagtctggatataagctctttatcagacacaggctttgtaattatttttttctcagatgctttcattctcttacagtgtttttcaaagagcaggagtttcaattttgatgaagtccagtttatcaatatttttattttatggcttatgcttttggtgttatatctaagtcatgtttgcttaatccaaggtcataaagatttttatctatattttattccataagtttcatagatttagatttatatttaggtctgtaatgcattttgagttaatttttgcatgygtgagttaggaccaaagttgttttacttgtttgtttttgttttgttgcatatggacatccaattgttccaacactatttgttgaaaagactgctgtatcttcacaaaattatctttgcatctgtgtcagaaatc

SEQ ID NO: 364989 - DNA, 568 bp, Homo sapiens
attgtgtgaagcaccttatttgggttatctttttcagtttgctccttgcaacaaccctataaagtagatggcattatcagccccattatacagactaaattagagcacacagagagattaagttatacactcaaaatcatacagccatgatgcagcagagctgtgatttgaacccaaatactgaccacccagtcatccttctcatgcaaaractgatcaggcctgtgacgaaaaattctaagatcaccaatgcacagccatctttcctgaatgctgaaacacttaggacacagcgatccctttggaaaagcagggagtatgtttgggattaataaaggaaagcctcctgcagagagcatataaagtcagggaagcagcaggtaaccagtggcagagctggagtgtcagacctctcaggggatcactgagacaaagagccagccctatcctgctctacccttggggcagaaccctggactctgaggacccaggagttgcctaaatccccctgagaaagctgaggcaataaatgttgtcggtctctgcactaaacttgaaccaccttcct

SEQ ID NO: 364990 - DNA, 554 bp, Homo sapiens
atgcacaaagtagcagaggaaagaaatacggtaatgaagcagtgaaagcagcaatttattaaagtgagaaagygctccacaaggtgggcatgggcctgagcaagtgactcaagggcccagttacaaagttttctgggttttaagcactcatttttcagttcttaccagctgccccttatctgcatgaaggatttggtctgtggctaattaaaggctgatgtgaattggtgccctgtgcagatgaagggatggtcctgccttggcctgcaaccaatcccaggcactctccctttccatctgacactggtggaagggagagggttgtagggagagtagcctttgatcctttgttactcaggtggagagatggggtttttccttttggtttagctttaagaagctttaggtgttcggcccccagacccaggtgttttccttttgatccagctttgggaagtcagcacaaattggcctgagattccctgcccccagaccttggtgttttttcttttaggaagtcagcacaaattggcctctgattatctgcccctaga

SEQ ID NO: 364991 - DNA, 430 bp, Homo sapiens
ggaactttggtctcagttattctgggggcacctttttctgtgttgtaccacggccctgaagactcacttgtgtacctaaaggagggctcttggtctatgcccttctcctatggatacctgatgccactaacaagtgctgatcaccgcaatctgtcctaagctgtggctccatcttattcattcaacagaggttttttttttctgggtttttttttttttttttttttttttgagcatccactctgtccctgacactatagcaggtgctgggaataaaacagaaaaacaaaagagaattaacccgttcctcctggagcttcaaatgaagcaagacccctgagccaggctggtgctagggccctcttcaggatttccacaaaraagacccttgtcatttgatcaatcctctcagtactgcaatggaatgatc

SEQ ID NO: 364992 - DNA, 632 bp, Homo sapiens
actttctcaatcataattacattagtcatcattaacatttaaagaggctgcaaacagaatactggacattgcaataaattatcattgtccactgggcaggttccatgaatcaagtgcccctggaactttttgagactgtctgatgctgcaatttaaatggaggatgtcattctgctctttgtacatgggagtacagtgggggcaaaagtgaaagcaagtgtatgtacaaaaaaaatccacactatgcatatctggcccatatttctaaactaaaagtctgttacaactctccctggctcctaaggcactgtacttttccaagtcatgtttagtcttcatcttagcrcaactcacaagacccattactcctcaatggtccagccaccctgagctacctgcatgtctcctaacatgccaggttctgaggcttcagtagtaacagcaataataacaacaatgttttaagttcttaatctgtgccctttaccatgccaagtgctttgaatatactcattccgtgtgtcatcaatattgtcatctctgctttacatatgaaatagacacagctcaggggtgaagtaacttgctcaatctcacacaggcagtcacaggcacagtcacaggcagaggca

SEQ ID NO: 364993 - DNA, 632 bp, Homo sapiens
actttctcaatcataattacattagtcatcattaacatttaaagaggctgcaaacagaatactggacattgcaataaattatcattgtccactgggcaggttccatgaatcaagtgcccctggaactttttgagactgtctgatgctgcaatttaaatggaggatgtcattctgctctttgtacatgggagtacagtgggggcaaaagtgaaagcaagtgtatgtacaaaaaaaatccacactatgcatatctggcccatatttctaaactaaaagtctgttacaactctccctggctcctaaggcactgtacttttccaagtcatgtttagtcttcatcttagcgcractcacaagacccattactcctcaatggtccagccaccctgagctacctgcatgtctcctaacatgccaggttctgaggcttcagtagtaacagcaataataacaacaatgttttaagttcttaatctgtgccctttaccatgccaagtgctttgaatatactcattccgtgtgtcatcaatattgtcatctctgctttacatatgaaatagacacagctcaggggtgaagtaacttgctcaatctcacacaggcagtcacaggcacagtcacaggcagaggca

SEQ ID NO: 364994 - DNA, 582 bp, Homo sapiens
gttggcccctgatgacaaagggagcaaaaaacaaacacaagtgcccagggtaccttaccgttgaatgctgaatattcatatcctcatctgacatctgagaataggcaatcagaggtctcctgtatgaccaaaacatgccttttaccagaaataatgtttcccagttttggggtatgatgaatttccacatttcttggataagtgcagacagcaattgaagttgtccaaactgaagccttggatggcagagtaggcacagatagcaccaagaggacagaagtatttgagggtaggagtgggcagggtgataaatggaattaggagatgccctttaaaagtgctctgtgcamtctacatgtgaagagttacagtgtttgttggaggagagtagatgtccattgataggcacaccccattgtttgcataaggcccagaatcacatgaaaaagaactagaactctgtctacatgggtctttgttggtcaggttgatgctgggaaatgaaagggcaggaaataaggttgaaaattcccagaagtaagaaatctggtcaagacctaagtgtgagtcatgagcaaggtt

SEQ ID NO: 364995 - DNA, 582 bp, Homo sapiens
gttggcccctgatgacaaagggagcaaaaaacaaacacaagtgcccagggtaccttaccgttgaatgctgaatattcatatcctcatctgacatctgagaataggcaatcagaggtctcctgtatgaccaaaacatgccttttaccagaaataatgtttcccagttttggggtatgatgaatttccacatttcttggataagtgcagacagcaattgaagttgtccaaactgaagccttggatggcagagtaggcacagatagcaccaagaggacagaagtatttgagggtaggagtgggcagggtgataaatggaattaggagatgccctttaaaagtgctctgtgcactctacatgtgaagagttacagtgtttgttggaggagagtagatgtccattgataggcacaccccattgtttgcataaggcccagaatcacatgaaaaagaactagaactctgtctacatgggtctttgttggtcaggttgatgcwgggaaatgaaagggcaggaaataaggttgaaaattcccagaagtaagaaatctggtcaagacctaagtgtgagtcatgagcaaggtt

SEQ ID NO: 364996 - DNA, 593 bp, Homo sapiens
tggcacacataaaaattaaataatcctcatctaatccaagagataatcctcaaaccttattttggactcatatttcaatattttcctacacaagaagatgagtacctggtttagcttttatcccctcttcctgtctgccttttagtaaagatgtgaagacacttaagcattcatcaggccctgagtaacaggatttgttacatttagaaattattctgggatgatgagaaaatcatggagaaaatcttaggggattcaaaaccctcagtttatcaatcamtcaacagaagtttattgagcacctattacatggaaaacataaggctgcacattcttggagatacctagacagttggttccttcaagaagattaaaaataacagaaaagatcaaatgtggtcacaagagtatgtctatccacaacttgacctatgacacatgattgccaagtgagtgggttacagaataagacccataggtgtccaagatgtctttgggggctgaggaacttggtgggacttggaggtagacaggaagttgggtgttttttgtttgtttgtttgtttgtttttgacagagtcttgatccatcgc

SEQ ID NO: 364997 - DNA, 591 bp, Homo sapiens
taccagctactcagctaagttctagaagaaaaaaaaaaaaaaagcagccacatagaaggtctttgggcagaaaagaaccttcagaaagagccagaatccatggttttacacctggctctgtagcatcccatgaccttgagtagtcttgtctctgtgtgtgctaataatattcattgtgtgtgctagtcatctcacatgttttatcttatttattatttaaaaagaaaatatstcgacaagtaacatccccctacttcatagatgatgaacccatggttaagtgactctccagtcagggtttgggcccattgtcacagaaatagtataaaaagataaggcttcaaactcaagtccatttgcatctacagttgaactcttaatgactacacaatatttctcttggcttctttgtctgttaaatgaggtttcttccagcactatcatcctcagatacatgaggacaaactgattatccaaatttttagccatactcacagatgggagccctatcagaaaataaaatactacactcacacattttaagttggatatttaatgtaaaagtcttggaaaaacacctttatttctttt

SEQ ID NO: 364998 - DNA, 591 bp, Homo sapiens
taccagctactcagctaagttctagaagaaaaaaaaaaaaaaagcagccacatagaaggtctttgggcagaaaagaaccttcagaaagagccagaatccatggttttacacctggctctgtagcatcccatgaccttgagtagtcttgtctctgtgtgtgctaataatattcattgtgtgtgctagtcatctcacatgttttatcttatttattatttaaaaagaaaatatgtcgacaagtaacatccccctacttcatagatgatgaacccatggttaagtgactctccagtcagggtttgggcccattgtcacagaaatagtataaaaagataaggcttcaaactcaagtccatttgcatctacagttgaactcttaatgactacacaatatttctcttggcttctttgtctgttaaatgaggtttcttccagcactatcatcctcagatacatgaggacaaactgattatccaaatttttagccatactcacagatgggagccctatcagaaaataaaatactacactcacrcattttaagttggatatttaatgtaaaagtcttggaaaaacacctttatttctttt

SEQ ID NO: 364999 - DNA, 374 bp, Homo sapiens
tgactgtaatcccagctactcaggaggtgacgcaggacaattgcttgaacccagaagkcagagtttgcaatgagccgagatcgcaccactgcactccagcctgggcaacagagtgagactccatctcaagaaaaaaaaaaaaaaaggaagaagagtgttctttatcttctcattataggaaattctcagaagatatcatgcaactcattaacactttagtagacaaatatctctaagtgaataagaaaggtatatattggtttaaagatagactgtaatacagtcttcccattagttccaaccatctctcctagagataatctgaatctgtaagacttttattatgtgtatttgttttatgaaggattgaggaa

SEQ ID NO: 365000 - DNA, 630 bp, Homo sapiens
ttccacttctactggcctggctgccttcttgttagtctgactcagaccttcagccctaaggacctgagtcactggccaccatcctccttggctgcagtcactcggccaatcaatttacagtcaaaattgggaaagggagtactaagttaggaccaagtggatgggttaagttctacacaaattcctctctgcctctattgtgcaataacaccacctcctcttaatgattggagtcaattaccctgccaagatagtgacttcttcttgcttttggtccctgtaaacaaggagatcaaagtacccaagtgaaaactaaagcttgtaattcaatgggacttttgctatgtcctcttgggaaagtgttatcctctttgaagaccaggactgttaatctagcagaacccagaattacagggaaagaaatcacaacgaccctcaatgggtcattgagagtgatagtaagtgagaccactactgttttcactccttaattcctgtgtccatgtagtcttccttcagggacacagcaccatataaagatcatttatttgatccaaatactgaattttacataatggcaatctstctgtgtagagtattacctctgaacctccaatgctctatcaggct

SEQ ID NO: 365001 - DNA, 579 bp, Homo sapiens
ccaagtaagtcactgaattgtagaaaggatttttcatcacgttactggtgttcttaattgtccacaattttcatatttacttttaaaatcaaaatatcatagtagatgctttcaaacgaacttccagttttagatattgcaaatactgaaatatgccagatttgagttttactaaaaaaaatgtctcagatgtaattccaaatgttagtttagtatcattttatttagtaaggctgtcatgctcccacatatggtagagaactgtgcaattttccagataatctgatccaaaaaaatatttttttgcttgaattttwaaaaaactttttggcttgaaatatctgaattaattggtttagctgttcctttcgcacggccaatgcagaataggtcagaagactgagcaacaagcaaagttcaaccaattctcctcagcacatccttgaccttaatgttggtaggtaaggtttactgtacagaaaaaaacaaaaaagaggctatattccttaagactttctttcagtaatctctacctctacatccactaagtttttcagatgagaccatacaatgtaggat

SEQ ID NO: 365002 - DNA, 586 bp, Homo sapiens
gattttctagataccttattttatatatatataatatatataatatataatatatatacacatatggacagagagagagagagagagagacggagtctcactctgttgcccagtctggcatgcagtggcttgatctcagctcactgcaactaccgcctcccaggctcaagcaattctcctgcctcagcctcctgagtagctgggattaaaggcatgcaccaccatgcccagataatttttgtatttttagtagagatggggcttcatgttggtcaggctgatctcaaactcctgacatcttgatctgcccgcctcgrcctcccaaagtgctgggattacagccgtgagccattgtgcccagccattactattaatttctaatttaatactgatatagtcagagaacatcctccataagattttaatcctttgacttctttttttcagggatgtacaaatgtctttttattcaaagagacaaaataaattatctgtaggcatggacaacaacagtggtaagccattatatattttgtcaactgaaaccagtaactgatggttacagtgatttcttaaacgtcagcca

SEQ ID NO: 365003 - DNA, 496 bp, Homo sapiens
cagtaactgatggttacagtgatttcttaaacgtcagccagccttttcttcattttctccaactgacttctctgaagctattggtgaggcacactgccttgggcttcctgccacagttcattaataaaggtaaagccctattctgggaattagaacatgccacctcccatccacctcccattgcacccattgcacccattccaaggcctgtctcttctttaggaatttgtgtgactgcaacttgtgctgcagttaacagagaggccaccccagcagcatccagtaaagcaggtcttacaacctttgttgggtcactaattcctttttccaccatattcgcaaaatcttcaatatagcatcataaccaacttctgaggaactttgcatrattttgacatttttgatagttgttttatggttccacagatggcctatcatcatgcatgctccaagtgtatttgaagataatatgtatcatgtagttattgggaaactt

SEQ ID NO: 365004 - DNA, 584 bp, Homo sapiens
gggactacacaaaggagtgaatctcagaaggtgaggatcatcggggactatcgtggaggctggttactacgatacactctttagcacatagaaggtactcataagatatttcatgtctttggaatggaattgatggaaatgatagctttttgaattggatatagaagtctggacaatattttaatagttagaaaagacaggatatctaaaccagtcatttctctcattcgccctctggaaatccagtttctatggcggcctaaacaaggagtgtcttggttccttaccagaggaatgtgagggatgaatcctataaactatgggctggccccaaatgtccttgttgtacattctcttgccaccctgaatttgtaatttcttatgtaacgggatgttaaatttgacttttggtgttttggcaaagtatccaagggttgrgaccatctgtgcagtacatgctaagagattgtgaaatcagttcttgttttaaaaagtttttaggttgtcatccacatggaggacattaatgggagaggccaggggacagattgagagagagcggagagcaggtgagtagttctgct

SEQ ID NO: 365005 - DNA, 591 bp, Homo sapiens
cctggcgatgctgggtccactatcgtacaccccagcgcctggctcgtgtkgcacggccactgcagccttcaggtgggctgtggttctccaccagccaccctctggcctctatgcttaaaacttttcaggcttctttttgcttttaggataaagaccagattctttccacggcccacaaagcctgcacaatctgacttctgcctacttcttcgacctcatcttgggccagcaattgtaacaacaaacacacgtccagtgctaaacatgtgctgggctatttcaatcatcagagcaagcctgggagggaggtactatcattatcctcatttgacagggggagacagtgaggtacagagaagtcacgtaacttatccaagggccctcagcttggaagagccagggctgggattcaaacccaggcagccagccctggggagcctgggcactgaagcactccactctctctctctcttcattccagttgcaggggagccctgctaccgctggcctttatgggtactgtttctcctgcctacagggctttcctgcccttccccaaccttcctctacttgatttccctatccttcagt

SEQ ID NO: 365006 - DNA, 591 bp, Homo sapiens
cctggcgatgctgggtccactatcgtacaccccagcgcctggctcgtgttgcacggccactgcagccttcaggtgggctgtggttctccaccagccaccctctggcctctatgcttaaaacttttcaggcttctttttgcttttaggataaagaccagattctttccacggcccacaaagcctgcacaatctgacttctgcctacttcttcgacctcatcttgggccagcaattgtaacaacaaacacacgtccagtgctaaacatgtgctgggctatttcaatcatcagagcaagcctgggagggaggtactatcattatcctcatttgacagggggagacagtgaggtacagagaagtcacgtaacttatccaagggccctcagcttggaagagccagggctgggattcaaacccaggcagccagccctggggagcctgggcactgaagcactccactctctctctctctycattccagttgcaggggagccctgctaccgctggcctttatgggtactgtttctcctgcctacagggctttcctgcccttccccaaccttcctctacttgatttccctatccttcagt

SEQ ID NO: 365007 - DNA, 591 bp, Homo sapiens
cctggcgatgctgggtccactatcgtacaccccagcgcctggctcgtgttgcacggccactgcagccttcaggtgggctgtggttctccaccagccaccctctggcctctatgcttaaaacttttcaggcttctttttgcttttaggataaagaccagattctttccacggcccacaaagcctgcacaatctgacttctgcctacttcttcgacctcatcttgggccagcaattgtaacaacaaacacacgtccagtgctaaacatgtgctgggctatttcaatcatcagagcaagcctgggagggaggtactatcattatcctcatttgacagggggagacagtgaggtacagagaagtcacgtaacttatccaagggccctcagcttggaagagccagggctgggattcaaacccaggcagccagccctggggagcctgggcactgaagcactccactctctctctctcttcattccagttgcaggggagccctgctaccgctggcctttatgggtactgtttctcctgcctacagggctttcctgcccttcyccaaccttcctctacttgatttccctatccttcagt

SEQ ID NO: 365008 - DNA, 569 bp, Homo sapiens
ggggcttctggcaggatttcacatctgctagcttttatatttgatgctttctctaggagcttggcaaaaagaaaacaccaacatcaaaagtaaaaaaatcaaatcaaaacaaaaaaatcaaaccaaaataaagataacaacaggcgagaactgggacacgatcttcttatagttggcttattacmtgtatctgtagaattatttatttccttaaacctgtttccttttgtactttatgacatttctgtgtaactaaagtaagaatctgagagaactctaaactgatatttatagatcctaccctcaaaacagatagacagtgaggtagggatgaactaatgcagtcaatcactgaattaataagagctggagtaaaaactaggccattagcttcactcaggtcatcctgaagtagtaaagtagctcttagagaattacattttgtactaataaatgttcacttctgcccacctttcagttttccacatatatttttacaactgcaaagtatcaagatagagagaatggacattatgggagcaggcaggatgtgaaacctcttattaatc

SEQ ID NO: 365009 - DNA, 569 bp, Homo sapiens
ggggcttctggcaggatttcacatctgctagcttttatatttgatgctttctctaggagcttggcaaaaagaaaacaccaacatcaaaagtaaaaaaatcaaatcaaaacaaaaaaatcaaaccaaaataaagataacaacaggcgagaactgggacacgatcttcttatagttggcttattacctgtatctgtagaattatttatttccttaaacctgtttccttttgtactttatgacatttctgtgtaactaaagtaagaatctgagagaactctaaactgatatttatagatcctaccctcaaaacagatagacagtgaggtagggatgaactaatgcagtcaatcactgaattaataagagctggagtaaaaactaggccattagcttcactcargtcatcctgaagtagtaaagtagctcttagagaattacattttgtactaataaatgttcacttctgcccacctttcagttttccacatatatttttacaactgcaaagtatcaagatagagagaatggacattatgggagcaggcaggatgtgaaacctcttattaatc

SEQ ID NO: 365010 - DNA, 580 bp, Homo sapiens
agcagctccatttttcagttcctcaaaaacccaagagtgatccttgagttctctctttttttacatcatatcttccagaaagtcctgctgtttcaacttttgaaacattatcagaatttgaggattgttcattatctccaactggtaccattctagttcaagctactgttacttcttgttggttcagaagacaaaatctgaattgtctaatgaataatactagaatgtttggctgagcaacaattaaaggaggctgtgagtgggtgtgcttcttctgccccacttaaagggacttttccagaactcaactttyttaagaaaagctctactcaccctgacacctgagtgccactccccaaaagacttctggtggctagtaactggtgtttttttttttttttttttttttttagggagttttgctcttgttgtccaggctggagtgcaatggcacaatctcagctcaccacaacctccacctcccagtttcaaacgattctcctgcctcagtctcccgagtagctgggattacaggcatgcgccaccatgcctggctaatttttgtatctgtactagtgat

SEQ ID NO: 365011 - DNA, 549 bp, Homo sapiens
actattattttaggaaggggaaagggaagasacaaaggacaaaaaatcatctagtcataaaacataggatatggtattggaagaagatgaaagaaaaaagaaagagtgagaatctattgatttgcatacccatacttgtatctgtcctgttttctggctctagactcaaaaactgactttgctgtcgtttggggataagtggagaaatgtttattctttgttttaaaggtagattcatggtatgtttatcaaaatcctgtaacgcacattctcaaaggcagggatcaacagaagtagcatacattactccaagtgaaggcttccatcatccgcagtacactaagcgtggcaagcctcacattcccatacatccccactagccttcctgagaaagagtatgatcagatagggcctaaggcaaggcacaagctctccagagaggatttatcagccctttgacagtcagcagggagggaacctgaaggtcatcaggaaccttctcagcccagatggtaggaattcagtagagtctcggttaatttaatgccc

SEQ ID NO: 365012 - DNA, 574 bp, Homo sapiens
agcattcatcacctgctaactgaagggcccttggacccagaataacaagcagtgatacccaggtagtacactgagggccttgggtgagcctctgagacttgctggctttaggtgagactcagcacattatcagttgtggtggatatggggcaaaactccttctgcttaagaaaaacagagggaaaagtaaaaggggactttatcttgcacttaagataccagcagggttacatggcagtagagcaccaaatgggctgttggggtccccagttatagagctgtactcttagacagcatttctgaacctgcctgggtgagaagggagcccactgccctgaagggtgaatcccagatcagacagcattcaccacagctgtcttaagagccactgggccttaaggaaacattggcagtagtctggcagtatttcctgtggccagaagtggtggcagatatggggtgaggctcttttgcctttggaaaagggarggaagagtgtgaaggactgtatcttgtggttttagtgccagctcagccacagtacaataaaacaccaggcaggcttataagtttt

SEQ ID NO: 365013 - DNA, 525 bp, Homo sapiens
aaaagaaaaaaataacatataatgaagcttcaatacatctggcagcacttttcaatggaagttttgcagcccaggagagagtgkcatgacatatttaaagtgctgaagggaaaaaaataaataaactttaccctaaaatagtatatccagcaacaatatccttcaaacatgaaggagaaataaagactcccagacaaacaaaagctgtgggatttcattaacaccagacctgttctacaagcaacactaaagagagtattttaatcagaaagaaaaggaaattaatgagccataagtagttacctgaaggtataaaactcactggtaatagtaagtacacaaagaaacacagactattataacactgtggctgtggtgtgtaaactactcttaccttaattagaaagactaaacaataaatacatcaaaaataataactgtaagaacttttaaagacacagtcagtacaataagatatgcatagaaaccacaaaacattaaaaagtaaggggatgaagttaaggc

SEQ ID NO: 365014 - DNA, 645 bp, Homo sapiens
tcaaatgtgtgtttggtagatattctacagtgcacacaaggatgagttgagattggaaaataaaagattcaaaattcgataccgccattgttctggtaaggtccccgtgaagccctttgtgtggagcatgagattcttcaagcaagtgccactctattccaagactttctttttcggtagcctgcctgtcycctaaagtgactgatgcttatgacctgaaagatacagtttattgatacaacctgactataatacaccagttttaagctagcagccaatgtcatatttgagaagttaacatatgagtggctttttctataagtttttaaatgattggggatttatttggatggagcatcctggttcctgctgagcctcactgttgggcaagaaaggacctggttgtcttggagttcacagagctttcaggagggctccatccttattgcccttctacaccttcagcatgacttgtcccctgcccaggtggagaggaaccagagccctgagagctcttctggaccagatcctcctcttccttctccaccagcaccgaagtctactcgtgttttacttacaacctggtctgacttccctgtactatagtccactcatttggaagaaaaacaactacctctagcaatg

SEQ ID NO: 365015 - DNA, 645 bp, Homo sapiens
tcaaatgtgtgtttggtagatattctacagtgcacacaaggatgagttgagattggaaaataaaagattcaaaattcgataccgccattgttctggtaaggtccccgtgaagccctttgtgtggagcatgagattcttcaagcaagtgccactctattccaagactttctttttcggtagcctgcctgtcccctaaagtgactgatgcttatgacctgaaagatacagyttattgatacaacctgactataatacaccagttttaagctagcagccaatgtcatatttgagaagttaacatatgagtggctttttctataagtttttaaatgattggggatttatttggatggagcatcctggttcctgctgagcctcactgttgggcaagaaaggacctggttgtcttggagttcacagagctttcaggagggctccatccttattgcccttctacaccttcagcatgacttgtcccctgcccaggtggagaggaaccagagccctgagagctcttctggaccagatcctcctcttccttctccaccagcaccgaagtctactcgtgttttacttacaacctggtctgacttccctgtactatagtccactcatttggaagaaaaacaactacctctagcaatg

SEQ ID NO: 365016 - DNA, 603 bp, Homo sapiens
attaaaaagtgggcaaagcacatgaacagacatttctccaaagaaaatatacaactggccagcaaacatacacaaaaatgctcaacatcactaattattaggtaaatgctcaacatcactaattattaggtaaggggtaccaccttaccccagccagaatggccattattaaaatgtcaaaaaacaataagtgttgtcatagatatggtgaaaaggggatgctggtgggaatgtaaattggtacgcctctatgacaaacagtattgagatttcttttaaagcagatctactattctatccagaaatcacacttctcagtatctccaaaagaaaagaagtcattatattaaaaagacaactgcacatgcatgtttattgcagtacaattcacaattgcaaagatacaaaatcaacctaagtgcccatcaaccaatgagtagataaagaaaatgtgatatatattccgcrgtgtaatagtattccactatggaatactactcaaccataaaaaagaatgaaataatgtcttctgcagacacttggatggaactggaagccattatcctaagtgaagtaattcaagaatggaaaaccaaacactgt

SEQ ID NO: 365017 - DNA, 152 bp, Homo sapiens
tcttactcatttaatttcttactagcatccttggcttgaagcttgtcagaaatttmtttttaagagcttcctaaaattctcaagtcattttcccctgacttgataatgtaataccattacttaaaattatgcaataatgctaataataatag

SEQ ID NO: 365018 - DNA, 604 bp, Homo sapiens
tggcattcacaccctgtgtaattctctgcctttgattgtgggctggacctagtgacctacatcaagcaaatagaatacagcaaaagtgatgggatatcattttcatgattaggttataaaacactgtgacatctgtcttactaatagactgtttttctgctggtttagatgaagcaagctactatgtcaaaaacacccatggggcaaataactgagggcagcctccagcccacagcctgcaaagaatttagaatttcagtccaacaggcctaaaggatcagaatcttgccagtaaccacatgagtgagcttggatgtggatccctccccagtctaaccttcagatgggaccacaaaccttgggcygactccttaattgcagccttttgagagactgagaagcagaggacacagctaaatcatgccttagataataaatgtaagttgttttaagccacttagttttggagtaatttgtaatgaagcaaaagataactagtacccttgcccaagaccatataggagtgagtgccagggataggatatgaacccaaatagtccggttctattatcttaaccactgataccatactgacccccctaaa

SEQ ID NO: 365019 - DNA, 598 bp, Homo sapiens
gtggtgagtttaccaagaattctaacagaattgtttcctgaaagccggcctgttgaaaaatcttggaggctaaggaaatgtgcccaacacaagaagttttgtttgtgtcactgtttaccctgacgcccccatcgctatctttaatgattaaatctagtggcagaaaggaagttctgcagaaaaaagtctgtgtgggctttttcaaaggacaagtctagtgaacctgcctggtacacattcttctgggatttcagttcataagaataatatcaacaatcacaaaacaagtgcagaaacgacaaaaytcaccaccacacacacacaaaagtgaggcaagcagaggcatcatctgcctttgtgagtccaggaaaaaagtttcttttaaagtaaaaatcacaagcaccaatgcagctttggggacaggggcctacagagagagggaggtccaatgccagatgtttgatagcctgtgggagggagtgggctcagtcagctgcaccagccatgagtggagctgctcttccttgaatgtatggcctggaatacttccagcggatacatcccttcagtaatggtaaactcaaacttgagctggggg

SEQ ID NO: 365020 - DNA, 601 bp, Homo sapiens
ctctgggaccctggggatggagcggaactccataactccctgtgtgagagtgccctcttgctctatcctcctctatctcaagctctgttggctgatttgaaagggaaygaggtaatatctgaaagcgcagcaggggtgggaatgagaatgatgctcggagaacaccgtccaggcttctgccccctcactgtaaagtgacgagggtgggcacaacattttcatattgttgcccgatgaggatggtaatggagacagacaaggcttagaaactgaggatttctctctctctctctcgctctctctctctctatatatatacacacacacacatatatatacatacatgcatatgtgtatacatacatatatgtgtgtgtatatatacacgtgtatatatacatacacacacacacacacacgtgagtgtgttacagtgtggtctctccacccgacagacatgaggccataatgtttgttcccatagaacttagactaaagagagaagggatcaaatttgcaacatcatgtgcacagtgatctggaaagtgttggcaaaagcatatagaccctggcaccaggctggagtttgaatccaggaccc

SEQ ID NO: 365021 - DNA, 551 bp, Homo sapiens
ctccctggaacaaagggcaggtttactacccagtatragaaaaatgacatatccttccagggcaatgttcagacaggttactacccattgtaaaagattcaggttccctaaggtcagagttcctctcctctaacataacccactacttgtgcaggacattacctggccctctttgcatcactttagggaaactgaggctcagagagctggtgcaaatgctgatactcaggcttctgctattgctgtcggtgttaaaacactttatttctgacccaagagtctgccagcatccatgaaagtgtgccaggctaatttgttagcttgcaagcaaggcaaaatcttggacccttcacagttcttcacaacttttcccacatagcctgtttcacttattctctcacaggtttcaatggacagttctccctaaataaatcacttgcataaaaatccccaactcaggctctgcttctagggaacctatcctaaaacaacaccactgtagaggtatgatttgtgcaattttctatatgcacacaatacttctatttttt

SEQ ID NO: 365022 - DNA, 551 bp, Homo sapiens
ctccctggaacaaagggcaggtttactacccagtataagaaaaatgacatatccttccagggcaatgttcagacaggttactacccattgtaaaagattcaggttccctaaggtcagagttcctctcctctaacataacccactacttgtgcaggacattacctggccctctttgcatcactttagggaaactgaggctcagagagctggtgcaaatgctgatactcaggcttctgctattgctgtcggtgttaaaacactttatttctgaccsaagagtctgccagcatccatgaaagtgtgccaggctaatttgttagcttgcaagcaaggcaaaatcttggacccttcacagttcttcacaacttttcccacatagcctgtttcacttattctctcacaggtttcaatggacagttctccctaaataaatcacttgcataaaaatccccaactcaggctctgcttctagggaacctatcctaaaacaacaccactgtagaggtatgatttgtgcaattttctatatgcacacaatacttctatttttt

SEQ ID NO: 365023 - DNA, 551 bp, Homo sapiens
ctccctggaacaaagggcaggtttactacccagtataagaaaaatgacatatccttccagggcaatgttcagacaggttactacccattgtaaaagattcaggttccctaaggtcagagttcctctcctctaacataacccactacttgtgcaggacattacctggccctctttgcatcactttagggaaactgaggctcagagagctggtgcaaatgctgatactcaggcttctgctattgctgtcggtgttaaaacactttatttctgacccaagagtctgccagcatccatgaaagtgtgccaggctaatttgttagcttgcaagcaaggcaaaatcttggacccttcacagttcttcacaacttttcccacatagcctgttycacttattctctcacaggtttcaatggacagttctccctaaataaatcacttgcataaaaatccccaactcaggctctgcttctagggaacctatcctaaaacaacaccactgtagaggtatgatttgtgcaattttctatatgcacacaatacttctatttttt

SEQ ID NO: 365024 - DNA, 551 bp, Homo sapiens
ctccctggaacaaagggcaggtttactacccagtataagaaaaatgacatatccttccagggcaatgttcagacaggttactacccattgtaaaagattcaggttccctaaggtcagagttcctctcctctaacataacccactacttgtgcaggacattacctggccctctttgcatcactttagggaaactgaggctcagagagctggtgcaaatgctgatactcaggcttctgctattgctgtcggtgttaaaacactttatttctgacccaagagtctgccagcatccatgaaagtgtgccaggctaatttgttagcttgcaagcaaggcaaaatcttggacccttcacagttcttcacaacttttcccacatagcctgtttcacttattctctcacaggtttcaatggacarttctccctaaataaatcacttgcataaaaatccccaactcaggctctgcttctagggaacctatcctaaaacaacaccactgtagaggtatgatttgtgcaattttctatatgcacacaatacttctatttttt

SEQ ID NO: 365025 - DNA, 421 bp, Homo sapiens
ctgagttattttatttttgaattgcaagttckccatctagtggtcagtttctagaacaacaagttcatggtgttactgatgtcatcctttggatgcaaattacttagttcgcctttttttttttttttttttttaatgattaatgcctgcatcaatcatagcaagctattgagcatataacttccggcaggcacagttggcagtggttttcaagaactaaaagtatttgtatattggcaatttaaatcacagcattttccattgctgagaacaacttccctgacttattatttaaaatttaattaccttgacattgtttctgaggtgaaaaaatagtccataagaaaatttatgaaaatgtatgcttaaattcaacatgtattcttcaacaggagaaaatgaaagggagtcaggcgttcat

SEQ ID NO: 365026 - DNA, 421 bp, Homo sapiens
ctgagttattttatttttgaattgcaagttctccatctagtggtcagtttctagaacaacaagttcatggtgttactgatgtcatcctttggatgcaaattacttagttcgcctttttttttttttttttttttaatgaytaatgcctgcatcaatcatagcaagctattgagcatataacttccggcaggcacagttggcagtggttttcaagaactaaaagtatttgtatattggcaatttaaatcacagcattttccattgctgagaacaacttccctgacttattatttaaaatttaattaccttgacattgtttctgaggtgaaaaaatagtccataagaaaatttatgaaaatgtatgcttaaattcaacatgtattcttcaacaggagaaaatgaaagggagtcaggcgttcat

SEQ ID NO: 365027 - DNA, 549 bp, Homo sapiens
acataattcttctgagtctgattttcttcatccataaatatgggtgtaataataacaccataataacccagaaacattatgaggctcaaacaagatagttcatgtaaacttcctagtgcataaccacttttgaataaataataaacaatgtttctgttcttttaggtttcaggattaactaagttattacacacacagagaaaattgacccaaatagttttccaactgggcttctcagctactacctggataactattgctacaacctgcttagaactcattttgctgttttctgtatttcaggccaagctgagtacagggaaactcaattgtcttttagaatagtgttaaaagttatcagcagcttccaaaatgtgggtgcaggtaaaaccaaaatgatgaaccccctgaaagcatctgggtggaggtgggggtgtgtatgtccagggtgggatccagttctgcggtaaaaccattcagtgctttctccctagggaagctgtgcscatggcactagctggagcaaaatccagggaacacaggagtagg

SEQ ID NO: 365028 - DNA, 569 bp, Homo sapiens
ggctatatttctccatgtatgccagattcggtggcaatggagagcttttaaaggattttaggcgagaaagatatgtatgamctgtgtttttaaactatatctttcagttttagtaatagaagtttggttcatagcagatctattttcttatcaggatcaactagaaaagatagatttaatttttagaaaatcttactttggacacataaaagaactactgaatcaccatggacatgagggttcaaggcctcagaaatgagggaaactcactgatgtaaacatgatattctatgctatgctgttttttccccttaaggtagttccagttcataaacatcataattggacagggttataagcaaagaaacaaacagatgctaaaagacacagaaactgagaacagctttcagcaaacttacagggttagaaagacagaaattgaagtccagggctatccaggaagtcaggacttgaggggtcaagattctggagagatggtaattgctaagaagcaaaaacaatagtctaatatcctcaaggttatttgctgatctatatataagctgtgt

SEQ ID NO: 365029 - DNA, 614 bp, Homo sapiens
cagcttcacacagtaggaagtttgtatcatgggtctcctgggcatgaaccactagcaagccttcatacactgctgagacattccctttaggacattccccatttatgaagggcagtgctccaattatttactagagtcaaggtgagcctgggcttaaggcaccatctagagctgaaaagaaggcagtaacytagcagtaaaggacctctaagcaaatatactcactaaaaaaaacaaaacaagccacatagaaaagactaattagtaaataatccttcaatgcaaagagatagatgtacatcaacaagaaacaacagcaaacaggaaaatatgatctccccaaatgaacaaagcaaataactaaccctaatgagacggtgatatatatatgtgagctttctgaacattaattcaaaaatactagttttaaggaaatgccataatctccaagataacatagaaaagcaattcagaaatttatcagtgaaatataacaaagagattgaaataattttaaaaaatcaaacagaaatcttggaactgagaaatacatttgttgaatgaaaaaattcattagcagctctcaacagcagaatggatcaagcagaggaaag

SEQ ID NO: 365030 - DNA, 477 bp, Homo sapiens
aaaaaaaaaaatcatgtgaacatctcaataaatccaggaaggatttggcaacatccaagggccattactcatataattctcaataaaaatagaaatagaaaattcctcaaattgtaagactgagtgttaccccttaaaatcagargcaagtcttcccttaccactaatattaaaaagtatgaggatttgactagtttaataaagcaaaagtaaaataaaataagacttccagataagaaaggatgaagtaaaaccaccctcattctctcatcacataatagcttgtataaaataactaaaccatctatgcaaaagctactaaaatgaatctgtcacaaagctactggaaataataagcaagtttgccaacatagcaggatacaaggccaatgtttaaaaataaattgcatttctatatattagcaacaaaaaattaaacatgaaatttttaaaattccatctacaatatagcctgaa

SEQ ID NO: 365031 - DNA, 477 bp, Homo sapiens
aaaaaaaaaaatcatgtgaacatctcaataaatccaggaaggatttggcaacatccaagggccattactcatataattctcaataaaaatagaaatagaaaattcctcaaattgtaagactgagtgttaccccttaaaatcagaagcaagtcttcccttaccactaatattaaaaagtatgaggatttgactagtttaataaarcaaaagtaaaataaaataagacttccagataagaaaggatgaagtaaaaccaccctcattctctcatcacataatagcttgtataaaataactaaaccatctatgcaaaagctactaaaatgaatctgtcacaaagctactggaaataataagcaagtttgccaacatagcaggatacaaggccaatgtttaaaaataaattgcatttctatatattagcaacaaaaaattaaacatgaaatttttaaaattccatctacaatatagcctgaa

SEQ ID NO: 365032 - DNA, 630 bp, Homo sapiens
attttttcatatatttcttggccatttgtatatctttgagaattgtctattcattttcttagcctactttttgatgggattttttttcttgctgatttgttggtgttccttgtagattctggatattagtcctttgtaagacgtatagattgtgaagatcttctcccactctgtgggtttcctgattactctgctsactgttcctttcgccatgcaaaagctctttagtttaattaggtctcagctatttatctttgtcttattgcatttgtttttgggttctttgtcatgaaatccttgcctaagccaatgtctagaaaggttttccagtgttatcttctagaatagaatttttatagttttaggtcttagatttgagtccataatccatcttgagttgatttttgtataaggtgagagatgaggattcagtttcattctcttacatgtggctagccaattatcccagcaccattttttgaaaagggtgttctttccccactttatgtttttgtttgctttgctgaagatcagttggctgtaagtatttgggtttctcagttctttattctattccactggtctatgtgcctatttttatacaagtaccatgctgttttggtgactatg

SEQ ID NO: 365033 - DNA, 630 bp, Homo sapiens
attttttcatatatttcttggccatttgtatatctttgagaattgtctattcattttcttagcctactttttgatgggattttttttcttgctgatttgttggtgttccttgtagattctggatattagtcctttgtaagacgtatagattgtgaagatcttctcccactctgtgggtttcctgattactctgctgactgttcctttcgccatgcaaaagctctttagtttaattaggtctcagctatttatctttgtcttattgcatttgtttttggrttctttgtcatgaaatccttgcctaagccaatgtctagaaaggttttccagtgttatcttctagaatagaatttttatagttttaggtcttagatttgagtccataatccatcttgagttgatttttgtataaggtgagagatgaggattcagtttcattctcttacatgtggctagccaattatcccagcaccattttttgaaaagggtgttctttccccactttatgtttttgtttgctttgctgaagatcagttggctgtaagtatttgggtttctcagttctttattctattccactggtctatgtgcctatttttatacaagtaccatgctgttttggtgactatg

SEQ ID NO: 365034 - DNA, 549 bp, Homo sapiens
tgccttagcaaaaatcaagcctgaaatatttgactttcaaacataagactatagaatctgacagcctccaagaaaagycctgaatattttttttaagtttctgaataaaatttcccagggaagtaagagcacgcataaaagtaactaaaattaacacttgtttatagtttatagtataagatggtggactgagcactcactgcaacacatgccctccccctcccacataccctgccaaaaaacgctaaggagtatcagtggaccctcatagagaaactaacagtatctgtatgaaaaaatataaaggttaggtagcaatgcaagaagctaccatcttggtaagaaatctattgcagaaaaaaaaaatgggtgcacaaccaagaagcatcagcatttgaggaaagtcagtgtcatgaaagaaaagagcaggaatagatgcaaaaaaaaaataagttaaaaaagctacatagaaagaaacacagttaaagcagtcagaagagaaatttaaaataattagattaaaaatctccagtgagataaagaaagaat

SEQ ID NO: 365035 - DNA, 592 bp, Homo sapiens
agaaaccctattaactcatcaaatacggaaataaaaatattttcctcatttctttataatagttttatagagaaacaggttggtatgttttgcttaagcccatccttacttgtctgaaacaacagaggatgcaggcagcaggcacaaggaagggtgagaaaggtatacattgaaaccccagataattctctcactgcaacagaggtaagagaatctcttccccactagacattttaacaaaggtactttggttacaagggacagcaactggtttaagtgagcttcagtttttaaaaaagagctatggaaatgatatagattaagaggaatcacatagagtctaagttacactaagtttagctggactgttaagtctttaggttacagctcttgcttctttcttggtctacacagtctctcattttcacttttccctgcagaaggtccattctcttgcagactgcctttgtctgcagggcttatagtttctgcttcctcacracttcagctcacacttaggccagagtcaactttggccctgagtctgtgacttctgagatctcaggcacatcactctttgattactgtatct

SEQ ID NO: 365036 - DNA, 545 bp, Homo sapiens
tacattgagcagtctcattgtcctctggcttccctgaaggtcactggccaaggctggagtggcagtggaggtggcaagtgaggatggmcccacaattcccagcacccagtgagcctctcagctgttttctaagatagataaaggatagcatttgatgcccactcaacttagtactttgcatttacacaggattagttaaagtgtggagaagaaaagtaatctgtagaaggatttaagcaccaggtcccttctctaaacttctgacaatatcttcaatttatttaattgggggggatgttattaacacaaatgaaatttgatatagttttttaaaaaaatatatccatttgggaagaagggtgtgttaggacgttattggattagaataaagaagtaccagagactgggtaagttataaagaaaagaggtttaattgcctcatggttctgcaggctgtacagaaagcatagcagcatctgcttctggggaggcctcaggaagcttacaatcatgccagaaggcaaagtgggtgcaggcacatcaca

SEQ ID NO: 365037 - DNA, 545 bp, Homo sapiens
tacattgagcagtctcattgtcctctggcttccctgaaggtcactggccaaggctggagtggcagtggaggtggcaagtgaggatggacccacaattcccagcacccagtgagcctctcagctgttttctaagatagataaaggatagcatttgatgcccactcaacttagtactttgcatttacacaggattagtyaaagtgtggagaagaaaagtaatctgtagaaggatttaagcaccaggtcccttctctaaacttctgacaatatcttcaatttatttaattgggggggatgttattaacacaaatgaaatttgatatagttttttaaaaaaatatatccatttgggaagaagggtgtgttaggacgttattggattagaataaagaagtaccagagactgggtaagttataaagaaaagaggtttaattgcctcatggttctgcaggctgtacagaaagcatagcagcatctgcttctggggaggcctcaggaagcttacaatcatgccagaaggcaaagtgggtgcaggcacatcaca

SEQ ID NO: 365038 - DNA, 433 bp, Homo sapiens
tggccacctctgtggggtctctttccaccccattaccctgtctgaaatccaactagtgaattaggtcagaaggatcttgggatttaacattgtttgagctgatgattctgatcactactctatgagaggaaatgtgggagtgggactctcttgaatgcagcagtttgtaactttggcagtttataagatctacttgctgaactttaaaaaaattccaatgtccaggccacatcccagrccaattaaatgagaacacaggaggtgggactcaggcactattatttttaaaagctcgccaggtgattttaatgtgcagccaagtagagaagaactgcccttacatttttctcagtaaagacagatgcaaaggttttgattaagaatcaccgtaacctcagccacccagagggcaattaggaagcacttcaaatta

SEQ ID NO: 365039 - DNA, 572 bp, Homo sapiens
aggatgagaaatgagccctctgcaaggactgcttatgtcaccttcacctccatcagtgaggtaggtgttttattagccacgttggacagaattggacactgaagtcaagtgcacagtcayaaagtgtagaacctggtaagaaaaagccccaagtgcctgatatagagtatgtgtatgagttagaattgtgtttggctgcaagtaatagaaaggaaaggaaaaaacctcactccaattttaaaaaaaagttttatttttaattacaaacaattatatatattttatggggtaccaactccaatattttaaatggggatatagttttaccacattgcaagagatccagagttaggtagatacctagattggttcagcaaatcaactgtgctaggacagatgtctttcaagatggctgtacagctctagtgccacatccgctttcacagccagaagaaacaggacctccttcttagacattttgcttattaaagaaggaaactatgccctaccccaccactactaccaccacaagaaaatttcccttactcttcactggccagaactgggcaacc

SEQ ID NO: 365040 - DNA, 572 bp, Homo sapiens
aggatgagaaatgagccctctgcaaggactgcttatgtcaccttcacctccatcagtgaggtaggtgttttattagccacgttggacagaattggacactgaagtcaagtgcacagtcacaaagtgtagaacctggtaagaaaaagccccaagtgcctgatatagagtatgtgtatgagttagaattgtgtttggctgcaagtaatagaaaggaaaggaaaaaacctcactccaattttaaaaaaaagttttatttttaattacaaacaattatatatattttatggggtaccaactccaatattttaaatggggatatagttttaccacattgcaagagatccagagttaggtagatacctagattggttcagcaaatcaactgtgctaggacagatgtctttcaagatggctgtacagctctagtgccacatccgctttcacagccagaagaaacaggacctccttcttagacattttgcttattaaagaaggaaactatgccctamcccaccactactaccaccacaagaaaatttcccttactcttcactggccagaactgggcaacc

SEQ ID NO: 365041 - DNA, 601 bp, Homo sapiens
ttcaccatctttgaagtaatggcaataatattctgccaaattgtcaagattaacagaagtgacatatgtgaagcagccagaacattcaatcattcatgcaacaaacatgacttgagcacccaygatgtgccaggcactgaggatacaaaagcaaacaagatagacagagactctgctgtcatccttctgggggcagacagatctgtaaacactttggccaactaggttgttggctggtgattgtgctgctaagagacaaaaacaggtgctgggatagagatgtgtgggcagggttttatttcagtctgggtcagggaaggcctcagtgaggaggtgacctctaagctgaaagtgaatgatgagagagtgcaaagggagacaaataactcaatagatagtctttctactacttatttatattgttttgtcacttaagccttgcacaactttattatattactcccattatgcaaattgcaaaaattgaagtctagtaaagttaagtaactcacttaagattacaacacaaataagggcacagccaacatttgaaccaccatttagcctgaaatgagagctgaactccaatactgtttaaagg

SEQ ID NO: 365042 - DNA, 450 bp, Homo sapiens
aaaataatttactgtgcactatgtacatatgtactatggaaaactgtgtactatggggggcgttcatatgctgaracttcccatctcaagtagcagttaaaatagtttaggtggctttcagtcaatatacagagaacgtttcattaaccaatataattattttatctcaatttaaatgacaaaaacaaaaaaaagtatgtcaattgatactgccaaatgaaaatgtgatgaaaatatttcatttgatgccaaataagtatttgtttggaccctttttcttattctcattttgggggcagtggaaatggagcaatggatattgtaacactatatggtaagttcatcatctgtggcagctagagcaaaatcttgaacttattctattaaatatataatggttttccatgatgaatattttaattttcttgttatatttactacatgtatctg

SEQ ID NO: 365043 - DNA, 544 bp, Homo sapiens
aattctggctatgattgcccacctggacaatgagatagtaatagatataagttatcttgattattactgacacttttagttgtgtcccaaatgattggcaagctataaaagaatggctttgacctttctgtcatgctcttcaaggacaatgtcctcagattcccctgatccatactggcatggtgtggggagaagggagatggagagaaccaagagtacaaagatcctaagagtcattgttcaatttcaagatcttaaatatttatcttctatctacatctaaacaactctaaagcaaaaatattcatcatctgtgaccattactctgctttgttaatatttkacaggaagatctttaattgaagattcattctaccctcagaaaactaacagaagatattgaaaactgccatatatattggaatctttaaaggtatcctcttatatttctattcaatgtgtgtatggataaagaaacttagtatgtgcctcttatatttgaagattctaatattattcataacaactaacatttgtatgttgc

SEQ ID NO: 365044 - DNA, 555 bp, Homo sapiens
attaataattgtgaaaacataaatgtaaatgaccttgacctgttggagaagaggccaaaagaagcatgaagcttattgcagtctagttacaaatactaaaggaaaactataggtattacagttaaatgagaaccatcattgtggttttagtataattgaagtcaatagggatgaaaagaagcttaatatataagttgttaacaaatatacagtaggcctggtgctgtggctcacgtctgtaatcccagcattttgataggccaaggtgggcagactgcttgagcccaggagtttgagaccagcctgggcaacatggtgaaacctcaactcatctctacaaaaaaaaaaaaaattagctggctgtgctggmgtgcacctgtggtcccagctacttgggaggctgaggtgggagtagctgggacccagcctggaagcctgggagatcaaggctgcaataagctgagatcatgcaactgtactccagcctgggcaacagagtgagacactgtcttgaaaagaaaaaaaaaaaaagaaggaaggaaggaaggaaagaaa

SEQ ID NO: 365045 - DNA, 603 bp, Homo sapiens
cattaaaatttaaaactcttaagcaccaaatgacattatcaagacagtgaaaagataaccaagagaatgggataaaatatttggaaactatgatctgataagcgtttagcattcagaacatgcaaagaactcctataatgcaacaacaaaaagacaacccaaattttttaaaaagggaaaagaatttgaataaacatttcatcatagaagataaacaaccaataaacacataaaaagatgcttaatatcattagtcattaggaaatgcaaatcaagaccacaatgagatacttcactcacaccaactaaaatggctatttaaaaaacagtaacaacaacaacaacaaccaaaactaaaatcaaaaaatggaaaataagtgttggcaaagatgtgaagaaattggaattctcataccttgcttgtggggaaatggtacatctgttatgaaagacagttyggtagttcctcaaaaagctaaccatagagttatacatgacccagccattccacatctaattatatacccaaaggaactaaaagcagggactcaaacagataactatatgccaatgttcattataagattattcacaatagcaaaa

SEQ ID NO: 365046 - DNA, 567 bp, Homo sapiens
agttttatttgatttgttcatttgtacccagaacagtgcctggcacataataggctttataactatttgctgaataaacaagtgaatgaatgggtatttgagggtaagggatgataaaataataacatgraactttagtaagatacttatatttttacttcttaaattagatacttgaaagacttgttgataaagtcatatgttagcatcttttttgttgtttgtaaaataataccattaacctatcaaagtttcaaagttttaattatcacctctaaccccttccagtggtttcatttttccttgaagactctgggaaggtaggtccgtgtggttctcaatgacatcatccttataatgaaaactgtcaagtcttcaatttaaactgagaaccacaatttccaatgtcgttcttttcaataaaataggggagttttttaaactttcattgggccagttcaaccacgaatataatgctgctaatcctaaaagcaaagtcctaaatattgaaggttaactggatccatgtgaagtcagcctaaagaaagacagattttagtgtggcca

SEQ ID NO: 365047 - DNA, 552 bp, Homo sapiens
ttgtcaattttattgaaaatcagatggctgtacacgtgtgcctttatttctgggttctctgttctgttccatcgttctatgtgtctgtttttataccagtatcatcctattttggttattttaactttatagaataatttgaatttgggcaatgttatgtctccagctttgttctttttgctcaggattgctttggctatttgggctgcttttttggttccatatgaatttagaatagtgtttttttctaattctgtgaaaaacaatattggtagttttatatgaatagcattgaatctgtagattgctttgggcagcatcrtcattttaacaatattgtttcttccaatccatgagcattttgttttgaatttggctatgaattcttctggtctggggctttctttggtgttaggttttttattactgattcagtttcagaactcaatactgttttgtccagttttcaatttcttcttgattcaatcttgagagactttgtgcttccagaaattgatccatttactgacagcattaaacagatcattgagg

SEQ ID NO: 365048 - DNA, 444 bp, Homo sapiens
tgaggatttccaaaactttttcaggtacacaaggttaaaaacttcttttgcaataatactaagacattatttgccttttatactgtcattatctcacaagagtatcttggagttttccasaggctacatgatattttatatctcagcagattaaactcagaagcagacactagaatttagtgcttttctatttttaaaatataataaactgataattgtaagtagagtgtttctctgagttctatgagctgttctagcaaattacttgaacctaagaaaagggttgtgtgaacactaatttataaccagtcagtcagaagcacaggctacaacctcgggcttaagtgggcatctaaaatggagatctatctttaagaaatgagccctcggtctaaaagatctgacactatctccagtagatagtgtgggattgaattggaggac

SEQ ID NO: 365049 - DNA, 585 bp, Homo sapiens
ttaggtaccatgttacatttttatcttacttaaaggatagacaagattacaaaggattttacaaagtacacagattaacagccagattaaagggatgcagagagcggggtatgggagaagcttccatgccctctctgggtgcaccaccctcagtaacctccgcgtgttcacctatcaggaggctcactgaagcctgtctttttggaattttatggagacttgattaagcagatatggttgattaaaactttggccattggcgatcaacttaatcttcaatccctcttttttcccagaggtgtttctaaatcagctgacactttttaaagtgccccagccaccagtcatctcagtagcataaaacaaacaaacaaaaaaacycactcatcactccagagattccaaggattttaggctttgtatgccagaaaacaggaactaagactaaatataattttcacaatattacggtaccattttatcttttccaagtgtaagattgatactctcacactctattgttgggagtgtaaaaaagtcaaactattgggaaacacagtctattcaaaattaaaaaaaaaaact

SEQ ID NO: 365050 - DNA, 203 bp, Homo sapiens
agcaacttcacatgagtgactaacagcattttctctgtctaaagagtaaggcctaatacttattgagaattcactctgggctttggctaaaaaaataaagaggttttaaaawgacagactaatattatatatctatgtagcatatagctatgtatattacacattatatgacatatatcatgttctatcatctagatcacata

SEQ ID NO: 365051 - DNA, 581 bp, Homo sapiens
ttcagagcatcatgttattaccatttcaaatcttcccaagctattacctcttaactctctcagagagatgtgatttttttctgagagggggaaacactatttctgagaggttgaaagcccattaaggtttcatggcaaggaagcagtatggtgggggccttgatgttaaagtccttaaaaatttcactgtacttttttttttttttgagacagagtcttgcctgttgtccaggctggagttcaatggcacgatctcagttcactgcaatctccgcctcctgggttcaagtgattctccctgcctcwgcctcccaagtagctgggattacaggcactcaccaccattcccagttaattttttgtatttttagtagagacggggtatcaccatgttggccaggctggtcttggactcctggcctcaggcgatccacccgctgggcctcccaaagtgctgggattataggtgtgagccactgcacctggcccactgtactttttatttaaatataatatatccttccatatcccgcaacttatgcagcagagagacctatttctctattatatccaccaaactt

SEQ ID NO: 365052 - DNA, 581 bp, Homo sapiens
ttcagagcatcatgttattaccatttcaaatcttcccaagctattacctcttaactctctcagagagatgtgatttttttctgagagggggaaacactatttctgagaggttgaaagcccattaaggtttcatggcaaggaagcagtatggtgggggccttgatgttaaagtccttaaaaatttcactgtacttttttttttttttgagacagagtcttgcctgttgtccaggctggagttcaatggcacgatctcagttcactgcaatctccgcctcctgggttcaagtgattctccctgcctctgcctcccaagtagctgggattacaggcactcaccaccattcccagttaattttttgtatttttagtagagacggggtatcaccatgttggccaggctggtcttgractcctggcctcaggcgatccacccgctgggcctcccaaagtgctgggattataggtgtgagccactgcacctggcccactgtactttttatttaaatataatatatccttccatatcccgcaacttatgcagcagagagacctatttctctattatatccaccaaactt

SEQ ID NO: 365053 - DNA, 536 bp, Homo sapiens
ctttttaattattcttaaaatatatttacatgatatcataggtttttatatgggttcccacacttgtgagaaatgattcaggtatgttccactattcaacttcctctaacatgcagtaaatgacacttataactagaatggataggcaacggataagttgcttcttgtatcttattaattctagctaaaagtactgccaattctaaagaaaatactatcaagaaaaaattttctcaaaatagcagctgatgtacaaacattagaaaaatagtctttacgattgactagaytgtgctagtctgtgtagactttatataggtaaaacaataaaaacagtataaaatttaaatccaagggagttcaagattaatgataatcatgcaagatttcatacatattcttgacaatcatgtgttccttattatgttagataagtattaatactattgtcaatatactttttaaaagatttctgaaacaatgtaattatgaatatgggaaattttaaaactaggaaaaacattatttgaagtttt

SEQ ID NO: 365054 - DNA, 536 bp, Homo sapiens
ctttttaattattcttaaaatatatttacatgatatcataggtttttatatgggttcccacacttgtgagaaatgattcaggtatgttccactattcaacttcctctaacatgcagtaaatgacacttataactagaatggataggcaacggataagttgcttcttgtatcttattaattctagctaaaagtactgccaattctaaagaaaatactatcaagaaaaaattttctcaaaatagcagctgatgtacaaacattagaaaaatagtctttacgattgactagactgtgctagtctgtgtagactttatataggtaaaacaataaaaacagtataaaatttaaatccaagggagttcaagattaatgataatcatgcaagatttcatacatattcttgacaatcatgtgttccttattatgttagataagtattaatactattgtcaatatactttttaaaagatttctgaaacaatgtaattatgaatatgggaaattttaaaastaggaaaaacattatttgaagtttt

SEQ ID NO: 365055 - DNA, 580 bp, Homo sapiens
gtttagagataggctctcactctgccattcaggctctaatgcagtggtgtgatcgtaactcactgccgtctcaaacttctgggctcacaggctcaagcaatcctacttcagcctcctgagaagctgagactacaggtgtgcaccactgcatccggctaattaaaaaaaaaattgtagagatgaagtctcactttgttgcccaggttgttcgccagctcttggcttcaagtaatcttcctgccgcagcctctcaaagtgttgggattacagatgtgaggcactgtgcccagccaagcttggtattctcacatggagagttgaacccaggctgcctgggtcagatgtattcttaagtctttcattcatacattctgctggagaaatttagaaatgtgtcaagtaaaaaaataaagtttttattagaattgcatacaayttataagctaattaggaagtaataaccatatttgtaatattgcatcaaaactattgcaacaaataaaaacacttggtaaatttgtcagctataaaataaaaatacaggacaaaatattgcaggctgtgtcagatataaaactct

SEQ ID NO: 365056 - DNA, 599 bp, Homo sapiens
tgggaggctcacctgagctctggaagttgaggctacagtgagctgtgattgcaccactgcactccagcctgcccgatggcgtgaaatcctgtcagaaaaaacaagaaacaaataaacaaacaaacaaaaaaaaaaaaaaaaaaggaaagaaaaagaaaaaagaagctgaggctcaggtaagctgctcaggccaccagactaaggcagttaaagatggcatccagacccctgaaaggaggccaagctaaagattggtttgggcaacgggtggttacttctggcagacacagaaaaggaacaagtaagagaaggaaagagtagggtcttgtctctgtcccataaaagcagcctcagaagaagtggactcagataattcacagcagaggctcagggarggagaggaagcctgggaggggtacccgtattggtgagggctggaggaggccacagatggtggttacagttggttgagagataaagatttctgatattcgttaagagaaacctcaaaacccttcagttccagaaactggcgtcctgttctagagatgattcaattatcttttctaacctcatgggggaaaaagaagcaaagagtt

SEQ ID NO: 365057 - DNA, 575 bp, Homo sapiens
gatgggaatgggtggtcagacatccctcattataccttccttcatttggaattcaagcacagctgaccagcattaacattaaaacagagcccttaagactgacaaaggtccaggcacagtggcttacacctgtaatcccagcactttgggaggccaaggcaggaggatcactttagcctaggagtccgagaccagcctgagcaacatagtgagacccagtctacaaaaaataaaaaattagccagctgcagtggctcacgccygtggtcccagctacctgggaggctgaggcagaaggatcgcttgagcccaggaggtcaaggctgcagtgagagccctgatcgtggcacaatgctccagcctgaaaaaccgagtgagaaccagtatgaatttaaaaaaacaaacaacaacaaaaaaccaatagcaaccaatcagttatgtttcacatttttcttattttttgtaataaaaaattaaaaattgaattaaaaaaagactggtaaagcagattctttgtaacaagaagataccaacataacagcaggctttgacatattttgaaatgtccctgcaaa

SEQ ID NO: 365058 - DNA, 527 bp, Homo sapiens
agttactgttacctgtcttttggataaaagccatttcaactggggtgagatgatatctcactgtagttttgatttgcatttctctgataatcaataatgttgagtgctttttcatatatctgtttaccatttatatgtcttattttgagaaatgtgtattcaaatcttttgcccatttttaattggattattagattttttcccatagagttgtttgagtttcttacacattttttattaaccccttgtcagatgggtagtttgcaaatattttctcccattttgtaggttgtgtcttcactttgttgattttttcctttgctgtgcagaagctttttaacttgatgtgtttttttgttcatttgcccatttttgctttggttgcctatgcttgtggggtggtattactccagaaattttttgtccaggccaatgtcctrtagagtttctccaatattttcttatagtagtttcatagtttgaggtattagacttagtctttaatccattttgatttgatttttgta

SEQ ID NO: 365059 - DNA, 559 bp, Homo sapiens
tgagacaatactgaactataccagggctgagaataagtgtctttgaaaagggtcgaatctgtgatgctagagacagccctggaaactgtcaggagttagcccaaccaggactgtgaccagatcccaggctgtccaccacagatttgcaggctacctgcagatgtgactttttcaaatgtactcaaagacaagctgactttggctaatgcagaaattaattaattcctctttttcagtaaactttatcctcctacacttagattgtctgtaagtacatctctggagttgagctcaactagaaagaagctgtctgcatttagttaataccagcattggatgcacacaatataatttgaataatgtagagcaacattttaatcatctctcataagcagtttccccatttgcaacttcctgggaaatcttacattatgaaatgttcattagaactcccaytttaaaaccctgctgccattttgtgagtgggcagaagaaaggctggagatgagatttgtctgtctcaaatgattcactccttcatttctggttcactccacag

SEQ ID NO: 365060 - DNA, 574 bp, Homo sapiens
acttttgaaacctctcaagggctgggcacagtggctcacgcctgtaatcccagcactttgggaggctgaggtgggtggatcacctgaggtcaggagttcaagaccaccctgggcaacatggtgaaacctcatctctaccaaaaatacaaaaaattagctgggwgtagcaacacatgcctgtaatcccagctactcgggaggctgaagcaggagaatcacttgaatccaggaagcagaggtttcagtgagccaagatctcaccactgcactccagaatgggtgacagagtgagattccgtgtcaaaaaaacaaactcttgaagcaatgaagccaagccaaagattcgccatcagactgtgcctgtaaaacctgtatgaattgggtgaattgctctcttttcaacgtctccaaaatatcttgaggtccctgggcctgtcagaaagtgacattctttacttattgcaaagttagaaacgctataaaggaattgtgtgggcaaggtaccaggtgtgtctttttccaagtctactggctgtataaagtcaacctcaatccctcgaagcagtccggttgc

SEQ ID NO: 365061 - DNA, 581 bp, Homo sapiens
tgtgagcgtctgtttctatagggatggagaaagtcccaagagaccactgctcgacagtgtcaccaacaatgtggataagttgttgatgtataagatcatagatttattttgaacctgccagggatttgaagaaattaaagaaatctaaataaatcaaatcccaggaaagacaagttcttcctagtagagagaggcccatagatgcctcattcctggtggaggagggggaggtagaatgaatctgacacatactggggtaagaaaaaaaacaggcaaactttccaggcacagaaatctgktggtgggactgaaaagaaaatcaaatcctcaagtaacttaaaattagaagctggactgtaaaacacaaagagatctccagagtctcacaggtctcggatctcaagcctggctgagaggaaagtgcccattcagccctcaaaacatatgaagccagtggtgaactgaatataactgtaacgaggacaagacccaactcaactaaaagtttagattgaactagcacgtaatactactggcctgacagaagggagatatcctttcggcggtggggggtggtgggc

SEQ ID NO: 365062 - DNA, 581 bp, Homo sapiens
tgtgagcgtctgtttctatagggatggagaaagtcccaagagaccactgctcgacagtgtcaccaacaatgtggataagttgttgatgtataagatcatagatttattttgaacctgccagggatttgaagaaattaaagaaatctaaataaatcaaatcccaggaaagacaagttcttcctagtagagagaggcccatagatgcctcattcctggtggaggagggggaggtagaatgaatctgacacatactggggtaagaaaaaaaacaggcaaactttccaggcacagaaatctggtggtgggactgaaaagaaaatcaaatcctcaagtaacttaaaattagaagctggactgtaaaacacaaagagatctccagagtctcacaggtctcggatctcaagcctggctgagaggaaagtgcccattcagccctcaaaacatatgaagccagtggtgaactgaatataactgtaacgaggacaagacccaactcaactaaaagtttagattgaactagcacrtaatactactggcctgacagaagggagatatcctttcggcggtggggggtggtgggc

SEQ ID NO: 365063 - DNA, 592 bp, Homo sapiens
ttagtaacattagtataatatggagtttaattcaatagaaatcackcactcaaaccttttcaacaaccatttattgaatattgacaacgagcaaggccaaagtcagtagagaattaaataatgaaccaaatccatattctgtcctcaatgaatgtataagataaagtataatcaaaagcaaggtggggagtggtgaataccataaggaatttggaaaaggcatgtactgctcttagcaagagactaaggaagaatctgggaggagtcagtagcttttgagttatttctggaaggatgatatatgaagggaaatccttgtagtagaagagcagtatgtgaagtatacataatttgaagactgcttgtacttcacttttatttgggataaaacacattttgagacttggcctagggacttaaccaaagataaatccattctagccacaaaatccccttggacattttctccctttctggccctaggatatttatgtttgctgctccctctacctggagtgctttctccctgaatacctgttggttttctccctcagctctttcaggatatataacattcaaaatttcagctgtg

SEQ ID NO: 365064 - DNA, 509 bp, Homo sapiens
gcataaaagacaaaaaaatggtatacttgtacctgcagggyagttaccatgaatgaaacttgtaagagtgggagttgttctgggtgagtgagtggtgagtgaatgtgaaggactaggacattactatacacttctgcagactttataaatactgtatacttaggacacactaaatgtattaaaacattttctttctttaaattaatctgagcttactgtaaatttttaaactttataaactctttaatttttaaaaaagcctttttactcttgtagtaacacttagcttaaaagccaagtacattgtacaactatataagaatattttctttttgtatccttattctatttttaaaatctttatttttacttttgcaacttgttgttgttaaaaacgaagacacaagcacacacattagcctaggtctatacagagtcaggatcatcaatattactgtcttccaactccacgccgtgtatctcagggaggtcagaggcaataacatgca

SEQ ID NO: 365065 - DNA, 623 bp, Homo sapiens
gatttttttttttttttaattttcactcagctcatgaagcatccacttactgagctttctcacctttccaatttgcttcagatcccgaatgaccatagagtggtggacgttgagttctttggcaacttctagcttctagtgtaattgtaagaggatcagcttcagtggtggctctcaattggtcattgtcaacttccaatcgccggccatgwtgctcctcatcttcaaggctctcatctcctttgcaaaacttcttgaaccaccactgcactgtcactttgttagcagttcccgggccagatgtgttgttgatgttgcaagttgtctctgctactgcatgacccattttgaacttgaatgagaaaattgcttgaatttcctttttgtctaacattattcccatagtttaaaataaatataaaataaacagcaagtaataagtctttagcaaaaaactgtaaagcatgaaatgtgcattaaaatggtgtataacataaccacatttatttaagaatgaatcccaatatcaaatggcaaatttcaacaatgcagaagctgcaatatcttttgcaccaaagtgcaagcttgccaaggaatcagtatgggaattcagagagcacaga

SEQ ID NO: 365066 - DNA, 587 bp, Homo sapiens
ctttagttaagagtggtacatacaacaggggcaaggagggctaaaggcccctcggtgtccatgcttgggacaatgcctctatgagaggccaagaggtgaccaagaacagagcttctcaaatcttgatgtggatctgaatccctggggagcttgctaaaatgcagattctcgtcagaaggttaagrtggggccaggaaatacccacctactgctggagggggtcagacagactttgagtaactgaaatctgtggaatgactctggagcagcagaggtggtgtgggcaagggcagtggcaagtgacgatcaggacatgaaagcaatctccagcaatcctcgggtattcaacagggaactgaatttcctacagaatggtactcgatggtggaaacttggactgagattacatcagtctttttcacaatattttcttttttaatttcactgcccgccactctttgtgagcaaattggcaggcatcgagaaacaaataggtagcaaacacccattaacagaaaaaagtatgtacttggttttacagcttgggtgattttcatgctcatggccatggttttataatgcatgct

SEQ ID NO: 365067 - DNA, 647 bp, Homo sapiens
ggagaagatttgaataaaatcactccttttccatgtgggtcaacacagtaccaaataagaactgggcctttgatagaaaatgtaagggacaccctcatagtgacttctttcctagcagtctgcctctgtttgcggtgttgtctggggtcattgttgaaagttattgacatatttctgcctctttgtgagttatctgtgaagctacgccacagtactctgttgttggctattctgcatgctcccagtgctcaggtgaattccttggaagatactgagcraaaacctagagcttatatgaccataatatctagaccattagcatgaactggtaaaaaccaaagtagaggaaaaagattgaaccaacaactcagtagaaattggtaggtttatatgagctttgttttgtggctcgaacattttagatacccaaagtccaagcattactcagttgggactggaaatcagatgaagtcatctaacatttttcaagagatggaagccaaataatttggcttagacttaagtagaatacttgagagccccactccaagcagtagcctatttatatggattattttaatcatttctgggttaactagtaaggattatagtcatctttataaaacaataacagcaacaatagcagc

SEQ ID NO: 365068 - DNA, 647 bp, Homo sapiens
ggagaagatttgaataaaatcactccttttccatgtgggtcaacacagtaccaaataagaactgggcctttgatagaaaatgtaagggacaccctcatagtgacttctttcctagcagtctgcctctgtttgcggtgttgtctggggtcattgttgaaagttattgacatatttctgcctctttgtgagttatctgtgaagctacgccacagtactctgttgttggctattctgcatgctcccagtgctcaggtgaattccttggaagatactgagcaaaaacctagagcttatatgaccataatatctagaccattagcatgaactggtaaaaaccaaagtagaggaaaaagattgaaccaacaactcagtagaaattggtaggtttatrtgagctttgttttgtggctcgaacattttagatacccaaagtccaagcattactcagttgggactggaaatcagatgaagtcatctaacatttttcaagagatggaagccaaataatttggcttagacttaagtagaatacttgagagccccactccaagcagtagcctatttatatggattattttaatcatttctgggttaactagtaaggattatagtcatctttataaaacaataacagcaacaatagcagc

SEQ ID NO: 365069 - DNA, 564 bp, Homo sapiens
tgagcatgtcctataaagttactgtgatgttaagttattgaatgctgaaccgtaggggaaatacagggttaggttcctgtgtgcctctggtcacaacattctcatcaaccttgtttaatatatatcggtgattcattaacatcaaagctatggccagcagcactataactcatgtctgaacaaagtttatctaacgtaagtatttgctctgcaaggcacatcacagccctcttaagctcaggaacactagacagcaattcagcattacccttcaaggccattttacatagtgaaattctcagcaaaaagcacaaaaaggcagacaatgtggcactaaatagactgctaaaaagacacttctttacagtataagagctggaataagaaggcagagtttcaccttgtttaacttcagttgagaacatgtgcaccaggcaactcaaatttttttgtcactctgcacatgtctgtgactgtcagcagtgtcaggcgtattgatgtgctagttacaaataaattttagcaagtaggcaaatttkcaaataatgagaaccaactgtatcc

SEQ ID NO: 365070 - DNA, 512 bp, Homo sapiens
tattccggtaatcttttaatacagactttataaatagctcacatcagacgatgggttatattggagagccagtcttctgcggtttcttgaagaatgcttgggatctgtgaggaagctctaggcccttggaggctaggtagcagttcactcagtaggagtttgtgctccttttgctcagtatttaacctggtagcatttgatggataagttcattaggagctaastagaagaacttaccacacttgtcagtttggaaaatgaggcccgggaagggaaagtgacttgttgagggtcaccattatagacgaaagtttaatacaggattgtgttaatagctcctttctgggatatctgatgtgtactaagcactaattcctgtgcttttatacattatctcattaaaattctagtattttcgatttaggttgtgttatgcacactttacaaacaaggggattgagatttacagagagagagtaacttgcataagatcacgtagctaccaatggtgt

SEQ ID NO: 365071 - DNA, 512 bp, Homo sapiens
tattccggtaatcttttaatacagactttataaatagctcacatcagacgatgggttatattggagagccagtcttctgcggtttcttgaagaatgcttgggatctgtgaggaagctctaggcccttggaggctaggtagcagttcactcagtaggagtttgtgctccttttgctcagtatttaacctggtagcatttgatggataagttcattaggagctaagtagaagaacttaccacacttgtcagtttggaaaatgaggcccgggaagggaaagtgacttgttgagggtcaccattatagacgaaagtttaatacaggattgtgttaatagctcctttctgggatatctgatgtgtactaagcactaattcctgtgcttttatacattatctcattaaaattctagtattttcgatttaggttgtgttatgcacacttyacaaacaaggggattgagatttacagagagagagtaacttgcataagatcacgtagctaccaatggtgt

SEQ ID NO: 365072 - DNA, 558 bp, Homo sapiens
cactcaacttcaatgaagcatccaacagagtgcttattttgttttgttttgctttgctttgttttgtttgagacagagtctcactgtgtccacccatgctggagtgcagtagcaagatcttggctcactgcaacctccacctcccaggttcaagcgattttcctgcctcagcctctggagtagctgggattacagatgcatgccaccacacctagctaatttttgtatttttttagtagagatgggatttcattatgttggccaggctggtctcgaactcctgacctcaagtgatccgcccgcctcagcctcccaaattgctggcattacaggcatgagccaccgtgcctggcccaggttacttattaattacaaaaggaaatgaaacttttataatggaaagatgcagtagacacacacatgtgcacacaaggatgcacctacatttataygtatatatgtatacacacttaacttttaaaattttacacacttgcctgcaacttgcctttttcatccagcaatactggtagaatttccaaatcaactgataagccc

SEQ ID NO: 365073 - DNA, 414 bp, Homo sapiens
cttatttatctgaatgactttctgtttagggatactaagaaaagaagttacgtgaggtaatcatgctggtgctgaggttaagtttgtgcagtttcacttcttccttaatagtttttttatacatgcaataaaggacatgtccggaagctgatcagtgccagcatgaccatgaagtgctcagtccccattccttctctccttacccctcagcccycttgcaggctatatacaaatttattcttttccttttctagggttgggaatttgcctcctttcttcctgcccctgtctgttattggtccctagtaccccaatttctgctacttttctcctccttcttttttttttttttgagatggagtctctctccgtcacccaggctggagtgcaggggcatgatctcagctcattgca

SEQ ID NO: 365074 - DNA, 552 bp, Homo sapiens
gggtagttacttttccactgttaaagaatgaggcttgccagctcctaaggaaatctctgaccccaccctgtacttttcaagcaagagcttttgaagtcttttgtgctagttagagactagcatagttagtacagctaagtaagtatgtaacagattctattattaggtttatctttgctgattcccatttgattgacagcgagttctccacccagaaagtttgatttattttggcagttggaagaggattttatggagcacttgttatctaaaaaaagtaaggctgtggaacctgcttcccccacccctcttttttagctgtttgggttggtcctagtgagcatgcctaatctaaggattactcagcaaacatgaccttagggctggttttgtaaatgttaccaaatctattacttaaccacagatgttcttccattgttgtgtcccacagccagagtagaatggtgacgattagttctgtgagacttggataaaacctgtattctttargtctctttgtatgtggtggtttgaaagtatttcctcacaaaa

SEQ ID NO: 365075 - DNA, 577 bp, Homo sapiens
gtaaccaatatttatttactgagtaccaggtgcttgagttttttaatcctcacaacaaccttgaccagaaggtttattaaagatcacaatttaacaaataagaaaattcaggttcagagaactttatgcccaacatcactccttttctctcattatgttctatgctctctccagtgtaccatacttcctctcattttgcaaacatttaatgggctttttttctgtgccaaaactggtgttaggtgttagggcaaagaagatgaatgaaacactgagatcatatatatgaacatgcatgtgaaattataaagcattatatgaaaattgaaactttttcttcttaataagaaaaaattcagtctagtggaagaaacaggaataaataactttgtcctccaaacttyccttgcctacttttacctcctttgccaagcttgtccttcaacctgaatttgacctttcacattctgaagtttgctcacttacctagtcattcagattcttccacatactttacaattaattcattcaccaaacacaaaggggtcttatattcaaagcagaattctaggttgat

SEQ ID NO: 365076 - DNA, 558 bp, Homo sapiens
tgaggaagccaaagagtctggagccagagaaggcatttggactcaaatgggatctattggattgtaccctattggcactaaggaactactgcctaccccccgccccggcttctcatgcaggactatgacctagaattggagttatgttatagaaagatggcttcaagttcccctttgaggagctccmcagtaaataagccatttaggagagaggtccccatttctctggactcaccattgcctccaaaaaaaaaaaaaaaaaaaaaaggctaaaatctccccaaaagaatggcaaatgaacaagggaaggaaggagctatttcttagtgttctttagactttaacagagtattatgtactgctattattattttttaggttaacaaaagtaatacattttctctagtgactccctgaatgctcctttgtagcttaatagttgaggctgaatgtagctattcagaatacctggacagctatggatggaaggggcttctctaggctaacttttgctctcttgtctcctgaataatctgaggggtggcatgggatgcagtc

SEQ ID NO: 365077 - DNA, 507 bp, Homo sapiens
attcccaccaatggtgtataagcwttctcttttctgtgcagcctcaccagcacctgttgttttttgactttttaataatattcattctgactggtatgagatagtatctccttgcgattttgatttacatttctctgataattagtgacgctgagcatttttctatatgtttgttggccacttgtgtgtcttcttttgagaagtgaatgtatctttgcccagttttcagtgaggttgttttttgcttgttgaattgtttaagttccttatagattctggcaggaagtgtatctatcccagaattcctagtaaatacatcctagtctttgattggccttgacaaggttacatgtcagttcctcaacaaatcatggttgcctgggtaaaaggatgtaagaattattttaaaccaatctaggcctacccttacagctcagagtgaatcccacccaaaccagtgacaaacaataggtgagctggcctctcaaaggaaatttgggaaagtac

SEQ ID NO: 365078 - DNA, 527 bp, Homo sapiens
ctatgacctcaggacagttttcctactgttctgtgcctcagtttgcccacttgtcaaatgaggacactaatagggtctttctcatagggttgttaagagagttaaatgggacaattcttgtaaaacacttggcaaaaagtctggcacatagtaagtgctcaatacatgtctgctgctattattgtagttatcttttttttttttttttttgagacagggtctttctttgtcacccaggctggagtgcagtggtgtgaartcagctcactgcagtctcaaccttctaaggtcagcttcccaagtagctgggactataggtgcacaccaccacacccggccaatttttatttttatttcttatttttttgtagagagagggcctccctatgttgcccaggatggccttgaactcctgggcttaagcaatcctcccacctcagcctcccaaaatgctgggattacaggcaggagccaccgcactcagtctgttgtttttatcttgactgcatgtcttgtgctgtcttcta

SEQ ID NO: 365079 - DNA, 374 bp, Homo sapiens
ctattttactatggagggctcatgattccttcccttcwcccctccacacacacacacagttgctggaagagacctttgaaatattctaagcccatctccacaattttctgctgaggaaactgaggatatgaaacttgcttgaggtaacacagcaagtcagattcacaccagagacacaaactcaggatccggattcccagcccagtgttcttcccaccccagctcctgcccctgagcagttttgcccctgggtggcagggatgtgggcttctctgaaaacattggcgatccacatctcacctccccaagaaccaaggcagactcttcagccatcccatctcacccctgccctgaaaactccctccccaggctgc

SEQ ID NO: 365080 - DNA, 599 bp, Homo sapiens
ttgcatgttttttatagcacaagacggccagtgtggctgctgcagagtaaggaaraagcgagcattatgagatgaggtcagagaggtgggggagccagctcatgagggggtattgttcatttgggaaagaggccagggctgaccacactacagaaaaattggctgggtgcttgtgacaggacctggatggtcactcacttactggggcggcagagaaggctgcaaggcctgaggccttggttatctgcttagtggctccatggagtctgcttgctggaggctatctggccttctgatccattcttttcttttctttttgtttttgagacagagtctcactctgttgcccaggctggagtgcagtagcacgatcttggctcactgcaacctccgcctcccgggttcaagtgaatctcctgcctcagccacctgagtagctgggattacgggtgcccaccaccacacctgggtaatttttgtatttttagtagagacggggtttcaccatgttggtcaggctggtctcaaactcctgacctcaagtaatctgcccgcctcagtctcccaaagtgctggggttacaggtgtaagccaccgcg

SEQ ID NO: 365081 - DNA, 599 bp, Homo sapiens
ttgcatgttttttatagcacaagacggccagtgtggctgctgcagagtaaggaaaaagcgagcattatgagatgaggtcagagaggtgggggagccagctcatgagggggtattgttcatttgggaaagaggccagggctgaccacactacagaaaaattggctgggtgcttgtgacaggacctggatggtcactcacttactggggcggcagagaaggctrcaaggcctgaggccttggttatctgcttagtggctccatggagtctgcttgctggaggctatctggccttctgatccattcttttcttttctttttgtttttgagacagagtctcactctgttgcccaggctggagtgcagtagcacgatcttggctcactgcaacctccgcctcccgggttcaagtgaatctcctgcctcagccacctgagtagctgggattacgggtgcccaccaccacacctgggtaatttttgtatttttagtagagacggggtttcaccatgttggtcaggctggtctcaaactcctgacctcaagtaatctgcccgcctcagtctcccaaagtgctggggttacaggtgtaagccaccgcg

SEQ ID NO: 365082 - DNA, 599 bp, Homo sapiens
ttgcatgttttttatagcacaagacggccagtgtggctgctgcagagtaaggaaaaagcgagcattatgagatgaggtcagagaggtgggggagccagctcatgagggggtattgttcatttgggaaagaggccagggctgaccacactacagaaaaattggctgggtgcttgtgacaggacctggatggtcactcacttactggggcggcagagaaggctgcaaggcctgaggccttggttatctgcttagtggctccatggagtctgcttgctggaggctatctggccttctgatccattcttttcttttctttttgtttttgagacagagtctcactctgttgcccargctggagtgcagtagcacgatcttggctcactgcaacctccgcctcccgggttcaagtgaatctcctgcctcagccacctgagtagctgggattacgggtgcccaccaccacacctgggtaatttttgtatttttagtagagacggggtttcaccatgttggtcaggctggtctcaaactcctgacctcaagtaatctgcccgcctcagtctcccaaagtgctggggttacaggtgtaagccaccgcg

SEQ ID NO: 365083 - DNA, 555 bp, Homo sapiens
gcttattaattaagtcccatttgtctktttttgtttttgttgcatttgcttttgaggtgttagtcataaacatgttgtctaggccaatatccagaagagtttttcctaggttttcttattatagttttgggtacatttaaatctttaatccatcgtgagttaatttttgtatatggtaagagataaggatctagtttcattcttctgcatatggctagccaattttcccagggtgtcctttcctcattgtttatgtttgttgactttgttgaagatcagttggttgtaggtatgtggctttatttctgggttctctattctgttccattgatctgtatgtctatttttgtatcagtaacatgcttctttggttattacagtcttacagtatagtttgatgtcaggtaatgtgataccttcaactttgttcttttagcttaggattgctttggctatttgggctcttttttggttccatatgaattttagaattgtcttttctaattctgtaaaaaacaacattggcaatttgtagactgcttttggcagtatagt

SEQ ID NO: 365084 - DNA, 555 bp, Homo sapiens
gcttattaattaagtcccatttgtctttttttgtttttgttgcatttgcttttgaggtgttagtcataaacatgttgtctaggccaatatccagaagagtttttcctaggttttcttattatagttttgggtacatttaaatctttaatccatcgtgagttaatttttgtatatggtaagagataaggrtctagtttcattcttctgcatatggctagccaattttcccagggtgtcctttcctcattgtttatgtttgttgactttgttgaagatcagttggttgtaggtatgtggctttatttctgggttctctattctgttccattgatctgtatgtctatttttgtatcagtaacatgcttctttggttattacagtcttacagtatagtttgatgtcaggtaatgtgataccttcaactttgttcttttagcttaggattgctttggctatttgggctcttttttggttccatatgaattttagaattgtcttttctaattctgtaaaaaacaacattggcaatttgtagactgcttttggcagtatagt

SEQ ID NO: 365085 - DNA, 555 bp, Homo sapiens
gcttattaattaagtcccatttgtctttttttgtttttgttgcatttgcttttgaggtgttagtcataaacatgttgtctaggccaatatccagaagagtttttcctaggttttcttattatagttttgggtacatttaaatctttaatccatcgtgagttaatttttgtatatggtaagagataaggatctagtttcattcttctgcatatggctagccaattttcccagggtgtcctttcctcattgtttatgtttgttgactttgttgaagatcagttggttgtaggtatgtggctttatttctgggttctctattctgttccattgatctgtatgtctatttttgtatcagtamcatgcttctttggttattacagtcttacagtatagtttgatgtcaggtaatgtgataccttcaactttgttcttttagcttaggattgctttggctatttgggctcttttttggttccatatgaattttagaattgtcttttctaattctgtaaaaaacaacattggcaatttgtagactgcttttggcagtatagt

SEQ ID NO: 365086 - DNA, 555 bp, Homo sapiens
gcttattaattaagtcccatttgtctttttttgtttttgttgcatttgcttttgaggtgttagtcataaacatgttgtctaggccaatatccagaagagtttttcctaggttttcttattatagttttgggtacatttaaatctttaatccatcgtgagttaatttttgtatatggtaagagataaggatctagtttcattcttctgcatatggctagccaattttcccagggtgtcctttcctcattgtttatgtttgttgactttgttgaagatcagttggttgtaggtatgtggctttatttctgggttctctattctgttccattgatctgtatgtctatttttgtatcagtaacatgcttctttggttattacagtcttacagtatagtttgatgtcaggtaatgtgataccttcaactttgttcttttagcttaggattgckttggctatttgggctcttttttggttccatatgaattttagaattgtcttttctaattctgtaaaaaacaacattggcaatttgtagactgcttttggcagtatagt

SEQ ID NO: 365087 - DNA, 527 bp, Homo sapiens
acactcataaatgatgaaagtaaaactatgactgataccaaagaaatataaaagatcatcaaaggttactataagtacctctatgcacacaaactagaaaacctagaggaaatggatacattcctggaaacacacaacctcccaagactgaatgagaaaggtacagaaatctggatcagaccaataacagttaataaaattgatgcaataataaaagtctttcaacaaaaaaagcccaggaacagacagattcacagccaaattttacgagatatacaaagaagagctagtaccaatcttactgaaactattccaaaaaagtgagaatgagggatttctccatagctcattttacaaaatcagtatccctgataccaaaatcaggcaaggacacaacaagaacaacaaaaaactgcagaacaatatccctgatgaacataaatgcaaagatccttaacagaatactagcaaaccaaatccaagagtatgtcaaaaagayaattcattgtgatcaagtagattttatt

SEQ ID NO: 365088 - DNA, 459 bp, Homo sapiens
tcatgagagctttatgtttcacagaactttaacaaagtatcttgttcataaaaggaactcaactaaatatttgctcaattaaattatttccatcaaacggagtcattcatttctcttctactgttcttatttaatcttgaggttagtttttccactacttataatcaaaacaactgccagatgggaataaaatttggccttaaaaaatcattcacattttatttctaaaatgagaatgggaaagtactgtgagaaggaaatgaatatatataataaaccaatatcagtttttaaagtgtgtttttttctatrtaaatgaagcaacactaagcattcagaaatgtatttattgacatcaaactattgtatatatatgtgtgtgtgtatatatatatatatatatatatatatacttttaactcaaagtaatatcttttcatgatcattctttttaatgtg

SEQ ID NO: 365089 - DNA, 586 bp, Homo sapiens
tactgtacttcctccacttcatccatctcgtccctccctgactgtccattctcactgtagaccagcacagagagaaaagccaattctaccagtggtagtggaggtggtgtagagacatagagtttttcrttcaaaggtaaattattatcactcctcacttttccccttggaattgttggtgggatagcactggaggtgacctggcaagccaggtcttaactttagagctattctagagttaaattattccatttagatgtcaagaaatagaaaacttcgtgtttgactgcctgggtttcctttgttttaaacatcttacttgggaatctaatatgtaagtgattgccacaggaactcctgttcagctgagtctatccttcccttctaccctatggtgtcaaagggagtctgggaccccacacctacgacaatccagagggtagtctataaactgttgccataggaatcgccaagacagttctcatcacagtaattgttctatctataaaacccctttctataagttctgggtaatataagaaggaaatatcaagcaaaggtccaaagtcatggatgattttaacac

SEQ ID NO: 365090 - DNA, 591 bp, Homo sapiens
ttacacatgttgagcttatgacagagctttttttaatttcaaagcagtatggtataatttcccagatataatcatttaatgcacttamatttgtttctctaaaacccagaagcaactaaattgccaagaattcatgcctgaggcatttctatctacatgtctcagtataaaatgttcgaaggaagtagctcatatttataaatgagttggtttgcctccccaagtctcctcatggtaagtaccatcaaaaacctcacaaatcatccataccacccactatcgtctttgtgacacaaaggaagccctgctccattcaaacattctctacatcctccataagccccatgggtttccaatctttatttttttcataaagtaaatgacttcccaggtaatagaggcagatagatagatacatacacattttattgtttgtgctgacaggttataaggagtagagagaagagtggagatggaaaggcggtgtggagaacatcagccttgttggattacacatatgaaaatgagggagagagaaatggggaacagggaaaataaaggaattcagttgacatggatttggcactcacc

SEQ ID NO: 365091 - DNA, 573 bp, Homo sapiens
actgagttttccaccagcgtaataatcacttcctttatttttacctataacaagcagctggattagtgtagtgcatgggagagcttcagctagtcactgaaaattacagaatatcaatagctattgaygtgggtggcaacatattacaaaatggaactgtagatcatttggggaaaatattttgatgaaattcacccctctgggtgatgtgctgaatcttaaaccagaaagaaagaacatcaaaccaaacaaaaaaggttatttttttcctttgaatggacagatagcaacatctttaaatgctaaataaagtagccctgagcttctgagggtgcccctcagggactattgtctgaactgtcaatcaagtctcttggatttctgccctcaatgcttctttccttttccagctttccttcaaatgttcagcagtgataaatagagagttgtttgtcttttatttcaaatgccttccttataatatcagagctatgttagcatcatttacaaatcaatctagcaggatggcttaatgtcatcacaattttatggcagccagtgatatccaaacta

SEQ ID NO: 365092 - DNA, 575 bp, Homo sapiens
aacacattttaagagtgtatgtggtatgggggyggagtaaaagaatttattagggggataactaatgattttggcgggtctcaaagataattgttttgagctgttatttatcctgttttacctctgcccgccttttcccatcctaccccaattctcaaatcctttactaagtgtttaagagatgcaaatgcccttccccccttccctatcctgctttcttttgctgtcagagtctctatttttacttctattttttcccccagatttcaatgcagcaaaccctgtgaaaacctaatcaaactttttattaaatatgaagattcagagcagaatggagctgaatggatgctgggcagagggtcagttttactttagtagagcatctttttgatgtgctggtaaagacacgacatttatcaaagaataattttcccaaaaaggggcaaaatcatgactctcatagagataaaatgaacatgtgctaaagattttattcgactcattgattaagtgactgaaccaggtaaatattataactgcttaaaggagaagtgaaagaagcaaaaatatatact

SEQ ID NO: 365093 - DNA, 575 bp, Homo sapiens
aacacattttaagagtgtatgtggtatgggggcggagtaaaagaatttattagggggataactaatgattttggcgggtctcaaagataattgttttgagctgttatttatcctgttttacctctgcccgccttttcccatcctaccccaattctcaaatcctttactaagtgtttaagagatgcaaatgcccttccccccttccctatcctgctttcttttgctgtcagagtctctatttttacttctattttttcccccagatttcaatgcagcaaaccctgtgaaaacctaatcaaactttttattaaatatgaagattcagagcagaatggagctgaatggatgctgggcagagggtcagttttactttagtagagcatctttttgatgtgctggtaaagacamgacatttatcaaagaataattttcccaaaaaggggcaaaatcatgactctcatagagataaaatgaacatgtgctaaagattttattcgactcattgattaagtgactgaaccaggtaaatattataactgcttaaaggagaagtgaaagaagcaaaaatatatact

SEQ ID NO: 365094 - DNA, 632 bp, Homo sapiens
aattgccacacaaataactcaaattggaacttgaccctatctaattttcatgaaagggcattaaactgtgtctcatgatgagttaaaaaaaaaaaaaaaaaaagacaagtctggatttggcagttgtagaaagatttaggaagcccatgacctagttccagctttctggccaaaggggtgtgtaatctctgagcctcacttttcttatctccaagatggagaaagggcagacagatagcctcaaaagttccttttcattctcagttcctgtgattctacttatcatatcaataggatgttttctgttttatattactgtgtgggttaattttatttgtcaacttggctgggccatggtgcccaggtgtttggtcaaatattgttctggatgtttctgtgaatataatttttggatgatattaacatttaaatcagtggattttgaataaatcagattaccatccataatgtgagcgggccttattgaattaattgaaggccttaacagaacaaagactaacctctcctgagcaaggaggaattctgccagaagactgcctttgaacttgaaccrtaactttcccgagtctccagcccactggcttagcaaatcagattttggatttgccaac

SEQ ID NO: 365095 - DNA, 610 bp, Homo sapiens
caacaaaaaaaaaaaacaaaaaaaaactttgcctagaccaatgtcctgaagtgtttcccctgtgttttcttccagtagttttatactttcaggtcttatgtttaagtctttaatgcatattgagttaatttttgcataggtgagagatggggtctagttttattcttctgcrtatgggtatccagttttcccagcaccatttatttaaaagggtgtccttttccaagtgtatgttctggatgcctttgttgaaaatcagttggctgaaaataatagatttgtttctgggttctctattctgctctgttggtctatgtatctgtttttttataccaatattatgttgttttggttactatagtcttgtattttgaagacaggcagtgtgatgcctccagctttgttctttttgttcaaaattcctttggttatttgggctcttttttggttccatacaaattttaagattgttttccaatttctttaaaaccttgctcttttgatagggattgcattgaatctgtacatcgttttgggtagtatgataattttaacaatattaaatcttctgatccatgagcatggggtgtctttccatttgttggtgtcc

SEQ ID NO: 365096 - DNA, 553 bp, Homo sapiens
ccctgtgttttcttccagtagttttatactttcaggtcttatgtttaagtctttaatgcatattgagttaatttttgcataggtgagagatggggtctagttttattcttctgcgtatgggtatccagttttcccagcaccatttatttaaaagggtgtccttttccaagtgtatgttctggatgcctttgttgaaaatcagttggctgaaaataatagatttgtttctgggttctctattctgctctgttggtctatgtatctgtttttttataccaatattatgttgttttggttactatagtcttgtattttgaagacaggcagtgtgatgcctccagctttgttctttttgttcaaaattcctttggttatttgggctcttttttggttccatacaaattttaagattgttttccaatttctttaaaaccttgctcttttgatagggattgcattgaawctgtacatcgttttgggtagtatgataattttaacaatattaaatcttctgatccatgagcatggggtgtctttccatttgttggtgtcc

SEQ ID NO: 365097 - DNA, 572 bp, Homo sapiens
ttccatttaatcagagtagttgaaatcatggttttaaaaaaatcactagcagttgagagagagctggattcttcaaaattagcagcaatgtgaccttgggcaagttacttctctcctctgaatcattaaagggaagggggaaagtagtaaaatctgttgaattattggctactttaccatcattacctttactaaatggttttcagtatttcttctagttttaattttctattctgctgagttcttaaattgattcaacaaatgtttactgagaaattctataagccaagcatagtgctgtgcactaaaagagtcattacaatcaatatgagggccaggtrcagtggctgatgcctgtaatcccagcacatagggaggctgaggtgggcagattgcttgagctcaggagttcaagaccagcctgggcaacatggcaaaacccatacctacaaaaaatacaaaaatgagccaggtgtgggtggcacgcacctgtagtcccagctacttgggaggctgaggttggagaatcacttgagcccgggaggtggaggttgcagtgagccgagattgtc

SEQ ID NO: 365098 - DNA, 572 bp, Homo sapiens
ttccatttaatcagagtagttgaaatcatggttttaaaaaaatcactagcagttgagagagagctggattcttcaaaattagcagcaatgtgaccttgggcaagttacttctctcctctgaatcattaaagggaagggggaaagtagtaaaatctgttgaattattggctactttaccatcattacctttactaaatggttttcagtatttcttctagttttaattttctattctgctgagttcttaaattgattcaacaaatgtttactgagaaattctataagccaagcatagtgctgtgcactaaaagagtcattacaatcaatatgagggccaggtgcagtggctgatgcctgtaatcccagcacatagggaggctgaggtgggcagattgcttgagctcaggagttcaagaccagcctgggcaacatggcaaaacccatacctacaaaaaatacaaaaatgagccaggtgtgggtggcacrcacctgtagtcccagctacttgggaggctgaggttggagaatcacttgagcccgggaggtggaggttgcagtgagccgagattgtc

SEQ ID NO: 365099 - DNA, 286 bp, Homo sapiens
tacctgacgcatatactttctgctcccyagctccttcagctgtactcactctttgttaagtcccacaattaacattgttcttggcccggacctcaatctggcctcccacattattcctgataccacacctgacccccatgactgtatctctctgatccacctgacattcaccccatttccccatatttccttctttcctgttcctcaccctgatcacgcttgatttattgatggcagttccaccaggcctaatcgccacacaccagcaaaggcaggctatgctata

SEQ ID NO: 365100 - DNA, 286 bp, Homo sapiens
tacctgacgcatatactttctgctccccrgctccttcagctgtactcactctttgttaagtcccacaattaacattgttcttggcccggacctcaatctggcctcccacattattcctgataccacacctgacccccatgactgtatctctctgatccacctgacattcaccccatttccccatatttccttctttcctgttcctcaccctgatcacgcttgatttattgatggcagttccaccaggcctaatcgccacacaccagcaaaggcaggctatgctata

SEQ ID NO: 365101 - DNA, 286 bp, Homo sapiens
tacctgacgcatatactttctgctccccagctccttcagctgtactcactctttgttaagtcccacaattamcattgttcttggcccggacctcaatctggcctcccacattattcctgataccacacctgacccccatgactgtatctctctgatccacctgacattcaccccatttccccatatttccttctttcctgttcctcaccctgatcacgcttgatttattgatggcagttccaccaggcctaatcgccacacaccagcaaaggcaggctatgctata

SEQ ID NO: 365102 - DNA, 286 bp, Homo sapiens
tacctgacgcatatactttctgctccccagctccttcagctgtactcactctttgttaagtcccacaattaacattgytcttggcccggacctcaatctggcctcccacattattcctgataccacacctgacccccatgactgtatctctctgatccacctgacattcaccccatttccccatatttccttctttcctgttcctcaccctgatcacgcttgatttattgatggcagttccaccaggcctaatcgccacacaccagcaaaggcaggctatgctata

SEQ ID NO: 365103 - DNA, 585 bp, Homo sapiens
ggaagtctttctgttcatgcctccccaggccctaaatatggatcctattcatcagaaaaatacatgtgaaaaaatttttcagttacttacccaggctgccttcccatggcattttttgttctagtactctgagcgcatggagccatattccatctcccaatacatgctttagtttgacaatgtgttatacttccttctctttaatkcaactccacccagccttaatggtctgggatctgttaatgccaccagctttggctcatagcctgtgagtcagactgtacctcccggcacccacatccccacaccatcaagagagggcaggctggtagcctaatagcatctaccaaaaggcaggggctctttggatgtcatttaaccagtggctttgccagggacagtaacagggaaaagaggaacatgatggtggccacatggtggcttgcttgtgactcatttggggtgccccttgagttagtctaagtatcagatagaataccatatttgaaagaaaattaaacttactattttgtactttctgggcatgttcaagcattcagagactttagaaaatgttctcaccct

SEQ ID NO: 365104 - DNA, 400 bp, Homo sapiens
ctttgtacaggttattttatttccttggaactaagttttatataaaattatctacagtttccagtagtaaagtttccttataactctgtcattctgtgacacttcatcttttgtttcacagggtgaatgacacacacgtctttggtgagaaagtcaagggcagagtctagcatgttggtcgtatcaattatttgaatcccaggtctcaaatcctttatggcagtaggcataaatcataaataattccaggctactactcccagatttcttagaaggatcagagcaccgacattctttggcagatgaaaaaagaaattcagttatctcgaatgcaaattwaaaaaaagagaatattctctcctattgaaaatctttttgaagggcagtagcagtttttctt

SEQ ID NO: 365105 - DNA, 493 bp, Homo sapiens
accgacattctttggcagatgaaaaaagaaattcagttatctcgaatgcaaattaaaaaaaagagaatattctctcctattgaaaatctttttgaagggcagtagcagtttttcttgctttggtaaaaacagagaacataacagcatttctcctattatcatggctctgttctgctgcagaattgagatttggaatatgaatgatcattatgcattcagcatcatttgctttgcctgtagaagatttaagagattggcttaaacatataatatcttagaaaacccttttattagttgtatttttacttcatgcatagacatttttattgattaaataatatattttattaattatgtctgtggtctccrtgaatcacttaaagtttaaatctctctcacaaaagtggaatgtcaaaaaagtttcaaatagtttttagggggtggtggtggtagtgttccattttgctgggttctggttaaagtgctaagatgt

SEQ ID NO: 365106 - DNA, 589 bp, Homo sapiens
acgaaaaaaaaaaattagttgggcgtggtgacatgcacctgtagtcccagctactcaggaagctgaggtgagaggattccttgagaatgggaggtggagattgcagtgagccgatattggaccactgtactccagcctgggtgacagagtgagacgctgtctcaaaaaataatacaatttaaaagaaaagaaaagaaaaaatggctaaagctaaatcatggtgttctattcccattttgtaatttagaatgagtttaccagaataktttgttttgaatttttctcctttctacctttaaataaaatattgagatctgctgatatttaatttagcagtgctactgaactcatagcaaacaaatgttaagggaaaactttagaaatgtgatttaagggaaaacaattccatatgtatattttgaggtgcagagaacagcatacaaataatatggggatatttttctactagtgaaatgcatggaattctatgtcaccaattcatggtgacatgaattgttttcaggtgttccatgatctgaatatgtttaaaaactactttcccctgtcaatccttatattttagagcaat

SEQ ID NO: 365107 - DNA, 623 bp, Homo sapiens
tgtagttataaagtctaatgcagattatattaaactttacaatggggagaggaattcaaatctgctgaagatcaattttgatggttgtgtggagcttggttatagattctgaataattcttgacttttctagagaaatacaacttcagttatgtttgttaaagttaaaataaacaaaagctaataaaaaagaaggggtggaaaaagcaagtataaaaaatataaattaaaagcacaagataagatggcaggaaagagactaaactggccttatttaatatattacctttctctttttgagacagggtctccctctgtcacccaggcaggagtgcagtggcatgatcatagctcactgcagcctcracctcccaggctgaatcaatcctctcacatcagcctcctgagtagctgggactacaggtgcacgccgccacgctcgcctaattttgtattttttgtaaagacagggttttgccctggctggcctcaaactcctgggctcaagcaaaactcctgcctcagcttcccaaagtgctgagattacaggcataagctactgtgttttgcctaatatattctcatagtaagagtatattaattgttaaataaatgtgaatggtt

SEQ ID NO: 365108 - DNA, 533 bp, Homo sapiens
atctggtagaattcagtcgtgagtctgtctggtccaggactttttctggttggtagactttttgttacttattcaattttaggactcattattggtctgttcagggttttgatttctactaattcaatcttgrgaggttttgtgtttccagaaatttatctatttcttctaggttttctcgtttgtgtgtatagaggtgtttgtaatagtttctgagggttttttgtattatatttctgtggagtctgtggtaatgtcccccttgtcatttctgattgtgtttatttggatcatccctctttttttttttaatagtctagctagtggtctatcgatcttatttattctttcaaagattgaacttctggtttcattgatattttgtattgttttttacatctcaatttcatttagtttagctctgatttttattacttattttcttctgctagctttgaggttggtttgctcttttctactttctctaagtatgatgttaggttgttaatttgagatctttctaactttttgat

SEQ ID NO: 365109 - DNA, 619 bp, Homo sapiens
tggaagagaaaacaaagttcagtgaaaacagagttactgttgttatggccagcagtgataaaattyaggatggcagtcttctgtatactgagttgtttgttcatatgccgtatatgagctaaaacctatagggtccttcagcaaagataatatgaatgttctatgttttctgtgtgttagagcagggacccaggctcagtcaacacgttcatagtttgaaaccttaatcaaggcatggaatatcatttaagctaagtcgcgattatccctcacaagtgaactataaaacagaatcttgattcatgaattagttcattgttttgccctgctgatgtttgttagatataacatatatgcatgccaagtgaagagagatgaaatagcatgatgtaatttagttgtgtttcaaagagtaaagcctccagggtattggtaaacatacagctaaatagaggctcacaatacacttctgtgttttatggttttgtcaaaatcaaaggaaatgtatttactttggaacaaataattgtgggaaatttctatagtgtccctgtggcttgtatttcattgcaagtagaattccctttggtatgtgaatgacattgcataagtaagctgt

SEQ ID NO: 365110 - DNA, 553 bp, Homo sapiens
aacagagttactgttgttatggccagcagtgataaaatttaggatggcagtcttctgtatactgagttgtttgttcatatgccgtatatgarctaaaacctatagggtccttcagcaaagataatatgaatgttctatgttttctgtgtgttagagcagggacccaggctcagtcaacacgttcatagtttgaaaccttaatcaaggcatggaatatcatttaagctaagtcgcgattatccctcacaagtgaactataaaacagaatcttgattcatgaattagttcattgttttgccctgctgatgtttgttagatataacatatatgcatgccaagtgaagagagatgaaatagcatgatgtaatttagttgtgtttcaaagagtaaagcctccagggtattggtaaacatacagctaaatagaggctcacaatacacttctgtgttttatggttttgtcaaaatcaaaggaaatgtatttactttggaacaaataattgtgggaaatttctatagtgtccctgtggcttgtatttcattgcaagtagaa

SEQ ID NO: 365111 - DNA, 619 bp, Homo sapiens
tggaagagaaaacaaagttcagtgaaaacagagttactgttgttatggccagcagtgataaaatttaggatggcagtcttctgtatactgagttgtttgttcatatgccgtatatgagctaaaacctatagggtccttcagcaaagataatatgaatgttctatgttttctgtgtgttagagcagggacccaggctcagtcaacacgttcatagtttgaaacyttaatcaaggcatggaatatcatttaagctaagtcgcgattatccctcacaagtgaactataaaacagaatcttgattcatgaattagttcattgttttgccctgctgatgtttgttagatataacatatatgcatgccaagtgaagagagatgaaatagcatgatgtaatttagttgtgtttcaaagagtaaagcctccagggtattggtaaacatacagctaaatagaggctcacaatacacttctgtgttttatggttttgtcaaaatcaaaggaaatgtatttactttggaacaaataattgtgggaaatttctatagtgtccctgtggcttgtatttcattgcaagtagaattccctttggtatgtgaatgacattgcataagtaagctgt

SEQ ID NO: 365112 - DNA, 643 bp, Homo sapiens
cctgtctcttcatcatgtggttctactctcctccatgctggcttcattctcagcctgcattcagctcattgaacaattctacctttggtagaagctgaatgcatattttccaaaaacttcttaacatggcatttgataataaataaaggataaatgaaactgtttaaccactctttgctttagtaggctgcaatgtcaatctcattgacaactaaaagaattaaaacaagatctaaccaagagagggctggcaccttctattttggcactscctgaactcaatggtggtcaagtcttataaacgcatactatgttatacaaaatgatggatacacagttctgtaagtctgtttatggatctgaaccttaataagcaatactttcacagtttatctctcgaagttcatgataggatttataatccagtttgtgtgtgtgtgttttggagtttgtttgtttgtttgtagacaggatctcactctgtcacccaggctggagtgctgtggccccatcatagctcactgcagcctcgacctcctgggctcaagtgattttctgacctcagcctcccaaagtgttgggcttacgggcctcagccactgtacccaggctataatccagtttttaattacattttatatcc

SEQ ID NO: 365113 - DNA, 510 bp, Homo sapiens
atggtttaccaccatatctcattgtgaggaatgttgctcttcagagatagtcactttaaactgagcaccaagaaagctgtatttgttcatgtttataycacatatgacaacttagaccaaacatggagtatgaaattggggataccagatggcattgtaaaagtgtgctgaggcataagttaacttactacagtagaatgataagctaacattttttgaacaactgttatgtgcagcctgtgtactacttacataaaatagcttatgaatgcacatggagtttatagaaaatcaaataacataaccaagcaagtaagctcctaatgcaaacaccttcacattctaaaaccctgacaacctgacattaaattaaatatcatttcaaagtcattttggctcagttttgacttccaacctttgaggaaggttgttgtatcccacttaaaaggatgactatcctttaagggagaagaccacaataccacaagaaacaagaaaaaagatacaacc

SEQ ID NO: 365114 - DNA, 590 bp, Homo sapiens
tatgattggtgccacaataaagctcttgtaccggattctgcaacaaagtgtaaattaatggaatgtgaaaaatggaaggactgcaagggaaaggatcaaagggtgagaagggaaagggagattattagaaaaaaatgtttaataaacacatagcattccaggaatttatcatggaaagaaacaatctccttttagatttcaggtaaaaaaaaattattgtaaattactacgtaaagactttaagcattttccaaaccatgccaaggaaagagaaaaaaaattacttcttagactccaggtacttttacataatttatctcacttacttcttataattatcctataaattgagcatttctatcattttttcatacagtacccatgccagggcacctgtgtattagactcccaggtaatcagttctgtggactaatgcctctgctggcacattctgtgtatcctgtagcccttgcaggaacaytggaaatacatggcaggaagggcctgccaccttccttgcccaaacccttccaacaaagccatcaaacaataagtgtaattgaagatgcattttaaccagtatttatcag

SEQ ID NO: 365115 - DNA, 590 bp, Homo sapiens
tatgattggtgccacaataaagctcttgtaccggattctgcaacaaagtgtaaattaatggaatgtgaaaaatggaaggactgcaagggaaaggatcaaagggtgagaagggaaagggagattattagaaaaaaatgtttaataaacacatagcattccaggaatttatcatggaaagaaacaatctccttttagatttcaggtaaaaaaaaattattgtaaattactacgtaaagactttaagcattttccaaaccatgccaaggaaagagaaaaaaaattacttcttagactccaggtacttttacataatttatctcacttacttcttataattatcctataaattgagcatttctatcattttttcatacagtacccatgccagggcacctgtgtattagactcccaggtaatcagttctgtggactaatgcctctgctggcacattctgtgtatcctgtagcccttgcaggaacactggaaatacatggcaggaagggcctgccaccttccttgcccaaacccttccaacaaagccatcaaacaatawgtgtaattgaagatgcattttaaccagtatttatcag

SEQ ID NO: 365116 - DNA, 605 bp, Homo sapiens
tgttctttgtgtgtaattctcacttactcctacagctgacaacarggagagcatcatgtgtctataggacagccgcctcctggcatttgcattacaattcaatttctcatggcagtgtttttgttttgttttcaggattcctccctcttctttccacaagtgaacacctctcctgttctaggagctggggattcagtagtgaatgagacaggcaaggtccctgctgtcatggagtctgcatcctagtgtaggtaataagacaatgaacaaagtaattttcaaagcaaacaaaatagggggtgctctggagagtacatggagatctgttgtagagggttggttgaggagggtttctctaagaatcaatgctcaggctgaaactggaatgaccagatggagacagcccggagaagaactgtcagtgcattccagggagggaagaccaaatgcaatgtcttaagaggagaaaagcctggcaggttcctggaatagaaagagggcatgtgggcccaatgtatatgatggagagaggtaggaaatgaactcagagaggttgtcagcacgcagaccatattcaacattggagtcccctaaggagtttggat

SEQ ID NO: 365117 - DNA, 605 bp, Homo sapiens
tgttctttgtgtgtaattctcacttactcctacagctgacaacaaggagagcatcatgtgtctataggacagccgcctcctggcatttgcattacaattcaatttctcatggcagtgtttttgttttgttttcaggattcctccctcttctttccacaagtgaacacctctcctgttctaggagctggggattcagtagtgaatgagacaggcaaggtccctgctgtcatggagtctgcatcctagtgtaggtaataagacaatgaacaaagtaattttcaaagcaaacaaaatagggggtgctctggagagtacatggagatctgttgtagagggttggttgaggagggtttctctaagaatcaatgctcaggctgaaactggaatgaccagatggagacagcccggagaagaactgtcagtgcattccagggagggaagaccaaatgcaatgtcttaagaggagaaaagcctggcaggttcctggaatagaaagagggcrtgtgggcccaatgtatatgatggagagaggtaggaaatgaactcagagaggttgtcagcacgcagaccatattcaacattggagtcccctaaggagtttggat

SEQ ID NO: 365118 - DNA, 548 bp, Homo sapiens
cactctcacaaaatagcttatttctttaatggaggtgagttgtagggcgcacaggctctgtggtcaggtcagacagatttgctttcaaatccactctaccatatacaaactgtagagtcttgggaaagttccttgaatgctctcaggttctctgtcttcctctgtaaattggaaatgataattttgccttctttgtaggtttgggttaaggaactaggtaaggaagtggtggatcaaataacacataggagatgatcaataattgtggtcttttcttttctttgaatttgtgtctttcagccaccttcccttgagcttataccattttaaacaacctcttgtgtaaatatttgagtctaacttttacaaagggaactgctagcttggaccttcagtaaggtggcttctgtttgaattmtattcttcctctatctgccgttgcattttggattatgtagagttgcatgatctggtcctgtgttacaggaggtggaagaggggaaaatgtggggcattgtaaagaatattgtggttggaattttcttaac

SEQ ID NO: 365119 - DNA, 538 bp, Homo sapiens
ctgcctaatctctggttcttaatttgaacatgtcacagggaaaaaattactgtgtataatccccactgtcttcaagaagggtggatcttggtaactagataatcttttgtttgcaaatcacaaattcctcaatctcagtataagtattaagtatgcaagtttagaaagagaaactgggaaaagttaaatagctttacataaaaagggagagatgggagatgtaccaagaagatgaaggaaaaaaggacagtatgctggaagggaaagagagaggagactccacccctgaggatatgggagctgggggaaggaacacagtgtctttaaacttatttctgccttgggctcttttggagtccagtaaagccaatggactccttttcaaaatttttaaacacataagagatataggatttttgttatagtaaagttgtaatcaaaaaaaaatkttaaaccacatttgtttggggggaagaagtgatgaacaggtagagcactggaaacttttagggcagtgaaactatttgatatgatacta

SEQ ID NO: 365120 - DNA, 328 bp, Homo sapiens
ttctttctgtgcacacatataaatgtaggtaaacaaacacaaatacttgttatatattcatggcaataggaacataaggtatcattttgcaacttgctttttygccaccaacttattatgtatatctttttctattaataaataatcttctgtaacatcatttttaatagattgcctaatttatttaaccagtattttattggtagacatttagattgtatcacctttttccccaccttatgcagtactgtgatgaagtgcatatattctaactaaaagtttgcacagattctgaattgtttctttggaacaaattgccagaattgca

SEQ ID NO: 365121 - DNA, 564 bp, Homo sapiens
tctcagcttctgatttggaactccattttctaattactcagctatcctttctccaagtaaagtttaggtcaagggcattcaatacccaactcactagttctaaaatggccctcttaattaccagtgctcattaactttatgtgtcattattagagcaaggaggtggagagggaagtgggagatataaaggaaacaggaagtaataaattaatttctaaccaaggtcagctgttccccagagcacaaagcaatggacagtggattgctccaggggcttatattggcaagaaagttattttgacaaagttcttatgaagtggacagaaaattctgtcaacgacagcaaatattcaccagataaaaactattttttttaaagagatttgagtttaaatatttccctacaagtcctttcttctatatgtctgttctgcatagrataagtttaagcaaaagcaacctatagggaaatagaatgagatgatcttggcaaaaggaatcagagagacagagagagagagagagagggagagaaactgagagagagactgaaagagagagaca

SEQ ID NO: 365122 - DNA, 588 bp, Homo sapiens
tgctcattcatcatctcccctcaccagaggctagtgtggagctgagctggcttctgaggatgacttcagattgagagcattgggtatctgagcctggaagtcaacagccaaagggcattcagctttgcttcagatccttccagaggttacctcccctcagcccacctcccacctccaacatctccccaccctgcctcccccgacacaacatccccagacaggaataccctggkcttctcccttacccttcccttcacaactatttactgagtgcttgctgtaataagtgcctggcactatgctaggccttgaacctacgaaagtgaacaaaagacacacagtccctgtctcatgtggaatcacgtggtaatagagacactaatcagatgatcagacaaagatttaattatacattgtggcaggcgctgaagaagcaccgtgagaatatacgacgtggggttcagtctagcctggtgggtcagcgctttcctgagaaattaatgtctgagctcagaactgaaggacaagcagtagcagccagatttggggagtggggctggagaagaggattccaggcagaggaaacag

SEQ ID NO: 365123 - DNA, 578 bp, Homo sapiens
aatatccactctaaagactatggtggagggggccagaggattaatcatggtataactcagtgattccaagtataattccaaggtgagttgagaggaacactagtttcatgggatagcaaataatagatgcaaggtgaagattctgaggtaaaaaaaaatgtttaagaaattctggtttracatcaacagtagactggataaagaaaatgtcatacatagacactggaaaactatgcagccataaaaaagaataagatcatttcctttacagcatcatggatggagctggaggccattatcctaaacaaactaacacaggaacagaaaatactgcatgttctcacttataagtaggagctaaaccaagaaaacacatggatactaagagcagaacaacagacattggggcctacttgagggtggaaggtgagaggagggagaggagcctttttaataggttaatgtactaaagagagtagtctctttagtttaataggctaatgtactaaagaggagcctctttaataggttaatgtactaaagagaggagtctctttaataggttaatgtacatggga

SEQ ID NO: 365124 - DNA, 548 bp, Homo sapiens
cagcctactctaggttgagtacccatgacaagtgttctcaaagcatgctactctattgcacctcataacactcatcaagtttatattacttgtttttataagaccgtaaactctctgatacatttattgctatatccccaagaatatagcccaaaaactagtttatgaatgacactcaaaaaatatttgttgaatgactgaatatgaaagarcccaaacttatgggttttatttttttatcttgcctctactcatttacagcagtaaatctgcaagcttcagaagttaagaactttgtccattgtattcaccaatgtttcattgcacatggtatctgtttaataaaatttattttgtgaaaggcactctcttaggctttaagaaattcacttacttgtttgttttaaatttcaacctctaaggtataaatctataaccataacattgcttattgttcttttgcctaatctctaaaaaaagtttaataattgaatagaattcaattaagcgttctcctaaaactaaatctgagcatgtttacaaatgtc

SEQ ID NO: 365125 - DNA, 622 bp, Homo sapiens
attttgctcacattgttagcccattcctttccttgctttgatttattccctatcacaattttattgtggatataaagataagattttgtgttaatatctagcatggtatgacataaggaacgctgggatgagggagattagacctcatttcccctctcaggttttttccctaatcactaagctttacctgcgctcaaattcacctgtacggaaaaataatgtaggtataatgagttctgacaacaaatactcaaagttaagccaaacttcacaggctttgggcacaatctgccatactgacgccctcacttcagacaccagacacaagtttaggagtcttcaggtcaccctcactttagaccagccggctacaatttcaggggcttccattgttctctaggtttgayaacatgctagaaagatccacagaattcaggaaagcactatttttatgatttccattttattatatcaaaaatgatacaaatcagaattggccaaagagacagatgcataaggcaaggtgtgggaagctctcacttgcaaagcttccattgtcaccaaggatgcattacttttccagtacatcaatgtgtgacagtacatagaggagtgccaacca

SEQ ID NO: 365126 - DNA, 570 bp, Homo sapiens
gtatgaatccaaggtaaaatatacttgaaataattcagaaataatagatgagaactgatgagtatgtgacggtggtatattcttaccatgatgtaccacttataatggtagtaaaaatggaaagggaaaaatagcctgatatatgtgtgrcaagcattgtggagaatcaaattgaatgttgagggaaataaaataagttaatggggttaatcaataaggagatcaataattaaaataataatgcaactactacttattaggaacttactatatttcaaatgccatgctggtcatttaatacaccatcttacaaattaataagatttgattagtagagataattatgttggatttcattttaaactcctggggtttgaggtgcccaaggggcaccctattgagatatttatagggagtgaagatggaagtgaatgatgcagaataaatcagagaagatgctaggaggaggttcttctcaagagacataggagtcttagaaagcatagggctaaattggtatctacgtatcatatagtgtgtgtgtctcttcactgttatcagcattaattc

SEQ ID NO: 365127 - DNA, 570 bp, Homo sapiens
gtatgaatccaaggtaaaatatacttgaaataattcagaaataatagatgagaactgatgagtatgtgacggtggtatattcttaccatgatgtaccacttataatggtagtaaaaatggaaagggaaaaatagcctgatatatgtgtggcaagcattgtggagaatcaaattgaatgttgagggaaataaaataagttaatggggttaatcaataaggagatcaataattaaaataataatgcaactactacttattaggaacttactatatttcaaatgccatgctggtcatttaatacaccatcttacaaattaataagatttgattagtagagataattatgttggatttcattttaaactcctggggtttgaggtgcccaaggggcaccctattgagatatttatagggagtgaagatggaagtgaatgatgcagawtaaatcagagaagatgctaggaggaggttcttctcaagagacataggagtcttagaaagcatagggctaaattggtatctacgtatcatatagtgtgtgtgtctcttcactgttatcagcattaattc

SEQ ID NO: 365128 - DNA, 475 bp, Homo sapiens
cagctttaatagatattaccaataattttctaatatgtttttatcaatatatcctcttgccagcaatgtttgagagttccaattgctctacacactaaccaacacttagtattgttagtttatttaagaaaaaagttttagtcattctgataaatacatgttggtatctcattatgatttaaatttgcatttccctagtgaatagtactttttcatatacctacttgttactaaaatatcttattttctgaaatacttacttaggaccttcacctatttttgaaaattygatattttaatacttaatgttttgaagaagctctttatatggaattagaataagtacttttcagatattcatattacaatgtcttttccagtctgtgacttgccttttcattcttttattgatggcttttaatgaaataaaatttttttttacttttaataatgtttgcatatctgtgtgaatgtg

SEQ ID NO: 365129 - DNA, 475 bp, Homo sapiens
cagctttaatagatattaccaataattttctaatatgtttttatcaatatatcctcttgccagcaatgtttgagagttccaattgctctacacactaaccaacacttagtattgttagtttatttaagaaaaaagttttagtcattctgataaatacatgttggtatctcattatgatttaaatttgcatttccctagtgaatagtactttttcatatacctacttgttactaaaatatcttattttctgaaatacttacttaggaccttcacctatttttgaaaatttgatattttaatacttaatgttttgaagaagctctttatatggaattagaataagtacttttcagatattcatattacaatgtcttttccagtctgtgacttgccttttcattcttttattgatggcttttaatgaaataaawtttttttttacttttaataatgtttgcatatctgtgtgaatgtg

SEQ ID NO: 365130 - DNA, 484 bp, Homo sapiens
gcatctcctgattgcagtattaacaagcacttgattatagaaaaaagtggctttgaaacacaatatttcaaataacttgacagaagctattttgagcratgctataaaatctttcatatttcctattaaaatttataagtgatatataaataataacagtgagtatacatatttctcaaaatgaaatatcaaatggaactatttttgttggctagaatctcatggggcttcctgggtacagttgatacatatacttcaaatgtcattttacactctctaggctaatagctgctggagactgacgtgctctaacaaatttatactaaatgaatgcatgtaaatgccttggaaataatcaatatggtcagatctctgaaattccatttactttgtagttccattgaggtcacaccttctatatcaatcataagaattttaatgggaatagatataaactgcatatagagttaccgttttcagtcac

SEQ ID NO: 365131 - DNA, 508 bp, Homo sapiens
agcaccgaacaagtgttctgttttttgacaggtatgtaaaaatggaggggggagaaggcatgaagcatattacgaatctaaagccattataccagagatacaaatctgaaaacatgtrtgttcatcttattttaatgatttttctttagataggaacaaagcaagttctctagcttaaatggtggatttggggcttcttgcattagtttggccaaacccatgtgagaaaaatatagcctatagtgtctggatgggaggtaatttttatccagcactcagcacctaggcaatgaaccacgacatgaatgcaaatcctcgttgaacgattgcatatatagcactgcctgtgttttccaagtactcttctagtcctattcatacaaaaaatgatcaaaataggtaacatattttgccctggtaacataatggagcttaaatcctaggggtagaatatagaaaaagtaaagtatatgaatatgttaggtgataaatgttgtagaaaaaaata

SEQ ID NO: 365132 - DNA, 587 bp, Homo sapiens
ataaacacataaatacataaaataaaaaactgtggctacctttatatttctattggagagcrttgttgtagaccgttataaagattttaacttttactcatagggaattaaggagcctctggaaggttatgagttgaggagtagcatgatttgacttctcatttaataggatcactctgactgctgtgcagagaatagactatagagggttgaagggcaaggtaactacataggagacaacttcaataatcgaggcaagaggtgatggcacttggaccacagtgaaagcagtgaggactcagataatttttaaatgtgcgtttaggcacagttggtgataaactgggtgtagaatttggaagcagccgaagataaggacaagatttctgacctaaggaaatgataagtctgggtttgccttagttaattcatttgagatcaacttcaggaagaacaggttttagggggaagatcacaagttcagtctaggacttactaaaatttgatataccttggtttttctgataatattaattatttatattctatttaatcatatacatattattgcttaactagattatttg

SEQ ID NO: 365133 - DNA, 587 bp, Homo sapiens
ataaacacataaatacataaaataaaaaactgtggctacctttatatttctattggagagcattgttgtagacygttataaagattttaacttttactcatagggaattaaggagcctctggaaggttatgagttgaggagtagcatgatttgacttctcatttaataggatcactctgactgctgtgcagagaatagactatagagggttgaagggcaaggtaactacataggagacaacttcaataatcgaggcaagaggtgatggcacttggaccacagtgaaagcagtgaggactcagataatttttaaatgtgcgtttaggcacagttggtgataaactgggtgtagaatttggaagcagccgaagataaggacaagatttctgacctaaggaaatgataagtctgggtttgccttagttaattcatttgagatcaacttcaggaagaacaggttttagggggaagatcacaagttcagtctaggacttactaaaatttgatataccttggtttttctgataatattaattatttatattctatttaatcatatacatattattgcttaactagattatttg

SEQ ID NO: 365134 - DNA, 587 bp, Homo sapiens
ataaacacataaatacataaaataaaaaactgtggctacctttatatttctattggagagcattgttgtagaccgttataaagattttaacttttactcatagggaattaaggagcctctggaaggttatgagttgaggagtagcrtgatttgacttctcatttaataggatcactctgactgctgtgcagagaatagactatagagggttgaagggcaaggtaactacataggagacaacttcaataatcgaggcaagaggtgatggcacttggaccacagtgaaagcagtgaggactcagataatttttaaatgtgcgtttaggcacagttggtgataaactgggtgtagaatttggaagcagccgaagataaggacaagatttctgacctaaggaaatgataagtctgggtttgccttagttaattcatttgagatcaacttcaggaagaacaggttttagggggaagatcacaagttcagtctaggacttactaaaatttgatataccttggtttttctgataatattaattatttatattctatttaatcatatacatattattgcttaactagattatttg

SEQ ID NO: 365135 - DNA, 587 bp, Homo sapiens
ataaacacataaatacataaaataaaaaactgtggctacctttatatttctattggagagcattgttgtagaccgttataaagattttaacttttactcatagggaattaaggagcctctggaaggttatgagttgaggagtagcatgatttgacttctcatttaataggatcactctgactgctgtgcagagaatagactatagagggttgaagggcaaggtaactacataggagacaacttcaataatcgaggcaagaggtgatggcacttggaccacagtgaaagcagtgaggactcagataatttttaaatgtgcgtttaggcacagttggtgataaactgggtgtagaatttggaagcagccgaagataaggacaagatttctgacctaaggaaatgataagtctggrtttgccttagttaattcatttgagatcaacttcaggaagaacaggttttagggggaagatcacaagttcagtctaggacttactaaaatttgatataccttggtttttctgataatattaattatttatattctatttaatcatatacatattattgcttaactagattatttg

SEQ ID NO: 365136 - DNA, 567 bp, Homo sapiens
gcctaggcgatgatctctttgtgatgaatttcccaggtgttctttgagcttcttgtatttggaygtctaggtctctagcaagaccagggaagttttcttcaattattcccacaaatatgttttccaaactttcagatttctcttattcctcaggaatgccgactattcttaagtttgattgtttaacatagtcctagacttcttggtggttggttcatattttcttcttcttttttctttgtctttgttggatttggttaatttgaaaaccttgcctccaagctctgaagttctttcttctgctcatttgattctattgctgggactttccagagtattttgcatttctgtgagtgcattcattgtctcctgaagttttgattgtttttttgtttatgctatctattttactgaaaatttctccccgcatttcttgtatcattttttggatttccttaaattgggctttgcctttctctggtgcctcccttataagcttaataacgagccttctgaattctctttcaggtaaatcaggaatttcttcttggttaggatccattgctg

SEQ ID NO: 365137 - DNA, 567 bp, Homo sapiens
gcctaggcgatgatctctttgtgatgaatttcccaggtgttctttgagcttcttgtatttggatgtctaggtctctagcaagaccagggaagttttcttcaattattcccacaaatatgttttccaaactttcagatttctcttattcctcaggaatgccgactattcttaagtttgattgtttaacatagtcctagacttcttggtggttggttcatattttcttcttcttttttctttgtctttgttggatttggttaatttgaaaacsttgcctccaagctctgaagttctttcttctgctcatttgattctattgctgggactttccagagtattttgcatttctgtgagtgcattcattgtctcctgaagttttgattgtttttttgtttatgctatctattttactgaaaatttctccccgcatttcttgtatcattttttggatttccttaaattgggctttgcctttctctggtgcctcccttataagcttaataacgagccttctgaattctctttcaggtaaatcaggaatttcttcttggttaggatccattgctg

SEQ ID NO: 365138 - DNA, 600 bp, Homo sapiens
agtggctgtattaatttacattcctgccaacagtgtaggaaggttcccttttctgcacatcctcaccagcatttgtgattggctgtctttggataaaaaccatttgaactgggtgagatgatatctcattgtagttttgatttgtatttctctgatgatcaatgatgccgagcacattttcatayatctgtttgccatttgtatgtcttcttttgagaatggtctattcatatcttttgcccattgttattgaattattagattttttttctactagagttgtgtgagttccttatatattttggttattaatacgctgtcagatgggtagtttgcaaatatcttctcaaattctgtggattctctcttctctttgctgattgtatcctgtgctgtgcagaagatttttaaattgatgtgatcccatttgtccactcttgctttggttacctgtgcttgtggggtattactcaagaaatctttacccagtccaatgtcctggagaatttctccaacgtattcttgcagtattttcatagtttgaggctcagatttaagtctttaatctatcttgatttaatttttgtatttggcaagaga

SEQ ID NO: 365139 - DNA, 568 bp, Homo sapiens
gaggtgaacaacctctacaaggaaaagtacaaaacactgctgaaagaaatcataaatgacacaaacaaatggaaacacgtcccatgctcatggttgggtagaatcaatattgtgaaaatgaccatactgccaaaagcaatttacaaattcaatgcaattaccatcaaaataccaccatcattcttcaaagatctagaaaaaagaatcctaaaattcatatagagccaaaaaagagccctcatagccaaagggagactaaggacaaagaacaaatctggaagaatcacattacccaacttcaaactatattataaggctatagtcagccaggcacagtggcacatgcctgtaatcccagaactttgggaggctgaggcaggtggatcgcttgagaccaggagttcaagaccagcctcaccaacatggtgaaaccctgtctctactaaaaaaattacaaaaattagccaggcatagtggcacatgcctttaatcccagctactccggtggccraggcatgaaaatcacttgaacctgggtggtggagattgcagtgagctaacatcgtac

SEQ ID NO: 365140 - DNA, 563 bp, Homo sapiens
ctcgtctatagccagaaactgtgtaaaccacagtatggtgagatacacacacacacacacacacacacacacacacacacayacacacttttaatatttgtatagcacatttaaaaaatactgttcttttatctcctggcctatagggataaaagctctttaggagtttatttattcccccatttgccctaatactcaagatttcatttatttctcctgagctactctgacttgctcttcaaaagcaaatctcagaatactttggaattaaatttgacaatgacagtaagaaataaaaactattgatgtttgctgaaatggaaaaataaacaaagccacatatttcttcaccaagatttcagaagccttgaagtaaaaactgacagatgtaaatatttttttgaaaggtcattttgactttcagcctcgtttactttacatgaagtataaatacaaattagtttttggtaacagagctaacagttaaataaatttgttgaggtttttaattgacttattttctggaaaagtctctaaacactcaaagactccaatttattttg

SEQ ID NO: 365141 - DNA, 600 bp, Homo sapiens
atggggagagatcataatggtayttcaatctccaacctcagatgtgttaccaaggtctgcatcggctacatattgtattgatccaacattaagaaacaccttaaaaactgtcatcaaatactgctaaactatcagagcaaatcctgaataattttccccatgcttcttctgtgtctctggaagaatacgatatcaagaactccttggttcctgggtacacattgaatccggggcccaggacccagatacctttcccttaggcatctcctgattgtttattctatttttttctcctcaatacacataattcatataatcacccttcttccacatgttttattcacttccctgtttactaattaaagtttcttacttagaaaaacaacttccatgcaaatattcatagcaatatttttcaaaatagcaaaaaactggaaacaacctaaatgttcatcaactggtgaatggacaaatataattggtatatcaatacaagggagtactactcagcaatcaaaacgaatgaaatactgataaatgctgcaactcagataaacctcaaaaatattatgctaagtgaagaagccagatgcaaaaaaa

SEQ ID NO: 365142 - DNA, 600 bp, Homo sapiens
atggggagagatcataatggtatttcaatctccaacctcagatgtgttaccaaggtctgcatcggctacatattgtattgatccaacattaagaaacaccttaaaaactgtcatcaaatactgctaaactatcagagcaaatcctgaataattttccccatgcttcttctgtgtctctggaagaatacgataycaagaactccttggttcctgggtacacattgaatccggggcccaggacccagatacctttcccttaggcatctcctgattgtttattctatttttttctcctcaatacacataattcatataatcacccttcttccacatgttttattcacttccctgtttactaattaaagtttcttacttagaaaaacaacttccatgcaaatattcatagcaatatttttcaaaatagcaaaaaactggaaacaacctaaatgttcatcaactggtgaatggacaaatataattggtatatcaatacaagggagtactactcagcaatcaaaacgaatgaaatactgataaatgctgcaactcagataaacctcaaaaatattatgctaagtgaagaagccagatgcaaaaaaa

SEQ ID NO: 365143 - DNA, 600 bp, Homo sapiens
atggggagagatcataatggtatttcaatctccaacctcagatgtgttaccaaggtctgcatcggctacatattgtattgatccaacattaagaaacaccttaaaaactgtcatcaaatactgctaaactatcagagcaaatcctgaataattttccccatgcttcttctgtgtctctggaagaatacgatatcaagaactccttggttcctgggtacacattgaatccggggcccaggacccagatrcctttcccttaggcatctcctgattgtttattctatttttttctcctcaatacacataattcatataatcacccttcttccacatgttttattcacttccctgtttactaattaaagtttcttacttagaaaaacaacttccatgcaaatattcatagcaatatttttcaaaatagcaaaaaactggaaacaacctaaatgttcatcaactggtgaatggacaaatataattggtatatcaatacaagggagtactactcagcaatcaaaacgaatgaaatactgataaatgctgcaactcagataaacctcaaaaatattatgctaagtgaagaagccagatgcaaaaaaa

SEQ ID NO: 365144 - DNA, 621 bp, Homo sapiens
aatttctgttgctttagccacccaatctgtagtattttgcatggcagaactagcagacaaatacagagggccggcctggtgcagtggctcacgcctgtaatcccagcactttgggaggctgaggtgggcagatcacctgaggtgaggagttcgagaccagcctggccaacatggtgaaatcctgtctctactaaaaatacaaaaattagccaggtgtggtggcaggtgcctgtaatcccagctacttgggaggccgaggcaggagaattgcttgaacccaggaggtggaggttacagtgagccgagattgcaccattgcactccagcctgggcaacaagagtaagacttcatcgccaaaaaaaaaaaaaaaaaaaagcagagggcctggaggatgctctaatgtctaaggcaagaaaaatgatggtgagagagccaccagcatcactgagaagctcagtagtagctgtcctgtatagcagggacatccaacccctggsccacgaacccgttaggaactggcccgcacagtgagaagtgagcaacgggcaaccaagcattattgcctgagctccgccttctatcagatcagggatggcattagattctcatagaagcatgaa

SEQ ID NO: 365145 - DNA, 621 bp, Homo sapiens
aatttctgttgctttagccacccaatctgtagtattttgcatggcagaactagcagacaaatacagagggccggcctggtgcagtggctcacgcctgtaatcccagcactttgggaggctgaggtgggcagatcacctgaggtgaggagttcgagaccagcctggccaacatggtgaaatcctgtctctactaaaaatacaaaaattagccaggtgtggtggcaggtgcctgtaatcccagctacttgggaggccgaggcaggagaattgcttgaacccaggaggtggaggttacagtgagccgagattgcaccattgcactccagcctgggcaacaagagtaagacttcatcgccaaaaaaaaaaaaaaaaaaaagcagagggcctggaggatgctctaatgtctaaggcaagaaaaatgatggtgagagagccaccagcatcactgagaagctcagtagtagctgtcctgtatagcagggacatccaacccctggcccacgaacccgttaggaactggsccgcacagtgagaagtgagcaacgggcaaccaagcattattgcctgagctccgccttctatcagatcagggatggcattagattctcatagaagcatgaa

SEQ ID NO: 365146 - DNA, 588 bp, Homo sapiens
aactcacatggttttgatgaactgaatcagcatcatacccagmgcagggatgggaaatagagaggaagacccactgcgggacttctgtttgcccactgattcagtgagaagccaggatgccaggtccagcacagcaatgagtttgattgtgttgattgtgtctcctccagacattcactgtcaactctcaatgcagaaacagctcatgaactatatttaggaaggacagagcctgatgagtgtggaaagactgcaggtttgggcacagggctggatttaaaggtctagacctgtgaacaccacctattttgttggctgttaattttaagtgtatgtttgttctaacaacaggaccctagcttctgctggcccttaagggttacaagattttcctcctggtgacagattgtttggctacatcccaaaagatataaaactccttccagtcatcccagaattaggtccatagatttccagttatagaagagagccattctgggtaacacagcagatgtaaattatgtgcctgaattgattttgcattaatttctcgtaggctattttcatgctgcttaaataccacttttt

SEQ ID NO: 365147 - DNA, 578 bp, Homo sapiens
gcagtactcttcaaaatttgtgcacttgatgcaccctcactgtatgcttgtcactcctcgtcacagctgctatggcagatatggcatctttactgatcggttcagcacatcccctggcacttggtatgcagctattgatttagcgaatacattcttttcaattcccaacaggtaagaggatgaaaactgtttttacttacataggaagaatgacagaacacatttaatttcttgtcccaggactaagttaactttcctgctttctttgataaaacatattccaaagggatattatttcttttacattcacagaacattgtttagtactccactatattggtcacattaaattaactagacttggtgagcagaaaatggcaagttctctggatgacctggtaagacaaacatgtgtcagaaggtgtgagaaaaccctctccaagatccaggggttttccccatatgtacagtttgtagggatccaatattcttgggcatgccaggacattccctccaagaaaatggacaaatcactgcayctacataaagaaaaaagagcagccttatcaagccccctc

SEQ ID NO: 365148 - DNA, 571 bp, Homo sapiens
tcctccataaacatgtgagctaattttcataagaaatctcttatgagattatatatataatatataatagtcatggttctccagagaagcagaactaacatcctagaaacaacccatgcagtagtcagggttctccagagaaacagaagcctatgagaacagggtttagagtgattgtgtaacttgcccgaagataccaactaaaatactgacagagctgagatttgacttcaagttccattctcttaactgttaaacaatactacctttgtctaaagactaattgagccaatagacttatgtggagttttttttcagagttgcatttgtatatgtttaaaaatttctccaaatactttgaaagtaagatctgaaaatcaaacagatctttggaaattttgcagctgaaatggagaaggccaggaagcatttaaaccagggctatggttaatgttatttgtagcctgagaatgtgactgagggagagggagcttacaggctgctttagctgggctcactctctcaacctcatagggargtcgtagtggggtcttactcagtgagagtgaag

SEQ ID NO: 365149 - DNA, 562 bp, Homo sapiens
ttggtttgttctctgtgttggtactcatatatttatattgataacaaccagtaactagccacattactaaagtacattttaagcccagcatgactttattccctactgtggtaggcttgcagcagtggaccaggtagcaatcttctccaaaatggcagccaacagagagtggagcagagcccagagaacaaaccatgaacaagccccttggaatggtgacaagaatattttattwaagttatcctaggatagaaatccctaggatataaactctcaaaaatataagccctttgtaagctattatggttaaataccaaggaaaatataactttaagattataacaactcattcaaatacttactaatgcctattattttctgggcacttggctagaccctggaaatgtggtaaggcatgagatactttccggggtttgggagagcttataactagtgggggctcatgatgtgcttcaaagagagtggcctctttccttcctccagcacaccaagctgagcccttccctggagatttacccaaacacatcatccactgctctgt

SEQ ID NO: 365150 - DNA, 591 bp, Homo sapiens
ttttctcctctttctgatcaaaatctcttttagataaggatatctgtccacatctacacttatctaaaagcatttggcaaagcccaaatatgtgctgggctctgggggaaagaaccctggccctcaaacattctgtgatttactgaaggagacaaacaaaaagacaattagaatgcactgaggatagtattgcaatggaagcactcaaacaaaaagtagaaagcgaatacccctaatctaaagatgagtttggaaagagggttacgggtcttggatcagtaagagataagaacacttcctcaaagagaaaagcaactcctaactaaaagacaataaaygaaccttaaaaaaataatgtcagctcaggtataaataaatgcaagtgcattaaaagcagccacagttaataggtaatgtttatcgagtgcatgaaacgtgccagaagttatgggtcttgtatgtttttttctcatttcatcctcataccaaccttatgaggtagtaccacttttcgagttttacagacgagaaagctgaggctcagcaaggttgcatactttaccccaggtcacccaatagtagtagagcagg

SEQ ID NO: 365151 - DNA, 505 bp, Homo sapiens
ttctgaaacttcaacctaggaaactactgcattttttagagtattttgtcctcttctttttgaatgttttacttttttttctcacctgtattgtgaaaagaaaaccagaaagcaattatttyttccttctatgcccatcccttgtctttaatatcatctttgaaatagtgacaccaaggtcagtgacttctctaagtggcgtgagccactgcttctggccttctttggttctttatgatttttaaattcatccatctccctaacagtcccctcatctcaagctcaaattcaactataataatatttataagtgtcacatgatacatattaatagcatcattcatttcttcatttaataagtatttattgaggctgggtgcagtggttcacacctgtaatcccagcactttgaaaacctgaggcaggcagatcacctgaggtcaggagttctagaccagttctaaacctcgtctctactaaaaatacaaaaattagccaggcctgg

SEQ ID NO: 365152 - DNA, 505 bp, Homo sapiens
ttctgaaacttcaacctaggaaactactgcattttttagagtattttgtcctcttctttttgaatgttttacttttttttctcacctgtattgtgaaaagaaaaccagaaagcaattatttcttccttctatgcccatcccttgtctttaatatcatctttgaaatagygacaccaaggtcagtgacttctctaagtggcgtgagccactgcttctggccttctttggttctttatgatttttaaattcatccatctccctaacagtcccctcatctcaagctcaaattcaactataataatatttataagtgtcacatgatacatattaatagcatcattcatttcttcatttaataagtatttattgaggctgggtgcagtggttcacacctgtaatcccagcactttgaaaacctgaggcaggcagatcacctgaggtcaggagttctagaccagttctaaacctcgtctctactaaaaatacaaaaattagccaggcctgg

SEQ ID NO: 365153 - DNA, 505 bp, Homo sapiens
ttctgaaacttcaacctaggaaactactgcattttttagagtattttgtcctcttctttttgaatgttttacttttttttctcacctgtattgtgaaaagaaaaccagaaagcaattatttcttccttctatgcccatcccttgtctttaatatcatctttgaaatagtgacaccaaggtcagtgacttctctaagtggcgtgagccactgcttctggccttctttggttctttatgatttttaaattcatccatctccctaacagtcccctcatctcaagctcaaattcaactataataatatttataagtgtcacatgatacatattaatagcatcattcatttcttcatttaataagtatttattgaggctgggtgcagtggttcacacctgtaatcccagcactttgaraacctgaggcaggcagatcacctgaggtcaggagttctagaccagttctaaacctcgtctctactaaaaatacaaaaattagccaggcctgg

SEQ ID NO: 365154 - DNA, 544 bp, Homo sapiens
aaacacttgtataatggcaattctaaaggacaagattgagtcctacttaagtattactgagttatgtcaaagacttgctggatagctggatgtggttattacttcccaaaatatatcccttccttcagagcatatccaaatccataacaaactatgtttacacaattctgctatgtatgcatatatgaacccatattcccatattgcttagcacagtgatatgtatctaataaatgtgagagtatctgagtaactttcgaatctaagaaccatcaaatatttttattttacctcagtaatttatatgtaaaacaaatatctgggagaataaaggcgcaaatacagagaaggcacaattcctgccccaaagagtttattgatttagtggaagtgcataaaaatgtaaccagaattgtgtaaaaaatacctagtaggttcagtggcatttaaaatatgcacatatgaaatgctacaagcttatttacagtgaatattaatattggacaccacccacsacattaagtgctgagtatacaaaaagtag

SEQ ID NO: 365155 - DNA, 550 bp, Homo sapiens
ttaatgtgtttgctgtaagtaaatataaatctgttcttttaaaaataacacattattaagccactgattcaatcatcagcaggctcaagaggttaagtggaatcagctaaggcaattgatagcaccatagatctcttttatatgagagtaattcaggagaagttctcattaagcatcaaggagaaaaagttattattgccgggtgtggtggttctcgccygtaatcccagcactttgagaggccgaggcaggtggatcacctgaggtggggagttcgagatcagcctgaccaacatggagaaaccccgtctctactaaaaatataaaaacttagccgggcatggtgatgcatgcctgtaatcccagctactcgggaggctgaggcaggagaatcgcttgaacttgggaggcagaagttgcagtgagccaagattgtgccgttgcactccagcctgggcaacaagagagaaactctgtctcaaaaaaaaaaaaaagaaagaaaaagttattactgaggaacaagtttgaaaactgttccagaaagatgctc

SEQ ID NO: 365156 - DNA, 594 bp, Homo sapiens
cctcttctcctccaaatgattgcaacacctttccaacaagggcatagaactgggatgaggctgagatggatgaattgacagaagtagccttcagaaggtgggtaataataaactttgctgagctaaaggagcatgttctaacccaatgcaaagaagctaagaaccatgataaaacataacaggatctgttaaccagaaaaacagtttagagagaaacagaaatgacctgatggagttgaaaaacacaacacaaaaacttcacaatgcaaccacaagtatcaataactgagtagaccaagtgaaggaaagattctcagagcttgaagactatcttgctgaaataagagaggcagacaacgttagagaaaaaaagaatgaaaaggaatgaacaaagcccctgagaaccacagattgtgtaaaaagacagaacctatgactagagtacctgaaagacacagggagaatgaaaccgagttggaaaacatacttcaggatatcatgcaggagaacttccccaacctagcaaaacasgcctacattcaaattcagaaaatccagagaacctcaggaagatattccatgagaagatcaacc

SEQ ID NO: 365157 - DNA, 596 bp, Homo sapiens
gagaacacatggataacagggcaacaacacacactggggcctgtctgtgggggataatcggcggaaggagagcatcawgaaaaataggaaattcatgctgggccaacccatcacgtgtttttctatgtaacaaacctgcatatcctgcacatgcacccaagaacttaaatgaaagaaaaaaacaattctaatgaaagagatgttgttttatctctcaaccagatactaccactattgagaaagaaaaatgttatgaaatgttaatgaaagatagtttctaatacaattcataaaagtgtgtgtataacatagtctacatttatgcaaatgagaaaaatttgtacacatacatatttataaaagcacatacacataaaaggaaagaaaagctagaagaatctacatcaaatgatacaatatttgactaaggaaaaggctatgcactgctttatacttattttatcattccattttattctccaaatcaataaacatgtattactcttatatgatggggggaaagttactttaaaatattagtaaataaaatattactaaggtgcagaatacttgaaaacccatacaaccaaaaacaa

SEQ ID NO: 365158 - DNA, 587 bp, Homo sapiens
gttaacatttgcatttcaaggtaaagaaaggcttttactgatggccagtcaccagggaaacttaatgagaagttacagtggttggatttgtagcaacttgttttctgtagtatccaggcagcagacggctttgtgcacacaaatacagaaagtggactgcttgttaggtatcatatctaattagctagaacccaaaaaacttctgctaatgatatttytatgccaggagagtttgagacattgcactccagtttggatgtttttaaagagtaagaatctgcaggaattacacacacaaataaaaccgttaacagatacttagagctgtacacctgttacatcattggattctcaccacaatagcatgaggttgggtatcagttttctattgttgctgcaacaaattatcacaaactttgacctgaaataacaccgttgtattatttcacagttctgtaggtctgaagtccaacacacgttttgctggactaaaagcaaggtgtttgcagtgcgttgttcctaactggatgctctggggaaggaacctgatatcatgcgcattcatggtgttgaccgaatctggttct

SEQ ID NO: 365159 - DNA, 564 bp, Homo sapiens
aaatacatttctcattgatgtatcattttatattttataaaatcattttgtattatcttcctccttctcccctatatcttcgaccctccaataactaatttctttgctcacctaaaaaactctttgaacacatagtttatacttgctgccatcacatttttctgtcctatttcatcctgactccattccaagttgacttttatcactgctactccacaaaactgctctggtcaaggtcatcatgacttctaaattgctaaaactggtagttaatccccaatcccatygtagccaatctgcaacattctggccagttattcactctattctggagtcatttcttcccttggcttctaggtcatcactgattttgagtttgtgtattttgattgccctgactcagttgtcaatatctcacaataggaaagccccgagaagctgctggccacttcctcccctgtcaacactcacattctgaatgattgggtgtgttaaatatgctgtgtgtgctgatgcctctcaaatgtgtatctccagccttgattatgccctagaaatcgactc

SEQ ID NO: 365160 - DNA, 591 bp, Homo sapiens
gtaaagcaagtatagtagtatttgtcattatcgtcatgatcatattggaaataaaagttgctttttattgaatgatcactaattattttcaaaaactatgagaaaagcactgtgagtaattgcagtggggataatggcagtagtgactaacaaataagcatctgtgatgtagaaatagcagcagtawtagaaagagccaaatatatacatatttaatgatatttagtatcgatagctgggaaaaaaggtggttcaccccatatatttttcatatattcctcttaccactgtcaagagtctctatgacattgctgagcacatagcaggtcaataaatacatgctcaattggttgtttgtccctagaaatgcattaggagtctagttttattctgttctatttatttatatccaggaaagatttatggcatctggctctttctatatgccctctgataagccatccagctacaccattgaaatcttcacctaggaagaaattctctcaggtctcaagaacagagagagaaagcttctcttcacctctacagcaggggaatggtgtcctgttggggaaaactaagaacaccaac

SEQ ID NO: 365161 - DNA, 591 bp, Homo sapiens
gtaaagcaagtatagtagtatttgtcattatcgtcatgatcatattggaaataaaagttgctttttattgaatgatcactaattattttcaaaaactatgagaaaagcactgtgagtaattgcagtggggataatggcagtagtgactaacaaataagcatctgtgatgtagaaatagcagcagtaatagaaagagmcaaatatatacatatttaatgatatttagtatcgatagctgggaaaaaaggtggttcaccccatatatttttcatatattcctcttaccactgtcaagagtctctatgacattgctgagcacatagcaggtcaataaatacatgctcaattggttgtttgtccctagaaatgcattaggagtctagttttattctgttctatttatttatatccaggaaagatttatggcatctggctctttctatatgccctctgataagccatccagctacaccattgaaatcttcacctaggaagaaattctctcaggtctcaagaacagagagagaaagcttctcttcacctctacagcaggggaatggtgtcctgttggggaaaactaagaacaccaac

SEQ ID NO: 365162 - DNA, 591 bp, Homo sapiens
gtaaagcaagtatagtagtatttgtcattatcgtcatgatcatattggaaataaaagttgctttttattgaatgatcactaattattttcaaaaactatgagaaaagcactgtgagtaattgcagtggggataatggcagtagtgactaacaaataagcatctgtgatgtagaaatagcagcagtaatagaaagagcyaaatatatacatatttaatgatatttagtatcgatagctgggaaaaaaggtggttcaccccatatatttttcatatattcctcttaccactgtcaagagtctctatgacattgctgagcacatagcaggtcaataaatacatgctcaattggttgtttgtccctagaaatgcattaggagtctagttttattctgttctatttatttatatccaggaaagatttatggcatctggctctttctatatgccctctgataagccatccagctacaccattgaaatcttcacctaggaagaaattctctcaggtctcaagaacagagagagaaagcttctcttcacctctacagcaggggaatggtgtcctgttggggaaaactaagaacaccaac

SEQ ID NO: 365163 - DNA, 591 bp, Homo sapiens
gtaaagcaagtatagtagtatttgtcattatcgtcatgatcatattggaaataaaagttgctttttattgaatgatcactaattattttcaaaaactatgagaaaagcactgtgagtaattgcagtggggataatggcagtagtgactaacaaataagcatctgtgatgtagaaatagcagcagtaatagaaagagccaaatatatacatatttaatgatatttagtatygatagctgggaaaaaaggtggttcaccccatatatttttcatatattcctcttaccactgtcaagagtctctatgacattgctgagcacatagcaggtcaataaatacatgctcaattggttgtttgtccctagaaatgcattaggagtctagttttattctgttctatttatttatatccaggaaagatttatggcatctggctctttctatatgccctctgataagccatccagctacaccattgaaatcttcacctaggaagaaattctctcaggtctcaagaacagagagagaaagcttctcttcacctctacagcaggggaatggtgtcctgttggggaaaactaagaacaccaac

SEQ ID NO: 365164 - DNA, 456 bp, Homo sapiens
acatttataaactttcttaactccttctctaagctcttaccaaatgtgttttttgaacttctagccacagcccttctgagaatcctttcccctaaaatacacttcctcctagcgtgctgtatagctaatttctccctatctttcaggttaattttttaacatctctatcttttccaaattacatcttacgtgtcatttgcctcaaagcccttgccataatttatatttttaattgattgttttgcttctcatctagaatatgttatccttaattttatttccaatcccagcyacatatttagcatataggctgcttatcaaatatatgttgaatcaaggctaagtacagtgcaaggactcaataaagagttaggggtgaaagccttggatgatacagtagctctccaataaatatgtactgaatgaaaggaggacagaaaaaagcaataagaggaa

SEQ ID NO: 365165 - DNA, 635 bp, Homo sapiens
atatatctctgggtctcagggttatttcacatctactctttaacgcagaacggtgtagttccactgtgttggaaggacaagctatgctgaagcaagcttgaaggcatccaaatatttaagactctgctcttggtataaatgcatgtgattgagtctacatgtgtgcggggccaacttacgaacagggatttttccaaatgaactttcatttacaaaacaatgtttattaaagaaaaagtagcagcaatgtgataatctgaaacttttatacattattaaataaaactcagtggtaactactgcaactgattagaaataagatgaataaaatatgtttctgaggaaggattgttcttatcactgatattgttcataatttttggcatggtgataagtagatcaaattgyagtcatttcattatcctttaaaaattatctgtaatcactgtgtgccccctgttacctgtgcccaggacagtccccttccacacctgtcctctgtttcccactcattggaaaaagaggtagttagcctgtgacatcaatggttgtttaatgtgagtctataatacctatacttgcaaaaaaaaaaatcatgaaatagtggcctacaaaacagatcaaccctcacatat

SEQ ID NO: 365166 - DNA, 608 bp, Homo sapiens
agaccagcctggacagcatggcaaaacctagtctcaaaaaaaaaaaaaaaaaaaaaaaaacttagctgggcatagcggcctgggcctgtagtcctagctactcaagaagctgaggtgggaggattgcttgagcccccgaggtcgaggctgcagtgagccgagatcacaacagtgcaatctatcttgggtgacagagggagatcctgtttcaaaaaaagtttagcttttctgtaraagaattttgagcagctccttctaaaaaggaaatgtacacctccattttgccacagtcaccacactccctcttggctctcttggcaaatatttgtgttacttgttaactctcacgggcatttgattttgaaatttcctaaagataccaacaaaagtttgaattctgtttcatgtatgtttaaaaatatgaacatgaatgacaatatgaggaatattcctattaatgtcattaaaatacttacatggtaggaattaaatctcattatctgactctttaataatgaagatggaatcaagcattgttctatagccatatttcctgataattgtttactataagatattttttgatagtcttatgaaacaaagagatg

SEQ ID NO: 365167 - DNA, 608 bp, Homo sapiens
agaccagcctggacagcatggcaaaacctagtctcaaaaaaaaaaaaaaaaaaaaaaaaacttagctgggcatagcggcctgggcctgtagtcctagctactcaagaagctgaggtgggaggattgcttgagcccccgaggtcgaggctgcagtgagccgagatcacaacagtgcaatctatcttgggtgacagagggagatcctgtttcaaaaaaagtttagcttttctgtagaaraattttgagcagctccttctaaaaaggaaatgtacacctccattttgccacagtcaccacactccctcttggctctcttggcaaatatttgtgttacttgttaactctcacgggcatttgattttgaaatttcctaaagataccaacaaaagtttgaattctgtttcatgtatgtttaaaaatatgaacatgaatgacaatatgaggaatattcctattaatgtcattaaaatacttacatggtaggaattaaatctcattatctgactctttaataatgaagatggaatcaagcattgttctatagccatatttcctgataattgtttactataagatattttttgatagtcttatgaaacaaagagatg

SEQ ID NO: 365168 - DNA, 604 bp, Homo sapiens
cttggtatagttgtacacaaatactttctcctttaacttgcaagtagggtaaaaaaaattctctttatgtcccttattctataacctcttttctattttttaattttttaaactttttaaactttttcatttaaaaccacaacacaaacatgaacattagccttgccctacataggatcaccatcttccacctgcacatcttgtcccacaggaaggtcttcagggacagcacacatggagctgagccgtcttctcctatgatagcaatgctttcttctggactacctgcttgaggctgttttatacttatcatttttttcttaatagaagaaatgcactctcaaatcatcataaaagtatagtaaacacatcaaccagtaactatcatttattatcaagtagtacrtgctatacgtaattgcatgtgctacatcttgtttaagactggcagcacagttaactttatttacatgagcatcaccacgaacacatgaatactgcattgcactacaatgtgatgatggctacaacgtcactaggtgacagaagtttttccactccaccatagtcttacaggatcactatcatgtgagatccaccttta

SEQ ID NO: 365169 - DNA, 589 bp, Homo sapiens
aagcaatattaactataatgaaggtggaggaggaagaaacattagaagagagaatgaagtagaagataaactagaatcacatcttacgaacttgttatatcygcacggggtgactcagctgttgtcaagtagtgagtcacagcagggcagactatgtaggggctgccacccggcttttactctgtgtgtttcctgtggataatatctaattgtatgtgacatgaatccagccatttctagattatccttataagaaggcattaactagaactcctttcagttttcaccacagatcaccaacaatggttcctaatttactttaagaaaggccacaatctgtcctcaggatgactttcaggtgactgacacctgccttggatgggcagccactcagcacccatgagctgtaattccctaggatctttaaaatcttggaccttcaggtactgccctggcctctttgcaagggtggtcctttacattctcaatcctccagcaggtcatgcaatcacaagagatttgtcagtctgcataaaacatctgaatgctaatgaaatggcccagcacattaattagactgtcaatagat

SEQ ID NO: 365170 - DNA, 589 bp, Homo sapiens
aagcaatattaactataatgaaggtggaggaggaagaaacattagaagagagaatgaagtagaagataaactagaatcacatcttacgaacttgttatatccgcacggggtgactcagctgttgtcaagtagtgagtcacagcagggcagactatgtaggggctgycacccggcttttactctgtgtgtttcctgtggataatatctaattgtatgtgacatgaatccagccatttctagattatccttataagaaggcattaactagaactcctttcagttttcaccacagatcaccaacaatggttcctaatttactttaagaaaggccacaatctgtcctcaggatgactttcaggtgactgacacctgccttggatgggcagccactcagcacccatgagctgtaattccctaggatctttaaaatcttggaccttcaggtactgccctggcctctttgcaagggtggtcctttacattctcaatcctccagcaggtcatgcaatcacaagagatttgtcagtctgcataaaacatctgaatgctaatgaaatggcccagcacattaattagactgtcaatagat

SEQ ID NO: 365171 - DNA, 589 bp, Homo sapiens
aagcaatattaactataatgaaggtggaggaggaagaaacattagaagagagaatgaagtagaagataaactagaatcacatcttacgaacttgttatatccgcacggggtgactcagctgttgtcaagtagtgagtcacagcagggcagactatgtaggggctgccacccggcttttactctgtgtgtttcctgtggataatatctaattgtatgtgacatgaatccagccatttctagattatccttataagaaggcattaactagaactcctttcagttttcaccacagatcaccaacaatggttcctaatttactttaagaaaggccacaatctgtcctcaggatgactttcaggtgactgacacctgccttggatggrcagccactcagcacccatgagctgtaattccctaggatctttaaaatcttggaccttcaggtactgccctggcctctttgcaagggtggtcctttacattctcaatcctccagcaggtcatgcaatcacaagagatttgtcagtctgcataaaacatctgaatgctaatgaaatggcccagcacattaattagactgtcaatagat

SEQ ID NO: 365172 - DNA, 566 bp, Homo sapiens
ggatagaatgttataatgcaaacctaccttttaacactaaaatttcaatctgagtttagcagttttactggaacattattaggattttggcatcacagtgtaatttcttctgagcacagggattccctgaattctcaagggctccacttcccctcttctttccctcctattacaagttcattatattctcaatttaaatatcattttaactgctgcaatttcaaaatgttgccatattcttacrctcattattgaagttttataggaaacacaaagaaattaatgaaattaaggtgtacacaatctatatggtgccagaaatgaatattttactaaagattttgtggagagcagggaaagtaattataatacatactatatggcaaaaaaatagtattcaatttctcatttttaaaactgtgtttttccccagaaagttttctctttagcagctttatctttcttctttcccttctgaacatggtctgggaaaaaaaaatctatctctttatcacatctcttcaggtcccatttagcaaaacaaagtttcataattggctaaaagc

SEQ ID NO: 365173 - DNA, 566 bp, Homo sapiens
ggatagaatgttataatgcaaacctaccttttaacactaaaatttcaatctgagtttagcagttttactggaacattattaggattttggcatcacagtgtaatttcttctgagcacagggattccctgaattctcaagggctccacttcccctcttctttccctcctattacaagttcattatattctcaatttaaatatcattttaactgctgcaatttcaaaatgttgccatattcttacgctcrttattgaagttttataggaaacacaaagaaattaatgaaattaaggtgtacacaatctatatggtgccagaaatgaatattttactaaagattttgtggagagcagggaaagtaattataatacatactatatggcaaaaaaatagtattcaatttctcatttttaaaactgtgtttttccccagaaagttttctctttagcagctttatctttcttctttcccttctgaacatggtctgggaaaaaaaaatctatctctttatcacatctcttcaggtcccatttagcaaaacaaagtttcataattggctaaaagc

SEQ ID NO: 365174 - DNA, 609 bp, Homo sapiens
gctttatttatattttttctttctattctgcttacttatttccctagtcttatgttgttttctatgtcgaattacttcttttgcattgttrttcttactgttcgggtggaaataagaaataaaaagggtagaaatcagatttaaatgatcatgtttatataacgactcatcttttaagcttcttccaaccccccatcaatttacaatttctagtggatcagattgttctgaaaataagcagataagatgtctaagcaatagtgaccattatagtgaaagtacatgatattcttgctatggtttgctttagatggtagaggtgggtcaaatcaatttcttaaacatgggaacaactctgagagaaaaggtaaatatatgtcatcgacgtttgcatgccatcgcatcgaaccacattacttaactttgtatccaccttctaagataggtatggctattttcattgcttagacatgaaaacaggaccagagagattaagttatggactaaggatctcagagccacaaagatgtataactaaaaaagtaaagccacattttctgattctaactcaccatcaatggcctgtcttcaaaacaacattacaatata

SEQ ID NO: 365175 - DNA, 614 bp, Homo sapiens
catcttgaaaaaactactttcttagctcttccataagaagcaagtcctcatccattcaaattttatcttgagattgcagcaattcagtcacatcttcaggccacacctttaattctagttcttttgttatttctaccatatcagtggttacttcctccactgaartcttgaactcttcaaagccatccaggagaactggaatcaacttcttccaaactcctgttaatgctgatattctggagtcctctcctgaatcctaaatgttcctaatgacatctagaatgctgaatcctttccagaagatttccagttattttacccagacccatcactggaatcactatctatggcagctacagtcttacaaagtgtgtttcttaaattatagacttgcaagtcaaaattattgatccatgggctgcagcatgatgttttgttagcaggtttgtaaacgacattaatttccttgtgcatcatcagtggctcttgggtgaccaggtgcattgtcaatgagcagttatattttgacctaagcagtaggtcccaacagtaggcttaaaatattcaataaaccaagctgtgaacagatttgctgtcatacaggttttgtttta

SEQ ID NO: 365176 - DNA, 481 bp, Homo sapiens
aactctaatcctcacaacccttggaccagcatttccatatcacagatgagatgacaaaggcatagagcaactgggaatggaggagccactgaaatgcgaagtctgrccccaaaggctgcatgaaccaactccgctctgctgcctccatttttattttatgtgaattgctgaaagttcaaaaccaccccatacacacaggcaaggatggtggtgttagatcggaaattaccctgcttgattgaattcagaagctccacacaggagaagagacttacagaaacaagcacactaagcagcagcgcaaaataaaataaaataaaaataaaaataaaataaaaaactgtgcacatgcttgtgcctctccttgtgcccagagctgcatgatgtacaacagatgtgtgtgagtcactcatgcactatcctgagcaccaacataaactggcatttctttgtatttaagggtggttcccttttgtcactt

SEQ ID NO: 365177 - DNA, 582 bp, Homo sapiens
gcaagtttgtagaagcataagtcagactcccttaagcaaaagataaaataattgaaatagctgaaaaaggctaggagggtaggcctacccttcaacataggtaggtctaggactgtaacattcttatcagatgcctagctcagatcctcttctttatttctctccctccatctttcaattccccttttgatattgttgtcattgctttcactcaaactcttcccatcttacagaagctaatgctccagagtgatcttgtcacagcttctagtctagtagaatgagcagccttcttcctggtggcttcagcaagcaccaggaggtctaggctccctggaccaccttgcctgtacctgaaccaaatcatgtaggcctgggaggagaacattgctgatgagcccgccttgattacatacccaccctgaaagtaaagagagaatgataaagatggtcacatctgagtctgagtcacatggactgggacttggggaaggtgggtcaccaaagaaaaamtgaagggatgtcctagaatgggaaacaaaatctgagcaggaaagaatcaacagatgtccactacactgc

SEQ ID NO: 365178 - DNA, 487 bp, Homo sapiens
cacttaaaactgattcctaccacccatctgattggcagtgaaaaacaatttgatcaaaatctgtgatgtgcttgagaaaccattctgtgaaaaaaaaaaaaaaaagaaaagtcaaatgaattttctgaaattgcatccrtgtggctagaacacagccatgctgtatagtaagcacataaattccctttccagagaccctcttttgtaatctctagtgcttggcttcaatatacctgggcctgacagcacaggaaaaatccaggtttccttaaagctcaacaacaacaacccacatcctaaaacagaacctccatgaaatgagaaaattgctttgaaacagccattgtggacaaagcatttgatttatatgggagcgtctgaactgaataattggttcagtccctaaaatgaacacacaaaaaaaggccattggcaaaggatggtaacaagttctgccatgtcttcacggtcatgtctataatttaac

SEQ ID NO: 365179 - DNA, 576 bp, Homo sapiens
gaaattcccagtgatagaacttyccagcattcgagcactcaccgcaaaatatcgcttttcttttgcaaccattttttattatttgatatcccagaatgcacttattcaacagatatttgagtgtcttctgtgcactggatctttctaaggtcttataatctaacagctaacaaacagtggaaaagaatccctaaactcaaggaatttacattctgacatgaaaaaatggaattatttgcagattggcaaatgtgatccacaggtgtggaaaatgcagagctgagcgacaggaagtcaggacagatgctgcctatctacactgactttcaggtgccctgggcaccccatgaatgccccccaatatccctgaaattcaccctttagactgagcaagggaggagaagtaattcttgctatgcttctccctttagtacccaggattatttcaccattcagaagaatgtgcagacacaattgacatgcttaaatcgggttctctaaagatttgtggggaggtgatctattaaatgtgcccctggaaaaactggtagtgaggaagctgaactgggaatagaa

SEQ ID NO: 365180 - DNA, 576 bp, Homo sapiens
gaaattcccagtgatagaacttcccagcattcgagcactcaccgcaaaatatcgcttttcttttgcaaccattttttattatttgatatcccagaatgcacttattcaacagatatttgagtgtcttctgtgcactggatctttctaaggtcttataatstaacagctaacaaacagtggaaaagaatccctaaactcaaggaatttacattctgacatgaaaaaatggaattatttgcagattggcaaatgtgatccacaggtgtggaaaatgcagagctgagcgacaggaagtcaggacagatgctgcctatctacactgactttcaggtgccctgggcaccccatgaatgccccccaatatccctgaaattcaccctttagactgagcaagggaggagaagtaattcttgctatgcttctccctttagtacccaggattatttcaccattcagaagaatgtgcagacacaattgacatgcttaaatcgggttctctaaagatttgtggggaggtgatctattaaatgtgcccctggaaaaactggtagtgaggaagctgaactgggaatagaa

SEQ ID NO: 365181 - DNA, 470 bp, Homo sapiens
ttagaaaacaatgtctcctccaaattcttcttaggaaaagaaaccagaagaggatcatctgcccttggtggagtcagggagcagcctttgtggataacaggggccattcctaatacctaattccaaatggggttaagaccttctccctagcccatagttgttagactcctcaaagaggcaaacaggggataaattgtgcatgccrcatttgttaacaatggaaagacccttgagtttagtccagatgtcagatgtggtaaaaaagagagagagagagaagctcattttgattttttcctaacagagacaatgggaaaccaggactgagtctttgagtgacttccttgtatcagcttacattacgttatgatccctgtgacttttttccattaatgagtttggtattacccagcttttgatctatgctggacttcttactgtttttccaaataacaagcctctacagtttt

SEQ ID NO: 365182 - DNA, 583 bp, Homo sapiens
cattcatttttaccagtgtatgaaattccactgggtgatcatagcacattatttttgtccaatgtcttttcaatagatattagagttgtttctattgctgtgctctttgggaaatgctgttgctaataggctcatgatggtaagtttcagaaattctctggggcggtgtgtctccaaatggggtccctggaccagcagctgcagcagcatttgcatcacctgagaatctgttagttctgtggtcttaatatttctgtcccctcagattatatgatgaactcttaacccacatggtgatggtattaggagatggggtctttgagagatgattaggtcatgagcatagacctcatgattgggattcatgattgggattggagactcctgagtactgccttgcccctttcagcatgtgargacacagctgaaatttccacctatgaacaaggaagtggaccctcaccaggcaccaaatttaccagtgctttgaccttggacttcccagcctccagtgcaatgagagatatatttctattgttcctaaactatccagtttatggcattttattatagcagctcaaac

SEQ ID NO: 365183 - DNA, 397 bp, Homo sapiens
ttatatagtaaagtccaaagtatgcagcagtaccattcttatgcataatctcttagtacttaactataataagaaaattgaatcatttgtaaaaaaattttatcacatattaattcaaaagatacatatactcaatttccagaagatattccaggtaatttagctgagagtatgtatgttgtacttatatagatatttacagcrtcagttttatttctattttggccaaatatttatataattaggcacatatcaaaaggaaagccaatacaagaattataaagtctgaaaattttttagtgactgggatgttcttgataactgatgacaatatgatgaaaaaacttgagaactagtaggatttgctttcctaacttccctgttatacttttcttct

SEQ ID NO: 365184 - DNA, 620 bp, Homo sapiens
gaattgaatatacttacttgatgtgaacatgggggaaacagaattcaataaaaggtattaaaataatgggttatcaatgctaggagagcattctataagcatctgaaagtgcttatagaaacagcttcctgaggcttatgagcactggaactgtctgacacaacctgccttcttatttcaagttaataaagtgtacatagaaacacatacacacatattcagaggtatcaagtgacagttctcgggagagggacaagaatgactttaatgtagacaacacaactgttcctctcaagtgctgtttcttctggaattaatatctgaagttgttctccttttgaaatcatcccaatgagtcaatcctacagtgaaatcccttagttyctttagcaaaacctttcctttaattgattccagcttccttctgataatggcatcattcaatctgggtctcaaacttattgcttatctctaatcttcacaactacattgaaacatatgtttaaatatcaggccagtggttctctaccaggggtgattttagccccaagggaatatttggcaatgtctggagatatgtttgattgttgccactcaggcatgagatgtgctactggcat

SEQ ID NO: 365185 - DNA, 570 bp, Homo sapiens
tcctttctgttaattttttaggcatttatttacrcattggaactacagaatgctccaggctcatcttgtgtatttcctgtctgagttctagaatcatctacttccccatgaaaccctattttttttattattgttaaagaatcatattagaaaccaaagaatggatgctaacagtctgttattactgaagtgccattgtttttagaccctctcagctaacagagcaaaaaatatgtacatgtatatgtgctaacttgtgtatatacacagacctataaacagttctatatgtaactatctatatctatattaagctaaacctaagtttatcctgatttctccaattctaatccattacttcacagatcattctagccttcttcccttacttatctgaaatctctctctccaactgtgagaaaactggtccttaacatctgctgtccatttgtataattgtccattgccaagatacctatatagcagtttcagaattgttcacctgtaaaacaacattatcaacaagagtacagtccttatgtacaggttgtttcacctttagtcttacag

SEQ ID NO: 365186 - DNA, 570 bp, Homo sapiens
tcctttctgttaattttttaggcatttatttacgcattggaactacagaatgctccaggctcatcttgtgtatttcctgtctgagttctagaatcatctacttccccatgaaaccctattttttttattattgttaaagaatcatattagaaaccaaagaatggatgctaacagtctgttattactgaagtgccattgtttttagaccctctcagctaacagagcaaaaaatatgtacatgtatwtgtgctaacttgtgtatatacacagacctataaacagttctatatgtaactatctatatctatattaagctaaacctaagtttatcctgatttctccaattctaatccattacttcacagatcattctagccttcttcccttacttatctgaaatctctctctccaactgtgagaaaactggtccttaacatctgctgtccatttgtataattgtccattgccaagatacctatatagcagtttcagaattgttcacctgtaaaacaacattatcaacaagagtacagtccttatgtacaggttgtttcacctttagtcttacag

SEQ ID NO: 365187 - DNA, 549 bp, Homo sapiens
tagaaatgcaagtggtcccactacagasttcataaatcagaaactctggaggtacagcctaggaatctatgcttaacaagaccttccagatgattccatgggaaagtttgacaaccactgccatagcagagactaacaatgtcttagcattgggccttgcatatgcttaatgaaaagcagttgacttaggtaatcgtgtatgaaaagaagaaggattatatgaataatagaaattagctggggatgctagcacatagctcaaaggggttctttgaaacatgtaattttgaaagctccatgagaggttgttttgcacctttccttgttttaatatagaaatacttctaaagttactttaaaaattaaaaaaatgggtttctgttttaatactaaataaaattaaggaaaatgaaagttccagggagaaacatgatgctcctacagctttgaagatcccttagcccatctctggttactctcagggtaacttgcatttgagattcatgggtctaaccagtgtggctagtggaatcctgttgggactgacca

SEQ ID NO: 365188 - DNA, 505 bp, Homo sapiens
cggtttccctggaaacctagtaaaggtggaatgtcagctatgttaccaagcaacatttcctatggtaaaaatgacttctaaactatacctgctctgggagaactgtcaatgaattataaatrcctggtgggaatccatagtttgaacttctctgaatgcagtgcattcttgacactgtgatgcaccttgctaggacccctggaagctaatcctatgggatgaaaaacagatattaccttatatggagaataaggcagtaagccagatggctcccatactcattctcttagaccaagttctgcaagaaacagactgtgtgagagagatttgcacccaagtttactggggagtgtttttggggaatgaggccaacaggactggacagattactggggagtgctcttggggaatgtgctgaacaggactggacataggaaaaagctaaactgtaatatagttacagctgtaaactttagccaattcctcaaggacctcctcactagcg

SEQ ID NO: 365189 - DNA, 505 bp, Homo sapiens
cggtttccctggaaacctagtaaaggtggaatgtcagctatgttaccaagcaacatttcctatggtaaaaatgacttctaaactatacctgctctgggagaactgtcaatgaattataaatgcctggtgggaatccatagtttgaacttctctgaatgcagtgcattcttgacactgtgatgcaccttgctaggacccstggaagctaatcctatgggatgaaaaacagatattaccttatatggagaataaggcagtaagccagatggctcccatactcattctcttagaccaagttctgcaagaaacagactgtgtgagagagatttgcacccaagtttactggggagtgtttttggggaatgaggccaacaggactggacagattactggggagtgctcttggggaatgtgctgaacaggactggacataggaaaaagctaaactgtaatatagttacagctgtaaactttagccaattcctcaaggacctcctcactagcg

SEQ ID NO: 365190 - DNA, 505 bp, Homo sapiens
cggtttccctggaaacctagtaaaggtggaatgtcagctatgttaccaagcaacatttcctatggtaaaaatgacttctaaactatacctgctctgggagaactgtcaatgaattataaatgcctggtgggaatccatagtttgaacttctctgaatgcagtgcattcttgacactgtgatgcaccttgctaggacccctggaagctaatcctatgggatgaaaaacagatattaccttatatggagaataaggcagtaagccagatggctcccatactcattctcttagaccaagttctgcaagaaacagactgtgtgagagagatttgcacccargtttactggggagtgtttttggggaatgaggccaacaggactggacagattactggggagtgctcttggggaatgtgctgaacaggactggacataggaaaaagctaaactgtaatatagttacagctgtaaactttagccaattcctcaaggacctcctcactagcg

SEQ ID NO: 365191 - DNA, 616 bp, Homo sapiens
atctttctccatccttttacttttagcctatgtgtgtattacacataaggtgggtgtcttgatgatagcatattgttgggtattgcttcattatccagcttgctactctgtgcctttttagtgggatgtttagcctgtgtatgttcaaggttactattaatatgtgtggattggtcctgtcatgttgttagctggtttttaatgtagacttgattgtgcagttgctttatagtgtatatagtctatgtacttaagtttgtttttgtggtggcctataatggtcttttgtttccatatttagtgctcccttgaagacttcttgtaatgcaggttttgtggtaagaaattcccttagcatttggttgtcttaaaaggattttgtttttcttttgcttatgaagcttagtttggctggatataaaattcttgtttggaatttattttctttacggatgataaatataggccctcaatctccttgggcttatagagtccactggtggccttatgaggttcccytaatgctgaatataggcccccaatctccttgggcttatggggtttctgtggaaaggcccactggtagccttatggggttctctttgaagttgacctg

SEQ ID NO: 365192 - DNA, 616 bp, Homo sapiens
atctttctccatccttttacttttagcctatgtgtgtattacacataaggtgggtgtcttgatgatagcatattgttgggtattgcttcattatccagcttgctactctgtgcctttttagtgggatgtttagcctgtgtatgttcaaggttactattaatatgtgtggattggtcctgtcatgttgttagctggtttttaatgtagacttgattgtgcagttgctttatagtgtatatagtctatgtacttaagtttgtttttgtggtggcctataatggtcttttgtttccatatttagtgctcccttgaagacttcttgtaatgcaggttttgtggtaagaaattcccttagcatttggttgtcttaaaaggattttgtttttcttttgcttatgaagcttagtttggctggatataaaattcttgtttggaatttattttctttacggatgataaatataggccctcaatctccttgggcttatagagtccactggtggccttatgaggttcccttaatgstgaatataggcccccaatctccttgggcttatggggtttctgtggaaaggcccactggtagccttatggggttctctttgaagttgacctg

SEQ ID NO: 365193 - DNA, 590 bp, Homo sapiens
ctttttatctatgttatttatttcattgaagatttctcccttcatttcttgtatcatttttttcaacttccttaaattgggctttgtctttctctggtgcctccttgattagcttaataactgcccttctcaattctttttcaggtaaatcagggatttttttcttggtttggatccgttgccagtgagctagtgtgatttttggggggtgttaatgagccttgttttgtcatattaccagagttggttttctgttccttcttatttgggygggctctgtcagagggaatgtctagggctcaaggctgttgttcaaattcttttgtcccacacggtgttcccttgatgtagtactctgcccattttcctagggatgtggcttcctgagagccaagctgtagtgattgttatctctcttttaaatctagccacccagcaggtttaccaggctccgggttgctactgggggttgtctgcacagagtcctgtgatgtgaaccgtctgtgggtctctcagccatggataacagcatagcatttgggctgtctcctgggtcctgcaggagcaatctgctttcttccgtggatatg

SEQ ID NO: 365194 - DNA, 565 bp, Homo sapiens
  misc_feature (1)...(565): n = A,T,C or G
nnnnnnnnnnnnnnnnnnnnnggttattctgcaggtcctgaggtctcctaagggacaagcttgaggagggacttaaatggccaaggatgaaataagaagcagaagaggctaatggtctttctgatccaaagctgtaaggcccaatgaaccaattgagtttaatctttcttttccccctttctcatgtcctatgtgcttacacacaaagttcaagacaacttttgccccaaaattgcctcaaccaaaaaatgcctgagtggtaggtggaaaaggggagttctgtttttggtgttcaaaatcctttccttttatgttttgggtgcttttctttggaattacctttcctcctctttgaagaggtgaactttagaaaggaagacttatagatgactttggttatagctgcctctcaggtaaaagaagccctctacrtagtttatcctagcttactgggggctagagtggaattgaggccacagtttccttcatggtaacacataggatgttttcctggcatacatgacactatagaggaggaaagggaaatggaacaggtgactgtgca

SEQ ID NO: 365195 - DNA, 546 bp, Homo sapiens
aaaaaaagaaaatcacaaggaaaggctttggttcacctcatttggatcatatggcccatcttgttttccaagggaaagcagctctctgattggctgatcctggatcacatgcccattcttatgtctggaaagaataagaattgtgatcattggtccctcaggagtcacatggcaatgctgaaggaggaaaarcttttctcagaccactatttctattgcatgtgatagaggcaggagataactcctgtaaaggtgacaggcaaagaatgggatgcttcctggctacattttgtgtgtgtgtgtgtatgtgtatgtgtgttgggggtgggttagaatgttggttggtgatgagggagctggagagagaagacaaggccaaggctaaagaggggccaagtgtgtgatgatggaaggtctcccatgccacacagaagaactaatatccatcttgaagcaaatggcatcagaacaagcgtatgccatgatcatatctatttgcagaaagattaccctacaataatttagaggctaaattagaggaggctg

SEQ ID NO: 365196 - DNA, 577 bp, Homo sapiens
tattgaaaagaaggaggtggcagaagccagccacaggggtggagccctcacagagagactctactaggtcagtgtcttaggagaaatgtggggttggagtcctcacacagaatccctactggggtgttgcctagtggagctgtataaatgaggccaacacccctgagacctgagaatggtagagcctctggcagcttgcaccctcagttggaaaaaaatcacaggcactcaactataactcatgagagcagtcatggggtttgcaccctgcaaagccacaagggcagaggtgccccaggccttggagacccactccttgcaccactgtgccctggatgtgaaacatggtgtcaaaggggattattttagagcttcagggtataatgtctgccttgctgggttttggacttgtatggagcctgtarcccctttcttttggcttatttctcttttttggaacaggaatatttaccaaatgcctataccaccattgtatcttggaagtaaataaacttgtttttgattttacagtctcattggtagaaggagcttacctagagtctcaaatgagactttg

SEQ ID NO: 365197 - DNA, 577 bp, Homo sapiens
ctgtgcaaatattatactatttaatcctcataaacatcatgcaggatctgtaccgttagcctcattttaccctggagaaaagcaagactcctaaaagttatagaacttgtcaagagtcacccagccagtgaacactgactttagtggaaggcagttagaaaggcaggattccaggtcattttttttccctcttagttagayctatgctggttttgctgtgcttgtgatgttatgaaggaccacaaacccaaactcctacagaatccaggcaggtaatgtaaaagagggagggagctgcgaagccaactgttagacaagtagagactgtggggaactgaggggcagggaacatgccctttctgaagaagtgagctgctccctctccagccacacatgctgtgccaagcaggagtgccagctccgtgtggctattgcccgtgatattcccaaagaagcagaaatttgaatttaaaagtggatctgacggtgaagtatcctgatttttattgttaaatagtttaaaattagtaaaaattttgtgtaggcctaactgacacattgtgggttagtttgcaca

SEQ ID NO: 365198 - DNA, 549 bp, Homo sapiens
aactctagggtggatatgaaactgttgatcaatgttgaatgagcagagctcactaaatactgagccacagaataaaacacctgtgagcaagatagctctcactgaccaggctcttggcaagaccacctatcttcctgaaacagggaatagacaaagcctgagggaaagccctttcttcccagccccaactgcaaatgtactccaggaggactgaacaaccagattcagggcctcagagggctcccaccacaaagaggtctaaagatgtaggctgagagggcagtgcaaattcagaaaagaacacccacagagagcccaaggtccatcacagcctcttcctgacactagtaagttaagcatgcccacaactctgaaaatctttttagacaaggaaggctcagaactccaagataaagggtcytcacaagacctggaaataaaatatgaaccaaaacataagcaagaatggctttagaaaagtgcaaatggtgaaaaattttgttctcatccattgcagtctatgattccaatcagcaccttcctccagag

SEQ ID NO: 365199 - DNA, 603 bp, Homo sapiens
cttggggaaagggtgtgaggggtgtgagggataaaagactatgcactgggtatggtgtacactgctttggtgatgtgtgcaccaaagtctcagaaatcaccactaaagaacttattcatgtaaccaaacaccactggttccccaaaaacctattgaaataaaaaaaattatgaagtcaatcaattaaatacacagccttgaaaacaaataacctaacatgtacaagcctatggattacttctacaaatataatattgactgaaatctgcttttaatagtatttgaaacatttacatcttaccatcttttctttattatctatagaaagcagattggagtttctaaaagcgcaggccatcaggctctcttcccagttctttttttcttaccaatgtaataacaactgttggaatatgtaatccactcctctggacaatggccacattgatatgctaaataaagatatgaattcctatccagaaaaacaaatatgtcaaacagctaccatctcaacatctcccattcatccaaacttctatagacagatgatttcacaaatgaattctagcraatattcaaaatgcaggtaatcctcatattacc

SEQ ID NO: 365200 - DNA, 576 bp, Homo sapiens
agtatttcactgataaggattaccttgtctctggtcactctctatagtctgtcttccaaaaaggaatgggtctcctgcaaatatccatggaaaccagccactgctaagtatgcaaggcattcaattccagttagttgcaagacttggcccccagcctcacccacaccaattacaccagggaagggacaaatgcttccccagccatgaacactgtggtggtgaatcatgccataagctcactgtatcacaccaaccacaacctcaaggttggaccccagccccctaatgctgccaagaaaggcactaatgcttctgcaatcacaaacacttggctgacaggataggcatggaggcaagatcctgccagatcattttgctatcaaatcccagcccttagagatggatacagtggttcatgcctgtaatgccagtgttttgggaggctgaggcaggaagattgcttgaggccaggagttcaagaagaccagcctgggcaacacagtaagacccaatctctacaaaaaaagaaaaaattaaawattagctaggcatggtggtatgcacctatagtcccag

SEQ ID NO: 365201 - DNA, 565 bp, Homo sapiens
agtggtggtacatagcctggtttttctttttcttttcacagctccatttcaatcctaaaaggtacactctctatctgtgtgacacacaaatcactttgctttcttttagaaatggcctattataagaaaaaattataggtccgtattctacctttttaaaagttataataattactcttggtatttaaagagaatagttacakaacataattttaagtgaatataatggttgaaaagatgctttagtgtggaaaatagacaaaatgatttaacattttgaaaaatcacattctgacctcattctaatacatgccatcagtaaattaaatttgagatgcattccattcgtgactgacttgcttacaaaggacacaagagccttgaaagagattctgtttgttagcttatttctttgcagttgaactggcagagtaaacacagggaggagacggttgaggtgtggttagatcaagcccttttcagtgccccgttctcctatggagcacttataaatgacatgaggaaggtagtatttagactgatcattagaggaaagatcagcatg

SEQ ID NO: 365202 - DNA, 572 bp, Homo sapiens
ctaggccactgtctctttttcacgttctttctgcctgctttatattcactggcggccaattaaattgtgcccatcggattaagggtgggtctgcctttcccagcccactgactcacatgttcatctcctttggcaacaccctcacagacacacccaagatcaatactttgtatccttcartccaatcaagttgacactcagtgttaaccatcacaatacatattccttacaaagcacctaatttaaaaaattcaaaactcaggttttgttgtgttagcctgaaccgaggtctgagctacatttttaactatacatccactttccttttgttagtggaaaagaacaattgtttcacttcaaacagacttatatgtgacttatttttgttatctacttctgtgcatactaccattaatagtgtaatttatttgtaagatatagtaaacataatgttttttaaaaaaatagatttttctcttcatttgcaaatttaacctggtcttcaacaatttataaattcactggttggttggtatgcttaataatgtttagattgcacaattgctatatat

SEQ ID NO: 365203 - DNA, 565 bp, Homo sapiens
cccttttttgtattatttcagtactgaatgcctctctcagaggcttcaaccttcaagaaccttgagcaaattaattcaggcctagtgctaatctkttaagctcccgatgttatccctgaccccaacacgaaatgtcttccttttaaatgagaactgcagagaaaatgctgtaattggcccaaagaggaggctgtccaaaggtggaattccagaaactgttacaccaggaaggttctgaggggacatatctcccacagccctctacccacttaaagcgccaactccaaccaatccctccactccctgtgccttggcccctcacctttacataatccccaaacggtaattctccattcaccagcagtaacactgttaccttccttcagtagggaatagtgtcagtttcagtctataaacacaatattttgagaagctattccaaatatgtcatattaaaagagccctaaaaaatacctttacattgactcttttttctcttctaccactaatattaatagctgatatttatcaagttatccccaggggacagcctaagttctaaata

SEQ ID NO: 365204 - DNA, 565 bp, Homo sapiens
cccttttttgtattatttcagtactgaatgcctctctcagaggcttcaaccttcaagaaccttgagcaaattaattcaggcctagtgctaatcttttaagctcccgatgttatccctgaccccaacacgaaatgtcttccttttaaatgagaactgcagagaaaatgctgtaattggcccaaagaggaggctgtccamaggtggaattccagaaactgttacaccaggaaggttctgaggggacatatctcccacagccctctacccacttaaagcgccaactccaaccaatccctccactccctgtgccttggcccctcacctttacataatccccaaacggtaattctccattcaccagcagtaacactgttaccttccttcagtagggaatagtgtcagtttcagtctataaacacaatattttgagaagctattccaaatatgtcatattaaaagagccctaaaaaatacctttacattgactcttttttctcttctaccactaatattaatagctgatatttatcaagttatccccaggggacagcctaagttctaaata

SEQ ID NO: 365205 - DNA, 607 bp, Homo sapiens
tgttaccctgggcaaagcatccctgcaagggagcaaaagcaacaacaatccatttggtgggtgagatggattcactggtactgatccaggcagggaaagccaaatggccgccccttctaccctgggcacccgactccccagtgcctggaggcctgggtcagcccctttggctgcccttttctagaccatggatgtcgtcccccttatgctaggcctttcttcagatggtttacaagacaattgatgaagtcaccactttaataacattcatggccattgccakttgtatactactcataatgtggcaggcattagattaaatgttttaggtaagttgtagagaatccccataataacatagttaattattctctttattcagctgggccttcttaaaaatgagatgtaagtgtttctacaatttggggatacataagtggatgtttaaagggcttaaggtatttgccaagctcctacatccttcttaaatttaaacttattttctggtaccaacactctagtgtggtgattagacttcctaaattttctcctgtttgcttggtctttttctgagacggagttgttctttctcgttgcctaggctgga

SEQ ID NO: 365206 - DNA, 548 bp, Homo sapiens
gccataaacccctctctcttgagctgttggagtcctaacccaattttctttggaattcccttctcttgatcaccrttggcagattctcctttggcaatcatacatgaagcaagactggaaattccctatagactgttagaaatgcaaaatgcttgttacccagtgctgcaaagaaatagcacttgaacataaatttaattctctcagcaagtcaatttttactttctgcagaaagggtgccccttgcagatggaacaatggcgagagcacacctggacaggggaggggaagtagttcttattcctgatgcaggaccctactgctgtgtcgttcctctattggctagggttggactgctcagtctaagctaattctgattggctattttaaacagagcaggggtatgaaccagagtggcagggtgaatagtttggtgggaaggacagttaggaatagataactaaaggggacttaggtcagagcaggtgaccaggcatgactgaggtcaaagcaggtgaccaggggaacagatgtgaactactgattaa

SEQ ID NO: 365207 - DNA, 548 bp, Homo sapiens
gccataaacccctctctcttgagctgttggagtcctaacccaattttctttggaattcccttctcttgatcaccgttggcagwttctcctttggcaatcatacatgaagcaagactggaaattccctatagactgttagaaatgcaaaatgcttgttacccagtgctgcaaagaaatagcacttgaacataaatttaattctctcagcaagtcaatttttactttctgcagaaagggtgccccttgcagatggaacaatggcgagagcacacctggacaggggaggggaagtagttcttattcctgatgcaggaccctactgctgtgtcgttcctctattggctagggttggactgctcagtctaagctaattctgattggctattttaaacagagcaggggtatgaaccagagtggcagggtgaatagtttggtgggaaggacagttaggaatagataactaaaggggacttaggtcagagcaggtgaccaggcatgactgaggtcaaagcaggtgaccaggggaacagatgtgaactactgattaa

SEQ ID NO: 365208 - DNA, 569 bp, Homo sapiens
ttcaatgtgtttttgtttaatttctaaatgctgggtgtatgcctgcaaggatggcctgctgaagacagacaactccactgccataaacacagtcatcattgtcagtgatctgaaattcattttttaaactatttatttcttggcagataggggctaaatggagttttgcatttcatgaactrttttttaacttcaacttgctacacacttctatgtgttttctaagcaaccaccaattcagagtttccccgcaacaaaaggaaatagtcttctctggggggaggggaccatttttggtaggggagaagggaaaagggaaacataaacacaaaccagcaaccagctgggtgaagtcaggccttttaacgatatgctgcctctctgggccctaatcctcacctgcaaacaaaggaacaggaagaatgctacctcgttttggtctgcagagttgaaagtgaagtgggttcttaaatgagatacaaaggcagattcagtctggattttatattgtcttcaatctttgtttatgaaaactacaggaatccttccttcctttctcctttccttcc

SEQ ID NO: 365209 - DNA, 618 bp, Homo sapiens
ctggggctacactttctaagacatggtgggggagaagccaaaacagcaggaaaagtaagctgcaaagaattaagcttgtaacaacttgggcaaagcacaaacagtgactgaggttgctcctttggctgttgacacacgctggcctgggtcggttgtggtcactaaacccattagcgttccaatgtggcaacagctaatgcagcaagttcaatgtgtttttgtttaatttctaaatgctgggtgtatgcctgcaaggatggcctgctgaagacagacaactccactgccataaacacagtcatcattgtcagtgatctgaaattcattttttaaactatttatttcttggcagataggggctaaatggagttttgcatttcatgaactgttttttaacttcaacttgctacacacttctwtgtgttttctaagcaaccaccaattcagagtttccccgcaacaaaaggaaatagtcttctctggggggaggggaccatttttggtaggggagaagggaaaagggaaacataaacacaaaccagcaaccagctgggtgaagtcaggccttttaacgatatgctgcctctctgggccctaatcctcacctgcaaacaaagg

SEQ ID NO: 365210 - DNA, 581 bp, Homo sapiens
ttaggggacagatgtagatgtagctcagagagttagtctctcctctaaaaatcaaaagtactcaaagctgttggaagtcatctttacaaccaagtggagagagcttaccagagtccaaagccaacccaatagaaagtgcagagggaaacagggagagaagaaggaggggaaagggagaagaaggggagagggagggagagacaagaaaagggagaaagaaaaagggaagagacaaaagatgagaaggaggaagagagggagggatcaggagagacagaggaagagattgagagagtgagaaagagaaaggtaaaaagagaaaggaaagaagaaaggaagaagggagacaatgacagtaacttaaatttcctaatgtgaacttctgattttctaatttgaacctctagatccagwtgtacataaaggaagacttacgtctttgcctttccagttaaatgagccaatgacttccctttttacttaagtccatagggttcttcaaatggggatccatgaccctcaaaatgttagaaactgcacaattggagcatttattagagatagaatgaactcacttcaga

SEQ ID NO: 365211 - DNA, 581 bp, Homo sapiens
gtggtgaaggaaatatcaagtagaacagaatcacgctcaataaggtaagtgaaaactccccttcagttctgatgagccgctccaggtggtggtggacagtgatgtgagccgcactgcaatacattatcagaatattgctgcagagctgcatgttccctttattcagcccttctaatagctgcaacaagaaagcacataatttagcaggggaagaaactggcaacaatatctgagataatcctggcagaacgtttcccactcttcacccctacaacagcctctccaccactctcaatggttggggttgggtgggagtggggagggggtaaggggaagaaacacagaggaaggacaaaggaaacagaaagataaactaygtcctgcaagtgcatctgagaagaggcctctttcaaaatatgtcacgtatatgtataaatgtctcttgatatacaaaaaaggaaattgaagggaaatatgccaaaatgttccagtgattatttccacataatcggactatatgtcaacttttattctctctacgcttttctacaatgatgatgtttttaaaattattttttaac

SEQ ID NO: 365212 - DNA, 599 bp, Homo sapiens
tttgtgcattaagcatttcttaatcatccttttaaagggctgaccaatatattaaaaggccacatgattaaaaggtaaagagaaaccctaagtagtattaaaatgcaccagtcttttgttttgttttgttttacagatgaaaaataattacagtgaatgtctgatgtccttgatgtttttccaagataaagtagcaaagaacagtcatttattcagttgtgagaaagatttccagctgggcagcaggtcacaaggcagaatacaatgccccacaattgcagcaaactgcttttgggtaaggtttatgctggagacaagagaattctcaaaaagtgtagccattctttcaatcraacaatccattcaccaggaggcctaaatggctttaaggaaaaaaagaaaaacaacaaggaaacctcaagtgacaccgccagcatttagaaatgcagatgatcccttctgggggggcaaagaagcatatgctttaaaaataaaaataaaaaacgaatcctggcttccagcagtgagccaatctgggctgccacccactgtgagatgatccctgggcagtcctccctcacctggacagtcacagcggc

SEQ ID NO: 365213 - DNA, 233 bp, Homo sapiens
ctttaaaattgtttccccacaatgtctgtgcattagcaagctagcattcctgcagtaggcatgggtcacagttggtgttttctgaaaggagctgaccccatcagcacaagaccaaaggggtcgaaaaaagattgaacagaytgagcagtgataggagacagaattggaatttcttaaggtgaccagtcccaaatctcctgtacttccagaaattatgaagtcatgggagaaga

SEQ ID NO: 365214 - DNA, 539 bp, Homo sapiens
ggtaccagggccgcttgcaatgttagggggagggtcacagacgtctcagaaataaattaggctgcccagcaaaatggttaaaagcagaagttgtagagtcacacaacttggttggatcaacctcttaccactggggtgatgtgggcaaaatagttaaactttctgtcttgggttcttcaagaatcattgccacagttaagtgagatgaagcctttagtgtgacggcaagtgaacctgcaaggcccctgccttcatgaagctgacgggccaggcagagaagcagattaatcagcaaccygtgctcagctctagagtgtctccaggtagcttttccagtgccctctctacctgtggagttgctgaaatccgcgctgctcgctcagaaaacgggtcaccgaggaaagatttcagcaggaaagagcagcccattcaataattccaaagtgactgtacccagggacttgaggaaccttaaatgcctatcccccaagccccacgactgagctcacagcacccagagaccatcacaatgaaaagta

SEQ ID NO: 365215 - DNA, 572 bp, Homo sapiens
aaacagtggtttccatgtcaaacttttgatccatcattattctgtgatcctccaggaagaagggctcagatgcagatgaccaaaagtgggtacagtttgcagggaggcattagtatttccctttgcaaaacatgttagtcccacagcaaggtctggagacacagttgggcaggctgagagagcaggagacccagatgctggagccctcaccttgggatttaccaaggcatgtggctccaactgggtattggttttccctggagcagggcatggccttttaaccagttttccctttttcatgctcccttaaaccagtccagcatctccctatgggcctggaccacagagatgcctttcttcctgactcctgagmcttctgaaagtttttccacatttttctccttccaagaaagcaatggttctccaactcagaggttctgatttcaggaagcatctgtggagtgtagctctgagaagaaagcacccaaagtggtgaagagtagtgtgtgcatgcacttaaggcccatgccctcctagggcaggactgaagccatagctccaggtgcctgtaa

SEQ ID NO: 365216 - DNA, 600 bp, Homo sapiens
gcattcccttgggcctatacaaggaacttccaggtaatgtggttgagggggaggggctgcacattacctttgaacccacttcaaggaaatagcaccaaaactctagaagtcatcaccctcagggagaaagaatgcttatctataagaagcctagcacacaacagcttcccaacctatctgattaaacaaatacacatgaagaccgcatttggcggcaagaaaggattaaaaaaaactcctccaagattatcttgggctaaatctgaagaaggaatctgcactccttccattccgatggcatgtttaagttcagtggctgaaaaatctgcagaaccagttgggtccctatgccgaaggggcagggaagaggcatgcgctgctctgccaatggggaggaaaaaaatttaacgagggcaagataagagccagacgtgtggaaatatttctctttgaggatattctttgtaccaattactcttcaaagwtatcatgttagcatttttggcacaacttgacaattaaattagacgaatcgttttcagtgtttttgcatttgatgtgcctgaaactcctcttaagctaaaatgttcagcctgtcac

SEQ ID NO: 365217 - DNA, 627 bp, Homo sapiens
ggcaggaggcggggggaatccaggcaatagaaatagcaagtaccaagacctgaggcaggaagagccagaaaaccagcaagtgctggggcaagtgagaatgggatgtaaggaggggaacatgagagagttaaagagaagttgatcaatgggtacaaatayatggtttgatagaagaaataagaactagtattagagagatcagtagagtgactatagcttacaataatctgttgtacacttcaaaatagctagcagagacttcaaatggttttaacataaaggcatatatttaaggtgatggatatcccaaatatactgattttatctttacaaattatatgaattattgcatatatcccaaaattatgtacatccattatgtatcttttttttcctttaaaggtgagttaggcagaacctgattactttgactgcagggtgatggcacggaaatacaagtattgagtagactccagatgtattttggaggcagagtccacaaaacttggtgttggattggatgtagggaaagggaagagtgaagggtaggggccagatttctggctcaaactaggctggtggcaccattgctgagatgcggagaactggagagtcacagtttgcata

SEQ ID NO: 365218 - DNA, 417 bp, Homo sapiens
gactatagcttacaataatctgttgtacacttcaaaatagctagcagagacttcaaatggttttaacataaaggcatatatttaaggtgatrgatatcccaaatatactgattttatctttacaaattatatgaattattgcatatatcccaaaattatgtacatccattatgtatcttttttttcctttaaaggtgagttaggcagaacctgattactttgactgcagggtgatggcacggaaatacaagtattgagtagactccagatgtattttggaggcagagtccacaaaacttggtgttggattggatgtagggaaagggaagagtgaagggtaggggccagatttctggctcaaactaggctggtggcaccattgctgagatgcggagaactggagagtcacagtttgca

SEQ ID NO: 365219 - DNA, 644 bp, Homo sapiens
ttaatgacatatgcggttgacaatgtatttctatttgacagtgctgtcgtggataaagcacatggtcaacctagagtccaggccctggacacagcacacctggggtttcttcctccaccccctcaaatgcagttggtgcagtcaccagccccaccttcctcttcttgaatcctgcccctcccttgctccagacctcaccaagtctctgcattacagttcacatcaaccctaagttgctctttccagcatcctaagccaccctggttgatctgctggcccctgtcctgaccttagtaaagggcccctggaagctgtctccatactcctttcatcccttccggcttcttgccatgccagggccacaggtagagaacaacccccgtcctgcccctacccttcagaactttgccttcccttcagaagtttgcatgtaatcgttccttcccctcctagttaatgagcttctggctcccagggtgcagggaacatgggcccagacttgcccctctgtctggagctgattgctgtctagccactcccacctckccctagtgctcatgcctaacaggtgtgggtccactgaatccagcctctcaccctcaacctgcacacctgttaggcattgacagtgggcagagcaacag

SEQ ID NO: 365220 - DNA, 507 bp, Homo sapiens
gacactgctctctgtaaaatgtatttctgacaattccatccactgttgactgcaggtgcttgtactagtgacagacagtgaaaatcatagtttctcttttaggttcctaatgagcatctagtgggtgcaggcgtagttctaggccagtgctgtccagtagaaatttccacagtgatgaaaaatcctatagccatactatcgttttgggtttgtggctattgagcccttgaaatctggctagttcgactgaggaactgaatgttttattttaattaatttaaatttaaatagccacacacagctaatggcttctgtattggacagtgcagttctagatactgtaattaattcagcaaggcatgacrcaccagccattttacagatgaggaaatggatacccagagagggagaatgacgtacctaaggtcatcaagtgagagggtgaggattcaaacccaaatccaatctatgatacaataactgctacacacaatgtgtgtaacactt

SEQ ID NO: 365221 - DNA, 629 bp, Homo sapiens
tttctggtctttcccattttaagtttcttagaaaataaggttagaattgaaattaagatgtttcctggaagcaaataacccctcttccccccaaaaagttaaaaaaaacaacaacaaaaaacttcaagtctggagaycccacggccctgtttgactttctaatccctgtctggtatcgaggccccttctcctctctcgcctctcttttctctcttctctctttaaatgggtaattcgctgtttggaagtaacttgggccttgcggtgaggtcgcacctcctcagcccctgccctccccccagccaaccttcgcacattcactgccgaaccagccagatttagtttctagacagactctgccaggggagtttcgagggggcaatgcggagagtgcgcagcgaaccgcgggccgacaaatgtgtgtgtgtccgagtgtgtggatccttggctgcgtgtgtgtgcgtgtgtgtttgtgtgtgtaggggagttgttctcgggtccaggacgtagtagccttcgtctcctccaccccccgaccctctcaacggaagaccctccccaggaggcccggcccaagagtcccctgtcttctcctcccctcccccgtgcgctccggtgctcaaggggtt

SEQ ID NO: 365222 - DNA, 616 bp, Homo sapiens
caaattgttagttatgcaggatgaatagtttctggagatctaatgtacagtaatgtgcctacagttaacaatactgtattgtgtacttggaatttcctaagaaggttgatcttaagtattcttatcacaaaaagattttttagaaaaagaaagaaagaaaatggtaactgtgtgaggtgatagatatgttacttagcttgatttggtctttatatcagaatatatatgtatctaaaaatatcagttggacaccttaaatatgtacaattttaatttttcagttgtacctcaataaagccagagaggtaatagaaagagaggatatatctataagagatatctgatgagagttgggactatatctgtcttttcacggataagacctggcaaaacgaggcrtccacatatttcttgaatgaatgaaggaatgaatgtgaagcttgagattaatgctaaactctcttcatagacattcattgagaattgcagttacaggtttagtaagtgggtatctgttgttttacactgtcagcacccattcctctttcttttgataaaaggacctcaatattcatttaggaaactacctgtgcaatattgagtgtgatcttggtgg

SEQ ID NO: 365223 - DNA, 616 bp, Homo sapiens
caaattgttagttatgcaggatgaatagtttctggagatctaatgtacagtaatgtgcctacagttaacaatactgtattgtgtacttggaatttcctaagaaggttgatcttaagtattcttatcacaaaaagattttttagaaaaagaaagaaagaaaatggtaactgtgtgaggtgatagatatgttacttagcttgatttggtctttatatcagaatatatatgtatctaaaaatatcagttggacaccttaaatatgtacaattttaatttttcagttgtacctcaataaagccagagaggtaatagaaagagaggatatatctataagagatatctgatgagagttgggactatatctgtcttttcacggataagacctggcaaaacgaggcgtccacatatttcttgaatgaatgaaggaatgaatgtgaagcttgagattaatgctaaactctcttcatagacattcattgagaattgcagttacaggtttagtaagtgggtatctgttgttttacastgtcagcacccattcctctttcttttgataaaaggacctcaatattcatttaggaaactacctgtgcaatattgagtgtgatcttggtgg

SEQ ID NO: 365224 - DNA, 527 bp, Homo sapiens
aaaaccatttttaataggttgaccactacagaaccagtagactggctactttgtagatttccacttaattccgtgtgaattcagcatatggaatttccagtgatgtcaaagagttgttggcwgtattaactgagttgacataaagcttttagttcagtgcctagatcatagtatttaataaatgttagatgttattattgacagcttagactgtgagctcctcaagggcaggaatttttattttttcatccctctgtgcccactctgtggtctagcacacagtgggtatgtcattaatccctttatgtcttgacaaacaagacgtcgaaccctagcctctaggaagctaggacattccatacaaactaaaatgcattttattggtctagattctagtctaaaagattcagtgaatagtcttatctggatagcatggaactttatgcagcatgcatgcaatgtgaattctaccaggctgaaattaccttagcagcctccctttcttttattctgtagcatcagcgaat

SEQ ID NO: 365225 - DNA, 527 bp, Homo sapiens
aaaaccatttttaataggttgaccactacagaaccagtagactggctactttgtagatttccacttaattccgtgtgaattcagcatatggaatttccagtgatgtcaaagagttgttggcagtattaactgagttgacataaagcttttagttcagtgcctagrtcatagtatttaataaatgttagatgttattattgacagcttagactgtgagctcctcaagggcaggaatttttattttttcatccctctgtgcccactctgtggtctagcacacagtgggtatgtcattaatccctttatgtcttgacaaacaagacgtcgaaccctagcctctaggaagctaggacattccatacaaactaaaatgcattttattggtctagattctagtctaaaagattcagtgaatagtcttatctggatagcatggaactttatgcagcatgcatgcaatgtgaattctaccaggctgaaattaccttagcagcctccctttcttttattctgtagcatcagcgaat

SEQ ID NO: 365226 - DNA, 604 bp, Homo sapiens
ctcttccctccacgcgcactcgcgggtcctcggagcccgctgccctctctgtcctggcccctcggcctactcacccgtcccgtccccttcagttccccccagcctgcacggggaagacttgctgagggtcgccccggtttcttgtcgactgcagaacccgaaagtttgtaagaggragagagcgcgcggcgagcgagcgagcgggccgggggcagcggcagcggcgccggggaccatggtgctgccggcgcctcctccgcgggcgtgaaggcggcgctcctactccctccccggactccgcgggtaagtcgaggcggccgcgggcgcggggtccagggacaccggagagccccaggcggcactaggggttctccgtccccaaagagccagccggggtggcgcgagcctagcgataaggcaccgggagcgaggaatgtgcccatcctcaggccggtaggtgcttcgaaatactggacttcctcccctccacccttttcccctctttctttcctaaatctgaaaatctggagatcaaagtttagcgtggagtgtaaagtgctccgataaaatatggtgacatcctcgccccccttctcaccccact

SEQ ID NO: 365227 - DNA, 442 bp, Homo sapiens
gaataaaataaactcacatataggagatatggaaaatatttcatcaaatattatgcccaaagagagaaaattaggagttgattttttttagcactctgaatatggaacttccttttaaaaatgtaattctacccttcacctttcctacattgtatgtttctgtgagattttactcattacaagtgaaagtagaggactgcctgtgaattgttyacttctgaaaagaatatattgagatcagttaaaattactcaagagtttggtgactcaggattgtaaaaagcctggatctcaacagctgggaggagtcagagggtgaagtgggaaaaaatagggactgagaggcaacgaaaagtccctttgaacctgtggtcatttatagcaattagagtgggttgcccctctacttctcccaagaagaaatcccaaatagattcctttc

SEQ ID NO: 365228 - DNA, 553 bp, Homo sapiens
ttaactaattacatctgcagcaatcatattccaagtaaggtcacattcggatccaccttctcttttcgctcagttcatatagttgaattcaggaaagttaaatgtgtaagtactgcggctcctgagaatattatggagtagaatgcaaaatctgtgggaatttgaaaggaaaaccatgggaaagagacatggcagtgtctctcttgactttacggtaggcccatcccagcttgagaccactgcattctctgtgtgcaaacatcagacacagatgtgcagtaggtgggcccaagtcatgggtcatatttctttttttcaatatgacatcagtgcatgattggcagaggctggcattggcccagaacggtctgagttatggtctcagtcttgaagctctctagtgccacctgctatatttgaatcactttatatgaattttatttgtccctcacaatgaacctgggaggtggccagtaccttttctrtcttttaagaaagaagacgctgagaatcaggaaagtcaattccctggcttaggtcacatagctaattc

SEQ ID NO: 365229 - DNA, 553 bp, Homo sapiens
ttaactaattacatctgcagcaatcatattccaagtaaggtcacattcggatccaccttctcttttcgctcagttcatatagttgaattcaggaaagttaaatgtgtaagtactgcggctcctgagaatattatggagtagaatgcaaaatctgtgggaatttgaaaggaaaaccatgggaaagagacatggcagtgtctctcttgactttacggtaggcccatcccagcttgagaccactgcattctctgtgtgcaaacatcagacacagatgtgcagtaggtgggcccaagtcatgggtcatatttctttttttcaatatgacatcagtgcatgattggcagaggctggcattggcccagaacggtctgagttatggtctcagtcttgaagctctctagtgccacctgctatatttgaatcactttatatgaattttatttgtccctcacaatgaacctgggaggtggccagtaccttttctgtcttttaagaaagaagacgctgagaatcrggaaagtcaattccctggcttaggtcacatagctaattc

SEQ ID NO: 365230 - DNA, 327 bp, Homo sapiens
atctcaggcacagtttcacatgcaaggtattgggaccaccaagcctctaacaattccattttctagttgatgaattcaacaaataaaaggcaaagaatatacagctgktttctgattctcaatgagagaggtggcagggaggcttctacaacaccaccagccccagaatctatattcttgtcaattcctctcccttcctcatggctctgcctgcaggtccacagagagcttccaaccactgtccagggaggccggtcaaccttccctccatgaccagaactgcagagcagcttgggcctccctgttaaattctgcttgtgagtggag

SEQ ID NO: 365231 - DNA, 535 bp, Homo sapiens
cagttctctttgagtttttgctttcatctggaatcttgcgcccctgccctctttgctgccgtcactgcacaatgtcaaacagctggagtctgggcagcaccagaatccaactgtctcagcctaacaagtgaagggatgggggaagaacagatggcgggagatgaggaaggtgggggtgtcatggaggacgaaagggggctgtgcttgctttagagaatctgatatcttggaaaagtggtctcacgtggaattcagtgtcaatagattctatttgtctagggctttgcaaaatcaagcacacagaagtggccttggactattctatttttcatttctctaacccagcttcacctctcactcaaacttttactaattttccctccatttattgagtgcctaccaagggtttatatatacatatatacacatatatatatgtgtatgtrtatatatatgtgtatacatatatatgtgtatatatagagagagaaatagtacatatatattatttccaatattcacagaaactagggtt

SEQ ID NO: 365232 - DNA, 488 bp, Homo sapiens
caacagcagaccctgccagggagcactccactccttcttactggaccctgagttccacctcaggcctgttctcaacacagtatggcaaggagtcacaaccgactcatcagagctggcagtggaaaagctgttctcaatcccttacctctaacagtcaaccattaataattgtttatttttaacttttaagattttttgataattttattctcccaattctcccatcatccctaggtcccactggtagctggaaataaaacaggtggtaaccaggtagctacctataattctaaacttgggaattttagtcctcaagttaatgtgaagtcttaagctgcagccggtataattgagaacagatcggtcaccgctccttaaggcctcctagcgccaaggccaggcatatactccygaatggtcctgtctctggcatcagagatcagcaggcaaggtggctgacaagaaaggaaggagtccccctcgccact

SEQ ID NO: 365233 - DNA, 548 bp, Homo sapiens
tagaaaatatttattagaatactacagcagtaatttttcaagatccattgattaatgctaaaattagtagtctcaaaagatcacccccaagatatttattaatcacaaagctgaaaaaagaattatctttatgacaaagaaacccaaaagataccaccttaaccgcatgaccaatgttaacatcactagtaataagacatattagccaggcttggtggcatgcacctgtagtcccagctatttgggaagctgaagcaggaggactgcttgagctcaggagttcaaggttacagggagccaygatcatgttgttgcactccagactgggcaacagagtgagatcctgtctctgaaaacaaaaaaagaaacaataacaataacaacaacaacaaaaaaccaaagacatattgactttaggtgctgttagtaagatgcactgagaagggcttatcatttctgtggtattcttgcctcaaagtggaaaacatagctatactagaattgagtgacattctgcaaaataactgaccaatactcttcagaagtgt

SEQ ID NO: 365234 - DNA, 555 bp, Homo sapiens
taaacatagcccccactgatgttgtctgtctctgtttctttccctttctcttcatgacttttggtttctcccgctccactatccaggtaggcaggggccccagtcagactaatggctggcccattagtccattggggtcttcagggataataaaagttaggtttctaaacagccttagttcaaatgctcaccacttcctgagagcctgaatttcagccctttcccattagtactttagcataaagyagtttatcagattcagctggttgattctaaggtgataatatgcagggctttaaagtttccctggaaaaaatcaaggtagcaataacattcattcattcaccaaataattttctaatgctgtcatgtgccaagcactaaatgcagtgagcagaggtccacatggcaaacttagaagggggttacttcttaaaaagacagaaaagcaaattcagttatttttcttgaacaaataattcctgaattcctattttgtaccagccagtctgcttagttgtggagacacatggtgagtcggcaggcctctaccct

SEQ ID NO: 365235 - DNA, 611 bp, Homo sapiens
cccagctgtgtgcctcagctaccatcagccctgtctgtaggagaccttcacagcgatgctggtatccactctccagcacattgtgatagccttgctgaatgctgggtcctctgagccttcccgaggacccatccctgtaagcccactttctttagmctctttctttcctcctgagcgtgggcatttgtacgccactccacacaggccaccactttcttccagcctcaaagagtcactccacatacaagttttcttcatttcctggagtccttgccaagatgttaaatcctatgtcccaaaaagtgtcccaaagtcaataaaatcttggtaatccagttttatattctaattcccttaatcaagcaccttaaaaaaatccaatcagtaatattcccttggctcctcgtgggacatgctggctaattcttgcagcttctttcatatataatcctgattctcctttaccaagcctagcacttccctagcctggctatgctgggatttaacctagttattggcatatcagtctggagggaggattggggaaagttctggagagagtaggtcccctgggaaaaggatatctgcagtatcttccagcacaggggtaa

SEQ ID NO: 365236 - DNA, 611 bp, Homo sapiens
cccagctgtgtgcctcagctaccatcagccctgtctgtaggagaccttcacagcgatgctggtatccactctccagcacattgtgatagccttgctgaatgctgggtcctctgagccttcccgaggacccatccctgtaagcccactttctttagcctctttctttcctcctgagcgtgggcatttgtacgccactccacacaggccaccactttcttccagcctcaaagagtcactccacatacaagttttcttcatttcctggagtccttgccaagatgttaaatcctatrtcccaaaaagtgtcccaaagtcaataaaatcttggtaatccagttttatattctaattcccttaatcaagcaccttaaaaaaatccaatcagtaatattcccttggctcctcgtgggacatgctggctaattcttgcagcttctttcatatataatcctgattctcctttaccaagcctagcacttccctagcctggctatgctgggatttaacctagttattggcatatcagtctggagggaggattggggaaagttctggagagagtaggtcccctgggaaaaggatatctgcagtatcttccagcacaggggtaa

SEQ ID NO: 365237 - DNA, 597 bp, Homo sapiens
cttagtgatatgaaaatctcataaggaatctggtccactggacataatggctcacacctgtaatcctagcaactccgaaggctgaggtaggaggattgcttgagcccaaaaattcaagaccagcctggataacatcatgaggtccccatctctaaaataaaatttaaaaaaacaaaaaacaaaaaacmcaaaacaaaatagtcaattatggtggcacaggcctgtagtcccaggtacttgggaggctcagatgggagcatcactttagcccaggagtttgaggctgcagtgattcatgatcgcatcactgcactctagccgaggtgacagagcaagattctatctcaaaaaaaaaaaaaaaaaaaaaaaagggagaatctggtccatgctcaaggtgtccacgtttagccgtggagggggtgtcccaccacattgttcttcactttcccgaacgcatcaggatgccatattacacagtgtgggtggaatatttgtaagtttggctatcttctcaattcattccatgtgtgccatagaatttaagtgctatagtcaggcgtttctgaatacagttttccatatgtagatttaccacta

SEQ ID NO: 365238 - DNA, 520 bp, Homo sapiens
ttgcgtagatgctgaagagtggccgaggtaagttaacatgcctctcaactttgcattatccatttgtatcttattttcagttatatgtctactgggtcaggatcctttcacgctccaaaagtaggagatctattctgtttggcatcaatatttccctgtgcctccctccctacactctcagtgctggctaatgytttccagatgaggtgtgagctgctgctaattgtacccggatcagtcttgatttgtgtttcagtcagcaaggcacctcactaatgggtctgaaacttggcagcaggcctgggaccagtgtcaaaggaaacagatccgaaaggcacaccgagaatggcaaggagacagggagtcgacagagaaagatttgcaggatgaaaggagggggaggaatcaaagggacaggagaaaacaggagagcctttggggaaaaagcaacagagaaacagacctgggaaagccggggctgtggaggaaaggggagaggggcaaacaaaggaaaaggccg

SEQ ID NO: 365239 - DNA, 520 bp, Homo sapiens
ttgcgtagatgctgaagagtggccgaggtaagttaacatgcctctcaactttgcattatccatttgtatcttattttcagttatatgtctactgggtcaggatcctttcacgctccaaaagtaggagatctattctgtttggcatcaatatttccctgtgcctccctccctacactctcagtgctggctaatgctttccagatgaggtgtgagctgctgctaattgtacccggatcagtcttgatttgtgtttcagtcagcaaggcacctcactaatgggtctgaaacttggcagcaggcctgggaccagtgtcaaaggaaacagatccgaaaggcacaccgagaatggcaaggagacagggagtcgacagagaaagatttgcaggatgaaaggagggggaggaatcaragggacaggagaaaacaggagagcctttggggaaaaagcaacagagaaacagacctgggaaagccggggctgtggaggaaaggggagaggggcaaacaaaggaaaaggccg

SEQ ID NO: 365240 - DNA, 491 bp, Homo sapiens
tcttctcaatcaaagggttcgtggtctcatgggcttcaagaaatgaagctgtggaccacagcatggagtgttacagcttgactagagaaatgcacagacccaaagagtgtgcagtggcaagatttattaaagcgaaagtgaaagtaaakcgaaagagaaagaaaacttccacacggtgcaaggggacctggaaggtggcctggcatgggtgtcttatgcttatatccccttatgacccctccccttttcttttttctgtcctatagaattagcttattttctctctgcttgtgggttggtgagccaacattaggctgcagctagagcttaaactccctatataattggttgaagtttcaatcccttagcttgcagctgtgactcattttggcttaggtgaaagtccccttagggaagtccctattgacccaggaagtccagccaatttagccacttagtccctcactgggattacaggcatgtgccactga

SEQ ID NO: 365241 - DNA, 541 bp, Homo sapiens
cttccacatggtattgggcctgtaggtgcacaaaagacaagagttgaggcttgggagccaccgcctagatttcagagtatgtatgaaaatgcctggatgtccaggcagaattctgctgcaggggcagagccctcatagagaacctcttactagggcagtgcagagaggaaatgtgaagttggagcccccacacagagtccccactgaagcactgcatagtggggctgtargagggctactatcctatagacctcagaatggtagatccagcattgaagccacagccactcaatgccagcccatgaaagcaaccaagagggctgtaccctgcagagccatgggggcagagcttcccaaggccatgggagcccaccacgtccattagtgtgccctggatgtgagacatggagtcaaaggacattatattggagctttaagatttaaaactgctctctcggttttggtcttgcatggggcctatagcccctttgttttggccaatttctcccatttggaatgagagcatttacccaatgcctgt

SEQ ID NO: 365242 - DNA, 603 bp, Homo sapiens
cattgagcaaaaaattttttgagtaataccccacaaacacagacaatcaaagcaaacatggacaaatgggattgtatcaagttaaaaagcttctgcacagaaaagaaaaacaacaaagtgaagagacaacccacagaaggggagaaagtatctgtaaactatctacaagagactaataactagaatacataaggatctcaaccacctctgtaggaaaaaaatctaataatctgttctaaaaatgggcaaaagttttgaatagacatttcttaaaataagacatacaagtggcaaacagacatatgaaaaggtgctcaacatcattgatcttcagaaaaatgcaaattaaaaccagaatgagatatcatctgaccccagttaaaatggcttatgttcaaaagacatgcaataacaaatgctggtgagggtgtacactggaggctcctyaaaaaactaaaaatagagctaccatatgatccagaaatcctcctgctgcatatataccaaaaagaaagaaaatcagtatatacaaaaaaacttccctcccatgttttttgcagcattgttcacaatagtcaaatttggaagcatcctcagtgtcca

SEQ ID NO: 365243 - DNA, 605 bp, Homo sapiens
ctggtgagggtgtacactggaggctcctcaaaaaactaaaaatagagctaccatatgatccagaaatcctcctgctgcatatataccaaaaagaaagaaaatcagtrtatacaaaaaaacttccctcccatgttttttgcagcattgttcacaatagtcaaatttggaagcatcctcagtgtccaccaacagatggatagataacgaaaatgtggtacatacacacaatggagtactattcagccataaaaattatgagatccagtcatttttaacaacatggatggaactggagattattacaagtgaaacaaggcaggaacagaaagacaaacataaaatgtcttacttatttgtggggtgtaaaaatcaaaacaattgaacctatggacatagagagtagagggatggttatcagaggctgggaagggtagtggtggactgggggccaggtggggatggttaataggcacaaaaaattagttaaaaagcgtacgacctattatttgacagcacaatagagtgattacagtcaatgacaattgtaaatttaaaaataagagtgtaattggattgttggtaacacaaaggataaatacttgagg

SEQ ID NO: 365244 - DNA, 541 bp, Homo sapiens
tggaaggccttacaggaacttgaaaatcagttcttctaggtgacattctttgaagccctgagtaagaattggwtgtttcttcatttttattttaaaaccacttgatacttggctgtaggatgccatttactaaattaattataattattcatttatgtgtgtgctccccctgttggactttgaactcttcaaaagccctgggtcttagaaacccttaaatctccaatatctggtactattcctagcaagccataaatattaaatacatgcatgagtgaatgataaatgtatggaacaatggatggatagagggaaacctacaaattttcaaaaggtgatagaatctagaagctaaggcatcttcaagttgtttcctgtatttggatgtgtacatactacaaacgacatacaggaaacagtatgttgagcattcctaagacaagttgaactataattagcttataatagaactgaaatttttctagttgaaacaacaaatctgttatcctactttgcagtaaatggctttctatgaaggaca

SEQ ID NO: 365245 - DNA, 556 bp, Homo sapiens
ctatagctcctatagaaagggttatgctctttccactacttggaatattgacttcttctcttttaaaatttctgcatggtaagaaggttaagaatagtgctcaggagttctagattcaagatagatttataaatctcgatccaaagcccatttccaacattaactattacacgactgcctgactggacaaattactgaatctcttcaaaactatttcctcatctacaaaatgggttgttgtaaggattaaaaatacctgtgaaatatttgagaaatagtaagtattcaataaattgaagatgctattaactgccatattccaatcatcgttaaaaactttgggccgggcatggtggctcatgcctgtaatcctagcactttgggaggccaaggtgggcagatcacgaggtcaggagatcgagaccatcctggctaacacagtgaaaccscatctctactaaaaatacaaaaaattagccgggcttggtggcgggcgcctgtagtcccagctacttggaaggctgaggcaggagaatggtgtgaatctgggaggcag

SEQ ID NO: 365246 - DNA, 610 bp, Homo sapiens
aagtaaccagctggcaaaccataaatatgattggtagagtatcacatttatgatggctttggaggtaagagacaatagcttaatgattgacagaaagcacctatccttccccttgaccagagattttctacactgggaaattgtggaggttcagagacatccactatgctcttccctatttcaaaggacccccaacatttagccccagtagcccctgaagaagccagtgatttcccaagaatataaaagacataaagggcctcctaaaactgcccagactagatctagttcctaggttataaatcctattaaaaatgagaacaactaagagaaaagccaagtctctaatatccacaaatgcctaaatactgtctcctatgaccattaccactgctccaccaaggttcctaagatgattgatagatagatagaacaaagccaaaaatgcatgatctttattaccatgagttgtttaccccaatyccaatgtggtccttggtgaccagactcaaccacatggaagaccccttttgcctaagaggcatataagcatagcaaactcagagaccccctagatccctttcccataagctgacactcacatcttaat

SEQ ID NO: 365247 - DNA, 538 bp, Homo sapiens
ccttgttcccaattttataaatagacttaaaatccaagagatgaccagtttagctcatcaaaactattgcctacaggaacatctgagatgggttcaaacaaaacattaagttgtcaccaaggacatatattacataaggccatattagtccacattgtgctgttataacaaaataccacagactgggtaatttgtaatgaasagaaatttattgatttgtggttctagaggctgggaagtccaagatcaagggaccagcattttatgagggcctccttccctccatagcaaaagggcaaagagagaataagagagagcaggagataacaaaactcattctttcataaagaacccactccctcaacaatgacattaattcattcataaaggcagagctctcatggccaaattacctcccattaggaccaacctcccaacactgtttcattgaggattaccactagcacttcttaaaattcaagcacagtacacaggcaccctcaaaagatcattggaaactggaaacattgattttcaa

SEQ ID NO: 365248 - DNA, 538 bp, Homo sapiens
ccttgttcccaattttataaatagacttaaaatccaagagatgaccagtttagctcatcaaaactattgcctacaggaacatctgagatgggttcaaacaaaacattaagttgtcaccaaggacatatattacataaggccatattagtccacattgtgctgttataacaaaataccacagactgggtaatttgtaatgaagagaaatttattgatttgtggttctagaggctgggaagtycaagatcaagggaccagcattttatgagggcctccttccctccatagcaaaagggcaaagagagaataagagagagcaggagataacaaaactcattctttcataaagaacccactccctcaacaatgacattaattcattcataaaggcagagctctcatggccaaattacctcccattaggaccaacctcccaacactgtttcattgaggattaccactagcacttcttaaaattcaagcacagtacacaggcaccctcaaaagatcattggaaactggaaacattgattttcaa

SEQ ID NO: 365249 - DNA, 538 bp, Homo sapiens
ccttgttcccaattttataaatagacttaaaatccaagagatgaccagtttagctcatcaaaactattgcctacaggaacatctgagatgggttcaaacaaaacattaagttgtcaccaaggacatatattacataaggccatattagtccacattgtgctgttataacaaaataccacagactgggtaatttgtaatgaagagaaatttattgatttgtggttctagaggctgggaagtccaagatcaagggaccagcattttatgagggcctccttccctccatagcaaaagggcaaagagagaataagagagagcaggagataacaaaactcattctttcataaagaacccactccctcaacartgacattaattcattcataaaggcagagctctcatggccaaattacctcccattaggaccaacctcccaacactgtttcattgaggattaccactagcacttcttaaaattcaagcacagtacacaggcaccctcaaaagatcattggaaactggaaacattgattttcaa

SEQ ID NO: 365250 - DNA, 651 bp, Homo sapiens
ggtagggcaggcattcacctccatcttgtttagcctcacctgtacattctccttgggatgactttccgtaatccccaagtccgccatcacaccacaccccagctcccaggattacttttctatgatggcaataagacaaagaacagctggcaatgggaaacagaccactgagcaatgtaatggaagcctactactgctttcctcatagtgggagaccaccagtgtggtaagagcacacagacatacacacacacccacaaattagtaccaggacattgtgtcctgttaaacttactacaaccatgcaaagatcgatattattaaccctacsttagaattaagggaactgatcatcagaatggttaagtaaattgcttagggccacagggtcaccaggcagcacaactgggattcctgccctgggtctcctaactcccaagcttctagtctttcctctaccgcacatctgaacacagccggggactgtcttcactccccacaatgcaccactctctctttgtcctttctctgccttcctcttctctttctctcattcccactttctttccttttttattatctgctctttgaattattccatgcctcatacctattcaggtttaggcaggttttgtgccactagatttctta

SEQ ID NO: 365251 - DNA, 576 bp, Homo sapiens
ggatccactgggtgaagccagctgggctcctgagtctggtggggacttggagaacctttatgtctagctaagggattgtaaatacaccaatcggcactctgtatctagctcaaggtttgtaaacacaccagtcagcaccctgtgtctagctcatggtttgtgaatgcaccaatggacactctctatctagctactctgggcggggacttggagaacctttgtgtggacactcygtatctagctactccggtggggatgtggagaacctttgtgtctagctcagggattgtaaacgcaccaatcagcaccctgtcaaaacagaccactcggctctctgtaaaatggaccaatcagtaggatgtgggtggggccagataagagaataaaagcaggctgccagcggaagcaaaggcaacccgctagggtcctcttccaccttgtggaagctttgttcttttgctctttgcaataaatgttgctactgctcactctttgggtccacactgcctatataagctgtaacactcaccacgaaggtctgcagtttcactcctgaagccagagagaccacgagcc

SEQ ID NO: 365252 - DNA, 576 bp, Homo sapiens
ggatccactgggtgaagccagctgggctcctgagtctggtggggacttggagaacctttatgtctagctaagggattgtaaatacaccaatcggcactctgtatctagctcaaggtttgtaaacacaccagtcagcaccctgtgtctagctcatggtttgtgaatgcaccaatggacactctctatctagctactctgggcggggacttggagaacctttgtgtggacactctgtatctagctactcyggtggggatgtggagaacctttgtgtctagctcagggattgtaaacgcaccaatcagcaccctgtcaaaacagaccactcggctctctgtaaaatggaccaatcagtaggatgtgggtggggccagataagagaataaaagcaggctgccagcggaagcaaaggcaacccgctagggtcctcttccaccttgtggaagctttgttcttttgctctttgcaataaatgttgctactgctcactctttgggtccacactgcctatataagctgtaacactcaccacgaaggtctgcagtttcactcctgaagccagagagaccacgagcc

SEQ ID NO: 365253 - DNA, 576 bp, Homo sapiens
ggatccactgggtgaagccagctgggctcctgagtctggtggggacttggagaacctttatgtctagctaagggattgtaaatacaccaatcggcactctgtatctagctcaaggtttgtaaacacaccagtcagcaccctgtgtctagctcatggtttgtgaatgcaccaatggacactctctatctagctactctgggcggggacttggagaacctttgtgtggacactctgtatctagctactccggtggggatgtggagaacctttgtgtctagctcagggattgtaaacgcaccaatcagcaccctgtcaaaacagaccactcggctctctgtaaaatggaccaatcagtaggatgtgggtggggccagataagagaataaaagcaggctgccagcggmagcaaaggcaacccgctagggtcctcttccaccttgtggaagctttgttcttttgctctttgcaataaatgttgctactgctcactctttgggtccacactgcctatataagctgtaacactcaccacgaaggtctgcagtttcactcctgaagccagagagaccacgagcc

SEQ ID NO: 365254 - DNA, 544 bp, Homo sapiens
ttaagcatgcacatgtggacagcccaccccaagggaaaaatcaggggagatgtaactcaagaccttggaattggccaggcgcggtgactcatacctgtaatctcagcactttgggaggctgaggcgggcagatcacgaggtcaggagatcgagaccatcctggctaacacggtgaaaccccatctctactaaaaatacaaaaaattagccgggcatggtggcrggcacctgtagccccagctactcgggaggctgaggcaggagaatgtcatgaacccgagaggcagagcttgcagtgagctgagatcacgccactgcactccagcctgggcgacagagtgagactctgtctcgaaacaaaacaagacaaaacataaaccttggaattatgccaacgtataaaactctaagtcaaaaggtcaaaccatacacttgatctctcaagtggcccgcttggccctcttccaagtgtaccttccttcctttccttcctgttctaaagctttttaataaactttcactcctgttctaaaacttgccttgg

SEQ ID NO: 365255 - DNA, 600 bp, Homo sapiens
aagcagtcacagagcctgcccagattcaaggggagcagacagcaacctcatttctcaatgagaggattgtcaaataatatgtggccctccttattctgccacatcacatgaaacagattctaccaataaggaaacctcactttggattgttgtgcttgcagaagaaataacttctttgttttctaagccatgttattattgggcctcttgcttagctttttcctgtaacaaacactcccagtgaatcagactctctaggtaccaggatcaggaatctgcaatctaaaaagcaacctgatggtttaatgcacaccggcatttgagattcattctgctaagcaacgagggaggtcagtttctgactgtccaatacctctgagatattaatagttaaacccttttatcagattgttcatggggttcagatcttagaacagacaacatctccacagggatgatctgcagatccacaacttggctaaatcccacctggagacactccaaggggcctcagagcccrtctggtgaaatcctcactgatacaggaattcttgatatgctagtgttataggatgctcacttcagtggcaaaaatgacag

SEQ ID NO: 365256 - DNA, 649 bp, Homo sapiens
tccatgttttctataagggcatcactgaggatactgtccattactttacatagtgtcttctctatcaggctgcaggagaaaatatcaatgactttctggtcttagaatcaggaatagatgtgtctctcccgagccaccagatttttcgccttatgagctctacgcattctttgactgacacatttctctctctgcactgggatgcttacagaccaggatcatactatttgccatgtaattcatgcattaatctctttcctgagttcatcttatttttccagatagtttcccttctttgtcttatttatcttaatttttatttattttattctgttgtttttcatgcatcctkgtaagctaccttgaatattttggaaaataaacttggtataaacagataactgatatcctaatgaatgtgaaacattattcaagctctttaatatcaaattcatgtgtgaatgttaagggtgagggtgccccagactttatttattcagaggcggaatgcgtaagaccatatttttctcactttcagcatttattctttttccacttactctgaagactctaagaaaggtgtatggaagggagagggtatacctgcttctctgctttatatatgctgttacagacatgagatcacaat

SEQ ID NO: 365257 - DNA, 527 bp, Homo sapiens
tgagcaagtgttgactctcccaatgaccctgtgaagtaggtcatcaacccattttgcagatgagaatactgaggcccttatgtgtgcagtgagttgcccaataccacatggctaatgagtgcagagacaagattggagcctcagctgttcacatcctagtgctctgccctttaccattcatactatcccattatcatagagtacctgttcattgtgccttcaccctgggaaggagaaaaggtcaagccttctgtcctctgcaagaccctctgttgctcttccaatggcttgtttttgtcacagtcacacataactgcatgctgttgacacagaagtcaatattcaaggtttcctccatgcatttttttcactcattacatatttatggtgccatgcactaaaataggtgtggggaacaaagtgatgggcaagacaggtttggctkctgaacctcatggagctcagttttgcaggggatgcagacattcatctaaaattcatgcaaatatctaattgtggctgtgcct

SEQ ID NO: 365258 - DNA, 548 bp, Homo sapiens
ctgcttatctccagcactcttcagagctggaaggcaggaaagttcaagtccattgaagctgtgcccacagccgcctcttcccccaggtgctctgtcccagggagctgggagttttatctataagcccctgactggggctgctgcttttctttcagagatgccctgccaagtgaggaggaatctagagaggcagtctggccacagctgctttactgtgctgtggtgaattccacccagtccaaacttcctggcctccttagcactgtcaggggataaccacctactcaagtctcagtaatggcagatgcccctccccccaccaagcttgatcatcccaggtcaaattcagacctctgtgctggcagtgagaatttcaagcaagtggttcttagcttgctggtgtccgtgggaatgggacccactgagcaagaccacttgactccctgtcttcagccccctttccaggggagtgaatgattctgtctcgctggggttccaggcaccactgggatatgaaamaacaacaacaacaacaacaacaacaacaa

SEQ ID NO: 365259 - DNA, 606 bp, Homo sapiens
ccctttccaggggagtgaatgattctgtctcgctggggttccaggcaccactgggatatgaaaaaacaacaacaacaacaacaacaacaacaaactcccacagctagctcggtgcctgcccaaacagctgcccagttttgtgcttgaaatccagggccctggtggtgtaggcacacgagggaatctcctggtctgcagattgcaaaaaccataggaaaagtgcagtatcagggccggatagcacagtccctcacggsttcccttggctgggggagagaggtccccagctccttgcacttcccaggtgaggaaatgccccaccctgcttctgctcaccctctgtgggctgcacccgctgtctaaccagtcccaatgacatgagctgggtacctcagtcagaaatgcggaaatctcccaccttctgcctttgtctcactgggagctgcagaccagagctgttcctattcgaccatcttgccaggtctgtaccacgttttctttatccattcatccatcagtgggcacttaaattggttctattccttggccatgtgaataatgctgcaatgaacatgaaaatgcagatatctctttgatatactgatt

SEQ ID NO: 365260 - DNA, 469 bp, Homo sapiens
aaaccaaacttctgctagctatgaccataactcctaccagctatgaaatcttgagctcattacttaaatgttccatgtctcagttttctcatctgtaagtggaaataattttacctacggaattgtgttatgaggatgagatgaactaatacgagcttggaaagtgcctggtatatagaaaacactctaagtcgtagctgttattattctcagggtctagaaatgaacatatgcttcagcttcaaaaataaaaaaaaggtttgccgattaaatcacrttgaatctctggggatggagaaaggctttctattaagccttttcactccatgttagtttggttcttctggttgccaagaattcactcaagctaacacaacaagcaaggaagcttgttgtaaggctgtgactgtaagaatagagacacgcatctctagggaactgtagaacaatcagccagccagaccacaga

SEQ ID NO: 365261 - DNA, 597 bp, Homo sapiens
attacagatttcccaatgcttcctcaaatctcacctgtgaatctcggtacagctattcctaccaataataaatgctgctctttattgtatgctatcatgcttctgggactatgtgggaaattcttcatacattatgttatttatttctcacaacaatctgtgagcctaggattgatatatcatttagaaataatatttctctgcccrtaacaggaaacatgactgccaatggcttaagcaataaagacatcatgaacaaagaaatagaatgccccactattggttcagcatctcaatgacatcatcaaagatccaggttcttacaacctgctgttccatcatcctcagattgctagttgtagattcacaagtgtgttgcctcatggttacaagatggctactatggctccggacatcacaacctcacacaacagcattcaaagcagaaaggaggaaagggagcaaaagatctcttcttgagcactgctctgttttttattggagaaaaattattccagaatcctctaagtcaacttcccttttatttcattggccaagacttagtcacatggttacccttggctacatgaaaggctg

SEQ ID NO: 365262 - DNA, 507 bp, Homo sapiens
caacactgctggtgggaatgtaaattagttcatcctttctggaaggcaatttggcaagacaatcccaattatgttaaaaatatatatgtatgtacatttaggcatacaaaaaagactgttgagagataaaataaatgttaacagcaattttctttgtgtaataagattagagtgatttttattttcttctttatatttttctgtaktttccaaattttcatagtgaacatgaattgcttttataataaggaaaaaagaaaaacaatggaaagacattaaaaaaaactttgttatgttcttttgaaatgtattttttacagtttcattacagtttcattccaggatgcttggttttgcaatgctaagctttttctgaagagttttgtacttcatcctgagagagttagagaataaaaggaactgtcagttattctcgtctgtctagcaaaagagaaagcacacctgctttgccctcagcagacctgtgtgggtacggcagccttgccc

SEQ ID NO: 365263 - DNA, 644 bp, Homo sapiens
tttaagacagggtctcaatctgtcatccaaactggagtgcagtggcacaatatarctcactgcagcttcaatttcctgggctcaagtgaccctcccacctcagcttcccaggaaactggggctacagacatgcaccaccatgcccagctaaatattttttagtagatacaagatcatgctatgttgcctagctggtctccaactcctgggctcaagcaattctccctccttggcctcccaaagtgctggacaggcaggagccaccacacccagctagatgttatatttttcttaaagtttccatagtcaagaaatctggagtcagataaaccaggattcatagatcaacttcaccaacttccagctgggttaccttagacaagtaacttaatcccaccaagcttcagtttcctcatctatgaagaatctggcatcattgtcataagcttcatgaaatctctcatggtaggcaagatctacagttacagatctcatattaaacaaatttaagttataaaagttgctatgattccatgctctaattctgaattgtaacaatgtctcctttatgtacctcatgggggtgattacaagaatctaacaagatactacacatggaaagtagaccacttgcccattgcagt

SEQ ID NO: 365264 - DNA, 599 bp, Homo sapiens
tggtatttataccatggatatgagcacatgctacacacaattcagggcttttctgtgggagtcctgatctgctaaatttgttcatggaaattcccggaagctcatcgaggacaccttttgggattccgtaaagtatatttcattaatgagacagaatctgcagtgagactagcaccatgcaatggaatcacaaattgagttgttaagagaaagaagagagaaggtgctctgcaggatggctaaaaagtatgctatgagagcaagaggaagaaaaaaaattcagtggaggaaagaaagatcttccaataaaaagaacagagattttaatctttgcagcacacattttgtcaagtctgcataattcatgaaacacaagaacatccggaggacagctgaagttcagggcagaagatcaagttgacaagattggctttggggtaaaacaagcggatgggggcttggctgtcggaactgacctatatttctctgtgtttactcttyggcaggagctgtcactgttcatccatcaccccggctaggctgcacccgaagtccagttttccctaggggcctttggaacctggaaccacaaagatggc

SEQ ID NO: 365265 - DNA, 605 bp, Homo sapiens
tattctgacttttgaaatctttgtctgctctaccataaggaatttcccgtgttctcttccattctctttgaagctccactacccagcatgtagctcagcctcttttctcctacacttcctttctcttttctgcctctcctgctcatccatgatcttgaattcttattcatttggcagaacaattgacctcttattttgttttgctattttgttatagcttatgtccatcaggccctgtctttaacacctaaaacaacctgtaaaaatatatccaagacaaagatggttttctctctaaaaggacctctggawgccaaagagctttttttgatacctgccaccaatctctgatttcatgcccaaaacagtcatcactaatcaatctcaccactctttgctaccaatagggcctcttcccaacaggtaagtgtagccagactgtattagtctgttctcatgctgcgaataaaaacatacccaagactgggtaatttataaaggaaagagtttgactcacagttcaacatggctggggaggcctcacaatcatggcagaaggcaaatgaggagcaaagctacatcttacatggtagcaggcaagaggg

SEQ ID NO: 365266 - DNA, 571 bp, Homo sapiens
attttatttttattttagattcagggggcacatgtgatggtttgttacataaatatattgtttaatggtgaggtttgggtttttagtgtactcatcattcaaacagtgaacactatatgcaataggtagtgttttaaatcctcaccatcctcccccattttggastccccggtgtctattctttcaatctatgtatctgtgtgtactcactgtttagcttccacttataagtgagaacatgcggtacttgattttctgtttctgagttattgctcttagaataatggcctccagctccatccatgttgctgcaaaagatatgatttcattattttttatggttgcatagtatctccattgtgtatatgtaccacattttgtttatccaagcatccattgatagacacttaggttgattctgtgactttgctattgtgaatactgctgtgataaacatatgagtgcaagtgtcttgtttatataatgatttcttttcctttggataaatacccagtagcaaaattgctgggttgaagtcagatcccatcacttctctactcatgaccccctc

SEQ ID NO: 365267 - DNA, 571 bp, Homo sapiens
attttatttttattttagattcagggggcacatgtgatggtttgttacataaatatattgtttaatggtgaggtttgggtttttagtgtactcatcattcaaacagtgaacactatatgcaataggtagtgttttaaatcctcaccatcctcccccattttggagtccccggtgtctattctttcaatctatgtatctgtgtgtactcactgtttagcttccacttataagtgagaacwtgcggtacttgattttctgtttctgagttattgctcttagaataatggcctccagctccatccatgttgctgcaaaagatatgatttcattattttttatggttgcatagtatctccattgtgtatatgtaccacattttgtttatccaagcatccattgatagacacttaggttgattctgtgactttgctattgtgaatactgctgtgataaacatatgagtgcaagtgtcttgtttatataatgatttcttttcctttggataaatacccagtagcaaaattgctgggttgaagtcagatcccatcacttctctactcatgaccccctc

SEQ ID NO: 365268 - DNA, 561 bp, Homo sapiens
gggggcagagaggaagagaggggattggaagagacaacgggagaaagacctacactgaagcccctctcggacctactcagtgctgaggatgggccgccggtggatgcacgaacctcctcttcctctgtgcttcctccacctccttctacacccacaacaccgaacatggacagaggcatccaggtgatgctaaatcgttgctgccacttgagtgcactcggctgtgctcasagctgacctgtgccctggtcagcaggaactgaaaggtatttctaggaacggtgcactcaccccacacatcttgcaggcctgctcctcggtcaacggtggcccagagggacaggtttttgctgtttttcatgtcctggtgaccagtctttcttgtctctgctgatcacaggtggagctacaacataattagtaggtggagttgcctcggaaaacattcctgtggtcaattttattttttaaagctgggaaatccaggtctctgggtggcccctgtggtgtcccttgtgctcttcagttggctcagaactcgtcgtcttttttaagtaactc

SEQ ID NO: 365269 - DNA, 576 bp, Homo sapiens
cccagcctggtaacaagtcaccacaaatttagtcacttaaaacaacactgggctgggcccggtggctcaggcctataatcccagcccttggggaggccaaggcgggtggatcacctgaggtcgggagctggagaccagcctggccaacatggtgaaaccccatctctaccaaaaatataaaaacttgctgggtgtggtggcgtatgcctgtgatcccagctactcaagaggctgaggtagaggaatcrcttgaacccgggaggtggaggttgcagtgagctgagattgcgctattgcactccaggctgggtgacaagattgaaactccatctcaaaaaaaaaaaaaaaaaaaaccacacacacacacaaacgaaaacaacaacaaaactccacagattcattatctcgcagttctgagggttgtaagcccaaaacaggtcttgctgggctaaactcaaagtttcagcagtctgcattcctttctggaggaaaatctatttctgcagcttgttcagcttctagagacttccataattccttgggttggggcaccttcctctgtctcaagccagcaaa

SEQ ID NO: 365270 - DNA, 576 bp, Homo sapiens
cccagcctggtaacaagtcaccacaaatttagtcacttaaaacaacactgggctgggcccggtggctcaggcctataatcccagcccttggggaggccaaggcgggtggatcacctgaggtcgggagctggagaccagcctggccaacatggtgaaaccccatctctaccaaaaatataaaaacttgctgggtgtggtggcgtatgcctgtgatcccagctactcaagaggctgaggtagaggaatcacttgaacccgggaggtggaggttgcagtgagctgagattgcgctattgcactccaggctgggtgacaagattgaaactccatctcaaaaaaamaaaaaaaaaaaaccacacacacacacaaacgaaaacaacaacaaaactccacagattcattatctcgcagttctgagggttgtaagcccaaaacaggtcttgctgggctaaactcaaagtttcagcagtctgcattcctttctggaggaaaatctatttctgcagcttgttcagcttctagagacttccataattccttgggttggggcaccttcctctgtctcaagccagcaaa

SEQ ID NO: 365271 - DNA, 533 bp, Homo sapiens
tatctcatgcaaatcttaaccaaaaggtagcaggagtggacacacttgtatcagacacaataggctttaagtcaaaaactgtaaaaagagaaaaaaatgacatatataatgatatatataataataatatataatatwtaataatatgtcattacatatataatgatatatataataatatataatatataataatatatcattttatatatatataatgataaaagggtcagctcattaggaagatataacaattataaacatatatgcccctaacatcagaattcccaaacatatgaagcaaaccttgacagaactgaagagagaaatggacagtaatacaataataataggagacttcaacagacactttcaatagtggatagaacaacaagcagaagcttagttgggacacacagaacttgaacaacactataggccagttggagcttacagacatataccaaacattccatccaacaacagcagaatacattcttctcagagacatgtgaaactgttctagaaatacc

SEQ ID NO: 365272 - DNA, 593 bp, Homo sapiens
ctattatctggtgataatgtattttgaktctattgttatcttaaaactggtttcttctgggcccatccttctgatatgtttgtttaatgacatgtttaaaaatctttgtaagagctgtattaaaatgacagatattttgtgttgccaacataaaccacaatctccaaggctggtgataaactccactcctggcctcagctactgtaggctttgaagctcttagctgcttttcaaatgttggcatcgttgtcaatcattttgtatcaaccttatagtttgtgtgaggaagccatttgttaaattgcagcctcctagactcaaagaacatttaccaaatgctttcagataaaatgccatcttattctgtaaaatactgggaagctcgcaaagggaagaaatacttgagggaaatagcaaattgcaggagagaaaagtgacataacgcattactctattctccattgcacttttgataagaactgagaacagcacttaattcccctctcttctgtgtgtgtttgtgttattcatttgactagataaagctctttggggcagggtacacataccatactggtggtctcaaaattata

SEQ ID NO: 365273 - DNA, 611 bp, Homo sapiens
ggagactattatctggtgataatgtattttgagtctattgttatcttaaaactggtttcttctgggcccatccttctgatatgtttgtttaatgacatgtttaaaaatctttgtaagagctgtattaaaatgacagatattttgtgttgccaacataaaccacaatctccaaggctggtgataaactccactcctggcctcagctactgtaggctttgaagctcttagctgcttttcaaatgttggcatcgttgtcaatcattytgtatcaaccttatagtttgtgtgaggaagccatttgttaaattgcagcctcctagactcaaagaacatttaccaaatgctttcagataaaatgccatcttattctgtaaaatactgggaagctcgcaaagggaagaaatacttgagggaaatagcaaattgcaggagagaaaagtgacataacgcattactctattctccattgcacttttgataagaactgagaacagcacttaattcccctctcttctgtgtgtgtttgtgttattcatttgactagataaagctctttggggcagggtacacataccatactggtggtctcaaaattataaaggaatggccac

SEQ ID NO: 365274 - DNA, 621 bp, Homo sapiens
attggacaaacctgaatcaagtatcttctctggaaactgggatgtgatcttctcacacttaactcacaagggtgaagaataaaaagggagtcattccctaaaataaacctgggaatctcttatcaggccagataactgatgccaacaaccttagtaatttattacaactagccaagggattctacagtattggcatttcttagamtctaatcaaacaaaatagtggaggtgaaaatgtgttttaaataacaaaacacagtaagatctcaatgtgattgggtcattgacttgctctagacactcagtaaaagcacaacactgttctaaatcctaaaagtggatacacagcagatctggcctttcttatcacggacttcaccatattattgagaacacagacactgaggcacagcaaataactgacttgtgttcaacaagaaacaagggcaaaagagtcttatataaataaacaatggtgaggtcgacaattatgaagacatcagagtagctagttctaatcataaaagatttattaaaggaaatcatttgctaatggaaatttgaaaccacagaataaggcaatattgaattattaaccccccaaaataacttttccacacc

SEQ ID NO: 365275 - DNA, 552 bp, Homo sapiens
cgtcaaaaccttttacctggcttaggcactgtgggcacttttctcagctaagtggtggaatatagtcacattattatcttaggattaatcataaagccatactgattccttggtggatcatcggaatcttttggaataatggaaaaaggcataaaaaaagcctttgtatctaacttcagcgttagttatcactcccttatcttgcttaatgttttttcatgtatgacaagtgacccactctttcatttgctgcataataggcaaaaggaaaagttaatttttttaactgattgaccatgattactcatgtaggtcctttgtaaggcagactgctcagctaattaacatagtaacatcaatcaatatgatatttaggaaaytatgtgctaagacatctgtctactgacttgtaaaggtaagttaacacataagaggtgggtcgtgggaaaattggtttttctcagaagcaatctacataaaaagcacaacatggtcttcagttagcccctgccctttgtaacagagaatgtttagtctgagatgtcacactta

SEQ ID NO: 365276 - DNA, 589 bp, Homo sapiens
gctaactttgttacattattgtggaataaatctgcaaaactgaaaatctgtacccattaaacaactacttcctctctctcctgaccctgacaactgccattctactttctgtctttataaaattaactactttagatatctcatttaagtcaatcatatagtttttgaattttatgactggtttatttcattttgcatagtgtcctcaaggtttatccatgttgtataatgtggcaatattaacttcttttttatataccacgttaggtatataaaacttcttctttatccattcattcatggacatctgggttgtttttacgtcttagctattgwgaatagtgctgtaaatacctcttcaggatcctactttcaattcttttggttatatacctagaagtgggattgctgtttcatatggtaacttgtttttaaatttttgagaatctgctatattgtttcttattgtgggtatactattcccaccaacagttcacaaattatccattttttccatattattaccaaagtttttttgtgtgtttacaaaatagttgttcttttcctttgtttttgtttatttgatagt

SEQ ID NO: 365277 - DNA, 379 bp, Homo sapiens
gggcatacagtcctagctagtcctgggcaacatggagcagtaagagatgtgtattttctactctgatctttcccttggccttctgcaatttagagatgttagttgcaagcaacagaaaacccaacccagacgaatttaattttacaaagaataaaaaacttactgattcatttactggagtccaggggcacaacagacttcactcgraggccaaacagtgctcaggatgctatttctgcatttttgttgtctccactccacatccttgatgcttgatgctggccctaatcgcaagcaggttctcactctgtggtcctaaaatgactgctggcaacaatgggactgcatgcttctttgtttctatttgcaaagaagagag

SEQ ID NO: 365278 - DNA, 468 bp, Homo sapiens
actaacatcatttttttctaattatttcaaaaaattgattaggaggaaattgttcttaactcattctatgaggcaggcattattctgataccaaaaccagacaagggtgcaacaaaaatgaaaactacaggccgatattcctgatgagcataaatgcaaaaatcttcaataaaatactagcaagccaaattccacaatacaccraaaagaaaatacaccagaatcaagtgggatttgggtcataaccccaataggcataatacttaataccataatactgagtgttaaaatcccaaaagatcaaaatcccaaaaatataattctgcaagaaataatttacaaaattatttctaaaacatttatttacatttttatatagggatatatttgagaaacataataacacaacagaacacttcataggtcactttacccaataaaataaggaataacatacatattttatca

SEQ ID NO: 365279 - DNA, 548 bp, Homo sapiens
ggttttcagtttttacccttgtacactaagactactgatactctttttataacctggcaagcaatgttactctcttgttcaaaaccttgcaatggcccctccatttcttttaaagtaaaaatcaaagatttggagttgcctacaaggsccacataatttagcccttggccttctatccctctccttctgctcttcccttgactagcctgcttcagatcacagtctctggatcttcctagagcctgaccagcctgaccagcattctggtctagtttaagacattcacacatactatttgttctgcctgtcatgttcttactccagggatttgtttcactcagtttcttagctcctgcagttcttcattcaagtaccactttctcaacaaggccctgagcacctatttaacccatgacgatctgcatcatgccaaccaaaatggcattctgatttcctctttttgacatttttcaaacttcctctacattttagttttccctgcatttccacttatctatattgctgttgaagtttccttctttcatagc

SEQ ID NO: 365280 - DNA, 548 bp, Homo sapiens
ggttttcagtttttacccttgtacactaagactactgatactctttttataacctggcaagcaatgttactctcttgttcaaaaccttgcaatggcccctccatttcttttaaagtaaaaatcaaagatttggagttgcctacaaggcccacataatttagcccttggccttctatccctctccttctgctcttcccttgactagcctgcttcagatcacagtctctggatcttcctagagcctgaccagcctgaccagcattctggtctagtttaagacattcacacatactatttgttctgcctgtcatgttcttactccagggatttgtttcactcagtttcttagctcctgcagttcttcattcaagtaccactttctcaacaaggccctgagcacctatttaacccatgrcgatctgcatcatgccaaccaaaatggcattctgatttcctctttttgacatttttcaaacttcctctacattttagttttccctgcatttccacttatctatattgctgttgaagtttccttctttcatagc

SEQ ID NO: 365281 - DNA, 581 bp, Homo sapiens
  misc_feature (1)...(581): n = A,T,C or G
ataaactgttaaatataaagaagccaggacttgggttttgaaataaaacagtttctcattcccaacctctccagatggtaaactattctcaaattaggaaatagctttcaggcaaagatcaaatccagggcactgtcaggaaaacacgatctaaaaatgactttaaaacactttctaagacttcasaaagatttaaggtggtgcctcatacaccttttcagacagataaaaaggctatctaagaattttaagaccatgcactacagtatctttcttttcattaaaaattagggcttgtaataattttagggcactgtcccctaaaaacgttaccaggagctcaaagtagagaaaagttacatcaaaactatttgtacaaatggtttttgctaaatggagtgaaccctaaaagggattcatagaaaatccataaaaattttaagataatagtactaacagaaacactgccagcatggactaaaaggaaaagtaacaatgagaaatgaaaagagaactcggtgcccccaaacttcttgggagggaagcgagtatgtaaatatgcgctcaatnnnnnnnnnnnn

SEQ ID NO: 365282 - DNA, 558 bp, Homo sapiens
aaatattattttaagtcactacattttggggtagtttgatacacagtaatagatatcctgaatagcacagattaggagggaatttcagaaaggtctaaatgtgaagaaagaggatcaaggttagaaactgagtatatcctgtggagatttaattttttagttttcttttctctgaattatggggaaaagttatactgaacatatttctatcagttttgttttctaagtagaaatttttctgattatcccaacttttagtaattgccaataagctaagtacatgcagcctggagrggggcaggtggtggtattgtagaaaataaagggagcaggtctatacagagaggaggatttggccccacacttgctcctctgctgaggccaatttttttttttttaatatattttaagttctagggtacatgtgcacaatgtgcaggtttgttacatatgtatacatgtgccatgttggtgtgctgcacccattaactcatcatttacattaggtatatctcctaatgctatccgtcccccctcccccaaccccacatcctggtg

SEQ ID NO: 365283 - DNA, 510 bp, Homo sapiens
tcatatatgtaaagcaccaaaacatagtaagtgctaaggaagtgttagttattattattattgttatgcatataaaacaggctggccactcctcttctgggtaagagcactaatcaaattgtaatcactgtcttggtagtatttagttctagaaccccaaagggaactgtctgatgaatgcccctggtgacaagtaggactagrgtttagactggtatctgcagagctgaggttgggaaagaaacttcttatacccagagctgtaggtttgctggatacaagacaatgtgacatgcagaaagtcattggggtattcgagaagaggaatcacacaagtcacaaaaacaaatttggggcataatatataaaactggtgtagagaaggggatgagggtgaagaaagagtcatggacattgcaagagagggtcacgggctgactgcaggagctagtctcaggataattcttactgttgcatgggtgggttgactacattcaaaagagaaagagc

SEQ ID NO: 365284 - DNA, 600 bp, Homo sapiens
aacactttattattaaatacattttaatttacttgaaacatctttttactaagtgctgcttcttccaatatgcatttttaactacttcattttaaatgcacaattagatattcagaccaccagcaagcaaagaatgacatcttatggatatgatatctagcacaattgatgcttatgatatatcacagaatgacataatccagtctagaacatctttgtcttgattttggttttttaaatgtgaagcttaatctttcttaacctcaggttttatttaaaggataattatcctttgataatgttctgctccatgctaagtagcatttcttttcaatgtccattcataaagaagcctaagagcagaataactctgtggaggagataaataacatttctccttttggagaaggcaagwaatagcccaggtagaatctgtggaaaccgttcttgttatttctaactgcaaacctggtttattacatactgggggaggacaaatgctaaaagacatgaggaacaggtaaagctttttaggttcattatttactatgggctcttaaagaaacgtgcagttcacgagggcttattggagccagtttc

SEQ ID NO: 365285 - DNA, 390 bp, Homo sapiens
ttctgctgctattgggtagaatggtctataaatgtcaattaggtcaagttggttgataatgctgtttgtgttctcaatatctttactaattttctgtctacttgcattttaacaattattaagagggtttgaaactttccaactataactgtasatatgtttatttctctttgcagttctaccaaatattctactaaatgttttgtaactgtgttattattagatatacaaaatattagaatttgtcctcttgataagttgacccatttataattattaaatgacttatcttgttcctggaaatattttttgccttgagacatattttgtctgatattaatatagatattccaattttcttttcattagtatgccatgtcaattttttcc

SEQ ID NO: 365286 - DNA, 592 bp, Homo sapiens
attataaggggcactatgaactccaattgctgaacatggaggaggagcgattcatgctgcctgggggagttaggtgagttccacagagaaggtgacattttagctgggtcttgaaggatgaataggcatttcccagacagcagagaggaaagagacaggagatgggaatggaaaggttgagctgtgaaggacttttcatgtcatgctgaggaatttggatacaaagggacaggtgacagcataaatgtctgttgattgcatggagcaggcatctacagatttggtactgttaatggctcattcccaggtctggcttcccattgccacatgtggaaggtagaagtattttagacctagcgtgactcccaacctctggagctttcttgcctctgcattcaatyacctgccttctatttgcagggttcccatgtgctaagagcaaatatgctagtaccagtaatgaccttaggtttgtattcatgtttggaatcaagggaatgtgggaaggaggatgggctttcaagagctccaatacaattccagcatcttgtcattgttgttacaaaatagctctgaccctcagcttcaactg

SEQ ID NO: 365287 - DNA, 523 bp, Homo sapiens
tgctcctttatggaagagttccttttaaaagaaatggagaaaatgcttagaaaaagtgtatttaaaataatgtttcccctacttttacccctttcggtggcatttccaaagaaaatctaggagagtccacttacktctcaatcccttcagcagaaagaatttcaaaacactcggctcacacttctgtggcattttcagtcttcttcacattggaactatttactcatggtaggtttgtgggcgtccctgccttctgtggaccaggagcccctggggagtcttgttccttgctcctggtggagcctggtcagcacctcactccgcggcttcgcgcttcgcagacacagcgcacctgtcatcggatgaattgattgggcgtcttgtcgaacaccagcacgggttgtgctaatgattcttagctccatcgcagcatagctgcaaatcaatcaccgtcttccagaattcctggatatttctttttttctaatcagaaagacagtagcaacacctggtgccgaagaag

SEQ ID NO: 365288 - DNA, 523 bp, Homo sapiens
tgctcctttatggaagagttccttttaaaagaaatggagaaaatgcttagaaaaagtgtatttaaaataatgtttcccctacttttacccctttcggtggcatttccaaagaaaatctaggagagtccacttacgtctcaatcccttcagcagaaagaatttcaaaacactcggctcacacttctgtggcattttcagtcttcttcacattggaactatttactcatggtakgtttgtgggcgtccctgccttctgtggaccaggagcccctggggagtcttgttccttgctcctggtggagcctggtcagcacctcactccgcggcttcgcgcttcgcagacacagcgcacctgtcatcggatgaattgattgggcgtcttgtcgaacaccagcacgggttgtgctaatgattcttagctccatcgcagcatagctgcaaatcaatcaccgtcttccagaattcctggatatttctttttttctaatcagaaagacagtagcaacacctggtgccgaagaag

SEQ ID NO: 365289 - DNA, 568 bp, Homo sapiens
ggaccaatgaaactgtgggggccgtgttgtggcattggatgggacactgcccttatcgggtctcctttccaggatggtcactctggcagggagagagttggatggattggagagattagggaggacacacacacacacacacacacacacacacactcttaaactgtttctaattatttgctcttggttgggatgaaaaagataccgtgtctgttgacttgtgaatggggggcattcctgaagagggagggaggagagagacagaaagagagasgaagaggaagggaggggggagagatggaaggactcatgagtgactgtcacaggcaggaccccccaagcatttgcaaatcctagctcacctattgccctcctattttaaaactccttactcctaaattcgtaacaagaacctgttaccaaagaataccattttaactccacctaggctgagtgacagcacagcacaggggtcaggaccaaggcttacagagcagcccaaccacctgcccctaggctccaaatctgaatcctggattcagaatattcaggtgtgtatgcaaagaag

SEQ ID NO: 365290 - DNA, 523 bp, Homo sapiens
tgctcctttatggaagagttccttttaaaagaaatggagaaaatgcttagaaaaagtgtatttaaaataatgtttcccctacttttacccctttcggtggcatttccaaagaaaatctaggagagtccacttacgtctcaatcccttcagcagaaagaatttcaaaacactcggctcacacttctgtggcattttcagtcttcttcacattggaactatttactcatggtaggtttgtgggcgtccctgccttctgtggaccaggagcccctggggagtcttgttccttgctcctggtggagcctggtcagcacctcactccgcggcttcgcgcttcgcagacacagcgcacctgtcatcggatgaattgattgggcgtcttgtcgaacaccagcacgggttgtgctaatgattcttagctccatcgcagcatarctgcaaatcaatcaccgtcttccagaattcctggatatttctttttttctaatcagaaagacagtagcaacacctggtgccgaagaag

SEQ ID NO: 365291 - DNA, 568 bp, Homo sapiens
ggaccaatgaaactgtgggggccgtgttgtggcattggatgggacactgcccttatcgggtctcctttccaggatggtcactctggcagggagagagttggatggattggagagattagggaggacacacacacacacacacacacacacacacactcttaaactgtttctaattatttgctcttggttgggatgaaaaagataccgtgtctgttgacttgtgaatggggggcattcctgaagagggagggaggagagagacagaaagagagaggaagaggaagggaggggggagagatggaaggactcatgagtgactgtcacaggcaggaccccccaagcatttgcaaatcctagctcacctattgccctcctattttaaaactccttactcctaaattcktaacaagaacctgttaccaaagaataccattttaactccacctaggctgagtgacagcacagcacaggggtcaggaccaaggcttacagagcagcccaaccacctgcccctaggctccaaatctgaatcctggattcagaatattcaggtgtgtatgcaaagaag

SEQ ID NO: 365292 - DNA, 417 bp, Homo sapiens
cctgggctttcttgggaaaaaacagagaaaagtcctttggtgtaaagtcagtgggaattctctggttgacctcttggtgttggttgctcttacaacactcaataaaataagggctgggcctttcttctcagcttttgttccagtgaaatttcattgctttactttctgcgaagrgctcagatattcggaaataacaaatgtcttaaagccactttcctgcaactttcacatatccatctttgtgtctcgtgctatcattctcctttctctttccagcttccttttcttcccccaagatagttttctgcctttctcactgtggtctccatcctgttcctgctgatgttcacccccttgtgtggtctccttcccagagggcaggcaggacctgagacttgctctaaccagtagaaggtg

SEQ ID NO: 365293 - DNA, 538 bp, Homo sapiens
ccctgtgcaaatggcacttctggtctaaccagtttttcacactctatgcaaatggcacatttggtccaaccagtttttcatgccctatgtaaaccagacactgcctcctcaccagctgatctataaaaccccctgtgtttcaccatggatccggcaacccacttctccaggacccctctctgcagcagagagctgttctttcttttgccaattaaacttccacttttaacttcactcttcatatctccatgtccttgttctccacggccatgagaccacaaactctgggtgatactctaacattcaggtcgtttcaatatacccactttgcctcttttaaaagagaaaaatcagtagcccccgaaatatatttttcagatggtagaccatgcatgatgtctctctgctgctgggcatctgtggcctccgttggcgctccccactccccatcttatcagtgtgtttccatcctgaagtgstggaataattatcagatactgatatggtctcatcctgtcagcgactaatacgtggccca

SEQ ID NO: 365294 - DNA, 648 bp, Homo sapiens
cctataaggcttctcctaatacgtttttctcaaaacaatgattaaagaaaaatattgtggttgcacaaagacggttatatcagtagcttcttcttcagtgggaaaaggggaagtagataggcaatgcaatggaattatgagcccaatgtgcttaggatcttgtaaatgttaaccaacattatcccctcacccaacatggcagcccataccctctcctcacctaacaagttgtccataccctctcctcagccagcatgactgtccatactctcccttcacccaacatggccactcatgtcttctcctcagctaacatggttgtccataccctttcctcacctaacatggctrcccataccctcttcctcacccagcatggccacccatgccctctcctcactcaacatggcatttttttttgccctcccccaaacctgggatgaggtggagcctcagtgtcttgactttatgtgtgtttgaatgaagagggtttaccacctctacctgctgataaaaaaccttcactagaggagaattggggtgtgcgtgtgtgtgtgtgcgtgcgtgcgtgtgcatgtgtttagggtagtggagaatgaaattgatttcttacctcttcttgttttgtgtaattctttacccaaataa

SEQ ID NO: 365295 - DNA, 640 bp, Homo sapiens
ctggcaccttgaaaaaagtgctgacttcacaaagacctttccgcttctacctctaaataagctgtgccacttgtacagttagatcagatctgctgatatcccataaaccacatttactgatcagcacattctctcagtagcaaagccatagaatgtcagtcccaatgtagactcataagccyaggtttgaactggttagatcattgaactgagacatcccaatgtggccacttatgctgtgttagtctgttcgtgttgctacaacaaaataccagagattgagtaattaataagcaatggaaatttatttcttatggttctggaggctgtgaagtccaagatcaaggcaccaggcttggtgtctggtgagggctgctctctgcctccaagatggtgccttgttgctgcatccttacatgacagaagagcggaagggcaaagggcctcactagtttcccccagtcctgctataagtgcattaatctcatttataaaggctccaccctcatgacctagtcacctcccaaaggcccaatctcttgataccatcatcttggggtttaagttgcaacatatgaaatttggagggacacatacattcaaagcatagcatacataatggcttcatagccatgactgt

SEQ ID NO: 365296 - DNA, 640 bp, Homo sapiens
ctggcaccttgaaaaaagtgctgacttcacaaagacctttccgcttctacctctaaataagctgtgccacttgtacagttagatcagatctgctgatatcccataaaccacatttactgatcagcacattctctcagtagcaaagccatagaatgtcagtcccaatgtagactcataagcccaggtttgaactggttagatcattgaactgagacatcccaatgtggccacttatgctgtsttagtctgttcgtgttgctacaacaaaataccagagattgagtaattaataagcaatggaaatttatttcttatggttctggaggctgtgaagtccaagatcaaggcaccaggcttggtgtctggtgagggctgctctctgcctccaagatggtgccttgttgctgcatccttacatgacagaagagcggaagggcaaagggcctcactagtttcccccagtcctgctataagtgcattaatctcatttataaaggctccaccctcatgacctagtcacctcccaaaggcccaatctcttgataccatcatcttggggtttaagttgcaacatatgaaatttggagggacacatacattcaaagcatagcatacataatggcttcatagccatgactgt

SEQ ID NO: 365297 - DNA, 640 bp, Homo sapiens
ctggcaccttgaaaaaagtgctgacttcacaaagacctttccgcttctacctctaaataagctgtgccacttgtacagttagatcagatctgctgatatcccataaaccacatttactgatcagcacattctctcagtagcaaagccatagaatgtcagtcccaatgtagactcataagcccaggtttgaactggttagatcattgaactgagacatcccaatgtggccacttatgctgtgttagtctgttcgtgttgctacaacaaaataccagagattgagtaattaataagcaatggaaatttatttcttatggttctggaggctgtgaagtccaagatcaaggcaccaggcttggtgtctggtgagggctgctctctgcctccaagatggtgccttgttgctgcatccttacatgacagaagagcggaagggcaaagggcctcactartttcccccagtcctgctataagtgcattaatctcatttataaaggctccaccctcatgacctagtcacctcccaaaggcccaatctcttgataccatcatcttggggtttaagttgcaacatatgaaatttggagggacacatacattcaaagcatagcatacataatggcttcatagccatgactgt

SEQ ID NO: 365298 - DNA, 555 bp, Homo sapiens
  misc_feature (1)...(555): n = A,T,C or G
tcaaggttgtgtgctccttgtgagaatctaactgcctctgatgatctgtcattgtctcccatcacccctagatgggaccatctagttgtaggaaaacaagctcagggctcctactgtttctacctgatggtgagttgtaaaattatttcattatatattacaatgtaggagtaatagaaataaagtgcccaataaaagtaatgtgcttgaattatcccaaaactatccctgttgccctgatccatggaaaaactatcttctatgaaactggtcccttggtgccaaaaaggttggggaccactgttctatgttctctccttgcttaagttagcccaaatcwgtttctctggtttaccactgaagaatggatacaagaggtcttcccagaggactattgcatctttcagtctttggtaggagtcacaagtagagaactgcttaaagtttangaaaagacagactcatgcactgactgaccagtcatagcaccatgaatgaacaaaagtgagttaagtatgaccatgcctgcccctcgagttggctacactcctgcat

SEQ ID NO: 365299 - DNA, 555 bp, Homo sapiens
  misc_feature (1)...(555): n = A,T,C or G
tcaaggttgtgtgctccttgtgagaatctaactgcctctgatgatctgtcattgtctcccatcacccctagatgggaccatctagttgtaggaaaacaagctcagggctcctactgtttctacctgatggtgagttgtaaaattatttcattatatattacaatgtaggagtaatagaaataaagtgcccaataaaagtaatgtgcttgaattatcccaaaactatccctgttgccctgatccatggaaaaactatcttctatgaaactggtcccttggtgccaaaaaggttggggaccactgttctatgttctctccttgcttaagttagcccaaatctgtttctctggtttaccactgaagaatggatacaagaggtcttcccagaggactattgcrtctttcagtctttggtaggagtcacaagtagagaactgcttaaagtttangaaaagacagactcatgcactgactgaccagtcatagcaccatgaatgaacaaaagtgagttaagtatgaccatgcctgcccctcgagttggctacactcctgcat

SEQ ID NO: 365300 - DNA, 566 bp, Homo sapiens
tatctttaaaaaggctcaacatcactagtcatcagggaaaggtaaatcaaaaccacaatgaaatgtcaactcatcccagttagaataggtattatccagaagaaaaaaaaataacaaatgctgctaaggacgtggagaaagtggaactcttctgcactgttgatgggaatgtaacttagtacagctattatggccaacagtacagaggttcctaaaagacttaaaaatagaacatatgacccagcaatcctactaccaggtatatatccaaaggtaatgaaatcaggatgttgaagagatatctgcactcccatgtttattgcagcgctattcaygacagccaagatataaaatcaacctaagtgtccgtcagtggatgaatgtgttttaaaaatgtggtatagctgcatactattccatggtgtgtatgtaccacattttctttatccagtctatcatggatgggcatttaggttgattccatgtctgtgctattgtgtcctttgcagggacatggatggaactggaggccattagccttagcaaactaatgcaggaacagaaaa

SEQ ID NO: 365301 - DNA, 579 bp, Homo sapiens
tggggtcatgcaggggatcgtgaggagccggatcgtttgactaattaaaacgggctgccccgcaaggatggcagaaagagacaygatttatgtttcaaggtcaaataaccactctggctctatgtgaaaactggattgtgtggaacattcatagaatcaggaggctggtgaatttgcccaggtgagagatgggcacttaggggagagtggttagcagtgaagatggaaagaattgggtagttagggttagatttctgagacaaagcctatgggacttgtggtagtttggttgttggtgtcagggaagggaagcatcacagaaaactcctgagtaacaccttgacaatgaagaggcttaaggtgccatttaccacgtaggaaaaccatggttgagggccaggtgatggcctaaatcatgtcccatctcccacccaaactcaggtgccaaggccataatccccaatgtgattgcatttggagacagggtctgtaaggaagtagttgaggttaagtgaggtcataaggttggggccctaatctggtaggacaagtgccttgataagaggaagagacgcccgg

SEQ ID NO: 365302 - DNA, 640 bp, Homo sapiens
agtccccaccatccataaacaagtacccaaagaccattcccagctcacaaacatattttatttgctgcacagaatgtggccaccctgttgttgttgttgttgttgtttaaatcactgcaacatttttaaagtgagagatttcatatcaatgtcctaatttctcttgaaaattggcatattgaaccaccctgggctcttccacttggcaaccattggctgcaactgagaaatccttgcatccttcagagaacataatctttggaattcactacagttatcaccacaygctactgactgaggactatcagctgaaataatccccattgcctgatctgttcttgtcagtgtatggatgttctactcctacatttcaaaattatttggtttaaattctaatttgccaatttctcctttgatggtgtaactgctataaataaaaataacatttaagatattcatgttttcaacccgaccagcccaaacacttagtataattttaattgaacagcattcaggattcaaggtttctgttcccttccccggctcacaaaggcacaaatctttattcctagaagccaaatcaacaatgatgcttaaaatatatattattcaataagggtgttgtctccatatggcaaat

SEQ ID NO: 365303 - DNA, 640 bp, Homo sapiens
agtccccaccatccataaacaagtacccaaagaccattcccagctcacaaacatattttatttgctgcacagaatgtggccaccctgttgttgttgttgttgttgtttaaatcactgcaacatttttaaagtgagagatttcatatcaatgtcctaatttctcttgaaaattggcatattgaaccaccctgggctcttccacttggcaaccattggctgcaactgagaaatccttgcatccttcagagaacataatctttggaattcactacagttatcaccacatgctactgactgaggactatcagctgaaataatccccattgcctgatctgttcttgtcagtgtatggatgttctactcctacatttcaaaattatttggtttaaattctaatttgccaatttctcctttgatggtgtaactgctataaataaaaataacatttaagatattcatgttttcaacccgaccagcccaaacacttagtataattttaattgaacagcattcaggattcaaggtttctgttcccttcccyggctcacaaaggcacaaatctttattcctagaagccaaatcaacaatgatgcttaaaatatatattattcaataagggtgttgtctccatatggcaaat

SEQ ID NO: 365304 - DNA, 584 bp, Homo sapiens
ggcaggctattttatcactgaagcgtcttcccatctaccagtatagctttcctgaccaaaatgcaaacaaacaaatarcaacaatgaaatctgacagacatcttcttagtgaatctgcagagggagattcccataaacataaacatttaatgtcactctcgtgaaaagaataacttaatgtcactaaaagttaaacacttttttggaacctcttgtctttccaaatgtacatctgaatctccctttatttatatactttacttacttcctaagagtggaacctcttgtctttccaaatgtacatctgaatttccctttatttatatactttacttactttatatactttacttacttcttaagggaggagaagtggctatttgaattctctttcaaaggcatgttttttacctttataactgttgactgatctgttctaaaactatgtacttcagtcgcttttcagatgcatgccacaggtttgtttactttcaaggtcaagggccttccttctccatcaattcttaatttatggagggggtgcaccttgggtgactcctgaaaccatgtttaaggacagaggt

SEQ ID NO: 365305 - DNA, 407 bp, Homo sapiens
gaagttatgaaataaccatcttggagagtgagagtgtgaacagatcagggaaataggagctgtttgagaataatagtgaagcattttgtgtatttttctctagtcatattcacctcaggagtgcagataaagagtaagtgcagagttagaattaaccagagatgaagttttgtyaaattactagtattacaaagaaagagaaggaaaagggaatgaagaatgtttgctagtgtatgaatgtattctaacaatagacaatggaattaagctgaataaggagggaactattgacttgagagaagtgaaagacagtgagaaagtcacatgatcttgtgatatccaaggaaccttgcaggcatggttctagaagtatgagctggagagatgatgatagcagtctgagagga

SEQ ID NO: 365306 - DNA, 537 bp, Homo sapiens
aataatagtgaagcattttgtgtatttttctctagtcatattcacctcaggagtgcagataaagagtaagtgcagagttagaattaaccagagatgaagttttgttaaattactagtattacaaagaaagagaaggaaaagggaatgaagaatgtttgctagtgtatgaatgtattctaacaatagacaatggaattaagctgaataaggagggaactattgacttgagagaagtgaaagacagtgagaaagtcacatgatcttgtgatatccaaggaaccttgcaggcatggttctagaagtatgagctggagagatgatgatagcagtctgagaggaaggggcttaagattgaaaaagggtcaaggcatgggggtgaagaacttggaaggattgtctacatagttattgaaattgtcragaattataatacgagtagtgtctaggataatgactaatccaataaccgaaatctccaaggaacttgtttttgaggttaaagtgggtggaagagaataaaagctgctattgtggttt

SEQ ID NO: 365307 - DNA, 548 bp, Homo sapiens
ataatctctctctcatagctcaagtttcattaatgggagaawgaagtttgcgatgatcaagaccagaaagagatttagggccagagacaaaaaatatgagaggaaaatggggcagacatatctaatttttatcacctcctaagatctattctactcaactatctgttaaactctgttcagacatggtcttggtatatttacatcttgggtatggtgtaaagttgcatgcatgagagtcaatatcaaggcattactgaatatattcaaaatattctatgatatgtacaaatgagtgaagtaaatttgattacacattctgaaaatgtactcagagcttctaaaatgaatgtctttctacagaatagtagcaataatgatgactactacagtttctattgcaataacaacaaataaaaaatcagctccttttatgaccgaattgagccctttgacttttgactacaacatagcactgcttaataaccagtagaacctattattttctaccttaccttgcataccatggagcttgccaactagcatttaaa

SEQ ID NO: 365308 - DNA, 321 bp, Homo sapiens
aacctctggtctcacagctggtcctcttattagttagccattgttgttcacaggttctggaaacttggtctttcactggacattttttaaaaaggcaaagactgtggggatcatctgatatgatattcctctcatttgcactgctcatgatttmattatttctgaggtgccacagtttgaaaacaagtttgggcttgaattatcaccctatgtttttggaatcaatgtgcttttaaactttccttcattaattgcacttcacaccacccaatatcctgcaattcagaggcagcagcagcatcttagttttaggatgagatg

SEQ ID NO: 365309 - DNA, 503 bp, Homo sapiens
aaaactgaaaaaaagctgttcgttaccaatttacagaagagaaaatggarttcaaatatgtgatataactcactccaggccacataggtagtaactgacagggccaggtttgaaacttagcactttttgactccaaataaatgttttatccaaatgtaattttgaatgtcctattttgagtcactatctagttatctctgtgataactttttaaatatattatgtaaacatttcaaaattgtttgcttttttattttctgatttttgttggagtaagagaaatctggataacactttgctatgcttcatttttcattaaaaaagcatcatgctcttgcaacagtaataacataaataagagaaatattactaaccaaacaccttacacacttttatattagcatgcaaaatttattttttagctctaaagcttaagaagcaattttttacctataattatggatatagaagaaatctctgtaaattactcaaaaatattttat

SEQ ID NO: 365310 - DNA, 600 bp, Homo sapiens
ttttaaaactttgctatcatgtgcagaataatgttccagctcttcagcatggtgacaaaggctcccttgatttggcccctaactctctttctcaccagcagcccccttcccacayacatattctgaactgtatgcattatttgtaccacataactttatacttctccagcctgtgtaattcctgctacttgacacaagctcccaaacactttgcaactgataaattcttacaaaatccttcaaaactgacgtaccatatctttttctgagttattttctgcttcttctcatagaaaggagtattcactcttttatacatactacacttctttataaatacgtacatatacttctctgttggttacaacacttagagcaatgttttgaaactgtaactacatgtttccttgtctacaaaaaaagttcactgagatggtgattttttgtttcttatctttaccactttgcataatgcttagcacataataggcactcagtaaatgttttatgaattaatgaataaaatcagttaatcaatcaatcaaacagcagcccttgggtctcagattacacaggcatgaaagtaagaaccctgaaccc

SEQ ID NO: 365311 - DNA, 600 bp, Homo sapiens
ttttaaaactttgctatcatgtgcagaataatgttccagctcttcagcatggtgacaaaggctcccttgatttggcccctaactctctttctcaccagcagcccccttcccacatacatattctgaactgtatgcattatttgtaccacataactttatayttctccagcctgtgtaattcctgctacttgacacaagctcccaaacactttgcaactgataaattcttacaaaatccttcaaaactgacgtaccatatctttttctgagttattttctgcttcttctcatagaaaggagtattcactcttttatacatactacacttctttataaatacgtacatatacttctctgttggttacaacacttagagcaatgttttgaaactgtaactacatgtttccttgtctacaaaaaaagttcactgagatggtgattttttgtttcttatctttaccactttgcataatgcttagcacataataggcactcagtaaatgttttatgaattaatgaataaaatcagttaatcaatcaatcaaacagcagcccttgggtctcagattacacaggcatgaaagtaagaaccctgaaccc

SEQ ID NO: 365312 - DNA, 640 bp, Homo sapiens
attctatcatatatgaacaataaagtgttaatatccaaaatgtataaagtccttctattagaaaaaagtgctcagcataattttaaatagaaaaattacatgaaaaataacatattaaggtagacatattaatgaccaacaaacagttgaaaagatgcccaaagtcactaattatcaaaacatgcaaattagaactatatttttcttacactgttgaaaaagtttttagaaacctaaactatgtttaaygttgctgaaagtacagggaaactggtactctgatatactactcaggggattcaaataggtctggtctcttttgaatcaatttaaaaactatttttaaaaatttaaaagtacatgttttgatttagccaatcaacttgcagaaattgccctacagtaacctctcacaaatttataaataaatacgtgccatgatgttttactgcgtggttgtttgaatggtaaaaaatctgaaacaacctaaatgccaaaattaatagagaaatagttaaatgattgatgatgatggtcataacatggaatactatgtggttatcataaaaaatgaggtggatttctgtgtaagtagtatgacctaggcaggtacttgtgacatatttttaagtgtaaaaaa

SEQ ID NO: 365313 - DNA, 640 bp, Homo sapiens
attctatcatatatgaacaataaagtgttaatatccaaaatgtataaagtccttctattagaaaaaagtgctcagcataattttaaatagaaaaattacatgaaaaataacatattaaggtagacatattaatgaccaacaaacagttgaaaagatgcccaaagtcactaattatcaaaacatgcaaattagaactatatttttcttacactgttgaaaaagtttttagaaacctaaactatgtttaacgttgctgaaagtacagggaaactggtactctgatatactactcaggggattcaaataggtctggtctcttttgaatcaatttaaaaactatttttaaaaatttaaaagtacatgttttgatttagccaatcaacttgcagaaattgccctacagtaacctctcacaaatttataaataaatacrtgccatgatgttttactgcgtggttgtttgaatggtaaaaaatctgaaacaacctaaatgccaaaattaatagagaaatagttaaatgattgatgatgatggtcataacatggaatactatgtggttatcataaaaaatgaggtggatttctgtgtaagtagtatgacctaggcaggtacttgtgacatatttttaagtgtaaaaaa

SEQ ID NO: 365314 - DNA, 627 bp, Homo sapiens
cctaccttctttaattccctctatagtccattgcacagactttatggtaacccagagaattattcaataagtcaatatatttaaagcatttagcaagctccccccaatagtaggtaagacaaataataactattaataatagtaccattatgctttttaagaaatcttagggaaaaattggcccagctgacaattttgaattatttttgttgttggaaaaacatgttggctatcaataactctcaggtgaatctgttgatctcttcaaatcacttttctaattctgtactttggacagtagtcatcagttgcttctgggaagaggcatgaggtcagcagacttgaattggtcaaatgtcagactgcagctcagtcatggctgggttatttaatgaattatatgggaaggaatagtgaatatctgtggcaggagcactgacaatatagcttagggatgctccaagactctggaaaacacagctaagcactgctcgttggcattccctataatgaygctgcatgacatgaaaaaggacaaagattcagagactgggaggtggtaagtttggagaataaaactggttgtttggctactattattacatgctccatcttcccctatgttgt

SEQ ID NO: 365315 - DNA, 559 bp, Homo sapiens
ggatgtcactatcaatattgtacataccacataccccaatccttaggcttagttgttcctctctctaatgctgcagtgtttttaattgtattatataatgtgctactttttgaattgtaatttgctcatttatttgttttaatcacaaggggctaatgcttctttacaaagagtaggttgtcaaaaagaaaaggttgaatgagatatttaataatcaatgcttttggtgttgtacttgatagtgtggcaacaactgaaggtcaaaagtcaaaaatatttacagagaacgaaaaaatcccaaccctaatccttgacatgtaagaatgaaatgcttctacacattcttgttaaaaccaacatgcccacttctggaagatactgactagatttgggttactgttttggagacctgaagtcaatgttaactttctttcattctatcaagaatgtcagtagtaactagaggtatcaatgagttgatcatyttatagtaaataatgtgccatcatttttccaattttaaattcattcagtcattaaacaaacattttgtttgagc

SEQ ID NO: 365316 - DNA, 540 bp, Homo sapiens
tatatcagaaaaaagtcatggctaactgctggtcaacttccagtctattgatataaattaggtagggaaccaacttctttaaatattcaaaaacaatctacctgtaaaacctaaaaactattttattttagggttttggagcatggagtaaagggctggcctttcaggaactggtaaaatcataacaaaattattgtaatggtaatatcatttaaggggttgtttccaatttgggattctgatcaccataataaattctcaaaagtcraatggagatgagggctgatgagctattttcaaaatctcaaaatgcactaataaaatccatatatctatctataggagattgtgtagcactcactatttgaaatacttgtgttctttgattcgacaggaaatatattgtctagcatggcaacaatgctggttatcttacatcgatcagagaatccgaacaaccattttagatgtcttaaaatatactagaaaaacattaattgttatttaactaatgttagatcaaaccttttaaaatatggg

SEQ ID NO: 365317 - DNA, 540 bp, Homo sapiens
tatatcagaaaaaagtcatggctaactgctggtcaacttccagtctattgatataaattaggtagggaaccaacttctttaaatattcaaaaacaatctacctgtaaaacctaaaaactattttattttagggttttggagcatggagtaaagggctggcctttcaggaactggtaaaatcataacaaaattattgtaatggtaatatcatttaaggggttgtttccaatttgggattctgatcaccataataaattctcaaaagtcgaatggagatgagggctgatgagctattttcaaaatctcaaaatgcactaataaaatccatatatctatctataggagattgtgtagcactcactatttgaaatacytgtgttctttgattcgacaggaaatatattgtctagcatggcaacaatgctggttatcttacatcgatcagagaatccgaacaaccattttagatgtcttaaaatatactagaaaaacattaattgttatttaactaatgttagatcaaaccttttaaaatatggg

SEQ ID NO: 365318 - DNA, 634 bp, Homo sapiens
aaataaaaaatcctatgtctaattaggcaagagcaggagctacagaaatgcaggtagaacagttgacctatgcttaaatcatggtgagaaaataactcaaaagctttctgtgggaaacagaaagtataagaaactttttagagaatatagaggttatctgaaagggcatcttccggttgcagtggcagcttgaaaggacattattccttctaaaattatgtytctaagaaatagtacctagcaaatctgtaatgaattagggtaaaggtaaaaagaaaatcgaagtttatctatgtggctattacaaagatatagtctaaagctactattctctacttgtaacgtgctgacttacagaaaatgggggtggtggatggtcaccactgtccagctttttggagaaatttcaaactggatccttttaatcctacccagtttgaggagcttgagactttccctttcatgtcctcatagcccttctgtttgaggggctaatgggtgtcctaaggtattgaaagtggggaggaattattatatgagggtaattatagttgtatcaaataactgaaaaaccttaggggattaaagttcatttgtcattcacaaaatccatttctaatgcccctagtcaggt

SEQ ID NO: 365319 - DNA, 634 bp, Homo sapiens
aaataaaaaatcctatgtctaattaggcaagagcaggagctacagaaatgcaggtagaacagttgacctatgcttaaatcatggtgagaaaataactcaaaagctttctgtgggaaacagaaagtataagaaactttttagagaatatagaggttatctgaaagggcatcttccggttgcagtggcagcttgaaaggacattattccttctaaaattatgtttctaagaaatagtacctagcaaatctgtaaygaattagggtaaaggtaaaaagaaaatcgaagtttatctatgtggctattacaaagatatagtctaaagctactattctctacttgtaacgtgctgacttacagaaaatgggggtggtggatggtcaccactgtccagctttttggagaaatttcaaactggatccttttaatcctacccagtttgaggagcttgagactttccctttcatgtcctcatagcccttctgtttgaggggctaatgggtgtcctaaggtattgaaagtggggaggaattattatatgagggtaattatagttgtatcaaataactgaaaaaccttaggggattaaagttcatttgtcattcacaaaatccatttctaatgcccctagtcaggt

SEQ ID NO: 365320 - DNA, 557 bp, Homo sapiens
ttttagatgtcttaaaatatactagaaaaacattaattgttatttaactaatgttagatcaaaccttttaaaatatgggaccattatttttaaaacaacaataaaagactttttgcagagaaaaaggataaccagagtcaaagtcaggttagaattgagtcattcagctgccattttattttatttttttattttttattttttcaagacagagtctcactctgttgcccaggctggagtgcagtggcatgatctcggctcaatgcatcctccccttcctgggttcaagmcatccttctgcctcagcctcccaagtagctgggattgtaagcatgtgccatcatacctggctaatttttgtatttttagtagagacagggtttcaccacattgcccaggctagtgtcgaactcccgagctcaactgatccacccgcctcagcctcccaaaatgctggagttacaggtgtgagccaccgcacctggcttagctgccactttagattcaaataaaatatataaatgtcctcagcatagactaccttaaatactgtattc

SEQ ID NO: 365321 - DNA, 555 bp, Homo sapiens
attgtctagcatggcaacaatgctggttatcttacatcgatcagagaatccgaacaaccattttagatgtcttaaaatatactagaaaaacattaattgttatttaactaatgttagatcaaaccttttaaaatatgggaccattatttttaaaacaacaataaaagactttttgcagagaaaaaggataaccagagtcaaagtcaggttagaattgagtcattcagctgccattttattttatttttttattttttattttttcaagacagagtctcactctgttgcccaggctggagtgcagtggcatgatctcggctcaatgcatcctccccttcctgggttcaagccatccttctgcctcagcctcccaagtagctgggattgtaagcatgtgccatcatacctggctaatttttgtatttttagtagmgacagggtttcaccacattgcccaggctagtgtcgaactcccgagctcaactgatccacccgcctcagcctcccaaaatgctggagttacaggtgtgagccaccgcacctggcttagctgcc

SEQ ID NO: 365322 - DNA, 582 bp, Homo sapiens
atgagcaagactgcatgtccatttgaggatataaaataggtttaaaaatagtctttctgtccccacgtataacttttaagagaataaatatagggatattcttgtgtgagataaaattgatgcttatcccctgccccaagcttccccctcatttttaattacttccttcctcccactgttttccagactatctgaattgyatcagtctcaggcatatgggaaagtgggtaccaccggatggctattgtcagtcaggaaatagctaccattcaaacactgtttgctaatgatgatatttgatgtgataaagtggatgtgaatattaaatttgaaccatctaggcaccatctcagattttaaaagcaggcatgagaactgacagctttgaataaacctctttctttctattttctgtgattctgacatattcacattccactaaataagagtgaacaccactacccacccactcaccaggcgttcactttatatatagctatagatactcaatgcaaaacaaagaataaatggattcacgtaacatagcgtttgtggtggggttttgaggaaagcaggggctta

SEQ ID NO: 365323 - DNA, 582 bp, Homo sapiens
atgagcaagactgcatgtccatttgaggatataaaataggtttaaaaatagtctttctgtccccacgtataacttttaagagaataaatatagggatattcttgtgtgagataaaattgatgcttatcccctgccccaagcttccccctcatttttaattacttccttcctcccactgttttccagactatctgaattgtatcagtctcaggcatatgggaaagtgggtaccacmggatggctattgtcagtcaggaaatagctaccattcaaacactgtttgctaatgatgatatttgatgtgataaagtggatgtgaatattaaatttgaaccatctaggcaccatctcagattttaaaagcaggcatgagaactgacagctttgaataaacctctttctttctattttctgtgattctgacatattcacattccactaaataagagtgaacaccactacccacccactcaccaggcgttcactttatatatagctatagatactcaatgcaaaacaaagaataaatggattcacgtaacatagcgtttgtggtggggttttgaggaaagcaggggctta

SEQ ID NO: 365324 - DNA, 554 bp, Homo sapiens
tcttttccaggggaacaacccaaacaaccttggagagaaaagtcaaggcaaaatagcaaagtgatgggactgtcactattaaagaaggattgtgaggtactttctcaggtagatctaactttgaaagggagagctaggaaagatgcacgatagaaggagagggagctgaagactaagtcaatttccaaatgaagagaaattacaataaaacacacgagcaaagtggtattcttataaatatgaatcrgaagaaaggaagctgttcctagcatgaaggatgtagaaaataatgcttggaatctaattggagagacaggaaaatatataataagtatgcataataatacaatgcattgaagctaagattaaactacagcagatcactgtcattaaatcatgattcatgtggttactgttgtacttttaggttttggagtataaaaagatggtctaaaccgcattcaagcttcattctgtagaaggaaacaaatgaggagaaattaggcagcactatcagcatctccaaggtaagagtaaaccagtgtggcccctat

SEQ ID NO: 365325 - DNA, 592 bp, Homo sapiens
agaagcttcagggtagagaaaaataagttaaaaagaaattgagttccagttgcttcttatctcacccccatgaccatggaagcctcaaaagaactgagggataaagagaataactctttattaaagcaataatttcaggaaattgaaataaaagacagcaaacgatattcagatttgttcccatttttccttaacccacagaaattattattggtaaaacgtcaccactaattgggagagaaaaactgttattaattgagcttatagtttagtgtttgataatgatctgctttaacgcatttctctctatgacagagatcacttaatttttgtctgtaaattcagttttttatgggcatcccacatctgagtcwaaacataaaagcagtcccaccacagctccctctcttaatctcaacctaatttcaatgaaatgaggtttactatttctatgtgccccaggccctcttttgtattcaaggaacttgtgccctttcttgcttcttctcaccctctttactgttgagttcccatcttcagtcttccaggaaagtaacggtccctgttagctaccagagggcatttgggagcc

SEQ ID NO: 365326 - DNA, 580 bp, Homo sapiens
aattcagtgtaatcatactagagttgttgcaaaggaagtccatctagggcaaatattttcgtcagtaatgagagtctamaactatttcctagaagacaaaataacagcagatggagaggccacaactgagaaaacagccttttaaaaaaaattttaccttagaataatagatgagtcttcattaagaatgtttgcaatgcaatgtggtaacttcattagcgaagagtatacagaacaagactgctatgctagccctcagtggccaaaagagaatgaagccataaagcatatatgtatatataaatatgtgcactgtgctgagtgaactattatatatgtgccaatttcattggaaattatttcagaaatatatagtgttagatcagcactgtgcagaggtaaaaggaacatatatattttgtgaaagtcatctaatacagaacaaaatctttatactcatggaacttgtaatacagcagcctttaaaaatggggataacatattcaaatatatataaacacgtatttaatacttcagcaatttgtggtcagcctgaatataaccttttttgaaagaacca

SEQ ID NO: 365327 - DNA, 580 bp, Homo sapiens
aattcagtgtaatcatactagagttgttgcaaaggaagtccatctagggcaaatattttcgtcagtaatgagagtctacaactatttcctagaagacaaaataacagcagatggagaggccacaactgagaaaacagccttttaaaaaaaattttaccttagaataatagatgagtcttcattaagaatgtttgcaatgcaatgtggtaacttcattagcgaagagtatacagaacaagactgctatgctagccctcagtggccaaaagagaatgaagccataaagcatatatgtatatataaatatgtgcactgtgctgagtgaactattatatatgtgccaatttcattggaaattatttcagaaatatatagtgttagatcagcactgtgcagaggtaaaaggaacatatatattttgtgaaagtcatctaatacagaacaaaatctttatactcatggaacttgtaatacagcagcctttaaaaatggggataacatattcaaatatatataaacacstatttaatacttcagcaatttgtggtcagcctgaatataaccttttttgaaagaacca

SEQ ID NO: 365328 - DNA, 598 bp, Homo sapiens
tctaatacagaacaaaatctttatactcatggaacttgtaatacagcagcctttaaaaatggggataacatattcaaatatatataaacacgtatttaatacttcagcaatttgtggtcagcctgaatataaccttttttgaaagaaccaaccttagaacactaaagacttgatttgtcaggccttcttttccatggctttgcttatatttgctctcayttagctctttgtactgttttggaaacataatagttattcactgaatatgtattcaacatctgtcttggcatttccctctacaccaacttcctctctctttctccctcttcctcattttccttaattttccctttccatttctactttctttctgggtattgttttgtttagtttgacactagagtgcagtggcatgatcaggacccactgcagccttaacctcctgggctcaagcaattttcccacctcagctggaactatagctgctcgtttttccatctcccttgctcttatctgtatgtctttctttttttttccgaactttaaggctaaacaaagaaactgaactatatttctaattacttcttgcaggtactga

SEQ ID NO: 365329 - DNA, 527 bp, Homo sapiens
atcattatacagtgcacgactgtgtatataaaatgttatgtttttctttaaaaacaaaggcaacaaaatggagttaattttatgtatggggcattcctttgtggtttttrtttttcatattgtttcttcctgtggtccctcccctaacatagcatcttagctattcagcaataacaccttgacctatgaatctgctcctgacctttcaaagatcaatacatctctacattagccattttttatcctttgaaatgaatggaaactaatgccaaactttccctttgcaaccataagcattttgggaaggtgagaggaaagaactgttcagtcttacattttacacaattaaacaatctgccaccttggcacagtacaccaggaaaatatatcatacctctgaatggttcttttctaatgtcattatctactccagccacacagcatccaaatacctccgccatcaggagagcccaggccccttcacgtagtatagggctctatgacattacaatacttcttatctcaca

SEQ ID NO: 365330 - DNA, 591 bp, Homo sapiens
cctctgcagtcccattgaaagataagatttccaatctctagtccattccagatttccaactctctaagaaaatagaatctgaattggaatttggatcagctgttttgcagattattgaacttggtggagaattttgtttaggcctctgcaggatgctgtcagtcctggaaagtccatggagtctggtttcattcaaattcccactaggacaaatgctccaggagaggagggaattttatactttgttcagtactgtattcccaatgtcttattctcaaggaatatttgttcaacaaatgaataaaccctgtgaactttcttggagtctacaagaatatttcattacatctcaggttttctgggaattctgaawaggtcccaacaccctgcaatggctgaactggaaagggaatgttggtgggtgcaacactatttcatagggtcagttgcagccattattaagaatactgcaccaatattacaggtccttggaaataataaactgtacatttaatacattatgaaattgtagtccatataacatttctgttctctgtgtcttttagctaggcccaagaacagagggtaaaa

SEQ ID NO: 365331 - DNA, 483 bp, Homo sapiens
ttgcaaaagctgtccacaccattttttctttcttgcttgctttaattgtcaggctgcccattcctcccacttctgttctattttcttaaagcacaacgagttcctagttgayagtatggtggagaagagtagaaacagcatggtctatttattttatttttaattcacctagtattcacaaataagaaacgggtatttgtagaaaaaatatatcatatataaaaagtagataagtcccaggcaggccattttttagctgatatttacttattgcagattcatacaagggttaaattagataaaacactttgcgtgctgctaataaacaatataaatgtaaaaatacaattctgttagacgttaaagtacaaatggaatagtatttacatttcaaaggaactttgggttcagtcagcctttataggtataagaaatgatgtaacagaactatcactggactagcagtaaggaaacctgggctcc

SEQ ID NO: 365332 - DNA, 471 bp, Homo sapiens
cacaccagtggactactggtgtactgctactcaagaggctgagatgggaggatctcttgagcctgggaagcagaggttgcagtgagctgagatcatgacactgcactccaacctgggcaacagagcgagaccctatatcacaaacaaaaacagaaaatagcctggcacctcttcctctctctcttcctccctctctcaccctgtgacatggcctgctacccctttgccttctgccatgagcaaaagcttcctgaggcctttcagaagccaagaaagatgctggtgccatacttgtacagcctgcagaacagagagccaaattaatcycctttctttatagtttctccagtgtcaggtatttccttacagcaaagcaaaacggatacacacacacacacacacacacacacacacaatgagacaaacatggaaataaattttctatcttctcagtggttcttcacgctagct

SEQ ID NO: 365333 - DNA, 483 bp, Homo sapiens
ttgcaaaagctgtccacaccattttttctttcttgcttgctttaattgtcaggctgcccattcctcccacttctgttctattttcttaaagcacaacgagttcctagttgacagtatggtggagaagagtagaaacagcatggtctatttattttatttttaattcacctagtattcacaaataagaaacgggtatttgtagaaaaaatatatcatatataaaaagtagataagtcccakgcaggccattttttagctgatatttacttattgcagattcatacaagggttaaattagataaaacactttgcgtgctgctaataaacaatataaatgtaaaaatacaattctgttagacgttaaagtacaaatggaatagtatttacatttcaaaggaactttgggttcagtcagcctttataggtataagaaatgatgtaacagaactatcactggactagcagtaaggaaacctgggctcc

SEQ ID NO: 365334 - DNA, 530 bp, Homo sapiens
gatttgtccacatcaaaacaagaaggcttgacctgtgtagtcctgcatcaacaagtcaatggattgaactattcctggaaataggtgtagacttggacaagttaggtcccttcaaccaaggataatttccagtgactgcattagctatagactgccagcagccaacaatttcatagctgggggataaatgcattagttctgaagaggaaatctgagtagtataccagagcatccaatccagtataggccaatccttgcatcccttggattcacgtgattcacacrgtaaatttattccatctgggaagaactccttcaagtttctggttggtctctttttctgggaaactttacaaaagaaagatgagtagcatgaactatatatatagcttttgccaatatagctggttttacagctgaaactgaaactcattttctccctcctctgcaacctattccagattgttttgaccctaatttagcacctctgatgatctagatggcttacctggtggggttacccagacagt

SEQ ID NO: 365335 - DNA, 498 bp, Homo sapiens
acactatccttagctacttttctgctcagcatcagsaggtaatgagcctttcacatcaaaaagttctactgaactgtctcatggtgtcatagtgttatcattaagtgagaaacaactctgtagcccagatgcttatagaaaaatgtagggaaatatgaaatggcaatcatgacaataattggatgttgacatcgtttcaatgggcagtgattctattcattttgatatactgtcagatttccaataacagtagataaacagccatgtggttgaccagcacaacccatacatactatcataatgactcaatatcagatacatttgccctttaaaaatacaatagccataaaaatttgtactgttaaagtaaactaaataaggactgagaaggactccatacttctatatttgagtccttgtggatgaactgccacctaacttaataggcagacaagattgaaaacctaacttagaaatatgcccctgtaacaataacca

SEQ ID NO: 365336 - DNA, 498 bp, Homo sapiens
acactatccttagctacttttctgctcagcatcagcaggtaatgagcctttcacatcaaaaagttctactgaactgtctcatggtgtcatagtgttatcattaagtgagaaacaactctgtagcccagatgcttatagaaaaatgtagggaaatatgaaatggcaatcatgacaataattggatgttgacatcrtttcaatgggcagtgattctattcattttgatatactgtcagatttccaataacagtagataaacagccatgtggttgaccagcacaacccatacatactatcataatgactcaatatcagatacatttgccctttaaaaatacaatagccataaaaatttgtactgttaaagtaaactaaataaggactgagaaggactccatacttctatatttgagtccttgtggatgaactgccacctaacttaataggcagacaagattgaaaacctaacttagaaatatgcccctgtaacaataacca

SEQ ID NO: 365337 - DNA, 633 bp, Homo sapiens
ataaaattattagtagaatcctagtgcttccatttatacccatggtgattctgtttgtttccctccagtggaccaggttacctctatgaaccgscttgatcagatgcttccttaaaatagcccgtttccctcaattacaagtggagaatgttgcttcttaaagcactttttttcctctttttaaaaatgtaattaaatcaacatcacaggccaagtaagaaaaaaagatttcacacttactgtactacaactgggcatatctcctactttggtcaggatttccagatggctgctgcattccctcggctgttcctttgcttcaggtttttctgaaattgagtttttgtttttttgtttttttgagattattttttaaaaggcatcaaagacccttgatgcaacatggcaggtgttctttaaaacgttctttaaatttttcacttcgttaaaaaatgcataggagacaaataaatctgcttgtgggtacaactcaagaagaaacttgtttcttcttataataacaagaattatagaacagaaaatttacccacaaattgctcactaggcccagcaaactccaaactatgcaacagtttttttgttttgacttatgaaggtatacaattgttgcca

SEQ ID NO: 365338 - DNA, 610 bp, Homo sapiens
aggttataactgtttatgagaaagaaatacatttcatttccctgaagccttggggtcaccctgctgcgctacctcggtggttagtaagaaagtggagataaggacaaaggccatgtagcagctgtatggaagggaaaattgcgggtttctgagtggtaccaggaattgactgctttaacctccaactgaggatcttggaaaaccttggaagtgaagaaggataagggaaataaaacttgtgagtgcctcctaagtatcatgcttagtaatatatgctttgctatatttcatcctcactttactatgtgaaattggtcttattacctctatcttcagagaaacatgaggctcagacaagtcacatggctatggtttgaatatttgtccccttcaaaattcatgttgaaatttaatctccaatgtggtagtactgagaggtgggcctttaagaggcgattgggtcatgaaggctctgccctcatgaatggattaatccattcattagttaatggattaatgggttatcatgggaataagattagtggctttataagaaggygaagagagatctgagctagcacaatcagccgccttgctatgtgatgtcctt

SEQ ID NO: 365339 - DNA, 508 bp, Homo sapiens
atctggggtaataaatgagaagcaggccaggcatggtggctcacacctggaatccaagcactttgggaggccaaggtgggaggatcacttgagcccagggatcatagccagcctgggcagcatagtgagacttcatcgctccaaaatattttaaaaattagctgggtgtggtggcattcacctgtggtcccmccactcaggaggctgaagtgggagggttgcttgagcccaggaggtcagggctgcagtgagccatgatcatgccactgcactccagcctcgccagcatagcaagaccctgtctcaaaaaaaaaaaaaaaaaaaaaaaaaaaaaagcagcagcaggcatgttgcaggtagttttagatgagttactttactggagagaatatgagaatactttatgaaatttgaacaatgacataagtaaagaaagagttttgcacttttggtaataaaggccattaacctgagagctccaggacgatgaagcctgtgtttcatccac

SEQ ID NO: 365340 - DNA, 521 bp, Homo sapiens
gatttgcccagccgcagaaaggggcggaaggccagggtaggtttgggggcaaaatggcacaaaagagttcagcctcaaacggttttggtgttgatgcaatctggatgcctggtcaccttctccatagagagacttggagcttactggggcttcttgtccacaatgtgactcttggcttctagactcttggaggaaggaatgggaaatgatgtgatgtgacctcgagttggaccattagccaacgcagtgacctgaaacagtggttctcaaactccaccgcacattagaagcacctgggagcgcagggcgtggcgggtggctcctggaatcccagctactcaggaggctgagcggggaaaatggcttgaggccggagttagagsctgccatgagccatgatcgtgccactgcactccagcctgggtgacagagggagactctgtcaaaaacaaaaacaaaacaaaacaaaacaaaaaaacgtgcaggtgagagtttaaatactcctgagactcaggtctgcc

SEQ ID NO: 365341 - DNA, 584 bp, Homo sapiens
tctagggtcctctggagatctgtaacagccccttyatcagaaaggaatttgaggtcaaaggcctcacgtaggactctgatcaaagccacataatttttttttttagacagagtcttgctttgttgcccaagctggactgcaggggcatgatcttggctcactgcaaccttgcttcccaagttcaagtgattctcctgcctcagcctcctgaatagctgagattacaggcatatgccatcacgcctggctaatttttgtatttttaatagagatagggtttcagcatgttggacaggctggtcttctgacttcgactcctgacttcaagtgatctgcccacttcagcctcccaaagtgctgggattatagacgtgagccaccgtatccagcttcaaagccacatacatttgcaaacaacactttataattaccagagcctcatcatgagctctgggaacttgggctggaggtccagggctcaggacaataagagctcctcaattctgatgcagatcagactgagctctggtcttctggtccaccagcctaaaagcccttacttaattggacacaataccaaagaa

SEQ ID NO: 365342 - DNA, 584 bp, Homo sapiens
tctagggtcctctggagatctgtaacagcccctttatcagaaaggaatttgaggtcaaaggcctcacgtaggactctgatcaaagccacataatttttttttttagacagagtcttgctttgttgcccaagctggactgcaggggcatgatcttggctcactgcaaccttgcttcccaagttcaagtgattctcctgcctcagcctcctgaatagctgagattacaggcatatgccatcacgcctggctaatttttgtatttttaatagagatagggtttcagcatgttggacaggctggtcttctgacttcgactcctgacttcaagtgatctgcccacttcagcctcccaaagtgctgggattatagacgtgagccaccgtayccagcttcaaagccacatacatttgcaaacaacactttataattaccagagcctcatcatgagctctgggaacttgggctggaggtccagggctcaggacaataagagctcctcaattctgatgcagatcagactgagctctggtcttctggtccaccagcctaaaagcccttacttaattggacacaataccaaagaa

SEQ ID NO: 365343 - DNA, 565 bp, Homo sapiens
aatctcttatgtgaagacagactcagsgtccagggtttggaccgaaagggatataggagttgttatagacccttaatatgttggaacatcgtgttgtataagaatagtgtattttcttttttatcatagtaacagtatagcaataacacatgaaattctagaaaaataatccactttaacataaaattatttttcatttttactatgtcctctgtattattcacctttttgtatttttcatatacttatcataatgtatgtataatcgtgctattttcattcaataatctttgaaaattaggaaaaaaattcacacctccaaaagagtttgtagtttcagagccattgtggaggaaggttttaatttacattttctgaactcctcatctagaatagctctcaaagcctgtggtgttctctccaagaagtatcctttatggtggcaagtctctcttcttcaggatagacttaacttagacaagagttgcatcacacaaatccaaagatgtccacactttaataattccagtttttaaaatgagaattaaggtgtgagtgtgagcag

SEQ ID NO: 365344 - DNA, 582 bp, Homo sapiens
ctaaagttatttctactgcacagatgtcttcatatatttctsttatctatagattgaacaaaataggttattttacagttcctcttgggtatttttactagataatttaagcctgggatatcagctctaagctgtcttccctgaaatctatacaaccctcagataaaacacatatatacacatagacacacacaagtgtattttagtttaaaaaaaaatcgtagctattcacagcaatgaattgctgtcagcttggaatgtgtctcatttattaaaactaattgagcattctgaaatgtattctccctagtgaacagaaatttaaaaccaaaataaacaagccaccaagtccaaaactccttgtcataattccaaagacctgcaaaaacctctcaagaagtcccaatttgttttatgcacatctacagaaacatgttggttctttggcatcggccgagaatgaatattcccaaagcatgaaattcagggtctggtggggttggggttgtttgcacccacagtctgccaagtccttttcttctgtccagagttttccacagcgagagccagcccctggccact

SEQ ID NO: 365345 - DNA, 377 bp, Homo sapiens
tgtttttgagtctatcagtttgatcatggaaactgacagattatcagtaaggacaacgaaatatagcggcatattggccagtctcaaatccttgaaaggtgcaaaagttaaaaagtgaaaagtgggccgggcrcggtggctcgcacctgtaatctcagcactttaggaggcagacacaggaggaatgcttgagcccaggagttcaagactaacctgagcaacacagcgagacccccatctctacaaaacatgtaaaaattgtccgggtgtggtggcgcgcgcctgtagtcccagttactcaggaggctaaggtggaggaacctttgagcccaggaggtccaggctgcagtgagccaagactgggccagtgcactcca

SEQ ID NO: 365346 - DNA, 564 bp, Homo sapiens
tttagaattttatttttttaaaaaaattcttgaataaaaccaatgtattcttttttcttttctttttgtactatttttgtcatttyggatagactaagtgtaaaggggccttgttttctctcagcaagagaggatttgctgagttatggggaaaatgagaatccaagtgggtctagcagaagaaatggaagtcgctaacacaagcgtgcatgcttggtgaatgcttcaaaaactcaatgttcagccttagcaaatgagccttaacctgcaattagcaatggtacctgcaccctttagactcagagaggcctcctgttaaagaaggatgtaattccccctattcaaaggcttgatccatgaagtttatagccaggaactaattagtgcatctttatcttgctttaaaggtctcaacatatgcactagtggaagtgccacctcatgtgaagaatgtctgctaatccacccaaaatgtgcctggtgctccaaagaggtatgtaggtgggggaggggaggaagaagggaaggaatgctgcgagggtgagggtgagaaggaggccaaca

SEQ ID NO: 365347 - DNA, 608 bp, Homo sapiens
ttgaaatttagttgtggttttcttatctacctttattaggttgaagaaattcccttgtatttcttttctggtgtgtgtgtgtgtgtgtgtgtgtgtgtgtgtgtgtgtgtgagtgtgtgtgtcaggaaaggattttggaattgtcaaatgcctttagtatgtataattagatgtgttttcttttctttattttattaacatggtctattacatttttttttgaatgtttaaacaaccttgcattctttgaataaacctcacttggtaattatgcttgctgcatttggtttgctggtattcgttgaataattttgcatctrtattcataaagaaattggtctatagtttttatttcctgtgatgcctttgatttttttgatatcaggtgatattggcctcatagaataagatgggaaatgttccattttcttctattttgagagatttttatgaagaaatagtagtaattattcttttaaaaattaaatagtatttgttactacagcaatgtgattggcaactttatttggtgttagttttaaaattactgattcaacttctttacttactagaagtgtattcagattatctatttatttttgagtgag

SEQ ID NO: 365348 - DNA, 459 bp, Homo sapiens
agcagtgagttgaagagagcctgagttctccctagtccttggtgacagggtctggattcaaacccagctttcctgcttccaagcctctatcccatagatgcctctcagcctcccggaatccaagccaattatttgtttcctggttttaaagtgcycatctgttaatttcttataattcgtaaaaaagtagaagtagattttggataaaataagttgtaggtgggaacttggggggacaggtggcagaaaatgcagaagacctgtgaaaagatcatggcatcaggcagaggaaataggattgcaggctctgtccatttggggtctgttgtctgcccatgcaagggccaaggagggagctcccttcccccaactcccccctcttccctgcccctccctcactgtgatgtggcacccaaggagccctctggcgggacaagctgtgtctgtctgaccaaaggc

SEQ ID NO: 365349 - DNA, 594 bp, Homo sapiens
ggtaggcaggatggcactcaaataatgtaatgtctggtctggcatagaggaacctgaatgcactggytgtgatgctggacagccaagcacccattgaacactagctttgactgcagggtaagagaccttgattagcaaaaaatatgtagggagctgggcatggtggctcatgcctgtaatcccagcactttgggaggctgaagcgggtggatcacttgaactcaggagttcaagaccagcctggccaacatggtgaaaccccatctctactaaaaatacaaaaattagccaggcatagcagtcccagctattcgggaggctgaggcatgagaatcacttgaccccaggaggcagaagttgcagtgagccgagatcataccactgcactccagcctaggtgacagagcgagattccatctcaaaaacaaacaaacaaaatatatatggagtcaggtgttaacatattataataagtagcagacctcatcttatcctccatgtaacagtgatgatggggtgagtgagcatggtggcttacaataagttgcaaacaccagtgttgtaacaaactaaaaacaatctaaattttaaaca

SEQ ID NO: 365350 - DNA, 594 bp, Homo sapiens
ggtaggcaggatggcactcaaataatgtaatgtctggtctggcatagaggaacctgaatgcactggctgtgatgctggacagccaagcacccattgaacactagctttgactgcagggtaagagaccttgattagcaaaaaatatgtagggagctgggcatggtggctcatgcctgtaatcccagcactttgggaggctgaagygggtggatcacttgaactcaggagttcaagaccagcctggccaacatggtgaaaccccatctctactaaaaatacaaaaattagccaggcatagcagtcccagctattcgggaggctgaggcatgagaatcacttgaccccaggaggcagaagttgcagtgagccgagatcataccactgcactccagcctaggtgacagagcgagattccatctcaaaaacaaacaaacaaaatatatatggagtcaggtgttaacatattataataagtagcagacctcatcttatcctccatgtaacagtgatgatggggtgagtgagcatggtggcttacaataagttgcaaacaccagtgttgtaacaaactaaaaacaatctaaattttaaaca

SEQ ID NO: 365351 - DNA, 570 bp, Homo sapiens
ggtatatgctcagcagtgggatatctggatcatatggttgctaaatttttagattctaaggaagctctaaactgttctatattgtagttgtaytaatttactttcccaccaacagtgtatgagggttcccttttcttcacatccttatcaccatttgttattgtctgacttttttataagacattttaactgaggtaacatcataactcattacagttttgacttccatttctctgatgatcaatgatgttgggcatcttttcacacagctgtttgccactgaaggtcttctgagaaatgtctattaaaatctttagcccatttttaaattggattattagatgttttcctataaggttgtttgagctccttatttattaatcccttgtcagatggatagtttgcaaatactttctaccattctgtgggttgttctttgctttgctgtgcagaagctttataaactgatgtgatcctatttgtccattattgctttggtgatctgtgcttgtagggtattacccaagaaatattttcccagtgcaatgttttcccagtagagaaacctgg

SEQ ID NO: 365352 - DNA, 570 bp, Homo sapiens
ggtatatgctcagcagtgggatatctggatcatatggttgctaaatttttagattctaaggaagctctaaactgttctatattgtagttgtactaatttactttcccaccaacagtgtatgagggttcccttttcttcacatccttatcaccatttgttattgtctgacttttttataagacattttaactgaggtaacatcatamctcattacagttttgacttccatttctctgatgatcaatgatgttgggcatcttttcacacagctgtttgccactgaaggtcttctgagaaatgtctattaaaatctttagcccatttttaaattggattattagatgttttcctataaggttgtttgagctccttatttattaatcccttgtcagatggatagtttgcaaatactttctaccattctgtgggttgttctttgctttgctgtgcagaagctttataaactgatgtgatcctatttgtccattattgctttggtgatctgtgcttgtagggtattacccaagaaatattttcccagtgcaatgttttcccagtagagaaacctgg

SEQ ID NO: 365353 - DNA, 570 bp, Homo sapiens
ggtatatgctcagcagtgggatatctggatcatatggttgctaaatttttagattctaaggaagctctaaactgttctatattgtagttgtactaatttactttcccaccaacagtgtatgagggttcccttttcttcacatccttatcaccatttgttattgtctgacttttttataagacattttaactgaggtaacatcataactcattacagttttgacttccatttctctgatgatcaatgatgttgggcatcttttcacacagctgtttgccactgaakgtcttctgagaaatgtctattaaaatctttagcccatttttaaattggattattagatgttttcctataaggttgtttgagctccttatttattaatcccttgtcagatggatagtttgcaaatactttctaccattctgtgggttgttctttgctttgctgtgcagaagctttataaactgatgtgatcctatttgtccattattgctttggtgatctgtgcttgtagggtattacccaagaaatattttcccagtgcaatgttttcccagtagagaaacctgg

SEQ ID NO: 365354 - DNA, 570 bp, Homo sapiens
ggtatatgctcagcagtgggatatctggatcatatggttgctaaatttttagattctaaggaagctctaaactgttctatattgtagttgtactaatttactttcccaccaacagtgtatgagggttcccttttcttcacatccttatcaccatttgttattgtctgacttttttataagacattttaactgaggtaacatcataactcattacagttttgacttccatttctctgatgatcaatgatgttgggcatcttttcacacagctgtttgccactgaaggtcttctgagaaatgtctattaaaatctttagcccatttttaaattggattattagatgttttcctataaggttgtttgagytccttatttattaatcccttgtcagatggatagtttgcaaatactttctaccattctgtgggttgttctttgctttgctgtgcagaagctttataaactgatgtgatcctatttgtccattattgctttggtgatctgtgcttgtagggtattacccaagaaatattttcccagtgcaatgttttcccagtagagaaacctgg

SEQ ID NO: 365355 - DNA, 595 bp, Homo sapiens
aggatagctttgggtattctgggtcttttgtggttccctgtaaattttaggattttttttctgtttctgtgaggaatgtcattggtattttgatagagattgcattgaatctgtagattactttgggaagtatgaaaattttaacaatattgattttgcaatccataaacataaaatatcttccatttctttgtgtcatcttcgatttcttacagcaatgttttatagttttcattgcagagaactttcatktctttagacaagtttatttccaggtattttattttatttgtagccactgtaaatggaattaatttattgatttcttttcagattgtttgatattggcgtataaaaaggttattgacttttgcatgttgattttatatcctgcaacgttactgaatttatcagttctagcagtgttttggtggattctttaggtttttccaaacataagactgtatcatttgcaaacaaaaataatttgccctctttctttccaatttagatgccctttatttcattctcttatctgactaatctagctaggacttccagtactatgttgaataacagtggtaaaattgcactt

SEQ ID NO: 365356 - DNA, 514 bp, Homo sapiens
tcatttctttagacaagtttatttccaggtattttattttatttgtagccactgtaaatggaattaatttattgatttcttttcagattgtttgatattggcrtataaaaaggttattgacttttgcatgttgattttatatcctgcaacgttactgaatttatcagttctagcagtgttttggtggattctttaggtttttccaaacataagactgtatcatttgcaaacaaaaataatttgccctctttctttccaatttagatgccctttatttcattctcttatctgactaatctagctaggacttccagtactatgttgaataacagtggtaaaattgcacttccttgccttattcctaatctgagagaaaaggctttcagtttttcctcatttagtctgacagtagctgtgggtctgtcatttgtggtttttattatgttgaggtatgctccctctataccctgtgttttgaaagtttttatcatgaagggatgttgaattttatcaa

SEQ ID NO: 365357 - DNA, 595 bp, Homo sapiens
aggatagctttgggtattctgggtcttttgtggttccctgtaaattttaggattttttttctgtttctgtgaggaatgtcattggtattttgatagagattgcattgaatctgtagattactttgggaagtatgaaaattttaacaatattgattttgcaatccataaacataaaatatcttccatttctttgtgtcatcttcgatttcttacagcaatgttttatagttttcattgcagagaactttcatttctttagacaagtttatttccaggtattttattttatttgtagccactgtaaatggaattaatttattgatttcttttcagattgtttgatattggcgtataaaaaggttattgacttttgcatgttgattttatatcctgcaacgttactgaatttatcagttctagcagtgttttggtggattctttaggtttttccaaacataagactgtatcatttgcaaacaaaaataatttgccctctttctttccaatttagatgccctttatttcattctcttatctgactaatctagctaggacttycagtactatgttgaataacagtggtaaaattgcactt

SEQ ID NO: 365358 - DNA, 566 bp, Homo sapiens
cccacaatttctttaaacattcatctattacagagtatctagatgggttccagtttttggctataagaaagaaagctgttttgaatatttttgtgggtctttttgtgaaaataaagttttcatttctctaggatagatgcccaaacatgcaattgctgggtcatatggtaatttcatgcttagttttataagaaactgtcaagctgatttctggaatggctgttcaattttaaattatcctccatgatataggagtgatccagtttttctgaatccctgccagcwtttggaattgtcactactttttgtcttagccattctgatagttgtgtagtgatatatcattgtgcttttaatttgtgtttctgtgatggctgaacacagctaatgatgttgaatatcttttcatgtgcttatatggaatctgatttaatccattctcacactgctaataacgacataagtgggactgggtaatttataaaggaaagaagtttaattgactcacagttcagcataactatggaggcctcaggaagcttacaatcatgacagaaggggaagca

SEQ ID NO: 365359 - DNA, 532 bp, Homo sapiens
aaacaataattattgtcctttaattcagctaaagagactgatgtgtaacctttacttgcttttccaaataaagatgtgattggttgtttacagcactgtcaatgtttatccaagtctgcttcttagattctatgtctctccaagcctctgctttgaaggcttttctttcytagagccttgtaaacaagacttgcctgtctgtcagggttttttccccccagtaatccacagctctgccactatatttgaagtttggcttcagtggatctttgaagactgacttcatcctcccggcttgcataggtcccactccacctcatcacatagctgctgcacaggaatcttgctgtcagtctgtctctgcacatgccctgcctggccaagctgcatggctggaagcaccccttccaggctgataccactgtcttgcagacaaaatatcaacaaattggagcagtcagaaagttgctgccatctgaagtaaatgatcttggtgacacctggaaggtaaagttgtgctatagcagagaga

SEQ ID NO: 365360 - DNA, 426 bp, Homo sapiens
cacagatagtaccacttccagaggatgctaactcgttacagatggccagtgtgtgaaaatatcaggtaacattttttggagtaatctagaagccctatagctgcgcatctcaaagggtagtccctggactggctgcaagggcatcatctggaatctgttacaaattcaaattatcagactgtatccaaggccagtaaaatcagaaactctggaaaaaagggtgaataatctggcttaataagcctgcaaggtgattctgataaacaccaacattagagaaccattgccctgcaggatgaggcamaatggaatcttaattagcttatggtggtgacgttaaatgaatactctctatgctagatgcttgtatatctacgagcaaatgtgaagaaagtcagtgtgtagagtatactcattttgtcactc

SEQ ID NO: 365361 - DNA, 617 bp, Homo sapiens
aggcacttgtcaaaaacctctaaagagatttcaccaactcgttttcattggaactattgggaggaggctggggagtgccgctgtgagcagtttagacagagctcttaatggaagcctcatagtagttggacagaacattcccatcctaggcatttctgctgctccctcactaatcagcagcagcactccctgctcttctggtgttggggttgggggtttgtcrgctaagctgcctctgctgcagtgtcactacattcttctcttctcctggaagcagcccaaatatggctgcaggcagaagccaaggaaaccttcatgcccaggtgaaccagagatgggggtgggatgggccaagtggaatccatctcttctgcagtaccaaaagggcacagggctactgccatcccatatgccaaagggagaaaatagagccaacctcagagcaaagcagtggctgctctctggctctggatctggagcatgagaaagaagagacagatgccagatgacaaacagacctggccagatctaagccaatgaagcaggacctcaaactaagctgggaacaaatggaaagtcctgagaaaagtggttttttttgtttgtttgtgtgtgtg

SEQ ID NO: 365362 - DNA, 589 bp, Homo sapiens
atctcctttggctccatgtttcacatccacgtctcactgatgcaagagggggattcctatggccttgggtagctctgctcctatggctttgcagggtacagcccccctaccatgttccttcacagctggcattgagtttctgtggcttttccagtgcacagtgcaagctgttgggggaatctaccattctggggtctacaggatggtggccctcttctcacagctccactaggcagtgacccagtggggactctgtgtaggagctccaaccctatatttcccttctgcactgctctagctgaggttctccatgagggctccacccctgcagcaaacttctgcctggacatccaggcatttctatacatcctctgaaatctaggccaagsttccccaacctcaattcttgacttctgtgcacccacaggcttcaacaccacatggaagctgtaaaggcttggagcttgcaacatcagaagccatggcctgagctgtaccttggccccttttagccatggctggagctgaagcagctgggatgctgggaactatgtcttgaagctatgcagagcaggggggccctgtgcct

SEQ ID NO: 365363 - DNA, 648 bp, Homo sapiens
caaatcagagaatgcccactttccttaactgcaaatggggattaataatggtacaattggtcctggcagttccacatccacagattcattcaaatgcaactgaacattttcagaaaaaagcacaataaaaatratacaaataatacaatataatgacaatttacagacatttacattgtattaggtatcgtaagtaatcaagagatgttttaaattatatggaaggaggtacatagattttatgcaaataaaacaccattttatataaggaatttgagtacccacagattttagactggggatgagaggttctggaatcaatcccccgaggaaactgagggataggataactgaatctatctcataggagtttggtgaggaatgagtgagttaatatacctagagcacaggaggtcacctatgacatgttaagtactatgtgagtcttagttatcattttatttcattactccaaaccattaatttaattcactttagaataattatgaaaagttctagaaattattagttttgaagttggttggaaaaggagtaatatttgtaaattaagttggaaagaactgatatatttataatattcatgaaataatggcatgtcagcagttataaaaatgaaaagacatggca

SEQ ID NO: 365364 - DNA, 553 bp, Homo sapiens
catgacttgctaaatcttgtagtttatatttggatttgccagagccacaaaatgtgttgcatcagactttgtgatctccctacattatacttagaatgacttccaacaattctttaaaattctttcaaaattgttcttgatgcctaaattagatattttcctgcaatatatacttactggctataatatctttctgtttgtttctgtattactttaaataatcaatcctaattaatttctatgtctttgtcatgattttccaaattgatttgtaaacaccgctgccaattatcatgtattmatcacagagcctagcagagtgctagatgggcagacatttctcgagtatagctagcagtagaataattacttgtttgcgtgtggtcagagggagcttatgcattcatatatcaattgtccagatatcaaagttttcttagatgtaatatatgcttagagaccgtttgcataaatattcattttttttcagcgaatgaatgtatcccatgttatttctgcccacgcccttcactttagttcaggtacactgttt

SEQ ID NO: 365365 - DNA, 553 bp, Homo sapiens
catgacttgctaaatcttgtagtttatatttggatttgccagagccacaaaatgtgttgcatcagactttgtgatctccctacattatacttagaatgacttccaacaattctttaaaattctttcaaaattgttcttgatgcctaaattagatattttcctgcaatatatacttactggctataatatctttctgtttgtttctgtattactttaaataatcaatcctaattaatttctatgtctttgtcatgattttccaaattgatttgtaaacaccgctgccaattatcatgtattamtcacagagcctagcagagtgctagatgggcagacatttctcgagtatagctagcagtagaataattacttgtttgcgtgtggtcagagggagcttatgcattcatatatcaattgtccagatatcaaagttttcttagatgtaatatatgcttagagaccgtttgcataaatattcattttttttcagcgaatgaatgtatcccatgttatttctgcccacgcccttcactttagttcaggtacactgttt

SEQ ID NO: 365366 - DNA, 582 bp, Homo sapiens
ttctttgacgttcaatttattatatattcgtgtggatgacatccttcttaatatcatggtggaagacatacctgtatatacggacaggacatatttgtatacacaggtagaaattatgtaactctccatcatcactattgttctaaaaagctaatttggtcacaaattcacatagttacatacttacatagcgtaagtaaaataaataatagaaaccctttctagctttttacctgagggcatttttttcccctccctacagctgccttccactccaacaaaatctcaaagtttataaagcctgtcaacttccattgctaattctcagtratgggattgtaattcgctttgggaagcttccctgtattactgttaagtcatttgcattccataggatgatttgtgttctgatgagtccaggaattcctagaagtctctttcctaccccgccccctctttcatttggagtctccttttctgagtagcagcagaagcccaaagaaagaaagaaaaaaaaccttgcattgcaagtacaattagatctatgtctgtagaagtgccttttgtccagagaccccttag

SEQ ID NO: 365367 - DNA, 512 bp, Homo sapiens
tgttttttttttccaaaatgtgggacttttcatttataccaacaaatattccatgctgyagaagtgtttgtgtacatcataacccccttgatattcacattttaaaattggaatccatagacaaacagacacagaattcagttactctctgagaagctcctaaatgtgaaaatgaataaaacatgtttgattccatcatggtgtagagagaaaacacttgtgccgcttaaggatcaattagggaagcataccgctactatgagtgatatggaatgacagattagaatggacaggattgtggaagttgttgaagatatttatgggaggctatcgcctgtgcatctggtggtgggtctagagtctctatattcagtagggctagcagttgggaaaaaatattgaacacgaactgggaaatgaggacagactagaatttgtgaggataaattggaacccatgtgtagactgaagtccttatctttgtctaccttcaaccttgacaaagtgggtga

SEQ ID NO: 365368 - DNA, 512 bp, Homo sapiens
tgttttttttttccaaaatgtgggacttttcatttataccaacaaatattccatgctgtagaagtgtttgtgtacatcataacccccttgatattcacattttaaaattggaatccatagacaaacagacacagaattcagttactctctgagaagctcctaaatgtgaaaatgaataaaacatgtttgattccawcatggtgtagagagaaaacacttgtgccgcttaaggatcaattagggaagcataccgctactatgagtgatatggaatgacagattagaatggacaggattgtggaagttgttgaagatatttatgggaggctatcgcctgtgcatctggtggtgggtctagagtctctatattcagtagggctagcagttgggaaaaaatattgaacacgaactgggaaatgaggacagactagaatttgtgaggataaattggaacccatgtgtagactgaagtccttatctttgtctaccttcaaccttgacaaagtgggtga

SEQ ID NO: 365369 - DNA, 624 bp, Homo sapiens
taaattgacacataaaattaagcatcatgtcattaaaggttaaaacgggacttaaaataatttgcactaaatttgatgtattttacagtcttattcttttttttttttttttttttttgaaatggagtctcgctctgtcgcccaggctggagtgcagtggcgygatcttagctcactgcaacctctccctcctggattcaagcgattttcctgcctcagcctcctgagtagctggaattacaggtgcgcgccaccacgcctagctaatttttgtagttttagtagagacgggatttctccatgttggccaggctggtctcgaactcctgacttcaggtgatccactcgccttggcctcccaaagttctgggattacaggcgtgagccaccgtgcctagccttagttattctttacttgccttcaaatggccaaatcaaccaaaacaaaagaatcgtcttaaactctacaaaatgatctggggttaataaggaagaattaatgaggaatatattacaaagagaatggataatgactttttatttgacctactagaagtaaagcacacctttcacatctaagaaactgacttttatgtctgttctgtactctgagatctttccttt

SEQ ID NO: 365370 - DNA, 568 bp, Homo sapiens
gtttatggtaatcatttgcataaattcaagcctatgccatggtgattaagacaggagatacatacaaattaaacaccagtgggaggagacaaaatgtgaattttcttataacttcagcacaaaatgacagaccctctactgattttactttttcatcttaactatcaaaattcttaacttacatgtgtgaatttgatgaaaagtttaaaatttgtcaattctatagaagtaatgaactgaattttcctcaaagaacactatatttaatatgaagtcaagccctakattttttcacaattcaagacactttaaaaaatcacacattaagtttttacaatttttacaaagttcttttattattgttttcaaataccaaggtaaggaagttaaggaactggttaaaatctcttttagtgggtatctttattggaacatgagcctgacacttgaaatcagtgctaaagcagattacccaggcactctacacaggagccatttaggacaaataaatcatattttgtgcctctctctaccttaaaagcttgtgttttatagaaagagtcagcct

SEQ ID NO: 365371 - DNA, 591 bp, Homo sapiens
tccaaggaactgacagggtttagtaggcaggtaaaaggagaaattggaaaggaagcacaaaaaatgttatttggactcagagaatctgggttaggaagtcttagatcttatagtaaaagccaaggggcagagatgtgaatggaatggctctcagaaatcatgtaagaggactttaagtatattccrtcctgtaatctggagcaatgaagtcagagagctgataggacaaaagtagatccaataagtagctgagaatgtgaatagctctaacgagcctccactgaggcttgaagaggagaggcaaaggataataaatgtgctgtcttcaatactcggtactaattcaaagagtttgtacagtttcctgtatagatagcctttggaagaatatagatgaaatgatgaataacatattatcaaggtactatcattactaagaatgctaccttacatttgcataatgcttaatagctttcaaagtactataatataagtgagcttatggttcatatgattttcacaatccctgtgaaatatatacaacaggtaacattttataagcctgtaggcaaggaaatttgaatgagagtt

SEQ ID NO: 365372 - DNA, 571 bp, Homo sapiens
tgtacagtttcctgtatagatagcctttggaagaatatagatgaaatgatgaataacatattatcaaggtactatcattactaagaatgctaccttacatttgcataatgcttaatagctttcaaagtactataatataagtgagcttatggttcatatgattttcacaatccctgtgaaatatatacaacaggtaacattttataagcctgtaggcaaggaaatttgaatgagagttacaaatacttaattatcttatctgccatcgccataatctgtaaacaagtgaactggaacccagacaccagttttataattagaaatgcagatctctgattgatgatcatgttaaaaataccatgatataatttwtgaacactaaatatatttgatgatatatttagatattgcgaagtatataatacataatactttgttgtgtttgggtattattctatcagggccagagtcttggtctagaaaattttggtctaatcaatgtgatctgtgatttcccatgaagagattggaaaggttaacaaaagggataaatagctaagcctgagaaatg

SEQ ID NO: 365373 - DNA, 626 bp, Homo sapiens
tctcactttcatgcccaccacaacacaaagtttatttgtgttagtagtcataactaatgtttatattgtgtcttctctccaattagccaagaaccgtgagtaattcatacacattctccttttttttaggactttgatagacagaattctaaagatgtgtttctaagattgccatcccctagtgatttgaacaaacatgaatctaggtactacagaaaagaggctttggaaataaaattaaggttaataattacctgaccttaaaaaaaggaagattatcctggattattctgctagatccagtgcaatcacataggacttaaaagcagaagagaaaggttgtagagtctgtcagagagatgtggaagaatagacaaacagagaagatatgaggtagagggggacgtcatggagattcaaaatttgaaaaggattccactcactgttgctggctttgaagataggggaaaggggtcaaggactaaggaatgcaggtgacttctggaagctgcaaatgacccctgagcaagagacagcaaggatatgggaaattccatcttacaaccacaartaactgaattctaacaacaatatgaatgagcttataaggggattcatccccagag

SEQ ID NO: 365374 - DNA, 496 bp, Homo sapiens
ttcttcaaagttaattactcttctgwtttcaatcaagaacaataacttttgctgcagaacatgtatgtttaagtttaaactgggggtggtggctaaaaaaaatgagggaagccttgggaggggtttctgggtacccagatgtgaattttagaaaaagaaaaaagaaataaaagataattattgcttacttctctacttcggagtgttatagctcaattaatagagatggaaacattttgcaaagatcacatagcatgcttgtgaaagatataagacatatccaatttgcacacaggttgtatcccaaaagctcatttataaattaatcacttgaaacttggaattaattccctatatgtcataaatgtcataaatgatggttaggatcccatgttacttatataagcctatattaagcagaatgtgtctgaaacactgcacatttataatgaaaaatgggttcaaacatacaacacataattaagcaaaacaaaat

SEQ ID NO: 365375 - DNA, 496 bp, Homo sapiens
ttcttcaaagttaattactcttctgatttcaatcaagaacaataacttttgctgcagaacatgtatgtttaagtttaaactgggggtggtggctaaaaaaaatgagggaagccttgggaggggtttctgggtacccagatgtgaattttagaaaaagaaaaaagaaataaaagataattattgcttacttctctacttcggagtgttatagctcaattaatagagatggaaacattttgcaaagatcacatagcatgcttgtgaaagatataagacatatccartttgcacacaggttgtatcccaaaagctcatttataaattaatcacttgaaacttggaattaattccctatatgtcataaatgtcataaatgatggttaggatcccatgttacttatataagcctatattaagcagaatgtgtctgaaacactgcacatttataatgaaaaatgggttcaaacatacaacacataattaagcaaaacaaaat

SEQ ID NO: 365376 - DNA, 586 bp, Homo sapiens
gttttaccttctcactcttccctatttctgtctggtggaactctaaagttcgaatgtctgttgccttcatgctgtggctcctcagctcagggaacagttgctgggatacaaatgaaaagttttgatgcagcatagttgtaagatatgggarggacacatcacatacttttttttgagaattatctggccatgcacaatctccctgggggcacctttcaagtatttaatatatgccattagggaacttataagaatctaatcagcaccctgtccagttttgctgttactgttgttgttgctgctattattgcttgtttgtgtccctgtcaggtcctaaatttcttacctaaacttatttcacttggtagccaaaacttttaatatatgtgtcactgaaaggtcctcctaagccagtgaaaatcaaaacttgctcctccgtaaatattatacctttcttcagttttaaattccctgagcttgactaaggttctcaactctgttaggaatacatatgtctctagtcacgatgaactctctatatgccactataaaaacttagcattttaaaaagtagcaaagaggtata

SEQ ID NO: 365377 - DNA, 600 bp, Homo sapiens
caacttgaattagttgacagttttaggccattgcacacagaaattctatgataaatattttgttgaaaaagatataattcataaagataaactgtatgctggctcatcaaaaaggtcttaatatatttcaaaaactaaaatcttacaatatgatatattcactgaccacagtgaaattaaattagaatttaataagaatagattacctagaaaatctaccaatatttaaaaaataagcaatatatttygaaaataactgaagcgtcaaaaattacaagggaaattaataaagttttctaacagactgataatgaaaattctgtatatgaaatttatgaaatacagctaatgcatagtttagaaagaaatttataattttaaatgcatactctagatggaaggtctaaaatcaaaaatatgccattataccttaagttacacaataaaaagcagagcaaataaaaagtaagcagaaaggagaaagtgataaagttaaaagcagaaacaaacaaaaaatgcctagaaaaatgtggaaaattcaatgaaaccaaaagcttctcctttaaaaagatcaatacaattgatgaccatttagttaac

SEQ ID NO: 365378 - DNA, 565 bp, Homo sapiens
tgagatcctcttacccttgatcatattgtaagtataataaaactgacccatctttcttcccactgtattttgcagttgctaacacttgctgttgcatatggataaatatgttgagtattgtaaagactcttcagaaaagtaatgtacaggttacttgctcaggtggatttcttgttggcctcattctttgatctgttccatattagctggtttgactcatggggaccttggttaaggaacatacatactccaaactcagtattatcctcctggcagtcataatagtattcttcctgatgtattatatcttctcaaaagttttaattgcctgcatgcagtcatttgcttaatgccaaatggtctccctttgtctagagtgataaaaactcaarcgagtagtaacaaagactctgtaacctctgacatgttgtgactgaaaaacaaaaaatgatggtaactggcaatagcactgatgctataagttttggtcacactcttaactaggtgagatctgagcaaaaggagaatattgttaaacaaaatgtgtgggaggccatagttttgt

SEQ ID NO: 365379 - DNA, 628 bp, Homo sapiens
tgtctgtgaatatgtttctcctagtgtattacacatggaccatcagtattacaaatgcttgaaagtgyttcattttattatttgttgttaggtatggtggcttttgtttatccattttgttcatttttctttttacaaactagtccttggaatttccttttctttttaaaaatatttttttactgccttatattttttatttgtcaatgtttgcatttgtcatgtttcccttattttgcagaagttgaaggggaacagctttaggaaaactgtgaatatgagtattagcctccagatacaaagcttagcaactaaaaaggaaaccctatatactttgctattccactttgaaaaatatcataagctctgattagtctgacagtcaagtctcataattggccctgtcagtgtcatcagaggggttttgtgctctggatgacctagctctgtgacttttctccactgagcactgagggtgctatgatggagaatctccactagaatattttgcaaagtatatttcaaaactttgagtgttattttagtcagaagaagaaataattgtatacttcatttggtaagtttatcaaaatattacttatgatttgagatttttaaccagaaagca

SEQ ID NO: 365380 - DNA, 628 bp, Homo sapiens
tgtctgtgaatatgtttctcctagtgtattacacatggaccatcagtattacaaatgcttgaaagtgcttcattttattatttgttgttaggtatggtggcttttgtttatccattttgttcatttttctttttacaaactagtccttggaatttccttttctttttaaaaatatttttttactgccttatattttttatttgtcaatgtttgcatttgtcatgtttcccttattttgcagmagttgaaggggaacagctttaggaaaactgtgaatatgagtattagcctccagatacaaagcttagcaactaaaaaggaaaccctatatactttgctattccactttgaaaaatatcataagctctgattagtctgacagtcaagtctcataattggccctgtcagtgtcatcagaggggttttgtgctctggatgacctagctctgtgacttttctccactgagcactgagggtgctatgatggagaatctccactagaatattttgcaaagtatatttcaaaactttgagtgttattttagtcagaagaagaaataattgtatacttcatttggtaagtttatcaaaatattacttatgatttgagatttttaaccagaaagca

SEQ ID NO: 365381 - DNA, 578 bp, Homo sapiens
ccaaaattaaaaactaaatttaaatataaatactagttatataaaaacattaaccaaaaaacaaagacatggaaagcaagaaagcaaaaatatacaaaataattaacaaaaacatataaataaaatcatgaaataacaaaaatcatgacagaatactttctatatctgtacgcaaatatgttgtatacttaggtaaggaggaaattttcctagtaacctacagtaagtaaaaacaatcctgagacacagagttgaaatagatgggtttcactggagaatagtgaaaggtaaagaagaaaaaaacaaaacaaacaaacaaaaaaacatcctaccaaaattagaaccagagttaggtggttccacaggggcggtctataaaatggttaatatttatttgtgcaattgctacataagttgttcatataacttatgtagttatatccttcacttcataaaagtgaaggaagayttccaaattacttcttatgagacagatatatcattaaatggtgaatggtggtagcagaaaacaaaacaaacaaaaaacaaatattacttgtaaatacagatgtaaaaat

SEQ ID NO: 365382 - DNA, 585 bp, Homo sapiens
tccacccttactatgattttctctcagcagtgatagaaataaaagaaatgttagcaagttatggctggacatgctggctcatgcctgtaatcctagtactttgggaggctgaggcgggaggatcacttgagatcaggagttttagacaagcctgggcaaggaagaccctatctctataaaaaaattaaaataaaataaaaaaaagctaggcatgatggcatgtagctatagtcctaactactcaggagactgaggcaggaggatcgcttgagcgtaggagtgcaaggytgcagtgagcaatgatcacactactgtaccacaacttgggcaacagagtaagaccctgtctctcaaacaaccaaacaaaaacaacagaaatgtcagtaagttagaagtatttgacatctaccctcctcctgtgtcctcattatgccagataaggtcttcctttattggaaaggatccaggtaatgatatagtggaaaaaatattaacaaagtagctgatgttatctacataataaactggtcatagcaataaaggcaaaagtgcagcaggaataaggagggcgtaaatgagtttata

SEQ ID NO: 365383 - DNA, 543 bp, Homo sapiens
cacaaaaatgttcaaagtcgttataatagtagagaaatgttatggttggtgcaagagcaagtcattactgaaggcaaatgactgaactaaataaatttgatttcccttggattttaacttcatgggtggctgcctataagaaaattcaatatatctctgggacttttgcctctctgtcaatgtgactgaaatctgcctatgaaatccmaataatttcattccataaagaactaggaaaatatttgcaagctatatttttaatcagaattcagaattcctcaagactacagtttctttgtcagattagtttgtagcatcataaaaatttcaattttgtatgtgttgaaaggggacagtttgattcccagtagaaaaaggtcagtttgagatgaagcttagacagtgaaacattactacataatgatagcaggggaatcacgtctggttgtttgaaaagtgctagtttctgtaattagcaaaagtaatatgtaagatataaggatgaaaactgagagaaggatttcagaacccattctggtttta

SEQ ID NO: 365384 - DNA, 489 bp, Homo sapiens
tcccactgtctattttgttgttgttgtcgtcgtcattggtttttttttttaatcatctgtaattatgttgtgattctggataaaagcgcaatgacagttatatgagttttttggacatacattttaaatgaccaacaccaggtgctatgacacccacttggcacaacaggatttctctaggaaaaagtccaagactattcatatatgacaaaaagaaggtttgaatatgaaagatgaacacgatatcaaagtgaatatttaagaaggaagcattgcaggacaaagttaggaaaacagctaaaattgaatgacrgttttaagtgggaaaaatttgaatagtagtgtaatagatacaaaactcttctagaactggaaacagcatcatgaggctatgtttgaagacttttgggggatatcctttgaatttgggaaatcttatctccaaagtgaaagataattcttcagaaaaaacaaaatgcttaattattt

SEQ ID NO: 365385 - DNA, 554 bp, Homo sapiens
caacaatgacaaaatgaatatccttgtatataactttgtgcctaatgtaaatatttctctagcacaaagtttaaatgtaaagttgcttggtcaaaggtcatgtgtgttttacattctcctagaatctagaaaattgcctttcaaaaccacttgtgtcaatttacatttccaccaacattggaggatgtattacctgtttcttcacaaatatatcaaaacagaaaatttttaatttttcaaaattatttttgtgtgatggacataaaaaatgctattgtattttgatttaatttgcaattctgtaatttttcgtatagttgaacatttttcacaaagcttattacccacttgtaattctgtatayatttgcccatatcttggtttatttgtctttctattactatattagagctccttatgaacccattgtatatatttgcccatatcttggtttatttgtctttctattactatattagagctccttatgaacccattgtattatagatgttgcaagaaaataaaaactcatcaaaatacaataacaaaaacaa

SEQ ID NO: 365386 - DNA, 606 bp, Homo sapiens
cttggctctattttgttttatagatctgtgtgtctgttttcagccagtaccatactgttttgattacttcagctctgtgatattgtttgaaatcagaatgtgtgaattccccagctattttatcattctcaagattgtcttggctattcaaggactttttaacccatttatgcctagtattccactattagaatgctaagtatgtgggagttatttatatcctattgctgaatgtcattgccaaggtctgattgcaaaaattcaaaaaattgcaacctcaggcataaatgggttaatttcatacaaattgtaggattgttttttctatttgtgtgaaaaatgccaygagaattttgatagagatcgcactgaacctgtagctcactttgggtaaggtggacattttgacagtattaattgttctaatccataaatatggtatatcacttcatttgtttgtttcttgttcaatttatttcatcaatgtcttatacttttcggtgtacaaatctttccactccttggctacatttatttttaaatgttttattatttttgaagatattataaatgcaattattatcttagcctttttttaaaaaatat

SEQ ID NO: 365387 - DNA, 606 bp, Homo sapiens
cttggctctattttgttttatagatctgtgtgtctgttttcagccagtaccatactgttttgattacttcagctctgtgatattgtttgaaatcagaatgtgtgaattccccagctattttatcattctcaagattgtcttggctattcaaggactttttaacccatttatgcctagtattccactattagaatgctaagtatgtgggagttatttatatcctattgctgaatgtcattgccaaggtctgattgcaaaaattcaaaaaattgcaacctcaggcataaatgggttaatttcatacaaattgtaggattgttttttctatttgtgtgaaaaatgccacgagaattttgatagagatcgcactgaacctgtagmtcactttgggtaaggtggacattttgacagtattaattgttctaatccataaatatggtatatcacttcatttgtttgtttcttgttcaatttatttcatcaatgtcttatacttttcggtgtacaaatctttccactccttggctacatttatttttaaatgttttattatttttgaagatattataaatgcaattattatcttagcctttttttaaaaaatat

SEQ ID NO: 365388 - DNA, 575 bp, Homo sapiens
gatcaatgacaggggttccgagataaggaaattccactggtttcttgagtttacagtgttcgtgttgtgagacagtagatcttagtgtttcagagcatggtctttccagtttccaaactgcatagcctctgtgcctaaacttcctcagaattaaaatggatataattatagtatctacctgctaagtttcttttgagagttaaatgacttaatacctgtaaaaaacacttagaatagtgccagccacaaaataattattcaatatgtgttagtttgtattacttttgccaaaaagctcaaagaacagcagcaatcacatctatcctcaaccagcacaaccaaacaacccactgaaatcaagacagtgtcaggaggtttactggtcatttgtgctgtcaagtattaaacacccaaggccatctcaccagtttttaatctggtgcctaattttctcatatctatggtgawacacttaattgctatgaggaaaagacatgtagtccattttctgattatttaatttgtttctaatcaattcactatatattcattgattatgcaaagcactgagttag

SEQ ID NO: 365389 - DNA, 596 bp, Homo sapiens
ctaactcttggtaaattagtcagagtagagaataaagagagctggacgttttctttaaaaaatacattgttagttttagctgaaagtttgatttgctataggaygcagtagattatttttaaaaatttgtaagtggacgaacaaaatgtatgatagaaaattgtatatatagctctgaatctcagaaaagatttctgggccagaaagtcatgatttggtaatcattactacctatagtgggagttgaagtcatgggaatcaatgaaactgcaagaaaacacagagtaagacaagcaacattataattactgaacttaaggagtttaaaatttggtgttttaaacaccaacactcaagattttagaaaataatattgcttattcatttaaattgttttctgtaataaatagcactcccagatattaatatgttttgttaagacagcattctatcaggtgtaattagatgtagacttacatagtgttctacttcctggacctgactcactataaatatttccttgtaaaatgccattgactataatagaaaccactgggtggataacagcttttcagaaaaaaaaatcaaatcaggaa

SEQ ID NO: 365390 - DNA, 584 bp, Homo sapiens
tgcatgcaggccagaaacacctgttttagggatgtaatgttgtatggcatagccttgacaggaatcttaggaatagctactttttttttttatacccaatcttgcacatggcrtataacaaaagttcttaaggttaatttacacagacacacacacctcacatggagctttgatatttaagaactgaaggtctggattcagaaatacatgaaactgtttgtggatagtagatgattaatatgcagccttatgtgttcccctttacaaaactaatggaaaaagatgtccaaatgtctgttaagaattgtaagtaaactgtaatatagaaataccatgaaacaacatgctgcactgaacatgatgacttacagtacaactgtctcttagtatctgcaggaaattggttccaggacccccatgaataccaaaattcatgaatgctcaagaacctgatataaaatggcatattacttccatataacctatgcacatcttcctttataacttaaatcatctctaggttacttaaaatacctaatacaatgcaaatgctatgtaaatagttgttatactgtattgttttt

SEQ ID NO: 365391 - DNA, 584 bp, Homo sapiens
tgcatgcaggccagaaacacctgttttagggatgtaatgttgtatggcatagccttgacaggaatcttaggaatagctactttttttttttatacccaatcttgcacatggcgtataacaaaagttcttaaggttaatttacacagacacacacacctcacatggagctttgatatttaagaactgaaggtctggattcagaaatacatgaaactgtttgtggatagtagatgattaatatgcagccttatgtgttcccctttacaaaactaatggaaaaagatgtccaaatgtctgttaagaattgtaagtaaactgtaatatagaaataccatgaaacaacatgctgcactgaacatgatgacttacagtacaactgtctcttagtatctgcaggaaattggttccaggacccccrtgaataccaaaattcatgaatgctcaagaacctgatataaaatggcatattacttccatataacctatgcacatcttcctttataacttaaatcatctctaggttacttaaaatacctaatacaatgcaaatgctatgtaaatagttgttatactgtattgttttt

SEQ ID NO: 365392 - DNA, 579 bp, Homo sapiens
aacaaaactgacagacttttgctggagtaagtgaaatagaagaaataaattactaaaatcargaattaaaaaatattactacaaacctttcagaaattgaaaggttttaagggactgctataaccgactgtgtgccaaaacttagatgaaatagacaaattcctataaagacacaaactaatgaaattgactcagtaagaaatagatgctttgaataggcttataaagagtaaagaaaatggaatattatttaaataacttcctatcaagaaaaaacaccttcagatagcttctaaaatcattctgtgaggtgaatattacctatataccaaaaccagataaagacatcagaagaaaaaaaaatttcaatagactatcccttataaatatagacacaaaaaatatttaaaaagaagtaaatcaaacccagttatgtattgatatgctttggctgtgttcccacccaaatgtcatcttgaactgtagctcccataatccccgtgtgtcatgggaggggactggtgagaggtaattgaatcatggtggtgtttttttcccatgctgtttttgtgataggga

SEQ ID NO: 365393 - DNA, 579 bp, Homo sapiens
aacaaaactgacagacttttgctggagtaagtgaaatagaagaaataaattactaaaatcaggaattaaaaaatattactacaaacctttcagaaattgaaaggttttaagggactgctataaccgactgtgtgccaaaacttagatraaatagacaaattcctataaagacacaaactaatgaaattgactcagtaagaaatagatgctttgaataggcttataaagagtaaagaaaatggaatattatttaaataacttcctatcaagaaaaaacaccttcagatagcttctaaaatcattctgtgaggtgaatattacctatataccaaaaccagataaagacatcagaagaaaaaaaaatttcaatagactatcccttataaatatagacacaaaaaatatttaaaaagaagtaaatcaaacccagttatgtattgatatgctttggctgtgttcccacccaaatgtcatcttgaactgtagctcccataatccccgtgtgtcatgggaggggactggtgagaggtaattgaatcatggtggtgtttttttcccatgctgtttttgtgataggga

SEQ ID NO: 365394 - DNA, 579 bp, Homo sapiens
aacaaaactgacagacttttgctggagtaagtgaaatagaagaaataaattactaaaatcaggaattaaaaaatattactacaaacctttcagaaattgaaaggttttaagggactgctataaccgactgtgtgccaaaacttagatgaaatagacaaattcctataaagacacaaactaatgaaattgactcagtaagaaatagatgctttgaataggcttataawgagtaaagaaaatggaatattatttaaataacttcctatcaagaaaaaacaccttcagatagcttctaaaatcattctgtgaggtgaatattacctatataccaaaaccagataaagacatcagaagaaaaaaaaatttcaatagactatcccttataaatatagacacaaaaaatatttaaaaagaagtaaatcaaacccagttatgtattgatatgctttggctgtgttcccacccaaatgtcatcttgaactgtagctcccataatccccgtgtgtcatgggaggggactggtgagaggtaattgaatcatggtggtgtttttttcccatgctgtttttgtgataggga

SEQ ID NO: 365395 - DNA, 632 bp, Homo sapiens
ttttaatatttaaaaactgaatgcttcctaagattgagaaaaaaatgaggatgtctagtcttgtcatttttatttaatattgcaattgattctagttagagcactatgcaagagaaagaatttaaaaacatccagagtgcaaagcaagaaataaartatttttgcttgcagttgacatagtcttgcatgtaacaaatccttaaacacatcctagaaaatatcagaactaataaacacatctggcaagtttgcaagagaaaacatggatatacaaaaatcaattgtagttttatatatgagtaactaacaatctgaaaataaaagcaagaaagcctttttatttaaaatagcataataaaggatatatttagtaaatttaacaaaccagataaagatttatacattgaaaactactaagcatgctgaataaaattaaaaagtctaaataaatagaaatacattcattgtttatgaattggaaaatttaatgttgttaagatggcagtaccaaccaagttgatctatagattcaatgcaatccttaataagtcctagcaggatttttcacagaaattggcaagctgatcctaaaattcatatggaaatgcaagggaaacagaatagtcaaaaca

SEQ ID NO: 365396 - DNA, 596 bp, Homo sapiens
aagaaaatgatgaactcagaaattctatctccccacttgagaagcagataccaagcctcaaatatgctaagattgccctgagtgagagtcttatctcctgtagagaaagagctgaaattgtggaaaaacagacacaagctcttagtgtgagagtggctgacctgcaacaaaaggtgcatgcacagccttaccagttgtctactgttaaagtgagggcattgattgaaaaagaatggaaccctgcaacttggaatggggatgtgtggaaagaccctgatgaagctggggatgctgagtttgtaaactctgatgaacctttttttgtcagaagaaacagtttcctcatccccagcagtggcaacaactcctccccaacccatgctgccatcagccttccctgcactgcctgaggaatcatggtgacctcccctgaggcagttgcccagaaagataatgttgattctcctcaggagccatccccaacaytcctgtttgcttctagacctataactagactaaagttctggcgggaccctagaggtgatattgagagtgtgactcatgaggaggtgggctacacttgaaaagaactgctt

SEQ ID NO: 365397 - DNA, 540 bp, Homo sapiens
caaacacttctgttctcttacttctgataggagcagaattcacatgtcatctacactttctctagaattcctctgagtgattttamttgacacctcacccttggaaaagaaaggtttcctttccttcctggtcccactttctcactctcatgtcaatattttttcctggaaatatcttctaataagtcagttgcacacaaatcagttgcactcatttcaatatttgtttcttgggaacctgaccaaaaatgcatgaatattgacttctacattttaattattgattttattcagtaccagattttcccttaacatttgtatttatataatataattctcgatagaagtctcagtcttgtcatctattttcatgaatgtattaatcatgactattttaacatttatttctgaaaaatctggtatctagtacacatgtggatctctttctattaccattttttctctttacactaatttttataatcatagataatattttcttaatttatgaacaatgcacataaaaattatcacctgtca

SEQ ID NO: 365398 - DNA, 645 bp, Homo sapiens
gatgtcaataattatgacaattttactttttgaggtttcaaatcatcttactgctcaattactgaatgcctcaagaaaattttcaataaggcacatgatttttctaccgtctgtgtgctttcataactgaacartcatctctgtgtcctacagaagtggacaaattagctagacaaacctacatagattttattttaaggttaatgtttgagagaagtttgaagtccagttggcttttgtaatccacatggaatgtttttgttttggcttgttaccatattttagcctgaatgttcctgccatcttttaaatccataacattcagaaatgtgtcctgcttggatctaggtactgatttcatttcattaatttttcttaatacacagtgaactgtggtgggatgcaagctcagggctagcacttgaatgttactctttcctaatttctaagctcaggtatatttctacactattttagcttttcatagtgatcacaagtgaggtggcaaaagggcatagatgtttctgagtttgtcaggatcttatccataaatatggaagtctttaattttcctaagttagtgccagtcaggctttgctaactattaatcatctaaaggttaaaggtatttatagaaaaaatgga

SEQ ID NO: 365399 - DNA, 612 bp, Homo sapiens
gaactagtaaaaaaaaggtaacgtatagtgaaaagacagaatgggagagagtttggcagcaattatcaaaggtatacttcccttaatatatcttgttttatatatttaaatttgcaaatacataattacattacataatttaaagagaaaaatattttttaaaaagcaaagccattcctaaaattaaagcaagctgtaacatattagcctaattatatatcaaattattgacataaccttacaaaaattatttcatgggatgaattttgaaaaacacagtatttaggctgaacttccctactgggaattattctaaaaacaaaataaccacaaagatacctacaatttatttatttatctcaatcagaatagtcatattggtgttaytttgaacctcagagagagttagttttataagatctaaaaattattttgttgatagtactcaacatgatgacacttgaatagttgaaaggcagaagtccctgttacttactgggccaaaagagagaactccctatgcagtgccgcacagggagttagctcaggataggctaagagcaagctgaatctgtagtgggcagcttgtgtatggcaagagagatgaggtta

SEQ ID NO: 365400 - DNA, 516 bp, Homo sapiens
cctaccctcagagagacccatcaggagacatgcctgtctgtgtccccagagtgaaacctgcagaatttggtccaacaacagattttaaacaggtcctgttacctggttctagctactctgtgccatggccccagtgtagtcctgtcttcctggaacccattagaagccacatccatctgtgtcccagtaggcagacacaccaactgcagtcaggctgtaggtcttcaactggccctgtaacctggatacaggtgttttcagctgtggttcaggaacatttctgcctacacagggacccagaaggaagcatgcacgtttgtgccatctgaggcagatctgcagaacttggtcttcggtgtggaccctgaagcagctcagtgactttattccagaactgctcagccatggtccaggggtagtccttcctgcccaagaacccctcagctccrtcctcattcaaatgtgatacaagagataaccccatcaatgcaaagagccaaaagaagaactagaaga

SEQ ID NO: 365401 - DNA, 511 bp, Homo sapiens
acagattttaaacaggtcctgttacctggttctagctactctgtgccatggccccagtgtagtcctgtcttcctggaacccattagaagccacatccatctgtgtcccagtaggcagacacaccaactgcagtcaggctgtaggtcttcaactggccctgtaacctggatacaggtgttttcagctgtggttcaggaacatttctgcctacacagggacccagaaggaagcatgcacgtttgtgccatctgaggcagatctgcagaacttggtcttcggtgtggaccctgaagcagctcagtgactttattccagaactgctcagccatggtccaggggtagtccttcctgcccaagaacccctcagctccgtcctcattcaaatgtgatacaagagataaccccatcaatgcaaagagccaaaagaagaactagaagaacttttttaccttcccaarccagtctgtaaaaactggaagaggtatttgcactttcaaatgcacagacacca

SEQ ID NO: 365402 - DNA, 541 bp, Homo sapiens
taggtaatcttgaaggcagtctaggacataaggactgaaattcctaggcgactcctagtgctgggatgggctaagagccagyagaccagagtgacacataacataggaagacatcagctgttgcagctaagggagtgcttgcattagccatgccccaaccccaggcagtgctgcttgcagcaacaaaagtgactcctttcatctgcttaaagggaggagagcaaagagtaaagaaggtgttgtcctgcatcttgaataccagctcaggcacagcagtatagggcactaggaagaatcatgaggttcccattccaggtccttgttcctggacatttctaggctcaccctgtgccaaaagggaacctattgccttgaagggaaagaaccattcctgtcaaaattaatcacctgctgactaaagaacccttgggccttgaataaccagcagtggtacccaaggtgtacactgtgggccttgggctctgagatgtgatggcttcaggagtgacccaacacattcccagctcttgtggctatggtg

SEQ ID NO: 365403 - DNA, 541 bp, Homo sapiens
taggtaatcttgaaggcagtctaggacataaggactgaaattcctaggcgactcctagtgctgggatgggctaagagccagcagaccagagtgacacataacataggaagacatcagctgttgcagctaagggagtgcttgcattagccatgccccaaccccaggcagtgctgcttgcagcaacaaaagtgactcctttcatctgcttaaagggaggagagcaaagagtaaagaaggtrttgtcctgcatcttgaataccagctcaggcacagcagtatagggcactaggaagaatcatgaggttcccattccaggtccttgttcctggacatttctaggctcaccctgtgccaaaagggaacctattgccttgaagggaaagaaccattcctgtcaaaattaatcacctgctgactaaagaacccttgggccttgaataaccagcagtggtacccaaggtgtacactgtgggccttgggctctgagatgtgatggcttcaggagtgacccaacacattcccagctcttgtggctatggtg

SEQ ID NO: 365404 - DNA, 574 bp, Homo sapiens
atgctaggagggaggatattgagagtgaaggggtttgagccaagctgcagccacctgaggaaagccgtctgaggaggagraggagcatggctgggtaatcagaggcctgggtagagtgtggggtggcaggcagaagaagtcagatttaccattcattttcatattcctcgcaatgttttggaagggaaacttggtaaaaggtaagactttacaaagttaaacagactgggagttcaaacatcataattgaatattaattttatagccccaggctggtaaggctaagattttaaggttttaaaacgttttaaaaggggtatttttaatttccagaagcagaagagtttttttctttttttccttttgccccaatggcccaccccaccataaccaccaaagcagtcctgcccttattttttttttcctactgcccccttccagttttttttcctctatatcccttccccatcccccctcttcagcccttttggctatgcttttttttttttttttttttttttttcagtccccacttactgacactgatggtgattctgaacttagaagaaagaaa

SEQ ID NO: 365405 - DNA, 539 bp, Homo sapiens
gatttattctctgtttgcatataaggattaataaacccttgagagtttttggctattttaaggkatttgtcttctagcgcactgttgaaaaaaaaaaaaatccctcaactaaagctagttgtttcttcatcagctctttagctctttgcttgttacatatatccatcaattttctctttcactgtcccttacattgtgctggtgcacatgtgtgaatgaataatattttgacctattaatttttatttcttgctctctatatttttcctatctcccccttccccattcaaacagataactgatgttctgcccgttcctccctgtggcagagaggacattagacatagactggaaagactgcctaaacttttattctcaaagctgaaggatcagaatgggagaaaactttggggtagaacactatgtctgggagaagcacatagggatgcatcaaacccgctgggggccctctcatctatagatctccctgtgctgggagaaagggaaaataggaatctgaagttactgagctctggaaa

SEQ ID NO: 365406 - DNA, 539 bp, Homo sapiens
gatttattctctgtttgcatataaggattaataaacccttgagagtttttggctattttaagggatttgtcttctagcgcactgttgaaaaaaaaaaaaatccctcaactaaagctagttgtttcttcatcagctctttagctctttgcttgttacatatatccatcaattttctctttcactgtcccttacattgtgctggtgcacatgtgtgaatgaataatattttgacctattaatttttatttcttgctctctatatttttcctatcycccccttccccattcaaacagataactgatgttctgcccgttcctccctgtggcagagaggacattagacatagactggaaagactgcctaaacttttattctcaaagctgaaggatcagaatgggagaaaactttggggtagaacactatgtctgggagaagcacatagggatgcatcaaacccgctgggggccctctcatctatagatctccctgtgctgggagaaagggaaaataggaatctgaagttactgagctctggaaa

SEQ ID NO: 365407 - DNA, 539 bp, Homo sapiens
gatttattctctgtttgcatataaggattaataaacccttgagagtttttggctattttaagggatttgtcttctagcgcactgttgaaaaaaaaaaaaatccctcaactaaagctagttgtttcttcatcagctctttagctctttgcttgttacatatatccatcaattttctctttcactgtcccttacattgtgctggtgcacatgtgtgaatgaataatattttgacctattaatttttatttcttgctctctatatttttcctatctcccscttccccattcaaacagataactgatgttctgcccgttcctccctgtggcagagaggacattagacatagactggaaagactgcctaaacttttattctcaaagctgaaggatcagaatgggagaaaactttggggtagaacactatgtctgggagaagcacatagggatgcatcaaacccgctgggggccctctcatctatagatctccctgtgctgggagaaagggaaaataggaatctgaagttactgagctctggaaa

SEQ ID NO: 365408 - DNA, 539 bp, Homo sapiens
gatttattctctgtttgcatataaggattaataaacccttgagagtttttggctattttaagggatttgtcttctagcgcactgttgaaaaaaaaaaaaatccctcaactaaagctagttgtttcttcatcagctctttagctctttgcttgttacatatatccatcaattttctctttcactgtcccttacattgtgctggtgcacatgtgtgaatgaataatattttgacctattaatttttatttcttgctctctatatttttcctatctcccccttccccattcaaacagataactgatgttctgcccgttcctccctgtggcagagaggacattagacatagactggaaagactgcctaaacttttattctcaaagctgaaggatcagaatgggagaaaactttggggtrgaacactatgtctgggagaagcacatagggatgcatcaaacccgctgggggccctctcatctatagatctccctgtgctgggagaaagggaaaataggaatctgaagttactgagctctggaaa

SEQ ID NO: 365409 - DNA, 479 bp, Homo sapiens
agacagaggcattatggctttagcagagtttacaaatgaacttaactaggaaggaagaaagtggatttaaaaacaaaattagaaggtaggggcaggaagtatgggagaaactaaaatgctcaaaatgatttccaattttgtttaacatctttccctagtagaagggaactctgtgatcacaattcatgctttgcttgttaattgtgggattaatgagaaaaagcatmtaatggcttacatataggaataagaatctatttccatataacctacttatctatagacattaattcactcaacaaacatgtattaagttcctactctatcaagcattatgccagatgccagagaaactaggatgaatagtcacagttcttgttaagaaacaaatagtttctttgaccttcatgtacttatttctgcattgattcttcctctcattttcacatgtttctcaagcacttaccatgcaccaaaca

SEQ ID NO: 365410 - DNA, 496 bp, Homo sapiens
ataaaatggaataaaaataacatgtttctctgacccatttaatctaaatatctacttataaattacaccacaccatatttcgccaaatttagatgtttaagatataaccccaaatagccctagtttccatcattctaaatgaatatttcataaatcaataaatataattatttattaaatttttattaagtggctacatgtcacagcttgtgctaagccctggaaataagagataagcacaaacaataatgacgtctgtccgcatggagcttatgatcccattgagcagatagatatcatatattatagcataatcaaacctaaaagttaatttatgatagctgctacaaacgagagctatagggtgctctaagagtatattaataatgagatttgacctggtcaaggtctgggactgttttccagaagtgacactagagcctctctaaagaatgaataaaagttcccccaaasaaaaaaaaaagattttttaaaa

SEQ ID NO: 365411 - DNA, 530 bp, Homo sapiens
tggtaaacaaacatatatcataaaatttatgtgtttaaccatttttaagtttacaggttagtagcatttcagtatcattaagttgatatgaaacatatctccagaattttctcatcttgtagaaccaaaaccctatagccattaaacaaaaaattcccttgttcctttcttcctattcctgctgatcactgatatgcttcctatttatatgaatttgactacattatatatttcatataagtgaattatttcacttagcatagtatcctcaagtttattcacgttgtagcatgtgacaggattcccttcctttttaagattgcacaatagtccattgtatgtgtatgtgtrtgtgtgtgtgtgtgtgtgtgtgtgtgtgtatatatatatatatatatatgtctcacattttttaatctatgtatatatcagtggagatttgagttgccttaacctcttggttattatgaattgtgctcctacaattatgggtaggcaaagacattgcttccattttggggggatgtata

SEQ ID NO: 365412 - DNA, 534 bp, Homo sapiens
ataaaatagtccttaaagatgcttctctataagaaatacattttccatgcatacaaaatagcccactttaaatatgattcagtagtcatctgggcccctcagtttagcccaaactgacctcttagtattaagatgtattatgtgatgatagagctattcttttgattttgacagaaataataatttaaagcagcatttctcttcccgtcagtttaggtgagttgaactgctgtgctgagagggagaaactaggagaggtggcccacgagatttttattgatacgctttcctgacatcctcatacaaaaatatgcaaaacaacagaatcctacagcagttataacattgattggaaatattagaagtttcactgctctcagaagatttttgtaggggaaggtgagcaatatagcacsatatttgctataaaacttatttgttgccccaaattctttgacagcttaaaatttttttctcaaagttcagcagtagcaatctcatgattgcttttgtttttccaacatgtcctcaaaa

SEQ ID NO: 365413 - DNA, 601 bp, Homo sapiens
ttatttaaaaacagacagtaggcagcaaacaaggaagagtttgcaaactatatcttaaaggacattttgtatctggctcgtcatttcttgctttctatttggggggctctgttgattgtacatggctaccttgcaggggaatgcagattaagaatggggaaggtgcagaacagagctaatcagaggttttgaaaataagtcagaatgagattgcaactaaggtgatcataggattctgggactataagatatatgaatgccatatgttccatgttgattttcaactttgtggaaccatgggaatgattataagagggtaaggaccaatgcccaatttgaaacaagaactattttctcaagacagaaatcttgtagytaaaaatcactaaaaactaaaccagctctggaccacccctccctgagtcacgacttcaggaagtccttacttaaaaggcagcctatttttttaaagcatattattacatgttttcttaaaacatgtttcatttcttatttataaaataataagagaatttgcaaattcagtaatacaactttctggagaactttgtccccaaactttttgtgtgttctgatgatc

SEQ ID NO: 365414 - DNA, 316 bp, Homo sapiens
tgggtatggtggtgtgcgcctgtagtcccagctaattgggaggytgaggcaggaggattgcttgaacctgggagatggaggttacagtgagccgagatcgcactccagcctgtcaatggagtgagactctgtctcaaaaaaaaaaaaaaaaaaaaaaaaaaaaatggagcaatctagacgtgtctctgtcccctcctacactctcagttttgaataagattttaatcattatgttttacagcttagttttctttgaattaattttgaatatatgtttcaaatgtatgcagaatacttcatcatgtaaatattccat

SEQ ID NO: 365415 - DNA, 491 bp, Homo sapiens
ggtgaaatcacatcacttggaaatattttgatgcmtggaatgataatgcttcatctcgtggagtggaaaaaaagtatataactaaatttgatatttgacattttaaaggtaacttgcaacttaacaagaaaagtgatgattgggtaaactaaaataatatattcagcctctgagttacacagtcaaacccctgacatagaggacaaggctgagaaaggcattcttttaaaaatttttaactcatcaggccataggctatttcacaggtttctaaataaaatgattaaggggaaagttgttttttttttttcctattttttaacctatatagaaataagagtgctagtactgtttttatcgttgataatttgtggtattgtgtttttatagaaggaaatttaatgtgatatttttgtaatgcatcaaattgattttcatactttaatttccattaatccattaaatttcagaaccattaggaataagtaaaa

SEQ ID NO: 365416 - DNA, 548 bp, Homo sapiens
actaacagagcaagaattcactcacctctgaaggagggcattaatctattcatgaaggatccaccctcataatccaaactcctcccactaggtcctacctcctaacattgccatattgcggatcaaatgtcaacatgatatttggaggggacaaacatccaaaccatagcagtctgtaaagacaacttctctcctttagactgtcctagtgctgtggtaaaagagaaggtaattttggaccctggctgccttgatttgaacaccacttctttccmtaaaatctagtgaccctaggcaaataacttagtctcactgtacttcaactctcttattggtaaaatgggaaaaataattaataatggctttgttaggattaaattagttagtgtatacaaaaataatgtgacacatattattcaagtgtatgctgttaccactatactatatggtattttccactatatgctattttctccccaattctaaccctcatttcccagaaagaaaaaaatacttaaagggaaaattgtttgcataaatttctgaat

SEQ ID NO: 365417 - DNA, 611 bp, Homo sapiens
cccttggaagatggtggaatctgatactggagggaaactctgctttgcttcctggatcgagtcccaggagagttggtgagatgccagaaataatatggcagtacagagtactgagataaggggaacccaaaagaacctcacggccttcctttgaccaatgtggtaaaagagtaacgtttacatggctatcaaggaccagatccagaagaaccctcaaagatggaattgaaaactgactcagcatggacaacggatatgcaaactctatgaatgagagacatgtgacaatgctgagagtaagaagtccttgctcacagccctggaaatcctacaaccatcacacagtcttccctaaaggtctagaaaagcttctgagaatttatacctagtccatggaggaaggtggagaaaaatgaggagtcaactgagtttaaacctagrtaagaccatagattaaaacttaagctagcctcttgaaaaataaataatgctatatttgctacccatctgaggagttaggttgcaatccataccagatacatatataagaattaatttttaaataatcacatttctgtagaatgcaccgtatcattatttagatgatattt

SEQ ID NO: 365418 - DNA, 590 bp, Homo sapiens
caacaaacccaaccatcctacaaatgtatgctcagaatctacaaagagcaagacactgtgctgagtgctggcaagtgttaaggttgagggagccaggctctaatttcaaggaggactaagtagaatgggattcttccctgaaagaacatacaacacacagcaagtaaaaaagaaggcaaactgtttcacactctgtaactaaaatattaacaaaatactaaatgagaatcaatacaaaaccaaacaaaaaaaaagtccagacattttatctacattcaccattagtcccaaatttcctggaactaaaagaatgttgaaaactcttgacacttaaaaaaaaaatcttatttataactcacttgaaggtaggaaggaaagaatcagaaagacatccacgatatttggaaagcaagaagcagggatattggaaacacataaataatgaytggaaaagtataactgagtcctagggagtgctggattcccaataaatgtctgttcaactactcagtgaacagatcaaccctagagtagataatcaaggcaaagataagtgtggaagaaaaagacaggtaagatacaaggcagat

SEQ ID NO: 365419 - DNA, 495 bp, Homo sapiens
tgattataatagcttttatttgttattgttctaataatcattaaggctttgactttaagaaaaatgttatttctttttcatataaaattctckcatgaattttcttttggaatattggcatcttcttttgtcctaattcactcccttaagtcagggcattagatgcagaataatcatcaaaccaagattcacggtggctggggcctttcatgtggctcctctaagcggctttaaccatgagtctgatttagacaagtggacatggggaattggcttggaagagggactgcaggtggtggaatcatatcaaggaaggtccatgagtagcagagcataaagaatatacagagaactgagaagcagtaaaggctaatgttgcaagtggtgggccatctagagagagctaatacaggatgagactggaagatggtttggattttttgatggccagccttaaagactaagatgtctggactttacacaataagacctaag

SEQ ID NO: 365420 - DNA, 609 bp, Homo sapiens
tatactactgtgaattttgacagacgcataaccactattatactcaagatacagaacagttccatcaacccaaaatatttgcttgtgactcttttccttgcccccacccctggcaaccactatctgttctccagccatataattttgccttttatagaatgttgtataaatgaaatmatctaataggtagccttttgagcctgtattcttttacacagcaaaattcatttgagattgatatacattgtgtgtgtcaatagtttgttcctcattatttgtaggtagaattatattttatgggtgtaccataggttgcttatctgctcaccagttacagggcatttaggttgtttctagtttgagtgattatgaattaaaaccaatataattatccacttacaggttttattgtgaataaaattttcatttctcttaggtaaataccgagtagtgggattgctaaactgcattataagtgtagacttaactttacaagaaattgccatagtatttttcaaagtggctaaacaatcatattttttaaacgagtttgttatcttaggaaaatgattgaaaaaaattattgccaaaactgtctattaatggtaa

SEQ ID NO: 365421 - DNA, 609 bp, Homo sapiens
tatactactgtgaattttgacagacgcataaccactattatactcaagatacagaacagttccatcaacccaaaatatttgcttgtgactcttttccttgcccccacccctggcaaccactatctgttctccagccatataattttgccttttatagaatgttgtataaatgaaataatctaataggtagccttttgagcctgtattcttttacacagcaaaattcatttgagattgatatacattgtgtgtgtcaatagtttgttcctcattatttgtaggtagaattatattttatgggtgtaccataggttgcttatctgctcaccagttacagggcatttaggttgtttctagtttgagtgattatgaattaaaaccaatataattatccacttacaggttttattgtgaataaaattttcatttctcttaggtaaataccgagtagtgggattgctaaaytgcattataagtgtagacttaactttacaagaaattgccatagtatttttcaaagtggctaaacaatcatattttttaaacgagtttgttatcttaggaaaatgattgaaaaaaattattgccaaaactgtctattaatggtaa

SEQ ID NO: 365422 - DNA, 586 bp, Homo sapiens
catgcctagcagaaacggcttccatactcctcactacactctcctacacaatattcaaaagagaatcccaaggacttagctgtgtctcagctctgcatttgaactccattcatgtacatgtggagaacagctagtgttttacaaagggcagaggtggttacattgaaagtccttggcattatcacaaatccctatgtttgtattcttttttatgggatccacaagattttatctattgcattcttttttacctaatgcctttgttgtcagggttggaacattgttgaattccggcaaacaatgggaatgaattggttttatacaaacaactttgtgtgtgtgtgtgtgtgtgtgtgtgtgtgtgtgtgtgtgtgtgtgygcgcatgcatgcatgtttcccaaagaccagaaaagcaaaggagactattaaaatcttaaagcatatctgtgggttactaggcctacctgggtctttatttactgtgttccactggattactgactagaaacacctgttgtaagaggaggagtacacgtggctggtgcatgaaccttggtaagtcatagtaaagcaagagtgtaaata

SEQ ID NO: 365423 - DNA, 590 bp, Homo sapiens
ttttctttgatttacttgttatcttcctggtcatgtagttagtctgttaaagtcactctgcctgtatagcttgttgaaggttacaggcagtggagtgctggaactggyttatgtcgagacctcttcccaattccatgttcaatgatgtctttgttgatagcttaaaattggctatggtgagagcgtttacactttggaaattggcagatggcaaccatagttctctcctagacaaccacttattaaacctttagcagcactcactgtttatagtgttctttttcgttttttaaaaatacttttattatgaggaatagccatgtagaattttatttccagatattttgttgtttaaaaccctaagaacatcactcactataccaattgccaactgagtaactgggaaagttacttagcttttctgtgcccaaatgtccttatctgtaagacggggatgataataatagcacgtaccttgggattgatgtgaggttgaataagaaacacatttatttcagtgaatacataatgacctggaatgaatactcaaataatgctacctgttatctctctgtactttaattaataga

SEQ ID NO: 365424 - DNA, 597 bp, Homo sapiens
ttggttgttctgcagacaaataatacagaagaattagatgatcaaggaatccgatctgaacacaatttaataatttggaaggtacacttttgaaggctttattggaactgggaagaaaatggaattcttttattttttgcagctcagaattttagtggtctgtagtctgttgtttcaatgataacttcagatgtgtagatmtattttattcaaattacagtgaagcatggttagctaaattcttagagcaggtggctgcgtatagagtagtttgctggcaaaagatcagggttcagtgacaagccagccagctagctaagaaaaattactacatactttaacttttaagaacagaattggatttaatatggacattacccatctaagcatcattcaaccatacatccatccatcctcctatcattctgttctcccctttcctttcctctctttatccttttttccttcctcccttcctctgtccttcagttttccatccatctattcatccccccatttatctatccacccatctttccatttattcagtcaataaacattgattgtatgccacatggtataccagtatttatgtga

SEQ ID NO: 365425 - DNA, 545 bp, Homo sapiens
tttttctgcctgtccaattgcacaaataattttggctcccaagctctctcctgacaaccatggaaacatgacatgaaatttctcaaacacactttctgatgaaagcaaggcatgctcttttttatttaaagaaaacagtttccatggggaggaagaagaagaattaaaaaaaaaaacaaacctttgtagatgccaagcacattagttgttaaatcttgtttctttcttttcctttcagttgaggtgggatttacacccagatttgagcagtggaagaaagctgggattggggaagagatgaaagagactgggggatgagggctgaaaatcaaagtcaagacaggagagagaaatctgggggtgggcaggaggggaaagcaggccagaagggaggagtgggagaggaagaaggagagagactaaaaagaacctattttgcaatgtcattaaatgatttgcaatgaattggcctgaggcttcaggaatttcttggcttgaaccaattaaaaatayttcatttttaaaaaagacataagagaacgaga

SEQ ID NO: 365426 - DNA, 538 bp, Homo sapiens
ttgcaacaacctggatggaactggaggttattaagttaagtgaaaaaagccaggtacagaaagacaaacatcacatggtctcccttacttgtgagctaacaattaaaacaactgaactcatagagatggcgagtagaatgatggtcaacagcagcttagaagggtggtgggtgtggcggggggtggggtgcaaattggggatggtatatgagtaagaaaaaatacatagaatgaataagatatagtatttattagcacaaccgggagattatagtcaataataacttattgcacatgtcaaaataactaaaagagtatgagtggattgtttgtaacacaaaggataaatgcttgaggtgayggatatcccatttaccctcatatgattattatgcattatatgccttatcaaaatatctcatgtaccccataaatacatatatctaccatgtatccacaaaaattacaaataataataataaagaccagaataactctcaagattctggctttagtgacagggaaaatgaagtccaag

SEQ ID NO: 365427 - DNA, 574 bp, Homo sapiens
tctcacattatgcttctgtggcttctggggccatttgtcacaatggtaattttttgttgaatctctattctttccacttgactgtaaacttcgttgctgttcatgatttcccctagcacagttctggcacatggagagccctcaataaattactgctgaatgaatgaatgaattagacaaaacaaaacacatagatccttgccccaccatacaaactaaactttgaggcatagaaatgtacaaagatgtaaatactactaatctttcaatggtggcaacaagagcactttttttttgaaatggagtctcgctctgtcgccaggctggagtgcagtggcgcgatctcagctcactgcaacctccccctcccaggttcaagtgatttcccctgcctcagcctcstgagtagctggggctacaggcgcacgccaccacgactggcaattttttttttaaatgtattttagtagagacggggtttcaccatgttggccaggatggtcttgatctcctgacctcgtgatccacccgccttggcctcccaaagtgctgggattacaggcatgagccactg

SEQ ID NO: 365428 - DNA, 574 bp, Homo sapiens
tctcacattatgcttctgtggcttctggggccatttgtcacaatggtaattttttgttgaatctctattctttccacttgactgtaaacttcgttgctgttcatgatttcccctagcacagttctggcacatggagagccctcaataaattactgctgaatgaatgaatgaattagacaaaacaaaacacatagatccttgccccaccatacaaactaaactttgaggcatagaaatgtacaaagatgtaaatactactaatctttcaatggtggcaacaagagcactttttttttgaaatggagtctcgctctgtcgccaggctggagtgcagtggcgcgatctcagctcactgcaacctccccctcccaggttcaagtgatttcccctgcctcagcctcgtgagtagctggggctacaggcgcacgccaccacgactggcaattttttttttwaatgtattttagtagagacggggtttcaccatgttggccaggatggtcttgatctcctgacctcgtgatccacccgccttggcctcccaaagtgctgggattacaggcatgagccactg

SEQ ID NO: 365429 - DNA, 594 bp, Homo sapiens
ggtgagtttataaggggaattctggacacacacaagagataccagggatgcggagcacagaggaaaagccgtgtgaggccacagcaagaaggcggctgtctgagagccaaggagagaggcctcaggagaagccaaacctgccaatggcttgatctgggacttacagcctccagaactgtaagaaagtacatttctgctgcttaagccactcagtttgtggtattttgttatggcagccctagcacaaatacacctcccaaggcccttgtctctccattcctgaaagtgtgcatgtgacaccatcaacaaggcaacctggggaggggaggtgctggtgggcctgggttctgttgcacttcttggggaggagcatgacaacagcagtgccagcgtaggtgcagagaggcagraggtggggccatgctgcagatgggaggggcaagcaggacccaggatggctctgaagctggagttggagcaatgagcaagatattttcttctctcttaccagtggtagccaagttttgtcaaatgggaccctatttagattttggaatcagactagttacgtgaactttccattatgtattatgc

SEQ ID NO: 365430 - DNA, 487 bp, Homo sapiens
gtgggcagcaagaagcctgctgggtgtgtcaaaatcagaagaaaaactttcagctgagaaaagcagtcctggttcctctctgggtatccagataggattggtaacaaataaaggagagagaggggtgaggggaccacaggatcctccagatgcttctgtttcaccttccccccatcttgtttagccaccacaccagccagcaccctggaaagagccagggctggcttagaaaccttacgtagagaacactggggtagtgagtcaccactgactttgaagggccatcaaaggtgacagytgggaggtgatgtggtctttctacacagccatgcacagcagcttcctgccaaaggagggagagacacgaatcacacccgcagggcttgctggcccagggagggggatggccaggatgatgccacatttatatatgaccagggccctgtgagaaggggttcttcaattcaataaaatggcagcatcatgg

SEQ ID NO: 365431 - DNA, 599 bp, Homo sapiens
  misc_feature (1)...(599): n = A,T,C or G
tgatctcaattcttctctgtccagatgaatcaggtctgctgcaatgtaactttacagtgtcccctcacccagactctagccatgtgacttgctttggctaatgaaatattaatggacatgatgcaaacagaggcrtgaataagcaattttgcatttctgcttgtcctcttcttgcactcttccgtcatcatgagaacatgcctgggtgagaatgctgtaggatgagagacttgaagcagagcctagctattccagtcatccagctgagggcatcctagaccagccaatctttagacatgtggccgagtctagcctagatcagcagagccacctaggcacctacctcagaggtatgactggtaaacacttattgttgcatgccattaaggttttgtggttgcttattatgcagcattattgtggcgatagataactaatacaaaaatatgaaacccaagaatgaatggagtacttaaatcactgaaaggagtacaagcagtatcaattcccatttggttatcttatatatatcatatatatatatatatatatatatatatatatatatagnctggagacttctctgaacagtttaaaac

SEQ ID NO: 365432 - DNA, 186 bp, Homo sapiens
tatataacatagctgtatctatttatagatrccttcttccactacccatgacttattccttttgccctcagtaagcacctaagcttgccatggttctttgcttggtgggtgaccccaatcttcatttctgaaacctgggccattagcagttcttcctgaactcggttgtagttctccattgacttt

SEQ ID NO: 365433 - DNA, 495 bp, Homo sapiens
ttgcattcagaaaaagcaaatcctttttggtggggggaatrggaggaaagcaaatctgtgtccagagtaagtgtctattccagtaagaacaaaacactgcctcttccatgatggaaacagtcccgtgtagtcagcttaccactaaataagctggctgatcactctggggaattgtccctatcagagactcagtgttgatctttgcttctggccaactgaatgctcagcagaggctgcagccaggtcagccttggtgagtgtaagtccatgttgctgagcccatgcataacttcaattcctgccaccatggccactttgtccatgaatctgttgggagatgacaggagtgtctggagaaagaagctaactgactcacagagtggatcatccaaaccacttgattattaaaaatttcctctactgagttcaccctttggtgaacattcacgtgggacattcccctgcattcccttctctcttatgggatgttgctca

SEQ ID NO: 365434 - DNA, 527 bp, Homo sapiens
gccttctctgctcagccccaggtatccaccagctcaacagcaccaagggacccccactgatgccacttggaagagttacccagggcgggtgcagtggctcaygcctgtaatcccagcactgtgggaggctgaggtgggtggatcacctgaggttgggagttcaagaacagcctgaccaacatggagaaaccccgtctctactaaaaatacaagattagccgggtgtggtggcgcatgcctgtaatcccagctactcgggaggctgaggcaggagaattgcttgaaccagcaaggtgcaggttgtggtgagccaagatcccgccattgcactccagcctgggcaacaagagaaaaaccctgtctcaaaaaaataaagaaataaaaaaaaaggaaaaaaaaatagagttacccagccaagctctactcaactttctgggtcacaaaattataagatctaataaaatggttcttttaagcctctacattttggggcactttgttatgtagcaatagtcaaaacaagtaat

SEQ ID NO: 365435 - DNA, 527 bp, Homo sapiens
gccttctctgctcagccccaggtatccaccagctcaacagcaccaagggacccccactgatgccacttggaagagttacccagggcgggtgcagtggctcacgcctgtaatcccarcactgtgggaggctgaggtgggtggatcacctgaggttgggagttcaagaacagcctgaccaacatggagaaaccccgtctctactaaaaatacaagattagccgggtgtggtggcgcatgcctgtaatcccagctactcgggaggctgaggcaggagaattgcttgaaccagcaaggtgcaggttgtggtgagccaagatcccgccattgcactccagcctgggcaacaagagaaaaaccctgtctcaaaaaaataaagaaataaaaaaaaaggaaaaaaaaatagagttacccagccaagctctactcaactttctgggtcacaaaattataagatctaataaaatggttcttttaagcctctacattttggggcactttgttatgtagcaatagtcaaaacaagtaat

SEQ ID NO: 365436 - DNA, 527 bp, Homo sapiens
gccttctctgctcagccccaggtatccaccagctcaacagcaccaagggacccccactgatgccacttggaagagttacccagggcgggtgcagtggctcacgcctgtaatcccagcactgtgggaggctgaggtgggtggatcacctgaggttgggagttcaagaacagcctgaccaacatggagaaaccccgtctctactaaaaatacaagattagccgggtgtggtggcgcatgcctgtaatcccagctactcgggaggctgaggcaggagaattgcttgaaccagcaaggtgcaggttgtggtgagccragatcccgccattgcactccagcctgggcaacaagagaaaaaccctgtctcaaaaaaataaagaaataaaaaaaaaggaaaaaaaaatagagttacccagccaagctctactcaactttctgggtcacaaaattataagatctaataaaatggttcttttaagcctctacattttggggcactttgttatgtagcaatagtcaaaacaagtaat

SEQ ID NO: 365437 - DNA, 583 bp, Homo sapiens
cttttgttgaattgatccctttatcattatatataatgacccttgggtttttttaaggtgtgttttatctgatacaactatagctactcctgcttccttttggtttctgtttgtgtggaatatctttttccacccctttactttcagtatatatgtgtctaccaaaaagttgagttcctcgtaagcagcatgyagtttgatcttgtttttttaatccattatgtcagtctttatcttgtaagtggaacatttaatccacttacattcaaggttaatattgatatgtgacattttgttcctgtcatattgttaattgttatctagttgttttatcaattcttggctttttcttcctttgtctgttgtctttgtggtttggtggtattctgtcatgttgccatttgattccttcctcttcctcctttgtgtaattgttttatgaaacctgtgagtttttatattctcatgtggttttatgatggtgaataccaaccttttgtttccatctttagtactcctttgagcatttcttgtacaaaagaagagaggagatccaaataaacatactcagaaatgaaaatga

SEQ ID NO: 365438 - DNA, 552 bp, Homo sapiens
atgtaaacaaatgcctataatcaggctccttttttttttttttttttttttcctttttttagagatggggttttgctctgttgcccatgctggaatgtagtaacatgatcataactcactgcggcctccaactcctgggctcaagcaatcctcccgactcagcttcccgagtagctggggcaacagaagtgcaccaccacacccagctaattaaaaaaaaaattgtagagaagggtcttgctatgttgaccacactggtctcaaactcctggccttaagtaattctcccacctcggcctctcaaagtgctgggattacaggcattagccactgcrcctggcctaggtttctgtttttgccgtccctgataaatttgactgtagcatggagggataattctctgatcagaatcccacacaccattgccactgctggaaatctgaagagatgctgggtttgctaccctaaaccaaaaactacttttgaccacaatgacccactggtacattctgccctaaatttcaccagtgttcatgatagcacttgtaacac

SEQ ID NO: 365439 - DNA, 447 bp, Homo sapiens
atgcatgctggatttttctctccagtccttgaacagatacaaccttttctaaaaacctggctcagttctgcaccttcctgaacagtatcctagggaaatattggcaattaagtgccctgttttcatgggcctctaatttttctcagcgattcaaattttaatgcccatagggtttccaagctgaaggctgactggggactttactgaagtatttttctttgtccttacaaaggggggaagctactttagtttccatcatataaattcatatgactggccatgtggctgctttaatgaccattatctaagaccttgtggctgttttaatagccacatgccccagtgctcctctccttacagtcagagctgatttttgtaaagtgtgaatctggactctgtkttgccaggtcttcacaattttcattctggtttataatctaaaagttc

SEQ ID NO: 365440 - DNA, 583 bp, Homo sapiens
ttcatccagcaagcatttatcaaaactctagtagtgagctagttgctgagaaggtcacacgaagatcactggacagctgtctcttggaaataccatgggaaaataatggttttcagcactggcatgtcaaagtcataaattagcctaagtattcacaactttccaatggagtaggctaaggcatcatttatttatttatttatttttttacagccacacataagaagacaggtagagcagttaaaagtttgwtagcagcattgcactttgggtgacacgtggcctgggttcaaaatttgtcaagcaattcacaaggctggctgatttgggaagtaatctatacatggagtacatttgtgggtgatttttgagtctcttgacttttggttctggtgtctatgaaatgaaggcatgaaataagggtgtttactcttgtggagtttaatgggaccatgtgtgtgtgattagttaattgaaactgatgaggaaactaacaataaatacgcttagtagtctcacattgctgtcttcttacagattctcttatatttccctcttctgttgcttgatgagagattctcta

SEQ ID NO: 365441 - DNA, 583 bp, Homo sapiens
ttcatccagcaagcatttatcaaaactctagtagtgagctagttgctgagaaggtcacacgaagatcactggacagctgtctcttggaaataccatgggaaaataatggttttcagcactggcatgtcaaagtcataaattagcctaagtattcacaactttccaatggagtaggctaaggcatcatttatttatttatttatttttttacagccacacataagaagacaggtagagcagttaaaagtttgatagcagcattgcactttgggtgacacgtggcctgggttcaaaatttgtcaagcaattcacaaggctggctgatttgggaagtaatctatacatggagtacatttgtgggtgatttttgagtctcttgacttttggttctggtgtctatgaaatgaaggcatgaaataagggtgtttactcttgtggagtttaatgggaccatgtgtgtgtgaytagttaattgaaactgatgaggaaactaacaataaatacgcttagtagtctcacattgctgtcttcttacagattctcttatatttccctcttctgttgcttgatgagagattctcta

SEQ ID NO: 365442 - DNA, 568 bp, Homo sapiens
acactgtcgactttaaagtggtaactgtcattttcattatttcttaccctagcaacttcagcaaatgatattttctaagaagccatattgtagagctccccatgctgatattttgaagtctaggccaatggtgctacacttgctaagaaattacagaagctatggggggctctcaagcttcaccatttttaatgcatacttgccttcaagaatgccatttccatcaccactgtccctaytgaagctgtctcctgttgatatatgccaaaggtaaatagggttgtttacctgaagctgttaattaattagtttgatgttcactgggaacttactaaattccaggcacaggcatggctggttacaggagtaaataagacccagccccagctgtcactcccacctcttaccataggtttgtgaatgtgtactctaaagagggagctgcatttagaaggcaattctaagacagtgtgataagaattttgataaggggtaagcacggatgtgttggaaacagatcagaagggcagcagccattcttgatattaggggttttcccagggaggtg

SEQ ID NO: 365443 - DNA, 570 bp, Homo sapiens
ttacatttgtacttagcactagaaaggacatgaagtatgtgaatgatggtagatgcaattaccattataaagttgataatacttgagtcaatgctgaaatgcagtgtgacctttaggaaaatgttacgtgtgggcatggaagtattgtgacacttcttaggagagacggaagtgcatttcatattgagttatgattgcaatcaaatccacaagtgcccatcttttgcccttcccatttcaagattacttgataacttggatcatatgctgcaggccacacatctcwcttttctttaaaatatgttttgaatgtcagcacttgtatcttgactttgattactgtaattttattttgattttaaaaaaagccaaagctttgtttttctgatagtgaaggtaaaatttatagttacaatttcaaaaatccatattgtggctttaaacaatgatgagatatgttctcaaaacataatgcctcaaaaattagtctgatagtgaattccaaaatcttatgatttagggagacttagagagtctttgctaaagcccagattactgggctggaaaacc

SEQ ID NO: 365444 - DNA, 630 bp, Homo sapiens
cttaaaataacacaacattgaagtgtgcaatattgaatgacttcctttcacaaaaggttcctctataacatgcaatgctgtgtgatagaattttacccacagtagaacttctttcaaaattggagtcaatcctctccaacattgtcactgctttatcaactaagtttatgtaacattctaaatcacttgttataatttaaacaatgtccattgcataatttataagaagttaattccgtctaaaaaaatcacctcctttgctcacctataggaagcaattccttacccattcaagtttgatcatgaaattgcagcaaatagtcacatcttcagattctacttctagttctcttgctatttccatctcatctgtagttattttccccattgaaatcttgaaccctcaaagtcatctgtaagggttaggatgaacttcttccacattcctgttaatgttgatgttttgatttcctcccatgattcacacatattcttaatggcatstagaatggtgaagtctttttagaaggttttcaatttagttttcccagatccatcaaaggaatcactgtctatggcagctgtagccttataaagtgtatttcttaaataacaagacttgaaaattga

SEQ ID NO: 365445 - DNA, 580 bp, Homo sapiens
atctccttgtacatagtcatcggaattcttgggtgactaggtacactgttaataagcagtactattttgaaaggatcttttttttctgcaaagtatgtctcaacagtggactgttaaaatattcagtaaatcatattgtaaacagaggtactgttttccaggctttgttgttccatttatagaccataggcagtgtagatttagcatacttctgaagagctctagagttttcataatggtaaatgagcattggctttaacttaaagtcaccatctacattggcccctaacaaaagggtcagcctgtcctttgaagctttgaagtcagccattaacttgtctctagctatgaaagtcttagatgacgtcttcttccattagaaggctgttatgtttacataaaaaaaaatctgttgtttagtgtaactaccttcatcaatatcttagctagatcttctggataatttgctgcagcttctatatcagcttttgctacttcaccttgtacttttatgttatggagatgatttctttccctaamccttgtgaaaccaacctctgctcattttaaacttttcttc

SEQ ID NO: 365446 - DNA, 619 bp, Homo sapiens
tttgcagaatcttgtaaattaaatgcaaaaagcaatggtgcacttagaacagtgcctggcatatacaagaaattcaatatatatagactaataataatatttgaataaaccctataaatgcagtcaagaattccataggtaaaggtagcctctaagcatgtaaggcttacagatgagtccatttctgccttggatctgtattgccaaatgaaagttttcttgaaccatcttcctccccaagtactgttttgagaaggcccacactgctacatcaatttttgtttatgactgaacttaataagagaatgaggatcctgagtgacagctctctggcaggaatggctaggaggaatattttaagtatctccccaaactgagatacctcctagatagtccctcattgcagacagagtatcagtaagtcagagcatgctggaaaccactgagtaaatatagtacatcttccaggagcatttttttttttttttactggatggtaatttagaatataatttttaagttacatcaaacatggatgtaagttaaacaaaatgagaaatagcataacatttttaacttaaacasaaaacctcaaaagaaattcaggcctgtaggaggc

SEQ ID NO: 365447 - DNA, 584 bp, Homo sapiens
ggatggtgtgggatcagtggattaaaagggtttacaaggagtgtcagagtaatacaaatggaataattaaactctcatgtctatggatacacatttaaatgataaaactataaaaaataaagagaaaacaattactrtgcagtcgggataacttattggatatttggggaaggaaagtggtgattgaaatggagcatatggatggagcttccagggcaggtgggaaaatttctgttttcttaaacctgggaatggatacaagggtgtctgccatagaaaaatttactaaaccttgtgtttattttgtgatttctatacctgtgttttattttgcaagtgttaaagaacttttttaaatggtaaaattatgactttcatagaggtataaaataaaggtgtcaaaaattttattgacattcattaattagacaagcaggaaagctgttacaactggttcaaaggagaaatcaaagaagcacacacttatatggaataagggaatattgaaatagatttataaatggtttgaaaaactgccttccacagtggaggagggaaatcaattacaattctaccaggcaaaa

SEQ ID NO: 365448 - DNA, 584 bp, Homo sapiens
ggatggtgtgggatcagtggattaaaagggtttacaaggagtgtcagagtaatacaaatggaataattaaactctcatgtctatggatacacatttaaatgataaaactataaaaaataaagagaaaacaattactgtgcagtcgggataacttattggatatttggggaaggaaagtggtgattgaaatggagcatatggatggagcttccagggcaggtgggaaaatttctgttttcttaaacctgggaatggatacaagggtgtctgccatagaaaaatttactaaaccttgtgtttatttwgtgatttctatacctgtgttttattttgcaagtgttaaagaacttttttaaatggtaaaattatgactttcatagaggtataaaataaaggtgtcaaaaattttattgacattcattaattagacaagcaggaaagctgttacaactggttcaaaggagaaatcaaagaagcacacacttatatggaataagggaatattgaaatagatttataaatggtttgaaaaactgccttccacagtggaggagggaaatcaattacaattctaccaggcaaaa

SEQ ID NO: 365449 - DNA, 593 bp, Homo sapiens
tatgtgtatcagctattacttccatgtaaaatttcagagctcattttcccaaactcattggatattgtcctgaaatggatcttatctagacttatcaattatgccattagattgactgcttttcagtgatataatacatgtaggattagtggatcaagtgatcaaatgcccatcaatrtacctccattaccacaaaataggtccctttgttggtgatcattactaagatatgatgctataaatgaggagttctggaagtctttgaatagtggtgctgacaggaaatgcagaccaggaagacactcccatatctggagcatatatcaattccagtaagtaaaattccaagtagaacttgtctaatagtaagttgctcaatctgccagtaagtggctggctggtttccagagtgccattgtaagagttcagtatcagaaccttggcaggttgaaccctcagcagtggccttggtaagaggattcccactgtctttcacccatttataagctttattcctgctactttgttcaaggccccttttgtaagcactgggtttagtgcttactttatagtgagctataatataaaacata

SEQ ID NO: 365450 - DNA, 567 bp, Homo sapiens
tctaagtcttggttattatctaagtcttggktgttattatctaagccatgtctgctttagagggaagctaaagctcagtaatgctgtggctcttgcagactcatagaggtaataccttggtggtcttgggtaagatccagaagacttccctggatcaccaggaagagacccgtggtctctttccttacttttccccaagtaaatgaagtctctctctctctctctctctctctgtgctgagatgcctggagctgggggatgggtgacacaagcacctctgtggccaccatcactgggactgtgctgggtcagaaccaaagccagcatagtactgggtcttacccaagaattgcagtgaccactacctggccatcacctatgttcactcaaggctcaagggctgtacaacctgcaggtggcaaatccaagcggacatgtatcctttccttcggagtgttgagttccctctggctttggatggatctgtggatgccatctagaagccaggacctggagttgggaactgtaggaatctacctggtgctctattctactgaggctgagctg

SEQ ID NO: 365451 - DNA, 577 bp, Homo sapiens
aagttgagcaaagtagagccagtgaagaaaaaaaatggacagtctctccttaaggctacatatgtacattgcacattttcagaggcaccattcctgtatattagtgtgagtggaatccccagaatgggccaatatgcatgacatctctggagatgaagtccgttttcttgttggtgtaagggagaaaatacatttaaaaagcacacatacacacacacacacacacacacacacacacacacacacacagactaccatgcttcctatgatttgacgattgataattctatagtatattttatactgcttcatggaacattttgtgtctcttttttaagaaaaaatcatgatcttaatgatcatgtgaacatttttgaaagatgatacttctgcagaatgtgctactgccaactcccaagggyactcctgatttatgatctaagcctgagtttcctcttcataaaatgaactaaagaggctgaaataaataatgtataataaagcatttggtaaaaagcaagacgattggcatcaatgacctgctctgactccacttcccattcagtgttgttcatac

SEQ ID NO: 365452 - DNA, 472 bp, Homo sapiens
tgccatgtatgttgtaaaatctatcttttccacatcttagttcacttttagagaccacccttttagcaagattcgtcatttcagtagtttggaaacaatagcttattcaggcagccacttttgatgggaaatagcatggaatagtgcagggtttcctaaactgtgtttccctgggacatagtttcacaaaatgttawtgaaagttttatagagcatggattatttgactagatacatgtaagaatattaaattgaacaaaattaaacagtttcttttttgacaggagttcccagaacttttgataagcacttatgcattgtgaatctcaagataaatttataatttcagtctttccaaaattgttatatatgtggaactcccatttttcttacaggaaattttaatctcccatttatttattgctgcatcacataacatcccctgatttaaaacaatttattactatctgtc

SEQ ID NO: 365453 - DNA, 521 bp, Homo sapiens
tttcaatcagccaccaatacttcttactcatttgttaattttttaaattgtacagatagattttggctaacacattttgatacttgtgaagtttcaaaactgaatgtctttgcttttccatgaaaccactataggcccgagaacaagaatcttgtcttatctattttatttcctgtcttatttttattaggtacactgtttggcacataataaatatttaataaatattatttgaatttaactcamaccctgtctcctttataagctaaagatttgattcttgtaagtttctgaaatgatacacactataggcattcagaaatacaaatgtcttattgaaatttacaccttttattaagtcctcctccacagttctcagtttgaattacgcggaggcaagagaccaggagacaagtacacttccaacggattagttttctgatctaaaactagccaccattattctccctttatcttctgttttttttgtgtcactttataagctgtctcaaaatggtgta

SEQ ID NO: 365454 - DNA, 577 bp, Homo sapiens
aaaataaaccataataattagcatggaacctttctgaaaagcaatcagagaatatagataatataaaggtatattacatttttacctaatattgcatatttatcccaagtcagttatcaaacatgtacatgtacatgtaaaaggaattctatgtgacattaataataaaaaattgggggaaatatctagatgccatggctgatattaattgctcagcactttccaatttctccttcttcatcttataacaccacccccactatccttcccaggtttcatcagatgacatttttataaggcagcagcttgcctaccacataaaagacaaggacrtggtgctcatgaaatgattccaactgcacagaaaagggcaacctccttggagatggaagagagaaaataaagaaatctggatttgtaggtgactttccagagcggtgctacccatcagagccaggcctcctgctaacctttgtgctatatcaagggagagaaataaacttctatcacatctgggtaactaatgctcaattctctttattacagctgcttagtctctacattaattaatattaac

SEQ ID NO: 365455 - DNA, 594 bp, Homo sapiens
tctgtgagttgttcagcttktttgagcagaagattggaacttactgaatatagtctctcacctaacataatggaaaacctgaataagtgaatacaaatacaaaataggaattcacacaatttcttaggtgatagaaaattacaaattcaaaaatataacataatctgcttttcatgctgatttctttactactatgtaatactttttatcgcgttttcatgcaaagataaaaaaagtagacatttgcagaatttatgattccatctcaacttcccaatccaactgagcctaaacactttagaacatattttaaaagtgtcaaccaatgacaagtacaaagaaactttaacattctattctaaggattccattaaacttttagaagccctgacttttcggtgacttcaggaccatgcagatcagaatgaataaattcttactgtcctgaacacaaggctaataattaaggtgacatcatcctttgctgacaccactctcagttcaattctcactgagtcaatccaatcaaagctggattagttgaatatcccccagtagaaatagtcacaattaaagatagctgtaaacttaaca

SEQ ID NO: 365456 - DNA, 644 bp, Homo sapiens
cttggacagatgagagtcttctaagacagtttagctgaactcttcattgctgttctctctccccatcagttgtgtcatgcagcctgctcatcaacatacacgtgtggaagacagattagcactacttagactgagctttgttcattttctgttgccagtctgcatttgagagagtaaacatttgtctcggtaactctaaaagcgagcatttttctccttttactcctgcattgccaggcttaattagcactttgcatagacttcataatgccttttggctatactctatctctgttccattttgagagagattgttccttttgaaaactgtgtatgtttctgtgtggagggagtttgtacaatatgaatatttccctcagccagcatctcccaccttaactactataartagtcttactcgtctcctgcttcctctcttaaactacaggggtctattctccaactagcagccagaatgggctgttaaaatataaatttgttcttgacctttttctgtaaaaccctccaaaggcattattatgccctccctataaaatccaaactttgccctcatgttacaaggtcctttgctcaaatgtcaccttctcagaaaggcctctctgggccttgcgagttcatcctta

SEQ ID NO: 365457 - DNA, 505 bp, Homo sapiens
gatctgaaaaaaacgtattttgttaacaaataagtgctggaaacactgcatattctacttttccttcttggaatgtcacagtcctaaatgcaggaaatctgtttacttttatcactctaggatttgccaaacttatttgataatgggcctcccccgaccaccccaccytttttttttttttttttttttttgcttggaacatccatttatgcaacaatcacacctacattattaaaaagtagttgctctctggtatcaaactactcccatatgtccagcattattctaagtgctgtataaatatgataaccagaacaatcctatttttactctttttacttgagatttttgaatgaggaaacagaagcttagagacttaaactatcttcctaagccacacagttccttgaggaatcagtatacagatagctcaatgtgagaactgctagtctaatgaaattcacaggttctggagcaagaccgaccaacatttgaatctgaatgg

SEQ ID NO: 365458 - DNA, 600 bp, Homo sapiens
cagttttgtcttgctggggttccaggcgccattggagtacaaaaaaaatctcttgaagctaacttgctgtgtgcccaaacagcctcccagttttgtgcttgaaacccagggccctcgtagtgcaggcacatgagggaatctcctggtgtgcgggttgcaaaaaccatgagaaaagcgtagtatctgggccagataccacaatccctcatggcttcccttggctgggggagggaagtccctggcccctttcacttsctgggtgaggcaatgtcccaccctgcttctgctcggtgttcgtgggcttcactcactgtctaaccagtcccaatgagatgaactgggtacctcagttggaaatgcagaaatcatcccccttctgcattggtcttgctgggagctgcagaccagagctgttcctatccggccatcttgccagatcctactaccacattcaatattgatctagatgctggatatataaatagtgttaattctagtgaatagaagactcgatgcaacaattttcggaaacattcaaagcaacaaaaaaaatgaaaaaataaacaggattaaagccattaatataaagatttttatata

SEQ ID NO: 365459 - DNA, 600 bp, Homo sapiens
cagttttgtcttgctggggttccaggcgccattggagtacaaaaaaaatctcttgaagctaacttgctgtgtgcccaaacagcctcccagttttgtgcttgaaacccagggccctcgtagtgcaggcacatgagggaatctcctggtgtgcgggttgcaaaaaccatgagaaaagcgtagtatctgggccagataccacaatccctcatggcttcccttggctgggggagggaagtccctggcccctttcacttcctgggtgaggcaatgtcccaccctgcttctgctcggtgttcrtgggcttcactcactgtctaaccagtcccaatgagatgaactgggtacctcagttggaaatgcagaaatcatcccccttctgcattggtcttgctgggagctgcagaccagagctgttcctatccggccatcttgccagatcctactaccacattcaatattgatctagatgctggatatataaatagtgttaattctagtgaatagaagactcgatgcaacaattttcggaaacattcaaagcaacaaaaaaaatgaaaaaataaacaggattaaagccattaatataaagatttttatata

SEQ ID NO: 365460 - DNA, 475 bp, Homo sapiens
atcatgtacagaaacgcttaagcattgttggcataaatccactcggagttgctgggttttcacttgaaaaggagtctggaaatgtgatttaaatgacattctrtcttttcttctgcttgtgtcttaaagtccttgcctgtctcttgttgtagccaatgtaatgcataaactcttccaaggaagacaagcagacaagctcagggtttgattcaccgccagttttgttccaacagttgtatgagtgccacattcatgaagctaatgccccttttctggccctaccacaggattccaagttttctttccagatggatgtgcagcttcagccccaccagcaggctggagtccttatccactcaacaaaagagatgtgtgcttgactctgaaatgttagcatggcatttctaactatgacaataacaagaatcatgcaactggagatatacatggagaagtcaacttgtttggtaaatag

SEQ ID NO: 365461 - DNA, 475 bp, Homo sapiens
atcatgtacagaaacgcttaagcattgttggcataaatccactcggagttgctgggttttcacttgaaaaggagtctggaaatgtgatttaaatgacattctatcttttcttctgcttgtgtcttaaagtccttgcctgtctcttgttgtagccaatgtaatgcataaactcttccaaggaagacaagcagacaagctcagggtttgattcaccgccagttttgttccaacagttgtawgagtgccacattcatgaagctaatgccccttttctggccctaccacaggattccaagttttctttccagatggatgtgcagcttcagccccaccagcaggctggagtccttatccactcaacaaaagagatgtgtgcttgactctgaaatgttagcatggcatttctaactatgacaataacaagaatcatgcaactggagatatacatggagaagtcaacttgtttggtaaatag

SEQ ID NO: 365462 - DNA, 466 bp, Homo sapiens
ccctaaccaacattgtattggttgcatgaattatttttagtaagacattgtaataggtatacctaaaaagcaaagtcatttgatagcaaaatataaaagctaatgtattagagagaaaaaatatgaagcattttttttgaatgcattatatttsaaaatgcattaaagcactttttgaaaatgtgctctttggaaaaattattttctcagcagcatccagattgttttagggcatataaatacatgtatgatgtaatgttattaatgaataatgtatataatttttttcttcatccatagtgagtgaccttatttttcgatggaaagaaaattagagttctttccaatttactagggttaaaattctgtaaaaccagccttctagaatagtaagttcaaattcataccccataaacatgctctcttaaaaggtgaaaatgtcattaggcattttgtgtgcaattag

SEQ ID NO: 365463 - DNA, 572 bp, Homo sapiens
tgctatttgtttcttcatcttgatctgtctccaaattactaacctcttgacatcaattttgctataaagaagtcaataacatttgaagggaatagcttaagcatattacgacacacatattgagtatctgggaaatattataagatttagctgtaacacattcatggaacatctactattaatattattaatattattcagatcaatggctttgattgccatttgtatggagatgattagtgtaaatctctcttctggattccagtcttcacgtaccaaagtttctgagatagttatacaattagttccaattgtattcatctttttttggttgtgggctacacagagttgaaacagttaagttttagatttgttaacataaatgtcttaagcaatggcaaatatgtgaacatgaaaataatttttctgggccaggcgtggtggctcacgcctgtaatcccagcactttgggaggccgaggcgggtggatcttgaggtcaggagatcgagaccatcctggctaacacggtaaaaccccatctctactaaaaawacaaaaaattagccgtgcg

SEQ ID NO: 365464 - DNA, 645 bp, Homo sapiens
caacactgtgcattgcttcagtaagtccttggtgaggatgattaatatactytggaaccagattgaatgaaattgtgcataaggaattctaacttccaaattgaagtttgacaagatggcctcagagaatacgctgttattttattattggatgtaagcaaagatagcatatttaatttaatagatagactttcagaacatgaaagtaattaaaacacactgtattactatctgccactctctattttctcatcacaaaggcaatactagtgtttgaggtcctctcccttgatccttcttaggacctttgtttcaagatggtgggctgaccacagacaactatttctttccatctctaaacctattcaattgataggaaagataatcaggaagggtaaagtccacagcaacgaagaaaataatgacaatgaagtcaatgggcaagaaaatcatacattccagaagatgaaaaaagataaaggatgaagcagaagtgacactgaactgcagactggaaaaattgggaaggaagctgcaaaagacaaagtcaaggataaattcagcctgactaaggagactcttgagtggctttgcctcagggacccaaggtcagcagagagtagatgtctcccaggacttggatga

SEQ ID NO: 365465 - DNA, 524 bp, Homo sapiens
tttaatttaatagatagactttcagaacatgaaagtaattaaaacacactgtattactatctgccactctctattttctcatcacaaaggcaatactagtgtttgagktcctctcccttgatccttcttaggacctttgtttcaagatggtgggctgaccacagacaactatttctttccatctctaaacctattcaattgataggaaagataatcaggaagggtaaagtccacagcaacgaagaaaataatgacaatgaagtcaatgggcaagaaaatcatacattccagaagatgaaaaaagataaaggatgaagcagaagtgacactgaactgcagactggaaaaattgggaaggaagctgcaaaagacaaagtcaaggataaattcagcctgactaaggagactcttgagtggctttgcctcagggacccaaggtcagcagagagtagatgtctcccaggacttggatgaactatatcctgctacctggcacttagctatggacaaaaatcacagggctt

SEQ ID NO: 365466 - DNA, 524 bp, Homo sapiens
tttaatttaatagatagactttcagaacatgaaagtaattaaaacacactgtattactatctgccactctctattttctcatcacaaaggcaatactagtgtttgaggtcctctcccttgatccttcttaggacctttgtttcaagatggtgggctgaccacagacaactatttctttccatctctaaacctattcaattgataggaaagataatcaggaagggtaaagtccacagcaacgaagaaaataatgacaatgaagtcaatgggcaagaaaatcatacattccagaagatgaaaaaagataaaggatraagcagaagtgacactgaactgcagactggaaaaattgggaaggaagctgcaaaagacaaagtcaaggataaattcagcctgactaaggagactcttgagtggctttgcctcagggacccaaggtcagcagagagtagatgtctcccaggacttggatgaactatatcctgctacctggcacttagctatggacaaaaatcacagggctt

SEQ ID NO: 365467 - DNA, 562 bp, Homo sapiens
ctttttcacttttatctatccttaactgtaacttagtgaaaaactagaagagcgtggtataatacttaagagtttctggatagtaaatctcatttgaaaagtttttcagtggtcacattcatctttatttcttttttgtttttttcattatagaatttattattattatttttatttatttattttttaattttattataattaatctttatttctttgaagttttgaattagaaacttcactgttttttttctcttcatatgtactagtttctcatgtaaaaaggaattaataaaaacaaattacattttgaacatattatattcatatggaaattttaatctttttaacacatgtcaattaaactgcatcttacatcacacttaatgactcaaaaacagcaataaatatttaaagatatacacctaatacaatcagtcttttctcattaagcactggaactctcatgttctcatacagaaaccattcagccatgcttaggtactacccatgttttgaattgctccctattcttgtrtaagtttggaaggatagaagaaaa

SEQ ID NO: 365468 - DNA, 586 bp, Homo sapiens
gtagatggcaaataaatattagcttgtattgttcacagatgtgaatatcttaattctgactactataatgagtggatatttgttaatcgttaatgttgatcattaatcaacattaacattgtttgttttaaccccatctaaattaggatgctgcccatcctggatatatataagatagacagacagatagatagatagatagatagatagatagatagatagayagacagacagatagatagatcttagctagttgatttctgtctggatggcttttatagtatgctaaactgtgcttttcaattaatatttattgagtgcttgtgttttatgtcaagttttatttatgcatttccagcaatataaactaatttatggataattctgcaattatatttttttctgtaaaatagattttttatgtaggggacaagatgctccaagctttccatttttctcttcaacttatatgaaacaataattgaagttgattaccaacacagatgggggaaattatattgatttcctagggctgccatgagaaagtatcacaaattgggtggcttaaaaaacagaaatttattgt

SEQ ID NO: 365469 - DNA, 587 bp, Homo sapiens
gatttcctagggctgccatgagaaagtatcacaaattgggtggcttaaaaaacakaaatttattgtctgtcccacagttctggaggctagaggtccataatcaaggtgtcagcaagataatactctctctgaaatctgaaaaggagaatccttccttgcctcccatatcttttgtattatccagcaattcttaacattccttggtgtgttaatacattcctaattaagtctctgcctgtgtgttacctggttatcttcctgtgtgattttacactgtcttccctcagtgcctatctgtgtttttgtccaaatttctccttcttagaatgacagcaatcacactggattaggccccttcctaatgaccttatcttaattacatctacaaagaccctatttctaaataaggtcacattcacagataccaggggttagaacttcaatatatctttttggggggacacgattaaagccataacacaaaccttttggccttacgcaaaaaaagctgtaaatatccctaccgttcagtaaacatctcagcagaatatggaaaaaacacttttatagaagaaaaattcttaatt

SEQ ID NO: 365470 - DNA, 591 bp, Homo sapiens
aaaaccctgtctctactaaaaatacaaaaattagtaggatgtggtggccggtgcctgtaatcccagctactcgggggactgaggcacaagaattgcttggacccaggaggtggaggttgtagtgagccgagatcatgccactgcactctaacctgggmgacatgaagagactccattgcaaaaaaaaaaaaaaaatccattctaaatgggagaaattgaccccaacaaaggggctggagactccatgcaagtccaaaatccatcagggcagtaaagttacaaaatgatctcctttgacttcttgtcttgcatccaggtcacactgttgcaagaagtaggttctcatggtcttgggcagctctgcccctgtgtctttgcagggtacagtctccttcccagctgctttcacaggctgctgttgagtgtctgtggctttttcagatgtgcagtgcaagctgtcagtggatctaccattctgggctctagagaatggtggccctcttctcacaactccactagacagtgctccagtggggactctgcatgggggctcacaccccacatttcccttccacactgccatagcagagg

SEQ ID NO: 365471 - DNA, 591 bp, Homo sapiens
aaaaccctgtctctactaaaaatacaaaaattagtaggatgtggtggccggtgcctgtaatcccagctactcgggggactgaggcacaagaattgcttggacccaggaggtggaggttgtagtgagccgagatcatgccactgcactctaacctgggagacatgaagagactccattgcaaaaaaaaaaaaaaaatccattcyaaatgggagaaattgaccccaacaaaggggctggagactccatgcaagtccaaaatccatcagggcagtaaagttacaaaatgatctcctttgacttcttgtcttgcatccaggtcacactgttgcaagaagtaggttctcatggtcttgggcagctctgcccctgtgtctttgcagggtacagtctccttcccagctgctttcacaggctgctgttgagtgtctgtggctttttcagatgtgcagtgcaagctgtcagtggatctaccattctgggctctagagaatggtggccctcttctcacaactccactagacagtgctccagtggggactctgcatgggggctcacaccccacatttcccttccacactgccatagcagagg

SEQ ID NO: 365472 - DNA, 591 bp, Homo sapiens
aaaaccctgtctctactaaaaatacaaaaattagtaggatgtggtggccggtgcctgtaatcccagctactcgggggactgaggcacaagaattgcttggacccaggaggtggaggttgtagtgagccgagatcatgccactgcactctaacctgggagacatgaagagactccattgcaaaaaaaaaaaaaaaatccattctaaatgggagaaattgaccccaacaaaggggctggagactccatgcaagtccaaaatccatcagggcagtaaagttacaaaatgatctcctttgacttcttgtcttgcatccaggtcacactgttgcaagargtaggttctcatggtcttgggcagctctgcccctgtgtctttgcagggtacagtctccttcccagctgctttcacaggctgctgttgagtgtctgtggctttttcagatgtgcagtgcaagctgtcagtggatctaccattctgggctctagagaatggtggccctcttctcacaactccactagacagtgctccagtggggactctgcatgggggctcacaccccacatttcccttccacactgccatagcagagg

SEQ ID NO: 365473 - DNA, 591 bp, Homo sapiens
aaaaccctgtctctactaaaaatacaaaaattagtaggatgtggtggccggtgcctgtaatcccagctactcgggggactgaggcacaagaattgcttggacccaggaggtggaggttgtagtgagccgagatcatgccactgcactctaacctgggagacatgaagagactccattgcaaaaaaaaaaaaaaaatccattctaaatgggagaaattgaccccaacaaaggggctggagactccatgcaagtccaaaatccatcagggcagtaaagttacaaaatgatctcctttgacttcttgtcttgcatccaggtcacactgttgcaagaagtaggttctcatggtcttgggcagctctgcccctgtgtctttgcagggtacagtctccttcccagctgctttcacaggctgctgttgagtgtctgtggctttttcagatgtgcagtgcaagctgtcagtggatctaccattctgggctctagagaatggtggccctcttctcacaactccactagacagtgctccagtggggactctgcatggrggctcacaccccacatttcccttccacactgccatagcagagg

SEQ ID NO: 365474 - DNA, 450 bp, Homo sapiens
atttagttggagtcataaagatagaggctatatggataaagatagaagctagactgcagtagtttgggggacacatggaggcaagaaaaaaatgtggagagtggagaaaactttttcaagagacaattgtgaagcagaaagaagtttgttgctttgttgctgaaggaagctgatgacataaaagtatttttgaagacakgatcatagagcatttttgtatttttaagaaaaaatatatgaagagattaatgataaggaggaaaaagctcatgaataaacaagtcaagaaaatagaaaggcagaaacttcagggatcagcaaaaggaaatagccatagatagaaagagacatcttccttccactgaaattggaaggggaaatagctaagaactgaaagactgacatacttattcaagaggataataagcacgaggctgagggcatttccac

SEQ ID NO: 365475 - DNA, 450 bp, Homo sapiens
gatttctgcacaacataaaagaaacaaaataaactagcattcagaatacatactgaattcctttaaattggcaaggaaaagacagacagcctaaaataaaaataaatacttgaacaggcatataagaaaagaggaaatccaaaagcgttaatgcaaaacataagaaaaggtgattaattgcactgatgatcaaagaaataagtccacagtataataccctttttaacccactaaattggcaaacattgaaaattcagacagtaacaagtgttggtgagcacatgggacaagagaaactatcatgcactgtgatgggagtctaaattggaaacctctgatagagaaatgtgtatcctaggactctaaatctctacrccaaatgtaacccctagagaaactagtgtgtatgtgcattaaaagaggcataaaaaatgttcactggaaggtcag

SEQ ID NO: 365476 - DNA, 595 bp, Homo sapiens
acggtttggctgtgtgtctcctcccaaatctcatatcgaattgtaatccctttgtgtcaggggagggacctggtaggaggtgattggatcatgggggcagatttcccccgtgctgttctcatggtagtgggttctcataaaatcagatggtttaaaagtgtggcacttcccccttcactccctctctctcctgctgccatgtaagatgtgccttgctttcccttcaccttccaccatggttgtaagtttcctgaggcctccccagccctgggaactgtgagtcaattaaacctctttattaaataaattacccagtctcaggtagttctttatagcagtgtgaaaacagactaatgcagttattgaggtataattgaagaacaacagacctcacataatttagagtatataayttgatgataagttttagcatatgtattcacccatgaagctattgccacacaatataaaaaatatttccatcatcccccaagtgtcctcttgcccttcgtagccccttccttctgcctctacctgctttctctcaccagacaaccaatgatttacttcctgttactgtcgattaatttgaaat

SEQ ID NO: 365477 - DNA, 501 bp, Homo sapiens
cgaatatttaggttgtttccattttgtagctgttacaaataaaggttctatgagcatccacatgcagtcttcatgtaaacataggtttcattttggtttggcaaatacctaagaatgaaatggctgtgccatatggcagatggatgtttaamacttttcaaagtagtttactattttgtattctcaccagatgtgtattaaagttgcaatttctctaaaactattttgtgtggtcaactatttttattattcttagatactctgatttagcagcagctaaaatctctgttcatcattttcagccatctagctttttctttctgataagtttcttggagtccccctggtgcatatgtagttcagtggcagtttatatgacaatttagggattctctgcttttgaattcatccttttaagaacgttctcctcaattgtcaaccactctgaaagcctcaaactctatcctctaataccgaaaactagtaagactatggctttct

SEQ ID NO: 365478 - DNA, 501 bp, Homo sapiens
cgaatatttaggttgtttccattttgtagctgttacaaataaaggttctatgagcatccacatgcagtcttcatgtaaacataggtttcattttggtttggcaaatacctaagaatgaaatggctgtgccatatggcagatggatgtttaacacttttcaaagtagtttactrttttgtattctcaccagatgtgtattaaagttgcaatttctctaaaactattttgtgtggtcaactatttttattattcttagatactctgatttagcagcagctaaaatctctgttcatcattttcagccatctagctttttctttctgataagtttcttggagtccccctggtgcatatgtagttcagtggcagtttatatgacaatttagggattctctgcttttgaattcatccttttaagaacgttctcctcaattgtcaaccactctgaaagcctcaaactctatcctctaataccgaaaactagtaagactatggctttct

SEQ ID NO: 365479 - DNA, 509 bp, Homo sapiens
gtgatatggtttggctctgtgtccccacccaaatctaatcttgtagctcccataattcccacatgttgtaggagggacccagtaacatatgatcgaattatgggggtgggtctttcttgtgatactgagtgggaatcacaagatctgatggttttataagcaggagttgccctgcacaagctctctctctctctttggctgctgctatccacataagatgtgacttgttcctccttgccttccaccatggtcgtgaggcttccctagccatgtggaactgtaagttcaattaaacctctttcttttttaaattgctcagtctcgggtatctctttatcagcagcatgaaaatgagctaatacagtaaattgytaccagtagagtggggtgctgctgaaaagatacctgaaaatgcggaagcgacattggaactgggtaacaggcagaggttggtacagtttggagggctcggaagaaggcaagaaaatgtgggaaagtttggaacttcc

SEQ ID NO: 365480 - DNA, 585 bp, Homo sapiens
ctagagatttgtggaactttgaacttgagggagatggtttagggtgtctggcagacaaaattccaaggcagcaaagcattcaagaggttacttgggtgctgttaagggcattcagttttagaagggaagcagagcacaaaagttcaaaaaatttgcagcctgacaatgcaatagaaaagaaaatcccattttctgaggagaaattcaagctggctgtggaaatttgcataagttattaggaaccaaaagttaatccccattaccgtgaggaaaatgtctccagggcatgtcagaggtcttcatgacagcccctcccatcacaggtccgaagacctaggaggaaaatgtagttttgtgggccaggcccagggtccccgtgttgtgtgcagtctagagacttggtgccctgcgtcccagccacacctgccatgactaaaaggggccaaggtacagctcagaccatggcttcagaggatgcawgccccaacctttagcagtttccttgtggtatttaccttgtgggtacacagaagtcaagaattgaggtttaggaacctccgcctagattttagaagatttattgaa

SEQ ID NO: 365481 - DNA, 591 bp, Homo sapiens
  misc_feature (1)...(591): n = A,T,C or G
ctttcctgtgctattcttatgatagtgaatgggtctcatgagatctgatggttttaaaaatgggagttgccctgcacaagctctttttgcctgctgccatccacataagatgtgacttgctcctccttgccttccaccatgattgtgagtcttccccagccacgtggaactgtaagtccaattaaacttctttcttttgtaaattgcctagtcttgggtatgtccttatcagcagcatgaaarcagactaatacaggtagcatcttttttttcccttccaagttcgttacattttacatatagtggatttatttttctcaccatccattaccttctttatctactatagaatagtttaagtttgtaccattttattatatctgttcatataaaagtcactaacaagtaattactcaccaggataaaaagcctgttcactctaagttgcaagtaaaattgttaaccttgcttgtcttttactagttgtctcaatttcaaatttcaacctcaacctacgtttaatttttaaaaatgttttaatattaatanaatanaatggttacnaccagnnnnnnnnnnnnnnnnnnnnnn

SEQ ID NO: 365482 - DNA, 621 bp, Homo sapiens
aaataacttatgctgccaagtgattgttcattccaagagggggattcaattcaatttcctccatgcaaaataaagcagcagcacgtacatgctttgaagaaatgtcattatgtaaggcaatgaacacactagctggacaatacactgaaaatactaaaactaaaaaggcataaatgacttcatctttttttataaatgaagtttactgaaggtggaagttgagggaagttgaggtttaaatggaagwccttcaaagtacaatttaatatattaacaatacctgctgtaaatctgctgtgggtatacagaaatgtagagtaatgtgtttctctccaaatgtttagctggacttctggaagcaaatgtagaatcactagtaatgatgtgagatatatccctctacgtgttaaacatttatttaggaaggcaacataatgaagacattttaactattatgtaagacaacacaacatagtggttaagagtgaggattctggagtcatcccatctgggtttgaatggcaccaaccatttacctgctaagttaccttcaggaaattatttaacaattctgtgcttcaggtttttcctatatttagttggaatgactaaatatatcaa

SEQ ID NO: 365483 - DNA, 621 bp, Homo sapiens
aaataacttatgctgccaagtgattgttcattccaagagggggattcaattcaatttcctccatgcaaaataaagcagcagcacgtacatgctttgaagaaatgtcattatgtaaggcaatgaacacactagctggacaatacactgaaaatactaaaactaaaaaggcataaatgacttcatctttttttataaatgaagtttactgaaggtggaagttgagggaagttgaggtttaaatggaagtccttcaaagtacaatttaatatattaacaatacctgctgtaaatctgctgtgggtatacagaaatgtagagtaatgtgtttctctccaaatgtttagctggacttcyggaagcaaatgtagaatcactagtaatgatgtgagatatatccctctacgtgttaaacatttatttaggaaggcaacataatgaagacattttaactattatgtaagacaacacaacatagtggttaagagtgaggattctggagtcatcccatctgggtttgaatggcaccaaccatttacctgctaagttaccttcaggaaattatttaacaattctgtgcttcaggtttttcctatatttagttggaatgactaaatatatcaa

SEQ ID NO: 365484 - DNA, 568 bp, Homo sapiens
tcacttttaatgtatttgctaatatgctatatttcttgatttacttcctcagtctctatgcataccactttttccagttgaaattaacatagttttttattgcaatacattttcttatgtcatctcagctacataaatgttttaacaaacaaatttttggaaaaactatttaaaaattccaacagccctaaaattatgtctttttctaaatatgtttctattaaggaaagtcrtgcgggcttaccttggtctaattccaaatcaaatttttaatctacttaaatgtaccctaatgtaatgatttagttatctatccatcacttgtgcatctgcttagaaatgggcaggtggtccctttcagaaataccattagataatgataatgattgcaattagatgataatgatcttggtcatttacaacatgcagagtcatttgtataaatgattttttgtaagtatggtttatagttggtagggaaccaaaagctacttccttcctaggttacaattcctctaagtagatgagctaagttaggcatatgggtttgagaaagtttattgcattt

SEQ ID NO: 365485 - DNA, 568 bp, Homo sapiens
tcacttttaatgtatttgctaatatgctatatttcttgatttacttcctcagtctctatgcataccactttttccagttgaaattaacatagttttttattgcaatacattttcttatgtcatctcagctacataaatgttttaacaaacaaatttttggaaaaactatttaaaaattccaacagccctaaaattatgtctttttctaaatatgtttctattaaggaaagtcatgcgggcttaccttggtctaattccaaatcaaatttttaatctacttaaatgtaccctaatgtaatgatttagttatctatccatcacttgtgcatctgcttagaaatgggcaggtggtccctttcagaaataccattagataatgataatgattgcaattagatgataatgatcttggtcatttacaacatgcagagtcatttgtataaatgattttttgtaagtatggtttrtagttggtagggaaccaaaagctacttccttcctaggttacaattcctctaagtagatgagctaagttaggcatatgggtttgagaaagtttattgcattt

SEQ ID NO: 365486 - DNA, 587 bp, Homo sapiens
caagagttccattgaaacactggcactttttcatttctcctcagaactttctttcttttttttttaactgaatagttgtcattattacttttgatgtgatgtggctgcaactgattatatgcataaacaccttgacattaytattattgttgttgttgttatatcttgtattagtccgttctcatgctgccaataaagacatatctgagactgggtaatttataaaggaaagaggtttaattgactcacagttccgcatggctctagaagcctcagaaaacttacaatcatggtggaaggagaagcaaacacgtccttcttcaaatggcaaccaaggagaagtggtgagcaaagggggaaaagcacttaaccatcagatctcatgagaactcactcactatcacaaaaacagcatgagggtcaccacccctgtgattaaattacctcccactgggttcctcccatgacatgtggggattatggaaactaaaattcaagatgagatgtgagaggggacacaaccaaagcatatcataacttgaatatgtaatgactaatcacctcgggaacaacttcattacatatag

SEQ ID NO: 365487 - DNA, 587 bp, Homo sapiens
caagagttccattgaaacactggcactttttcatttctcctcagaactttctttcttttttttttaactgaatagttgtcattattacttttgatgtgatgtggctgcaactgattatatgcataaacaccttgacattactattattgttgttgttgttatatcttgtattagtccgytctcatgctgccaataaagacatatctgagactgggtaatttataaaggaaagaggtttaattgactcacagttccgcatggctctagaagcctcagaaaacttacaatcatggtggaaggagaagcaaacacgtccttcttcaaatggcaaccaaggagaagtggtgagcaaagggggaaaagcacttaaccatcagatctcatgagaactcactcactatcacaaaaacagcatgagggtcaccacccctgtgattaaattacctcccactgggttcctcccatgacatgtggggattatggaaactaaaattcaagatgagatgtgagaggggacacaaccaaagcatatcataacttgaatatgtaatgactaatcacctcgggaacaacttcattacatatag

SEQ ID NO: 365488 - DNA, 562 bp, Homo sapiens
tctttcagtttatattaatggagttcactggacctcttggacgtgtagatcaatgcttttcaccaaatttggggargttttggacattaattcttctaatattattttcacatcctcctcccttccttttaaaactcctcttatatatatgttggtacacttgatggtgttacatgggtctctgaggcactgtttatttttcttcatttttttcttcttattcctcatacttgataatctcagtggacctatcttcaggttttctgattcgttcttctgcctgctcataactgctgttcaatcctctcagtgaatttttaaaagttgttgtacttttcaactccataatttatatttggtttctctttataatttctatctcattattcatgtagtctttatggtgaggtatcgttctcatactttacttctctaggcctgatttcctttagttctttgaacatatgtaaaatagctaatttaaatttttttatctaatgtctgggcttcctcaggaaaaattttgattgattgacttttttcatgcatattggccatactt

SEQ ID NO: 365489 - DNA, 562 bp, Homo sapiens
tctttcagtttatattaatggagttcactggacctcttggacgtgtagatcaatgcttttcaccaaatttggggaagttttggacattaattcttctaatattattttcacatcctcctcccttccttttaaaactcctcttatatatatgttggtacacttgatggtgttacatgggtctctgaggcactgtttatttttcttcatttttttcttcttattcctcatacttgataatctcagtggacctatcttcaggttttctgattcgttcttctgcctgctcataactgctgttcratcctctcagtgaatttttaaaagttgttgtacttttcaactccataatttatatttggtttctctttataatttctatctcattattcatgtagtctttatggtgaggtatcgttctcatactttacttctctaggcctgatttcctttagttctttgaacatatgtaaaatagctaatttaaatttttttatctaatgtctgggcttcctcaggaaaaattttgattgattgacttttttcatgcatattggccatactt

SEQ ID NO: 365490 - DNA, 599 bp, Homo sapiens
atatccccatggtttgctccctcatctccttcaggtctttgcccaagtgtcacctctttagtgaagccttctctgaccactctatttaagattgcacactccattcctcttcagttccaccttgtaattctttttttttttttttttttttttgagacggagtctcgctctgtcgcccaggccggactgcggactgcagtggcgcaatctcggctcactgcaagctccgcttcccgggttcacgccattctcctgcctcagcctcccgagtagctgggactacaggcgcccgccaccgcgcccggctaattttttgtatttttagtagagacggggtttcaccttgttagccaggatggtctcgatctcctgacctcatgatccacctgcctcggcctcccaaagtgctgggattacaggcgtgagccaccgcgyctggccgcaacttcttggaagctatattaaagggttttaaatttagataaccagtaaatccctcccttctaggaaacaacacttcatgttttgttactttccaaatttttgttgactggtggttggctgctcccaggttgttggcagagcctctggttacactg

SEQ ID NO: 365491 - DNA, 527 bp, Homo sapiens
tttactttctctctctttctaaacttttaactttgtaatgagcatatatatcatgatctcattctttctctcatggttagttggctaaatccactcattgattttttttcccttataagactgtaaaaactggaatgaaattctcttataaaaacagattgtagacagtcccatttctctgatcaatatttaccacctgctgaaagatctattagatccctgaaagggcaagctatggcaaggtcatcaggtcaattaatatgaataatattttattttagctcyactgcaaagataagcaacacagaatgaagtgatagccattcatcttccttataacaataggcaaagtccattcacttataaagagaataagtgaaataaaatgcttttgttcaatatagtttttttttttttaacttttgctttagagtattctcctgtttgccaaacttaaaaatgctggatggaatcttgaagctaccagaagattgcttatcaccagaaaccaatattttttcaaaaat

SEQ ID NO: 365492 - DNA, 597 bp, Homo sapiens
aacctctgttatcatttgatgttgcaccatagcctaccctctccctactaacacacctccttaaatttagggactgcaacataactcattcaatgatgtattttccccccagaacaggatagcaggcacttgaaatgttgaatgaatgaataaatggctattgtaggaaattattaatgagtggcagaattatcgggtaggatacaacttcaaaagtttaggtgaaatggataccacatgttcttagttataagtgggagctaaacattgggtctcatggacataaagatggcaacaagagacactgaggactactaaaggtgggaggaagagaaggggaaaaggactcaaaaactaactattgggtactatactcagcacctgggtgatggaataattcaaacttcagcatcatctaatatacccaggtaacaaacctgtatatgtactgcctgaatctaaaataaaagttgaaaaaaaaaagcttaggtgaaatatattgaaaactttagggcaacagtgttggaaatcgacgttataagggcataggaaattggagagttatgasagccaacaaatcattttattgtttaagct

SEQ ID NO: 365493 - DNA, 609 bp, Homo sapiens
agcaggcgaaccattagatatgaatcagaaacttcattttttacagatatctatattttgatagataaatattttttccacgggaactaacatttatttagcagctacaatattcaagacgctggggtaacytttttcgatcctgtgctattctatatgtagcttctcttcccacttaaaaaaaattctaacaataaataaagctttagggtgtgtggatcctcatgttgtccctctggtatataaagttgtctcctataaatcattttacattttgaccctaaaatccatctacgagcagatattcttcctccttgaattttggctggggcacaacagaaaggagagagtaagagataggtttggcagaagtgttacagtacgtagctacccaggtatgagtggggcaggagacgcctccccctactccaccaggaatgtcaggcaaccatcaggtgatggtgaggtgtcaggtgattgtcacactacctctctaaaataataattggttgtagccagagccagggcaaggcagtttcccaatagacaaaaatgcctgtaactggtgatgggcagcttcccaataagatttcaggaattgtgtgagtg

SEQ ID NO: 365494 - DNA, 497 bp, Homo sapiens
aaattctttttgctaaacactttttaaagtctattttgaaaatcaaaggtgaacaatgacttttttgcccttggctttctctctatcacaccctaaggcaatagatgcttcagcatcaatacttagagagcaaaggcaaaaaaactgaatccatcagctaatatttgtaaatatttttactctgcaagagagtggcataaaatgcgactcagccctggcttcatattagaatcatctgaggagcttttaaaagtacaatgccctatacccacaccccagagattctgatttaattcgtctagaatgaggctcaagtgtcactattttttttttttgctagacccttcaggtgatttttttttttttttttgaaatggagtctcactctgttgcccaagctggagtgcagtggcacaatctcggctgactgcaacctccacctcctgggttcaagygattcttctgcctcggcctcccaagtagctgggactacaggc

SEQ ID NO: 365495 - DNA, 554 bp, Homo sapiens
agggcaagtcaggaggctggagattcaagtaagggttgatgttgcagtcttgagtccaaagttctggaaactcaggcagaatttttatgtcgtagcctggaggcaggattccttcctctctgagaaacctcagtctttgctcttaagtccttcaaatgattggatgaggccctcccacattatggagagtcatctgctctactcgctgtagatgctaattttgtctaaaaaaatacctttatagaaacaactagactagtgtttactaaacaactggtcacyatagtctagccaagttgacatataaaattatccatcacactgagtcaaagaaccgtcttgaaacaagtatgtgggagctctatttctaatagtcaagccaggaagctccagagtaagagtctgtgatggaatctatgttctgctacttcaacttcattcaagctcagttcaacgactggaacaaaactaaaacaaagactgagaattcataatgaattgggaaacagctgaatatacagatattaaaacaaaaaagtccacaaagagtatca

SEQ ID NO: 365496 - DNA, 604 bp, Homo sapiens
atacacaatatatgtgtatgtatgtataaatataccaaaaataaaaattttaatacgaattctggaagatagaattaaggacattttttaggatctagctttttttaaaaaaaaataaaactatggagaaatttgaaaattagagtatgggtataagaagtctaatgttcaaaacagcaatactcagaaatagaaaatgtaacacaaaatttccagatagaatgcatctcctgagtttccaacatagygaaggaaaaaagatccacacgaagtagagacttaagaaattccagaacaccgagcaaagaagtaaacatgaaagcgctacagaaaaaaaatcattattttattaaaaaggtcagaaatcagcctggcattggtcttattaataacaacacaagaaggtagaggaaaatggaaaacacctcttcaaaaatttaagaggaaaaatatattcaacttagaattcttcgcccagcccaaattaatcagaaatgagggttaaacaaagaaattttctgacttgaggtatcaaaaattgtactatccatgtatcttttcacagaaagctgtgggtgaatttaatgatgatctccaccaaaat

SEQ ID NO: 365497 - DNA, 596 bp, Homo sapiens
  misc_feature (1)...(596): n = A,T,C or G
ttggccatgagctgttattactgcaatttctcctggtcataccacatctattctcttcttcctgtccctccatcaggcaaagaaaacataaagaactgcatgtaaacttctgccatatacattatttaaaaagttactggaaagaaaaaagaaatgcctgatantcctttagtgcagctgttttaggtccttcatgcctggcctttgagcttgccatccagtagagatatgtaatgctcttttagtgagtgaagtatagttaaaattttcattcaattagtcatacatacttcactttgaacttcctgtgtatattattctgtgctcaattaaactattccttcccccaaattccattcccagacttcttattcatacataaaatcttgtaaaagtttttattcctctccctaatagttttttgtttaagatgtaagtttatatacacacattttgatggtttagataacttgatcagatgattaygtcagtggagtctgagtgctgagcttagcctaattttcaactttcttacttagtatgccattattttcatgcagtggtttaagtatttactacaaataaatgaatgattc

SEQ ID NO: 365498 - DNA, 653 bp, Homo sapiens
ataaatttttcaacctccccattcccaagaaggtacaaacataataacatggatgaaactagcttgttatactcaggtagaatcataaattgttaatcactcaagacaaattactattacgtgactctttcagatakccaagactgttaacgactgcttccccagaaggaagcagtttactggggctgctgttcaaaggaaatgacccagttgccaagaggctatgaaatattaagtggctgtgccagtgtttgtgaaactatccacctaggaagtcttgctttcagaagataaccagtgtggttgtgttaaacgctgccaaccttaaggatcaaagaataacttgataaagcttaactagaaagtctatgctgcattaagttcttagaaattatgaagctcacatgagatgttgagggcatttgtaatgccctgcatcttgggtcttggtgtttaattgttgggattgggctaattagttcaatgtcactaaccagcagaaagaaaaggaaacacaaaagaatagctgctggtggggagcaaatcagaaaataggataatctggggacaagagtctaaaatcaagctaaagaacaaaacattcaagggtaaataggattcatgatgcagcagagaatgcaggggaagagatc

SEQ ID NO: 365499 - DNA, 566 bp, Homo sapiens
agcatatttccaaagtcatctgcatctgtaagtgttacataaagcaagttcttgactggtaactctcaggttttctaaatatcattaagattgttytgtatagttaagtcaacttacagtgtttttcacattcctctcttctccatttatccctaaatcgattattaacattgtactttgttaggcaaataatccagtgtggaaattaattgaagagaaagagcatgcaaaacaaataggaaggttgttttaaaaagaattttctgtctgctgtctcaaggtaatatatgtccaccttcagaaagtaataagtaaaaaaatgtgtttcttggaatccatcagctctgctcacttgtactctttctacactgctgtctggaaacctgggtgtccttgatgtttcctgcctctaaaggatgcagagtcttacctctcttgcaacaatagatgctgcactaagcttcagaggcctcctattccacaattacacgcttgagcaattaaaaacatctgccaagatctgctcgtgtacgcaccaacagcattcttgtcatagccctctccag

SEQ ID NO: 365500 - DNA, 583 bp, Homo sapiens
ggttaattatacagtttgtgagcaacaggatataatttacaaaatgcttctctgcttctcataaacctagacagcattgcttgaggtaggaaatctcaacatctttacctttcatgttaattccaaggccaaagtgaaaaaagaactaaaaacaaaaaccatctattgtgatcacatttaccacactgagaagaggcttcacacgctctccatagaaaaacattttccaaactgcttatcagcaataaagcagaaaaatattaagcatcactggactgctgttctcatttcaattgcagctaatttgyaaagacaaactttacaagacaattagctctttattagttgatgctattaacaagtagaaaagtcaaataggaacagaccaacataactccttaggttccattaaatacattactcaaatgacaagacagatatttaaggtgtatctgacttacatttgccctctaaagtaatcccccaacaaaaaaaacaaaagagcaatagcttgatcaaaaggactaataaactagttcctacaagctcgcacctccctttcactgcctgaacttctggactc

SEQ ID NO: 365501 - DNA, 567 bp, Homo sapiens
tttttccatcttcagaggactgtgtctgacattgttcccactgcagattcacagccctcaggagagggtacatccatctcctaaacccatccaagggcccttgtaactaacaccaaccagtgtaggtcacaggacggtacacatactgcataaatacatacattatgcagaaaaccaactgctgacacttaagcacaggtgtaatctttgctaaaaaccttttgttataaccagtatattgggtcatgtattacttaaaacaaaaggtcaacctttaatttttagatataatttagttgaaatgggatttttttttttttaggaggacctattataactggtgtgacttgacttctctcttctattagccccaggacttcaatgtctccataatcttcagttcaacaaaggtctactaacttacttattgtctagtaaygtgctggggatccataaatgaaaaaagatggcaagatgaaaatttttttctttttttcctgagacaaagtctgtcaatgtcacccaggctggagcacagtggtgcactcatagctcactgcaagcctc

SEQ ID NO: 365502 - DNA, 501 bp, Homo sapiens
tgatctcatttgcatataaaagtgaggggtttttatcatttggttttacaaattatctttatggaagtcagttcaatatctagcttcttagccacacattattttattttatacactggctgggaagtctgccttcaggcttgtggtcaggaaaacactttactctgccacccttagtttaaatagcatgtgcatgtatgcgtgcaccatcagtagggctgagctggaaagasgaaacaaaagtgtaatgcctttgtatgactgtgtctgctctggaggcaactgtaagttattggagaatgtgacagccactaactgaccaacatttgttatgtgcagattactattggtattttgtatgctaatgcctattctcccgaagaataatagataactgttctgagagtgagacatacgtgaataactaggacagcatttaccagtcattgatttttcaataccctttctgaaacgtgctcaatacacttacatacgcaaaca

SEQ ID NO: 365503 - DNA, 547 bp, Homo sapiens
ggcatttcacactttccccaggaaaattaggagtaaaatgaccagaaataggcgaagtgcttaaaaataaagatatcaggactacaggaggctcagtacctctckgtcatcttatattttaatgatttgtggaataaattgacttcttacctccacagaacccttggccttttttttttttttttttttttttttaagacagggtctcactctgtcacccaggctatagtgcagtgttgcaatcttggctcattgcaacccccacctcttgggtccaagcaattctcccacctcagcctcccgagtagctgggattataggtgcctgccaccacacccgactaatttttgtatttttagtagaaatggggttttgccatgttggccaggctggtctcgaactcctcacctcaagtgatctgcccgcctcggcctcccaaaagtgctgggattacaggtgtgggccactgtgtccagctggacttgaagagcagaatctgtatttcagcttaagtagaaagaacatagagttggatttgaagttctgg

SEQ ID NO: 365504 - DNA, 561 bp, Homo sapiens
ttctcttccaccatatttaaattggtaaactcacctattctaactgcaataggcacaataatattttccaaacaccaaactgagagagaatataactttttaaaaaatattcataaatgtactttcaggaaaaaaaatgaattaaaaaaatttttaaaatagtgtctcactctgtcatccaggctggattgsagtggtatgatcacagttcactgcagcctttaactcttaggatcaagtgattctcccatcttagcctcccaagtagctgggactacaggtgtgcacaaccataccagattaattttttattttttatctgaagagatgggggtctcattatgtttcccagggtggtcttgaactcatgggctcaagagattttcccacttcggcctcctaaagtgctgggattataggcatgagccactgcacctagcctaaaatgcatttttaataaatttatcacatttcactttattgaaaaaattaagattagaaggaattggaacactccaggaaaatccagatgtacaagagggcatttataaaaccacaaac

SEQ ID NO: 365505 - DNA, 568 bp, Homo sapiens
gtgaggccccatttctaacaaatcaaaataaaaatattagccaggtagagtggtacatgcctgtagtcctacctgcttggaagactgaggcagaagaattgcttgagcccaggaggttgaggctgcaatgagctatgattgcaccactgcactccagcctgggtgacagtgagaccctgtctccaaaaaaaatttgtttaataaaataaaattaaaagaattttaaaaagccttttccccaactgaggataatatacrattaatcttcttatatctactaatatagtatttaaattaatagatttcctcatattgaatcatccttgcattccagaaataaatcctacctggtcatggtatattttcttaatgtggtgtttggattctgttttctaatatttactctagcatttttgcattgatattggataatggcttgtagtcttgtttacacattagagtcattttcctccataccacttttaggagaacagtttccatgaaagggagcttgatgataacagaaaagataaagagacaatctaacacagaaatagacctgtcttag

SEQ ID NO: 365506 - DNA, 568 bp, Homo sapiens
gtgaggccccatttctaacaaatcaaaataaaaatattagccaggtagagtggtacatgcctgtagtcctacctgcttggaagactgaggcagaagaattgcttgagcccaggaggttgaggctgcaatgagctatgattgcaccactgcactccagcctgggtgacagtgagaccctgtctccaaaaaaaatttgtttaataaaataaaattaaaagaattttaaaaagccttttccccaactgaggataatatacaattawtcttcttatatctactaatatagtatttaaattaatagatttcctcatattgaatcatccttgcattccagaaataaatcctacctggtcatggtatattttcttaatgtggtgtttggattctgttttctaatatttactctagcatttttgcattgatattggataatggcttgtagtcttgtttacacattagagtcattttcctccataccacttttaggagaacagtttccatgaaagggagcttgatgataacagaaaagataaagagacaatctaacacagaaatagacctgtcttag

SEQ ID NO: 365507 - DNA, 568 bp, Homo sapiens
gtgaggccccatttctaacaaatcaaaataaaaatattagccaggtagagtggtacatgcctgtagtcctacctgcttggaagactgaggcagaagaattgcttgagcccaggaggttgaggctgcaatgagctatgattgcaccactgcactccagcctgggtgacagtgagaccctgtctccaaaaaaaatttgtttaataaaataaaattaaaagaattttaaaaagccttttccccaactgaggataatatacaattaatcttcttatatctactaatatagtatttaaattaatagatttcctcatattgaatcatccttgcattccagaaataaatcctacctggtcatggtatattttcttaatgtggtgtttggattctgttttctaatatttactctagcatttttgcattgatattggataatggcttgtartcttgtttacacattagagtcattttcctccataccacttttaggagaacagtttccatgaaagggagcttgatgataacagaaaagataaagagacaatctaacacagaaatagacctgtcttag

SEQ ID NO: 365508 - DNA, 619 bp, Homo sapiens
gatggttctttaaacaaggactctgggagttaccttctcaacaaaaagacttaaagctcctttagtcatcagaggtaggtaataacaaagaaaagggtattccaccaattattgacacatggtcgggatggtatatttaaaaacctgaaactgttatatcctttaaattttctagtaccccaaatgcactatgctcatccttgcaaattctctcctctagcagaaacaactatcaggacctagtcactcttccagggacagatcaggattctatcttccaccattaaaatttttaagaaaatatgttttgaaccctggtttgcacaatgttaacttaaaacactraagttttagccaatgaaaatgtctttgaattacaaactattactgcaaatgggaaggcttataattctacctgataaaaaaaaattttcttagattatcagcaaagggaaaatacagtttaaacattgtcactgaactcatgaaccactataactgtcctccaacccttaggcacatcagacactaattatgacatctctggtctatatataaacagtatcacatatggttagtaatggtttcataatgtggttgtctctgtaactaggccaca

SEQ ID NO: 365509 - DNA, 619 bp, Homo sapiens
gatggttctttaaacaaggactctgggagttaccttctcaacaaaaagacttaaagctcctttagtcatcagaggtaggtaataacaaagaaaagggtattccaccaattattgacacatggtcgggatggtatatttaaaaacctgaaactgttatatcctttaaattttctagtaccccaaatgcactatgctcatccttgcaaattctctcctctagcagaaacaactatcaggacctagtcactcttccagggacagatcaggattctatcttccaccattaaaatttttaagaaaatatgttttgaaccctggtttgcacaatgttaacttaaaacactaaagttttagccaatgaaaatgtctttgaattacaaactattactgcaaatgggaaggcttataattctacctgataaaaaaaaattttcttagattatcagcaaagggaaaatacagtttaaacattgtcactgaactcatgaaccactataactgtcctccaacccttaggcacatcagacactaattatgacatctctggtctatatataaacagtatcacatatggttagtaatggtttcatwatgtggttgtctctgtaactaggccaca

SEQ ID NO: 365510 - DNA, 658 bp, Homo sapiens
tactcagtccaccaatttaaatgtcaatctattctaaaaataccctcacagatgcacacagaaataatgtttagctggatatcttggtgtcctgtggcccagttcagctgatacaaaagattaaccatcacatagataacwtgtatatccctaaataacttcaccttttaggatatttaattaatatactattaatttattaaattgatgtaagttgtgaagcttgtacaaataagcagtagaaagcccttttttgtatttggcagatgttaattttcttttaagctttactttttatattcaagtataaaacattttaatgtatgcctgttgttatattatagatgaggattccatcttgtccattatttgaggtgagaaacgaaggacaactttttccttagccttccttctggtcacattaacatggacatttacctttagcaataattaccaagttctattttctggcgagcatattaaaggtgtgttaatagttttctcctgtaatcttttctggagagaggtttatcagtttcttaattgacctccaatgtgcttgaaaattaagagtaataaatacatgcaaattaatgcctgtttatattcaacagaagaatcctctgagctgaacaaatgtttggcttaaacactgccc

SEQ ID NO: 365511 - DNA, 658 bp, Homo sapiens
tactcagtccaccaatttaaatgtcaatctattctaaaaataccctcacagatgcacacagaaataatgtttagctggatatcttggtgtcctgtggcccagttcagctgatacaaaagattaaccatcacatagataacttgtatatccctaaataacttcaccttttaggatatttaattaatatactattaatttattaaattgatgtaagttgtgaagcttgtacaaataagcagtagaaagcccttttttgtatttggcagatgttaattttcttttaagctttactttttatattcaagtataaaacattttaatgtatgcctgttgttatattatagatgaggattccatcttgtccattatttgaggtgagaaacgaaggacaactttttcmttagccttccttctggtcacattaacatggacatttacctttagcaataattaccaagttctattttctggcgagcatattaaaggtgtgttaatagttttctcctgtaatcttttctggagagaggtttatcagtttcttaattgacctccaatgtgcttgaaaattaagagtaataaatacatgcaaattaatgcctgtttatattcaacagaagaatcctctgagctgaacaaatgtttggcttaaacactgccc

SEQ ID NO: 365512 - DNA, 658 bp, Homo sapiens
tactcagtccaccaatttaaatgtcaatctattctaaaaataccctcacagatgcacacagaaataatgtttagctggatatcttggtgtcctgtggcccagttcagctgatacaaaagattaaccatcacatagataacttgtatatccctaaataacttcaccttttaggatatttaattaatatactattaatttattaaattgatgtaagttgtgaagcttgtacaaataagcagtagaaagcccttttttgtatttggcagatgttaattttcttttaagctttactttttatattcaagtataaaacattttaatgtatgcctgttgttatattatagatgaggattccatcttgtccattatttgaggtgagaaacgaaggacaactttttccttagccttccwtctggtcacattaacatggacatttacctttagcaataattaccaagttctattttctggcgagcatattaaaggtgtgttaatagttttctcctgtaatcttttctggagagaggtttatcagtttcttaattgacctccaatgtgcttgaaaattaagagtaataaatacatgcaaattaatgcctgtttatattcaacagaagaatcctctgagctgaacaaatgtttggcttaaacactgccc

SEQ ID NO: 365513 - DNA, 562 bp, Homo sapiens
tattttaatattttcaatatagctgactggagtgaacattagttaacatgagtaagtgataaattggatctaaattgtcattggtatctatagagatgttgctataaagaagtatgtccaagttagattttcacctaggcaggttgggaaaaaaaagatgaaaaaatatgtgcattctaactattttctacaaactatatacatagtagattattccattgttgacacttctgaatcatatggccatggaaattaaggggatcccttaattgaacccctcaattgaaagaggagcaaactaaagcacagagtacaktgtccatataaacaaccacttagggctgccatcttcaatgggaaggtctctctcaagttatagactgaaatctaagtctggcccagcattcactgggcaccttattttctacctacattttcataagatgtatcacaaacttcagcaattatttgttgtgtactatctgctatatatttatgcaagttaacattgaaataataaaatgagaagccattagacaggaaccctgggttcctacctaag

SEQ ID NO: 365514 - DNA, 565 bp, Homo sapiens
ggaggatcgcttgaggccagtgattaaagaccagcctggacaacatagtaggactccatctctataaaaattttaaaaattagccagacatggtgccgtgtgcctatagtctcaactactttggaggctaaggcaggaggaatgcttgagcctggggggttgaggctgcagtgagctgtgatggtgtcratgaactctatcctgcagtacagagtgagaccttgtctcaaaaaaaatcatctttacagttatttgattatttgcagattttcagtgtttattgtttttactttccttgccccactattctgcattcatcaaatattcattgaacactgtctttttgccagagactgctgtaggcacaagagatacagcaaaaaacaagacaaaacccttgctctcatgaaacttacagtcaagtgtgtgagatggacataaacatagtactgtgctgtcatgttgtaaaatgggacctctcattgagaagctgggttggtttgggggtggggagtatgacatcaagagttctgttttgatcatgtttagttcaagatgcctgtta

SEQ ID NO: 365515 - DNA, 565 bp, Homo sapiens
ggaggatcgcttgaggccagtgattaaagaccagcctggacaacatagtaggactccatctctataaaaattttaaaaattagccagacatggtgccgtgtgcctatagtctcaactactttggaggctaaggcaggaggaatgcttgagcctggggggttgaggctgcagtgagctgtgatggtgtcaatgaactctatcctgcagtacagagtgagaccttgtctcaaaaaaaatcatctttacagttatttkattatttgcagattttcagtgtttattgtttttactttccttgccccactattctgcattcatcaaatattcattgaacactgtctttttgccagagactgctgtaggcacaagagatacagcaaaaaacaagacaaaacccttgctctcatgaaacttacagtcaagtgtgtgagatggacataaacatagtactgtgctgtcatgttgtaaaatgggacctctcattgagaagctgggttggtttgggggtggggagtatgacatcaagagttctgttttgatcatgtttagttcaagatgcctgtta

SEQ ID NO: 365516 - DNA, 565 bp, Homo sapiens
ggaggatcgcttgaggccagtgattaaagaccagcctggacaacatagtaggactccatctctataaaaattttaaaaattagccagacatggtgccgtgtgcctatagtctcaactactttggaggctaaggcaggaggaatgcttgagcctggggggttgaggctgcagtgagctgtgatggtgtcaatgaactctatcctgcagtacagagtgagaccttgtctcaaaaaaaatcatctttacagttatttgattatttgcagattttcagtgtttattgtttttactttccttgccccactattctgcattcatcaaatattcattgaacactgtctttttgccagagactgctgtaggcacaagagatacagcaaaaaacaagacaaaacccttgctctcatgaaacttacagtcaagtgtgtgagatggacataaacatagtactgtgctgtcatgttgtaaaatgggacctctcattgagaagctgggttggtttgggggtggggagtatgacatcaakagttctgttttgatcatgtttagttcaagatgcctgtta

SEQ ID NO: 365517 - DNA, 614 bp, Homo sapiens
cttctggggttggcataccagatcattttgagctcaaataggagacaaaagaaaggatgttgggaaagctgtatggtggagaggctgaactgttggaatgaaaagacaagaagcatattattatgttaattccagcaccctagatctgcaatgctgaaaggactgccaaaactaaagcttgtcctacaccacgttcatcacaaagaaattctgtttagacgttgagttaaactttctcaactgtattcagtacaggattaagtggttgagatgggccattctgcagttacactgtttccgttccartctgggtctcctcatgtattagctgtgtggaccttgggcaggtaactcctttgtgcctcaaagaaatggagatgacgataatacctacctcagtggggttattgtgaggataaaatgcgattaatagaaaataattagaatggtgcctgggatacatactgctcattaaacattgtatatttttattattagtgcactgtgctataataggatggctatctagaaaacatcatgcaatttgtaatgcacatttatcatccagttaattgaaagaggtagtgatgggacagtggtggcagacattgaat

SEQ ID NO: 365518 - DNA, 456 bp, Homo sapiens
gcctgaaccggggaggcggaggttgcagtgagcagagatggcaccactgcactccagcctggtgacagagggagactcygtctcaaaaaaaaaaaaaaaaaaaaaaaatctttttaaagcatcactaggatcagaaatgcaaatttttcagaaatttcaaaaatgtggagaaaaggttggacattttgttagggaagtaaaagcatatacatataaaattatatttgttctggaatataaaatatgttatttgtattgctcactatagatctagggattgtaagaacttatgtagcattttatcaagcctccatatctctttggagacttcaaagactttagaaaggtatagataatatcaaatgttggtcaagatggtagtcaacaggaactctcaaacattgagagtaggcatgtaatttggtacaaccatcttgaaaaactgtttggccttat

SEQ ID NO: 365519 - DNA, 456 bp, Homo sapiens
gcctgaaccggggaggcggaggttgcagtgagcagagatggcaccactgcactccagcctggtgacagagggagactctgtctcaaaaaaaaaaaaaaaaaaaaaaaatctttttaaagcatcactaggatcagaaatgcaaatttttcagaaatttcaaaaatgtggagaaaaggttggacattttgttagggaagtaaaagcatatacatataaaattatatttgttctggaatataaaatatgttatttgtattgctcactatagatctagkgattgtaagaacttatgtagcattttatcaagcctccatatctctttggagacttcaaagactttagaaaggtatagataatatcaaatgttggtcaagatggtagtcaacaggaactctcaaacattgagagtaggcatgtaatttggtacaaccatcttgaaaaactgtttggccttat

SEQ ID NO: 365520 - DNA, 586 bp, Homo sapiens
gccccaaattatttaatcatatgcatgccaggaatgcactatatctgacaaatataaagtgaaatctactgcctttgttttccccaggtttcaatatgcaattgtgtagactttctaagtaacatgaatgtgtaaaataggtgtaaattaaaatattaaaaattcaggtcgattcatttgggtgaataattcaaatgtgacacttyatagctgtgtactcctagaaaattctcattagaccttagtaaaagtgctctaatgtacatagtattatatatgtggtcataaaagatcttcaggttgggagacttattttcttgtgagacttccccactgtaccctaacccatttatagtgcaatgtagaattctttatagctatatgagaacttaaatagcagcaagtccaattgctcatttcaaagatgagaaataaacgaaatgcagcaaagtagtctttttgggttaaatctttccgaaaatgtactttaaaaatctcaacccaagaaaatgtttataagggctttagtcacttgagtctagcctcagaggcctgtaagaaaatgcatttttgtcaccaagcaaca

SEQ ID NO: 365521 - DNA, 586 bp, Homo sapiens
gccccaaattatttaatcatatgcatgccaggaatgcactatatctgacaaatataaagtgaaatctactgcctttgttttccccaggtttcaatatgcaattgtgtagactttctaagtaacatgaatgtgtaaaataggtgtaaattaaaatattaaaaattcaggtcgattcatttgggtgaataattcaaatgtgacacttcatagctgtgtactcctagaaaattctcattagaccttagtaaaagtgctctaatgtacatagtattatatatgtggtcataaaagatcttcaggttgggagacttattttcttgtgagacttccccactgtaccctaacccatttatagtgcaatgtagaaytctttatagctatatgagaacttaaatagcagcaagtccaattgctcatttcaaagatgagaaataaacgaaatgcagcaaagtagtctttttgggttaaatctttccgaaaatgtactttaaaaatctcaacccaagaaaatgtttataagggctttagtcacttgagtctagcctcagaggcctgtaagaaaatgcatttttgtcaccaagcaaca

SEQ ID NO: 365522 - DNA, 586 bp, Homo sapiens
gccccaaattatttaatcatatgcatgccaggaatgcactatatctgacaaatataaagtgaaatctactgcctttgttttccccaggtttcaatatgcaattgtgtagactttctaagtaacatgaatgtgtaaaataggtgtaaattaaaatattaaaaattcaggtcgattcatttgggtgaataattcaaatgtgacacttcatagctgtgtactcctagaaaattctcattagaccttagtaaaagtgctctaatgtacatagtattatatatgtggtcataaaagatcttcaggttgggagacttattttcttgtgagacttccccactgtaccctaacccatttatagtgcaatgtagaattctttatagctatatgagaacttaaatagcagcaagtccaattgctcatttcaaagatgagaaataaacgaaatgcagcaaagtagtctttttgggttaaatctttcygaaaatgtactttaaaaatctcaacccaagaaaatgtttataagggctttagtcacttgagtctagcctcagaggcctgtaagaaaatgcatttttgtcaccaagcaaca

SEQ ID NO: 365523 - DNA, 601 bp, Homo sapiens
atatatgtggtcataaaagatcttcaggttgggagacttattttcttgtgagacttccccactgtaccctaacccatttatagtgcaatgtagaattctttatagctatatgagaacttaaatagcagcaagtccaattgctcatttcaaagatgagaaataaacgaaatgcagcaaagtagtctttttgggttaaatctttccgaaaatgtactttaaaaatctcaacccaasaaaatgtttataagggctttagtcacttgagtctagcctcagaggcctgtaagaaaatgcatttttgtcaccaagcaacaggaaatatgatgcaaaagactgcatgtttgtctcccccaagggactgaattcatcaaacaaaagtaccatgttccattatctttatatctttaacgatatacataatagacattaaataaggagacatataccaaatattcctcctgctcaccctatttcaagaacaattcgtcagatcttccacataattctccccagttatggattgtgtcagcaccagataccaaatattacatgtaaattaaatactgtagaactatttttagtagcacagaccactattcgt

SEQ ID NO: 365524 - DNA, 639 bp, Homo sapiens
gcagcctccacagacacattcacaaacatacccaagttgttgtgggattcatacatacccataatgagagtgaaatcgtgaagaacaatgaacgaaacataaaataactgcgaaagggttactgatactattttgtagaacccagagatgatggaaagagagaaaaaggtatatacatccagcatgaatrctataaataacattaatttagatgttggtgtttgctagtgaagataaagtctgcaaatgaataatttttatgaaacttaatgtgaacattgatttgtaggcatgtgtttcaattccaaaaagtaaaaagttagaattctttattgatgaaatatacaaattatactatagtatcctcctaattgattttaaaacatgctatgcattaattttaaatatatgaaaaaaattactgtacataattcccaaattttaaattcttagtatttttcatgcaaaatatatatacaacacaatgttgctcaagagaaaatgttgcatcattgaacccactttaaagataaaaaatagaaggcgtttttgagtgtgttggtgtttttcatttctgaacaagtttagaatgggtgaaatgaagtgcgttttggtgagtgactggcatatagatttaat

SEQ ID NO: 365525 - DNA, 639 bp, Homo sapiens
gcagcctccacagacacattcacaaacatacccaagttgttgtgggattcatacatacccataatgagagtgaaatcgtgaagaacaatgaacgaaacataaaataactgcgaaagggttactgatactattttgtagaacccagagatgatggaaagagagaaaaaggtatatacatccagcatgaatgctataaataacattaatttagatgttggtgtttgctartgaagataaagtctgcaaatgaataatttttatgaaacttaatgtgaacattgatttgtaggcatgtgtttcaattccaaaaagtaaaaagttagaattctttattgatgaaatatacaaattatactatagtatcctcctaattgattttaaaacatgctatgcattaattttaaatatatgaaaaaaattactgtacataattcccaaattttaaattcttagtatttttcatgcaaaatatatatacaacacaatgttgctcaagagaaaatgttgcatcattgaacccactttaaagataaaaaatagaaggcgtttttgagtgtgttggtgtttttcatttctgaacaagtttagaatgggtgaaatgaagtgcgttttggtgagtgactggcatatagatttaat

SEQ ID NO: 365526 - DNA, 639 bp, Homo sapiens
gcagcctccacagacacattcacaaacatacccaagttgttgtgggattcatacatacccataatgagagtgaaatcgtgaagaacaatgaacgaaacataaaataactgcgaaagggttactgatactattttgtagaacccagagatgatggaaagagagaaaaaggtatatacatccagcatgaatgctataaataacattaatttagatgttggtgtttgctagtgaagataaagtctgcaaatgaataatttttatgaaacttaatgtgaacattgatttgtaggcatgtgtttcaattccaaaaagtaaaaagttagaattctttattgrtgaaatatacaaattatactatagtatcctcctaattgattttaaaacatgctatgcattaattttaaatatatgaaaaaaattactgtacataattcccaaattttaaattcttagtatttttcatgcaaaatatatatacaacacaatgttgctcaagagaaaatgttgcatcattgaacccactttaaagataaaaaatagaaggcgtttttgagtgtgttggtgtttttcatttctgaacaagtttagaatgggtgaaatgaagtgcgttttggtgagtgactggcatatagatttaat

SEQ ID NO: 365527 - DNA, 654 bp, Homo sapiens
ataaggagacatataccaaatattcctcctgctcaccctatttcaagaacaattcgtcagatcttccacataattctccccagttatggattgtgtcagcaccagataccaaatattacatgtaaattaaatactgtagaactatttttagtagcacagaccactattcgtagttggtggtcttgactagctgctgaattaatttctgcctgtgcataaagagaatatacagaagacagcacagagttgaaaaatatccatttacttataagtgcccaactgtgggtactgcacataaaaccattctctttaaaaagaatattctctaaatgcataaagatcttggaatttggttgggtttaccttatccctcataataaaaaatcactatctcagttcttatgcactaattatggtaaagcatcctaaattgtgcagtaggcattgtctttttygcctatgaattacattttatcttgctatcattggtttgctgggtgaactattaagagcttattgctattcagacataaatgatagctttgaccaccctttttacccaccctaaaatgtatttttatgctaaagctatccaaatgagtgattttaaatataattattatatatataatatatgattatatggaagttaat

SEQ ID NO: 365528 - DNA, 648 bp, Homo sapiens
caaactagaggtagagcaagcactagaaaaagctgattacatattcagagtagaagatgtaggaaaaagttgctttgccaggtgttggatgatgrgaaagttgctattatgtagtaattcaaagacaggctctcccataagtactttaaccttagttaacagtctgaagtgttttcaggttcttattgctttaaaacagagtaaggaagcaaatgtgtaaaactactttaaaaactttctgagttagtaaaaatatgatctgaggaggttgcttttaaaattagagctgagggtaacagatatctcgaaagttgcaaagttgagcaaatatacaataatttaaaagtggtccccgaggattcccaagggcattatttttatgaaaaaatggaatgatcagtgtacagcctaggtaaataataatgctatatcctgacatcactgcaccatcaaagttgccaagaaaagcaagctaggaggtaactgctgtatttccaaaagatgaaaatgttaaaggtgtttcagagatctgtggaagttatttttattcatcagagagatgcattgatgaggtggtttcattgaattagtattctccaagaaccaggtccttcaagatttagaacaccatgcgtgaggactttgact

SEQ ID NO: 365529 - DNA, 648 bp, Homo sapiens
caaactagaggtagagcaagcactagaaaaagctgattacatattcagagtagaagatgtaggaaaaagttgctttgccaggtgttggatgatgagaaagttgctattatgtagtaattcaaagacaggctctcccataagtactttaaccttagttaacagtctgaagtgttttcaggttcttattgctttaaaacagagtaaggaagcaaatgtgtaaaactactttaaaaactttctgagttagtaaaaatatgatctgaggaggttgcttttaaaattagagctgagggtaacagatatctcgaaagttgcaaagttgagcaaatatacaataatttaaaagtggtccccgaggattcccaagggcattatttttatgaaaaaatggaatgatcagtgtacagcctaggtaaataataatgctatatcctgacatcactgcaccatcaaagttgccaagaaaagcaagctaggaggtaactgctgtatttccaaaagakgaaaatgttaaaggtgtttcagagatctgtggaagttatttttattcatcagagagatgcattgatgaggtggtttcattgaattagtattctccaagaaccaggtccttcaagatttagaacaccatgcgtgaggactttgact

SEQ ID NO: 365530 - DNA, 558 bp, Homo sapiens
tatgtgctttttatagacatcaggagttgccatgatcatgacactctgttggtgtttttgctcctcttgtattcagcaattgtattctggagacacacagaatgttgttaatcccaagcaatgtattctactatttttgaaggcttctttatactatctctacccaaatatcttctgtcaacagtaatgggagaaagaaaggaagggaagggaagggaagggaataggggagagagagagagagagagagagaaggaaggaaggaaggaaggaaggaaggaaggaaggaargaaagaaagaaagaaagaaagaaagaaagaaagaaagaaagaaagaaagaaagaaagaaagaaggaaaatctagaaaggattcactttctagccacatactgagcaaggtgaatgagtcagagggacatggcctgagggaggacaggtgtggaaaacaggtttagccattggaaatgtgtactaatatatccttatcatcagaaataaaatgcaaccttttgttttttggagcttcaggtcagccagttgctggaaagacccaattc

SEQ ID NO: 365531 - DNA, 450 bp, Homo sapiens
ggagtttgtactcaggtcatttctcatcttgttcagagctcgtaggttgttttcaaaggcagctaggggtccttcaaaaacagtttggagggggtagaggtggtcaggtatcaggtgcttgctgctgattggttgtggcagagatgaaataatagggggtcgaagctgtcctcctgcatgctgaattgattctgggtggagccacaggagctgggttggkggtccaggtggagccatgggtgtcagacatgcaaaaaccctggaaagatatcttaaaaggacaacctacaatagtggtgttatttgcatgactaattggggaagttgcattttttatacctcaagaataatggctggcaattgtttatgtctgcaccttagcaggactcaagttcctctctttccccaagcctgatggtctcccattagttttacaaaagtggttgaatt

SEQ ID NO: 365532 - DNA, 558 bp, Homo sapiens
gcaaatttgatcatattacctttgttgtaaatgtkcaatgactccccattgctccttaacacattcaccagacccttcaaagtctagctcctgcttaactctccagcctcatccttcatcacagtcactctccagctttcgtgatctgctccaccaaatgcctctgggtcctcttagtgctcctgttctctaacctatatctttgaatccaacatgcttagctcaaatcttattactccttttccctggcttctcacttggtaacacctatgctgcaggaagccttccctaaccctgaggctagatttcatctctctgatctcatagcatcttttacttaaattagttaagaactgcttaagtaattcaatcaaagactaaaaaaaaaaaatcatgcttcaggctagagacatgggtgttacattctttttttatatatatactttaagttttaggttacatgtgcacaatgtgcaggtttgttacatatgtgcacatgtgccatgttggtgtgctgcacccattaactcgtcatttagcattaggtatatctcctaa

SEQ ID NO: 365533 - DNA, 538 bp, Homo sapiens
gaagttgctctgatttaaatgcctctgacgtctttagagattgcaaagtttaaactattaggcagaaaatgaggcttataccacattatgtgagttaactacactgaagaagttgttaaatttttctttaagtaattttctagcaattagttgtgtctcagtataaatggactttcaatgtcttaagaagtgaaagttcttaggaacctcttttgcagctacaacattgctgaaattctttaaggcttttttttcttctcactcattaaaatatctttagacaatttcttcaattatcatctataccaggatggttcccagatgcatacttttagtctagacatctcctctgagctccagattcataagcagatttgtgacaccttcaagggcacacaatctgtayagtcacacagggtgctgtgcttggaagtgccaacctttggtttaatgctctgctatagccatgttgaaattgttaataatatttgaacaagaggccccaaattttcattttgccatgggccctgcaaactat

SEQ ID NO: 365534 - DNA, 538 bp, Homo sapiens
gaagttgctctgatttaaatgcctctgacgtctttagagattgcaaagtttaaactattaggcagaaaatgaggcttataccacattatgtgagttaactacactgaagaagttgttaaatttttctttaagtaattttctagcaattagttgtgtctcagtataaatggactttcaatgtcttaagaagtgaaagttcttaggaacctcttttgcagctacaacattgctgaaattctttaaggcttttttttcttctcactcattaaaatatctttagacaatttcttcaattatcatctataccaggatggttcccagatgcatacttttagtctagacatctcctctgagctccagattcataagcagatttgtgacaccttcaagggcacacaatctgtacagtcacacagggtgctgygcttggaagtgccaacctttggtttaatgctctgctatagccatgttgaaattgttaataatatttgaacaagaggccccaaattttcattttgccatgggccctgcaaactat

SEQ ID NO: 365535 - DNA, 570 bp, Homo sapiens
tctcgcccccctcctactcttcccaagtccccaaagtccattgtatcattctcatgtctttgcgtcctcatagcttagctcccacatatcagtgagaacatacgatgtttggttttccattcctgaattacttcacttagaataatagtctccagtctcattcagatcactgaaaatgctgttaattcattcctttttatggctacatagtattccatcatatacatacatatatatatatatatctcacagtttctttatccaatcattgattcatgggcatttgggttggttccatgatttggcaattgtgaattgtgctgctataaacatgcatgtgcaagtatttttttcaaataatgactttttttcctctgggtagatacccagtggtggaattgctagatcaaatggcagttctacttttagttctttaaagaatctccacactgttttccatagtggctgtactagtttacrttcccaccagcagtgtagaggtgttccctgttcactgcatccatgccaacatctactgtgttttgatttttttattatggccattcttgc

SEQ ID NO: 365536 - DNA, 593 bp, Homo sapiens
tcaaggagatccaacaatacagtggcaagaaaacactgtaaaggaaggcatttctctctcacattccagaaagttccagctggctgctctgcttcatgcagtcattcaggggtccaggttcttttcattttgggtctcagggatcccctgggacactgtccttgtgtacttggtagaggctgaatcacagcatgtttgtagggagggaataaagcccagaaacacccccgccatttctgttcacattccattgacgagaactgaagtcatgtgaccatgcctcactgccagggagactggggaaaacgagagttgctttggtgggcaatcaagagatccratcataataataaagacacttttgtcccaaatgggttaacttagaaaaacaatataaccaaaacaacacctttgcagatcaggaaggcagagctgtcaatgtccctctgtacaatgtatttgtatctgctcaatgtaattaatccaaattatatagtatatagttagtaggcaatagacatttatttcaagtttgaaaaaaaataatagaagccacaagtctctctagtcaatcagagagagccaaaagtcat

SEQ ID NO: 365537 - DNA, 593 bp, Homo sapiens
tcaaggagatccaacaatacagtggcaagaaaacactgtaaaggaaggcatttctctctcacattccagaaagttccagctggctgctctgcttcatgcagtcattcaggggtccaggttcttttcattttgggtctcagggatcccctgggacactgtccttgtgtacttggtagaggctgaatcacagcatgtttgtagggagggaataaagcccagaaacacccccgccatttctgttcacattccattgacgagaactgaagtcatgtgaccatgcctcactgccagggagactggggaaaacgagagttgctttggtgggcaatcaagagatccaatcataataataaagacacttttgtcccaaatgggttaacttagaaaaacaayataaccaaaacaacacctttgcagatcaggaaggcagagctgtcaatgtccctctgtacaatgtatttgtatctgctcaatgtaattaatccaaattatatagtatatagttagtaggcaatagacatttatttcaagtttgaaaaaaaataatagaagccacaagtctctctagtcaatcagagagagccaaaagtcat

SEQ ID NO: 365538 - DNA, 553 bp, Homo sapiens
ttgatggttgatcagaaatgcacacaggatcggccagctccagcaggccaaactcagaaagaatgccaggaagcttaatgtggaggcttagtcccagggtcagcagtgccttaggtcccttttcaatcttcaggtcacaaacaagatcctgcacagtctgcattatattcacaagctataatattttaatcattcttggctgcttctctacttggttggaatggatgtggatgagtagaaattgaggtgataaagattaaagtaggccagcacagtggctcatgcctgtaatcccaacattttgggaggccaaagcaggtggatcacttgaggccaggagttcaagatcagcctggccaacatggtgaaaccccatcgctactaaaaatacaaaaatcagccaggtatggtggcacgtgcctrtaatcccagctactcaggaggctaaagtaagagaatcgcttgaaccagggaggcagaggttgcagtaagccgagatggtaccactgcgctccagagtccagcaagactctgtctcaaaaaaaaaaagatt

SEQ ID NO: 365539 - DNA, 385 bp, Homo sapiens
aaaagtaactctagatgtttactaacaaaactcagtggggtgggggaagcccaaargaatcaagctgttcttcaaaatgtaactattgccataacaaagaccttttaaagaatagatacaaaatctaaacactcgagaaccagataagtgaaacataaaaaggtaagccaaaaccaggagaaaaatcaattaatagaaataagaaatacacaaataataaaggtgatagacaaaacatgtttaaacagatattagaatatattaaaatttttggccaggcaccaggcacggtggctcatgcctgtaatcccagcctgttgggaggccaaagcaggcagatcacttgaggtcaggagtttgagaccagcctggccaacaagaggaa

SEQ ID NO: 365540 - DNA, 562 bp, Homo sapiens
tttacttatgatccactaattcttattttaaacacaattataacaagtttaattcatttcatacctggccaatgatatttgagatgtcaaataatgcattatgtgtccgatttatgtaggaaagtttagcattcctatcagtgaacccatatgcaaggaataagccatgggcctctatgaaaacagtggccaacagaaatgcttatatattttaggttaaaataaaatatatattgtatgtatatamcatttttacaaggcctattttagcaatttttaattaataatcaaccatcttgcctaatattagacaaaaaggacttccactgaattactggaatcagctatactgacaatagcaaaaaagcaaagttgaagatctaagaatgggggaaaagggcaatggaaaatctttaaataatatcctcaaaatattaatacactcaaagcatagaagtcaggcaaatgggttgttggagcacctggttgtattactgcatttccatgtgatgcaacaactgacttttgtaataataaacctgagttgcaaaaaccaaaaaca

SEQ ID NO: 365541 - DNA, 562 bp, Homo sapiens
tttacttatgatccactaattcttattttaaacacaattataacaagtttaattcatttcatacctggccaatgatatttgagatgtcaaataatgcattatgtgtccgatttatgtaggaaagtttagcattcctatcagtgaacccatatgcaaggaataagccatgggcctctatgaaaacagtggccaacagaaatgcttatatattttaggttaaaataaaatatatattgtatgtatataccatttttacaagkcctattttagcaatttttaattaataatcaaccatcttgcctaatattagacaaaaaggacttccactgaattactggaatcagctatactgacaatagcaaaaaagcaaagttgaagatctaagaatgggggaaaagggcaatggaaaatctttaaataatatcctcaaaatattaatacactcaaagcatagaagtcaggcaaatgggttgttggagcacctggttgtattactgcatttccatgtgatgcaacaactgacttttgtaataataaacctgagttgcaaaaaccaaaaaca

SEQ ID NO: 365542 - DNA, 562 bp, Homo sapiens
tttacttatgatccactaattcttattttaaacacaattataacaagtttaattcatttcatacctggccaatgatatttgagatgtcaaataatgcattatgtgtccgatttatgtaggaaagtttagcattcctatcagtgaacccatatgcaaggaataagccatgggcctctatgaaaacagtggccaacagaaatgcttatatattttaggttaaaataaaatatatattgtatgtatataccatttttacaaggcctattttarcaatttttaattaataatcaaccatcttgcctaatattagacaaaaaggacttccactgaattactggaatcagctatactgacaatagcaaaaaagcaaagttgaagatctaagaatgggggaaaagggcaatggaaaatctttaaataatatcctcaaaatattaatacactcaaagcatagaagtcaggcaaatgggttgttggagcacctggttgtattactgcatttccatgtgatgcaacaactgacttttgtaataataaacctgagttgcaaaaaccaaaaaca

SEQ ID NO: 365543 - DNA, 466 bp, Homo sapiens
gtccgatttatgtaggaaagtttagcattcctatcagtgaacccatatgcaaggaataagccatgggcctctatgaaaacagtggccaacagaaatgcttatatattttaggttaaaataaaatatatattgtatgtatataccatttttacaaggcctattttagcaatttttaattaataatcaaccatcttgcctaatattagacaaaaaggacttccactgaattactggaatcagctatactgacaatagcaaaaaagcaaagttgaagatctaagaatgggggaaaagggcaatggaaaatctttaaataatatcctcaaaatattaatacactcaaagcatagaagtcaggcaaatgggttgttggagcacctggttgtattactgcatttccatgtgatgcaacaactgacttttrtaataataaacctgagttgcaaaaaccaaaaacaaaaattga

SEQ ID NO: 365544 - DNA, 434 bp, Homo sapiens
ctagggccctgcccaccgctggtccctctccacactatcacagctgatcctttctggaaagcaccactccttgacaggaggccaaccagcacaaaaatagagcattaaaccaccaaagctaaggaccctcatggattccattgtaccytccaccaccctccctggaaccggcactggtatccatggctgagagacccataaacagtttacatcacaggactctgtgcagacaacccccaataccagcctagagctgggtagacttgctgggtggctagacccagaagagagacaacaatcactgcagtttggctcacaggaagccatagccacaggaaaaggggaagagtactacatcaagggaacacctgtgggacaaaaaaatctgaacaatagacttcaaacctagaccttccctctggcagagcctaccc

SEQ ID NO: 365545 - DNA, 568 bp, Homo sapiens
ttttccatttggtttataatatgggaagatattttcataaaatatcttccaaattttaccaaaaatttggagcacacatttttcctttcatcttaggctccatttaggcacattacagcactgcaatcagcatttgcccacattctcatcctatccccagatttatgttatctgtacatttgataaatgtgctttttgtatttttgcctaaggcactggtaaatatattgatctgagaaattcaagtataaatgctagttctctgattgagagagcttgctctagtttgaaaatagttcaaacaactaaaaattcacttatttgtcgttatttgtttcacatttctttatatttctgtacctcagaggcactcatgatttactaagttgaattatagtcagccttccatagccatgkgttctgcatccatgattcaaccaagctcaggtggaaaatacttcgaaaaaaaatggatggttgcatctgtactataacatgtacaggcttttttccttgtcattattccctaaatgatacaatataacaactatttacaaagcatttatat

SEQ ID NO: 365546 - DNA, 566 bp, Homo sapiens
gattgttttttctatttctgtgaagaatgtcattggtacgttgatagggattgcattgaatctatagattgcttttagtagtatagtcattttcacaatattaattatttcagatcatgaacatggaatatttttccatgtttggtcctcttcaatttctttcatcagtcttttatagtttttcttgtgcagatattttatccttggttaaatttattcttaggtattttattttttgtagctattataaatgggattgctttcttgatttatttttcaactagtttgtttttggtgtgtagaaatgctactgatttttgtatattgaktttgtattctgcaacttggctgaatttgtttatcaggtttatttttttttttttggtggagcttttagggttttctatgtataaaatcatgtcatctgcaaacagggacaattcgacttctttccaatttggatgacctttatttctttgtcttgcctaattgctctggctagaactgccagtaccatgttgaataaaagtggtgagaacagacatacttgtcttgttccacttctt

SEQ ID NO: 365547 - DNA, 628 bp, Homo sapiens
tttcttttgttatgcatttactaatcagatgatatttgtgtcatgcttgtcctggcacagggtgatgaccaaaaccagacagttatttaatcatgaagtttagatggcagagagagaaggagaaagaaaattaagtaaacctatatatttttccttttttaaaaaatgatttcttttaaatagacagataaaattgtatgcatttatcytatataacatgatgttttaaaatatatatacattgtggaatggttaaatctagccaattaaaatatgcattaactcacagttattttttgtggtgagaacattttacatgcattctgttagcatatttcaataatataatgtattgtcattaactatagtcaccatgtggtccaatagatctcttgaacttattcctccgatccaactataattttgtatcctttgaccattgtctttccagcccttccccatccctgcaagtgccccagcctctggtaagtactatgggactctctacttctatgagatcaacttttttagattccacatatgaatgagataatgtggtatttgtctttctgtgcttgtcttattctacttaatataatatcccccaggttcatccaggttgttgcac

SEQ ID NO: 365548 - DNA, 577 bp, Homo sapiens
gcaacacaacgggacaatatcttcaagcaattcagagtgacttttgtgttctagatttttttccataaatacaagttgtagtattgattgaaagtttaccttttggtttataatctataaaacatattttcttgaaaatataaataggttatattgtatacccttccsttattcttggtaaaactgagaagtttcctttctacattataaatcttgctatctttctccttatgagttgtgtttgctttcagtgtctggtgatcctactatctttcctggtatcataggagctagcatttattctgtgcctattaggtaccaggtactgttctgagtgttttactgatatattatgtaatctccacccaattctatataggaggtagtgttaatacaaccattttgcatatgaagcaatctgcacctagaggtaaatgaagttacccaagtttgcatgggcagtaataagtagaatagctgtcatgtaaattcaaagagtctggttccaaaggctgtgctttcacccatcatttccaggctgagtaagaaagatgacagtgagacacccaggagtctg

SEQ ID NO: 365549 - DNA, 604 bp, Homo sapiens
  misc_feature (1)...(604): n = A,T,C or G
actcttccttttctagttccttaagatgaattgttagtttttttttattattatttgaagtttttcttcttttttcatgtaggcacttatagctctaaacttccctcttagtactgcttttgctgtctcccataggtttttgtatgttgtgtttygattatttgtttcaaggaatttttcaatttcttttttaatttcttcattgacccactggtcattcaggagcatatagtttatgcttgtatttgtatcgtttccaaaattcttctcgttattaatttctggttttgtttcattgtcatcagagaaatgcttgatattattttaattttttgaataatttaagaattgttttgtgactcaacatgtgggctatccttgagaatgatttaagtgttaggaaaagaatatatattctgcagccattggatgaaatgttctgtaaatatctattagattcatttggtctatggcacagattaagtctgatatttctttgntgattntctgtctggaaaatctatccaatactaaaagtagggtgttaaagtctccagctattattgaattgggggctggctctctctaatatatttgctttata

SEQ ID NO: 365550 - DNA, 585 bp, Homo sapiens
tgttcaaagtgctttccttatattgttatttcatgtttaaaacagtcttaggcagtaagtactattactgtaacttccatttcacagattaataaaccatgtcataacaaggttaagttacttgccacgatcacagtgtaagtagcaaagyctggatttaaatggaggctccagaatcttgcctgtcaatcattaaattattctgcctcaaaatggttgacacttgggagaaaagaagaaaagaacctgcaatatatgttgactatgggaggcgcagtggccttttttggactttgggtgatgtgctacctaaggagactaaatggcaattcaaacattggaagagtgaaagttattttctctgttagggtagaagagtactagactagatacaggtatctggaaccatgtgaccttaaataaattacttaatgttcattccatttctttatttttctgagttaaatgcccattggggacatttgggaatatcaaattcccaaatgaaagtgaaagtgctttggaaagtagaatctttgtgcgaagtgagaaattgatctaatatttaaaaaagtctaactaatg

SEQ ID NO: 365551 - DNA, 585 bp, Homo sapiens
tgttcaaagtgctttccttatattgttatttcatgtttaaaacagtcttaggcagtaagtactattactgtaacttccatttcacagattaataaaccatgtcataacaaggttaagttacttgccacgatcacagtgtaagtagcaaagcctggatttaaatggaggctccagaatcttgcctgtcaatcattaaattattctgcctcaaaatggttgacacttgggagaaragaagaaaagaacctgcaatatatgttgactatgggaggcgcagtggccttttttggactttgggtgatgtgctacctaaggagactaaatggcaattcaaacattggaagagtgaaagttattttctctgttagggtagaagagtactagactagatacaggtatctggaaccatgtgaccttaaataaattacttaatgttcattccatttctttatttttctgagttaaatgcccattggggacatttgggaatatcaaattcccaaatgaaagtgaaagtgctttggaaagtagaatctttgtgcgaagtgagaaattgatctaatatttaaaaaagtctaactaatg

SEQ ID NO: 365552 - DNA, 585 bp, Homo sapiens
tgttcaaagtgctttccttatattgttatttcatgtttaaaacagtcttaggcagtaagtactattactgtaacttccatttcacagattaataaaccatgtcataacaaggttaagttacttgccacgatcacagtgtaagtagcaaagcctggatttaaatggaggctccagaatcttgcctgtcaatcattaaattattctgcctcaaaatggttgacacttgggagaaaagaagaaaagaacctgcaatatatgttgactatgggaggcgcagtggccttttttggactttgggtgatgtgctacctaaggagactaaatggcaattcaaacattggaagagtgaaagttattttctctgttagggtagaagagtactagactagatacaggtatctggaaccatgtgaccttaaataaattacttaatgttcattccatttctttatttttctgagttaaatgcccattggggacatttgggaatatcaaattcccaaatgaawgtgaaagtgctttggaaagtagaatctttgtgcgaagtgagaaattgatctaatatttaaaaaagtctaactaatg

SEQ ID NO: 365553 - DNA, 597 bp, Homo sapiens
gtcatttacaatcataacattgattttttttgtgattaaaatatttttagaataagatctggcttttaactttgttcttgctggttggcctgaggatcactaagttggattaacaattttctgatagccatgaaatcatccttactggagtaatacagtgatgaccatatttggcttcttagatctgtcaaatacacagactcttctacagcttgtccaaagtggcagtatctcaactagtcttttaacaacaagcgcattcccatgtggattgttgatagttactgagaaagaacaattgtactaaatatttttttctaagtggcaaagtataaagatttttaaagtctcaatttctgttagacaaataaaataaccaaatgaacaggattttgaaatccataaaaytgttttcctttaaattcaaaacaaaacaacaacaagaagaagaatgcagaatttttttcgtgaacattgcaaattagtagaaaaaggcatgatataataattgttggttaaaaaaaagtctctttatagatcaacattgagcaatcagtctttctgtttatgttgtccagaccagttgtcagcaacatt

SEQ ID NO: 365554 - DNA, 572 bp, Homo sapiens
aattttgtatttttagtagcaatggggtttcaccatgttggccaggctggggtttcaccatgttggccaggctggtcttgaacttttggtcacgaacacccgccttggcatcccaaagtgctaggattaccggagtaagcccctgtacccagcctcattattttaaaagactgcagtagaaaagtgtgcgtatgggaaactcgggctgttgctgctgggacagggagtgctcctgcagacagggctgggaagcaagcaaggtatgggtacaatccttacaatgaatatcaggagttgccagcagactgtaggatggaactgctccaggaagggagctcatcctgggtccyacatcctttcggagactaaacagttacagcaagatgccattttcaaacctagcctttggcaactgcatgatatcctgggacccagaagtgccaggactggcgtgttatggaaacttgggctgttgctgccgggacagggtgagtgagttgggagcacttctgcagacagggccagaaagtgagtgaggcctaggtagcaggagccagtgccaggaaaccaac

SEQ ID NO: 365555 - DNA, 480 bp, Homo sapiens
acactgtttacagccaaaaaaatcttacagagactgtactactgcatgtgttcagactcaaaaccaaagtaccctacccaaccaataccatagataacaacttcagaaaaagttcttccctacaaaagtaaattcaaaaatagtaagaagtgactattacttcagatgtgcaggtatcaatataaaaacacagaaaacatcaaaaagcaaggaaaaaggacacctccaaaggaacacaataattcttcagtgatagatacttatcaaaaagaaatttttaaaatgccagataaataattcaaaatatttgattttagggaagctcagtgagatacaggagaattytgaaaaacagtgcaaagaaatcagaaaaacaattcaggatatgaatgagaaatttaccaaagatatattttaagaaagaaataaatagaaatcttggaaatgaagaattcattgaaggaaattactttcattgaa

SEQ ID NO: 365556 - DNA, 507 bp, Homo sapiens
ctgctttcctctaaaagcaaacatactccactgtattgaatattgtattaattcttctaattaaaaatcattttcctttcttgtcccttttcaaggcactatcttcccttttcacgtgtcagtttttcttcttcctgaattgcaaaggtgaaaaaaaaaagaaggtgaataatgttgtgaatgtaaacacgtctgttgccatgggagccgctgagcgacaagaaccacttgtggctgcaacatttgcaggaggccacttaccaaacctggcaattctaattcagtaaacagggacaacartgggcatcgttagagaaaattgcttattttactgggagggagagaggcaagctaggaggcttcgagaactctataggatgtacagtcgatgttgatgagcatgcccgttgcctaatgaagtggttgtttttcaaaggggcttggtaaaaacgcaatttccagctaccttgacagcaaggaggtagactaaggacacatcctgtgttt

SEQ ID NO: 365557 - DNA, 479 bp, Homo sapiens
ttttcagtgaaaatgaagccagaaaaccctgccttttgtatatttagaaccatatggggttcctgtttgttgatggtcctctgggggaagagttaaatttcatcctgggagtgtcaaacaaattcaggtcccccagaaggacttgaaaaaagtcatgtctaccacctcttgcttgtaagtaaggatatgaagaatgctttcctagatgcccctgaaaaaaggtcatcctaacttttatgtccagtttttcctaggtatgcatctccccagaatgcaggatttttccctggagtgcggtcacttggtaaatatactttagttctgggayctaagttttccctttttaatcctcttaccccaaatataggttttaccttcccacattctataaattaatttccttttattgacccgatgttagtaacaatgcaaccttcctgcatggatgcaaagaacataatgcaatgacagtttccatg

SEQ ID NO: 365558 - DNA, 573 bp, Homo sapiens
tatacctaggaagaggatatggaataaaaattattcatgtcccrtaggccatcaccagaaccaagaccccaggaatgaggacctcaagggtttaacttgtcacgatcacaaaaaatattcgaatgaattccttgagagctcatttgactatgcaggctctttttagccttctcttttgttcacaggacagaacaatttctggcacacatagctggtacttaataaaatttatgtaattgaatttaagtagacaaaatgaaaagttgttaaaacaattaattataccaaatttgagtaattgaatatgactcaagtgtgataaaaagttcttaaaagactttaatttctacattctttattaaaatagtggggttttaattgtattataaaaatatcaaacccatttttctataaaccactaaaagatgttcagtcttgttttatagaggcagagtttgaacaatagaaaccacagggaccagagttgggtttttgttttttttaattctatgtccagcttggaccctaattggctgcatgaacttaggaaatccttgatgcttatttttctca

SEQ ID NO: 365559 - DNA, 593 bp, Homo sapiens
ttgtcttccattttctaagtatcataaaagcttcttaaattattgtgagacctcagggagagaagggctccctcaaagaagattgggattaagtttcccacacttttcacctgaggtcaggagttctagaccagccaggccaacatggtgaaaccccatctctactaaaaatacaaaaattatctgggcgtggttgcacatgcctgtaatcccagctacttgggaggctgaggcaggagaatcgcttgaacttgggaggtagaggttgcagtgagccgagattgctccattgcactccagcctgggtgacagagcaagactctgtctccaaaaaaaaaaaaaaaaaaaccaaaaaacaaacaaacgaacaaacaaacgaaaaaccaaaaaaaatttccacactttgttaaatggactcagtggcatatttagtttgatttaraaaacagagggatatttttcacacctctgtgttatggagcagattctttcctatgctctgtgagaacaagatccatgtgtctttgtcactgtattgacatcaactgtggagcacctggtatatgagatctcaacaaatattaaaataaata

SEQ ID NO: 365560 - DNA, 589 bp, Homo sapiens
actaattggaaatacagtaaaatttaaaagactcagttgaatccaaattttgtttctcatactgggtgaagctttggtgtaagacagagcttcccagtctgggcagtaaagtatttgacatttttattcagatacttcatgtgtttgtgtgtgtgtaagtcttacagtgtgtcctagaatgtttaacagcatccttggcctttgcttagattatataggaaaaatcagacgtcggaaaagtagagttgaattttgcatgtgaaattggttttccacaagtgatttmtttgagacagaagggtttgttacatggaactatctggttttctgagttcatctatcacataatcttataaatgagtttgtgtgtatagaatttgcttacatgtggcagtgatgttttaaaaaacattggactaagacttataagatcaaggattgaattccggctttgcacttactacttttggaacatgtttaacttttgtgtctctcaattttcttttctgtatttgggaaataatttttaaaaaacacttcacagatagttgtgaaaatcaaactacataaaaacaattatcacttattt

SEQ ID NO: 365561 - DNA, 589 bp, Homo sapiens
actaattggaaatacagtaaaatttaaaagactcagttgaatccaaattttgtttctcatactgggtgaagctttggtgtaagacagagcttcccagtctgggcagtaaagtatttgacatttttattcagatacttcatgtgtttgtgtgtgtgtaagtcttacagtgtgtcctagaatgtttaacagcatccttggcctttgcttagattatataggaaaaatcagacgtcggaaaagtagagttgaattttgcatgtgaaattggttttccacaagtgatttatttgagacagaagggtttgttacatggaactatctggttttctgagttcatctatcacataatcttataaatgagtttgtgtgtatagaatttgcttacatgtggcagtgatgttttaaaaaacattggactaagacttataagatcaaggattgaattccggctttgcacttactacttttggaacatgtttaacttttgtgtctctcaattttcttttctgtatttgggaaataatttttaaaaaacrcttcacagatagttgtgaaaatcaaactacataaaaacaattatcacttattt

SEQ ID NO: 365562 - DNA, 646 bp, Homo sapiens
tgattatgatgcagtgaaaacattgtggactttagatatgaatttgaatgtgagcttacttttctcattcattcattcaacaaatatctgctgtccaccatgtgccagaggctattctcgggcacagagagaaaaaacatgagactgcatcttcaggtaactcataggcttgcttgcaggaaacakacaagtaaacaattattacccagagtgtaaagtgtcagaagagatgggagcatagggcaggaagtctgaagagagagacataacataaatttggtgtggggggtggccctggttcagagggtgttggaacttttaagtagttcctggagaagcactgatcttgagttttaaagaaatcttaagctgtgggagagggagcatgagggtagtttatccaaagaatatgtgtgtgatatgttttgttgggataactgaaggaaagggatgtgaggagaaaagagataacaagtgaggctagagcactcagcaaaagctgtgtaattagaacctgtggactctattacaaaggcaatggagagtcattgactagggctgacatgatgagattggcattttaggtcaccttgaagagggacatgactaagcaggctatggaagtaattcagactgaggaggcagt

SEQ ID NO: 365563 - DNA, 561 bp, Homo sapiens
taggaacagaagctggacaagcaataattggtggggcaggggagatgggggagctgtgaaatagtcgtagaagccgtgtacatcagctgtgtacttcaaggggctgcacagagatggaatgcagtcatcctctaaactgaacctctcttgccccttacagcaccccatgctgccactgccctcaattcagatctggggcaaaggggtccaagggcagctcccagcccagtgaagatctagttgacagtaaagctcaaagaaagcatttccagcagggagagtgctgaccacagcaaggcaggagtcagcgtggaagaaaggaagcagcctggcttctgaccctcccgagacacgcatgggggaggactaraagggctgttctcacacggggaggggcaaaaggtcattgcaatttgggtgttagtgtcaacaggacttcatctctgccctcagacaggtaaaacttggggaaattctggttgcagggagaggagtttgctcaaaggctcactgaaaggattaaataggagaacataagaaggtgcatggcacagtggtctg

SEQ ID NO: 365564 - DNA, 457 bp, Homo sapiens
gaacagacactactcaaaagaagacatacatgcagccaacaaatataggaaaaaatgctcaacatcactaatcactaaagaaatgcaaatcaaaaccaaaatgagatatcatctcacaccagtcagaacggttattatcaaaaagtcaaaaaacaacagttgctggcaaggctgcagagaaaagggagcacttacacactattggtgggaacataaattagttcagccactacggaaagcagtgtggagattcttgaggaacttagawctaccattcgatccagtgattctgctatggagtatatacccaaaggaaaataaattgttctaccaattcatcccagcactattcactacagcaaagaacatgaatcaacctagatacccatcattggtggactagataaagatgtggtacatacacaccatggaatactacgcagccataaaaaagaac

SEQ ID NO: 365565 - DNA, 629 bp, Homo sapiens
ttttctttcttaagctgaattgggttttctctctcttatcttaactgatgtatcacccaaaacatttggtatgtcccaccccgagatagtcccaatgacaaagaagatgaacttctcatacagaagattaggacacggaaggtcactcagccagaactcttaagtattctatcaccaggttcttagctcttttctctggcatcatggtgccttcctctgtgcctttgctcayggtattttcttagctttcctaatatgatctctctcttcctttcctgcataagtaaattcactcaagctctactcacaaacctaggtttgcctttttcccttctctgaaatcccagagcattattatttacatagctaatcctgggaagttattacacagacttttgttgttgttcttgtttataatttcggataccttatgtttctaaacagattctaagtaatctaaggataagaacatgctcttatactacatctatatttgtcagaatgccgtggacaatgtgtacatagcaggcattataaatactcaatttttttattgaattggcaaaaggaagtgtgaagtgagtgggggatgatacagctgccagatggctaaaagataaaataatagg

SEQ ID NO: 365566 - DNA, 629 bp, Homo sapiens
ttttctttcttaagctgaattgggttttctctctcttatcttaactgatgtatcacccaaaacatttggtatgtcccaccccgagatagtcccaatgacaaagaagatgaacttctcatacagaagattaggacacggaaggtcactcagccagaactcttaagtattctatcaccaggttcttagctcttttctctggcatcatggtgccttcctctgtgcctttgctcatggtattttcttagctttcctaatatgatctctctcttcctttcctgcataagtaaattcactcaagctctactcacaaacctaggtttgcctttttcccttctctgaaatcccagagcattattatttacatagctaatcctgggaagttattacacagacttttgttgttgttcttgtttataatttcrgataccttatgtttctaaacagattctaagtaatctaaggataagaacatgctcttatactacatctatatttgtcagaatgccgtggacaatgtgtacatagcaggcattataaatactcaatttttttattgaattggcaaaaggaagtgtgaagtgagtgggggatgatacagctgccagatggctaaaagataaaataatagg

SEQ ID NO: 365567 - DNA, 584 bp, Homo sapiens
atgatagcccacaaaacaagcatcaatacacttaagaaaaytgaaatattatcaagccctctctcagagcacagttgaatacaactgcaaatcaactccaaagggaagcttcaaaaccatgcaaatacatgaaaattaaacaacctgctcctgaatgatgattgggtcaacaatgaaatcaagatggaaattaagaaattcttcaaactgaacaattgtgacacaacatatcaaaacctctgggatacagcaaaggcggagctaagaggaaagttcagagccctaaaccaatatattgaaaagttgaaagagcacagacaatctaacatcacacctcagggaactggagaaataagaacaagccaaacccaaaccaagcagaagaaaggaaataaccaagatcagggcagaactaagtgaaattgaaacaaacaaacaaaaaatacaaaaagagaaatgaaacaaaaagctggttctttgaaaagataaagaaaaatgatagaccattagcaagattaagcaagaaaagaagagagaaaatccaaataagctcaattagaaatgaaacaggagatattacaact

SEQ ID NO: 365568 - DNA, 584 bp, Homo sapiens
atgatagcccacaaaacaagcatcaatacacttaagaaaactgaaatattatcaagccctctctcagagcacagttgaatacaactgsaaatcaactccaaagggaagcttcaaaaccatgcaaatacatgaaaattaaacaacctgctcctgaatgatgattgggtcaacaatgaaatcaagatggaaattaagaaattcttcaaactgaacaattgtgacacaacatatcaaaacctctgggatacagcaaaggcggagctaagaggaaagttcagagccctaaaccaatatattgaaaagttgaaagagcacagacaatctaacatcacacctcagggaactggagaaataagaacaagccaaacccaaaccaagcagaagaaaggaaataaccaagatcagggcagaactaagtgaaattgaaacaaacaaacaaaaaatacaaaaagagaaatgaaacaaaaagctggttctttgaaaagataaagaaaaatgatagaccattagcaagattaagcaagaaaagaagagagaaaatccaaataagctcaattagaaatgaaacaggagatattacaact

SEQ ID NO: 365569 - DNA, 584 bp, Homo sapiens
atgatagcccacaaaacaagcatcaatacacttaagaaaactgaaatattatcaagccctctctcagagcacagttgaatacaactgcaaatcaactccaaagggaagcttcaaaaccatgcaaatacatgaaaattaaacaacctgctcctgaatgatgattgggtcaacaatgaaatcaagatggaaattaagaaattcttcaaactgaacaattgtgacacaacatatcaaaacctctgggatacagcaaaggcrgagctaagaggaaagttcagagccctaaaccaatatattgaaaagttgaaagagcacagacaatctaacatcacacctcagggaactggagaaataagaacaagccaaacccaaaccaagcagaagaaaggaaataaccaagatcagggcagaactaagtgaaattgaaacaaacaaacaaaaaatacaaaaagagaaatgaaacaaaaagctggttctttgaaaagataaagaaaaatgatagaccattagcaagattaagcaagaaaagaagagagaaaatccaaataagctcaattagaaatgaaacaggagatattacaact

SEQ ID NO: 365570 - DNA, 562 bp, Homo sapiens
ttagaatgggccctaaattcagtgactggggtccttttaaagagaaaaagtgaagacacagaaacacacatgggaaagaaggttatgtgacaacagaggcaaagcttggagtgakgcagctacaagccaaggaataccagggattgctagcaagtaccataagccagggaggggcaagagaaaattcttgctagagccttcaaagggagcatggccctactgacaccttgatcttgaacttctagcctctagtactgtgagacgagaatttttgttgttttaagtgatacaatttgtggcgatgtttttatggcagtcctacaaaataaatacatactgcattaagtggctcagagaattattttgtgtggagaagctgctgaaataaagaccatgtgctttgatttggaataatcccaaagctacactgtggatgcagttagccaagggcactgctgctcctgacttacacaagaggccaccaggaagatgccaccatatctgccagttctagaaccatgttgtgtctgctactaaggacactagtaaaagtggacgcctc

SEQ ID NO: 365571 - DNA, 557 bp, Homo sapiens
tttaattatttgtggggagggtgagtggaaatgtgaaatattaccatggtatgtcaaagctaaacaaaaaggtatattcaggaaagtgctttatccctactgtctcatttccattagtcctttctttataacccttttccaatccactccctgtaggtaactattaataatttctacctccactttcctatggttttgtttgttttagagtgtgtaggggtgcatttatatgtgtgtgtgcacaaatgcacaggtatgagtattttgttaagtcgtcttcttcctaatattaaaagtagtaaactggctggtttttgtgtttttgtttcttgtatttgtattgttttgttttgtttggatgttatcgttactttggggtttttttcactttgctgagttcaactaaccatatgttctayaaaaatcaatttatagataatttcccttttttaaacagctatatagtgcttcattgtatggatattgttggggatgtttgcatttcttcacatcttttgagcaagacactgactgccctttgttccagactatctttt

SEQ ID NO: 365572 - DNA, 457 bp, Homo sapiens
ttatatgaaggtgtatctgccactatttgctttaccctgtgggaattggggctgataaaactggtgccaaaaatggcatactttggctacatttactctaggtaataaactttccttcatctctgaccwaggagtctcacgccttctgttagattctacaaaactgtgacagtgttttgacttgcagatagggtaaaatttcagacacttcacagttcttgacagatgtgtcataatttatttaaccactatcctatatatgggcatttaggtaccacagttccacagtttaatggctgctgatagaggacatgagacccatagattagagacaaaggactttattatgtgtgtgtatatatatatatgtatgtgtgtgtgtgtgtgtgtgtgtgtgtgtgtgtctatgtggatatatatacatacatatccaagaataataaatcactattgtttt

SEQ ID NO: 365573 - DNA, 533 bp, Homo sapiens
tgtaccagacacagccatagcaggtaggaatagtgccaggggtgcaggcagatccagtggtaggcactgrgtcacaaatcgttgatgaaacagtactaaattttggtcttcagaggttttttgtttagaggcatttggatgggaaggaaggagacacttcaccacgtttagacatagagctgactttgtctttactagaaataagtcaccattgtcctgcagggacaaggtgagtgggaaggaaggaaacttcgtctcagctcatgggctggtggtaagatccttcaataccagaacttttagaactgttcatatgtacctttagattggggttccaaactagtgaagtaactaactagaggaaaaatgcttttctttataatctctgtttatccttctatgtttcgttttacccttttacttagatttgaagttaagtactgttttttctcattaaaattatatttaaacatttacccaattgccacctagtcttagtcattaattttaatggctattattttgaaaaaaaa

SEQ ID NO: 365574 - DNA, 584 bp, Homo sapiens
gtctgaacattttcctccacttctaaaccaatatatgctcggaaatccagtagcaaaaaaaaaagagtaatttttacagaaatgttaaaagagattattaataaatattagcactaatcatatttactattactattgtattccattttcctacaaattgctctgaayggcttcatggttaaatataaaaaacaaataaacgaacaaaaacatcccagcacctgcagcatttgaaagtagaatttgctagggcataaaaccagtgagttatttgtcatgcagcttaattctgtcataaaatgctaatcagcctttctgtcactttgctcttgccccatatctttttatgagaacattaacatggttattacagagtagagactcttatggctacaaatatacttaccatttatgtatatttttgttcacaaaaaaagatgccaccaagagtcccagactcctagttaaccataatcctagtttctagcatgaggagcttgagtctgccatgccatctggatggtggcatcaggtggccagggtcagcttccttttgctcaggtctttgtgctagagtcaaacta

SEQ ID NO: 365575 - DNA, 507 bp, Homo sapiens
acagaagaaaagaactaacaaaataagttcagaaattaagaaagtcctaagtggaagaattgcatgagcccaggagctgccgtgggctgtgattgtgccactgcactccagcgtgggtgacagagtgagaccctatctcagaaaaaaaaaaaaaaaaggaagaaaaagaaattaagaaagtcataaacagaaaaacaatggaactaataaattcaagaactgtattataaataaaaacattaaaaataacaatcaactaacctgataaagatacgcagtaaagaaaataccatttgcaaatatttccttaaggaaatacaaaagcaggttctgcaaagagtgatgctgcaggttcagtttctagggtctgtttttttgcgatgttcattactatggtttcttgttttgacttgcagcctttacattgtcttcctttcaaataggtracactatttcctcttgtgaatgaagagattggttgttcatgcagcacaggaattgaactgt

SEQ ID NO: 365576 - DNA, 569 bp, Homo sapiens
tacctatgggaagaactattaagaggtagccagaagtatagatcgatattgggaagtggcaaatactttggctggatggtcaggggcttcataagtttcagattggaggtgttgggacagggaactcagagaaagaggtatgtagatggaccttttggaatgggtgtagagttaaggataattgttaccagggggactgcttacctaaggggatctgctgcagagaagactstcaataatcacagaggctagatgacttattctgtggatggtttcagcttctttatccagccactccataatctgctcatcaaaaaagtggccatgttaacaagaatgaatgttattcatgagctcaacaacatggagttcttctcaccgaggctgatctgactgccactgctgagtgcctggcatgtcaacatgtcaacggcagagaccaaagctgagctctcaatatggcaacattccccaggaggaccagccagccacctggtggcaagttgattacattggactccttccatcattgagggggcagcaattttttttcttcctggaatagatgc

SEQ ID NO: 365577 - DNA, 547 bp, Homo sapiens
aatctattatttattcattatayattttctactttctaccattgttcccccatgtaattttgaacagaaatgaagaaaactggccacttatctatgtgaatcttgtgtcccccctgatgttttgttttgaatctgcaaaaacaaaggtactttagtcagtttcagtctgggggcagagccattttgagtcataaagaacagttttacaataggatgacccaacacagttgaagggttaaattacagggaagaaaatcactcagctacatgctaatgtagcaatgggtgagggattgatttaaaaagtgtttacattcaatcctttatttcctcctttgctataactctctatcctcctttacttatttatttcatgactccctgggttattatttcagctttaccccagattaggggtagagactaggatcataacagctatctttttcttctcctaagtgtaagaggtgctcattggagctaccttatgggtacagcagaatagagactaggaatgcaggttgggtctcttttcttagcaatatgg

SEQ ID NO: 365578 - DNA, 547 bp, Homo sapiens
aatctattatttattcattatatattttctactttctaccattgttcccccatgtaattttgaacagaaatgaagaaaactggccacttatctatgtgaatcttgtgtyccccctgatgttttgttttgaatctgcaaaaacaaaggtactttagtcagtttcagtctgggggcagagccattttgagtcataaagaacagttttacaataggatgacccaacacagttgaagggttaaattacagggaagaaaatcactcagctacatgctaatgtagcaatgggtgagggattgatttaaaaagtgtttacattcaatcctttatttcctcctttgctataactctctatcctcctttacttatttatttcatgactccctgggttattatttcagctttaccccagattaggggtagagactaggatcataacagctatctttttcttctcctaagtgtaagaggtgctcattggagctaccttatgggtacagcagaatagagactaggaatgcaggttgggtctcttttcttagcaatatgg

SEQ ID NO: 365579 - DNA, 474 bp, Homo sapiens
aatggtgccatctaacataacccagtcaaggagcaaaaatccatcaagtccacagtcctgaagattattctgggagtgtgcatgggaaaccttgggggccattttagaattctgcctaccccaacctggaatgatacactgaagatcctgccttcctgaggggttaaggaaacttgtttggcagtgtgttgccctggtgacttttagcgtgtcatttaaattatccaaggctgtttcttcatttgcaaaaaaagagataataacaatattactaatgtttctatcctatagggttgtcatggagctccagtgagttagtgaatgtaacagggttttggaaaatgtagtgttttattgatttytgtgttgaagaagctcgacttgtcagaatcctgttcttccattcagtctcagttcaaattctatgtactccagttttcttcatctttttagaaatcccaccattccttgatc

SEQ ID NO: 365580 - DNA, 482 bp, Homo sapiens
tcaacttgtagaatacatttttttcctggggaagttttttttttgtttttgtttttgagttttttttgacagctttttcattcattcacttattttctcatttagtatttattaatacctactcttgctagacatcaagagaagctcttagattataaagatgaagactcttcctgatttttcactgctcatactctggtttagaaatygactcataagcaattccactgttaacaagttttatagtagagataggtaccaaatgtttggggaacatgagggaggaattggctgagtgtcttggggagtacatgcttgtaaacttcatttgctgtgaaatgtcttctttgatcttgtgtttattcctctatggtgggactaacaacaatgaaagtgatattgtatcttgagcacttatcacatgatggatgctatctctagcaataaataaatgctatctaatttaatcttcataatagctc

SEQ ID NO: 365581 - DNA, 581 bp, Homo sapiens
ggtagaattttctggttttcatctaaatgatttaagttccttgtcaagaaaatcgctaagttctattttttctgcatttaagacaaataactgagctgtcctttcaaagttttaagcttataatcctaaagattgctatacattagctgtaaaggaaacactattatatggccatctctttcctttacagttacaaagcactcatcatatgccataaatgactgtacttacaatgtctataggttttgattgtttagaagaagggaagacttctttagtttttaatccagatgtaaaggaaaggaaaataaaatgtattgaactcctaatgagtagtaagcaatgttgctgacaatctaattaatgtcaaataactaactcaatttatcaagcatgtactgaatatcttctgaatttcaggaattgtgctaggcacttttgtgagtgcaaagttgtttaagatacagctcttttcatgaaggatctccccatgtagtatgagataagattatatccmcacacaaaacaaataggtaaaatggacactcaggaaatgatctatgagaaaataattttcttca

SEQ ID NO: 365582 - DNA, 586 bp, Homo sapiens
ttatatattatcatttatttgtgcaattcatttcatcttcacaagaacccatccatgtragtactactattattgcttggacaatgaggcttgagttacttacccaaggtcacagagctgcaaatgtcagatccaggtttcaaatgcagaagtctttcctgaaagtgggggttgtaagcccttgtgcaacactggctcctgtgtggcttctgctctggtgttcagtgctgagtctgtctgtggcttgaccaggtgagagatcctctatctccagacgtccaggacaactcacacagagcccgatcttcctggcctgtgctctcacatcagacctttcccactgcactcccacccacctactaacaatacctaacatctgcactgtgcttaccacatcatcttatttaactgactgctttctccttggtacattcttccctgctaggaaacttcaccccaaatctgtgtgcacaccaggcttcctgccccatggggtccaggtcaaagaaaaaggaacctttacacctgtccttgctctgctactcctgagccttctcactttactcctgctgttacccactccacc

SEQ ID NO: 365583 - DNA, 601 bp, Homo sapiens
actactagcatcacatttataaatatttcatattaaaccaatcattcctctacagtttgggtgtcttgtggaggagaagggagatggtgagatggtatctcttctaacagagtatcagagaggcctacatgccactcctattaaaccaataataccttgaagccaaggaatttgtctgattcataattaaattgccagtccctagtacagaatctcaatccctggtacatagtgggtgttttatraatgttagtgaatatatgacatacaaacttcatgtgctagttccaggctaaatttatctgaatggtttctgaaaatcagatcagtccattctttctggatgataacatctcaacactaccaagatagtctttctgtgggaaacccacaacatagggttacaaacgctacaattcaaccactgcagttcaaactagactagaccatcatgatcatgcctgattcccaaagaagagatgaaagtggatcagcaggtaggagccaatgtagagatttcataataaaacacgttaagacttttaaataacagatttataataattctaacaaaacaggcttcagaattgactaggaatct

SEQ ID NO: 365584 - DNA, 510 bp, Homo sapiens
cattactgtgtggcttaaaattaaatgagtgacagtgaagttacaaaccctgtaaggcagagtttatatgtagctcatgatggtatcccacaagagtgcctgacactgggcaatctctgcataaatacataaatagatgagtaagtgtgcaagtacataatacaaagcttagcctgtaaggtaccaggacttggtgtttcaggaagtacctctatgtctctctaccctttgggtgatcttccactcaaagatcctttgaatatgtagaacctttggggtcttgctcttacactggctatctttactgggaatcactcattggagtgggtgtccagcagccttgcttataccmcatgaactggtcattttggccacatttttatggaacagagatggacatttgacccaataagttttcattcgatttttacaactcggagtttgaaattgaggctaagagagtctacctctttgcaggtcagttgctagaacagtaacacataaactgag

SEQ ID NO: 365585 - DNA, 597 bp, Homo sapiens
gtgatgaagtcatttccacttttaagtctaactaagtcaaataaccaattctgtataacatatttaaggctgtatttcctggaatctacactgatactaaaaaccttattaacgagagcttggtcaatatgatgattaattaaggtatttggggattatattaacacttaaattagtgaattctgagaggcagattgccctctataatgtgagtgggcctcatctatattatgttaaagttctgactagaaccaaaagactatcctgcccaaactagaggcctaccagcaaactgccttcagactttacctgcaccatcagctctcctaggtctccaggccaccggcctgtagaaaggaactacaccaccaacttttakgcgtctccagcctatcagattttggactcaccagcctccgtaattgcatgagctttttataataaaacctttttttattgcatacacacacacacacaaacacatatcctatgtgttttgtttttgtggagaaccctgaataacacagtcaaaaaatcagaagctactctagatatttcaagcaggaagagatttaatataaagagttagaaatttac

SEQ ID NO: 365586 - DNA, 393 bp, Homo sapiens
ctttttcttgccttttgtcacagaacaactctggaggaggcagccagggctcaaaagctgataaaaaagcttcatggactccatggtccaaagaaagaagaaaataactggagtcccctcttctattaagaagtaaccaaataggctgggcatggtggctcatgcctataattctagcattttgggaggccgaggcgggcagatcacttgaggtcaggagttcaagaccagcctggccaacatggcgaaaccccgtctcttctaaaaatacaaaaaaattagctgggtgtggtggcatgcacctgtaatcccagctacttgagatgctaggcrggagaatcgcttgaacccaggaggtggaggttacagtgagccaagattgagccattgcac

SEQ ID NO: 365587 - DNA, 567 bp, Homo sapiens
tggccttcagtaggagcagagccgtccatgcattgcaacagcagctagtggattggtgcaatgggttggtccatttgatgatgggaatttgaggaaacaaagaagactggagccaggcatggtacacatgcctgtggtcccagctacttaaggaggctgaggcaggaagatcgcttgagcccaggagttggaggctgcagtgagctaagatcacgccactgtgttctatctagcctgggtaaagagtgagactccatctccaaaaaaattaatgataaaaaagtaacgaagactcaagatggagagaaggtataaaatcaggagtsggaaatagtgaaggaactgaatcactgaagtaggactgcaggagctgtgccctcctggagtgtcctgtcagagttttgaaggctggcccagaggagtaagcactcaggggcctttgtattctcattatgtatctactctgtcatcacaagggcttatcaccagttcaggagtaacccaggtgaaaatctcagcagtgcctcttatcaactctggtgtcttggatggttccggaaagctctg

SEQ ID NO: 365588 - DNA, 461 bp, Homo sapiens
caccactgcactccagcctggacaacagagcaagactctcttaaaaaaaaaaaaaaaagaggttagcacaagggcctcagattccctgccataaaccttggtgtttttccttgattcagcatgaattggccttaggttccttgcctccagacccttttctcctgcctcaagtctgcccccttaaccaccaagcacaatgtctcttgtatagatattgatttgtgctcgaaagctgacttgttcagagcccgaatcgcccagcaaatcctcccaggagatgactcctcgctctcacctcccgcaatcttgtctccagttccagcagccgattcttgtcactgkggtcttggtggctgatcttctccagctgctcctccagttttcggttctgggcctccaacttcccagcctgtgtctccaggtaaaatttctgttgcctgagttcagaaatcatctcttct

SEQ ID NO: 365589 - DNA, 605 bp, Homo sapiens
tttcgcttgattttcttcattctctcttgtcgcggcctttgggtttccaccatgattatgaggcctccccagccacatggaactgtgagtccgttaaacttctttttctttataaattacccagtctcagggatgtctttatcggcagcatgaaagcaggctgatacagtcctagtgattcttttgcacattaaagtttgagaaacacttctctaggtgatctccaaatttctttcctgagctacttttcattttctagataatggttctcaaacttgagtgtgcacaagaatcccctggagggtttattaaaaagaaaaaaaaaaacagttttctgggctccactcctagaatctcaggttcaatacctctggggcagactcctagaatgtctatttctatcaagttcccaggccatgctgaggctgctggcccttggaccccagtttgcaaaccaccactctacattagaagtagtggtttaaaaaacaaaatcaagctttattgcccagcgggayatttcataatgtgagatgtttgtgtaagtctttgctgatggtttttcaggctcttctgttcttacacgctttagcttcactctatag

SEQ ID NO: 365590 - DNA, 560 bp, Homo sapiens
aggatgtttaacaccatctacagtttctacccactagatgccagtagcaccccctcctcactcccagttgtgaccatcaaaaacgtctgcagatggctcaagcctgtaatcccagcactttgggaggccgaggcgggcggatcacaaggtcaggagattgagaccatcctggctaacacagtgaaaccccgtctctactgaaaatacaaaaaattagccgggcgcggtggcaggcgcctgtagtcccagctactggggaggctgaggcaggagaatggcgtgaacctgggaggcggagcttgcagtgagccgggatcacgccactgcactccagcctgggcaacagagcgagaccctgtctcaaaaaaaaaaaaaaaagtctgcagacattgccaaatgttccctgggggtccaaactgcccccaggagagagctactcattcctamgccatggggctatggtgtgcattattcagttttagaatgtgaacttgcagttgcttgacctgtgcttggactcattactcaaacagtcaacttatagggtgaatccttatatg

SEQ ID NO: 365591 - DNA, 558 bp, Homo sapiens
atctgcagtcttgcaaattctacactctgcaaacccttgacctacagcagtctgaatagtgggctagttgggcatgttctggggtggcccagcgctmgaggccttctcagaaaagggggaggcagtggaaggcccaggggctttggtcaaactggacccagctcctgctgcatgtcctggcagagaggattactgggcaagtcattcaatctcttgagccactacttcctcattggagggacgggaggatgaaaagctccccctcagggctcttgtgtgggtagaatgagtacaaggcttatctcaggagcttgggaaactttgattcccttgttcctcagcctctgttccttccatttccaaagaggccatatagcttagtggttaggaataagatgctagtatcaaatagaattagggtagaatgccagttctgtctcatatatcttagctacatgaccttggcaaatgacctgaactccttgagtctcagtttccccatttgttggataggaataacacctgtcttatggggttaggttaggattacaatctatg

SEQ ID NO: 365592 - DNA, 558 bp, Homo sapiens
atctgcagtcttgcaaattctacactctgcaaacccttgacctacagcagtctgaatagtgggctagttgggcatgttctggggtggcccagcgctagaggccttctcagaaaagggggaggcagtggaaggcccaggggctttggtcaaactggacccagctcctgctgcatgtcctggcagagaggattactgggcaagtcattcaatctcttgagccactacttcctcattggagggacgggaggatgaaaagctccccctcaggrctcttgtgtgggtagaatgagtacaaggcttatctcaggagcttgggaaactttgattcccttgttcctcagcctctgttccttccatttccaaagaggccatatagcttagtggttaggaataagatgctagtatcaaatagaattagggtagaatgccagttctgtctcatatatcttagctacatgaccttggcaaatgacctgaactccttgagtctcagtttccccatttgttggataggaataacacctgtcttatggggttaggttaggattacaatctatg

SEQ ID NO: 365593 - DNA, 558 bp, Homo sapiens
atctgcagtcttgcaaattctacactctgcaaacccttgacctacagcagtctgaatagtgggctagttgggcatgttctggggtggcccagcgctagaggccttctcagaaaagggggaggcagtggaaggcccaggggctttggtcaaactggacccagctcctgctgcatgtcctggcagagaggattactgggcaagtcattcaatctcttgagccactacttcctcattggagggacgggaggatgaaaagctccccctcagggctcttgtgtgggtagaatgagtacaaggcttatctcaggagcttgggaaactttgattcccttgttcctcagcctctgttccttccatttccaaagaggccatatagcttagtggttaggaataagatgctagtatcaratagaattagggtagaatgccagttctgtctcatatatcttagctacatgaccttggcaaatgacctgaactccttgagtctcagtttccccatttgttggataggaataacacctgtcttatggggttaggttaggattacaatctatg

SEQ ID NO: 365594 - DNA, 557 bp, Homo sapiens
aaccactgatttttttttattttatttatttatttttttatttttttgaggaatgccccaggaacccggacaaagtgaatcttgtttgtgttatatgacaccttgaatctgttataagttggaccatttggagtttgacaaaacttcatgtagctgtttctgtgtgatgaggaccaaacaggcgcttgtttctttttcagattttgctccacccaagaaagattaaccatagtctacaaaattatttgtagtccctaagataaggcagtaagtaggcagtaaatatataaatatattaatagatacttgaagagagtccctccagttggaacccaagaagcccrggagggcaagactgtgtagaatcccttcttccctctgactccccagcagcagttaagttcctggttcactggcagggaactcatacccttcccagtttcccagtgtcccaagggaactgcaaggacgcaatgttgggtgacttcactgtcaacccaagtatttgcatcaagacaaaaggaggcccagtaagagttttctctaacttgcttctg

SEQ ID NO: 365595 - DNA, 608 bp, Homo sapiens
tgctttttaaacaggatctgcagggaattcctatgcaccttaaagttgagaagcactgctctagagcaggagtcagacataaactaagatgcctatgagggccaagtagatgtcctaaatgagagaagttggccagagcgggctgtgggacactggaaaaccgaagtgccatctagagagggtagccagccactccagctatgtggacctacattgccagcatttctgacatttccaacaaaagcccaaatagagaattttatgtgccatatgcttattttttatttattcaatgttttttgagatggagtctctctctgtcgcccaggctggagtgcagtggtgcgatctcagctcactgcaacctctgcctcccgggttcaagcgattctcctgcctcagcctcctgagtagctgaaattatgggcacccaccaccatacccagctgctttttggatttttaatagagacagggtttcaccatgtgggtcaggctggtcttgaactcctgacctggtgatccacccacctctgcctcccaaagtgctgggattacaggygtgagccaccgcgcctggcccatatgcttatttttaaatgtaagcag

SEQ ID NO: 365596 - DNA, 579 bp, Homo sapiens
agcttctggcttgaatacctgggagcacttaatataacacattttcttttgtgtagagaaacttttggaagagagtgtgggttccaccctgccatctgctggctgagacaccagacaagaggttgaacctctttctggcaaaagtcaaggtgcttagcttggcaaacaaggtgctaaatctaccccctcccggcctcttcagctgcccctttcatggcccacccacagacatctcaggctctggacggaccaagtttctcgccttttgcaaacacctctcccttccttaagtgtcgtccttgttccctcagtgtagaacatttacattctacctccctggaaacccctgcctgtcatcacataccctgcccagatgtaacaacttcttcaaaacctcccatgactccccagctttctaccttgaccccacctctccctatagtagttaatttttgtgatccaccctctttacccaagccccctgaaggaggtgtctacactctgttctcacataattacttccctctcagtccactgccgtcrgctcctgcactccactggaactggtttgcccaaggc

SEQ ID NO: 365597 - DNA, 523 bp, Homo sapiens
gaccaggctggtattgaactcttgacctaaagcaatcctcctgcctcaggctcccaaagtgctaagatttcaggcatgatccaccatgcctagcccaatggagatccttggaccactggtttttctcccctctgcacaaaatttgatagtgtayatgcattcctttttaaaaaacattttacactgaaatgtttcaagtctataaaaaagttgtaagaatagtacagtgaatactcatgtatccttacccagatttaccaaataatattttgcctcatttgccttaagtatctatttatcctttttattttttcagaaccatggaaggtgcttaatctgtttgggctactacaaaaaaatactataacctagacagtttataagcaacagaatttttcccccacagttctagaggctgggaagtccaagaccaagttgccaggcattcagtatctggtgagagccagctgttctctcactgtaacctctgacatgaatgggagattagagccctcatgaccta

SEQ ID NO: 365598 - DNA, 523 bp, Homo sapiens
gaccaggctggtattgaactcttgacctaaagcaatcctcctgcctcaggctcccaaagtgctaagatttcaggcatgatccaccatgcctagcccaatggagatccttggaccactggtttttctcccctctgcacaaaatttgatagtgtacatgcattcctttttaaaaaacattttacactgaaatgtttcaagtctataaaaaagttgtaagaatagtacagtgaatactcatgtatccttacccagatttaccaaataatattttgcctcatttgccttaagtatctatttatcctttttattttttcagaaccakggaaggtgcttaatctgtttgggctactacaaaaaaatactataacctagacagtttataagcaacagaatttttcccccacagttctagaggctgggaagtccaagaccaagttgccaggcattcagtatctggtgagagccagctgttctctcactgtaacctctgacatgaatgggagattagagccctcatgaccta

SEQ ID NO: 365599 - DNA, 523 bp, Homo sapiens
gaccaggctggtattgaactcttgacctaaagcaatcctcctgcctcaggctcccaaagtgctaagatttcaggcatgatccaccatgcctagcccaatggagatccttggaccactggtttttctcccctctgcacaaaatttgatagtgtacatgcattcctttttaaaaaacattttacactgaaatgtttcaagtctataaaaaagttgtaagaatagtacagtgaatactcatgtatccttacccagatttaccaaataatattttgcctcatttgccttaagtatctatttatcctttttattttttcagaaccatggaaggtgcttaatcygtttgggctactacaaaaaaatactataacctagacagtttataagcaacagaatttttcccccacagttctagaggctgggaagtccaagaccaagttgccaggcattcagtatctggtgagagccagctgttctctcactgtaacctctgacatgaatgggagattagagccctcatgaccta

SEQ ID NO: 365600 - DNA, 607 bp, Homo sapiens
catgcgattcaagtcagactggtcaaagccaatgagactcagttcttgggacttttgggtcgtgttatcaacaacagagctagcctgagaatgaagccgatacagaggaaagcagaactaagggctagaaagatcaagggcaagtttgggtgatggcatccgaccccaatatccatgtgtatctgaagccagtgtctatccctgaaatttttagttatgtgagcggataatgtcctctcttaataaaaaaccaattaggaatttatcatttgcatctgaaatcaaataccagctagcttggaagcaccattgaaaaaaccttcagkttagtttggttctttcaacatctcctgtcatttggatgttcactgttccataagctcaggggaaatggtccctctgtagcctgagggggtaaactttgattagcctaaacctaatgtcgcaattttattctctttatcagtgattgctttacacatgaacatgtgatgcaaatcttgtgaatgagaccgagatgaaaggtgctgcataggttctggaataggttttcttcttcctactcaagaggaaaaactgcccttttctgcctttgtatatggcttta

SEQ ID NO: 365601 - DNA, 489 bp, Homo sapiens
gggtttaactgtacagtcttttgtgattatgcataaagatcaaaggatgggagtagcaatgagtcacacagaggtctgttgcaagagattataagggtgtaccatgcagaacctctccaccaaaccttagggcccttgggaagcttcagtgagttaccctgggggccatcttggcaggagctgaaggtagaaaggtagagtttatctctaaaagattcatgggtatggctcttgacaartcgactatgagccccactgaaacccacagaggacaggcaaagggtttgggaaagctgtttcacccacagtgctggcagattggtctgtaggggacagagtgcaaaatgaaagaagactgtcagagcccccaaacttgctgtcaagaagaaggctgataaaactacttggctgcaaacacgtggatctttcgtgagaaaagaaggatgacccagaggcagaagcccagaaggcagagccaagagacatgga

SEQ ID NO: 365602 - DNA, 629 bp, Homo sapiens
gttctgcctagaggaggagacaagaaggagggaagcaagaatgaagccacattccaagccacccaagctttcttacatcactctgtctacacataagctgcaggttgtcacatttgacaaattgttttaaaatcttctcttttcctaattcctgccaactcttcctcaccctcacccacagaaacttctctaagaatgacccaggaaggggggagagtcatagaaccccacccctgaggacttttgcagtttaaatagcaatcttgagtagttttcaagtttttattttttataattcttcagaattcctttattaaataaactcttayatgaaactcgagatggatgcataggtgggtgggcagatggatggatgtatgggtggatgtttggatgaatgggtgggtgaatggatgggttggtgggagggagggaggtaaaacaatgggaatagtgtagttaaacagacacaccctagagccagactacaaaggcttgaatccttgccttgtcatttactagctgtgtgaccttgagtagtcacttagacattcagcacttcagtttctcatctgatgatgggcatagaagttgaaacccatctcataggaatatcgtgactactgcat

SEQ ID NO: 365603 - DNA, 629 bp, Homo sapiens
gttctgcctagaggaggagacaagaaggagggaagcaagaatgaagccacattccaagccacccaagctttcttacatcactctgtctacacataagctgcaggttgtcacatttgacaaattgttttaaaatcttctcttttcctaattcctgccaactcttcctcaccctcacccacagaaacttctctaagaatgacccaggaaggggggagagtcatagaaccccacccctgaggacttttgcagtttaaatagcaatcttgagtagttttcaagtttttattttttataattcttcagaattcctttattaaataaactcttatatgaaactcgagatggatgcataggtgggtgggcagatggatggatgtatgggtggatgtttggatgaatgggtgggtgaatggatgggttggtgggagggagggaggtaaaacaatgggaatagtgtagttaarcagacacaccctagagccagactacaaaggcttgaatccttgccttgtcatttactagctgtgtgaccttgagtagtcacttagacattcagcacttcagtttctcatctgatgatgggcatagaagttgaaacccatctcataggaatatcgtgactactgcat

SEQ ID NO: 365604 - DNA, 541 bp, Homo sapiens
ctcctgggaaacattgcttttaggccacttaactagttccttttctcatttaatggagcagataatgaggcccagagagaagatatcacttgcccaggctcacacaaagccagattttgaacccrggtctcctggctcttgggctttgtgattctcagagatctttctgcatgtgatgaaaatcaaggcagtacatgaggaatttgagaaggtccagcaacctgtggctctgaccttgactgagctgctctgtctgctcccggacccctccaggatgggtccagaggccttctgctaatgaagtagcaactcgagctctcttctggagcggcgacggaggtggatgaaggcagtgagctatgagcttagttcacacttggaccatgtcttaagagcataggatacaaggtgtgacctgcagtacatgcaaagtgcggtgattaattcacagataagccttgtcagcttcccctcatgccctccctctcactcttgctctgacatattagagcaactgtctctctcctctccagaaagatag

SEQ ID NO: 365605 - DNA, 541 bp, Homo sapiens
ctcctgggaaacattgcttttaggccacttaactagttccttttctcatttaatggagcagataatgaggcccagagagaagatatcacttgcccaggctcacacaaagccagattttgaacccaggtctcctggctcttgggctttgtgattctcagagatctttctgcatgtgatgaaaatcaaggcagtacatgaggaatttgagaaggtccagcaacctgtggctctgaccttgactgagctgctctgtctgctcccggacccctccaggatgggtccagaggccttytgctaatgaagtagcaactcgagctctcttctggagcggcgacggaggtggatgaaggcagtgagctatgagcttagttcacacttggaccatgtcttaagagcataggatacaaggtgtgacctgcagtacatgcaaagtgcggtgattaattcacagataagccttgtcagcttcccctcatgccctccctctcactcttgctctgacatattagagcaactgtctctctcctctccagaaagatag

SEQ ID NO: 365606 - DNA, 541 bp, Homo sapiens
ctcctgggaaacattgcttttaggccacttaactagttccttttctcatttaatggagcagataatgaggcccagagagaagatatcacttgcccaggctcacacaaagccagattttgaacccaggtctcctggctcttgggctttgtgattctcagagatctttctgcatgtgatgaaaatcaaggcagtacatgaggaatttgagaaggtccagcaacctgtggctctgaccttgactgagctgctctgtctgctcccggacccctccaggatgggtccagaggccttctgctaatgaagtagcaactcgagctctcttctggagckgcgacggaggtggatgaaggcagtgagctatgagcttagttcacacttggaccatgtcttaagagcataggatacaaggtgtgacctgcagtacatgcaaagtgcggtgattaattcacagataagccttgtcagcttcccctcatgccctccctctcactcttgctctgacatattagagcaactgtctctctcctctccagaaagatag

SEQ ID NO: 365607 - DNA, 541 bp, Homo sapiens
ctcctgggaaacattgcttttaggccacttaactagttccttttctcatttaatggagcagataatgaggcccagagagaagatatcacttgcccaggctcacacaaagccagattttgaacccaggtctcctggctcttgggctttgtgattctcagagatctttctgcatgtgatgaaaatcaaggcagtacatgaggaatttgagaaggtccagcaacctgtggctctgaccttgactgagctgctctgtctgctcccggacccctccaggatgggtccagaggccttctgctaatgaagtagcaactcgagctctcttctggagcggcgacggaggtggatgaaggcagtgagctatgagcttagttcacacttggaccatgtcttaagagcataggatacaaggtgtgacctgcagtacaygcaaagtgcggtgattaattcacagataagccttgtcagcttcccctcatgccctccctctcactcttgctctgacatattagagcaactgtctctctcctctccagaaagatag

SEQ ID NO: 365608 - DNA, 561 bp, Homo sapiens
cggctattaaaaaagaacgcggcagctctttttatatttaataaggaaagatcactaagatacattattagggaacaaaactcaaggtgcagaasagcatataggatactagtatctctgtaaaaagaaataaacattttgcttaaatgtacatatagctggaaagacgtgagaaataatagtggttgctggaaggtgtgggggcgggcaggaattcgagtggttaggaaacaaggatgggggcgatgcttttcactgtaaactcttttcttttgaatcttgtactaggtcaatgtattgtctatttgaaaagagtaaatcaagctactctggaggctgaattgggaagattgcttgaggccaggagttcgagaccagcctgggcaacatagggaggcctccgtctctacaaaaacaaagaaaattagtcaggtgtcgtgatgcatgcctgtagtcctagctacctgggaggctgaggtgggaggatcacttgagcgcaggagttcgaggctgcagagagcaatgattgtgccactgtactccagcctgggtgacagagtc

SEQ ID NO: 365609 - DNA, 556 bp, Homo sapiens
ctatccttgcctcttacaattctgacataaacctttgacttcagtgaagaaaacctgctctttggctgttaacataatttgtatactcaccctttttaccttgtgctgttctgatagaggattgctttaggcagctgcaatatacttacacttgtttaggcatttctagatatgtgtctcttttattttgagcaaggaccatttgcttctttccaatctttccacagcactgagtgcagggttttgaatagactggacacttgatacatatagttgactgacagaccttcacactttctttcttaatagtttccaggatgggccagtcatgagctatcaccttcaagcatgcaactctgactcaataggagcagagatcccagttcccatcagcatcttagacaaatcaggataaaaagcacatccagaactcttctagctatccccagcctccagccagwatgagaagagggagctcaaaagatactcaagattgattttgtgtttaaaggataagggtagagaagaaagagatttccctgtgtagcttatgtgg

SEQ ID NO: 365610 - DNA, 550 bp, Homo sapiens
ttagtatcttggaacaatgttgccttttgctgagccttgggcattgagggaaaactgactttctgctttttatgccagataaggaaaaaataaaaataaaaatgtgaaactgagggaagtacaaaggggttttgagggagttggggtagaaaactgtatcttcttgggacttgaatcaaatgttttaagtctgccaagccagatcatgttagaccttcacctcttagatcctgtggttttgatcaaygtgctctgtgagctaccctgccctaacccaacttctctaactctaccacagatggtaaaagaaaatgagttttgaaggaatacagcaaatattcacaagtatctcccagacttaatgcacctggatgaagatgagattctcagctctacttccccctccccattcccttatgcatcaccattgtcaaggtcaggtgctgaccagggacaatttcccttgaactgttctttgtttagttctccatcacttgcctaatcagagaaaagaagcagacatggccacagcctttccagtacagaggag

SEQ ID NO: 365611 - DNA, 550 bp, Homo sapiens
ttagtatcttggaacaatgttgccttttgctgagccttgggcattgagggaaaactgactttctgctttttatgccagataaggaaaaaataaaaataaaaatgtgaaactgagggaagtacaaaggggttttgagggagttggggtagaaaactgtatcttcttgggacttgaatcaaatgttttaagtctgccaagccagatcatgttagaccttcacctcttagatcctgtggttttgatcaacgtgctctgtgagctaccctgccctaacccaacttctctaactctaccacagatggtaaaagaaaatgagttttgaaggaatacagcaaatattcacaagtatctcccagacttaatgcacctggatgaagatgagattctcagctctacttccccctccccattcccttatgyatcaccattgtcaaggtcaggtgctgaccagggacaatttcccttgaactgttctttgtttagttctccatcacttgcctaatcagagaaaagaagcagacatggccacagcctttccagtacagaggag

SEQ ID NO: 365612 - DNA, 550 bp, Homo sapiens
ttagtatcttggaacaatgttgccttttgctgagccttgggcattgagggaaaactgactttctgctttttatgccagataaggaaaaaataaaaataaaaatgtgaaactgagggaagtacaaaggggttttgagggagttggggtagaaaactgtatcttcttgggacttgaatcaaatgttttaagtctgccaagccagatcatgttagaccttcacctcttagatcctgtggttttgatcaacgtgctctgtgagctaccctgccctaacccaacttctctaactctaccacagatggtaaaagaaaatgagttttgaaggaatacagcaaatattcacaagtatctcccagacttaatgcacctggatgaagatgagattctcagctctacttccccctccccattcccttatgcatcaccattgtcaaggtcaggtgctgaccagggacaatttcccttgaactgttctttrtttagttctccatcacttgcctaatcagagaaaagaagcagacatggccacagcctttccagtacagaggag

SEQ ID NO: 365613 - DNA, 590 bp, Homo sapiens
ctgtcggggcgtgggaggaaagcaagataacgcaggcgacccgagaaggacggtgaatctgactggccagactgggaagtaggcgaaggggaagcagcgatactgggaaggtgcggtgggacctgtaggagaagagaaacagaaaagaaaggaagagaaggggagaggccagcagagaggaagcagaaaaagggaaggtggggccaagaaagagaaatgtgctggaggasaggaaggcgtggggccctgaagggacgcgaattcttttttcccagcgtccaggccttccagaggctggggttcatctagagacctgctgaggaggggccacactcgcctcttttgctcgcagcaatctattctgccaggggattccctggaacacaagaatcctggggctctaagggaccctaaagagcgtctggtcctgctccttccttcatccgtgacgaaacttgggatgggaaggctgttcatgctgggtttcctctgggagtgagacctcaagacaactgtggcagttcctgatagaaacactaaataaacgaggtcctctgtggcaagggctaacgcttccagaagcttctgaa

SEQ ID NO: 365614 - DNA, 590 bp, Homo sapiens
ctgtcggggcgtgggaggaaagcaagataacgcaggcgacccgagaaggacggtgaatctgactggccagactgggaagtaggcgaaggggaagcagcgatactgggaaggtgcggtgggacctgtaggagaagagaaacagaaaagaaaggaagagaaggggagaggccagcagagaggaagcagaaaaagggaaggtggggccaagaaagagaaatgtgctggaggacaggaaggygtggggccctgaagggacgcgaattcttttttcccagcgtccaggccttccagaggctggggttcatctagagacctgctgaggaggggccacactcgcctcttttgctcgcagcaatctattctgccaggggattccctggaacacaagaatcctggggctctaagggaccctaaagagcgtctggtcctgctccttccttcatccgtgacgaaacttgggatgggaaggctgttcatgctgggtttcctctgggagtgagacctcaagacaactgtggcagttcctgatagaaacactaaataaacgaggtcctctgtggcaagggctaacgcttccagaagcttctgaa

SEQ ID NO: 365615 - DNA, 590 bp, Homo sapiens
ctgtcggggcgtgggaggaaagcaagataacgcaggcgacccgagaaggacggtgaatctgactggccagactgggaagtaggcgaaggggaagcagcgatactgggaaggtgcggtgggacctgtaggagaagagaaacagaaaagaaaggaagagaaggggagaggccagcagagaggaagcagaaaaagggaaggtggggccaagaaagagaaatgtgctggaggacaggaaggcgtggggccctgaagggacgcgaattcttttttcccagcgtccaggccttccagaggctggggttcatctagagacctgctgaggaggggccacactcgcctcttttgctcgcagcaatctattctgccaggggattccctggaacacaagaatcctggggctctaagggaccctaaagagcgtctggtcctgctccttccttcatccgtgacgaaacttgggatgggaaggctgttcmtgctgggtttcctctgggagtgagacctcaagacaactgtggcagttcctgatagaaacactaaataaacgaggtcctctgtggcaagggctaacgcttccagaagcttctgaa

SEQ ID NO: 365616 - DNA, 430 bp, Homo sapiens
tttggctgggggcatcggcaagactcctktctcaagagctgagctccccgagtgagcaatttctgtcctttttaagggttcacaactctaagggggtgcgcgtgagagggtcgtggtcgattaagcaagcagggggtacgtgactgggggctgcatgcaccggtaattagatcggaacacaacaggatagggatttttcacagtgcttttctatacaatgtctgtaatctatagataacataaccgattaggtcaggggtcgatctttaactaccaggcccagggtgtggcgccgggctgtctgcttgtggatttcatttctgccttttagtttttagtttttctttctttggaggcagaaaatgggcataaggcaatatgaggggtggtctcctcccataataccagtcctgctgtattggaatcacta

SEQ ID NO: 365617 - DNA, 430 bp, Homo sapiens
tttggctgggggcatcggcaagactcctgtctcaagagctgagctccccgagtgagcaatttctgtcctttttaagggttcacaactctaagggggtgcgcgtgagagggtcgtggtcgattaagcaagcagggggtacgtgactgggggctgcatgcaccggtaattagatcggaacacaacaggatagggatttttcacagtgcttttctatacaatgtctgtaatctatagataacataacygattaggtcaggggtcgatctttaactaccaggcccagggtgtggcgccgggctgtctgcttgtggatttcatttctgccttttagtttttagtttttctttctttggaggcagaaaatgggcataaggcaatatgaggggtggtctcctcccataataccagtcctgctgtattggaatcacta

SEQ ID NO: 365618 - DNA, 430 bp, Homo sapiens
tttggctgggggcatcggcaagactcctgtctcaagagctgagctccccgagtgagcaatttctgtcctttttaagggttcacaactctaagggggtgcgcgtgagagggtcgtggtcgattaagcaagcagggggtacgtgactgggggctgcatgcaccggtaattagatcggaacacaacaggatagggatttttcacagtgcttttctatacaatgtctgtaatctatagataacataaccgattaggtcaggggtcgatctttaactaccaggcccagggtgtggcgccgggctgtctgcttgtggatttcatttctgccttttagtttttagtttttctttctttggaggcagaaaatgggcataaggcaatatgaggggtggtctcctcccwtaataccagtcctgctgtattggaatcacta

SEQ ID NO: 365619 - DNA, 672 bp, Homo sapiens
atacagtatacactacttcgtgtctttctttttaaattttttattattttaaaaattactatgatgatttttgttttaatagtttctggggaacatgtggtgtttggttacatagataagttcttttgtggtgatttctgagattttggagcacccatcacctgagcagtgtacaccgtacctaatgtgtagtcttttatctcttaccccactcccacccttctcccaagtccccagagtccattgcatcatccttaagcctttgagtcctcatagcttagttcccacttacacatgagaacatatgatatttggttttccattcctgagttacttcacttggaataatgatctccaactccatccaggttgctgccaatgccattatttcattcctttttaaatccactcattgattgatgggcatttgggctggtttcatatttttgcaattgtgaattgtgctgctataaacatatgtgtgcaagtgtctttttttcatataatgctttcttttcctctggataaatacccagtagtgggattgctggatcaaatggtagatctacgtttagttctttaaggaatctccatactgttttccatagtggtcgtactagtttacattcccaccagcagtgtraaagtgtttccttttcaccaaattcatgc

SEQ ID NO: 365620 - DNA, 619 bp, Homo sapiens
atgagaggagaataagcaggtatcagaccataactgtttacatatgatagaatatcaaaccaaagttagaccagaccttaaagaaattccactactcgatggaatgaggctgtttgtgaataggccatcctgagtgatagatggtaaaagacacaatgtccaggctgtcattgatggaaacaaacaaaccttatgagaaaaaggtagattacccaataactgctcagcccaaacctgtgaattacatgctcttaaccaagccctgaagctcatataaggccaagaaggcactgtatatgctawttccagatatgcctatggagtagtacacacctttggaaagatctggacaaagtggagcctaataaatagcaggtagaaagaattggtatatgggaaactggtcaaacaagttttaaaaagcctcctgcttccagcagaggtagccatagttcatgtaaacggccatcagaaaggaaactctatagaagctagggttagggttagggttagggttagggttagggaacaggcttgtggataaagctgctaagcagcctccctggaggtagaagttaaactatttggcctaatcccagatatccctaaggtggtatta

SEQ ID NO: 365621 - DNA, 579 bp, Homo sapiens
tcggctctatcctgccaccactccatgtcaggagctgggcctgaacagaaacatctgaaagactgcctcttctccacgcccaacacctgctatcccatgggacggactagaccttgccagagcccctggtatggcaagcatgttgttcaggtccctgaggtgtgtctgaacaacatgcttggaacctgaagaacatgcttgccatagcagaggctcatcacatgaagcatgtggcctgtactttctaaacattccctagtcatatctgaatttctagaccttaaatcttgtttgagttctccctctctgccctcgaaaatccagctttaacatagctagcacgtatgcagtccttactagatgctggacacctttccaggcattatcacatttaatcctgccaaacaccctaagaagttaagtgctatgctccttttacagatgagttaactcaaggttggaaarcttatggaatttaaccaaggtcatagagtttgtgagtggccaagccaggacctgaacctagatttgaattatctggtttatgctttcaagtgccacacattacagtgattccct

SEQ ID NO: 365622 - DNA, 351 bp, Homo sapiens
tccctgccctgtttgatgtgtcaggcagaatcctacaatgctgcatatcagtggaaaccttgtaaatgaattccaacttctaaatatacgaaagagctttctaagacaatttctttctctgcagtaaataattctttgttaaaatgagtcagcagcctctatctgtatgatcaagatttggttttaggatcgctaaaagtaggggacttctatgtgctggggggacaaggctgtcttttcctaattttgytcacaaaaatggatatcagtaggagacagtggtggctttgccatataccagctgtgtgcccttcggcaagtcacttatcgtctctggaccttagtttcccc

SEQ ID NO: 365623 - DNA, 351 bp, Homo sapiens
tccctgccctgtttgatgtgtcaggcagaatcctacaatgctgcatatcagtggaaaccttgtaaatgaattccaacttctaaatatacgaaagagctttctaagacaatttctttctctgcagtaaataattctttgttaaaatgagtcagcagcctctatctgtatgatcaagatttggttttaggatcgctaaaagtaggggacttctatgtgctggggggacaaggctgtcttttcctaattttgctcacaaaaatggwtatcagtaggagacagtggtggctttgccatataccagctgtgtgcccttcggcaagtcacttatcgtctctggaccttagtttcccc

SEQ ID NO: 365624 - DNA, 560 bp, Homo sapiens
aaggcaggcagaggaatgagaaagcttcaggtgtgcttggattggagggttttggcctggaggagctggaggcaggatagctagaagcagacattttatgtgatgggcttgggagcacagttggctttctctggttggcccggagytggaagcagaggcagaaaagagaagagctgggagtcattgaccaggctatcactattctaggctgattgttgcagaggttgtggcttgacttcctggctgctgcacggtggaagatcagagttgtattgttatatgttgtctggccgttgtccatttgtatattcagtctctcgaaataagatacttttcttaggcctaaggaaatgtgttatttcccagcgtaactgattgtctgttttaatcatgtctcttatgaatgagatgtgacacatttcattctggcttaggtgaggacccagatcaaagcgtgaatgtgcacaagatttgctgagatcgaatttcagagctggagacacatggaaaagaaacagatgtgtaccattccacgtgccatgctgctatttcagactgca

SEQ ID NO: 365625 - DNA, 596 bp, Homo sapiens
tctgcttgtctggttggggactgatctttattcactactaaagctctctgggtcagcatttagattacttattaagctttatttgatggccagagaaaaatgcattgagattgtggatataaatgaagaccacccaaatgagaacaaacagaggaatatttactcagagcttactgtgtcagtgggggttggtcaccagcacttgcattagcagagactcaaaggcaggcagaggaatgagaaagcttcaggtgtgcttggattggagggttttggcctggaggagctggaggcaggatagctagaagcagacattttatgtgatgggcttgggagcacagttggctttctctggttggcccggagttggaagcagaggcagaaaagagaagagctgggagtcattgaccaggctatsactattctaggctgattgttgcagaggttgtggcttgacttcctggctgctgcacggtggaagatcagagttgtattgttatatgttgtctggccgttgtccatttgtatattcagtctctcgaaataagatacttttcttaggcctaaggaaatgtgttatttcccagcgtaactga

SEQ ID NO: 365626 - DNA, 567 bp, Homo sapiens
gactttttaaaacttaactttaaaatacacaagtaatactgtaaaacaataatctgcaacaatacagacaaggccagcgtccatgytgacaacccccttccagtcctgattgcttcgaaggggtaaccaacccatttacagtttagtgttgaaccctaaagagcactttctcatgccccattctttgtatctgctcgaagagctctatggtaagttaactagtcattctcccatcagtgggcattagtttgcctccagtttttcactggcacctcaagcagtgctgcaggggacatccttgcctgccacgttgaacacaaacaaggatttctctggggtcgaggcagcagggtagagtggctcagagcttggagcctggagccagtttgctgggctcaaatcctaactttaccatctataaagtaccagttttaaacttaagtgtaaataaagttaaaaaatgaaggctcaattgaacaagggtccccagagttgccagccccaggatgtttcaccatcccttactgatccccacaaccctgcctatacctctgtgaatagtccctt

SEQ ID NO: 365627 - DNA, 567 bp, Homo sapiens
gactttttaaaacttaactttaaaatacacaagtaatactgtaaaacaataatctgcaacaatacagacaaggccagcgtccatgctgacaacccccttccagtcctgattgcttcgaaggggtaaccaacccatttacagtttagtgttgaaccctaaagagcactttctcatgccccattctttgtatctgctcgaagagctctatggtaagttaactagtcattctcccatcagtgggcattagtttgcctccagtttttcactggcacctcaagcagtgctgcaggggacatccttgcctgccacgttgaacacaaacaaggatttctctggggtcgaggcagcagggtagagtggctcagagcttggagcctggagccagtttgctgggctcaaatcctaactttaccatctataaagtaccagttttaaacttaagtgtaaataaagttaaaaaatgaaggctcaattgaacaagggtccccagagttgccagccccaggatgtttcaccatcccttactgatccccacaacsctgcctatacctctgtgaatagtccctt

SEQ ID NO: 365628 - DNA, 591 bp, Homo sapiens
tcagggaaaaatgaaaattcagccccttcttccaaaatcagggaaaaaatgccatgaaaagtatgaaaatataaagcccttttccttccttctggggcccctctttcaacttctcatggtgtttttacttgctatttaaggccattctgaaaaagaaaaattaaaatcttaaatcattagtatgaattttaccatttatctttttattatgtgatatcagttttaaatgcaaatataagagcaattaacacatatgcagaatcgtccgttactcaatccatatttcatagctcgtgcaagcatgggtatatcattgctaccaggacagtggaaacgctgcccagaactacctcagcactttctcatctcacctcttgatactccttctaccagacctctcccttcgcctcctggtgggcgaggaaggggagaggagctaggggttttctgatcttcgctgttccttctgtgccttccttttcagcrgttaagtggctggaaggaatacaggaagtaacaggagtaataaaggacctgacagggttccttggtttgttgtgttttgtagaatgtctttgccttttttctgcc

SEQ ID NO: 365629 - DNA, 455 bp, Homo sapiens
tgctgtttggtgattttgtcactgtgcgaacatcacaaagtatatttatacagacccaggtggtagagyctgctacacacctaggctattaacctgtacagcttgttactgtactgaatactgcaggcaattgcagcccagggataagcatttgtgtatgtaaacatctctaaacatgtatagtaaaaatatagtattttaattcacagggtatgcatggtctgttgtcgacagaaatgtcattttgtggtgcatgactgtatgtagatatagtattccccgcttgtctgcaggggatacattgcaagatccccagtggacgcctgaaatcacagatggtactaaatcttatataggctgttttttctatacatacatacctatgataaagctcaatttataaattagacatagtaagagatgaatgacaataacaaaataccacaattataaca

SEQ ID NO: 365630 - DNA, 485 bp, Homo sapiens
aactaaatcctcatagtcaaaagattatcagaattaaaagttaatacatataaaatgcttagaatggtgtttgatctattacaaggattaagtaactgatgacttaatgatgataacgattttaatacctgcaaaatgcttagtatatataaatgatgatgataatgataattctattcttgttttccctttgcccttatttttaaatatttyatcttttttgttgttttaatttataaagttgcctctaacgttttatggacttgctggcacatgatccaagacttgccctcaagggtggctctccttaccctgactattcatttttatgagtatacacaaagcacctactgtttactcagtagtgtccatgaacttttttctactgctgttcatttgaatcatctagcaaacacagaaaaatactgggcctcacttgagaccatctgaaggaactctgagggggcaggtcctaagcataatat

SEQ ID NO: 365631 - DNA, 539 bp, Homo sapiens
caacccaaattttctttctttcctttatgctaggcagatacttttaaaacaaatgttgtctgggaattgttgttrgtggggtattcttctccaggcatttgggtatgtctgttttttttttttttttttttttttagagacaaggtttcactcctgtcacccaggttggagttcagtggtgcaatctcggttcactgcaacctccgcctcccaggctcaagccatcctcccacctcagcttcccttttagctgggactacagggttgtagcatcacacctggctaatttttgtgtttttagtagagatggggttttgccataatgttgcccaggctggtctcgaactactgggctcaagtgatgtgcccacctgggcttcccaaagtgctgggattacaggcctgagccacagcgcctggtcttgggtcggtcatctttacctctccttcatagacactttaggcagcatatttaaggctaaatagaaacaatgtaaggatctggccattaatcacgtcagtgtccaatccattaagcc

SEQ ID NO: 365632 - DNA, 495 bp, Homo sapiens
agaaaatgaagatagtcagggaaaaggttctatttgggtgctacagctgaggagaggagatgggagatcagtctcaaatccatctccctaactaaaataaggggtttatagaacaaaaatgtaactatgtgcagggcaagagaattaaggagaactaaggaagaggagttgatcaataggaagcaagtsgttgcttaggcaattgtgacaggtgaggggtacctcattgtccacatgtggtgatctggtaagtttcagttccttaatactatctgggaatcccggtggttgctttcctgagaaaggaacccagataagacaaatataactttctcaggtttcaaaactgggagggtcaatttctatgtttatcaaaaagaaacaataaacatcagttctatggaacaattggataggtttcagtaccagtagctactggtttgaaacactcttcccagctcctccttcctggtctcctctccatctctccatccc

SEQ ID NO: 365633 - DNA, 640 bp, Homo sapiens
ccactgagaaataaacaaaattgattattaaataagtaatattattattattattaaataagtaataccattaattaagtgaaaatcatgttgaaaatgtctctctttctgcctttggctcattgctgtactttaacagcagayatatcttaaggaagagtactaaagctcagagtcatctaaatgtgatgatctctgctgttttctaggtcacctctctctgttactgagggatgctggcttaggaaatgtgcactaactttattgtctccataagaaatatatacaataatgcatcaattaatgataagcaccaagaaatgcagcttaggcaatttcatttttgtgcaaacatcatagactgtacttacacaaacctagatagtataggctactccacacctaggatatatggtagagcctatcgctcctaggctacaaacttgtacagcatgttactgtactgaatactacaggctgttgtaacacactggtaaatatttctaaatctaaacatagaaaagttacagtaaaaattcagtataaaaaataaaatatgatatgcctatatagggcacttaccatgaatggagcttgcaggactggaagttgctctggtgagtgagtgagtggtgaatga

SEQ ID NO: 365634 - DNA, 552 bp, Homo sapiens
atcagttttgaaaacaaaacaaagacaaaatgagaagaaacacacaatttcttttcagctatttttaaaaagagcatcatcacacatttttgagattggtttctagatacagtactgacaactgtttaggtaactttyaccattagaatcttctagccagtggaacatgtttatattttgttttcaagtacacacatgaaggcccaatagtgataaaaggcttgggatcaaaaatcactgaaaagtctcatatttttattgctatttaatctaagtgaatgtcacttaattttgataatggtaaattacaagtaaaggagcttgagagaaatccaagtcagtataatttctttaaggacaaggctaatccttcctgaacattaaaactttgtacctgagtcatagattttcctcattacccaaaggaaaagatctgaaaccagctgaaattattgattgaattgaattaccttggaaacagacaccatttaaacatttttattctcacctactttttgttttcttttttttctttttttattttttttgaga

SEQ ID NO: 365635 - DNA, 552 bp, Homo sapiens
atcagttttgaaaacaaaacaaagacaaaatgagaagaaacacacaatttcttttcagctatttttaaaaagagcatcatcacacatttttgagattggtttctagatacagtactgacaactgtttaggtaacttttaccattagaatcttctagccagtggaacatgtttatattttgttttcaagtacacacatgaaggcccaatagtgataaaaggcttgggatcaaaaatcactgaaaagtctcatatttttattgctatttaatctaagtgaatgtcacttaattttgataatggtaaattacaagtaaaggagcttgagagaaatccaagtcagtataatttctttaaggacaaggctaatccttcctgaacattaaaactttgtacctgwgtcatagattttcctcattacccaaaggaaaagatctgaaaccagctgaaattattgattgaattgaattaccttggaaacagacaccatttaaacatttttattctcacctactttttgttttcttttttttctttttttattttttttgaga

SEQ ID NO: 365636 - DNA, 573 bp, Homo sapiens
attaacagtgatggaaaaaggagtagaactgaaggcttctgaaatgaagagactgtttggagcaggtgctgggagaaatgtggtaagaaatgagatagaagtgaaatgactgccaaacaataagggcctccctgagattagagagaatgaatctgtaacaacaggtaaataatcaaaatatctcccaattattccaaactacatgtttaaaagatgaagtataagcccaaaaaatataccagatcactgatggctggatttaataactcaatgtaatttcttaaaaaaagcaatttggcaatacaagagctttaaaatgttaataccctctgacctaattctctttctaggaatctatcttaaggcaatactcaggaactcaaagacagtccttgtcaaatgggaaacagtgcagygtggtagaaagagcacaggccttagtcagtcagatttgggtttgaatcctgactctgccacctgatagctgtgtaactttgcttaacctctctgagccttggtttcctcatctgtaaaacgaagatgacagtaactagattacaaagttgttgtgaa

SEQ ID NO: 365637 - DNA, 464 bp, Homo sapiens
ttagctttcaaattggcacaggaatgaacagttttagtggcgttcactttctggtgacaaagtatattttgggttttgcagttaaattttgttcttcagtaatgtaacatatataaaacatatgtttgtgggtggttatttggwtatttccctcataggtttcatgaccattcttatagctatggtaattgaatccccaccaaagcacagaagggtcactggtgggtaaaatagggtttctacttatgaggagctttcagttaaggtgacaggtgttgaatggggattaaaattagtaaatgactaaaccatagattgaacttggatcttagatttttactttgaattaaaatatacttttatagcttttaagtgagatgagttgaataatttgctataagtggtttaggtctttgcccaaactctagaagtgaaaataattttctctctgatcttgccaaaac

SEQ ID NO: 365638 - DNA, 613 bp, Homo sapiens
taacccccagtggcaaaatttatgggaactcaagtttaaacccctgggatccatgattcctctctggctagggctagtttaaatgctccctctataggcaggggtcagctgagtttagtctggttttcctttctgctctaacaggacagcacccagtggctgtgttcttccactccaaattcccagagatgctctctgcaccactccctaccactgccaggatgggggaggggtggcctcagtgactcaggcctgatttttctatctcttcagtgcctctttcagcgatatgaagttaaaaccaggtactgtgagtgctcacctgagttttttgtggttttttttttttttgagactgtctctccttgctcctcagattgcagayagcctattgttggaccttgtaatcatgtaaactaatacttaataaactcccctttatatatatcctgttagttctgttcgtctaagagaaccctgactaatacacctcagttttctcattttgggagattagctgaattaattcatgcttatctctgaatgagcacaatgttaagtacccaatgttagctgttattagtaagatgagtaaattaggactcctatcctt

SEQ ID NO: 365639 - DNA, 525 bp, Homo sapiens
tttctctgtgcttacagttaccagtgagttttctacctttaggtgatttcttattgtttattaacatccttttctttcagaatgaagaaatccctttagcatttcctataggacaagccgggtgttgatgaaatccctcagcttttatttgtgtatggagatctctatttctccttcatgcttaaaggattttttttttttttttttttgccagatatactattctagggtaaaagttgttttccttcagcactttaaatatgtcatgccactctctcctggcctgtaaggtttctactgtaaagtctgctgacagacgtattacagcyccattttacgttgtttctttttttcttgctgcttttaggatcttttctctatccttgacctttcagagtttgattattaaatgccttgaggtagtcttcggattaaatctgcttggtgctctacaaacttcttgtccttggatattcatatttttctctatgattgggaagttctctgttattatccctttaaata

SEQ ID NO: 365640 - DNA, 581 bp, Homo sapiens
caccagtgtgtcatagatttgctctcttacataatcccatatttcttggaggttttgttcattccttttcattcttttttctctattcttagctgtcttatttcagaaagctgtcttatttcttaagctctgagattctttcctcagcctggtctattctgctattaacacttgtgattgcattatgaaattcttgtagtgtgtttctcagttctatcaggtcaattacattcttttctatactggctttttgtctgttagctcctgtatcattttactgtgatacttagcttccttggattggcttttaatgtactcctgcatctcaattgtcttcattcttatccatattctgaattctatttctgtcgtttcagtcatctctgccacattcagaatgctttgtggagaggtagtgctatcgtttggaggaataaaggcactctggctttttgatacatcagttttcatgygctggttctttctcatctttgtgggctgatattccttcagtttttgaagttgctgttcttcagattttttttctttatcttatttgatggccttgaaggtttgattgt

SEQ ID NO: 365641 - DNA, 586 bp, Homo sapiens
cttcattcttatccatattctgaattctatttctgtcgtttcagtcatctctgccacattcagaatgctttgtggagaggtagtgctatcgtttggaggaataaaggcactctggctttttgatacatcagttttcatgcgctggttctttctcatctttgtgggctgatattccttcagtttttgaagttgctgttcttcagattttttttctttatcttatttgatggccttgaaggtttgattgtggtataatgtgagttcagttgactggctttgtttctgggagattttagggggccaagtctcagctcccaactcctgaaatgcaagctctaattctgagggacttgtactgggccccaactttgttctctggctcctcaaggttaggaacytactgcactgggtgagagtggttgcgggggtgaggtgctcccagactactggtctctacaatccaatgggtggtgccagccaaagcatttcataggttggtggcaatgggatccattctcattctcatgtgccagcagtagcagcagtgtggtggggcacatactcatcagctacagcagggtgctag

SEQ ID NO: 365642 - DNA, 586 bp, Homo sapiens
cttcattcttatccatattctgaattctatttctgtcgtttcagtcatctctgccacattcagaatgctttgtggagaggtagtgctatcgtttggaggaataaaggcactctggctttttgatacatcagttttcatgcgctggttctttctcatctttgtgggctgatattccttcagtttttgaagttgctgttcttcagattttttttctttatcttatttgatggccttgaaggtttgattgtggtataatgtgagttcagttgactggctttgtttctgggagattttagggggccaagtctcagctcccaactcctgaaatgcaagctctaattctgagggacttgtactgggccccaactttgttctctggctcctcaaggttaggaacttactgcactgggtgrgagtggttgcgggggtgaggtgctcccagactactggtctctacaatccaatgggtggtgccagccaaagcatttcataggttggtggcaatgggatccattctcattctcatgtgccagcagtagcagcagtgtggtggggcacatactcatcagctacagcagggtgctag

SEQ ID NO: 365643 - DNA, 621 bp, Homo sapiens
gtctggaagagaaagatccaacatagaagaatgagaaggagcagcagtaagacaagagaagaaaatgtctctaaaaagaaatgagtcaactgtgttgaatgatgctgaaaattcaagtgttcattagatttgtcaatatgggtatcttcacaagaacagtttcaatggagtaatgtgagtgaaagcctgaagcagtttccaaaagataaagggggcaaaatggaagtggtaaagcaaatgcagacaactcctctttttttgctgagatggggagcagagaggagatggaaagggamaattggttttcttttgttttaagatggaagatagtagagaattttgtatgcaacagaaacaacctaatagggatggtgaaaataagcacctactatgttccaagtgctaggaatacaatatgaacaagatgggtacaggccctgcccttaagaaactaaataacaaaaaagctattacagattgtcataagttatttcagggaatcaaacttttccttcaaatataaattggcttgaaatcctcatcttgaattctattataagtgcacaaaactatgacaaaaattatttcaaaaaatattttccaaacatttaatatgcttaa

SEQ ID NO: 365644 - DNA, 466 bp, Homo sapiens
catttcaattcacctccctctgcagtccattatccttgtatacttaaaatgcaaatagtgtttgcttaaaactcttcaaaggctttctactgcccccaagttaaactcaagctccttaatktaccattacaaagtccttctttttatgacctgtgtatttcttatgtattcctcagcctcactacagaggctaatagggttgccagataaaatacactatgcccagttaaatgtgaatttcaaataaacactgaataatattttagtatatcacatttaatagcacaagcatgagcaatatttaggacatacttatcttaaaaattatttgctgtttattagaattcaaatttaactgggtattctgtaactttatttgctaaatctgttaatcctagagactaatcactcctgccatatgggtctttgagggtaagaagcaacaggtgggtttgagagctctgta

SEQ ID NO: 365645 - DNA, 643 bp, Homo sapiens
atgaaatgagaataaattaacaaatattattagattaaatttatttattaatcgtgttggatccaagtaccttatagctaccaaggatacaggatacaaaaagaggttattctcaaatgggggagaagataattaagtaccctgcaaaatgcctcatgatatgtgctaaagtaatattagtatatacagtgtgctatggaaccatcaaagaggggagcaactgactctctccaraatttgaagagcaatgcagttggattctacttccaatctgtgaaactgcctcacagttaaagtactctctgagggcccggtgagaaatcaggcagataccagagaggaatctattcttacaagatagctgcatagggtgatatctgtgactttgcggcttttttaactgattgcattccccagtcatttgcaacttgggtggcagaaagctgagattttatggacttgaaatgtcaggggacagaggtcaaggctggcggagcaagaaattacagaggaatccctgcaaacaagaaaaatcatacgaagggtgaactgcaaaattttagtataatgactgctcaggtggttggctgacagccaaattatgtaggcacaacagaggacccccccccccgcctcccgcctc

SEQ ID NO: 365646 - DNA, 505 bp, Homo sapiens
atgcttgcttgagtggtcacaagtgagggaaacagtgagagactacgcccatgtacgtatgtgaaagaccacaaaagactgagataagcatggcatctgaccactgaagaaggaagctggaccagaatgagggaaaatggacaacacttgggaggaaaggaagcaagtgggaaggacaaagttaaacaggtagtgagagaagaggctataggaatgaggaggaactaggaggaaagaagtattttttcccttccaccttttttctctctctactcttttccttsatgatctcagtcactattaggccttcaatactcctttctgtttgcatgattgccaaatatctccattcttgccttttctccaactactgagctggccacatccatctacatttcctattaacactgtaaatccaacaggtccaacctgaattcagcatctccttcatctcaagcctgctgctacttttatatgcacttctcttatacttatcaaacatcca

SEQ ID NO: 365647 - DNA, 507 bp, Homo sapiens
ttaaacaggtagtgagagaagaggctataggaatgaggaggaactaggaggaaagaagtattttttcccttccaccttttttctctctctactcttttccttcatgatctcagtcactattaggccttcaatactcctttctgtttgcatgattgccaaatatctccattcttgccttttctccaactactgagctggccacatccatctacatttcctattaacactgtaaatccaacaggtccaacctgaattcagcatctccttcatctcaagcctgctgctacttttatatgcacttctcttatacttatcaaacatccatctaaaccattctctctccccatattctttcaatcgttccttcatccaacaaatayttattgtgcatctattatgtccgatacattcagccacagccctagatatatccattcactcatgaagtcgggtcatttctatcttggaaatctcttctctcactacctcatgagctgcctaactcaa

SEQ ID NO: 365648 - DNA, 517 bp, Homo sapiens
agggaggaggggctccctgggatgggtgtgcaggtctcagagacctccttgggccctggaaggtgacctggggcccctgagctccccacaatcaggtctactcagatgtcaaggcactgagccctgtgtgctgctctctgctgaggagttatctgtccacagagagtgtgagtgtcatggaggaagaatgaacctgggcgctcacacgggcaccttcagggggctggttccccggagggtaaaacagacacacasaaacggaatttcaagcataccaggatcaacaggcagagtcccatgcccctgggccctaagaggagcaggaggtctcatgacacagggtgggggtggtgaccctgccttgccacccagatcctctgtgccatccagacggaagagctgcacgttgaatatgcatagcttcctggagaagagctgcacgttgaacatgcatagcttcctggagaagagctgcacgttgaacatgcatagcttcctggagaagagctgcacgttg

SEQ ID NO: 365649 - DNA, 517 bp, Homo sapiens
agggaggaggggctccctgggatgggtgtgcaggtctcagagacctccttgggccctggaaggtgacctggggcccctgagctccccacaatcaggtctactcagatgtcaaggcactgagccctgtgtgctgctctctgctgaggagttatctgtccacagagagtgtgagtgtcatggaggaagaatgaacctgggcgctcacacgggcaccttcagggggctggttccccggagggtaaaacagacacacagaaacggaatttcaagcataccaggatcaacaggcagagtcccatgcccctgggccctaagaggagcaggaggtctcatgacacagggtgggggtggtgaccctgccttgccacccagatcctctgtgccatccagacggaagagctgcacgttgaatatgcatagcttcctggagaagagctgcacgttgaayatgcatagcttcctggagaagagctgcacgttgaacatgcatagcttcctggagaagagctgcacgttg

SEQ ID NO: 365650 - DNA, 643 bp, Homo sapiens
gaaggcaccaggaaggcctcagaagacagagccttggtcctctagctacgccaacctcttcgacatgaaagagcccatctcaaacagagcacaccacacagtgtttcactgcagcatccaggactcctccttcctaatatgacctgagctaacttgccctcttattgatccctgccaaagtcatttcctcctcacaatccactgaggaggatgctgatgtgtttaycatcccttttagaggattttgtatggaataagaagcaaccattcttaaaataggagatttaattctagccaaaagattttattactgactttctgttacaaggcaaataaaccaagatttgaaaataattatcctaccatttaaagatgacccctacttagcatgtggtatttgttcttccactctcccttttcaacagaatttgtgtgcaccatgatgttcactgctcctcatgctcacactgactccagcactgggacagcctgtcatggggagcagcgagggggtgcggggggcgggcactgaccctctccaacccagctgtgcaggagattcctgcagggaaaatgggtgcccggctaattcccaagttgagccttgagatttttttattggatgctatgtcttgggattggg

SEQ ID NO: 365651 - DNA, 643 bp, Homo sapiens
gaaggcaccaggaaggcctcagaagacagagccttggtcctctagctacgccaacctcttcgacatgaaagagcccatctcaaacagagcacaccacacagtgtttcactgcagcatccaggactcctccttcctaatatgacctgagctaacttgccctcttattgatccctgccaaagtcatttcctcctcacaatccactgaggaggatgctgatgtgtttaccatcccttttagaggattttgtatggaataagaagcaaccattcttaaaataggagatttaattctagccaaaagattttattactgactttctgttacaaggcaaataaaccaagatttgaaaataattatcctaccatttaaagatgacccctacttagcatgtggtatttgttcttccactctcccttttcaacagaatttgtgtgcaccatgatgttcactgctcctcatgctcacactgactccagcactgggacagcctgtcatggggagcagcgagggggtgcggggggcgggcactgaccctctccaacccagctgtgcaggagattccwgcagggaaaatgggtgcccggctaattcccaagttgagccttgagatttttttattggatgctatgtcttgggattggg

SEQ ID NO: 365652 - DNA, 643 bp, Homo sapiens
gaaggcaccaggaaggcctcagaagacagagccttggtcctctagctacgccaacctcttcgacatgaaagagcccatctcaaacagagcacaccacacagtgtttcactgcagcatccaggactcctccttcctaatatgacctgagctaacttgccctcttattgatccctgccaaagtcatttcctcctcacaatccactgaggaggatgctgatgtgtttaccatcccttttagaggattttgtatggaataagaagcaaccattcttaaaataggagatttaattctagccaaaagattttattactgactttctgttacaaggcaaataaaccaagatttgaaaataattatcctaccatttaaagatgacccctacttagcatgtggtatttgttcttccactctcccttttcaacagaatttgtgtgcaccatgatgttcactgctcctcatgctcacactgactccagcactgggacagcctgtcatggggagcagcgagggggtgcggggggcgggcactgaccctctccaacccagctgtgcaggagattcctgcagggaaaatgggtgcccggctaaytcccaagttgagccttgagatttttttattggatgctatgtcttgggattggg

SEQ ID NO: 365653 - DNA, 643 bp, Homo sapiens
gaaggcaccaggaaggcctcagaagacagagccttggtcctctagctacgccaacctcttcgacatgaaagagcccatctcaaacagagcacaccacacagtgtttcactgcagcatccaggactcctccttcctaatatgacctgagctaacttgccctcttattgatccctgccaaagtcatttcctcctcacaatccactgaggaggatgctgatgtgtttaccatcccttttagaggattttgtatggaataagaagcaaccattcttaaaataggagatttaattctagccaaaagattttattactgactttctgttacaaggcaaataaaccaagatttgaaaataattatcctaccatttaaagatgacccctacttagcatgtggtatttgttcttccactctcccttttcaacagaatttgtgtgcaccatgatgttcactgctcctcatgctcacactgactccagcactgggacagcctgtcatggggagcagcgagggggtgcggggggcgggcactgaccctctccaacccagctgtgcaggagattcctgcagggaaaatgggtgcccggctaatwcccaagttgagccttgagatttttttattggatgctatgtcttgggattggg

SEQ ID NO: 365654 - DNA, 427 bp, Homo sapiens
cctcccttctttatcccctcgaggtcatttcctcccmggatccacctgtcctgctgctgtgttttttgtccctcccagaacttgctttttttttttttttttgagatggagtttctcttttcttgcccaggctggagtataatggtgccatctcgacccaccacaacctgtgccacctgggttcaagggattctccagtgtcagcctcctgagtagctaggattacaggcatgcatctccatgcttggctaattctgtatttttaggagaaacgggttttctccatgttggtcagtctggtctcgaactctcaacctcaggtaatctgcgcgccttggcctcccaaagtgctggggttacaggcgtcagtcaccatgtcacaacttttgtactagataaaaagcaacccttcctcaaagaggagact

SEQ ID NO: 365655 - DNA, 427 bp, Homo sapiens
cctcccttctttatcccctcgaggtcatttcctcccaggatccacctgtcctgctgctrtgttttttgtccctcccagaacttgctttttttttttttttttgagatggagtttctcttttcttgcccaggctggagtataatggtgccatctcgacccaccacaacctgtgccacctgggttcaagggattctccagtgtcagcctcctgagtagctaggattacaggcatgcatctccatgcttggctaattctgtatttttaggagaaacgggttttctccatgttggtcagtctggtctcgaactctcaacctcaggtaatctgcgcgccttggcctcccaaagtgctggggttacaggcgtcagtcaccatgtcacaacttttgtactagataaaaagcaacccttcctcaaagaggagact

SEQ ID NO: 365656 - DNA, 427 bp, Homo sapiens
cctcccttctttatcccctcgaggtcatttcctcccaggatccacctgtcctgctgctgtgttttttgtccctcccagaacttgctttttttttttttttttgagatggagtttctcttttcttgcccaggctggagtataatggtgccatctcracccaccacaacctgtgccacctgggttcaagggattctccagtgtcagcctcctgagtagctaggattacaggcatgcatctccatgcttggctaattctgtatttttaggagaaacgggttttctccatgttggtcagtctggtctcgaactctcaacctcaggtaatctgcgcgccttggcctcccaaagtgctggggttacaggcgtcagtcaccatgtcacaacttttgtactagataaaaagcaacccttcctcaaagaggagact

SEQ ID NO: 365657 - DNA, 427 bp, Homo sapiens
cctcccttctttatcccctcgaggtcatttcctcccaggatccacctgtcctgctgctgtgttttttgtccctcccagaacttgctttttttttttttttttgagatggagtttctcttttcttgcccaggctggagtataatggtgccatctcgacccaccacaacctgtgccacctgggttcaagggattctccagtstcagcctcctgagtagctaggattacaggcatgcatctccatgcttggctaattctgtatttttaggagaaacgggttttctccatgttggtcagtctggtctcgaactctcaacctcaggtaatctgcgcgccttggcctcccaaagtgctggggttacaggcgtcagtcaccatgtcacaacttttgtactagataaaaagcaacccttcctcaaagaggagact

SEQ ID NO: 365658 - DNA, 622 bp, Homo sapiens
ttatgccgttaaatacaatataacacgcctgattattttctgctttggatcaggagatgagaaaataacacagcactgcagccaaaagcctgacctcgcaatgtctgtttcccatgtgtcaccacaccaaagtccactgtaaaatgtacttattcctacactgagttatgtgaccattgagacaatcctacatgagagacagtgtttgggatttctgaaggccatccaacttccatatgcacacataggtgctaaaactctctggcataacaacaaattatacctgaaccatgtgattacttcagagtagtagcccatggcatcaaccttccacccactcctgagttcacctctgcctcttgcactgaggagataaagcgcttggcaaattcatctctgcactatctccagctgygtactggggatattaaactggccttcagctacagctgtggtggaggataaatgggcagagtgacgttaaggtgtgcagtggtaatggaatttttatttacaacactcatctttgtgttgagctgtgcacatggaagcatgctatctggagaaatgtacacatcctcccaaagacattcataatccctatacatagactctcttctta

SEQ ID NO: 365659 - DNA, 427 bp, Homo sapiens
aagcccacctgtttttatccagtatgtaactctttcaccattcagataactagacggagtcatcctttgccttaaagaagattgtcacagtggaaccagaatacaaaaagatacattcttggcttgtgaatgtcaaagctggggctcaggtataagatattcggagccagtttcttccccctcagagtgagtcatgttgcttgctctattagttctatttccttagatgtgacttctctccttcgtgsggggtggtgtttctcatttttagtgttagagttttcctcaaatattttgtcattcttggttgggtgtttgtcttaatttttgaagttccctgttagctcacatgtgagtgctggattttttcatagcaccttgttgccagtaatttcaggaaagaatttggacttgcaatgggataggg

SEQ ID NO: 365660 - DNA, 589 bp, Homo sapiens
gcacctgttcctggtgtacctgattatagttsagggcagaattgcaatgcacttgtgttaaagcccctaggaaagggccgaaccccttggagtttctaatgcagaggtttgccttacaggccatctctggtgccttcccgatccactttgtcatggtggatgattgccatgaggcatccattggcctaggtccccctcttaaacctgcgtttttggtgtgtgtgtaagtggtgtagtcgaatccagactattgggcttgtatgttaacaatttcttctatagatagtgcaacagctaggaaggagtgtaatgtcatcctcaagtgcctgcttgtgtgggcatattcagcagtcagtattgtgtgttacgttagcaacttgagatattactgggtagagtgggtgcttgggtgcagccatttgaggcagtagctagctatgatagagtaaaaacagaatcatatttaaggaaaatgacaatatatggtaaacttaggaaggcaggaaagaagatgggctgtaaagagtatgagaaaaacagttaaatactagtacttcagcacattgaagttgtggtgtgggggtaaata

SEQ ID NO: 365661 - DNA, 552 bp, Homo sapiens
gcttatctgctttttcttgttgctttccctcaatcccaccagcctgattccttttccctaattaggactccacataatccagggtcacaggattattttcttctaaacatkttgtaattttaggttttttatttttttggaatggagtctcacttggttgcccaggctggagtacagtggcatgagctcagctaactgcaatctccacctcccgggttcaagcaattcttatgcctcagcctcccaagtacctgggactataggcgcatgccaccatgcctggctaatttttgtatttttagtagagatggggttttaccacattggccaggctggtcttgaagtcctgaccttgtgatctgcccacctcagcctcccaaagtgctgggattacaggcgtgagccactgcaccctgcctgtaattttagttcttatatgtagatctgtgactctttttaagctatttttttatttattgatcattcttgggtgtttctcggagaggcggatgtggcaggatcataggataatagtggagagaaggtcagcag

SEQ ID NO: 365662 - DNA, 552 bp, Homo sapiens
gcttatctgctttttcttgttgctttccctcaatcccaccagcctgattccttttccctaattaggactccacataatccagggtcacaggattattttcttctaaacattttgtaattttaggtttttwatttttttggaatggagtctcacttggttgcccaggctggagtacagtggcatgagctcagctaactgcaatctccacctcccgggttcaagcaattcttatgcctcagcctcccaagtacctgggactataggcgcatgccaccatgcctggctaatttttgtatttttagtagagatggggttttaccacattggccaggctggtcttgaagtcctgaccttgtgatctgcccacctcagcctcccaaagtgctgggattacaggcgtgagccactgcaccctgcctgtaattttagttcttatatgtagatctgtgactctttttaagctatttttttatttattgatcattcttgggtgtttctcggagaggcggatgtggcaggatcataggataatagtggagagaaggtcagcag

SEQ ID NO: 365663 - DNA, 552 bp, Homo sapiens
gcttatctgctttttcttgttgctttccctcaatcccaccagcctgattccttttccctaattaggactccacataatccagggtcacaggattattttcttctaaacattttgtaattttaggttttttatttttttggaatggagtctcacttggttgcccaggctggagtacagtggcatgagctcagctaactgcaatctccrcctcccgggttcaagcaattcttatgcctcagcctcccaagtacctgggactataggcgcatgccaccatgcctggctaatttttgtatttttagtagagatggggttttaccacattggccaggctggtcttgaagtcctgaccttgtgatctgcccacctcagcctcccaaagtgctgggattacaggcgtgagccactgcaccctgcctgtaattttagttcttatatgtagatctgtgactctttttaagctatttttttatttattgatcattcttgggtgtttctcggagaggcggatgtggcaggatcataggataatagtggagagaaggtcagcag

SEQ ID NO: 365664 - DNA, 564 bp, Homo sapiens
tctcacttggttgcccaggctggagtacagtggcatgagctcagctaactgcaatctccacctcccgggttcaagcaattcttatgcctcagcctcccaagtacctgggactataggcgcaygccaccatgcctggctaatttttgtatttttagtagagatggggttttaccacattggccaggctggtcttgaagtcctgaccttgtgatctgcccacctcagcctcccaaagtgctgggattacaggcgtgagccactgcaccctgcctgtaattttagttcttatatgtagatctgtgactctttttaagctatttttttatttattgatcattcttgggtgtttctcggagaggcggatgtggcaggatcataggataatagtggagagaaggtcagcagataaacacgtgaacaaaggtctctggttttcctaggcagaggtccctgtggccttccgcagtgtttgtgtccctgggtccttgagattagggagtggtgatgacacttaacgagcatgctgccttcaggcatctgtttaacaaagcacatcttgcaccg

SEQ ID NO: 365665 - DNA, 619 bp, Homo sapiens
aaaatgtgatgtacatgttgccatcagtagttccaaggcctaccacttgtgagtcttttaaaattaactgggctgttatgatcctatcactctggcagcaacctggcatagctgtgcctttaacaaaataattctgtaataaaacgagattttacatgckgaaacaaaatattttaaaacatcttgctgctgattgctcattttaataatatttgtggaatttaaaccccccacacacatcaacaaatgttccaatggaagattacattaagttttgggttaacttcagaattattaattttttatatcaatcttttaatgaacactcttgatttgttttctttaagaaaaatcccaagtcctgaaaagactttaaggctatgtacctttacatgctgtaataaacatgaccagggtaactttaagcaaaggggactcatgagtggttttcacactatctgtgaatgtctctgagcaaggtagactaaattctgtctcagctactcctatttctccaaatatgtgaaatcagttgtgacatctgctgtatattagggctgaactgctagggatggaaagccaatttgaatccaaaaggaggaatttattgtaatgatat

SEQ ID NO: 365666 - DNA, 566 bp, Homo sapiens
attacattaagttttgggttaacttcagaattattaattttttatatcaatcttttaatgaacactcttgatttgttttctttaagaaaaatcccaagtcctgaaaagactttaaggctatgtacctttacatgctgtaataaacatgaccagggtaactttaagcaaaggggactcatgagtggttttcacactatctgtgaatgtctctgagcaaggyagactaaattctgtctcagctactcctatttctccaaatatgtgaaatcagttgtgacatctgctgtatattagggctgaactgctagggatggaaagccaatttgaatccaaaaggaggaatttattgtaatgatattattgggtcgaactgaacttaaagaaagcagtgtggctgggcctcagcggaccagctggaagcagggcctgggatgccatcgggattccgtctcgatgaagagagtttttgtctctgcttctctccgtactttggcttcacatgaccaggaacagttgctgtgttttacatctcacagcttcacccaccagaaagccctcattttctc

SEQ ID NO: 365667 - DNA, 732 bp, Homo sapiens
gtcctctgtgatcttccttcattagttatcccctttctcatttttctcttggatattttcactmtattctctctgctgactctccctcttcaacctataaacatgttcaagtctcttccattctatgaatataccctgcccccaccactatctctctagttaccaatctaatctctctcctctctttttcattcaaaattcttgaaaggagatatccacaataaatctcaactattattttgacttcagttctctacgatctagtttttgcccttactgctccttcaatgaaactgctctcagtgctcaatgaagtcactgatgaccagaatctgcaagtagatgtcaatctgagtaggctacgatgcctgtatctcatgtgcttttataagcttctgcaggtgaatgtccctcctttggttgtaacttgtctctaattcctaaaggtctacttctgctgaagcactttccctgagaatcatagaaactgctaagtggggttctgaggtgagatgactgtaagcaaagcaatcccaaaccaatttgtacagccatatagcacctaatgctggagtctcaaggggaatcatattggtaaacagcaaatgagcatgaagggggaactttatatgttcatgatattgtacataaccaagtttcacaaataacaaacacctgaaaatggacttttgtgtacatttagtaaggaggggtttactgagctcacggtgg

SEQ ID NO: 365668 - DNA, 732 bp, Homo sapiens
gtcctctgtgatcttccttcattagttatcccctttctcatttttctcttggatattttcactctattctctctgctgactctccctcttcaacctataaacatgttcaagtctcttccattctatgaatataccctgcccccaccactatctctctagttaccaatctaatctctctcctctctttttcattcaaaattcttgaaaggagatatccacaataaatctcaactattattttgacttcagttctctacgatctagtttttgcccttactgctccttcaatgaaactgctctcagtgctcawtgaagtcactgatgaccagaatctgcaagtagatgtcaatctgagtaggctacgatgcctgtatctcatgtgcttttataagcttctgcaggtgaatgtccctcctttggttgtaacttgtctctaattcctaaaggtctacttctgctgaagcactttccctgagaatcatagaaactgctaagtggggttctgaggtgagatgactgtaagcaaagcaatcccaaaccaatttgtacagccatatagcacctaatgctggagtctcaaggggaatcatattggtaaacagcaaatgagcatgaagggggaactttatatgttcatgatattgtacataaccaagtttcacaaataacaaacacctgaaaatggacttttgtgtacatttagtaaggaggggtttactgagctcacggtgg

SEQ ID NO: 365669 - DNA, 581 bp, Homo sapiens
gggggaactttatatgttcatgatattgtacataaccaagtttcacaaataacaaacayctgaaaatggacttttgtgtacatttagtaaggaggggtttactgagctcacggtggctattttcattacatacatacatacacaaagagaatggattatctgtcaacaactgtctttgaaaaatggaaagcaaaacattttctaccagtcagaagcacaacagtgtcaccctgactactctggtattatctgagcatcaggactgagtgatgaaattttgaactacctttgctgatcagtggaagcatttataagttaataggaaagatcattggtgtcttttcctcaaagaatttcactgtgtattacagtgtattattgttaatgtttcaagtcttagcaagtgaaatactgattattctaaacctttcaaaaccagcgtaagtaaatcttactcatgtgccagtgagaaaatgtgaattataaacatcattttggggcatgaaaaaaaaaaaaacatattaggaataatactcaggggaaaattttaactgtaggaccagggtagctttccagtgtaa

SEQ ID NO: 365670 - DNA, 494 bp, Homo sapiens
agtgcgtgacgggccagctgacggcacggtgtgctcagagaactcgggttctagtcgctcctcgcaaggaacgaaggaagggatggcggcytcctgacgagcgaaaaatccacgtcacgggcgttcgagactccgcagcgcccgggtcggggcccgaaccgccgtcggcgggtgggtcacggagccgcgcagtaccccggcgaaacctcggagcacgcgcctgccaggcagaggctgccgcggccgggagggggagggggatttttttacccttttctttttttttttttttttagcggggaggagtgaagagagtgaggtttggggatccttctcggagagagaaaggcgggcgtcgtcccttgtgccccgcgcaggccgacgcgcttagccgattccgcacgttgggcaagtgggggcacagcgtccccgggcactccggtcccggcaggtcagcctctcccgggcagcgctcacacccagtcctccgagcc

SEQ ID NO: 365671 - DNA, 575 bp, Homo sapiens
ttctgtatgtcaacatgttagcgtatatttgtattaaaacaaataaatcaatcagtctttaggctatctgtctaatgttgggcttgctcagttctgcaaaaacctgtagcactgtgcaagaaaagacttgatgcatttgacagcaggtgttcaggaaaaatgcaccacagtaaatagcagcaattgatgatgagcacaaaatgaagagaacagaagaaaaaaaaatttagcatgcacacacatacacatacttaagttattttattagcatattttctttgtccatttctattaaagagtcattttacaagtcaaaacagtatgtatccagcactaatccaaattcttcctcttgtaaaaagtgaatctgctttttaaaaaactataggggcaaagtgaaaacaatgcaaactaacatttcctatgtctctataaaattcactctttaaaaagggtctccataagatagaataggagtgaagaacttmcttagatatttacatattttaagatatttaaaaatatataaacccatgggttcttaatgggggtaagggagtagtggcagtggggac

SEQ ID NO: 365672 - DNA, 554 bp, Homo sapiens
taaggtgatctgcctacagacacctactaggtatacagaagcatgcagacaagaaatatataagacagcaggtggtaccaaaaacatgttgctcagaatatgtttctggataactaaggtttttaactcattacatataaacgatttttaaaaacctaaaatgaaagtcttctgatatatactacaaagaatggatgatatggtaaatgtaaacaaacaaaggttttgttgactcaaagtcttcttttccctctccatcattcttaaacaatattctgtgctaaagttattagatggtgaggatacagatgccgtaggacagatttatacaatgtracttgaacgggcaccacaggactgatgggttgcacagtggtgacgccgagtggtgatgcagagctgtggatactgcctgcctgcacttgcagaggtcatcaatgtttccacatcctctgagaggaacagcgtgtttctgtctctcaccccaaagagacattgtttctgttttctattcctgccactcctcaattttttttaaggtacaaaataccaag

SEQ ID NO: 365673 - DNA, 557 bp, Homo sapiens
tataagtatggaaatttttagttcaaagtacatttttagtctcatttacaatagcaagtggttctgttgaaactataaatatatacatacataacacacacgcacacacacaggactttcaaatgtctgagcactttcaaaaattaaagttgtgtttggaattgcctctgaagaacacagagcattgttaagaacatgaataacaataaaaaagcatcaytagaaaatagcatagaataagaatcaagccaaaaagctacatattcactcttaatattatgaattgtattaaaataggctatttaaaagaataaaattgatttcattgtatttttttcatagatctcattagatttggggatgtaatgaaattttactagtgatggataggtttcttgtgaatgtatttggaatagacaaatcaaaaatagactatcctatcagagtatcttatttggttcttcaaaactattaccacagttgtgagctgagaggtcagttcaccaatatgataaaacctggagagggagcactgaacattctaccttcataaatcc

SEQ ID NO: 365674 - DNA, 510 bp, Homo sapiens
aagaggaggtcaagaggattcacagagaaatacaagagaggtccatttcaaatgctgattatacctttccattttattcctcatcctatatttctgaaagacagagaagcagatacaacacaacaggaagagaatctacagctttaaactaacaggtaccctccaatttgaagcatgacttgcttacttaaattcagaactaactggttgtgttgtgtrgaaagattcgtcggaaatgtcatagggaaaggaagacagtctaatagactcatgggatcatagaaatagaagggatatgaaatgtcgtttagtccatatgctgccctgaagcattaactcacaacatattttattatcttgacatttaaatatagtcaattgccacaattacttttcagagcaaagttttacttactttcttggatagactatcagtgctgattgctggagccacagaataaattcaaaaagttgtttgaagagcccagggctaccaaattaccttttgca

SEQ ID NO: 365675 - DNA, 527 bp, Homo sapiens
gacctagtactaaatgtggaattaaccaaagcagaaaggacatattcatgctttgaaagaaacaaacattattagagcaaaagttttacagagaggcctgactttcttagaaagatttctcaatgcttctcaagttaccctagaaattgtttgagtttggataatacttaacaatgagagagagcacagtgaaatttctttctatttttgtctcatcatatattggttgccaagttaagagcyacaacctggaaatttagaatgtcattctgccttgttttgttcttttggggtctgacctttgctttatccaaatatcattttgtctgtaaatattaaaaagagttgctggccactcagtgttgcaaaatacgtggaacactttaaaggatttgtgggctggcatgggagctcttattgtgcgaaattaatctcttgaaaatgttttactattgacagcactgcttcccataattaggcaagtaagagtcactcatgaagctgtaacaattgggtgttatgctttc

SEQ ID NO: 365676 - DNA, 601 bp, Homo sapiens
tttttttttttttgagacgagttttgctctgttgcccaggctggagggcagtggtgctatctcagctcactgtaacttccagctcccaggttcaagcaattctccctgcctcagcctcccaggtagctgggagtacaggcacccaccaccacgcttggctaatttttgtaattttagtacagatagggtttcaccatgttggccaggctggtctcaaactcctgacctcaggtgatctgcccacctcggcctcccaaagtgctgagattacaggcatgtgccaccgcrcccagccattcttggtgattcttttaaaactatatagtttgaaggaaaatatagtcatgtgtcacataagggatgggatacattctgagaaatgcattggtaggcgattttattgttatgcaagcattataacatgtactcacacaaacctagatggtacagcctactacacacatagtctatatagtacagccccgtgctcctaggctgcaaacctgtacatcataacactgtactgaatactgctggcaattgtaacataatagaaagtatttgtgcatctaaacatatcttaaacatagaaaaagtaaac

SEQ ID NO: 365677 - DNA, 497 bp, Homo sapiens
tctgattataatagcttttatttgttattgttctaataatcattaaggctttgactttaagaaaaatgttatttctttttcatataaaattctctcatgaattttctttkggaatatgggcatcttcttttgtcctaattcactcccttaagtcagggcattagatgcagaataatcatcaaaccaagattcacggtggctggggcctttcatgtggctcctctaagcggctttaaccatgagtctgatttagacaagtggacatggggaatgggcttggaagagggactgcaggtggtggaatcatatcaaggaaggtccatgagtagcagagcataaagaatatacagagaactgagaagcagtaaaggctaatgttgcaagtggtgggccatctagagagagctaatacaggatgagactggaagatggtttggattttttgatggccagccttaaagactaagatgtctggactttacacagtaagacctaag

SEQ ID NO: 365678 - DNA, 497 bp, Homo sapiens
tctgattataatagcttttatttgttattgttctaataatcattaaggctttgactttaagaaaaatgttatttctttttcatataaaattctctcatgaattttctttgggaatatkggcatcttcttttgtcctaattcactcccttaagtcagggcattagatgcagaataatcatcaaaccaagattcacggtggctggggcctttcatgtggctcctctaagcggctttaaccatgagtctgatttagacaagtggacatggggaatgggcttggaagagggactgcaggtggtggaatcatatcaaggaaggtccatgagtagcagagcataaagaatatacagagaactgagaagcagtaaaggctaatgttgcaagtggtgggccatctagagagagctaatacaggatgagactggaagatggtttggattttttgatggccagccttaaagactaagatgtctggactttacacagtaagacctaag

SEQ ID NO: 365679 - DNA, 497 bp, Homo sapiens
tctgattataatagcttttatttgttattgttctaataatcattaaggctttgactttaagaaaaatgttatttctttttcatataaaattctctcatgaattttctttgggaatatgggcatcttcttttgtcctaattcactcccttaagtcagggcattagatgcagaataatcatcaaaccaagattcacggtggctggggcctttcatgtggctcctctaagcggctttaaccatgagtctgatttagacaagtggacatggggaatkggcttggaagagggactgcaggtggtggaatcatatcaaggaaggtccatgagtagcagagcataaagaatatacagagaactgagaagcagtaaaggctaatgttgcaagtggtgggccatctagagagagctaatacaggatgagactggaagatggtttggattttttgatggccagccttaaagactaagatgtctggactttacacagtaagacctaag

SEQ ID NO: 365680 - DNA, 573 bp, Homo sapiens
cagctgacctctgcaaactcacctaaggtaatcaatctgtgtccaaatttaacattacaatgtaaggagacaatcgactcatctggcctgtaaatgcttgactctgtgtgcactatgtcctctctaaatggcaggcatgaatgtaccactttcttaactttgagcatatttgggctccagtatgtaaaactccaggaggaggtatatcacatgcattactacctgtttttaaatggttaagtggtatttttcaattgtctcattgttttttaatatttattataaaattaaactttattctaagttatatcagttgatgtgaatatcaattgatgaatatgtctgcagtcagaaaaacaaagcaaaacaaaacaattttgttaaattctgattagatactgttatctgtccccstaaaatctctttgctacaaagagagattggaagtactaaagaggtgttaaggacatacagctctgaacagttttctctttgaaaactccctttctccgaatgattcaaaaggagaaggttttgcatgttatgtgtttcaaatactataaacaactactt

SEQ ID NO: 365681 - DNA, 604 bp, Homo sapiens
tagaacctgtcctatcatctgtttcagtccaacctctcttagtttcaaagctgtgggttcaagtgagatgtttatgttctttcggaacttgggctcaaacgaaacggtctggactttcaaataacagaaaacttgtctttccccttacaaaaataaaatcacctgtttaagaatggcaaaagaaagtaaatcacataataaagagttgctaaaagacacctgacggctaaaagtccatatagattttagtattcttgttaagtaaatgtaatctgygattcatccttaaaagcatttgtttagaccccgtggcttttggaaagttcaaactcagtggcagatgctgagtacttatatattcctttcacagatttgctaagaaatttgtccttacgatatcatgcattttgatacagtaattatccacacaacacacacacacagaatttaggaacagttaatatggacatgcagaatggataatggcaagatttcattataatgggtgcaataatttttattttgagtaagctaaccgaatgtcattatatgtagcatttgaggtttgcatggttgtggcaatatgcacattttattggttgta

SEQ ID NO: 365682 - DNA, 604 bp, Homo sapiens
tagaacctgtcctatcatctgtttcagtccaacctctcttagtttcaaagctgtgggttcaagtgagatgtttatgttctttcggaacttgggctcaaacgaaacggtctggactttcaaataacagaaaacttgtctttccccttacaaaaataaaatcacctgtttaagaatggcaaaagaaagtaaatcacataataaagagttgctaaaagacacctgacggctaaaagtccatatagattttagtattcttgttaagtaaatgtaatctgtgattcatccttaaaagcatttgtttagaccccgtggcttttggaaagttcaaactcagtggcagatgctgagtacttatatattcctttcacagatttgctaagaaatttgtccttacgatatcatgcattttgatacagtaattatccacacaacacacacacacagaatttaggaacagttaatatggacatgcrgaatggataatggcaagatttcattataatgggtgcaataatttttattttgagtaagctaaccgaatgtcattatatgtagcatttgaggtttgcatggttgtggcaatatgcacattttattggttgta

SEQ ID NO: 365683 - DNA, 563 bp, Homo sapiens
tgtggctatgttccaataaaattgtattttatggggctgatgtagttactcaagcctgtaatcccagtattttgggaggtaaagatggaacagttgcttgagcccaggagttcaaggctgcagcaagccatgatcatgcccttgcaccagaacctgagcaaaagagtgaaaccttgtctcaaaacaactacagcaataaaacaaactgtggacatcaaacttgaatttcataaattaaaattagaagtagttgcgataaattttcttttgtttttaaaaaatcatttaaaaattctaagaccctttcttagcttgtgggcagtacaaaaggcagtaggctggattcgatccttgtgggtcatagccactgccattcatttacatatcaccttcaggagctccatgcattgagctgtggctgcaagccaggcactgagccacaaagctgagcaagatgcctcycttgcttaaaggaagcttccagatggttcattcctcaaggaccaggcaaagcctgctctggcagtgaggtatcccagatcccattgcctaacagtgctttc

SEQ ID NO: 365684 - DNA, 622 bp, Homo sapiens
tgacctgtcttggtctgttagggttgctataacaaaatactttagactgggtagtttataaaaaatagaaatttattgctcacagttctgaaggctgggaagtccaagatcaaggtaccagcagatttggtgtctggtgagagcttgctgttggctcctcagatggcgtcttctatctgtaccctcacatggtggaaggggaaaacaagctccatygggcctattttataaggttattgttcctaaaggcccccaaattaccccccagatgccccacctcttaataccaccacagtgaggattaagtttcaaccatataaattttggggggacacattcagatcatggcagaccacatcaatctctgagtaattttttagtttatggcagaaagggatgttccaggctcatttttttcctgccccagtactgaagtcagtaatttctctaaggagcactgcttgttttcaatagagaatggtatttagaagccaagattgagggtgtatgtgtgctcattattattgtgctcttctggcctctaagtagacagaactttgagaatatatgtatatttatttttgcagaccatgagttcacctccaatttgcatttaacacct

SEQ ID NO: 365685 - DNA, 559 bp, Homo sapiens
aattggtttttcattgtagccagaagagggcactattgctttacccaaattctgtgctgtggtctgtggaaacccgcatttgtgttctgtgctacagtgttccattcctggttttgttgagggtggcagtttcattcttaggtgactagcacaagaaacacacaaacaagcaaaaaaagcaaaacaaacttttgtccataataacacacatgcaaaaaattgggatgtggaaagttgtttatattttattaagccatagaaaattatgtatggaattttaaaaatgaacatgtatgccgatgacattgatcaagattctgcctggaaaaccactgtttgaaaaattagaatgtacctaggtgttcctgttcactttcaacaagtgtcctagaagaggtgtagaagaaattggtgcagttttggaaaaccccgggatgtttcctcccactattaagacagtataagggcaatataactgtggggtaaagctgaagaacagaaaataggaatggttgcatggttctttctgcagattgkgctggagaaggggattggaggt

SEQ ID NO: 365686 - DNA, 625 bp, Homo sapiens
cctgcaaatgctgacacctgcatagaaggagttcaaaatgcaaacactgctttatttaaatcaaaaaayacgtgtgtgtgtgtgtgtgtgtgtgtgtgtgtgtgtgtgtattttgccagctgttgttaatttagggccaccccagaatttatttgctgactacagtgctttccttggtatctacattgaaattatagtagaatctaatgctatcttttggttttcttcagtaagaaaacagtagggtagagacataggaaatgcttgtcacccatcttcaaaaactgaatcacatgccttcatccttttcttttacaccatccctctgttacttcaaaggaatgaagtcctcaagaacctgcctgtccaaggattcctaaggaagctgtttatcccgctgtttatccccagagggtaaactgtgtggctggttgcagtatctgttccagacacataacagccagtcccaaaagcgcagctgaaactctgtttcctttaaccattcagacatttttaaatgcatattctaagaattattaataaatgcaaatgaatgatttgccacagattcatgggctaaaatactaacctgcacctccccaaccagatgtgagccccactataa

SEQ ID NO: 365687 - DNA, 625 bp, Homo sapiens
cctgcaaatgctgacacctgcatagaaggagttcaaaatgcaaacactgctttatttaaatcaaaaaatacgtgtgtgtgtgtgtgtgtgtgtgtgtgtgtgtgtgtgtattttgccasctgttgttaatttagggccaccccagaatttatttgctgactacagtgctttccttggtatctacattgaaattatagtagaatctaatgctatcttttggttttcttcagtaagaaaacagtagggtagagacataggaaatgcttgtcacccatcttcaaaaactgaatcacatgccttcatccttttcttttacaccatccctctgttacttcaaaggaatgaagtcctcaagaacctgcctgtccaaggattcctaaggaagctgtttatcccgctgtttatccccagagggtaaactgtgtggctggttgcagtatctgttccagacacataacagccagtcccaaaagcgcagctgaaactctgtttcctttaaccattcagacatttttaaatgcatattctaagaattattaataaatgcaaatgaatgatttgccacagattcatgggctaaaatactaacctgcacctccccaaccagatgtgagccccactataa

SEQ ID NO: 365688 - DNA, 625 bp, Homo sapiens
cctgcaaatgctgacacctgcatagaaggagttcaaaatgcaaacactgctttatttaaatcaaaaaatacgtgtgtgtgtgtgtgtgtgtgtgtgtgtgtgtgtgtgtattttgccagctgttgttaatttagggccaccccagaatttatttgctgactacagtgctttccttggtatctacattgaaattatagtagaatctaatgctatcttttggttttcttcagtaagaaaacagtagggtagagacataggaaatgcttgtcacccatcttcaaaaactgaatcacatgccttcatccttttcttttacaccatccctctgttacttcaaaggaatgaagtcctcaagaacctgcctgtccaaggattcctaaggaagctgtttatcccgctgtttatccccagagggtaaactgtgtggctggttgcagtatctgttccagacacataacagccagtcccraaagcgcagctgaaactctgtttcctttaaccattcagacatttttaaatgcatattctaagaattattaataaatgcaaatgaatgatttgccacagattcatgggctaaaatactaacctgcacctccccaaccagatgtgagccccactataa

SEQ ID NO: 365689 - DNA, 561 bp, Homo sapiens
gtgatgcaactagttttctttcctttttggaatataattttttatgatgagtaaacatggctkagtggaagaaaggaagcaacaaagtcctagagctccagtgttaggaagactttacaaagcacccagtaatttccacagtgacttgagatataaaaaatggtgaggagccagcttcactcccacctcaagctaagcatctactgtctactccattctaaccaatgcccagtgttttggagaatgaccatatgaacctatgggaatgcatcaggtttccaaagggttaaaacattcattagcattctcaatgctccaccactgtagttgctattttaattagtacattcaatctggagtatctggaggaagactttaaacctaaacctcaatagactgtctacttactcttgtgaatctgccgcctctctcagagcaaatgctgccctgagtgaaggaagaatgaggctccctgaaactaggtgcacaggcaccaaaatgcttacacattgagctggaatcatgctaggcccagaacacatttccttgaacattaaattc

SEQ ID NO: 365690 - DNA, 613 bp, Homo sapiens
ccgcggccgcttgattcaaagtgaactcctcaaagcagcagccacgccgcctcctctcctagcgattaagcctccatcaccttctcctgttttttatcgctcggtggtgttagtttggagttcagtaaagaaatggcccagcacacacacacgtttaatagtcccgcgtgtcaggagaarggaaggcgattcgaaaaataatctcgcgtggtgatcacttttacgaatcccatttatctttgcaactagaggcttgtctttccactgggagttaaaatatctgtcttttattcggtatttggagctaagtctataaatgaacgggatagatgaccggtccagcccccttgttttacaggtggggaaccgaggcccagggagatgtgaattgcctggctcgtagtcacttagcaacaatgtcccagctctgcagctcgagagtgagggccccacgacagagtttattccgtccccgggtccccgcgtccccaagcgcccgcgcttcgcctcccagcttgctttaaaacactaggcgcaggagcgatttaaactggctaaggaggccccacatggcgcttccagagtccagactgctgaaaccaagactgtcagt

SEQ ID NO: 365691 - DNA, 578 bp, Homo sapiens
ggctgattcacagagacagcccggatcaattcatgtcaagaaccacgtatggagagccaggggggctgcgaggttaggagagggctggcaagcagcacccaggttctgaagcaaagaccagacagatggaaactctgtagactccagagataggtgctgaaaagatgggaggcggaaatgtgtaactattgcacatatgtctttttaaaacatgtttctgtagcctgtggcaaggtgtgggggagctcatcaaggcagccaccaacgcaccttttagacacctcctagacccactctgtctgcttcctttgtgagtcaaatctacctaaaacrgcacctagatgaccttgcctagaaatggactatgtacatagctcagctggttggttggggattttgccacaggaagcgacagaactagggacaggtatgtatctttaccacctagaaattgcgggatgtccttaaccaagggaacagcaaagttcagatccctttgcaaagaactttgctaagcaggcagggctgagaaaggaaagaaatccgctggccattgtgtcaccatccgctggtgccac

SEQ ID NO: 365692 - DNA, 528 bp, Homo sapiens
ggcccaataaatcaggtttgttttgaaatccttctcagcaggatgtgtgcgagtaaaaggactgtgtaggctccctgcaggaaaactgaatttggaactggagacaagccattcacctagacaatggtctaggagccaaaccctgcatgtcatatgcattttggattgaccacacacacttgttcacaccggcacaggctgcacaccaacacacctgtagctaaaacaaagtaatgataacactttttcttacagctttataatgtcaagacgtgagcttgaacacaccagttcatttcacagtgacagatatacctagaaaaagcttgcttgaagcacaattataaaccagaaccaccgtgggctaggtatggtgctgcgatactaaggagaaatatagacactagaattatgtggaaaagaggataatgctctttagtcttgtcttaccrtctctataggcatgtcaatattaaaaaggaggaaaagcaattgcattccacttgcaagtacagcttgtgtgtgagt

SEQ ID NO: 365693 - DNA, 440 bp, Homo sapiens
cctatgtcaaaataaccattcttgctgcactttaggcaaataatcaggccaagtataagactaaagtttattcataattagtttttaccaaaatgaggactggagagaaaaactttgctccaaagcttatcatacatttgtcattaaatcctagtctcattattgtttttaagctttttgcctacartttagccctgcttactcctgtgaatcaagtggtgatcttctgcagcttggggaaaaaaaaaagggatgggtaacataaaaatgtgaatcaatatgctagttctgggcaattatcttgcaaattctgccaggtaatgaaagtgagtaaggtgcccataacctggaggtttctttgtttgcgaaaataaaaccaaggaacttcatagacccccaaaggggaattctatatcttggcaagtaaaattttagatgga

SEQ ID NO: 365694 - DNA, 540 bp, Homo sapiens
cctaggtctgtcttggttttgaggcagatataagcattaggacataccaggatatacaagggtataaaatttagaactattattccagaataagtttatgattacagggagttataattattatatttgtcctgcattttttaggcattgcttacataggtcagggtgaatggattttatttctaaagagtcattgattgtgtgtccttaaaaggacacgttcaagttaactactcattctttctctacttaacaggggttccagaagtcagrggatgtggttgatggagggcttggaaaaagatgttaggaaaagagaaagaggaaattaaatgtatgttgcctagtcccacttgaccttgttccatttaattccacaaatgttctcattcatttaacaagtatttcttgatttatttctatgtaccatgcaccaaggctatcacgcaacagcaaacaagacagccatgctgcctgcctggtggggtacacggtcagttgggaaagacagacctgatgacaattgtgtgaagtgttgtg

SEQ ID NO: 365695 - DNA, 528 bp, Homo sapiens
ggaggaggtggaccactgtctctccaccatgtcagccaggctgtgaaaccacatcttcgaaggtgagcagctgcatagagggcctggccgtgggtattgagaccactaatagtccttctgttgcagctcagtaggagaaaaagaggcaagatggctttttgttgcctttttttttttttaatggagtttcactctgtcacccaggctggagtgtggtggcacgatcttagctcaaggcaacctccgtctcccaggttcaagtgattctcctgcctgagcctcctgagtagctgcaattacaggcatgcaccaccacgcccagctaatttttttatatttttagtaaagagggggttttaccatgttggccaggttggtctcaaactcctggcctcaaatggtctgctcaacttggcctccaaaagcattgggattacaggcatgagccactgcrcccaaccgaggcaagagttttaatagctcttttggctctaacagatcattgaggtagtgatctggtaccagcag

SEQ ID NO: 365696 - DNA, 583 bp, Homo sapiens
ggtttaagcaattctcctgcctcagcctcccaagtagctgagattacatgtgcccgccaccatgcccaactartttttttgtattagatggggtttcaccatgttggccaggctgctctcgaactcctgacctcaggcgatccgcccacctcggcctcccacagtgctgggattacaggcatgagccaccacgcctggcctgactggagtttttgtctctcacaacaactcaagagcctgggaagtttgattaacaagacatcgatggctggactaaaagctcagctatctcagcagcagttattctcctctgacatgacatcttcttctctgtcctgggatgaggatagatctggagaacaagcccttggctgggccagtaggagtggattcctagcaaccagattggattagggtctctctcaaaggaagagcaggaattatgtctgaggagtggggaagacccgtcatggagagacgttattaggatcctgtctgatggctaaattggggacagggtcaggagacaaggatcaagaacacgctgaggtgtcgcctcataacggcaatgcagagagtttca

SEQ ID NO: 365697 - DNA, 582 bp, Homo sapiens
agtcaggtcctagctaatcttgttgggaagcttttgattattgatttctctgttcagattttatagttcttcatgatacagtcttgataggctgtaagtttcaggaatttatcaatttttttctaggttatccaatttattggcatataatggttatagtagtctctgatcatcctttgtatttcatcaattgtaatgtcttctttttcatttctgattgtggggacaacagtgattctatcttgaatgctaatccaacatgttgatttctgaytagccccagtcctgtgaatgtctcctgagtcctactttagttactgtccctagaatacaaacatgtgaaccttgatgttatagcacaaattataggtcataatgcatgtagcacacatgcctgttctgaagggttgcccttaattatctccctggagcatgtaccccctttccccatggcatttaagccctaggtctggggaataacagtgcagagatctacctgccttgcagccacccaggactacacttctgtctgtaagtttctccaataaaacacccattactgacaaactggatttgtctgtc

SEQ ID NO: 365698 - DNA, 515 bp, Homo sapiens
gcttgttcacagttacaagtgttgaaattggatgatggatatataggcatttgacatactgttctctctattaatttgtatatatttaaaatataccattatatcttttaaaacttcaaaaataatgtcttaaacaagattcattaacacatttttttcaacacctactatgtgttgtgtgggagcttaaaatacattaacaatggccgggcgcgttggctcacgcctgtaatcccagcacttkgggaggccgaggcgggcagatcacgaggtcaggagatggagaccacggtgaaaccctgtctctactaaaaaaaaaaaaatacagaaaattagccaggcgtggtggcgggcgcctggagtcccagctactcgggaggctgaggcagaagaatggtgtgaacccaggaggcggagcttgcagtgagccgagatcgcgccactgcactccagcctgggtgacagagtgagactccatctcaaaaaaaaaaaaaatacattaacaacaaaacaaa

SEQ ID NO: 365699 - DNA, 515 bp, Homo sapiens
gcttgttcacagttacaagtgttgaaattggatgatggatatataggcatttgacatactgttctctctattaatttgtatatatttaaaatataccattatatcttttaaaacttcaaaaataatgtcttaaacaagattcattaacacatttttttcaacacctactatgtgttgtgtgggagcttaaaatacattaacaatggccgggcgcgttggctcacgcctgtaatcccagcactttgggaggccgaggcgggcagatcacgaggtcaggagatsgagaccacggtgaaaccctgtctctactaaaaaaaaaaaaatacagaaaattagccaggcgtggtggcgggcgcctggagtcccagctactcgggaggctgaggcagaagaatggtgtgaacccaggaggcggagcttgcagtgagccgagatcgcgccactgcactccagcctgggtgacagagtgagactccatctcaaaaaaaaaaaaaatacattaacaacaaaacaaa

SEQ ID NO: 365700 - DNA, 515 bp, Homo sapiens
gcttgttcacagttacaagtgttgaaattggatgatggatatataggcatttgacatactgttctctctattaatttgtatatatttaaaatataccattatatcttttaaaacttcaaaaataatgtcttaaacaagattcattaacacatttttttcaacacctactatgtgttgtgtgggagcttaaaatacattaacaatggccgggcgcgttggctcacgcctgtaatcccagcactttgggaggccgaggcgggcagatcacgaggtcaggagatggagaccacggtgaaaccctgtctctactaaaaaaaaaaaaatacagaaaattagccaggcgtggtggcgggcgcctggagtcccagctactcgggaggctgaggcagaagaatggtgtgaacccaggaggcggagcttgcagtgagccgagatcgcrccactgcactccagcctgggtgacagagtgagactccatctcaaaaaaaaaaaaaatacattaacaacaaaacaaa

SEQ ID NO: 365701 - DNA, 594 bp, Homo sapiens
cccctcccaaatctcatgtccttctcacattttaaaacacaatcatgccttcccaacagtcctacaagtctaaactaattccagcattaactcaaaagtccgattccaaagtatcatttgggacaaagcaagtcctttctgtgagcctgtaaaatcaaaaacaagttagttacttcctagatacatggcaatacaggcattggataaatacaccckttccaaataggagaaattagccaaaacaaagaggttacaggccccatgcaagtccaaagcccagtgggggagtcattaaatcttaaaacttcaaaatgatctcctttgactccatgtctcacatccagggcacagtgatgcaaggggcaggctcccaaggccttgggcagctccacctctgtggctctgcagggtacagcccccaaggctactttcgcaagctggtgttgagtccctgtggcttttccaggtgcacggtgcaagttgtcagtggatctaccattctgggatctagagaaaggtggccctcttctcacagctccactacccagtgggaactttgtctgagggctccaatcccacatttctcctctgcat

SEQ ID NO: 365702 - DNA, 607 bp, Homo sapiens
agaaacattacagacattttctgaatayagtatgataaagctagaaattaattatcaaaaattcccctgtgctggagattaagaaattgtcttaaatgatgcttgagtcaaagggggaaataagaaccaatgctgaacttctaagatggaattaaagcataaggacagttgctagcatctatgctgtcattgtgtgaattagaaaaggagttcctttttcaagtaaaagcagagaccaaccctgctgtatctgtgagtagtcagtgacgatggcctggagcccagctggctgaaagatgagcatgaggctctggggaattagagccaaaatgagttggtaactggagaagaaagaaaacatataaatttctcttctctaggggaaaaaaaacctgagtatgagttttcccttaagactggaagcaaatttctattaaagtgcttgctagcaagattttgaaggccaggaaaaagtcatacacaagaaatgtttctttgattgagttctatattcacaagacctgactcctaagaacaaaaagacaagaaagcagcttattaaaatgcaagaagtttaataaacttgttactttctataacccactag

SEQ ID NO: 365703 - DNA, 436 bp, Homo sapiens
tggatgtttgtcttaataagaaagcttgcaatacccagttcaatattcatgttgcaagaaaagctcttaggggaaaaatgaggtcagctagcagcctaagatagaaaataccaaaagcagatgaaaaggtgaatccttaaaaaactacatctgttacctccaacttgtcagtcatgatcaatcatcaaaccttgggcagatctgctggttcaaccaagaaagagctatagaataaggagattgacacttatattactcattacttcagcagttatgtaagtctggtctttaatgaccattgtgtctacatcaagttcataacttttcacctttacaatctgcttgttttttttgtaattattagatagacagcctagagtgagaagttaaagktccaattaagtaaagatctaaataaaaaccagaatacaaggga

SEQ ID NO: 365704 - DNA, 574 bp, Homo sapiens
aggagattgacacttatattactcattacttcagcagttatgtaagtctggtctttaatgaccattgtgtctacatcaagttcataacttttcacctttacaatctgcttgttttttttgtaattattagatagacagcctagagtgagaagttaaaggtccaattaagtwaagatctaaataaaaaccagaatacaagggaaattttttttttctttatttaatcattgcctgggggcagggggagttctggggggaaaaagtatatagtgtttttggccaggtgcagtggcattttgggaggccaaggtgggaggatcgctcgaggccaggagtttgagacaaacctgagcaacacagcaagatcccatctctaaaaaaaaaattaagtgaaaaaaaagtacataatgctttagttgtgaccttttaaagctccctttctaaatgtatgtttccttttcctattatacactgaagtgtgggatgtgggggaattaaaaaaatgctgaatatccaaccctaacaaatcatttttctcttataatctgcactggctctacttttcctaggtgct

SEQ ID NO: 365705 - DNA, 574 bp, Homo sapiens
aggagattgacacttatattactcattacttcagcagttatgtaagtctggtctttaatgaccattgtgtctacatcaagttcataacttttcacctttacaatctgcttgttttttttgtaattattagatagacagcctagagtgagaagttaaaggtccaattaagtaaagatctaaataaaaaccagaatacaagggaaattttttttttctttatttaatcattgcctgggggcagggggagttctggggggaaaaagtatatagtgtttttggccaggtgcagtggcattttgggaggccaaggtgggaggatcgctcgaggccaggagtttgagacaaacctgagcaacacagcaagatcccatctctaaaaaaaaaattaagtgaaaaaaaagtacataatgctttagttgtgaccttttaaagctccctttctaaatgtatgtttccttttcctattatacactgaagtgtgggatgtgggggaattwaaaaaatgctgaatatccaaccctaacaaatcatttttctcttataatctgcactggctctacttttcctaggtgct

SEQ ID NO: 365706 - DNA, 638 bp, Homo sapiens
gatgtttccctgaccttccaggcctggcgccgcctctctgtgagtgagggctggtggagtggggcgggaagcttgtgataggctggggccagggtgcaagatgaggctggagattgagctggagatgcattggggatagaacctggataaggctgaatatgtcattggacatagagatgaaagacaggcatggtgacttamacctataaacccagcactttgggaggcccaggtggaaggactgcttgaggccaggagttcaagaccagtctgggcaacatagtgaaactttgtctctacaaaaaaaaatttaagagttagccaggcatggtggtgtacacctttggtcccagctactcaggaggctgacatgggaggattgcttgagctcaggagttggaggctgcagtgagttatgatcctggactccaggatggagaacagagggaaaccctgtctcagaaaaataaataaactgccaggcgtggtggctcatgcctgtaatcccagcacgttgggaggctgaggagcacggatcacctgaggtcaagagttcaagaccagcctggccaacatggcgaaaccccatctctactaaaaaatacaaaaattagctgagcgcagtggctcacgactgt

SEQ ID NO: 365707 - DNA, 576 bp, Homo sapiens
ataataccttaatttttgaatgttaaatgaaacttatattcctggagctcaacatcacctggtcatgatgaatttatatatattgttaaatataatttcgctaaattttttagaattctttgcatctatgttcmagaggggtcctggtctgtagttttgttttgtagtagttctgtctagttttggtattaggaatgatactggtgccatacaatgaaattggaggtattcctgccttttccatataagttaagcatttgaaattaaaatctgaaatgctcctaagtatgaaacatttccagtgccaacatgaaactcaatggaaatgctcactagagcattttgcatttcagaattttggatttggtatgctcaaacggtaagtataatgcaaatattccagaatctgaaaaatttctggtccaaagcattttggataaagggtactcaacctatagtttgtttgatattgttatcatagctgccccttgaacaacatggaaacacccatttccatcaagtcatctcctattaatttaattactctggtgtagtatctatttgctcttgaatttc

SEQ ID NO: 365708 - DNA, 609 bp, Homo sapiens
aagtaatgctagcaatggggagcgactgtaaatacaaatgaagcttcagtcactcacctgatgctcagctcctgctgtgtgtcctgtatccatggtctagatcattgttgggaactcctgatgtaaatcattgttttttgctttttgttttgagatggagtcttgctcttttgcccaggctggagtgcagtggcacgatctcggctcactgyaaactctgcctcccgagttcacgccattctcctgcctcagcctcccgagtagctgggactacaggcacccgccaccatgcccggctaattttttgtatttttagtagagacggggtttcaccatgttagccaggatgagtctcgatctcctgacctcgtgatccacccacctcatcctcccaaagtgctgggattacaggcgtgagccaccacgcccggccctaaatcattgttaaagctttcaaatgtatcttgcaattccttcaatgagtatttcatttccaggagttgtctgtttttaaaataaaaaacttatcttacttgacattttgaggatttaaggatccattgttggagaattactgtgtttttttgggggggtgtcatattatctttt

SEQ ID NO: 365709 - DNA, 582 bp, Homo sapiens
ccacatcttagtggaaacgttttcagcttttccacgttcagtatgatgttggttgtgggtaagtcatatatggcctttattgtgttgaagtatgttctttctatacctaacttgttaagagttyatatcatgaagccacttatcaaatgctttttctgcatctactggcattaccacatggtttttgttcttcattctgttgatgtgatgcatcgcatttatggatttgcatatgttgaaccattcttgcatccctgggataaatcccactttttcatcatgaatgctcttttcaatgtgttgctggattcagtttgctagtatttcgttggggatttaaaaatttatgttcatcaagggatacttgtctatatttttctttattttgttgtatcctcatgtggtattgctattagcggtaatgctggccttgtggattgagttcagaagagttcccttctcttcagttttctggaggagtatgagaagaattggtattagctcttctttaaatgtttggcagaattctgcagtgaaggaatcaagtgctggacttttctttaatgggagacttttaattac

SEQ ID NO: 365710 - DNA, 553 bp, Homo sapiens
tagttgggttatatattggcattgtaactttaatttttacaattaagccctgggcttgattctaagacatgtcttccctgaaactataaaagataagaaactttttttcagaattgccactgaggcattctattttttcatccttgttctgtataaactctaaaattttcaaaggtagctgcttcaagccataatgttagtaatcatgattgctgcctttgtaactaagtgatagctgtgtgactgccattgccttgccctccatttgcaacccattccatccataattaaaagattgaaaagagttacttcaagccagtttacccatatgtaatttcccttcaacgaggacatcatagtatatattaaaaatgtgatagcaatccaatgtcaggtttcatttwaaaaatctgttttctgtagtcattcctagttccaacaatctcataaatcctgagaggaaattattggcatattcaaagggggaatgaatgagtttaatgaaaagataatttacaaaggtgactacagaatcaaggaaaaccaactagga

SEQ ID NO: 365711 - DNA, 427 bp, Homo sapiens
tttatgggccaggcccagggccccagtgctctgtgcagcctcaggacttggtgccctgcatcccagccactccatctccagctgtggctaaaaggggccaaggtacagcttgggctattgcttcagaggaagcaagccccaagcattggcagcttccatgtggtgttgaacctacaggtgtgcagaagacaagaattgaggtttgggaatctctgcctagatatcagaggatgtatggaaatgcccaggtgtccaggcagaagtcagctacagggacggagtcctcatggagaacctctgctagggcagtgcaaaggtraaatgtggggttggagcctccacacaaagtccccactggggcactgtctagtggagctgtcagaagagggccaccatcctccagaacccagaataatagatccactta

SEQ ID NO: 365712 - DNA, 584 bp, Homo sapiens
cctatcacaggccaagaggactaggagggaagaatggttttcctgggccctgcccagggaccccctgccctgcataaccacaggatgctgctccctgcattccagctgccccagctttggccttggttaagagatayccagatacatctcaagcttctgctccagagaatgcaagccaaaggttttggcagcttccacattgtgttaatcctgcaggtgcacagacggtaagagctgaagcttgggagcctctgcctagatttcagaggatgtatggaaagcctggatgtccagaaaacagcttactgtgggggcatagccctcatggagaacctctactaaggcggtgctgaggggaatatgaggttggaggcttcatatttggagtccccagtggggactgaggcactgcccagtggagctgtgagaagagggccactgtcctccagaacccagaattgtagatccaccaaaagcttgcactgcacacctagaaaagctgcaggcactcaatgccagcccatgaaagcagctgagggagctgcaccctgcagagccccaagggcagagataaccaaggcctt

SEQ ID NO: 365713 - DNA, 584 bp, Homo sapiens
cctatcacaggccaagaggactaggagggaagaatggttttcctgggccctgcccagggaccccctgccctgcataaccacaggatgctgctccctgcattccagctgccccagctttggccttggttaagagatacccagatacatctcaagcttctgctccagagaatgcaagccaaaggttttggcagcttccacattgtgttaatcctgcaggtgcacagayggtaagagctgaagcttgggagcctctgcctagatttcagaggatgtatggaaagcctggatgtccagaaaacagcttactgtgggggcatagccctcatggagaacctctactaaggcggtgctgaggggaatatgaggttggaggcttcatatttggagtccccagtggggactgaggcactgcccagtggagctgtgagaagagggccactgtcctccagaacccagaattgtagatccaccaaaagcttgcactgcacacctagaaaagctgcaggcactcaatgccagcccatgaaagcagctgagggagctgcaccctgcagagccccaagggcagagataaccaaggcctt

SEQ ID NO: 365714 - DNA, 584 bp, Homo sapiens
cctatcacaggccaagaggactaggagggaagaatggttttcctgggccctgcccagggaccccctgccctgcataaccacaggatgctgctccctgcattccagctgccccagctttggccttggttaagagatacccagatacatctcaagcttctgctccagagaatgcaagccaaaggttttggcagcttccacattgtgttaatcctgcaggtgcacagacggtaagagctgaagcttgrgagcctctgcctagatttcagaggatgtatggaaagcctggatgtccagaaaacagcttactgtgggggcatagccctcatggagaacctctactaaggcggtgctgaggggaatatgaggttggaggcttcatatttggagtccccagtggggactgaggcactgcccagtggagctgtgagaagagggccactgtcctccagaacccagaattgtagatccaccaaaagcttgcactgcacacctagaaaagctgcaggcactcaatgccagcccatgaaagcagctgagggagctgcaccctgcagagccccaagggcagagataaccaaggcctt

SEQ ID NO: 365715 - DNA, 584 bp, Homo sapiens
cctatcacaggccaagaggactaggagggaagaatggttttcctgggccctgcccagggaccccctgccctgcataaccacaggatgctgctccctgcattccagctgccccagctttggccttggttaagagatacccagatacatctcaagcttctgctccagagaatgcaagccaaaggttttggcagcttccacattgtgttaatcctgcaggtgcacagacggtaagagctgaagcttgggagcctctgcctagatttcagaggatgtatggaaagcctggatgtccagaaaacagcttactgtgggggcatagccctcatggagaacctctactaaggcggtgctgaggggaatatgaggttggaggcttcatatttggagtccccagtggggactgaggcactgcccagtggagctgtgagaagagggccactgtcctccagaacccagaattgtagatccaccaaaagcttgcactgcacacctagaaaagctgcaggcactcaatgcyagcccatgaaagcagctgagggagctgcaccctgcagagccccaagggcagagataaccaaggcctt

SEQ ID NO: 365716 - DNA, 290 bp, Homo sapiens
aaacacttctgaactaagccatttctacttctttccagctrctatgttgtcatttattctgttctgcctttcaagatgctcttatctaaccctatttaaggcattttaagttaaaaataactctttatttttacaatagtaatgtacaataatattaactccagattgttgaatggttacatcttacctaaataatctgagacttggtgttaaatgtaaattgagtggtaaaagctaagttacagaagtccaaagatgggtatggactcacttctccctgtaatgttgat

SEQ ID NO: 365717 - DNA, 545 bp, Homo sapiens
gggacttttcagaaaaaggatattatcaattttgtttcagagtcaacccataaactaaattccttcccaagattagttccacctatgccctcgaatgaacaatgacagtttgaaggttaaaagcaagatggagtcaattaggtctgatctctttcactataagaatttcctcagttataatttttgaaaaatggtttcttctcatcataaaaactgcgcaactaaattaactaaagtttcacattaataatcactgtagaaaaatatgtttttattgttttaatggaacaagtttctcattagttgttccaggaaagttgaataggctttaatatcatttaygaaaattgttagtaaaatgcttgggggtatatttttaaactggtaattgagggaatagtaattagtttcagcaggaataatagtgttttatcatcttattctcatccatggaactaccagtgctatttctgtcattcttctctgttcagtacatactatcctttagttaaagtagctattaactttgatattatattccaatg

SEQ ID NO: 365718 - DNA, 545 bp, Homo sapiens
gggacttttcagaaaaaggatattatcaattttgtttcagagtcaacccataaactaaattccttcccaagattagttccacctatgccctcgaatgaacaatgacagtttgaaggttaaaagcaagatggagtcaattaggtctgatctctttcactataagaatttcctcagttataatttttgaaaaatggtttcttctcatcataaaaactgcgcaactaaattaactaaagtttcacattaataatcactgtagaaaaatatgtttttattgttttaatggaacaagtttctcattagttgttccaggaaagttgaataggctttaatatcatttatgaaaattgttagtaaaatgcttgggggtatatttttaaactggtaattgagggaatagtaattagtttcagcaggaataatagtgttttatcatcttattctcatccatggaactaccagtgctatttctgtcattcttctctgttcagtacataytatcctttagttaaagtagctattaactttgatattatattccaatg

SEQ ID NO: 365719 - DNA, 591 bp, Homo sapiens
tggttgcctgatattcctggtggagtgtgggggatccctctcttgccctgctcatgtctgactaactatctgctataacagaagggcaaaaccaaggaactgttaaaaccagagggtgtaatataaagaaattgttcaattttgtaagttggtatcatcagcttcttgagaaacctttactaaaatggatggtaagaataaataatgtaaggtaagtatctttaattttaaatgctacagaatgaaagaacacgtttggcttgatacaggaaccacagctcackattaaacaattgctgatgagtatatgcaatccagaaacacagaaggttattcttgatagaacagccagctctggttgaccagagaaaagccactggaaggtctgtttgccctaagaaggtgactgcccaactctctctataaaaaccaagtggaggaccccagatgaagcagctgatatgcttcatatgcaagccatgtgggactggctttacgatgactgagatatttacccactgaatatgcccattacccaggttacggtaagtgctctggttaagggaactccttctacatgagcaccccagg

SEQ ID NO: 365720 - DNA, 520 bp, Homo sapiens
attcttgccttgaaccttggataagaaaaaagtttgcctaatcagggatgagatatactttccaaattattttcgttgttttgcctcttgatgtagcatcactgagaagaaccatttactccagtgggaatgcaacatgacaatattattctcatccctgcttttgaggtgaaataacattagcttaaccaaatcttcactctgaatagcttttgatgagagaacaactgaatactctgcactgatagcattagctctctattkgtcctcatacacagcgtgattccattgtctaaatgtctttgttttgggttctttatctttgcttgtagatgctttgtgaacagttctgctatttctgtactactaatttcacttccttttgctttccttttccagcccttggaacaattcatctaactctttctcaaataagttgatagtttaaatgtatatatttgctgaaacaatatggcttctttcagttttacaaaagcactaatcatgtgtggaaatagag

SEQ ID NO: 365721 - DNA, 571 bp, Homo sapiens
tagcaattcctggctattctgattgctacatactccaatggccaaaataaatcctcagggattcgaatttaatataggtttattcacctgggtcctcttgctgaattaacatagttctagatctatggcacagtgatcactttttctaagtatgttrctttcagtcttcctatatggcctaggtgggccaaaagcagtgtgataatatgtatgataataattgtgggataaacatataataaaattatagctagtggaatagtaagcatgaaattttggaattggaaacagcaaaaatgctgctagcttagactctgggaggtatggagaagtgggaggcattaatgatctttgtcttttaggaccatccttagagggttcttcccaaaggaaaatccactgttgctgttctcacaaattgctgagaacaccttaaatttaactggctcttgaatttgccacccttgactaatcaaaatttgactgacattccctttaaccttaccaagaagtctaccagactccaactcttccaaggcaaaaaacctgtcaataattctggatgtcttct

SEQ ID NO: 365722 - DNA, 595 bp, Homo sapiens
tttaatataggtttattcacctgggtcctcttgctgaattaacatagttctagatctatggcacagtgatcactttttctaagtatgttgctttcagtcttcctatatggcctaggtgggccaaaagcagtgtgataatatgtatgataataattgtgggataaacatataataaaattatagctagtggaatagtaagcatgaaattttggaattggaaacagcaaaaatgctgctagcttagactctgggaggtatggagaagtgggaggcattaatgatctttgtcttttaggaccatccttagagggttcttcccaaaggaaaatccactgttgctgttctcacaaattgctgagaacaccttaaatttaactggctcttgaatttgccacccttgactaatcaaaatttgactgacattccctttaaccttaccaagaagtctaccagactccaactcttccaaggcaaaaaacctgtcaataattctggatgtcttctttacccacattctcatatttgttgtttcatcactccatggtattaamaagtatctcctagtttgtgatgtgtacaaactggccaaacagta

SEQ ID NO: 365723 - DNA, 595 bp, Homo sapiens
tttaatataggtttattcacctgggtcctcttgctgaattaacatagttctagatctatggcacagtgatcactttttctaagtatgttgctttcagtcttcctatatggcctaggtgggccaaaagcagtgtgataatatgtatgataataattgtgggataaacatataataaaattatagctagtggaatagtaagcatgaaattttggaattggaaacagcaaaaatgctgctagcttagactctgggaggtatggagaagtgggaggcattaatgatctttgtcttttaggaccatccttagagggttcttcccaaaggaaaatccactgttgctgttctcacaaattgctgagaacaccttaaatttaactggctcttgaatttgccacccttgactaatcaaaatttgactgacattccctttaaccttaccaagaagtctaccagactccaactcttccaaggcaaaaaacctgtcaataattctggatgtcttctttacccacattctcatatttgttgtttcatcactccatggtattaaaaartatctcctagtttgtgatgtgtacaaactggccaaacagta

SEQ ID NO: 365724 - DNA, 565 bp, Homo sapiens
atgaataaatatgcttttataccatcccaaatgaggaaacacaatgtctctctatgaggttctaagctgaagcagtaaatcagtacaacttactaatttcctagtgttttcattcccacagtgagatcaaacaactttactaaatgcttttcaatgaggccactaagaccatgaaatttgaaggacatttactgcatttctagtagtactcccctcagaacactggcaattctaaatacagtaatttgggcaggagttttgctgagatgaactactttttattctgcacttcagaggagtcactgacaaggtgcctacctccaagttgtgggaagggggcttaaatctgtccctggctttggaacttcatcaaactacgtaataytcaagggctggtgtaggattggcccaatattactttctgctagatactaaggcattccctatttcttccattagagaatggaccaaatttacctttataaactcgatacagcttatgccctgatgaataagctcattaactaaatattttagagtagctgcatctacctgcaattagcct

SEQ ID NO: 365725 - DNA, 494 bp, Homo sapiens
ttttaaattgtagtggtcccatcaaagaaggagcctttttgctgggcgtggtggctcatgcctgaattcccagcactttgggtggccaaggcgggcagatcacctgagatcaggagttcaagaccagcctggccaacatggtgaaacgctgtctctactaaaaatamaaaaattagcctggtgtggtggcgcacacctgcagtctcagctactggggaggctgcagccagagaatcgcttgaacctgggaggcagaggtttcagtgagccaagatcatgtcactgcacattccagccttggcaacagagagattccatctcaaaaaaaaaaaaaaaaaaaaaaggtgtgcgggggagggacttttaaattcttgacttctcactcttataaactactttggaagggtggtttcattcattctcatacttttccattaaaacagttcttaatctgaatataatcagggttgagatttaaataaaaagagagactt

SEQ ID NO: 365726 - DNA, 598 bp, Homo sapiens
tttcactcttgttggccaggatagcaatttttacttctgataattttctcctcactactgtcaaatcaagtttagcttaaagctgccttcttacatattttcaatttcgcctaaaggttttttggtacattagaaactataactgtgtaaacagactgtagcccatacactgaatttggccaatcaaatgtagccaactctttgaaccttgttctaataaggccaacaccaagttgcaaccaatctagctgtttctatacttcgattcccttttctgtccataaatcttccaccacacggctgcactggagtctctgagccaaccctgactcaaaatgctgcctgattcatgaattgttccttaytcaaacacctttaaatttaatttggctgaagtttttcttttatcactactttttaaaaatctccaaatgggttattctcttttatcccctaatcagatttgattctcttttgttctctaattagatttatttagattccctaataagattttattggaaaaaaaaaaaaaaacctttttaatcatcttttttggaccaggatgtacagggttgcatccacagatgtgtagttg

SEQ ID NO: 365727 - DNA, 569 bp, Homo sapiens
tgagctcagcttgcttctgatggggaacagaatccttcacccatgtttggaagtcagttgactagagatttagcctggagacaggtgggttttcctgatttgagcctggaaatgtgaaccaggaggatttggttatcatctccrtacagcaagtgtgagccatctgggacttatgtacctcaccagctgtgatgctggaatcctccaggcctctcatcacacctgtctgaggattcctagcaaaaaattaatgtcatggccagcaaccacatctatgcgtacatcacactcaaacctggacgtgagtctagggaggtatcggcagccttcaagcatttgaaggcatgtccagcagaaaggggaagaactggaattactggacgtggtgcctttaacatttctccctgagacatggttttgaatccagatcatgatttgtccatgagaataattcctgtcactattccgtcagggaaatcagtttatcagatgcatttcttagagtgtagagtatagtgttctaaaataaacatactttaattgtcagctacctctttagaaatatacct

SEQ ID NO: 365728 - DNA, 569 bp, Homo sapiens
tgagctcagcttgcttctgatggggaacagaatccttcacccatgtttggaagtcagttgactagagatttagcctggagacaggtgggttttcctgatttgagcctggaaatgtgaaccaggaggatttggttatcatctccgtacagcaagtgtgagccatctgggacttatgtacctcaccagctgtgatgctggaatcctccaggcctctcatcacacctgtctgaggattcctagcaaaaaattaatgtcatggccagcaaccacatctatgcgtacatcacactcaaacctggacgtgagtctagggaggtatcggcagccttcaagcatttgaaggcrtgtccagcagaaaggggaagaactggaattactggacgtggtgcctttaacatttctccctgagacatggttttgaatccagatcatgatttgtccatgagaataattcctgtcactattccgtcagggaaatcagtttatcagatgcatttcttagagtgtagagtatagtgttctaaaataaacatactttaattgtcagctacctctttagaaatatacct

SEQ ID NO: 365729 - DNA, 569 bp, Homo sapiens
tgagctcagcttgcttctgatggggaacagaatccttcacccatgtttggaagtcagttgactagagatttagcctggagacaggtgggttttcctgatttgagcctggaaatgtgaaccaggaggatttggttatcatctccgtacagcaagtgtgagccatctgggacttatgtacctcaccagctgtgatgctggaatcctccaggcctctcatcacacctgtctgaggattcctagcaaaaaattaatgtcatggccagcaaccacatctatgcgtacatcacactcaaacctggacgtgagtctagggaggtatcggcagccttcaagcatttgaaggcatgtccagcagaaaggggaagaactggaattactggacgtggtgcctttaacatttctccctgagacatggttttgaatccagatcatgatttgtccatgagaataattcctgtcactattccgtcagggaaatcagtttatcagatgcatttcttagagtgtagagtatagtgttctaaartaaacatactttaattgtcagctacctctttagaaatatacct

SEQ ID NO: 365730 - DNA, 525 bp, Homo sapiens
ccccaaggcacacactgcattccaatctttggggctctgcaggctggtgtgctctcagtgtctgctagagggccagtcttccagatccacatcctctctgggcctacactgtgcttctccacaatatctgagttacattgttttgtttctttgattcacactcttttttttttccaatgagagtttttcacatatgcatttttgttcctcaaacgctttctgtacaacctttacatatttattgattgtgatagagggcttcttttttccctaattagcagactttgcaaattccttgtctgattttgctgggaatattgctgtgtgctgccttctccatgcctttctctcttttacttgagcaatctgtccatcactggttcagttcagccctygctgaagatggctttatcaccccccaggcaccatggagacatagcgcctgatacggcagccagaaggacaacctctctgttcaaggctctgtgcacgctatcgagaggccttctctatagaaagccccca

SEQ ID NO: 365731 - DNA, 525 bp, Homo sapiens
ccccaaggcacacactgcattccaatctttggggctctgcaggctggtgtgctctcagtgtctgctagagggccagtcttccagatccacatcctctctgggcctacactgtgcttctccacaatatctgagttacattgttttgtttctttgattcacactcttttttttttccaatgagagtttttcacatatgcatttttgttcctcaaacgctttctgtacaacctttacatatttattgattgtgatagagggcttcttttttccctaattagcagactttgcaaattccttgtctgattttgctgggaatattgctgtgtgctgccttctccatgcctttctctcttttacttgagcaatctgtccatcactggttcagttcagccctcgctgaagatggctttatcaccccccaggcaccatggagacatagcgcctgatacggcarccagaaggacaacctctctgttcaaggctctgtgcacgctatcgagaggccttctctatagaaagccccca

SEQ ID NO: 365732 - DNA, 434 bp, Homo sapiens
gtaattgatgtaataaagtagtgggtagaaagagtcacaattccctaaactagataaaataagcaattactcttgctatcagaatggcagcatcaatgggaacgctgtctgtgtctgaacacaacccaaccagccctgttgcatttaagcatcagaggccatggccttattatctttccaggatgtgcatgtataataagcttccccaacaaatgaaggsgggatgtttctggcaaaatgaaaaatggtgctaaactatgtccagatgattaattcacagaaactctccatcacacagcaacgacatatgcccatctcctctgttgtccccttggagattttcctactaaacgtatgtgcatatttttcatggccactgatatttgaattgcagcctgctcccatgcagaacatgaaacacttcaaactgcata

SEQ ID NO: 365733 - DNA, 568 bp, Homo sapiens
tggggtttctgcgcgtcataaatgaccagcttatactcttcttggacttttatccaatgccttgtccttgatctctggcaagactcacttatgccttcatcctcgttcactccctgcacgccagtgacatctcccatatgcaaatttggcaagctcatcacctcatatcacggccaaagcttcccgaggtmtgaagccagtcgttcccacatccttccactccatcaggtctctgtcctctcttgcaactccaagcatggctggtcctgccatcggcgtgtccgctgggtccatccccaagtgaagtgtccacgtgaggtgtggtttggagaccctaaagacagggatgggaagttttcctcagctgttagaataggctgaatgagtacatttgtgcatgtgtgccaaaaagtgactatataatttgcaaacttaatactaagactttcttttcttgtataataatctggtagcaaggctgtggggagaggaggagacatattcccccacggaacaccgagtgctagagactttgtttatccagagaactgacaactgctgggaggag

SEQ ID NO: 365734 - DNA, 580 bp, Homo sapiens
gagcgtgtgcagatggccacacaggaagcttccaggagtcaggccyggaggcagcccaggcctccactgaccacgacccagtccccaccaccaccgtgaactccccaggagtgggaagtgtcgactagctctgtgccctgcagaaaagggagatgggcctggacaacatctcctgtttccccgccataagagagaaactccctttctccttctcttattttgaacagacaggaccctagaaaatgaagacagcaagtggagatgttcaaagcaatgtgtagaatgtagtcactgaaaaaactgtaacctctgaatgaaaagacatttgggagaaagagaagctagaaaaatagcaaaagaaacagtaacaaagaaaggtgaacatctttaaattagaatcaaatccatagatcttattttattaagaaaaattatattaagataaacaattttgctgacctatttaacctacgcttcacaaattatcttatttgataaaaaattatttggagccaaacaaaggctctagatatttgcaagtgagttctcatggctatgggtagaacaaatgcgtgaaaac

SEQ ID NO: 365735 - DNA, 560 bp, Homo sapiens
ctgtagcataaccctgaaattaatactaagttaatgtaaacatyactttctgaagtttattcagcttttgctgatttctcagggcactaacaggaagacagaaaaagatcaatactttgtttgaaatatattctattccaaacatctccatacaatgaaaattgtgtcttattcttcaaataaaggtgatatatcagaaagtaaatctataaaaattgccagcccagtggaatccagaatctgcatgaagtgtatcttttttttttttaactatgtcaaacaaaatttaaaaacagcttgacatttcctaaatatgtttaaagaaatcataatttcagggcagaagggagcagatggctgcaaacactgtaggaacttagagagaccgaaggaggtttaaagccatatttgacagaaaactaaaggaagaaatctttcctccccttcttcatcctggactattttcaaaatagtgaattattttctgaatatgcattccccattcagagccatggaaaaaggccaaggaagaacctgccaaggcatgagattagcaacac

SEQ ID NO: 365736 - DNA, 560 bp, Homo sapiens
ctgtagcataaccctgaaattaatactaagttaatgtaaacattactttctgaagtttattcagcttttgctgatttctcagggcactaacaggaagacagaaaaagatcaatactttgtttgaaatatattctattccaaacatctccatacaatgaaaattgtgtcttattcttcaaataaaggtgatatatcagaaagtaaatctataaaaattgccagccmagtggaatccagaatctgcatgaagtgtatcttttttttttttaactatgtcaaacaaaatttaaaaacagcttgacatttcctaaatatgtttaaagaaatcataatttcagggcagaagggagcagatggctgcaaacactgtaggaacttagagagaccgaaggaggtttaaagccatatttgacagaaaactaaaggaagaaatctttcctccccttcttcatcctggactattttcaaaatagtgaattattttctgaatatgcattccccattcagagccatggaaaaaggccaaggaagaacctgccaaggcatgagattagcaacac

SEQ ID NO: 365737 - DNA, 568 bp, Homo sapiens
gtatctagtaaacatcactcatgtgtgagggttaaagacttatttttttagaatttaatgtcctaagcatcccttttcaggaacttatgagagagaaaaacaagagagaagagggcataggatcttggaaacagaagttctaatccaggattgctgtgcaggtctggagagcaatatccaaatccgtcctgaagacagaagattctggaagggacttctatggagaaaggagggaattaatgatgcccgaaatgaaggacaaggttaagtcctcagcccgactccttaactaaaaggaaaggccatctggatatgcgaagcatcagacggayggacactgtgctcctggagaagcagagctctcaagacacgtgctttcaccaaaatgaaacctatttactaagttctatagtttaataaaaaccattttattataatttgtaaagcattctgaaatctttagttgggcatactcaaaattttggtcaattatttccatatttagagagagaaaaattatattagtcaggcccaaaggacgtgcagcatttctaatcaaagtttattt

SEQ ID NO: 365738 - DNA, 636 bp, Homo sapiens
ctcccaatttcacatgcatcaaggaggcaggcttgcatgaggtacacccaaggagcagcagcctctcccgttcccacctctcacaggccctctgagggtgtttctattctatcgctcatcaccttgacagaaacctctggagaagctatggtcatctactagcaggatctgtgggtcgtctaaggtagaaacatgtagaatggccatgttattcctcccctccgtgaaactttcctgcyaaggtgtgtctgatttttgctgagtgtgttcccaggctaaggatgctgagaacaagtgcaaaaccataacaggatgctgggagcctgggccagccacaaagaaggccttgacatttgcagatctgaagtcttggaccttcagactgctcggatccttaaataaccaggggctggtaagggagatctggcaaaggcaggtagcaccagtgtgcctcagtgctctgatatgccatgtagaaacacggccacttatgtgtgctaattgatgggcatgaaacatacatgtgaatacattacacatgatcctctcaaaagaaatgggcagctttcagggctattgtattcatttatatacatttaggtttgaagatcataagagcctctgggggtgcaggga

SEQ ID NO: 365739 - DNA, 601 bp, Homo sapiens
ataagtcactttgtttttatgacactttctttgtttttatcatactttctcagtcatttttggattattacaagaggctactgtaggttactgggcagccctttttggcttcttttacatcttcctgctgtgaagtgtgatatatgaaatggtgtctctgtggttcagagctctaaattggagtcagaaagtcattgtgagaaagactgcctgtgtgtcttgctaactggcaacagcaacaacaaaaaaaaccaggaacttgtcttgacctttgaagtgggtcaaactgcagtgaccaccacattctggaaaacagctgaatttctccagtattgcaacccctgaacagcgaccaccagtaaactatggacgcatgttcyaagtcagccacctctaccaatgataattctccaaaacaacttgtgtaatcactctgagcttccttttggttttctcttaaaatcctctactcccctctgtctcttcagaagccaaattgtttcctgaattataattcctaacattaagacccctataaacaccaccttgtcttcttgaactgcagtttggtctttcacctgttcttggttgacactaccca

SEQ ID NO: 365740 - DNA, 592 bp, Homo sapiens
acacccaacacacacagacacacacagaggagtccttctccatgctrctaacctgagcagccttctctatgcctccatcgcatctcacaactctgtggcttaagattctccagtggcttcccactgcacttagacaacaatctgtgagggtgacgtgaaggtgcaacatttatggggagcaactctggggcacagtgaaagggagtgaaggagaaaaagccccgatcattaagccagacaagactggaaggtgaacgtaagttagcattcagatcctctggccttaaaccagcttcccagaaattgggttggagttgattgtgtctccaggcagttgacttctggtttattctaattggcagtccctcaggactcagtcactgcagcagttacccactaagaaaagactaatcttttcaaatgttctcctcaatttcacaaaatagatgctaaaagagcaccctccagcagaaagtctgggggaatgatttatctccaaggctctttttctataacagttttgtttcgcttagatgagattccgtttggttttctttttgctgatcatggagatataccccagagaaatagc

SEQ ID NO: 365741 - DNA, 604 bp, Homo sapiens
cagaacataaactgtaagaggcactacattaggtcaaaacactgtcagttcagaccaacatctttctctgaataggaccaaggatttgggttgctgttgtaatttaaaatttgtctttggagtcatgccagagctacaggtttagggatgcatttcaaaacattttccctccatcttctattatgtttgtgtcatctatgagtttttttcctaaatatcccttgacttgtttatgtttcaagtctttacaacacacgagactttaaatttactgcctattgtatgatttaatacttccttgtggtaaatagaagaagggaaaaaggactgaattaacaattcctggggaaaaaaaactcacttcatgaaaaatgtccatgcatctcagttgcagtgaggacttgtcacatcggcccatttctgcaacagttgggyctccagctgtctctacacatcatttctggagagcagactttgcgctggttttgcacagaggccgactagaactttcgacaggcaagtgtgtgacacagaagcatcttgaaatcctagcattttttcctgttcatttaacagctagggaggtttcaaacatctttcaaaa

SEQ ID NO: 365742 - DNA, 601 bp, Homo sapiens
agatgtgagcactgtgtctggggcatccccaaatcagccactcctccttgaagcactctcttctgaaaacccaactctcctggtttcctcctacttcccaggccccttcttgatctctttccacaattctccctcattgcttgatttctaagtgatggcagccctggggctcatcctggtcctcttctcttctttaccttcactcactcccatggtattcccatccagtctcacgactttaactagactagggtatagtgcatagtgggttgcaaagtggcccccaaaaagatacatccaagtgctaagtacccagtatctgttaatgtgaccttatttgaaagcagtgcgtttgcaaatgtaattgagtttamggatctcaagaggaaatcatcctggattcagggtgggcacaaaatccaatgactggtgtccttataagaagagaaaggagaaagagattcgtgacatgagcacacacagagaggaaggccacgtgaagatggaggtggagattggagtggtgaggccacaaaccaaggaaagccaggggccactggaaactaaaagaacccagaaaggattatcccctagagctttc

SEQ ID NO: 365743 - DNA, 564 bp, Homo sapiens
atggttttacaataacgatgtgtagcaatttccactcccctccctcaccattagcaaagacccactctcttgctacataagtctctaagtaatttaaaagcctttgcattctctcttgaactaggttataaaccctgtgagaacaaaacaggtttttaattatgcttataactacctatgagktacctgacgggatgctcatcgcataagaagagctaaacctagcacacatatgattgtgtttctatttgtagctcacacaatgatagtgcattttgtacccactttcagttccaacaaaaaaagcctttgaccatttctacctctaccatgacttttcctcccttaaataccacttttatattgagaattacatttcatccataaatgagtgacctcatatgaataaacacccatcatttcatggaatctgctgaacaaatgatcctgaatgcaactataatttaccttcagagagagcttttaaaaagctataaaagaattatatgaaaaggtacgtttcatagagaacatctgttttacccatgatcggtccttttaaat

SEQ ID NO: 365744 - DNA, 564 bp, Homo sapiens
atggttttacaataacgatgtgtagcaatttccactcccctccctcaccattagcaaagacccactctcttgctacataagtctctaagtaatttaaaagcctttgcattctctcttgaactaggttataaaccctgtgagaacaaaacaggtttttaattatgcttataactacctatgaggtacctgacgggatgctcatcgcataagaagagctaaacctagcacacatatgattgtgtttctatttgtagctcacacaatgatagtgcattytgtacccactttcagttccaacaaaaaaagcctttgaccatttctacctctaccatgacttttcctcccttaaataccacttttatattgagaattacatttcatccataaatgagtgacctcatatgaataaacacccatcatttcatggaatctgctgaacaaatgatcctgaatgcaactataatttaccttcagagagagcttttaaaaagctataaaagaattatatgaaaaggtacgtttcatagagaacatctgttttacccatgatcggtccttttaaat

SEQ ID NO: 365745 - DNA, 564 bp, Homo sapiens
atggttttacaataacgatgtgtagcaatttccactcccctccctcaccattagcaaagacccactctcttgctacataagtctctaagtaatttaaaagcctttgcattctctcttgaactaggttataaaccctgtgagaacaaaacaggtttttaattatgcttataactacctatgaggtacctgacgggatgctcatcgcataagaagagctaaacctagcacacatatgattgtgtttctatttgtagctcacacaatgatagtgcattttgtacccactttcagttccaacaawaaaagcctttgaccatttctacctctaccatgacttttcctcccttaaataccacttttatattgagaattacatttcatccataaatgagtgacctcatatgaataaacacccatcatttcatggaatctgctgaacaaatgatcctgaatgcaactataatttaccttcagagagagcttttaaaaagctataaaagaattatatgaaaaggtacgtttcatagagaacatctgttttacccatgatcggtccttttaaat

SEQ ID NO: 365746 - DNA, 613 bp, Homo sapiens
tctgctgaacaaatgatcctgaatgcaactataatttaccttcagagagagcttttaaaaagctataaaagaattatatgaaaaggtacgtttcatagagaacatctgttttacccatgatcggtccttttaaatgatctctgaagtcaacttggtgctttggtctaagtcttgtgctcagatccctctatcacattaaaagagatgaagcaaaatctgagtctttttaaaaaacyctgatggttttaacataaagtaaccttcgttgtttatttaacttcatatagtcaagcaggacacactgagcccctaagaagggacacgtgctggcagctggctttgtgaagtttaattaaaccgttgattttagcagagtcctagggagttaacacgtcacctatattggagtcttcatagaggaaatcatgctactggggagagagggaaatcagatacatgaagagaagtgaagagaagtgatcatggattaaccatcttcaaggaattgcgggtctcctggttactgcttggtgctgtcctgccactcccacactcctgactgcggtccatatctaccctggggattcgtccacccattggtgctgtcaactaa

SEQ ID NO: 365747 - DNA, 613 bp, Homo sapiens
tctgctgaacaaatgatcctgaatgcaactataatttaccttcagagagagcttttaaaaagctataaaagaattatatgaaaaggtacgtttcatagagaacatctgttttacccatgatcggtccttttaaatgatctctgaagtcaacttggtgctttggtctaagtcttgtgctcagatccctctatcacattaaaagagatgaagcaaaatctgagtctttttaaaaaactctgatggttttaacataaagtaaccttcgttgtttatttaacttcatatagtcaagcaggacacactgagcccctaagaagggacacgtgctggcagctggctttgtgaagtttaattaaaccgttgattttagcagagtcctagggagttaacacgtcacctatattggagtcttcatagaggaaatcatgctactggggagagagggaaatcrgatacatgaagagaagtgaagagaagtgatcatggattaaccatcttcaaggaattgcgggtctcctggttactgcttggtgctgtcctgccactcccacactcctgactgcggtccatatctaccctggggattcgtccacccattggtgctgtcaactaa

SEQ ID NO: 365748 - DNA, 505 bp, Homo sapiens
tttgcccactttttaatgggattatttatctattttcctgttgagttgtttgatttccttgtatattctgtatrttagtcccttgccagatagtttgcaaatattttctcccagtgacaagttgtttcttcactttgttaattgtttccattgctgtgcagaagacttttactttaatatagtttcatttgtctatttttgctttaattgcctgtgcctttggggttttagccataaaatcttagcctaaaccaatgttctagagtgtttcccctatgttttcctctggtagttttataatttggggttttatatttaagtttttgaaccattttgagttgatattatatagagtgagaggtgggattttagtttcattcttctgcatagggatatccacttttctcagcaccatttattgaagagggttcccttttatcaatgtatggtcttggtacctttatcaaagatcagttatctgtaaatacatggatttatttctggg

SEQ ID NO: 365749 - DNA, 469 bp, Homo sapiens
gagttggagtattttatcctgagtgaacataaagaaaataactcaacagcagtggtgagatagagacacaatagctgcttcagcattgtctatatctagtcaccattagtctgaaaccgtggcaaggacgtctatttttgtatcattgttaataactgaacagatcttataggaggagcgaaagtcagaaacaactgtgaaatggatcttataytataaaaggaagaaaaaatgttcacaaacagttattcaattgccgaaggaaaaaatactcagaaactaaaatagtttataaatactcacaagcaattcaaaatgcacttctaggtagataatagtgcctccattcttccttcttccccaaataaaatgtcatataaaaacaaatcctaggtaagggcaacagttcttgcccattcttcccatttttctctatttgagtcattgccatcacctctagttcagtggt

SEQ ID NO: 365750 - DNA, 430 bp, Homo sapiens
aggcaccagtacttttaattcatattattctccctttgagctcatcacctgagaatacctctcagtgaaaggggagaaaattgccagtagaagataaagatttattacccactccaccctaccccaaatcaaaagaattttgcatgaactaaaaattaaactttaaatcctaatgggtagaggcaagaagagagaaacagtatggggwttctggcaagagagatgttggatggaaagaatactgagagtgtgagagaagacagaactgagaaaagaggcagagataagaaatgggacatgactcatatcgtcaaaaggagggagatgaatggatggatgaataggaagccaggaatttggaagttgatggaatacttttgtgatcagaattctctttaattcattctctcctagatttcttcagtgattg

SEQ ID NO: 365751 - DNA, 540 bp, Homo sapiens
gaagctctatttgtcaggagcctgctatctggtatgtaaatcatttacagcacttgtcctttttttctcgctgctcatttttccaaactaacttgagtactttactacatttagctatttcttaacttctctgtgtagatgtttagtgaagaggcagaacacaactaaatacaactggaaaaatttagctaatttttatttatatacctacttggttcacttgtcccagatactaagaaaaaaaaaaaacaaccttgagatttcaggaggcagaaattaccaaaatcatatttttgtcttcatagtgctttatttgaattaattttgtggccctaaacttaagtcagatatggtttccctgaggatcttcccaaagatagaagagtttttttgcagttggtgctggtagtagctgtggcggtraagagaattgcctgaataaaagaagtaacttgaacttacaggaataattgagcaatgatttataggactttgactgggatagttctcctttatgacatggatcttaggactataaaa

SEQ ID NO: 365752 - DNA, 618 bp, Homo sapiens
atatcaaaactgattgtgtaactcttgctaacattaaggcaccaaattgtctacaaatgtaatcatttatcatgacctaaatggcaactatggtccaaattacccttcagctcctgcttgaaggtccataaatacctctaaggaaaaaatccaccctggtgctctcagtcctgtcttgctaaggctccctgctgcactcttctgcagcattctttctttctaaagaaacttttcttttttcaaacctatgctgttggtaaattcttcttaccaactcacgagttggccactttctgatgctgggactctgacacctcacccagcagctacaagcaaaaaagaaaaataaaaagactcagatgctatttaatgtgttcaagtgtattcagacaatgagtgaaagggtcagaaattgwacctagacctgtctgatttaaaaactcatgtttttaggcagtattttatttaatcactaagttagcaaatattagaaaagaagacacagtaataaactctttttttatctcttgaacgtatatttccttttttattagaatatatttggacttatttcaactagataagtagccacaagagaatcacccagataaaagtttg

SEQ ID NO: 365753 - DNA, 564 bp, Homo sapiens
tgctatttaatgtgttcaagtgtattcagacaatgagtgaaagggtcagaaattgaacctagacctgtctgatttaaaaactcatgtttttaggcagtattttatttaatcactaagttagcaaatattagaaaagaagacacagtaataaactctttttttatctcttgaacgtatatttccttttttattagaatatatttggacttatttcaactagataagtagccacaagagaatcacccagataaaagtttgactgcctgattatgcacacatgcaacatgtcgtaactctgagaatttggtcaccatttcaaagatgagatttgacatggcatagtagctgagrgaataaaaatccttaacactatggaataaactcccattctctttaggtgcctgggggagatgcatttataattgattgctcaagttccagctgttctctgaactgtcattgaagttatgaattatttgctgaatctaatatgtggataacagttaaatcagcacagtgagtttatttatcttttgcataatcagttttataaacatgcttgtc

SEQ ID NO: 365754 - DNA, 528 bp, Homo sapiens
atagatgtcaaggcagcttcacaaaattttcaaagatttctgttttgaagatccctgtaaacatctttgagactattttcttgaactggcttccttcattaggattcattgtttgaatccatttgcttgaattacaaagtaaggctttgtgtgcccaactgactagcgcagtgtttgccaactttccttgataagaaatcctgaggcattccttatatgacttcttttagaaaagtacttctcacctttaatgagcatgtgagtcacctgagaatcttttgaatattcagtaggtttgaagtcagagatgagattctgtagccctcagaagctcacagctgatgctaatgctgctggtccaagaactattctctgagtggcatgggtgtggagccacaccatccaataacctagccactagtgacgggcagttaygggacacttgaaatgtgactagtcagaagagagatgtgctgtgagtctaaaagagacagcggattttgaaacttactaaacaaataataaaaa

SEQ ID NO: 365755 - DNA, 505 bp, Homo sapiens
tcttttttttttttgaatgggaaaaatgaaaatataaaagaacaatgaatattaaagtgtgacaggtcttggtagtacatcatatcacaattgttgacccctgagcaatgcaggcgttagaggtgccaactccctgtgcagccaaacatccatgtataaattttgactcctccaaacttaactgctaatagctaattgactggaagccagcaaacagttgattaacacctattttacatgttatatgtattatrtactgtattcttacaagaaagtaagctagaaaaaataaaatgggtattaagaaaatcatgaggaagagaaagtataattactatttattcattaaatggatcctattcattaaatggatcatcatcaatgtcttcattctcattgtttttcatactgaataagctgagaaggaggctaaataggaggaggggttggtcttgttatctcagtggtggcagaggcaaaagaagtaaagtagatggaagaggag

SEQ ID NO: 365756 - DNA, 552 bp, Homo sapiens
aataagtttgctatgctctagcatgagctaacactgcctatatcattcaaaatgactggctcacagtcatggatgtggtggctccaattaacctgctccataaatactttttagcgaagtcgggccaaagagattaatgtatttcaatttggaaatattatttaaaattgactggtcctgagagagattagaaacactgcaattgaccacacacacagagtcatgaaccaattattttactggcaatgtaataactgagaaactattcctatcttccgttccaccatctattgaaagccacatcaaaaacttaataggctgcatgtatattgaaraaaaaggggggagccagcaataactggatacatatcttgcagaagatttatgtgcagtgcaatcctatggtgattccaaggtagaattgactagacacccatatctagaatcttcttagttattacgctttgaaaatgcaatgaataggtacattggatatttgttttgtaaagaacactgaacattaaagagtgaagataaaattcagtttactac

SEQ ID NO: 365757 - DNA, 608 bp, Homo sapiens
gaacaccatgtgaagacaggggactagagtgatgcatcaacaaaccatgtgattccagagattgccagcaaaccactggaaacttgaaagaagcaaggaaggattcccctacaggttttagagagatgccctgctgacatcttgattttagacttttagscttctaccacacaatacatttctattgttctaagctacccagtttatggttctttcatacaccaggcctaggaagctcatatgcttccattacaaagctagtgtcagagcccaaaaataaatccatgcatttatggtcaatcaactgattttcgacaacagtacaaagaacacacaatagggaaaggacagtcttttccgtaaatggtgctgggaaaacttgatatccacatgcagaagattggaattggatgcttatctcatgctacatttttaaaaaatcaactcaaaatggattagacttacaggtaagacctaaactactactagaagaaacactactagaagaaaatgtagggagaaagctccatggcattggtctgggcaatgattatttggatatggcaccaaaagcacatgcagtaaaaacaaaaatagacaaagaagat

SEQ ID NO: 365758 - DNA, 583 bp, Homo sapiens
ttacaatgtgaaaacaagagtgagggggacatgcatttgatttcccaaagttcaaatctgggaaatattagcataagcactttgatgatcgtgacagtaagtctagagaattaatctctaaagcaatcagaattcagatcttctacagctttatagatcagaatgacctattttaattaactattccagatacaaagagacagctgctctacatagaagattggagctgttrtctactttcaggatgacgttaccttgagtaaattgctctcaaaacctgacttcatatgtgattttttgagtgatctttaaactggaaaaaagctatgtggccctgctgtcaggcagcacagcaacatgaatgagagtcacgccacctgggtttgcattctggctgcattgtttattagctgtttgatatcggggaagtgatttaacctctttgtgactccattttgtcatctataaaacgttggcaaccttattacattaataaataactcaatcaggcctattattacttgtatagctattatgattatcatgtatctatgattatttataagacagcataaagccttat

SEQ ID NO: 365759 - DNA, 626 bp, Homo sapiens
cattactttattcttcacacttgcaaagtcttttttcttcatcctaatgcagtggtatgatttaatcttatctcctacaggatccaaaactaggtggaattttacatttttactagtatttttttatttcctaagccattttccattttggaaatggcatttttcaatatatccttatttgttttttgagcttatgttgaatgctttgtctagagaaatatagatcttttaaaatttggtagttcttttgtgctttaataaagcttattcctgaaggtctttgtttaggtttcatttgaaataatttctgagtacctaccttctgtaaggtactgggggctgacaacgtactcatgaaacttcttagagtttttcaacagggatgcttacatttgtttgaaatgtaaagaaaaaacgtatttgtttataaactatgctgtggactgaattgtgcccctctcattcacatgtttaaaacctgacaaycaatgtgatagtatttggaaatgaggcttttaggaagtaattaaagttggattaggtcaaaaggatggtggggacctccatgatggaattagtgtacttttaagtcacccagtctgtggcattctgttatagcagcccaa

SEQ ID NO: 365760 - DNA, 616 bp, Homo sapiens
gttgtggctcattgactttagcgggagaatatgactcaaatcctctgagttttataaggtaatgagttagtttaggttaaagcaaaccttggaacataatttgattggtttttcctctatcagtgatggatgatgcttgataatcactttctgcctattatatcaataaatcaactgcaattcaattttaatctgtaaataaagttaaatcagggctatgagcaaattacacgcctgcattagctacttagargtgtcattactgtctgtggttattgagccgaatgtagatatttgagcttttaaattctagttttaaagaagctgagataaatttcttgaatgttcttacaagaaacaccatacactctgagaaatttgtacctgcctgaaattgcaaacataaattatacgatatcagaacaaataaggatttctagcttcaagcaccaagtgatattatcttcggattgtcagtaggcatgcagggaacacaatatagaatgaagttaaatgctcctcatggagaagaaaaatgggacaataatcccatctcggcttaagaaattaaagctaggaaaaatacccagtgtgtcaacctgccatgttgtactgt

SEQ ID NO: 365761 - DNA, 625 bp, Homo sapiens
tggtactgttttagtatcaagtatattctgttttgcagactgggatactgttgtattagtctgttctcacagtgctataaagaaatagctgagactgggtaatttattaaaaaaaagaggtgtattggcttgcagttctgcaggctgtacaggaagcatgatgctggcatctgctcaacttctgaggaggcctcagaaaacttacaataatggcaaaaggtgaaggcggagcaggaacatcttacatggccagaataggaggaagaaagagagggagaaggcactacacactctaaaacaaccagatcacaccagractcactgttgcaacaatagcactaagagggatggtattgaaccatgagaaactgccccatgatcaaaccacctcccaccagaccccacctcctgcagtaatcctgaggattacatttcaacatgagatttgggtgaggacacagatccaaatcatatcactgctagaaaccaaagctttactaaaccaatagcagggcctatcaaactcttttactttttcattattcagtgggaaaaaggtgaaacccacagacagtagaataactccaccattcgcactcgtttccccaaaccattcagcaaatat

SEQ ID NO: 365762 - DNA, 625 bp, Homo sapiens
tggtactgttttagtatcaagtatattctgttttgcagactgggatactgttgtattagtctgttctcacagtgctataaagaaatagctgagactgggtaatttattaaaaaaaagaggtgtattggcttgcagttctgcaggctgtacaggaagcatgatgctggcatctgctcaacttctgaggaggcctcagaaaacttacaataatggcaaaaggtgaaggcggagcaggaacatcttacatggccagaataggaggaagaaagagagggagaaggcactacacactctaaaacaaccagatcacaccagaactcactgttgcaacaatagcactaagagggatggtattgaaccatgagaaactgccccatgatcaaaccacctcccaccagaccccacctcctgcagtaatcctgaggattacatttcaacatgagatttgggtgaggacacagatccaaatcatatcactsctagaaaccaaagctttactaaaccaatagcagggcctatcaaactcttttactttttcattattcagtgggaaaaaggtgaaacccacagacagtagaataactccaccattcgcactcgtttccccaaaccattcagcaaatat

SEQ ID NO: 365763 - DNA, 473 bp, Homo sapiens
gaactgttaatctcagtatagcgagaagataagtaggttttatttggaaatgtaatcgctgtcgtttctggaggttccagttgctcgatagatgtgcctggcagcagttattacaagggcctggaactcaagagcgaccacagctggagacataggttcaaaagtcattctgtggctatcatgaggacsattgttgtggaagattcacaggcaaagtaaatgcagtgagagaacaaacagaaagtgaactctaacatgccacaagggcaaacctctttattttttaggagctgaggatatgggtacaagagattcttgaaaatgtcaagaaacattttaaagcccatgcttaaggtcatagaataagcctatgttctttctcaagggatcgtgaaaaccagagtttctgatttatctttatagggatgattcaaaaaaggagtatatgtgtaaaatataaaacacaaaacaaa

SEQ ID NO: 365764 - DNA, 586 bp, Homo sapiens
ttagctgataatttgatcatttctcattcagaggatagtcacagactgataactccaggcaasgcactgtgttatttattagagatacaatgtttgacaaaggtccagagtttgcagggcttaaaacttacataaattgggattcactttcgaaaaatgtaaaatttcaaatataaaattaggtgccgaagtaattatttataatataaaagataccacatcatattcttcaaaccttgggtctctttcttcttagatccctttaagggatttgccaaaaatatttctacagctatgctttctgattgtaacctgtcccccttctcacctagaacactctgtaactctctgcaactttcacgaagaggtggaaggtgcctctgccagcaaatgagacctgaacttgatctttcattagcttcaaagtaaacccgtgtctgtttactccttcataaaaaacatccagcttgtgtcctctgggcaaggcagacacaaattagaggaccggttatacattcattattcaattatttgatggtatggagaaatgcagaggactaggagagcatataatagggaagtcaga

SEQ ID NO: 365765 - DNA, 536 bp, Homo sapiens
tgaccaatggcagtgtagtgactacattyccgtgtgagtcaacagaacatctgttagaaataaaagggcaagatgttttaatttttgaaatccagagaaaattttaacttttttaatattaatgaactaagaaggggttttcttctaaacatttaatttcatttcacagcagttagtaaagggatgtttaagcatcaaagggagagatacgcattttacctatataccagcctttaactcatttaaaaaattctaaatgttcaggagaatttaaccttttcatatcattttttattagattcatgaacagaataggtaagaaactggtatcacatttatatattgagaatttctccccctttcctcattattctgttttaaactcatcatgttttttagtttaaagtaatattgtttttaacatgagcactctttctcaagtaaagtttatgtaattcctcttaccaataaatagtggaaaatttggtcatttaaggaggctttattaatgcggtaataatacactaacctgttat

SEQ ID NO: 365766 - DNA, 536 bp, Homo sapiens
tgaccaatggcagtgtagtgactacatttccgtgtgagtcaacagaacatctgttagaaatamaagggcaagatgttttaatttttgaaatccagagaaaattttaacttttttaatattaatgaactaagaaggggttttcttctaaacatttaatttcatttcacagcagttagtaaagggatgtttaagcatcaaagggagagatacgcattttacctatataccagcctttaactcatttaaaaaattctaaatgttcaggagaatttaaccttttcatatcattttttattagattcatgaacagaataggtaagaaactggtatcacatttatatattgagaatttctccccctttcctcattattctgttttaaactcatcatgttttttagtttaaagtaatattgtttttaacatgagcactctttctcaagtaaagtttatgtaattcctcttaccaataaatagtggaaaatttggtcatttaaggaggctttattaatgcggtaataatacactaacctgttat

SEQ ID NO: 365767 - DNA, 536 bp, Homo sapiens
tgaccaatggcagtgtagtgactacatttccgtgtgagtcaacagaacatctgttagaaataaaagggcaagatgttttaatttttgaaatccagagaaaattttaacttttttaatattaatgaactaagaaggggttttcttctaaacatttaatttcatttcacagcagttagtaaagggatgtttaagcatcaaagggagagatacgcattttacctatataccagcctttaactcatttaaaaaattctaaatgttcaggagaatttaaccttttcatatcattttttattagattcatgaacagaataggtaagaaactggtatcacatttatatattgagaatttcyccccctttcctcattattctgttttaaactcatcatgttttttagtttaaagtaatattgtttttaacatgagcactctttctcaagtaaagtttatgtaattcctcttaccaataaatagtggaaaatttggtcatttaaggaggctttattaatgcggtaataatacactaacctgttat

SEQ ID NO: 365768 - DNA, 590 bp, Homo sapiens
ttgtgaaaaacctaagagaaattcaggtctttaggatgggaggggtcatgtccatcttgtgcctcactctatccccagccttctacaccatgcctcatgcatggtagatggtcaataaatatttgctgaaaaaaaaatgacaaacagcatgttcgggatagtttaaactgtaagtaaatgtgattaaacagcactttgaccattttggcatgtggaataatagaactaatcacaactagttacagtcttgtttgttcttctatgattactgtttgtttttacactgattacttcttatgtgattgataaatgtgggaatgctatggttttaatatatgtgttcctccaagattcatatgttgaaacttaatcatcaagggaatgaaatcaggaactgaggcctttggggaatgattaagtcttgaasgctgtgcctttgtgaatgggaccaatgcccttataaaagaggtttcagagacctgcctcaaccttccatctcttctgctatgtgaggacacagcatttgtcctgccccttttgcccttctgccatttgaagatatagcaagaaagtaccatcttggaagcaga

SEQ ID NO: 365769 - DNA, 556 bp, Homo sapiens
agattacattcttgtaaattatatccaattacagtttagtgaggtattaataataggatattatatcatattttgcttcaggaattttatctattatgataagaactcttacatacagaggtgcttattctccaaaaatatcttaggagaaaacacagcaaacggctgactccaggatgggatttagggagccctgggaaagcctttataggcctcaaatattttcctcaccatctgtctgttattcaacctytaaaactaattgcttggcatcttaaagtctttgtcattttagaaagtttctttttagaatgcagacgtacctgggttatttaatgtgttagccaacttttagcaaattacatcattaaacaaaatgcagatataatttcagtgtctgagaattctctagaaaaatttaattttgaaaatgtaatataatatatgcatattctggatcatcggaatgaataccttataaatgagtgctcccttctagcttaaagcctgaattcatgtttttgttcttgtcagtaacaactactattacttaatc

SEQ ID NO: 365770 - DNA, 607 bp, Homo sapiens
attacttttcaaaaaataatggaaattatgcctttgaacagagatgtgtgaaagattacattcttgtaaattatatccaattacagtttagtgaggtattaataataggatattatatcatattttgcttcaggaattttatctattatgataagaactcttacatacagaggtgcttattctccaaaaatatcttaggagaaaacacagcaaacggctgactccaggatgggatttagggagccctgggaaagcctttataggcctcaaatattttcctcaccatctgtctgttattcaacctttaaaactaattgcttggcatcttaaagtctttgtcattttagaaagtttctttttagaatgcagacgtacctgggttatttaatgtgttagccaacttttagcaaattacatcattaaacaaaatgcagatataatttcagtgtctgagaattctctagaaaaatttaattttgaaaatgtaatataatatatgcatattctggatcatckgaatgaataccttataaatgagtgctcccttctagcttaaagcctgaattcatgtttttgttcttgtcagtaacaactactattacttaat

SEQ ID NO: 365771 - DNA, 577 bp, Homo sapiens
acccaggtgacaccactctaaaatgtgctaccactcaagtgctatgaacttcagcactatcagtgtccctaaggaagactgcagtagaaaacagtatatacaaaaaaaaaggatatatgatttttcccccaacagaaaagataaatgtggcctagcagtaaatattgaaggaataaaatccctttgggataacagaaatgcagaactgtaaaaatgtataaagggyttgattgattgtttgttagtaacatggtatgtattaaagagagagagagacagagaaagaggcaacaaaataggagaaagaaatacaagccagcacttttaagagaatatgatttaagaaagaaaaaagaatgttaaaattcagtgccaaacctagaatgagatctgtggaatgtaggccaggtgacagattcctgagtcaggacctataggtcctaatggctttaatgaaagtggattaccttactttaaatatgttaatgattaaccttggaaattaagacccaactaggctgtggctaataaatacattcacctctgcaacagacaacagctactcttttgtcttgcc

SEQ ID NO: 365772 - DNA, 636 bp, Homo sapiens
tctaattagagcagatcatctttataagttgttaatgtgatarcttttcctataatgaaaaaataaatatatttccttatttttttaaataaacttaaaattttggaataattttagatttatatcaaagctacagatagtatagatagttcttatacctttcacctataatgttaatatcttagtacgtttgtcaaaactaagaaggtaacgttaatagtattgctgttaattaaactacaggctttatttggatttcactagtttttctaatgtcgtttttctgtttcaggatccattccaagaaactgtattgcatttagtcttcatgtctccttagcctcctaaggagactgtgccaggtgttttgtagactgttcctcagtttaatttgtaagagatgtttctcatgattagcctgaaattatgggttttggggagggagtccacagatatgaaatatgttctcatcacatattacagggagtgcaagacagcaacatgacctaccggtagtgatattaacattgaccacttggttaaagttgtgtttgccagatttctttattctacataaccgccttttatgtgtccaattgtgtcttctaaaaaaatatgctgaagtcctagcaccca

SEQ ID NO: 365773 - DNA, 636 bp, Homo sapiens
tctaattagagcagatcatctttataagttgttaatgtgatagcttttcctataatgaaaaaataaatatatttccttatttttttaaataaacttaaaattttggaataattttagatttatatcaaagctacagatagtatagatagttcttatacstttcacctataatgttaatatcttagtacgtttgtcaaaactaagaaggtaacgttaatagtattgctgttaattaaactacaggctttatttggatttcactagtttttctaatgtcgtttttctgtttcaggatccattccaagaaactgtattgcatttagtcttcatgtctccttagcctcctaaggagactgtgccaggtgttttgtagactgttcctcagtttaatttgtaagagatgtttctcatgattagcctgaaattatgggttttggggagggagtccacagatatgaaatatgttctcatcacatattacagggagtgcaagacagcaacatgacctaccggtagtgatattaacattgaccacttggttaaagttgtgtttgccagatttctttattctacataaccgccttttatgtgtccaattgtgtcttctaaaaaaatatgctgaagtcctagcaccca

SEQ ID NO: 365774 - DNA, 636 bp, Homo sapiens
tctaattagagcagatcatctttataagttgttaatgtgatagcttttcctataatgaaaaaataaatatatttccttatttttttaaataaacttaaaattttggaataattttagatttatatcaaagctacagatagtatagatagttcttatacctttcacctataatgttaatatcttagtacgtttgtcaaaactaagaaggtaacgttaatagtattgctgttaattaaactacaggctttatttggatttcactagtttttctaatgtcgtttttctgtttcaggatccattccaagaaactgtattgcatttagtcttcatgtctccttagcctcctaaggagactgtgccaggtgttttgtagactgttcctcagtttaatttgtaagagrtgtttctcatgattagcctgaaattatgggttttggggagggagtccacagatatgaaatatgttctcatcacatattacagggagtgcaagacagcaacatgacctaccggtagtgatattaacattgaccacttggttaaagttgtgtttgccagatttctttattctacataaccgccttttatgtgtccaattgtgtcttctaaaaaaatatgctgaagtcctagcaccca

SEQ ID NO: 365775 - DNA, 501 bp, Homo sapiens
gagttggagctgtcctcttgtgctgagtcagttcctgggttggggccacaagaccagatgaaccagtttatcaatctgggtgataccagttgatccatctagtgcagggtctgcaaaatatctcaaacactgatcttaggttttacaatagtgatgttgtccccaggagcaatttgaggaggtttagaatcttgcagtctccagctgcatggctcccaaaccataatttctaatctcagggctaatttgttagtcctgcaaaggyggtctagccccatgcaggaagggggtttgttttgggaaagggctgttatcgtctttgtttcaaactatataaactaagttcctcccaaagttagttcagtgtatgcccaggaatgaacaaggacagcttggaggttagaagcaagatggagtggtttaggtcagatctcttacactgtctcagtcataattttgcaatcgtggtttcaaattttctgttgttttaagccaggcaat

SEQ ID NO: 365776 - DNA, 600 bp, Homo sapiens
taaccaaaaatgcctaaatattttctcctcccagaacagtatgccacttaagcatctgctgattaagatggaaataaaagcaaatcaagaatgctagtgttgtaagataagatcaagcaatatgtaacatggcattctatttaattacaaacttaatgactacaataaaacatgcttttggttgttttgtgtgcatatgttgtattatatgtgtatttgtgtgcaggatactcttgtaagatatgctattattttagatagaaaaaatagcttattattaaacattcttctaagtagtttcccaggtagtatcttatttaaacttcataactgtttcatgagaaaagtactattattatgcccgttttattgatgatcataactgaggcagagaatagtcatttgcccaaagttacagacatctggaaaattgtggagctaggatktaaacccagagtgtccaaattcagaacgtaaattcttaactgaaacacatgtgctattctgcctcatgagaatttcatcatcctttataagccagtcatactatgaacccagtcagatagaatcatcaacaacagggcctagactataactctg

SEQ ID NO: 365777 - DNA, 654 bp, Homo sapiens
taacagcaaaataaaaaaatgcctaaagctgatgtcctgactaatcactcagattatagttaggcccaggaagagaagacttttcattaggaaacaaataattcacaacaggaaatgcaggtattgacaactgttcctccacttttgaaatgagactgggagattgggtggggggaggcactatattcaatagatatatctttcagaaaattgttcctatcactataaagtgacctcatatatgtatttctttttagaaaaaaatctataaattgtgtttataaataagtttctagtaattgtcttcctagaagattctgctaaaaccaaaaagaaccgtcaaagttcagaagaagcggtaagaaaaagaataaaggcaaatatttcagtgaggcaaatccaaagcaaacactgaaacaaatgaggttacagacaatggtatgaatgttaatgaacataaagcctgatggtggaaatctgctaaatgcatagttgagggaattgagaggacatttccctaacagtttgttcctgttgcttaaaattttttaaaaawgttaccgcaggatggcccaattcagtcccaacatcatattatgcagatgagttacaattccctgctgaagttctgcagaagagttgagtctaatttag

SEQ ID NO: 365778 - DNA, 618 bp, Homo sapiens
aacttagaggaaatggaaaagagagttttgaaaagaaagggataacttggtaggcaatgcctcgggctgtgagaggtcaagttatttaaggatgaaaggagccttgaatttggcttttagaagcttgttctgtgcactgtgagctgggtggtattggtggaagactgagagcagaggatgaggagtgaggacaatggacggggagggagtggagggagtgagtggccgccttaagggaggagacactcgaatgaagtcagttgaggagggaaggagttgcagaggtcagtaacctgaggagaaataaattaaagaagtttcattttttattttcttaaaatagaaaagctatttatcattttgtttatagataaaggctgaggggaaagagccattgaagatggtgcagatatagaagaaagggcataattgygagaataatatcttagaggatgttggaggagatgggtcaatagtaccaggaggggcgaaagaatagacactgcatccccgacctttgtctgtagggttggttcagggacaggtttgaaacactgcgtggtataagtcagagaaaatgtcaaagagagatctagagaggattgaggaagttaggca

SEQ ID NO: 365779 - DNA, 622 bp, Homo sapiens
tttagttatgcgttactactcaatcttttctggttgcaatatgaaaccgagctatctttaaataaaagaaaaaagtagcttctctattatctggagccacaaatgtgtattttgataaagaactgaaaatttccctctggcaatcatttattttgggaaaagaagcgctatttaaatacaactctgattttgcctgcttttgagctaaccatgttgctagggactttaatttggtaaaaagaacagtgtcgtgtgctctgttttctacctggatgtttctagaacaccatgtacattgggattaggttctcctcaaaaggatctcaagatctgaaaaccagatcaggtcttaaggagggcaactacatgtgtgtttggtcgatattatctygcagacaccaatgtttctctgaccaaagtatcttattttgggagatgcaatgtttgcattatttacctaaggaaggtaacatattaagtcatgagaaggtaacatattgagtcactatttccttttagaaatcgatttatcagaaataaattctcactggctaggtgggaaacaagatggctaagagtactcttgctcgtcaggggtgagaaaagctttcctataaagcac

SEQ ID NO: 365780 - DNA, 582 bp, Homo sapiens
tcattaatgtagccaggccttttctttctaggcatttcctggacctgggagagatgaactgaatctgatacctttaaaagtctgcaaaaacatcatttaccatctattctctctgaggartgcttaattaaaagctaatacccaagctatatatatatatatgtatatatttaaaaggcccttttgctttttctctttcaatgctggttttggaaaaatatttcagtggattaaaatcttttttccccccccaaaacctttgtgcttggtactgccatttgcttcctttcttaaaaatcattctcctatttacttttactccatctactttttctttctccttgtcccattagaggacttttgacgactcaggccccttaaggaactcagaaaaaaggtgtcattcaccccttaaggaatgcagaaaaaaggtgccactcatgccttttgggggatcttctgtcttccttgtggaggttcaagatttgtaggcagactcttctcaggtctaaagctctgctttctattttattacctgatttctttggcttttgggggtacgagaaattactttgctttgtg

SEQ ID NO: 365781 - DNA, 521 bp, Homo sapiens
catgaagaatcttggctcattgctgattggcagagtctgtaacatctgaaactagtgaagagagaayggattggcggtcctcagatgacattcatcatcaccagtgcacttgagggtggtgcttctgaccgtaacatttccagcctccatgattttcaactgtcagtataataactcgaaatccagccatacaatattatcctttgtgtgcaaacgtcttaaaaagtggacaaaagttattcaaagagttgaactaaaacgttctcatttttcattatcatatcaggcaaaaaatgaaggactcttttaatgtttttgttatttacatctattttaaaacaaatagatataattcccataggtcaatagttcaattgccaccattcttccaagtaccctgtgggaggattagttaagaatgcttatgtaatatagttctagaactgaattaagaaagataatgagctgatacatagtgcactttatgtataataactgaatctgcagagtctttgagatat

SEQ ID NO: 365782 - DNA, 574 bp, Homo sapiens
taaaagacacatgacaattattttttcagaaatctttaatgaaggcaataatttctaatctattttctaatgcagaggtcccaaaatgacctattttgaaatgctacctagacctatatcaactactaaagctcagcaattgaaatgcttaaatgctgcagacatcaaatacaataaatgttattcattcacttattcatacaatcaatcaacacatgcattttgagcacttcctgtgttcccagacatgggctaaacattgcaaacacaaaggcaattaaaaaatagaaaaagatatggcctagcccccgccaagctcgccatctagccagtggaaaggaatggatactaaccacacattcgcaaacatgattgtaaaactgtagcatcgtgccaatgatacaaagaagatgtactaaagagctgagtctctcagggccagagaaggtgtttctgagaaactcacagcatagcctaaatctgaagaaaagtagactcttggggcaragggaagggtataaagaagcttccaagcagggggggcaatatatacaaatgacctgtgatagaaaga

SEQ ID NO: 365783 - DNA, 512 bp, Homo sapiens
gtgccaatgatacaaagaagatgtactaaagagctgagtctctcagggccagagaaggtgtttctgagaaactcacagcatagcctaaatctgaagaaaagtagactcttggggcaaagggaagggtataaagaagcttccaagcagggggggcartatatacaaatgacctgtgatagaaagaactgaagccatgcgagggactcaaaaggctattggagtgggagtgcataaaacagtgtcctgcagatggaggcagtgagatcccagtgaaccagcctaagccaatcctctacagatggcaatataaggtttttctatttattccaagaacagtgggaagccatggaatttttctaagcagagtagtgacaagatctgcattctcagccaatcactgtgactgcagaatggaggacaaatttgcatgagggtggagtgactgtggaaagccctttttggagggatttagagtggtccggcaagacactgtgttggcttgaagaatagtg

SEQ ID NO: 365784 - DNA, 512 bp, Homo sapiens
gtgccaatgatacaaagaagatgtactaaagagctgagtctctcagggccagagaaggtgtttctgagaaactcacagcatagcctaaatctgaagaaaagtagactcttggggcaaagggaagggtataaagaagcttccaagcagggggggcaatatatacaaatgacctgtgatagaaagaactgaagccatgcgagggactcaaaaggctattggagtgggagtgcataaaacagtgtcctgcagatggaggcagtgagatcccagtgaaccagcctaagccaatcctctacagatggcaatataaggtttttctatttattccaagaacagtgggaagccakggaatttttctaagcagagtagtgacaagatctgcattctcagccaatcactgtgactgcagaatggaggacaaatttgcatgagggtggagtgactgtggaaagccctttttggagggatttagagtggtccggcaagacactgtgttggcttgaagaatagtg

SEQ ID NO: 365785 - DNA, 571 bp, Homo sapiens
ttagggaaagtggaagtaaggatactgggaacaatggttatagggaaggggtgggaaagagaagatattctatttaaaccacactttttccttaggataggagttttagttttagttttctgaagttagaacaaggataatgttttatactatctggtagtttctccaaacacttgatacaatttaaagtggagagaacacaagctttagagtcaggatctagatttaaaccactctcaatcgttaaactctctgagcccaactggagctaagaatatgtggacatatgctgattgcctacacagcacttagctctcttgtcttttttcctaagagaatcccagggttcccagctagtggcagtttgggagggattaagcccaacccaagtctragagttggctttgatgggttcaagcaaatcatttcattccattagcatgtaatccaatttaaattaatgcttagagagacatttcacaagggcatctggggtacatgctgaatcttctaagacatctactttaagaggcactctctatccctgggaaggatgagatgtgctgatgtg

SEQ ID NO: 365786 - DNA, 633 bp, Homo sapiens
ggtgtgggaccccaagactgtaggaatagcacagtgacggtatcttatatgcccatactcaacagtgaaaggccacccagacctaggttgaaagccgacctagcaataggaggcaaactagacaggctcattcatttccctggaccacactggagtcccagtgacaaaatcagttgagtctgacaacaccagcaaaggggatgggttggaaaactaactggaaataagtgactggaggagatacactcctttcctgagccagagtctcccctttccattgagagataccaaagcagacagggagaactagcaggagagacccagcagctggatctaggaatcttctttgtctccacaagcctgagaccctcctccccaatccagagacatcagagcagcagatggaggtgggaataggtagaaaccagtagtggcatctcttcttaagaagaattaatgctaattttacacaatctcttcctgaacatagaagagacaaggacacttccaaacttattttataacgccagtatttccctaatagcaaaaccaagcaaaggcagcaccataaagcaaacaraacccaaaaaacaaaaactacagatcaatatctttcatgaatatagatacaaa

SEQ ID NO: 365787 - DNA, 607 bp, Homo sapiens
ttacttctattatttctatgaaatgccagcatgggaaaatacctgaataatgacatattacttaatgttagaaaaggatagtattatagttaactaaaatgtacacacgaacaaagcttaaggtgtttgtttttgtttttcctactagcaagagaaatgggacagaggggaaaaaggctattgggttcattccatgctttggcaaaaggaaattagtgtaggagtagctcagaaaatcattctgtaccattctggaagattctgcaaagaagggcttaaacaaatatgctgggatacagggagactgtctatgtggacaccgcagattttagtttggttgtggtgccgttgactctctccttttataagtgaactgtatcatttacgtgccaagttcaatttcaggcctctcttactatggaactctgccatttgcaacaagktacaacttttcctgtggctataggaagttttgctctgtgaaaataaacatgactcacatcctgaatattgcactccaaaaaattaataatctttttatattaccttttttttttgagacagagtcagggggatgggaagtgcctgttgtccaggctggagtgca

SEQ ID NO: 365788 - DNA, 464 bp, Homo sapiens
atttcatgttaagaactccacagctgtctccactattattgatggcgtctgttttcattaaaagtaagcaaacaaaagcaaaaactgatttgtagaggcacttaatactttgtactgttaaattttttgaaatattcttctcaaatttcacagtgttttttagttatctttargatgcaagttactcgtttgttgatagtagaattaataggtctattaaattaatgcccgtatgtggaaaagaaatataagcaatagtctcttgccctttatttctagtctttgaatttttcagtagatagaaccagttttagttattttagttttaaatgcttcaggtggttacttttatgaattctaaataataagcatacacttttctctttgatactatgtcaaatttttgtattatcttttaattctccactaaggatgaaatttaactcacatactcccagtttccc

SEQ ID NO: 365789 - DNA, 440 bp, Homo sapiens
agttcagctaaatgcaaactgaactccagaagacctgctcctacccatcactgtaatcgttaagggagaaaattaattgcctgaggccagagtgtcgaaatccaactagacatctcctcccaagtgacctgtccctgagcagattgtggtgggcacacctgtaagtaatattccaacttcatttgtctacacataatttcccttgtcaggatttataatcatatacacatagctgttgtggtttttatggagtttctgtctttcccaatacaccataagctccaccaatgggaagaggctatacctattttttaacactacagcacctagcacatagactaatcactcatcaaaaattctcaatgatggagagatgaataggggtggggatttcaaaccaggactcacagttcttaamaaagaaaacagaataaaaataa

SEQ ID NO: 365790 - DNA, 562 bp, Homo sapiens
agggttaccaccttatcccaaggggcaatgactacacaactccagcttctgtggtctgtggccatagaagaatacaacttgatgttgccagctctttcagtatttcaagacaatccagaattcaggattttgtgttaaaatcttcctattttaacagttggtaaaccatgcacatttaagattttgtgtaggacacatttgtgaacgagagtcacccaatggactttggagaaaggcatttcatggcctttaggagaaaggcaattttcctactggaaaccataaggccttttattcttgtcgaaattcatcagtactttgtaaaatggaataaacttttaagcattaactagcagaaaaatctgscatattgctgctgagtgagtgtgtagcaactgacaattatggacagtagaactcaaactagctcttgatgcatgggaagcgaatacgaggcaatcagtttaaaattagaaccacatttcttagaggcctccatctgtcttcctacatggggagtatggagtccctgatccttcatctatttttgagtggccctgtc

SEQ ID NO: 365791 - DNA, 504 bp, Homo sapiens
cggagagacgaagaatttattgtagttgtgtttttgcaatagtttctctcccccactgggtgattattcatgcactgcttctccacattagggcaaagtgagctcacatctctcttacctgctctctgggcctcccrgcctggactcgcacaagggcaccatcccactacccctcatacttccaatcagtgcagaccagagccaccccaaccccactatcatcactcacatgagcagcaggatggagctggcacagaagacaagcctcctacacctcctctgccaaatcttcaaatatcatcagtcacactggaaaatggccccaggccactgctgcttaatgggccatgatggatgaacacagatctagagaaatgattgtttaccaactaagggatcagagcctatgggcctctttctgtcctctgaagagcatgctgctactggggcaaatgagtttgagtccagagccgacaatgagcaggtgatcaagccccaagtgaa

SEQ ID NO: 365792 - DNA, 580 bp, Homo sapiens
ttctttctttctttttcttactttcttttttttcttatagcgtcagggtcttgctttgtcacccaggctggagtacagcggcatgggagatgcagcatttcttaaagaatgccccactgttgtttctaagattttcttctaagccactgatacccattccaatgtaatgcatgtgctcaaacaacgacaattatacccacctggttgactgagctagcactcatgacctaatcaccttgtaaaggccacctcttaatcttattgcattggggatttaagtttcaacatgaatttttggagggacacaaatattcaaaccagaacagagatcaagtcctgtagtcacaggatttatagtcttagttatttatagtcttagctatgctttccctgttctattwaaacatgtttaaaccactggaatatgtgcatgcatgtggatttcatcttccttttagcaactttggagtcagggcacattggggaaaactcataaagcccaggaaactttaatttcagattataataggtttcatttgcacaaaattaagggcacagtgataataatattatctttttg

SEQ ID NO: 365793 - DNA, 545 bp, Homo sapiens
aaactcctatactgtatattaattctgaaaggtacaggtgaaaagagacagagaatgtctgtagtaatgaacagtttattctttcataactcaattgtttcagtctatctcctcttactttctcaaaatttttatatgcaaaagaaatattgatagtatctattaagtagtaactcagaagaaatagtggttaattgatgtagggccacaaaaattaatatctagtggaatttaatgtctagttttctggaaactaaaagaatatgtaaactttgcagttatataaaagatgttatagacacaatattttgcacaataataagtcttccaggcaamagttgtaaactcctttttaattgggtatatttagaagtacatgaaggaaacttactattaaatacataataattgtataagctgtccaggaactaaattacataaataagatattcacttgttttttctggttacaccatattttcatattaatgtaatataacattttattatatactatactctagggattaactaaaatgtgagcc

SEQ ID NO: 365794 - DNA, 599 bp, Homo sapiens
tattatatactatactctagggattaactaaaatgtgagccaaataaatagcactactgatgtcatcttaaatcatttgaagcaatgttttgaaaaagttggaaatttgattgatttatctatttgtggtgatatatcaccactaatatatcaccaccatctaattgtggtgaacttaacaaaattagattcttcccccccgccaagatatttgaaaatacttaccagaaacaatagtttgcaggatatacaaaatatattattgatacagataattaatatttttcaaaaattatccaattgtacgatataaacaaattcacacaaaggcactgtgatgatatgtttcaccaagatcaggaataaaatgctgttgagactttaytgactataaggaaaatccagcagtaagtgagtctaattatgagtaatgagatggggcatatatggtactataggttttattgtacctatagcatgtattcaaagcatgtcaatgctttgaagtgaattttcaccatttttactattttcagcttcagaaactaaatctatttttgcaggcatatttatttactgtatcttttttataagcagaa

SEQ ID NO: 365795 - DNA, 486 bp, Homo sapiens
ttgtccttgtgacaagctcacactaaaggttgtattttatgtttacaaattgaaaactgtcttgaaactgaggggtattcccttccccttcctcttgcttcttctggcagtttatraagatgcaccaccatgtttcattagcatgtgtgagcgttcttactaaacaagataaaaaaaagaaggagcatttgtccctgctggtagaaaaatccatacacaccttgaattacccctatttatgggagacagataaaaactttgatcttttggaatccactattgtttggagttcactgtcaccttcatcctgacttagtatcactgacatactctccatattaggaaatatggcacatattcagcactcgatacatattgaagcattattgttcttgaactttggaagaaataaagtaaaagtaaattacagcatagggtgaattccacagaacaaaaccttaatatcaggattcctctgcaagtgac

SEQ ID NO: 365796 - DNA, 486 bp, Homo sapiens
ttgtccttgtgacaagctcacactaaaggttgtattttatgtttacaaattgaaaactgtcttgaaactgaggggtattcccttccccttcctcttgcttcttctggcagtttataaagatgcaccaccatgtttcattagcatgtgtgagcgttcttactraacaagataaaaaaaagaaggagcatttgtccctgctggtagaaaaatccatacacaccttgaattacccctatttatgggagacagataaaaactttgatcttttggaatccactattgtttggagttcactgtcaccttcatcctgacttagtatcactgacatactctccatattaggaaatatggcacatattcagcactcgatacatattgaagcattattgttcttgaactttggaagaaataaagtaaaagtaaattacagcatagggtgaattccacagaacaaaaccttaatatcaggattcctctgcaagtgac

SEQ ID NO: 365797 - DNA, 593 bp, Homo sapiens
tgtgtgtgtgtgcgtgtgtgtcattcagggttttcttcatctaagattatatcatttgggtacagagataattttttccatcattccaatttggaggacttttgtttgcttttctaacgtaattgtcctggctaggacttccactaccatgtgaaatagaacttgcaaaagwgagcattcttgccttgttgctgatcttagaggaaaagatttattttttatcatttgtatgatatttgctgtgacttcttatatggctattattatattgtggcagtttctttctattcctagtttgttaagatttttcatcactatagggtgttaagttttgttaaatgctttttccatatcaattgagatgatcatgtagtttctttattctgtaaatgttatatgttacatggattaatgtttatatgatgaaccatccttgcatttcagaaataaaatcctcttgtctatggtatataattcttttagtatactactaaacttggtttagtagtattttgatgaggatttttgcatcaatgttcataaaagataacggtctgtatttttcttttcatgcaaaagtatttttatctggc

SEQ ID NO: 365798 - DNA, 593 bp, Homo sapiens
tgtgtgtgtgtgcgtgtgtgtcattcagggttttcttcatctaagattatatcatttgggtacagagataattttttccatcattccaatttggaggacttttgtttgcttttctaacgtaattgtcctggctaggacttccactaccatgtgaaatagaacttgcaaaagagagcattcttgccttgttgcygatcttagaggaaaagatttattttttatcatttgtatgatatttgctgtgacttcttatatggctattattatattgtggcagtttctttctattcctagtttgttaagatttttcatcactatagggtgttaagttttgttaaatgctttttccatatcaattgagatgatcatgtagtttctttattctgtaaatgttatatgttacatggattaatgtttatatgatgaaccatccttgcatttcagaaataaaatcctcttgtctatggtatataattcttttagtatactactaaacttggtttagtagtattttgatgaggatttttgcatcaatgttcataaaagataacggtctgtatttttcttttcatgcaaaagtatttttatctggc

SEQ ID NO: 365799 - DNA, 593 bp, Homo sapiens
tgtgtgtgtgtgcgtgtgtgtcattcagggttttcttcatctaagattatatcatttgggtacagagataattttttccatcattccaatttggaggacttttgtttgcttttctaacgtaattgtcctggctaggacttccactaccatgtgaaatagaacttgcaaaagagagcattcttgccttgttgctgatcttagaggaaaagatttattttttatcatttgtatgatatttgctgtgacttcttayatggctattattatattgtggcagtttctttctattcctagtttgttaagatttttcatcactatagggtgttaagttttgttaaatgctttttccatatcaattgagatgatcatgtagtttctttattctgtaaatgttatatgttacatggattaatgtttatatgatgaaccatccttgcatttcagaaataaaatcctcttgtctatggtatataattcttttagtatactactaaacttggtttagtagtattttgatgaggatttttgcatcaatgttcataaaagataacggtctgtatttttcttttcatgcaaaagtatttttatctggc

SEQ ID NO: 365800 - DNA, 448 bp, Homo sapiens
ttagtagtattttgatgaggatttttgcatcaatgttcataaaagataacggtctgtatttttcttttcatgcaaaagtatttttatctggctttggtattagggtaatactggcctcataaaatgaattaggtgaattaaaaagtgttacctcctcttcaatgttttgaaaatttgagaaagattgatatttgttctttaagtatttgatagaattcaccaacaaagccatcaggccctttctttagtcaggaaattctgtttgctgattcaaatttcttgctatttataagtttattccaattttaaaaaayattattgtgatttagccttggtatgttttgcctttctagaaattgttccatttcatctagcttatcatttgttggcatagagttattcatagtactttcttataattatttttagttctatagaatcgatagta

SEQ ID NO: 365801 - DNA, 599 bp, Homo sapiens
cacatcttcttttagtgttttgagtatttttaagatagttgttttaaggcctgtgtagatcagtcatcagatatttttcaagaacagtttctgttttgttgttgttgttgttgtttcttcttttaaatggaacatacttttccattcctttgtatgccttgtggtggtggtgttgttgttgaaacctgtacatttaaatttaatgatatagtgactagaaattaattctatttcctccccagattgtgccatttttttgtttacgctttcttgattatcataggctatctctgctgagattcagccagtggtgtaaattcaaggtcttctcaagtatttctctgagactgcaccttccactgggcaggcatggtgagcttgtcattttccgtcatgtatatgattgtttttgaaagtcctgcatgtctatatctggctcccaaagtgggagaaagggaaaaatgaatggaggaagaaagcaccarcccattacatcacctggaaattacttcactcagagtaagagaggcgtgcaataattgtgggtgggtataaaaataatggtttctgcttttttgtctctacctctgtgaccagaa

SEQ ID NO: 365802 - DNA, 599 bp, Homo sapiens
cacatcttcttttagtgttttgagtatttttaagatagttgttttaaggcctgtgtagatcagtcatcagatatttttcaagaacagtttctgttttgttgttgttgttgttgtttcttcttttaaatggaacatacttttccattcctttgtatgccttgtggtggtggtgttgttgttgaaacctgtacatttaaatttaatgatatagtgactagaaattaattctatttcctccccagattgtgccatttttttgtttacgctttcttgattatcataggctatctctgctgagattcagccagtggtgtaaattcaaggtcttctcaagtatttctctgagactgcaccttccactgggcaggcatggtgagcttgtcattttccgtcatgtatatgattgtttttgaaagtcctgcatgtctatatctggctcccaaagtgggagaaagggaaaaatgaatggaggaagaaagcaccaacccattacatcacctggaarttacttcactcagagtaagagaggcgtgcaataattgtgggtgggtataaaaataatggtttctgcttttttgtctctacctctgtgaccagaa

SEQ ID NO: 365803 - DNA, 630 bp, Homo sapiens
ttctctctgaaaaagctaaatgtttcacaaccaagagctactaacattgaaatatgagaattctcaacaacaaaaattgtcccattgtcacattagtatgtcctacttaatatcaggtggatagcaaagagtccccaatatctggcaaagcttctgttgtgaaagacagatgaagaccaaagaaaaaatattatggttaaaaaaagagggaaycttagaagctaaatgaaaccttaaatatattagtgctactcttctttagagaaatgagggatgttgaaactaagaaacaaaaacaaaagtatttaaaatgaaatgagaaaaaagaaagaagctacaaatatataaaatatggtcacattaaaatttccattaaattttggaaataaggaacaagacaatctttgaggaaatagagggagaataaatgaacaaagaaaggctttaatagtatgaaagaaaacctaaaattaaaggttcaatcaagagatgcaatttaaagctcaggggagtgccaaaggagagacacagagtatgaaatggaggaaaatattaaagaagcaacataagaaaatatcccagaactgccagtgtttctcagaatcaaccactacaaagagaccagtaccc

SEQ ID NO: 365804 - DNA, 630 bp, Homo sapiens
ttctctctgaaaaagctaaatgtttcacaaccaagagctactaacattgaaatatgagaattctcaacaacaaaaattgtcccattgtcacattagtatgtcctacttaatatcaggtggatagcaaagagtccccaatatctggcaaagcttctgttgtgaaagacagatgaagaccaaagaaaaaatattatggttaaaaaaagagggaaccttagaagctaaatgaaaccttaaatatattagygctactcttctttagagaaatgagggatgttgaaactaagaaacaaaaacaaaagtatttaaaatgaaatgagaaaaaagaaagaagctacaaatatataaaatatggtcacattaaaatttccattaaattttggaaataaggaacaagacaatctttgaggaaatagagggagaataaatgaacaaagaaaggctttaatagtatgaaagaaaacctaaaattaaaggttcaatcaagagatgcaatttaaagctcaggggagtgccaaaggagagacacagagtatgaaatggaggaaaatattaaagaagcaacataagaaaatatcccagaactgccagtgtttctcagaatcaaccactacaaagagaccagtaccc

SEQ ID NO: 365805 - DNA, 504 bp, Homo sapiens
cacattaaaatttccattaaattttggaaataaggaacaagacaatctttgaggaaatagagggagaataaatgaacaaagaaaggctttaatartatgaaagaaaacctaaaattaaaggttcaatcaagagatgcaatttaaagctcaggggagtgccaaaggagagacacagagtatgaaatggaggaaaatattaaagaagcaacataagaaaatatcccagaactgccagtgtttctcagaatcaaccactacaaagagaccagtacccaaccctatcatcatcatgaaatttcacagtgcgcaacaaaatgtttcagacagcaaacattgtgcagccattagattaaacagtaccagtaaaatatagatggctgaaataaatacatgtaaatttctaaagaaaaatgattttctgcccagacttcagtatgcagaaagaaaacatcaacttgcaggtggagtacacatttttgcggtattacatgctctcaataaata

SEQ ID NO: 365806 - DNA, 541 bp, Homo sapiens
tgcaacttcctctccacaagcaacatagagacctatccatgttgaaggacaagtttcttttctatcacttcctttctttttctttcttctccttctcctccttcttctttcacatctctagatgaggaaatattttcaagcttaaaggcaaagacatcaaccatagtaagaaagctctgcagaattgattatatcgaatagtactatatgcatgtgtgacataaacattcaaaaatttgtaacttawattaaaagtaaaatgacctcagtaatactcagattatttagcaagaaaaaaatcatattcatgtccaccaggcaatatatattataatgttcttagaaaaataacaacaacaacaaagtaagcacaatggaaaaattgtcatgcaattagagaaaaaatcacaataaaattattcatgcaatttcatgtagttattatatcatctgagggctgggcttggtagctcacatctgtaatcctagtgctttgggaggccaaagcgagaagattgcttgagttcaagagttggaggcc

SEQ ID NO: 365807 - DNA, 560 bp, Homo sapiens
ctttcacatctctagatgaggaaatattttcaagcttaaaggcaaagacatcaaccatagtaagaaagctctgcagaattgattatatcgaatagtactatatgcatgtgtgacataaacattcaaaaatttgtaacttatattaaaagtaaaatgacctcagtaatactcagattatttagcaagaaaaaaatcatattcatgtccaccaggcaatatatattataatgttcttagaaaaataacaacaacaacaaagtaagcacaatggaaaaattgtcatgcaattagagaaaaaatcacaataaaattattcatgcaatttsatgtagttattatatcatctgagggctgggcttggtagctcacatctgtaatcctagtgctttgggaggccaaagcgagaagattgcttgagttcaagagttggaggccagcctggacaagacagtgagtctccttctctacaaaaaaatacaatttaaaaattcttatcgtaacagctattatattgataggcacataattaagattgaataaatgcatacaggtatgtcccc

SEQ ID NO: 365808 - DNA, 565 bp, Homo sapiens
tttctttgtgcttttctaatgtggcctacatcctcccaagccttataggattaaaattttctaagcagggacaaaactttaaagtgcagttttctttctgtagactttgtagcagcatttcttargtagccaattcaaataatttctgtttcttttcaatgttcaagaaatagtcaaaatgaaaaggaatgaacttaagtaataaatatgtatgtctctgtaggcatgtgtgtccatacacctacatatatatatttacatattttattcatatacatgaaacgtagcaagaactgatgcatgtaactgaacctgtcaaacacttctgattgccacagtggtgacattgtctgatataatcaagaataattgtactttttctcagttaagtatacttcacatggcttttgtcactgaggaatgacattatcataaaacgatgaacgtcattgaaacacttttttctcaataaatacattactatatatcacaaatagataaggatttcactataatagtatcatcatcaaacctaaaagattaaacatagtccattcatattctg

SEQ ID NO: 365809 - DNA, 565 bp, Homo sapiens
tttctttgtgcttttctaatgtggcctacatcctcccaagccttataggattaaaattttctaagcagggacaaaactttaaagtgcagttttctttctgtagactttgtagcagcatttcttaggtagccaattcaaataatttctgtttcttttcaatgttcaagaaatagtcaaaatgaaaaggaatgaacttaagtaataaatatgtatgtctctgtaggcatgtgtgtccatacacctacatatatatatttacatattttattcatatacatgaaacgtagcaagaactgatgcatgtaactgaacctgtcaaacacttctgattgccacagtggtgacattgtctgatataatcaagaataattgtactttttctcagttaagtatacttcacatggcttttgtcactgaggaatgacattatcataaaacgatgaacgtcattgaaacacttttttctcaataaatacattactatatatyacaaatagataaggatttcactataatagtatcatcatcaaacctaaaagattaaacatagtccattcatattctg

SEQ ID NO: 365810 - DNA, 573 bp, Homo sapiens
taattatattacaggcaggatacagtcatttgtacagattacacattgtaattacctgtgtactaacctatcttacaaaggaaggagtggcctagttttcggcaatatcgctcacaagtagggaatgccactgacaatagacacccaatacatgtgttgtgagtgaatggaatgtgatatagataaatagtcctgcccaatccatcaagttagttactctctgaaaataaaatgaactgaaatcaaagaattttaaataagaagatctggaagtagtatattgtagagggaaaatgcatgtgttttagtaatccacatgttaatttgaatacaactgtatccatttatcggttacataatcacaggcaaaatactctcatatactatagaatgttcatatgtaaattagggaaacagtagcaacacttgtcaaatatcctatgaggatactcaatatttagtagttttttatatattataaaatgwatattgcatacagtttactattctcaatttattttttctaaaagtaaacattctaaagaacactatactgactaatactggagtaat

SEQ ID NO: 365811 - DNA, 576 bp, Homo sapiens
ctttgccactctttggctcctttttgcctcctccttcctctcttgcctcctccttccactatatgaagatggagcaggaaggccctcaacatgccaaatgctgctgccttgatcttgaatgtcctagtctccaaagcttgaggaataaatttctgttctttataaattaccctttctcaggtattttgttataatggtacaaataagacaattgttaaattagtaaaatcctatattatagacttaatgcctggaacgtctaaatagaaaaaagtctattgccttctaagtaaatttkcaggcatgagaatatatgtaatgaatgggtggcatagatgacatcctcttttgtttttacatttaattagaaattcagaagagggagaaaaagcacttggtgtgtttggaaaaagtttcatagagcagtatgaacttcagctggacttatagaggtaagaaaaagatcaaggagaagaactggagaaaaaaatgcataaatttacataatgcatttgagtgacaatgagatccttctggctgaaaagtatggttcatgtagacaaataagcagatcta

SEQ ID NO: 365812 - DNA, 456 bp, Homo sapiens
taaaccaaagcaataatttaaaactaaaataaaattataaattccaaaaagcgttatttaaaagttagatttacatgtatacctgaaggccttttattaaaagaggctgagatagaatctcctgtgatttaattttgagtcaaatttttctacttagaagatgtggctattcttacacatacaaccagtaacacataaaatagatattaagtttacatttgtaacttaacttgaataataacaagaaacaagctgattcagaaaaagctgactaatatgtgctcaatgtctaattagttgagtagtatgaattttgcccatttcattaaattagctgaataagtttggaggtcacatacattgcactagttatgcagttcaaatacattgacagtccttgtaatcctatttaartatgcactaacctggaaaaaagagatgtcattaaatgcctgt

SEQ ID NO: 365813 - DNA, 495 bp, Homo sapiens
atcttgtgtgtgtggttttagtgattgaatatagattaagtgaacttactacttgttctagaacagtcatgacrtagatgtgaaaactttggcagatctttcagtctcccacaaactttcttaaattaaatcgaggtgctgcctgggcctgagccgatgtttgtctctggagcacaggttgatgctctgcactgcccgtgatttctgtctgtagtcaccagatcacggacactccctccggctgcagctggctccccaagtttgaccagaggaggtacaactcaccccttgactgctgaggtccaatgcagaaacgatacctgctcttctcctcctcccattccctacagcacaaatgagtccagatatactgtttctaaaactttgtcaattgttgagaaacagaattatagcatagagaaacttatgtctgtctctaagttacttctgctttgctgggccctcagacctcaatacaggagacccgcccttgct

SEQ ID NO: 365814 - DNA, 495 bp, Homo sapiens
atcttgtgtgtgtggttttagtgattgaatatagattaagtgaacttactacttgttctagaacagtcatgacatagatgtgaaaactttggcagatctttcagtctcccacaaactttcttaaattaaatcgaggtgctgcctgggcctgagccgatgtttgtctctggagcacaggttgatgctctgcactgcccgtgatttctgtctgtagtcaccagatcacggacactccctccggctgcagctggctccccaagtttgaccagaggaggtacaactcaccccttgactgctgaggtccaatgcagaaacgatacctgctcttctcctcctcccattccctacagcacaaatgagtccagatatactgtttctaaaactttgtcaattgttgagaaacagaattatagcatagagaaacttatgtctgtctctaagttacttctgctttgctgrgccctcagacctcaatacaggagacccgcccttgct

SEQ ID NO: 365815 - DNA, 609 bp, Homo sapiens
caaaacatctctgagcttttagaaacaaagctgaatccagaccaactgcctcatctgaattcagcctgtgaaaaccataaaccactctgacctcttactgctgaaggaagacatgctccctgctggcatccttccatgagaaacacatctctttctcacattggacatattttaaaggcaagaaaggcaggatttgagatctaaaagtctagattttttctcttctgccactctttggtgacgtgaagttaccatttccattctataaaatgcaaaattacaaaaggttttagaattgcttctcatttgaaaggaatgttgaaggttatttaaatactaaagtttaatcaacagtggtttgaaatccttaggaaatactatgctaaacaaaatatccttrctcatggtagcttaatcaaacagcagatatttgtcaaatgtaaggcttgttataggcaggttggaatatcttctattaggaagctctattctattctatcttctataactgtagttccaggggaaaaaattctgtgcatgtctcagtaatcagaacttcaaagaggagtatgcaattttaatttaactgatgtgaaaaacactattaaa

SEQ ID NO: 365816 - DNA, 616 bp, Homo sapiens
aagctattgagtaactattgctaatatatggcataaagaaactcaaccaaagaaaagagaaagtcaaataatacatgtaccccaaagaataataggtaagttaagtagatcatggtatgttctactcaattggaacttcccctagttctcctcaactcatagatgattctaacatattatatgttgtaataaagaatgacaaatataagaaatggcatcaaataataaagcttaagaaatgaaagatgagtcctgagaagaggtgccataagttgtagtggaaagtattttctctaaaccattatgatgactattgtagtacgttaaagagcagaaccaaagacaagcctcatacaggacatttcagaaatcatcactgtgattaaaaaaatgcatgttattgttaaattgtattttacttttatgktaagttccagggtacatgtgcaggatgtgcaggtttattacataggtaaatgtgtgccatggtggtttgctgtacctgtcaaaccatcacctaggtattaagcccaacatgcattagctattttttctaatgctctccctccacaccccctccacagaccccagtgtgtgttgttcccctttctgtgtc

SEQ ID NO: 365817 - DNA, 590 bp, Homo sapiens
tttcagacctttaagggtcagactctcagttagtctttcctagatccagacaagggaggcccttgcagaaagcctggaagcatcactgcagattctctacagacgccaatctcccccacaaaagacagctttgcaggctctctgaacagccatctcaaaatatgtcaragaagtttattttggggtaaaccgtttttgtttccttcaaagccatattaaaagaaaaaagaaaagaaaaaaaggatggaataaataaagagagcaatggagggatgatggaagaaaaagaaaataagttagtttgaggccccctgtgaaacctagttatgatccattcatcctttccctttatggggtcaatctccaaagtggcttgtgttccaaataacttgtgtatacacagtgggttttcaagaacaggaaaggagtagtatagttgtccctatcaagaaaacaattcttcacatctttcacccatcacaagcctgctcagaaatgttttcctttcatggatgcaaatgaagatatggaaagaaaaaggttggagaagagcaataatagtaggaaagggctagctgcatcaatgttaa

SEQ ID NO: 365818 - DNA, 590 bp, Homo sapiens
tttcagacctttaagggtcagactctcagttagtctttcctagatccagacaagggaggcccttgcagaaagcctggaagcatcactgcagattctctacagacgccaatctcccccacaaaagacagctttgcaggctctctgaacagccatctcaaaatatgtcagagaagtttattttggggtaaaccgtttttgtttccttcaaagccatattaaaagaaaaaagaaaagaaaaaaaggatggaataaataaagagagcaatggagggatgatggaagaaaaagaaaataagttagtttgaggccccctgtgaaacctagttatgatccattcatcctttccctttatggggtcaatctccaaagtggcttgtgttccaaataacttgtgtatacacagtgggttttcaagaacaggaaaggagtagtatagttgtccctatcaagaaaacaattcttcacatctttcacccatcacaagcctgctcagaaatgttttcctttcatggatgcaaatgaagakatggaaagaaaaaggttggagaagagcaataatagtaggaaagggctagctgcatcaatgttaa

SEQ ID NO: 365819 - DNA, 632 bp, Homo sapiens
taatttcttgtttattgaagactccattattactttttaaagttcccagtaacatctaccaaaaaaaaaaaaaaactttaagattaatgattgatgaaatgcttcatgtttaaggttctaaattaccaaaagtccaaagaaatgttgcatttttyttactttctttcactcttcaacaaacatattctatctccaaaataccttacattttaatgttattgatgtgaaactttttctactaacatgatctgcttatcagtgactatgtctgacctgtataaggaaatctatttctagtttgtcaatttaggtattttggtcatagcacctatatatcacatatcctacttccaacagatggaattgccacatgtttaattcaactgagtgtttgaaatgtcacaaatacaattactctaatcctactaaatcaaacgcactatccacattccattgattgcctttgtaactagtcattattatggcctaaaatggtcaattgagaaaataatcaattcaaacataccatgaagaccattgccagaacaggtattctgaaaccaaggttagcctagcaaaatatagtatagttggaaatatcaaagagttgcagccactaagtcaaggttttt

SEQ ID NO: 365820 - DNA, 510 bp, Homo sapiens
atataatttgacaaacatcctgttagccatcatattaattattctatctttcagtaggatctgaagtctgtctgggtaatcttcagcctatgtgccatgtgactttacctgaatgttaattacattagcatgctttagtggaaaggaaagaaggaagaaggttgagatgggagatctgggttccagaaccagttcaagttcaactcaaatgcttttctagaaataggagaaattaaactgtatgatttttaaatccttttttaatttgaaaatgcttttgaatttgaacatattaagagtataatacttcatactttctcacgcactctcccacctgttgcaggctcatgctttcagcctgaaacaggtcattttggctgaagcgagygacaaacatccttcacccatttttaacaatttcccattgcattaagttacccaaactttttagtcaagttctgttttgagtgagcatttgatggttattcccttctcacaaatacactaaac

SEQ ID NO: 365821 - DNA, 606 bp, Homo sapiens
cttggcctcccaaagtgctgggattacaggtgtgagccaccatgactggcctgattgcgtttctaaacagtaagtaagatattttataatgagaaacagtgaccctttctacatggtgaaatacaccaygctggtacttggagttaggcaaccctgcctcttagagatcctccacatgcctcttctgacccattgtgccgtgtgcactgggaaggagatgaccatggggaaggaagaactgtgttctggaaatcccagagagcttgtggagaagccagaagccatccccgctggctggagagatcatgcagggacaaagcccagcacatgataatggtatgtaggtcagagtattagaaattgaggtttctggcaatactaaatagtcagcactcttgattaaaacttaattgcaaactgtttctaatcaaatcctccctaactgcaggtacttttgccccaacatttgtttgtttgggttgtttttcttttcttttttttttttacattgctgaggaagttattatacattgaacatccacattctcaaacatcatttccagaaagagctctcgcttacttcttctaatcgcaaattacacagat

SEQ ID NO: 365822 - DNA, 606 bp, Homo sapiens
cttggcctcccaaagtgctgggattacaggtgtgagccaccatgactggcctgattgcgtttctaaacagtaagtaagatattttataatgagaaacagtgaccctttctacatggtgaaatacaccacgctggtacttggagttaggcaaccctgcctcttagagatcctccacatgcctcttctgacccattgtgccgtgtgcactgggaaggagatgaccatggggaaggaagaactgtgttctggaaatcccagagagcttgtggagaagccagaagccatccccgctggctggagagatcatgcagggacaaagcccagcacatgataatggtatgtaggtcagagtattagaaattgaggtttctggcaatactaaatagtcagcactcttgattaraacttaattgcaaactgtttctaatcaaatcctccctaactgcaggtacttttgccccaacatttgtttgtttgggttgtttttcttttcttttttttttttacattgctgaggaagttattatacattgaacatccacattctcaaacatcatttccagaaagagctctcgcttacttcttctaatcgcaaattacacagat

SEQ ID NO: 365823 - DNA, 584 bp, Homo sapiens
aagtggggaagggttaaaaactacatattgggtacacgtacatgtaatgtacatgactccagtgacagatgcagtaaaatttcagatttcaccactatacaattcatccatataaaaacacttgtacccctaaagctactgaaataaaaaaattaactggtggaaataaataattaaaatatcttatgttcctttcaatctgtctactactctgttctgttctttggaatacaaataaaaagtatttaacctctgaactttttgtaactgtaaatttgaaaagctgcttaattttttattgtgatggcaacagtgttgataatctatacacattttckgagtaaattaatcatattaagaattttgtcagaaaataaaattccacttttgtcaacaaaacaaatccacttttgttaaaacaaatcagtctctgtttaaaactacaaacacacctctccgaatttctgtgtaggttgtttttgttccttagctccatgcaaagttatgtggctgatggtgagggaatggtaagtttgtggggcttagagcccaaagacctgggagcaggcccagattctactata

SEQ ID NO: 365824 - DNA, 581 bp, Homo sapiens
atgcgttgcagccagtttatcttggaagactcacccagaatttaatttcttaaaattcaatatccttatgagggcaattggtaacacctgctgtgaatattttccaggctacaattatacaacaacactccatgccaaaaattgttaaggaccttgatcaagcatttgtccttatgttcaagcagctcagaactgttttctgtggaaaaccttggccctgcccatctctgcaagataggcaaccatccaggctttaggcattcaggtggaagatactgaatttcataagacaatgtttgtttgattcctctgtgcttccagtttcacatcatacctgaaaaatggaaataatacctatcttatgaggttrttgcaagaattaaaaacacataaaacattttaagtgccaagtgtagtcagtgctatgtaggtattgttgctggctattattagtataagattgagttagaattgccagatttagcaaataaagatatataacacccagataaattcgatttttaagaaaatgacatagtatttctttagtataaatatatctcatgcattatttgggacac

SEQ ID NO: 365825 - DNA, 581 bp, Homo sapiens
atgcgttgcagccagtttatcttggaagactcacccagaatttaatttcttaaaattcaatatccttatgagggcaattggtaacacctgctgtgaatattttccaggctacaattatacaacaacactccatgccaaaaattgttaaggaccttgatcaagcatttgtccttatgttcaagcagctcagaactgttttctgtggaaaaccttggccctgcccatctctgcaagataggcaaccatccaggctttaggcattcaggtggaagatactgaatttcataagacaatgtttgtttgattcctctgtgcttccagtttcacatcatacctgaaaaatggaaataatacctatcttatgaggttattgcaagaattaaaaacacatmaaacattttaagtgccaagtgtagtcagtgctatgtaggtattgttgctggctattattagtataagattgagttagaattgccagatttagcaaataaagatatataacacccagataaattcgatttttaagaaaatgacatagtatttctttagtataaatatatctcatgcattatttgggacac

SEQ ID NO: 365826 - DNA, 581 bp, Homo sapiens
atgcgttgcagccagtttatcttggaagactcacccagaatttaatttcttaaaattcaatatccttatgagggcaattggtaacacctgctgtgaatattttccaggctacaattatacaacaacactccatgccaaaaattgttaaggaccttgatcaagcatttgtccttatgttcaagcagctcagaactgttttctgtggaaaaccttggccctgcccatctctgcaagataggcaaccatccaggctttaggcattcaggtggaagatactgaatttcataagacaatgtttgtttgattcctctgtgcttccagtttcacatcatacctgaaaaatggaaataatacctatcttatgaggttattgcaagaattaaaaacacataaaacattttaagtgccaagtgtagtcagtgctatgtaggtattgttgctggctattattagtataagattgagttagaattgccagayttagcaaataaagatatataacacccagataaattcgatttttaagaaaatgacatagtatttctttagtataaatatatctcatgcattatttgggacac

SEQ ID NO: 365827 - DNA, 565 bp, Homo sapiens
gccattcacacaacagctagctagcctcacagggcgtcagtatgattcccgggaaagaggtgtctgtgtttaatggatttctatggtccagtgctgtggggaaacactaggacatgaccctgttaagcacagaactcttataaaagctttaattggctaatgtgcagggtgagccaagaggtctgttttccacagactgtgttctgtgaaacgcactctgggaaacattgttggagaactccaggctgctctcatggagcatggagagaaaattccccttttcagaaagtggtgtaaattctggagggatagtggaggggagggaaggggcaggatrtgagaaggggacatggacagcatcttttctttcggaatgaagacaatagacacctatctgcacccatggcagccccaggttgtgacttgcccctttgtaaaaccaccatgccctcccattgcccatggcccttgctctgtccacacccctcaagccctcttccaaggatgggaagtccttcccatcgctggccttcagggtaagaaagcagccactggtcttaactgc

SEQ ID NO: 365828 - DNA, 545 bp, Homo sapiens
agaggctgcagagcactgggaatgcttctatattgttgggaggaatgaaaattagttcagccacagagatttttcaaagaacttagaacagaattgccatttaatccagcaatcccactactgagtatgtgtgttcatagcagcactattcccaatagcaaagacatggaatcatcctcagtgccaatcaatgtggactggataaagaaatgtggtacaaatrtaccatgaaatactatggatccatgaaaaataatggaattatgtcctttgtagcaacctggatgaagctggaggccattaacctatgcacactaatgaagaaacaaaaaaaacaaataccacatgttctcacttatatgtgggagctaaacattgggttcacgtgaacataaaaatggcaacaagaaacactggggactactaaagggggaagggagaaagggagcagtggttgaaaagctattgggtactatgctcactacctggatgacgaggttattcatacccctcacatcagtatcatgcaatatattcatgtaaat

SEQ ID NO: 365829 - DNA, 545 bp, Homo sapiens
agaggctgcagagcactgggaatgcttctatattgttgggaggaatgaaaattagttcagccacagagatttttcaaagaacttagaacagaattgccatttaatccagcaatcccactactgagtatgtgtgttcatagcagcactattcccaatagcaaagacatggaatcatcctcagtgccaatcaatgtggactggataaagaaatgtggtacaaatgtaccatgaaatactatggatccatgaaaaataatggaattatgtcctttgtagcaacctggatgaagctggaggccattaacctatgcacactaatgaagaaacaaaaaaaacaaataccacatgttctcacttatatgtgggagctaaacattgggttcacgtgaacataaraatggcaacaagaaacactggggactactaaagggggaagggagaaagggagcagtggttgaaaagctattgggtactatgctcactacctggatgacgaggttattcatacccctcacatcagtatcatgcaatatattcatgtaaat

SEQ ID NO: 365830 - DNA, 633 bp, Homo sapiens
ttgatagatctggacaagagggtagccaattaggtaatggcctccagcaagagcggactctatagaagactcgcctttgaactgtgtggagttgaactaaaaagtgcagctgttatataaatcagagagaaaagaacaaggttacacctgtgggttgactcaacagctatattttctcagctgaaatagtagagtagtataatgatagctaatacaatattcagattaattaagtaatcttgacttcaattatttagataactccagagaatagggaattagttccaaaattaaagtgttaatttcagaaatggagacaaaagggtccctatcaggaaatcactcaggaaaatattttcctaaaagatttgaacatttaatrgcaaggaaagttataaacaggaccaggtgttatcaatttaaggccagggatctaatatcaactttattatgtacgtacagagaacatgtcacaaacaagtttgtagatatctatttgttagaaattgttttctaactacctgcatcaatctaaatttgtctctaacttgatgtctggtaaaaaagaacaggtaaatgtgtgccaagctggtcataatacattactgttaacatttctgccataacaaggat

SEQ ID NO: 365831 - DNA, 633 bp, Homo sapiens
ttgatagatctggacaagagggtagccaattaggtaatggcctccagcaagagcggactctatagaagactcgcctttgaactgtgtggagttgaactaaaaagtgcagctgttatataaatcagagagaaaagaacaaggttacacctgtgggttgactcaacagctatattttctcagctgaaatagtagagtagtataatgatagctaatacaatattcagattaattaagtaatcttgacttcaattatttagataactccagagaatagggaattagttccaaaattaaagtgttaatttcagaaatggagacaaaagggtccctatcaggaaatcactcaggaaaatattttcctaaaagatttgaacatttaatggcaaggaaagttataaacaggaccaggtgttatcaatttaaggccagggatctaatatcaactttattatgtacgtacagagaacatgtcacaaacaagtttgtagatatctatttgttagaaattgttttctaactacctgcatcaatctaaatttgtctctaacttgatgyctggtaaaaaagaacaggtaaatgtgtgccaagctggtcataatacattactgttaacatttctgccataacaaggat

SEQ ID NO: 365832 - DNA, 610 bp, Homo sapiens
catctctctatatttaactagatatattttaaaaaagattgtcttctctggcatccatcggggataagtgacagctgtctgtgcattgatgaagcacgaagactttttccatccgaaggaagaaagatcactgcttttcatccttattctttgaactatttaattttrcagccatctgaatcaacttttattcttctcgcatatgttctagaatcttataaatagagaaggcagaaaagtgcaacacctaggtagacagcttttgtcaaatattactcctacattgttttacaaggttccttttgttctgtggtaaaaggcagtgtttttcaatgaaaaagtagcatataaatatctccctttggttaagaggtctatgttcctaatagaataactaagtttggttcagagtattatttttcccttatgggaaataggagtagaacattttattctctgatatttctctatgtgtcactattaagtagtggtaatgtggtggaaaacagacatgcagaaatgactcttcaagtttctttctatttttattatacagcataattagaagaaacatgattttctgagttctgattgggaaagagaaaaaagg

SEQ ID NO: 365833 - DNA, 575 bp, Homo sapiens
tccaggaacacatgattggccagcctctgctgtaaatggtatggggaaaactggatatctacatgcagaagaaggaaattaattccttatctcacgctatatataaaaataaaatggatcaaatacttaaatatgagacctgcaactataaaactactaggaaaaaaagagaaaaggctccattttgtcaatgattttttaaaaaatataaatccaaaagcacagagaacaaaagcaaaaatagacaaatggaatgcaaatggaattaatttgatttgaaatcaaattaaaggygtctgcacagcaaatagaacaactaacaaagtgaagagacaatccagagtgggagaaaatatttgcaaaccatgtatctgataaggggttaatatccaaaataaataaaaaaactcaaacaattcaatagcaataaagcaaataaccccatttaaaagtaagcaaaagacctaaacagacaattcctaaaaatacatacaatgtttaacaggtttatgaaaaaatgctctgcatcactaatcattagggacatgccaattaaaaccatagtgagatataac

SEQ ID NO: 365834 - DNA, 575 bp, Homo sapiens
tccaggaacacatgattggccagcctctgctgtaaatggtatggggaaaactggatatctacatgcagaagaaggaaattaattccttatctcacgctatatataaaaataaaatggatcaaatacttaaatatgagacctgcaactataaaactactaggaaaaaaagagaaaaggctccattttgtcaatgattttttaaaaaatataaatccaaaagcacagagaacaaaagcaaaaatagacaaatggaatgcaaatggaattaatttgatttgaaatcaaattaaaggtgtctgcacagcaaatagaacaactaacaaagtgaagagacaatccagagtgggagaaaatatttgcaaaccatgtatctgataaggggttaatatccaaaataaataaaaaaactcaaacaattcaatagcaataaagcaaataaccccatttaaaagtaagcaaaagacctaaacagacaattcctaaaaatacatacaatgtttaacaggtttaygaaaaaatgctctgcatcactaatcattagggacatgccaattaaaaccatagtgagatataac

SEQ ID NO: 365835 - DNA, 591 bp, Homo sapiens
caagaacatgaaataggatactgacattttgtaaactcattgtactaggctaaaaaaggaaattctgttatagagacatctttctttccaactttaaattgttcaggaagatgtatttgaattcactgaccttgtatttacttaccaatagcaagtaacagatgaatgaaagaatataaagacattgagtttaaatatctaaccaggaagtggtttcttaggatagttatgcaggcaatacattcacttgtcttttcaaattattttcctttgtccagcgaactaaccatagctaactaccaggtacagtcttttagtaaagactatttggttatcagcagtgcctcttatttctgctctccaatcagcagatcctctcttttctgctccccaagtataggctctagacaaccatgtttctgctgtgcagttctgcytacccacgttcatagtcatgacgtgtctgctgtgttgaacctcagtatatcgaaaacttaatctgcaggacagatctctggatggctttggactgacccaattcgctcccactttcctgcatgtagttcttggaaaaactgtagaatgtgctgg

SEQ ID NO: 365836 - DNA, 367 bp, Homo sapiens
tgagtgttctgtctcatcggactcaggcaattgataaaactatagcccaaggtgcagtgggcaaaagtgtttggagtcctatttctggtggttggtatagtgataatctttgctattctccatgcagtgggaattctctcttggggttggtaattggagaacctggtccacactrcattgtgtatagtagaggctcaacaacttttgaatgaacgtgtacatgaaaataggcacctgacttaagctgagctattcaaatcttgtcacttgaaaattgcaactgagaaatatggttttggtggttacgtcacatcaatagtagagttcaacaggaaaaaatctacaagttgcaatgccaacttaccca

SEQ ID NO: 365837 - DNA, 548 bp, Homo sapiens
acattcttggtaaaagtgaatttctaagcccaagttctttggtttttcaaagttgtattgttttgtgctaaatttggtatcttagtaacagcattgaaggaatgcgcatgtattctcctacaatgggctgcagctgcttcccaaactaacatcttggtttagtttccatttttcgatttgaaaagagacattattggagttccaaatactgtctattaatccctcacctaaaatatgcagcaactctaaaattctaagtggcttgcttgtaaattctttcactcacttcatttggttagtgattgctccttttatgtaacaaccaaaattttttttatccaaattcttcttagaaaaggcaaatctgctgccacttaggtacttccactttgtatacagcgtttacacttccaaaawttttttttcctttacttttattatactttaagttctgggatacatgtgcagaacgtgcaggtttgttacataggtatacatgtgccatggtggtttgctgcacccatcaacccgtcatctacattacgtat

SEQ ID NO: 365838 - DNA, 201 bp, Homo sapiens
ggctgatgcatttcttgcaaagatgccctgcccagagaggaggaatctagagaggcaatctggccacaagggccttgctgagctgtgatgggctccacccagtcyaaacttcctgggggctttgtttgtattgtgaggggaaaactgcctactcaagcctcattaatggcagacgcccgtcccccctcttcaagatcgagc

SEQ ID NO: 365839 - DNA, 620 bp, Homo sapiens
gaaacatggatggtatcaggtacctttacagacacatggagagacagagagagagagattgcttacgttataatgggaaggaatgatgtatggtttatagggcatcataggataaaatgggaatgtatagtaatacatttaccttagacttgggatacagaggtttcccaataaagttgataacaatagtaattatttcctgaatactcaccatgtactaggtactagattaagctcttcatgtgcattaactcgtttattctctaacaaaattttgagaggtagtgtcagtattctcactgtacatatgagyaaacaggtttccaaagaccttttccccaaagccccttactagaaaacatatttgaatttaggtctgagtgattcatagctgaaagctcttaacttctaggctttatgttaaggtaagtgctgaaggacgacctatgagtaatcttcctctaggaactgcacgtctaagtgtataagagggttgctcaaatgagcacacaaagaggttgagacagggatgtttacagaagcaatgtttattaagcaaaacttgtaataaactaattgtccactaatgagggaatattttaaaaagtaggcatctataa

SEQ ID NO: 365840 - DNA, 628 bp, Homo sapiens
taggatcaaaacctcacatatctatattaaccttgaatgtaaatggtctaaacaccccacttaaaaggcaccgaatgggaaattagataaaaaaacaaaactcacttgtcttctgtcttcaagagacccatctcacatgtaacagcaccagtaggctcagaataaagggttggagagagatctaccatgcaaactgaaaacaaaaaagaacagagataatcattcttatatcagataaaacagactttaaattataaaaawgtaaaaaaggacaaagaaggacattacataatgataaaggtttcaattcaacaggaagatttaagtatcctaaatatatatgaacccaatattggagcgccagattcataaaacatacttctagacttcccaaaagacttagccacatggtaatagaggaggccttcaacaccccactgacagcattagacagatcatcgagcaataaaactaacaaattctggacttaaaattgacatatgaccaattggacttaataggcatccacagaataccccatccatcaaccacagaatatgcattcttcttgtctgcacgtggaacgtactccaagatcaaccatgtgcccagccataaagctagtctc

SEQ ID NO: 365841 - DNA, 628 bp, Homo sapiens
taggatcaaaacctcacatatctatattaaccttgaatgtaaatggtctaaacaccccacttaaaaggcaccgaatgggaaattagataaaaaaacaaaactcacttgtcttctgtcttcaagagacccatctcacatgtaacagcaccagtaggctcagaataaagggttggagagagatctaccatgcaaactgaaaacaaaaaagaacagagataatcattcttatatcagataaaacagactttaaattataaaaaagtaaaaaaggacaaagaaggrcattacataatgataaaggtttcaattcaacaggaagatttaagtatcctaaatatatatgaacccaatattggagcgccagattcataaaacatacttctagacttcccaaaagacttagccacatggtaatagaggaggccttcaacaccccactgacagcattagacagatcatcgagcaataaaactaacaaattctggacttaaaattgacatatgaccaattggacttaataggcatccacagaataccccatccatcaaccacagaatatgcattcttcttgtctgcacgtggaacgtactccaagatcaaccatgtgcccagccataaagctagtctc

SEQ ID NO: 365842 - DNA, 628 bp, Homo sapiens
taggatcaaaacctcacatatctatattaaccttgaatgtaaatggtctaaacaccccacttaaaaggcaccgaatgggaaattagataaaaaaacaaaactcacttgtcttctgtcttcaagagacccatctcacatgtaacagcaccagtaggctcagaataaagggttggagagagatctaccatgcaaactgaaaacaaaaaagaacagagataatcattcttatatcagataaaacagactttaaattataaaaaagtaaaaaaggacaaagaaggacattacataatgataaaggtttcaattcaacaggaagatttaagtatcctaaatatatatgaacccaatattggagcrccagattcataaaacatacttctagacttcccaaaagacttagccacatggtaatagaggaggccttcaacaccccactgacagcattagacagatcatcgagcaataaaactaacaaattctggacttaaaattgacatatgaccaattggacttaataggcatccacagaataccccatccatcaaccacagaatatgcattcttcttgtctgcacgtggaacgtactccaagatcaaccatgtgcccagccataaagctagtctc

SEQ ID NO: 365843 - DNA, 601 bp, Homo sapiens
tttacgctgtcaccagcaggttttaagtaaccatctctcctcactcacacccacactggtattattatatttttaaaaccttgaaaaatatttaagtgaataattaaattatwatatatgttatatatatatatatatatatgtatgtatgtatgaataagacagggtctcactctgttgcaggctggagtgcggtggtgcaatcacggctcactgcagcctcatcctcctggcctcaagtgattctcccactttggcctccggagtagctgggactacatgtgcacaccaccacgtctagctaagtttcgtatcttttgtagagacagggtttcatcatgttgcccaggctggtctccatacaagcaatcctcccactttggcttcccaaagtgctggaattacaggtgtgagccaccatgcccggcccaaataattgaattatattgttactttaattatactttgatataagctgaggttgattatatttattgttaacttacttccaactaacgtagtttttttctttacttaaaaacaactttagaagacgtagtgccataccatatgcacacacacacacacacacacatatata

SEQ ID NO: 365844 - DNA, 597 bp, Homo sapiens
agataccaattatatccagttgattggtggtgttattgagttaaactaagtcattactgattttctgcctgctgtatctgtctatttgtgatataggggtgttcaagtctccaactattatagtggatttatctattccttcttgtagttctagcctcacatattttgaccctctgttgctaggtgcatacacattaaagattattatgtctctttggagatttgatgcctttatgatgatgtaatgcccatctttatgcctgataaatttccatgctctgaagtctgctctgtctaaaattaatataggtactctaactttctttcaatttgtgttaacatagtatatctttttctagtcatttacttttaatttatttgtgtctctatatttaaggagggtttcttttagacaacataaaagtgggtatggttttttgagtcactcagacaatctccattaatgagtgcatttagcattcatgtttgaagtggctatatagttggattaatacatrccatatttgttactgttttctatgtgtcgcccttgttctttgttcctattctttcactctttttatcattttagttaag

SEQ ID NO: 365845 - DNA, 522 bp, Homo sapiens
attaaaactcctctagtctcaggcttcaagacccactaccaactagcgctgccttacctaacagccggcttcactcagctcaggcccacgcgctttgctctagcctggcagagctcttccacctgcttctttgcacctgtacagccatccctacccatgcagttatctgaaatcactgtgcgtgtgcactctcacagaggtgtgtgtgtaggggcgcgcgtgtgtttgcaggaggagtaggaaaagagaaggggagccagccactgtccctccacattctactgtaggggaaagctctgaagcaggagcatcaagggtggagatgaaagagaaacacaggagagggtggtggcaggatgtcaggaggggaggagctacgaccagtgttctgctgctagttgtggacaggtgaaaggacagaacagygggccctggtggctctgctaactctctcactgcctcccttctgtgttgctctgccttctctttccttggggtgattgctccagtcccttagacatg

SEQ ID NO: 365846 - DNA, 529 bp, Homo sapiens
aaataacaatagagctttaagtactctgcctcctataaacacatggacaaccttattattcaccgtgcgctagacaaattgagaaagcatttttatatcctctgtcgtgtatcaaggcgtaattatcagcacatccttgtatttattcctgtgaggctggaatgcataccgctgcagatrgatatcagccctgcaaactcggtatcattcattctttatctctggcggtggtgatagcagaagaaacgactcctaacacatatacacggtaaatgccttaaatctacaagatatggctgtcctccttgtcctgcatggaaactgcgtcttcaatttcccacagaaactccagatctattgaaatcttggaacattaaaattctccttcattgttagccaaggtttagtaacttgacaaccagaagacagacaccctggctgtttgagggaacgtaggcttaaaaataagaacagcttttcctagtgcatgaaaattcacctggggcttcataggatgaatatttataat

SEQ ID NO: 365847 - DNA, 536 bp, Homo sapiens
acaccaatggttttcaactctggccacgtgttagaaaaacctgggtaactttttgaaattgtcccggtccaagccccaatctcagagaattggatttaattgatcctggagcatgggttttaaggtccctcctggtattgcagcctgaattgagaactacagctttagatctactgtcatgatcatctcactctaggctgtattacagacgtgtgtttgcctctcataggcatcccgatggggttcacggtccagctgaaatgctaacggcaacaccaatcattggcacttctagatttactgccaggagtctttgcctttatcacccaaccccagatgtctaggcatgtccccatggcctgtccctcaytgaagagagagctaacaggcagctgcaccactaccctgacctgcaacttaggattatgaagggaagagttctgaagttaagtccttgcccaacccatacctggtatgtgaccttggggaagttattaacaattccctgcttcagttatcttgtccataaaagtaac

SEQ ID NO: 365848 - DNA, 483 bp, Homo sapiens
atatctaaacatccaaatgacctgggcctagcattgagctaggtgtggttatctcatttaatgtagactatataacaactataaggtaagtatttttatgctcatttcatgtaatgtggaaacagaagcctgtagatggtaagttgcccaaagtcatagagctggcaaagggtgaagctcagattccagcaggcttgtctgatttcagaggccttccaatttcatgatcataatctcattattaagatcatctttccctcttaggtcagtagcagttaattctttctacttattccaggtgtcaactacttacttaargtcatctaatttacctgtcccaaacaatttttcaaaaaaaaagtcaaatgcatttcttccatttggtttcttaaccatggaaacagcagacattttcccaacttggggcataatttccaggatccaaacataccacaagttggttatttcgtcatggtcccattg

SEQ ID NO: 365849 - DNA, 595 bp, Homo sapiens
tattggctttggctaaggtaccttccttggcggctatttccactcaacatctgaaaaaaacaggggttctcttgaggaagaggacgtggctgttggatakccatctatagtgtctatcatggtgctcaataaattcttattgaacaagcatagaaatcttcaccactgagctacactgcattctggaataacagaaaggatatctggcctaatctccctgacacaccagagcttatacagcaataggcaagctcaggccagaaagaattccaatagaaagttcagctcatcagaactgcagctggcagatgtcttaattcagtggtcaaatccagacaagggtaagagggtgcatgctgtgctccattctcagaaaactgcttgtcatctgtagactgcctcattctctttcacggctttgcccagaatgtctctatcccttcccctcatattgtccatttgacaaattcttgttttttttttttttaaagatacagttcaaaagtcacctcccctgagaagcttttcttgatagtggaaatcttctctgttctctatggcactctgtagttcagcacttaccacattatagtgt

SEQ ID NO: 365850 - DNA, 619 bp, Homo sapiens
gactcacctcattcatctcctgtctttcaggaatcactgtttttgtctgatatccagtgtcytgaaaaccattgtttcatatacttctaaaatttattggttaaggtgagagggtaaatctggtctttttctctatcttggctggaagtgtaatttgatcatagaatatttatttggagaatgagaacaggtactgctcattagaaagaaaaagaaagggaaaaaagagaaaagaaaaaaggaagaaagaaagaaacaaagaaacaaagaaagaaacaaagaaagcaagctttaaacaagaaaggaaaaaggaagtaaggaaggtttcaaacaactgcttgttaggaagcagcaaaaggagaaaaaaattgtatagtttttcatgaagctaaatttatttaatttaaattgcaattccttatactgagatgatctatttgctactttttgtgtgtcaaaaaatctttcattttgttttttaccttgcacaattaaaactggtaactcttctaactaaaaagattactgacctctcaaattccaaagtctagaaaagagtcgttgaaattcaggggcttttaaagtcttaaaagcagtctgagagaaaacacatgctata

SEQ ID NO: 365851 - DNA, 619 bp, Homo sapiens
gactcacctcattcatctcctgtctttcaggaatcactgtttttgtctgatatccagtgtcctgaaaaccattgtttcatatacttctaaaatttattggttaaggtgagagggtaaatctggtctttttctctatcttggctggaagtgtaatttgatcatagaatatttatttggagaatgagaacaggtactgctcattagaaagaaaaagaaagggaaaaaagagaaaagaaaaaaggaagaaagaaagaaacaaagaaacaaagaaagaaacaaagaaagcaagctttaaacaagaaaggaaaaaggaagtaaggaaggtttyaaacaactgcttgttaggaagcagcaaaaggagaaaaaaattgtatagtttttcatgaagctaaatttatttaatttaaattgcaattccttatactgagatgatctatttgctactttttgtgtgtcaaaaaatctttcattttgttttttaccttgcacaattaaaactggtaactcttctaactaaaaagattactgacctctcaaattccaaagtctagaaaagagtcgttgaaattcaggggcttttaaagtcttaaaagcagtctgagagaaaacacatgctata

SEQ ID NO: 365852 - DNA, 576 bp, Homo sapiens
tgagactcactcactaatgaagggcaatctgcttgagtcaaagtctactagtttaagtgtaaacctcattcaaaaacatcctcaccgaaacattcagaatgttgacaaaatatctgggtatcatggaacagccaagctgacacataaaactaataatcacgagcaggtattgttatccttatttataaagatgtggaaaccgtgaatcttcaaggtcaagatgactcttccaaggttacacagttattaagagctgctttcaatgtactttctgccacatacagctgtctcgtaaaatctatgatttctagtattrcaatgtttaatttttttaaattgatctatactagagaaacttctccatggataaccaagacatgttggaattcctcatgattttctttttgtcttctgacacttattctctgagtgtcgtacaattcaattcaattctgacactacccagaattagtgaagacccacaaatgaaggacttagtcccataagactgccccgtttcagattccaacaacaaatttcaggtgtccccaagcaatctgcacttctgccaggaca

SEQ ID NO: 365853 - DNA, 619 bp, Homo sapiens
gactcacctcattcatctcctgtctttcaggaatcactgtttttgtctgatatccagtgtcctgaaaaccattgtttcatatacttctaaaatttattggttaaggtgagagggtaaatctggtctttttctctatcttggctggaagtgtaatttgatcatagaatatttatttggagaatgagaacaggtactgctcattagaaagaaaaagaaagggaaaaaagagaaaagaaaaaaggaagaaagaaagaaacaaagaaacaaagaaagaaacaaagaaagcaagctttaaacaagaaaggaaaaaggaagtaaggaaggtttcaaacaactgcttgttaggaagcagcaaaaggagaaaaaaattgtatagtttttcatgaagctaaatttatttaatttaaatygcaattccttatactgagatgatctatttgctactttttgtgtgtcaaaaaatctttcattttgttttttaccttgcacaattaaaactggtaactcttctaactaaaaagattactgacctctcaaattccaaagtctagaaaagagtcgttgaaattcaggggcttttaaagtcttaaaagcagtctgagagaaaacacatgctata

SEQ ID NO: 365854 - DNA, 487 bp, Homo sapiens
gtaatttaggcctcattttctaaaatgtgagactgcctaggaggcctcagactccaaattttcctctaggcctctactagtaattccacagaatagtgaagagactgaaatatctcaatgaattagaataacttgcccaagaacataacgtatcctactggcagagtacccacarctcaggaaatatcacaccttcaagagaaaatgttagtataactttagtcagctttaataatagtggtattttattgttgcttttattcctaaagcttagaacttctctattaataacatagtcaccaaaaattagctaatcaatgagattagcacaggataaattgaggtataataaaaagaactatctaacacctagggcgagacactaactctttttgtcaagcatctgtcttttcattattgaacatcctttagaatcaacgatttatcttaattttctttagaattcagtgttgtattgttttaaagc

SEQ ID NO: 365855 - DNA, 527 bp, Homo sapiens
ggtacaaattccccactaggtcaatagatacaactttagatggtataatttaatctaacattcacatactaattatgctgtctttgctggtgtcttctaaagtcaattacaactgtgataaccaaaagcagcacttctctacattttttaacaataaggcatatgttagaaatgatacagcactttgaggtaaattcaggaggctgatcctgtgggatgaagggccaagatcctggcacacatgtagcctgtacactagtgtgctccacacatgaagtaagatctggcaagagcaaacatttgaacccttattgatattctttgttatggaaggccatctactgaggatgctcttgacaccttagatgataagttccactaggagacctataaaatcactttcaaaactgagattctgagatttgccaagaattattctttcgtggtaatgctgcctcagttgtgttgtacaagttatttgagacagaaaaatgkattcataccctagaccataccacagtgctaac

SEQ ID NO: 365856 - DNA, 392 bp, Homo sapiens
ttgtgaagtgaaaagatcttctaaaagaaaatacttgtcccataatttatccttggcatcccaracatgggatgggggtcgggatgaaggattagtctctaaggaaagagattagttctaaggtgtgtagttattgaatcctgcaggcacagtgatgttcagaagctggagccagtcaaacctaaaaatacaagagagctagcattcaaaataatgcaatgggcattgttcagaggtccaaactgaaagagagcacagggagagatctgggcaggatgaatggatttattggtcaattttgagaggtcaggactttggaggagaccacaggtagacactggatccaagaataaggttatttgttgagttttggatatcaaactcaagaaatg

SEQ ID NO: 365857 - DNA, 392 bp, Homo sapiens
ttgtgaagtgaaaagatcttctaaaagaaaatacttgtcccataatttatccttggcatcccagacatgggatgggggtcgggatgaaggattagtctctaaggaaagagattagttctaaggtgtgyagttattgaatcctgcaggcacagtgatgttcagaagctggagccagtcaaacctaaaaatacaagagagctagcattcaaaataatgcaatgggcattgttcagaggtccaaactgaaagagagcacagggagagatctgggcaggatgaatggatttattggtcaattttgagaggtcaggactttggaggagaccacaggtagacactggatccaagaataaggttatttgttgagttttggatatcaaactcaagaaatg

SEQ ID NO: 365858 - DNA, 392 bp, Homo sapiens
ttgtgaagtgaaaagatcttctaaaagaaaatacttgtcccataatttatccttggcatcccagacatgggatgggggtcgggatgaaggattagtctctaaggaaagagattagttctaaggtgtgtagttattgaatcctgcaggcacagtgatgttcagaagctggagccagtcaaacctaaaaatacaagagagctagcattcaaaataaygcaatgggcattgttcagaggtccaaactgaaagagagcacagggagagatctgggcaggatgaatggatttattggtcaattttgagaggtcaggactttggaggagaccacaggtagacactggatccaagaataaggttatttgttgagttttggatatcaaactcaagaaatg

SEQ ID NO: 365859 - DNA, 639 bp, Homo sapiens
ctaaatataatattgtataataaaacattttaaatttatatcacagatccttctagttggactcacagacagtcggttgcctgttcatgaatactacctactataaacatgacatctacaaaaagaggggtcaccctactgaaaatactaaaccaccctaactaatgagaagattctattcattccttgaagagtttttatagaaaagtttaagaaatgtaatttgttgcaattaacatttttatgttttacattttacattttgattattgtgcagaaactgacagaatttaaaaaaatggacttcagaagttcaaaatttatcatttttgaagaagtttatttagaataggattttataactaatttggactcttcatcacattgatggatataatacttagaattataaattgctagatttgataaatacctaacaaaatgtttatttttttcagtcatacttgaccacaaaacaaatattttactaaatttccagagtcatttctctgaaaaatagtataatggcatgataacatttcackaaatcctatttatcttctgggaaatattttaatttagcttttggatttcctaatatgataagcttatatattcatggtatgaattcctttaaaa

SEQ ID NO: 365860 - DNA, 604 bp, Homo sapiens
tttcttcctttttaaggctgaataatattccattgtatttatacaccacattttgatactcattcatccagtaagggactgttgtgatgcttcctagttttagccattgtgaataatgctgctatgaacatgaatgtacacatatgtctttgagamactgccttcaatattttgggtacattctcagaagtggaattaacagatcacatgataaatctactttaaattttttgaggagccacaatacgattttccacagtggcaatactatgttatattcccaccaacagtacacaagggttgcagttactccacatcctcaccaacatgtattttattttctgttttttttattataatcatcctaatggttgtgaggtgatatctcattgaagtttttcttcacattttcccatggagtagcattgttgagcattgtttcatgtgtttgttggccatttgtatatcttctttgaagaaatgtctacccagatcatttgctcattttaaaaatcagattattagatttttgctgctgttgttattgagatttaagaattcactatacattctggatgttaattccttttagatatatgattta

SEQ ID NO: 365861 - DNA, 544 bp, Homo sapiens
tgcagaaaatcatctaatagcattaagtaattatttataaacaaaattctcagcacaaagtaaaatcaaagggaattctttcttaaattgataaagattctctaccaaaatcttcagcaaaccttacactcacaagaaatgttgcaattgcatatataaactgccttaacttttcttccttttagcatccctgggtggaagaaagctaggccctttgtttgtttgttttagtcctatatttagtataagatggcttggaaccagaacagttgcagcagtctgaagtgtagattgctttcccttcttatactatctgtatggaggaacggatttgctctggggcagtaagtatcacacaatgctctaacatggtatagtatagagttggaatgcctaaattctaacttagcctcagatyagctatgagatcttcattaagtgtgcaggtctctaactgacatgtttgatcaatgaggcctgctgaccagattgtatttaatgtccctttccttggatgggctggagctggctgccatacttctca

SEQ ID NO: 365862 - DNA, 579 bp, Homo sapiens
cgttgctatgtcaaaattaataagttactattggtattttgcttcttcgttctactatataaattatttagcaatttctttaagtaaatgccacttaccacttttattacaataatgataaagataattcttaaaataataatgaacaagatgataaacataataattaacattttccaaagcaytttcacatattgtattcacaacaatactgtcaaataagaagaaaggtctattatcttccttgcacagaagaaaaaatagattaagaattatcaggcaacctgtccaatattatataatttgtaatttttatacaggatactcagatttgcaggagaaattccacttcagaaagcaccaaattaccatcacattgatttccaaatgcctaatttaaatatctagatatctaaatatctgaagtcatttttcagaaaatgtgcatagtaattttccagagacatatatatagatagttattaagttcgaatataaccctcaaataaccaattcatctcaaataaatgtgaaaaataagtaagacagagactaacattgttttttagaaaaactacc

SEQ ID NO: 365863 - DNA, 607 bp, Homo sapiens
tagcctacatatttattcaacaggcttgccaaaaactcaagagaattccaaggatgtgcttccctaaaataccgccacatacgttagtctgtattttttaatttttgaagctacattctgaatttttaatctttaaattaacattaaatctcaaactaagatagtctctaaagttcttttcccatctctggcactaataaaatgagtactatcaaaaagtgatgggatccatagatcgtggtgggactgaaagkttgaattggggttctaaagggaatgaataagaagataggaagtgatggtttattgtttaatttattgttttgctagttaattttttctgtcaggccacacattttcaaatgatatgtaggtagaatatatattatttttcataattttatgctgcatttgccttcactggaattttacttatttttttcattctttatttagtataattcttacttctattatatgagatatgctttcccctcaatatggagtaacctaacttcatttcttacacataatattattatgctatttattgttattttttatcatgtacatatgtactaaataataatgcaacacacaaatttct

SEQ ID NO: 365864 - DNA, 603 bp, Homo sapiens
atgtacttcatagtaaaatcataatccccttttttcycctcattttaagaaagatttcactttggattgacttgaaacaaagttgggacacattttcagtaaagtgcttcaggatggcaattaggttctttttctcctgcttcccatggtagaatgaacacatttcttgaatgaggtaaatcttggtagacaactttacatatattttttaacctgaaacattataatgaatgctccttgggtacaggattgctccatctgaaagaaagcctatagaagtatacactgtttttcaaacaaaaatgaaaatagaattttctttgtaccagtatgtgtcactcttaaatacatcaaggatgctgacatgaccacaaaatgcatttatcaattaaaggttgaagcccatagggcctaagtatatacaattatatttaaattctctcatataacccaaaaccaaactccaaacacaaccaagttataactatgccattaggtaaaagaaagacttgaataaaagaatggagcatatccaactcgtttatatacacaaacctattaaataactccatttgtatgtctaatatccatttcaaacttaat

SEQ ID NO: 365865 - DNA, 608 bp, Homo sapiens
ccggttatttcagcccagctgggcaatgttaactccagagctccctgctgtttgggccaatgttttgtctgcctgcatctcagttcaacttcttcctctgcccaattgaacttctttccccttattttcccatggattaattcctattaaatattttgtatcacaaactctgtctcaacatctgctttcagagagctcaacctcaaagagttaatactggcagtgttctgaaaaatcaggtgataagatgaagttttggagatgaatcattcattgcttagatgacaacgagaatcctaagctggttwtggtggaagacagacagccccaggcacgtggaagtgggtcaaatgtcaagccttcaccagtaataaattagaatggtctgctgttggaagggaatggatagagggtgcaatggatcaggattttcagactcatggataaacagtagatataaacataacaagaaaggagggctattgctaagtggcactgatgctctactggaatacaactaacaactgacttatcataatgggccatgaaaacctattatgacagaagctttcatctcctgcagcagcagggcagaagattattaagcc

SEQ ID NO: 365866 - DNA, 608 bp, Homo sapiens
ccggttatttcagcccagctgggcaatgttaactccagagctccctgctgtttgggccaatgttttgtctgcctgcatctcagttcaacttcttcctctgcccaattgaacttctttccccttattttcccatggattaattcctattaaatattttgtatcacaaactctgtctcaacatctgctttcagagagctcaacctcaaagagttaatactggcagtgttctgaaaaatcaggtgataagatgaagttttggagatgaatcattcattgcttagatgacaacgagaatcctaagctggttttggtggaagacagacagccccaggcaygtggaagtgggtcaaatgtcaagccttcaccagtaataaattagaatggtctgctgttggaagggaatggatagagggtgcaatggatcaggattttcagactcatggataaacagtagatataaacataacaagaaaggagggctattgctaagtggcactgatgctctactggaatacaactaacaactgacttatcataatgggccatgaaaacctattatgacagaagctttcatctcctgcagcagcagggcagaagattattaagcc

SEQ ID NO: 365867 - DNA, 608 bp, Homo sapiens
ccggttatttcagcccagctgggcaatgttaactccagagctccctgctgtttgggccaatgttttgtctgcctgcatctcagttcaacttcttcctctgcccaattgaacttctttccccttattttcccatggattaattcctattaaatattttgtatcacaaactctgtctcaacatctgctttcagagagctcaacctcaaagagttaatactggcagtgttctgaaaaatcaggtgataagatgaagttttggagatgaatcattcattgcttagatgacaacgagaatcctaagctggttttggtggaagacagacagccccaggcacgtggaagtgggtcaaatgtcaagccttcaccagtaataaattagaatggtctgctgttggaagggaatggatagagggtgcaatgkatcaggattttcagactcatggataaacagtagatataaacataacaagaaaggagggctattgctaagtggcactgatgctctactggaatacaactaacaactgacttatcataatgggccatgaaaacctattatgacagaagctttcatctcctgcagcagcagggcagaagattattaagcc

SEQ ID NO: 365868 - DNA, 260 bp, Homo sapiens
aggtgatgaaaagttagactctcagtttattttgaaaaaagattcagcagtgttctttaaaataatcaatgataactcaagactttttggyctgaacaaatggaaatttttgtcatttttctgaggtagtagagagtagggtacatgcagatgtaggggaaatattagaagcttggttttaacaggtaaagactgagatgcctatggctatgcaattagagttgaagtaagcaggtagatttatgaatctgagtttcaaa

SEQ ID NO: 365869 - DNA, 602 bp, Homo sapiens
ctattggtcacaaggccactctggaattgtagggtgaagaaatagacctctgatatggtttggctgtgtccccacccaaatctcatcttgaattgtagctcccacaattcccataagttgtgggaggcagccagtgggagayaattgaatcacgggggcagtttcacccatactcttctcatggtagtgaataagtctcaccaaatctgatgattttataaggggtttccctttaacttggctctcattctctctttgcctgcctccatgtaagacataaccttcctcctccttcaccttctgccgtgattgtgaggcctccacagccatgtggaactgtgagtcaattaaacctctttcctttataaattacccagtcttgggtatgtctttattagcagagtgagaatggactaatacaacctctccttttatggggaatgttgtaacaagttgtgaccaattttgcaatctaccacacacaccaatcttgaactgactaaaatctgtgcttctcactacttagaaaataaaccccttgtctggtttatgattttctttgtactttaccagcagagttagcataattcctacctgacaca

SEQ ID NO: 365870 - DNA, 592 bp, Homo sapiens
agctccttcacgatgtctctattcaaaaagtgaatggcatgcacatttgtgcttttccagctttggctcaagactgctaactaataatcctaaattaaccagaagaataggctggtataaattttgccaaacacactcacgtatattaacttatttacaatttaaagcaatcacgtgaaggaagctggccagatattattatccccattttacaaatcagaacactgactttctcaaacactaagttattcctgataaatattaaggtcacataacagtagttgccaggtaagaacttggcagcagactttccagtcccaaggccattgctgattccacatggcccactccctccctcacstcatcagctggacagacatatccatcggttcctacattcaaacggtgtcatttgaatgtaggaaccaatggaaccagtgtccccaagagtgtctatttatcctgcaggaaaattatccatatatttgaatacctctgtgactcaaattacatttttctatcactcaacagaaatgtaacatagcttggttctatgtggggctgacgtggattgatatggaggcacgagaca

SEQ ID NO: 365871 - DNA, 582 bp, Homo sapiens
ggataaacaagctatagatacattttaaaggcctttatgtttttctcttcttggaacttgtttttctggaaaaatgttttttcttctcagtcagctgaattatttttctccatctttttttgtcttgccactcttaatgcacaaatgagaggccctaaggtaacttctggtagcctgggagtccttgggaaaaacagargaggtgccacagaccccgttttgggaaaaaaaaaaaaaaacacttctgttttctttgtgaaactccaggaattaaaagcagatagatccctctccagattaaaggctctgttttgttttgcattgtgttatctgatggttttgagtttgggtgggggtatcagaaattacttcacattatgagagagctttggtgtgtaatgactgggtaggaaatatactttaaggcatggctaatagtagttatgaagggatacttgactctttgcacacttagatcagagaagcatgctcttggccacctggaagataaggaaacattcccaccccccgctgggagacgagactctcatgagggatgggctgatacaaaataggctgatt

SEQ ID NO: 365872 - DNA, 524 bp, Homo sapiens
taaacaagttgtggaaggttcataaaaattaattgtaagagattctgtgtgtgaacatattggctaaagttaaagggggtattattcagtttttccataaattaaacattggaatcaaagcacaacaggtttttctgatctgctctttccaaaaaaaaaaaaaaaatgtaaagggctataaaggtttgtaagactcttaccttatggttacacattaaaattgggtaaatatgtctataaggttttattaaacattgactttaacattaataggacattaatgtaaaagttaaatttggcttatttggtataaaaatcacacaggaagcattaacaaatgtgaaatggtattttgytttcttggaactatatttgcataaatgtgttattggtatatgttccaaagttatgggaaactcctataattctaatatgaattagtgtatgttattaataattataattatataaaattttctgtgccacagaagttacatttccttatcaattgtggctttaatagt

SEQ ID NO: 365873 - DNA, 636 bp, Homo sapiens
tgtttcttctctttcgctgcttttaggatcctttctttatccttgacctttgggagtttgattattaaatgccttggaggttgtcttctttgtgttaaatctgcttsgtgttctataccttctcatacttggaaattaataccttttctaagtttgggaagttgtctattactatccctttgaataaactttctatccctatttctttctctgccttctctttaaggccaatgcctcttagatttgccctttagacgctatttgctaaatcctgtaggcatgcttcattgattttttttcctttgtctcctctgactgtgtatgtttgagtagcttatcttcaagttcactacttcttctgcttgatcagttctgcaagtaggagattctgatgcattcttcagtatttcagttgcatttttcaactccagaatttctggttgattctttttaattatttcaatctgttaaatttatcaggtagaattctgaattccttccctgtgttatcttgaatttctttgtgtttccttaacacagttattttgaattctctgtctgaaagttcacatatctctgtttctccaggattggttcctggtgccttatttagtttgttttgtgagatcatgtttt

SEQ ID NO: 365874 - DNA, 636 bp, Homo sapiens
tgtttcttctctttcgctgcttttaggatcctttctttatccttgacctttgggagtttgattattaaatgccttggaggttgtcttctttgtgttaaatctgcttcgtgttctataccttctcatacttggaaattaataccttttctaagtttgggaagttgtctattaytatccctttgaataaactttctatccctatttctttctctgccttctctttaaggccaatgcctcttagatttgccctttagacgctatttgctaaatcctgtaggcatgcttcattgattttttttcctttgtctcctctgactgtgtatgtttgagtagcttatcttcaagttcactacttcttctgcttgatcagttctgcaagtaggagattctgatgcattcttcagtatttcagttgcatttttcaactccagaatttctggttgattctttttaattatttcaatctgttaaatttatcaggtagaattctgaattccttccctgtgttatcttgaatttctttgtgtttccttaacacagttattttgaattctctgtctgaaagttcacatatctctgtttctccaggattggttcctggtgccttatttagtttgttttgtgagatcatgtttt

SEQ ID NO: 365875 - DNA, 636 bp, Homo sapiens
tgtttcttctctttcgctgcttttaggatcctttctttatccttgacctttgggagtttgattattaaatgccttggaggttgtcttctttgtgttaaatctgcttcgtgttctataccttctcatacttggaaattaataccttttctaagtttgggaagttgtctattactatccctttgaataaactttctatccctatttctttctctgccttctctttaaggccaatgcctcttagatttgccctttagacgctatttgctaaatcctgtaggcatgcttcattgattttttttcctttgtctcctctgactgtgtatgtttgagtagcttatcttcaagttcactacttcttctgcttgatcagttctgcaagtaggagattctgatgcattcttcagtatttcagttgcatttttcaactccagaatttctggttgattctttttaattatttcaatctgttaaatttatcaggtagaattctgaattccttccctgtgttatcttgaatttctttgtgtttccttaacacagttattttgaattctctgtctgaaagttcacatatctctgtttctccaggattggttcctrgtgccttatttagtttgttttgtgagatcatgtttt

SEQ ID NO: 365876 - DNA, 500 bp, Homo sapiens
caacattattaacaataaccaatgtttcagagtaaaaattagaagccaggcttgcaaatatctacaaagtaaaagaaactaatgatcttgtattcttatgcagaaagcaaataaacttttaaaaatgaaaaatataattgcaaatggaaacttggtagataggtttaatagtatattagacacagaagagggcacatggagattagagtgagtatatctggaaattttcagccattatcacttcaaatattgcctgctccattctctctcctttcctggcactctaaatatttcattattaaaactaacaaatattcactaacatccaaagattttgagttccagatggagaggagaaaggatggaacacrggcaacatttcaagtttttccagatatggtgaaagatcaaagcatagtttcaagaagtcaaatgaatccaagcaagataaattaaaataaattgacacctatatacaacagaaagaaactgaaaaacaa

SEQ ID NO: 365877 - DNA, 573 bp, Homo sapiens
acatatacccagaaatgggattactgggtctaatggtagttctgcttttagctctttgaggaatcgccatactgctttccacatggttgaactgatctacagtcccaccaacagtgtataaatgttcccttttctctgmaactttgccagcatctgttattttttgacttttaataatagccattcatttttaaattttatttttgctttttttagtaatagccatatcattgatgtgttatgatctcacaacaaattaaaccagattaaaaccaaattaaaaccagattgttttgatttgcatttctctcacaatcagtgatattgagctttttttcatatatttgttgtctgcatgtatatctttttttgaaaatgtctgttcatgtctttgctcactttttaatgggcttgttgttctcttgtaaatttgcttaagtaccttataggtgctagatattggacctttgtcagatgcatagtttgcaaaaactttctcccattctgtaggtggtctgtttactctgttgataagtttctttgctgtgcagaagctcttaagtttgattagat

SEQ ID NO: 365878 - DNA, 573 bp, Homo sapiens
acatatacccagaaatgggattactgggtctaatggtagttctgcttttagctctttgaggaatcgccatactgctttccacatggttgaactgatctacagtcccaccaacagtgtataaatgttcccttttctctgcaactttgccagcatctgttattttttgacttttaataatagccrttcatttttaaattttatttttgctttttttagtaatagccatatcattgatgtgttatgatctcacaacaaattaaaccagattaaaaccaaattaaaaccagattgttttgatttgcatttctctcacaatcagtgatattgagctttttttcatatatttgttgtctgcatgtatatctttttttgaaaatgtctgttcatgtctttgctcactttttaatgggcttgttgttctcttgtaaatttgcttaagtaccttataggtgctagatattggacctttgtcagatgcatagtttgcaaaaactttctcccattctgtaggtggtctgtttactctgttgataagtttctttgctgtgcagaagctcttaagtttgattagat

SEQ ID NO: 365879 - DNA, 573 bp, Homo sapiens
acatatacccagaaatgggattactgggtctaatggtagttctgcttttagctctttgaggaatcgccatactgctttccacatggttgaactgatctacagtcccaccaacagtgtataaatgttcccttttctctgcaactttgccagcatctgttattttttgacttttaataatagccattcatttttaaattttatttttgctttttttagtaatagccatatcattgatgtgttatgatctcacaacaaattaaaccagattaaaaccaaattaaaaccmgattgttttgatttgcatttctctcacaatcagtgatattgagctttttttcatatatttgttgtctgcatgtatatctttttttgaaaatgtctgttcatgtctttgctcactttttaatgggcttgttgttctcttgtaaatttgcttaagtaccttataggtgctagatattggacctttgtcagatgcatagtttgcaaaaactttctcccattctgtaggtggtctgtttactctgttgataagtttctttgctgtgcagaagctcttaagtttgattagat

SEQ ID NO: 365880 - DNA, 576 bp, Homo sapiens
tcagcaaactattttgtaaaggccctatagttaatgttttaatctttctaggccaacagacaaaaatgaggatattatgtaggtacttttataactatttacaagtaaccatttaaatatgtaaaaaaattcttagtaggctatacaaaaataggcagtagacctggtttggcctgcaggccacggtttcctcaatctctacagcattcaaaaactgtattctgtgtctatattttgttttaataattcaggttaagatccagatgtttgtttgstcagaaatacaggaacactagtattcttagagcttgaatgtttgtttgaattatgtaaagaactgtagctgattagacagattaaaattttggtttggttgatttgcttgcactaataaagacacattcacatctggcaaacataaaggcaggtcctcaacaatcaagtggcatttatttaaactattatggaaatgtcaaaagtcctgctggagacaaggaatcattacagcaggtagttcctgatgttttataattctgtgcctaggaaagacctgatctagtttaataagttaaataa

SEQ ID NO: 365881 - DNA, 603 bp, Homo sapiens
atctgtaacacttttatgcacacatacccacacagaccatccctctccttgtactggattctaagacctgtaagggcagaaactatgtcttatgaatttttatatttccagaatccagtgcataaatatatttcaggtttattcaataaattgccatctgaatacataaaagaataaatattcaacaaagaaaaaattcacaaatctgtagtgaaaattcttctagaaattaatcttgaagtgaacctaaaatgtaaatacacttataaataaaaataaggtggaactgggaayctggatctacaacccaagacaagttatataaccttcgtgaagcctagtttacttatgtagaagttaaaaatagtagtgattactttgcaggattgttgtaaggtaaagttagcctttaaataatgcatgcaaatgagtagtacaatatagacactcagaaagtaatatcttttggattgtcttttgggagggaaggcataacttaagaaacgtcagcttccttggaaaccaaccagtcttaaagagatcaatggcactcaatactgctttcactgtgataaacacaattgcgctagaatgtcatgccct

SEQ ID NO: 365882 - DNA, 547 bp, Homo sapiens
aaaataagtatgagatatataatacttggaaaatctgcattttgccttctctttaaagatcagaatatcttaccatattcagcatgaattccttcagagtacagttgacttgaagtgagcatgagatgtcccttgaatatggtatctgtgctctacattttgctacaagtccttctagtcatctccctcatcctgaattggaacaaaaataatatattatatatatttaattatattaattatcttatgatttagtcagattaatctaaaattgccactttgatctygttactctcttgcattgtctttgaagcccttcacactatggctgtaatctgccttcccagcctcatcacaactactttccttagctgtagaatctgttcctttggcttttccatctcagtactctgcatcagggccttattgaaggcttcttcctctctagtcctacttaagtgtgatctattttttagaccttaataaaatcttgcttctgcaaagccctcctgaagtagtccagttattagtgatcttttcacgtttt

SEQ ID NO: 365883 - DNA, 606 bp, Homo sapiens
tggctttttgaaaattcctattctgctggaactgatctctcaagtccagttgtgtcttctcaggcttcatcttgctctaggaagtgattggtaccatcaattasttctgcctcatcgattggtctcttcatggaccctgtggccatgctgtctctcagttcatgttctatctttacgtttattcttttaaaatctcttgctttactatttcttctcattcctttaatgcaggtttttctgaggtgaattttaaaatcttcttccctttgatctcaccttcacacaataattttgacttaattcacaagggtccccaatttacctctagacctgactttttatccaagtattagtcttgtattgatacatgccttcacggacattaatttgtatagttcttaagatcaacatgtgcaaaaccaaactgtttaatttctttaaatatttgacaactgacacccaaaccagtttcttctgatctcatatttctgcttttagcactagccctgtgtcaatcatgcaggttaaatatcttctaccaattaaacattattttaaactgcacagttaaataacattttcataaaagttcaaatgttacaggta

SEQ ID NO: 365884 - DNA, 606 bp, Homo sapiens
tggctttttgaaaattcctattctgctggaactgatctctcaagtccagttgtgtcttctcaggcttcatcttgctctaggaagtgattggtaccatcaattagttctgcctcatcgattggtctcttcatggaccctgtggccatgctgyctctcagttcatgttctatctttacgtttattcttttaaaatctcttgctttactatttcttctcattcctttaatgcaggtttttctgaggtgaattttaaaatcttcttccctttgatctcaccttcacacaataattttgacttaattcacaagggtccccaatttacctctagacctgactttttatccaagtattagtcttgtattgatacatgccttcacggacattaatttgtatagttcttaagatcaacatgtgcaaaaccaaactgtttaatttctttaaatatttgacaactgacacccaaaccagtttcttctgatctcatatttctgcttttagcactagccctgtgtcaatcatgcaggttaaatatcttctaccaattaaacattattttaaactgcacagttaaataacattttcataaaagttcaaatgttacaggta

SEQ ID NO: 365885 - DNA, 425 bp, Homo sapiens
ttccaactcacatgtaatcctttttacctcagcagtgttattttacatatagtttaaaactcccattttaaagatacatgtgtaaacactattgtgggctagattagttgaactgtttggaatcatcactgaggcccataaagtttatttgacctgtgtagggctattcagctctttgtcttaaaaccagacctgctgactctcttctgggtttttttttttttaccagcaccagggctcctttatttacattcacatttctacttccctaggactgttaagatctcactgaaayacaggcaccttaaaagagacctaactagagcagctcttcagccagtctgaccctatttttataacttaacatcaaaatccaaataaaagagttggattataatattcttattaactttactaaagcccga

SEQ ID NO: 365886 - DNA, 630 bp, Homo sapiens
aatatcatgttgtatacaacaaatatatatacttttatctgtcaattagaaaatctttaaaaatgctaacataccaaaaaaaatcccagaaaaaaaatgggatagaggtataagaaagaggtcaagattggagatgcatttgggagttgtgtatgtggagaattgtgagaataaataggctgccatttgaatgataaaatgaacagagggaagatatcttagactttgggtctacacatggaagacaggatgctttaaacataggaactaaggaaataaaaaaatrtttagcagcttttatgttctatgtactgtttttatatgccatgtactgttctcagtgtttcaagtgtattcattggttcaaactgctttacagaaaagaaaactgaagcacaaaaaataaccatagtgcagagtttgggaaatcaagaaatttcaggtttgacatttcagctaaatgttacagaaacattaaatatacttagaaagatcatcattgagatttgaggtaacagtttcatttatatcagcatagaaaataaatgttaaagaaagaagtggaaaacatttaggaccagtaggaggaggacctatgtgctatgagtttgacattgaatggaagaataa

SEQ ID NO: 365887 - DNA, 496 bp, Homo sapiens
tacaaaacagctggggaaaagtagagaattttataaatagtatgaagcttcagcttagcgttaggattataatacaatttatcagatcttctattacaggctatttataaattagggaaatgtaagagacaatgttaacaaatattttttctcccggctcatggaaaaaataacaatgctgaaaagtaattagttttacattccttccctgtacacctagtgagaactcctcagtgcataacattcatattctcatttttcccctaccctctgccagtgtgctggactctgctttcattgtgcttccaatccattcagattctktttattattattattcttattattattatactttaagttttagggtacatgtgcacaatgtgcaggttagttacatatgtatacatgtgccatgttggtgtgctgcactcattaactcgtcatttaacattaggtatatctcctaatgctatccctcccccctccccccacc

SEQ ID NO: 365888 - DNA, 496 bp, Homo sapiens
tacaaaacagctggggaaaagtagagaattttataaatagtatgaagcttcagcttagcgttaggattataatacaatttatcagatcttctattacaggctatttataaattagggaaatgtaagagacaatgttaacaaatattttttctcccggctcatggaaaaaataacaatgctgaaaagtaattagttttacattccttccctgtacacctagtgagaactcctcagtgcataacattcatattctcatttttcccctaccctctgccagtgtgctggactctgctttcattgtgcttccaatccattcagattctgtttattattattattcttattattattatactttaagttttagggtacatgtgcacaatgtgcaggttagttacatatgtatacatgtgccatgtwggtgtgctgcactcattaactcgtcatttaacattaggtatatctcctaatgctatccctcccccctccccccacc

SEQ ID NO: 365889 - DNA, 407 bp, Homo sapiens
tctcacttataagtgggagctaagctatgggtatgcaaaggcatacagagtgttataatggacattggagactcagaaatgggaaggtgggaggcggttgaaggacagaaaactacatattgagtataatgtacaccactcaggtgatggttacagtaaaatctcagacttcaccactatacaattcatccacatatccaaaactcacttgtacctcaaaagctattgaaaaataaaaccaattcttatttgtgatactgacttcagaagcctattttgtggatgctgctgatgggtactaaaaacagaaggaaagagaacactactacaartaattacttatttttgtcttatgaaagtaacttctgtagataatttttaaaatcaaatagttctacaaattttag

SEQ ID NO: 365890 - DNA, 636 bp, Homo sapiens
cccactgtgatattaagattaatatctccctgggatattactaataatatcacaagttatacagccactgtaatattaggagtaatatgttctttggatattatgaataatatcaatggttgtacacccactgtgatattaggaataatgtctccctaaaatatcaagaataatatcacaaagtatacacacagggtttacatacaccgtgatattaggagtaatgtctctttaggatattatgaataatatcaagggtgtactgctactgtgatactaggagtaatatctccctagaatattactaataatataacagtgtatacacacatggacatagtgtactcctactgtgatactaggagtaatatctccctaggatattataaataatattacagggtgtacacacatggtgtacccccactgtgatattaggagtaayatctctttagcatattacgaagaatatcacagaatgtaccccccactctgatactaggtataatatcatagggtttacacacatggtatactacccactatgatattaggagtaatatcttcctaggatattatgtataatatcacagggtgtatactcatggtgtaccttcactgtgatattaaaagtaa

SEQ ID NO: 365891 - DNA, 636 bp, Homo sapiens
cccactgtgatattaagattaatatctccctgggatattactaataatatcacaagttatacagccactgtaatattaggagtaatatgttctttggatattatgaataatatcaatggttgtacacccactgtgatattaggaataatgtctccctaaaatatcaagaataatatcacaaagtatacacacagggtttacatacaccgtgatattaggagtaatgtctctttaggatattatgaataatatcaagggtgtactgctactgtgatactaggagtaatatctccctagaatattactaataatataacagtgtatacacacatggacatagtgtactcctactgtgatactaggagtaatatctccctaggatattataaataatattacagggtgtacacacatggtgtacccccactgtgatattaggagtaatatctctttagcrtattacgaagaatatcacagaatgtaccccccactctgatactaggtataatatcatagggtttacacacatggtatactacccactatgatattaggagtaatatcttcctaggatattatgtataatatcacagggtgtatactcatggtgtaccttcactgtgatattaaaagtaa

SEQ ID NO: 365892 - DNA, 521 bp, Homo sapiens
aggggtgcccctgtgatattgggagtaatgtaattctctccccctcgaatattacaaacccaatatcatagggttgtacacccccctgcgatattgggagtaatattatcttctccccatcttaatgttacgaacattataacaggggggtatacactccctgcgatattgggggtaatatcatcctctttcgccttgaatgttacaaacaatatcacaggggagtgtacaaccctacgatattgggtataacattatcctcaccttttctggaaattacgaacaatatcactggggggtgaacactccctgtgatattgggagtaacataatcctgtcttcctctggatattattaacaatatcacaggggagtgtacacgccctgctatattgggagtaacgttatcctcttccctcyggatattccaaacaacgtcagagggtagtgtacaacccctgcgatattgaaagtaatatcttcttccctcctggatattgttaacaatatcacaaaggagt

SEQ ID NO: 365893 - DNA, 615 bp, Homo sapiens
ttggcgctactttattgctggtatttsaagctatggggaattttttatggaattattattattattactgttattttggtcctgaggatatgtccttcagtttggggaaattttcttttatgatttctttaataatatccttgcctgcattttctctgttctgtcagattttagtctgatgtggaaatcctccagtaatctaattttaaaatgttttctctcctgttttcattttttcgacttttgctttgttgtcttagagatctcaattttatctttcaacccttccattgcatttttaatttttcaattccttttatttttctgaagtttaattttaatcataacctatttgtatgtttttttaaaaggcctttactgaggtataatttatatgctataaaattcacccattttattatacagctgcaatttttctctatttctctgaggatattaattataggtatttgaagtttcctcctgttttgtttttcattatttttgtttttctctgagttcttttttgtgtgtttgctttcttcattctattttttcctttttagaaggggatttttctcaaatctttggggattcttggtaatttctaagtgt

SEQ ID NO: 365894 - DNA, 578 bp, Homo sapiens
caccccctgtaacattggcagtaatattcttctctccttgcctggatataagaaacaatatcacaggcggggtttacactgcctgcaatattgggagtaatatcttcctctttccccctgtatagtataaactatatcaaagggggtggtatacaccctctaagatatttggagtaatattatcctctacaaatcgggatattaaagacaatattacgagggaggtgtataccccttgcgaaattgggagtaatactatcctttaccccaactgaatattatgatcaatatcacgggggtggcctatatccctgcgatattaggagtaatataattctctcccccctggatattaggaacaatatcacaggaaargatcaatattatcctttccccagttggatattaggaccaatatcacaaagggggtgtagaccccctgcaatattgggagtaatatcatcttttccacccttcgatattaaaaacagtatcgccgggtgggtgtacaccttttttgatattgagagtaatatcatcctctccacttctggataatataaacaatattatgcagg

SEQ ID NO: 365895 - DNA, 574 bp, Homo sapiens
cacaggggttgtacaccatatgtgtacacccctgtgatattatttgtagtatcttacgtggacgttacttctaatgtcacagggtgtgtacaccgtgtgtgtacaccacctgtcatattattcatcatacgttagtgagattttactcctaatatcacaggaggtgtacaccgggtgtgcacacgtcctgtgttattattygtaatattctagagggatgttactgctaatatcttaaggggtgtacactatgtgtgtacaccttctgtgatattctttgtaatatcttgggtgatgttacttctaatgtcataggatgtgtaccccatgtatgtaaacagccagcgatattattcataatgttctacgaggatgttactcctaacatcacagggggtgtacaccccctgtcatattatttgtaacatcatagggggatgttattcctaatgtcactggggatgtccaccatgtgtgcccaccccctgtgatattcttcgtaatatcctaaagtgatgttacttctaatgtcacaggggggttaccccatgtgtgtaaacaaccagtgatatta

SEQ ID NO: 365896 - DNA, 574 bp, Homo sapiens
cacaggggttgtacaccatatgtgtacacccctgtgatattatttgtagtatcttacgtggacgttacttctaatgtcacagggtgtgtacaccgtgtgtgtacaccacctgtcatattattcatcatacgttagtgagattttactcctaatatcacaggaggtgtacaccgggtgtgcacacgtcctgtgttattatttgtaatattctagagggatgttactgctaatatcttaaggggtgtacactatgtgtgtacaccttctgtgatattctttgtaatatcttgggtgatgttacttctaatgtcataggatgtgtaccccatgtatgtaaacagccrgcgatattattcataatgttctacgaggatgttactcctaacatcacagggggtgtacaccccctgtcatattatttgtaacatcatagggggatgttattcctaatgtcactggggatgtccaccatgtgtgcccaccccctgtgatattcttcgtaatatcctaaagtgatgttacttctaatgtcacaggggggttaccccatgtgtgtaaacaaccagtgatatta

SEQ ID NO: 365897 - DNA, 590 bp, Homo sapiens
ctaaatacatttttgtacacttgagttctctgattctttttgctgtcataaaccaagactgaggaacttaggacaatgttgaagctaagttttataaaacctaaaattacgatttggttaagaaagagatcttagtgcgtttgatgtaggaattccactttgcaaagagaatggaagtaactgtctccatacaaaggcaaccacaaactaacgcttgcctttgaatttgtgatatcccctaattctccagtatttttctttttacattaatattcccttaaaaacattacctggaatgatcctctgtgcatggagaagtacacattctgcaatgataagtgtaaacaaaactgaacattttatttctccctttttgctattctctgacctgcagtgcattccaatactttctgctttcagttaacacgcagttctttattattttgatcactggacctcaatagcgcagcacacagkcaatggccaatggatattctggcctgaatattaatgatatctgagtgcagactgagatataataatgctaaaaattgtagatgatggtttattatttctagacagtagcacac

SEQ ID NO: 365898 - DNA, 657 bp, Homo sapiens
tgggtagaatattcacagcattaataagattcttaaaagcagttatagtctccaaattcaaagaaaactaagttaaagtttcctggtttaaactgtttttcttttttttcctaatagtaaaagaagaggctacttatgaaaagtacatattaaatatagattatttatgaattacaaattgaaggataattggcatttaaaaatttgaaaatatggttttataaatttttgaaaccaaatatctcattttttgcaatgcatatttaaataaaaactttatttgtaatttttaatagttaaattttcctataacttgtataatatctagtctacaagattatattaaaatyatgtttacttgattatctctttctttgtgtatttctactgctgtagaaatttgtgaaaatatatttacctattcttttttttgtaaaatatatgttgaaaaggaagtgactactatatgggtatattttttgttgttatatatgtttttatttttcatcaagtgattttaatgaaatattaactagtattttaacttggaacactactcataagatctaagttaaatggacatgtgccatataaatgaacttattaaatatttctgggagaatatttatctggtaaaaaaagaaaaatttcccccct

SEQ ID NO: 365899 - DNA, 564 bp, Homo sapiens
tgtgtcatattcactaacttgcagatgttcaaccatccctgcattcatggtctgaattccactcgatcatggtgtattatctttttgatatgctgtcggattctgttagctagtattttatttaggatttttgcatctatattcatcagggatattggtctgtagttttcttttttagttatatcctttcctggtttttgaattagagtgatactggctttatagagtattttcagaaggattcctttttatctctatcttgtggaatagcrtcaataagattgctaccaattcttttttgaatgcgtgatagaattcagctgtgaattcatctggtcctggaattttttttttttttttgtggtaacttttgaattaccattttaatcttgcagcttgttactggtctgttcagagtttctatttcttcctggttttatctaggagggttgtatatttccaggaatttatccatctcatctagattttcttgtttttgtgcataaaaatgttcatattagtcttgaatgatattttgtatttctgtggtatcagtcataatag

SEQ ID NO: 365900 - DNA, 407 bp, Homo sapiens
aatagcggttaaagtttgatgaggtctcttacagtttacttgcccgtgtgagcaacttgtttcctgaatgattttctcctcattttgttttattgatgtagggaatagaaagcatctaaatataggagatcacttggaaaagatttgctattaccacttccacatgctcagaaactggtggctgattaaatgagcatatagtgataaaatgtgtgacctttcagccaattctaagtctcaaacttctttttgaatcttaaatcttgttttattttcttgtatytggtatctatctaggctagttaatgttggtaaggttgagattgtctcatagatggcaacaaaattggtttgattgccctacgttgtatttacattttttcccaagggcatgaaagcagttacac

SEQ ID NO: 365901 - DNA, 536 bp, Homo sapiens
cctttcctggtttttgaattagagtgatactggctttatagagtattttcagaaggattcctttttatctctatcttgtggaatagcatcaataagattgctaccaattcttttttgaatgcgtgatagaattcagctgtgaattcatctggtcctggaattttttttttttttttgtggtaacttttgarttaccattttaatcttgcagcttgttactggtctgttcagagtttctatttcttcctggttttatctaggagggttgtatatttccaggaatttatccatctcatctagattttcttgtttttgtgcataaaaatgttcatattagtcttgaatgatattttgtatttctgtggtatcagtcataatagctcccattttgtttgtagttgagttcattgggatcttttctcttcttttcttggttcatcttgctaactgcctatcaattttgtttatcttttcaaagaaccagctttttgtttcatttatattttgtatttttttgtttcaatttcatttagttc

SEQ ID NO: 365902 - DNA, 608 bp, Homo sapiens
ttctgtggtatcagtcataatagctcccattttgtttgtagttgagttcattgggatcttttctcttcttttcttggttcatcttgctaactgcctatcaattttgtttatcttttcaaagaaccagctttttgtttcatttatattttgtatttttttgtttcaatttcatttagttctgctcttatctttgttatctcttttcttctgctgggtttctgtttggtttgttcttgtttctctagttccttgaggtgggactagaatgtcgatttgtgcactttcagactttttgatggaggcatttaatgctatgaactttcctcttagcactgcttttgctgtatcccagaggttttattaggttgtgtcactattattgttaagttcaaagaattttttaattttcaccttgatttcattaacccaagatcatacaagagcatattatttaatctccacgtatttrcatagttttgagggttccttttgaagttgatttccagttttatttaactgtggtctgagagaatacttgatataattttaattcttaaaaatttactgagacttgttttgtgacctatcatatggcatatcttgaagca

SEQ ID NO: 365903 - DNA, 596 bp, Homo sapiens
gtgaaaattattacaaatttcagttggaagcttttcaacctgtgacctctccctagttctgctggctgtctaccccatgggcccttgtgtaatatagtcaggratagcttccctgggctagagctgaaaactgggagcgctcttcctgctgctgcttctacctttatattttgcatggctccctaaaaatctgtttcagctccaggtaaggttaaattcttcccctgtaatctagatttttagattccccagtggggatgtgtgttctggggcaggttttcctcctctcatactttgggaacttacagtttttcacctgtcttgttgaatttgcagcagcataccacttctttcaaaggatctatgaattcctttggtttcctggtacattctgtggttgttcttgcagcaaaatgtcataatgtgattcttcacatgctggtctgtccatctaagtgggagctgcgcgttagctttgtctcctatctgccatcttcctacagtatctgatcccttcttttttgttagatttataaatcttatatttagaacaggtagaactcagggctattacatattcatacatgtaaagatat

SEQ ID NO: 365904 - DNA, 596 bp, Homo sapiens
gtgaaaattattacaaatttcagttggaagcttttcaacctgtgacctctccctagttctgctggctgtctaccccatgggcccttgtgtaatatagtcaggaatagcttccctgggctagagctgaaaactgggagcgctcttcctgctgctgcttctacctttatattttgcatggctccctaaaaatctgtttcagctccaggtaaggttaaattcttcccctgtaatctagatttttagattccccagtggggatgtgtgttctggggcaggttttcctcctctcatactttgggaacttacagtttttcacctgtcttgttgaatttgcagcagyataccacttctttcaaaggatctatgaattcctttggtttcctggtacattctgtggttgttcttgcagcaaaatgtcataatgtgattcttcacatgctggtctgtccatctaagtgggagctgcgcgttagctttgtctcctatctgccatcttcctacagtatctgatcccttcttttttgttagatttataaatcttatatttagaacaggtagaactcagggctattacatattcatacatgtaaagatat

SEQ ID NO: 365905 - DNA, 622 bp, Homo sapiens
aagaatatttgtccccagtgaaaattattacaaatttcagttggaagcttttcaacctgtgacctctccctagttctgctggctgtctaccccatgggcccttgtgtaatatagtcaggaatagcttccctgggctagagctgaaaactgggagcgctcttcctgctgctgcttctacctttatattttgcatggctccctaaaaatctgtttcagctccaggtaaggttaaattcttcccctgtaatctagatttttagattccccagtggggatgtgtgttctggggcaggttttcctcctctcatactttgggaacttacagtttttcacctgtcttgttgaatttgcagcagcataccacttctttcaaaggatctatgaattcctttggtttcctggtacattctgtggttgttcttgcagcaaaatgtcataatgtgattcttcacatgctggtctgtccatctaagtgggagctgcgcrttagctttgtctcctatctgccatcttcctacagtatctgatcccttcttttttgttagatttataaatcttatatttagaacaggtagaactcagggctattacatattcatacatgtaaagatatatgtgacta

SEQ ID NO: 365906 - DNA, 631 bp, Homo sapiens
tatgtgactacctttcctggttgtgtagacattcaaaaatgtgcaatgaggcagagggggaaatcacacttgtttaggtaatttaggttcctaaagcagctttgctatataactcarttgaaagcaatgtgctgacttggcctatccatgtaattgctctatttccttttttcttattgtgctgttagtcctaaacaaaatggttttgattgtcatgaagactattataaaaacacaaatagtacaatagctcattatgtgtgccaaaattttgtgttctactcagcaaatttcttacaaggttggtttatctgttcaggggaatctgagtgattgagaatttttattgatattgcatctaatttaggcattccatggagtgtttgggatagctattctgtttttgtcacttaccaatcctgtagggtgttgtagggattcatgctgattgacacttactcatgtaaacgtgggttgtggtgaaaagcactgactttggcctctgacccacagagctgaatctgtcatttgtagtggattacttaattttaagctttagtttaatcatataaaatgctttacctgaaacaaatttgagagtacatcctaaataaggttaattttataatta

SEQ ID NO: 365907 - DNA, 631 bp, Homo sapiens
tatgtgactacctttcctggttgtgtagacattcaaaaatgtgcaatgaggcagagggggaaatcacacttgtttaggtaatttaggttcctaaagcagctttgctatataactcagttgaaagcaatgtgctgacttggcctatccatgtaattgctctatttccttttttcttattgtgctgttagtcctaaacaaaatggttttgattgtcatgaagactattayaaaaacacaaatagtacaatagctcattatgtgtgccaaaattttgtgttctactcagcaaatttcttacaaggttggtttatctgttcaggggaatctgagtgattgagaatttttattgatattgcatctaatttaggcattccatggagtgtttgggatagctattctgtttttgtcacttaccaatcctgtagggtgttgtagggattcatgctgattgacacttactcatgtaaacgtgggttgtggtgaaaagcactgactttggcctctgacccacagagctgaatctgtcatttgtagtggattacttaattttaagctttagtttaatcatataaaatgctttacctgaaacaaatttgagagtacatcctaaataaggttaattttataatta

SEQ ID NO: 365908 - DNA, 631 bp, Homo sapiens
tatgtgactacctttcctggttgtgtagacattcaaaaatgtgcaatgaggcagagggggaaatcacacttgtttaggtaatttaggttcctaaagcagctttgctatataactcagttgaaagcaatgtgctgacttggcctatccatgtaattgctctatttccttttttcttattgtgctgttagtcctaaacaaaatggttttgattgtcatgaagactattataaaaacacaaatagtacaatagctcattatgtgtgccaaaattttgtgttctactcagcaaatttcttacaaggttggtttatctgttcaggggaatctgagtgattgagaatttttattgatattgcatctaatttaggcattccatggagtgtttgggatagctattctgtttttgtcacttaccaatcctgtagggtgttgtagggattcatgctgattgacacttactcatgtaaamgtgggttgtggtgaaaagcactgactttggcctctgacccacagagctgaatctgtcatttgtagtggattacttaattttaagctttagtttaatcatataaaatgctttacctgaaacaaatttgagagtacatcctaaataaggttaattttataatta

SEQ ID NO: 365909 - DNA, 563 bp, Homo sapiens
gtggtacatgaaggaaaaaacgtcatagggtcatgaatataagtgactctaagagctaagaatggcttgtggctgctgccagatggcaatgtgctacaaccacagtcccacagccacagggaactgaatttggctaacaacctgaatcagcttgaatgctgattcttacgcagagctcccggaatggaatacaggataaccaaaactctgatttcaatctgagcaaggaatttagccacaccacacctgtacttctgagataataaatagttgtttgtttaagccacaaagtgtttggcagtttttaatgcactagaaaactaacacaccctgagaaataattaaaatatcccataatgtaaagtaggaagtgttatatactaagaaaagccgcatacacaaaaaaatctcagtatgaaagttgattaatcctaaactagacctcttggaaacgtggaaattggaaattctcacctctttgtaatgygctgcaaaataaaaattcatctgtttgctttgagaatattttgcccttcttttcttaaaaaatagcttcttttttt

SEQ ID NO: 365910 - DNA, 529 bp, Homo sapiens
tacctagaaactgaaagggaaatatttcaaatccttggttttctgaaattgaaataaccctttagaatcttaagaacagtgatatgtttcgacagatattttatgataaaattaaccaccatgactaacagcactgagtgtttttgacaggatataaggccaaacactttgttgtattattatttgcattcargattaattctgtccatgcacagacacaaatgtcgtatttaatcccatagaacataataaccactttataaacatagagctatccacaatatcagtttattagcattaggaattacagaattctatctccagctgttctttgtgaagttcagaaaccaaacaattaaacaagaatacatttacatttctaagtgctcaagataaatggtctctctggtcttccctgttacggagaactccataaatctaatccttgaagatatatctactgaggcaatgtctacatgacaccaaagcattcatatgaaaaagagaaaactgaatgatccaaatgtct

SEQ ID NO: 365911 - DNA, 565 bp, Homo sapiens
acttactctgaaatgccctttgcctgccattgaagaagtaacagcattatatagagtcgagcttaaattattttcttcttcctctgyaggcttgccagaataagaagaaaattttatacttcacttaatcactcttcactttggaattaggcagaattagaggatgttatccttctgtcatgtttttggcaatacaggtattgtcagttttttctgttttttttttatatgtatcatgtttaatcatgagaaaatactgcatacctcagagaaattacaggtttagttccagaccaccacaataaagcaaatactgcaataaagtgagtcccagttttttggtttcccaatgcatataaatgttatgtttactctataactattaagtgtgcaattgcattatgcctaaaacaaatgtacataccttaattttaaaatattttattgctacaaactgctaatgatcatctgagccttcagcaagtcatattctttttgctggtggaaggtctggcctccatgtggatggctgctgactgatcagggtagtgattgctgaaggtcg

SEQ ID NO: 365912 - DNA, 544 bp, Homo sapiens
aaaaatgatccagttgttattaacaaaactcgctttaaataatcaaaataattcttttattttcaaagtattataaagaaattctagttgactgttcttaagacatttctattgacttctataactgatagataggtggcagtctgcaaaattatgcctgccttgtaagtaatgttctgcctttctgtcattcagccattaaatgtcccatagccaggtgacagcctcaggaaaacacatctagtattatatcaaagcctgtcattctccttgccaagggcctcaccataaaagatgtctgaatttgagcaagctactgaaattcaatcaaaatggtaagtttatattgggagactgaggacactacagatcacaatgacaaagggcaaaattttataactgctgcaaagattagggaaaaatttctcstagatattgtgaaagtagttcccccttttaattcgaaataaagagaatactatttacagtattgcatttgtatgtaaaatgtaatatatatgactaaagagtcattatttcaaaa

SEQ ID NO: 365913 - DNA, 599 bp, Homo sapiens
aggttccttgacttacacttggtactattgccatcttacatactaagctcagtatttaggttattcattaacrtagcctcattttacctacttaacagcatctctaattatcctcagctatcatcccataaacagccattgggctcagaaacaagaggactagaggaggaaatagacaataatttttttaagtttcatttgtagttcctctttcattacaaatctttatattcaaagcagcaattatagtcagacttacaagttcaggtatctgaaaatgtgatgtctctacagtgttgattctcagtacaggacagtttcctggagaaactgggccaaaagacttagaccacagagagtcccaacatatcatagcagttactagagtttgaatgtctcctccaaaactcatgttgaaatttcattgctattgaattaacaatattaagaggtgaggtctttaaaaggcaagtaggtaatgaggactccaccctcatgaatcgattaatgccattatcacaggagtcagtttgttatgatggaagtgggttcttgataaaaaggatgagtttctcccaatttcctgtcttgcaagctca

SEQ ID NO: 365914 - DNA, 496 bp, Homo sapiens
tttcaaaggacagtttttaaaacaaaggtatactacagaatatttatatgcattagatgaaattaacagtagaattaatattgctaaaaaaccttataccaaataagttatgtgaataaaaggcttgagacaactttcaaatgtggaagaagacaattaagtgaaaagtgatcaccgaaatgactctggtattaaggacagaaaataaaaattcataatatagttaattactgttttggaagagtagaaaagatgaaacagatattttcaaagcaattaagaattcataagtaataacagaaaaaaaaacttttgcactataataaaaaagaaaacaaaaattaaaagcaaaagatttctagatkttttagattgaaaagttcaagtcaatatctaaaaagacgcccgtaattccaggactttgggaggctgaggtgggaggatcatttaagcctaggagttaaagagcaacctggacaacatagtgagatgtttt

SEQ ID NO: 365915 - DNA, 605 bp, Homo sapiens
cattaccattattaacaaaaatatacaagctaaaagacaaattaccaacaatgttaaccaaagtattttctatgaaacagaattttcataattaatagttaatactagaataaagaaatttttggtcaaagaatttctcagaagtgttaatatactattgtgatggttaatactgagtatcaacctgaggggattgaaggatgcaaagtattaatcctgggtgtgtctgtgagggtgttgccaaagaagattaacatttgagtcagtgggctgggaaaggcagatgcacccttaatctgagtgggtacaatcgaatcagttgccaatgcagttagaatataagcaggcagaaaaatgtgaaaagagagactggcrtagcctcccagcctacatctttcttccatgctggatgcttcctgccctcaaacattggactccaagtccttcagttttagaacttggactggcttcccttgctcttcagcctgcaagcagcctattgtaggaacttgtgattgtgtaagccaattcttgataaacttattatatatatatatacacacaatatattatatattatatatactagctatatataatatata

SEQ ID NO: 365916 - DNA, 555 bp, Homo sapiens
catccatggactcacggaatgcattatccactgtcacggtattccacacagcattgcctctaaccaaggcactcactttatggctaaagcagtgcagcagtgggctcatgctcatggaattcactggtcttaccatgttccccatcatctggaagcagctggattgatagaacagtggaatggccttttgaagtcacaattacaataccaattaggtgacaatactttgtagggctggggcaaagttctccagaaggccatgtatgctctgaatcagcacccaatatatggtactgtttctcccctagccaggatttatgggtccaggaatcaaggggtggaagtggaagtggcaccactcaccatcacccctagtgatccatagcaacttttgcttcctgttcccacaaccttaagttctgctggcctagaagtcttagttgtaaggaaggagatcacctctcctgttgtctcatgcctcagataaagaaaagaggagcaaaaactaaggaaaggyagaaataagatcaatagttagacagctcccagacactc

SEQ ID NO: 365917 - DNA, 601 bp, Homo sapiens
tgtctacttaccctctcctttccctcactgcctcagagcatctcagccaacagacaaaacttcctcacctttgcctctttaatgggtacagagtttcagtttgggaatacagaaaagttctggagatagattgtggtgatgattgcacaacagtataaatgtacacttaaaagagttaaaatgataaattgtatgttacacgtttataaccacaattaaaaaaaactgtaaattatcaaattaccagaattccttgcaggtagcagagtacagacaacatatctatagctactgatccttattctgaaatctgctgaaaccaattttatcccgctttatctaaattcttcctgcattgaaaacaggcatgatgtctgaagtatctgactacctaaagcccattaataaaggcaagggagaaaagccaagamaattatcaaaactcagtccagacttcttagagttgtagaatcaatttcttctggtaactgttttgaaacttattataataataaaattgtattttttaaacaactgaagttgaatgaatttctaaatgacatctctttctgcatgtacatatgtgtacttaggcgtataa

SEQ ID NO: 365918 - DNA, 625 bp, Homo sapiens
ttgtggtgatgattgcacaacagtataaatgtacacttaaaagagttaaaatgataaattgtatgttacacgtttataaccacaattaaaaaaaactgtaaattatcaaattaccagaattccttgcaggtagcagagtacagacaacatatctatagctactgatccttattctgaaatctgctgaaaccaattttatcccgctttatctaaattcttcctgcattgaaaacaggcatgatgtctgaagtatctgactacctaaagcccattaataaaggcaagggagaaaagccaagaaaattatcaaaactcagtccagacttcttagagttgtagaatcaatttcttctggtaactgttttgaaacttattataataataaaattgtattttttaaacaactgaagttgaatgaatttctaaatgacatctctttctgyatgtacatatgtgtacttaggcgtataacacactttaagaaaagctagttttactaattcttttactaaatctatacaggggctataaataatatttgctgccttaatagaattgaaaattaagaaataattgcagtctagtgttcttagagataacaatgatgatacacttttcttggctt

SEQ ID NO: 365919 - DNA, 625 bp, Homo sapiens
ttgtggtgatgattgcacaacagtataaatgtacacttaaaagagttaaaatgataaattgtatgttacacgtttataaccacaattaaaaaaaactgtaaattatcaaattaccagaattccttgcaggtagcagagtacagacaacatatctatagctactgatccttattctgaaatctgctgaaaccaattttatcccgctttatctaaattcttcctgcattgaaaacaggcatgatgtctgaagtatctgactacctaaagcccattaataaaggcaagggagaaaagccaagaaaattatcaaaactcagtccagacttcttagagttgtagaatcaatttcttctggtaactgttttgaaacttattataataataaaattgtattttttaaacaactgaagttgaatgaatttctaaatgacatctctttctgcatgtacatatgtgtacttaggcgtataacacactttaagaaaagctagttttactaattcttttactaaatctayacaggggctataaataatatttgctgccttaatagaattgaaaattaagaaataattgcagtctagtgttcttagagataacaatgatgatacacttttcttggctt

SEQ ID NO: 365920 - DNA, 594 bp, Homo sapiens
tggccaactagtgctgcagatagaaagccgaaggaccttgtctcaaatcaagacagactgtaaggcrtaagtttcatttttaagtttccccaggaatcagactgaagctgggattttatgtgaaattatacctctgtttggcttcctctgcttccctttcttgattcctctatcactttaaagatttctcttggatcatttccttaggaaatcattaacaaatcctcctaacaaaagctgtctcagtgtcagcttttggagaatctgactccaaagaaggagactgtgaaaattttggttgatttttagtaactttatacatttcctcatatgtgttatttttgttgcacccatcttccttgtcctgatctgtttctcaatggtgaatgtaaatttaaaaaaaaagaatgaaaatcaggcagatagaaattggatatgttagaaaatattataccatactttgtactcaactggacctgagaatggggaaaggaagagtgggagaaccaaatctcagagaagacagtgtagacagttaatcagaaaaaaagaaaagtcatctagctaaatggatagggcctgcaaagcaaagac

SEQ ID NO: 365921 - DNA, 594 bp, Homo sapiens
tggccaactagtgctgcagatagaaagccgaaggaccttgtctcaaatcaagacagactgtaaggcgtaagtttcatttttaagtttccccaggaatcagactgaagctgggattttatgtgaaattatacctctgtttggcttcctctgcttccctttcttgattcctctatcactttaaagatttctcttggatcatttccttaggaaatcattaacaaatcctcctaacaaaagctgtctcagtgtcagcttttggagaatctgactccaaagaaggagactgtgaaaattttggttgatttttagtaactttatacatttcctcatatgtgttatttttgttgcacccatcttccttgtcctgatctgtttctcaatggtgaatgtaaatttwaaaaaaaagaatgaaaatcaggcagatagaaattggatatgttagaaaatattataccatactttgtactcaactggacctgagaatggggaaaggaagagtgggagaaccaaatctcagagaagacagtgtagacagttaatcagaaaaaaagaaaagtcatctagctaaatggatagggcctgcaaagcaaagac

SEQ ID NO: 365922 - DNA, 594 bp, Homo sapiens
tggccaactagtgctgcagatagaaagccgaaggaccttgtctcaaatcaagacagactgtaaggcgtaagtttcatttttaagtttccccaggaatcagactgaagctgggattttatgtgaaattatacctctgtttggcttcctctgcttccctttcttgattcctctatcactttaaagatttctcttggatcatttccttaggaaatcattaacaaatcctcctaacaaaagctgtctcagtgtcagcttttggagaatctgactccaaagaaggagactgtgaaaattttggttgatttttagtaactttatacatttcctcatatgtgttatttttgttgcacccatcttccttgtcctgatctgtttctcaatggtgaatgtaaatttaaaaaaaaagaatgaaaatcaggcagayagaaattggatatgttagaaaatattataccatactttgtactcaactggacctgagaatggggaaaggaagagtgggagaaccaaatctcagagaagacagtgtagacagttaatcagaaaaaaagaaaagtcatctagctaaatggatagggcctgcaaagcaaagac

SEQ ID NO: 365923 - DNA, 508 bp, Homo sapiens
aatgcatttatgctgatacagttccagttctagagaatatacttatgtaggtacaggtccatctgaacaggtaatacataaaaggctagaatctgtcaatgtctctaatattattctagcttgtgatgactgttctataaatgtctggcaatgaacaaattgccatgggccagttgcagatgactcagtatagtctgtattatgtatcccttatgctaaaraattcacaatcaggttcttgaatgtatttcaattggttgcaatacttagttggtaatattcatgtcacatacacataaaattatattttctaagaaatatagatattcaaaatgtatttacatcttagttactttgaatgagacttagagattttcacacatgattataatcaagtattttaagtaaaagtaaactagttttatgtaggttatgaaatataggaggaatatctctagcacatgaggaatcactttcccatattagaaagactacttcctttcaagga

SEQ ID NO: 365924 - DNA, 582 bp, Homo sapiens
ccagggttccaaaccttccttatttagcttcaggatatacaaatcttaatattaagtcttaaggcaccaatgctaccatacctatgctattcgaagaattatttttaataccattgagaaaacccaggtgcagcatgcttgttaattcccacaatacatttatctgcttggcaggtacagcctgtgagcttgacatgttaatgttgctgtaatgctcctttcctcatccaactatcagtgggaatactgcatgcaaaggcaaaaacggtgamacagaaaaggcattgcctatgctaggtttgtttttccttgttttatctaagcttgaacaggagaggttttgtaatagatatgtaatcatcttcaaagtgatgttttaaagggaaatatatttttataaatttattatagaaatcacttgcataagaaaataatagaggtaagtaaatcacttctagatagtgaaaatgggatatttaaattaaaaaagatcaaacgatagctgtgttttcctgttttacaaatacttaaccttatcattttagagaacttgttaaactcagatgaaatggagcaatacac

SEQ ID NO: 365925 - DNA, 582 bp, Homo sapiens
ccagggttccaaaccttccttatttagcttcaggatatacaaatcttaatattaagtcttaaggcaccaatgctaccatacctatgctattcgaagaattatttttaataccattgagaaaacccaggtgcagcatgcttgttaattcccacaatacatttatctgcttggcaggtacagcctgtgagcttgacatgttaatgttgctgtaatgctcctttcctcatccaactatcagtgggaatactgcatgcaaaggcaaaaacggtgacacagaaaaggcattgcctatgctaggtttgtttttccttgttttatctaagcttgaacaggagaggttttgtaatagatatgtaatcatcttcaaagtgatgttttaaagggaaatatatttttataaatttattatagaaatcacttscataagaaaataatagaggtaagtaaatcacttctagatagtgaaaatgggatatttaaattaaaaaagatcaaacgatagctgtgttttcctgttttacaaatacttaaccttatcattttagagaacttgttaaactcagatgaaatggagcaatacac

SEQ ID NO: 365926 - DNA, 565 bp, Homo sapiens
acattccaaggcttggccttacacatagggactggtctgatgtcagaggagaacaagaacttcaaggaatttctagtcctccaaatgagttacactatattgggacagcaatgagataagagctgggatgaaaagaatttgacagagcaagagtagatgcatgatasaataggttacaaggaagaaaagatccgtgttcaatggttaagtcaatgggggcaggaatttggtttttgttgttcaacactacatacccagtttcaggcccataacaagagaaatgaatgaatgggagagtgagtgaggctatttgatcctttctctttgtttctttaatctagtatttcccaatgtatggaatgcttcaactagtaatctgggacatcattttaggtggtaatggtacattaaacactctaaatcaggtagagacaaagtgtttccccttttaatttcctagtatcaaggagaaaaatttcagtttggtactagtaggcctttaacatctttctattcttgtttaaacaggagacatgttctcagggactgagctccaggtaacttt

SEQ ID NO: 365927 - DNA, 686 bp, Homo sapiens
ggggtagaactcaagctatcatattattaaatatactaaatgaagttagattttataaaacaagtttattaaagcaatgaaaaggaaaattaatttgacaaatccaaaatagattctagggattagacatatctctattttcaacattattttctgtctttaaaatgcattttctcctcaaatatcctcagaaagttttaaaaattgrtaataattcttcaatttttcatcagaaaaaaggaatccttagcaaacattaaacataactgtagagcagaaaattcaaattgcagaaatatatccagaaagtgactcaagtatttatttgacttttatattttaatctgaacatttaatttgagcttgtgatattaatgaattccaaaatacagataccatgtttattcttttcacttaaaaactaaccatttttagagtagagtaaatgttgctaattttacaattctccatttaaaatacacttttatttttataatacttttcaaaatattatatttctgcacatttaaacctgctcaatgaatttatctgatgcatgttttcatgttgatgatattaattacaatttactggccaggcatggtagctcatgccgataatcccagcactgtgggacactgaggtgggaagatcacttgataccaggagtttgagaccagcctggg

SEQ ID NO: 365928 - DNA, 606 bp, Homo sapiens
tgtaccttaagttatttccaaaaatatataggcagacagatagatacagagatggaratattagttcatcttttaatttctttctatttccatgttctcttcttgataaaaaccagtaatttgtatgttgtcttttaattgtttagaccccaaatcacacagtaatttttatacctataaattgtccactatgttaacagtatttttctcaagtctttcctctattgatttgtgtgactatttatgatattattataagtatcacagttattttttcaaaattttatttcatagatctgtaaattatctcaatattttctcattctgcttaattaccttgagagtgaactgtatctaaaatcaattttattccaatgtgtgctagttatctgtcttctgaagacataattaacttatcatttattttaatacaaactacttaaatctaattagtttgtatgtttggttttgttatcactattgcttgtttacttttaaatacattctctctaagccttctattttctctacaaacatcatagtagattctccttggctcctctttctgtttatcataacattctctgaatgttctgcttaaaacat

SEQ ID NO: 365929 - DNA, 606 bp, Homo sapiens
tgtaccttaagttatttccaaaaatatataggcagacagatagatacagagatggagatattagttcatcttttaatttctttctatttccatgttctcttcttgataaaaaccagtaatttgtatgttgtcttttaattgtttagaccccaaatcacacagtaatttttatacctataaattgtccactatgttaacagtatttttctcaagtctttcctctattgatttgtgtgactatttatgatattattataagtatcacagttattttttcaaaattttatttcatagatctgtaaattatctcaatattttctcattctgcttaattaccttgagagtgaactgtatctaaaatcaattttattccaatgtgtgctagttatctgtcttctgaagacataattaacttatcatttattttaatacaaactacttaaatctaattagtttgtatgtttggttttgttatcactattgcttgtttacttttaaatacattytctctaagccttctattttctctacaaacatcatagtagattctccttggctcctctttctgtttatcataacattctctgaatgttctgcttaaaacat

SEQ ID NO: 365930 - DNA, 594 bp, Homo sapiens
ccaggtgacttccttttcaatggatttgctggtgatgggtgtaatgtagggatacctctgggaccctagcttgactgccgtttgcctccaacttcagctgcttgttcaggaactgccttgagttaaatatgttctcacaaaaaaatcatcaataaaagcagggtgagccattcaacagcctctctgtgaccgtatctcaataatttctaaataactgtgmatcaaaatcaggaatcaaaagtggaaacatgatcgcattggtccatagccccaagattgttatttttcatagacctctttaaagttgccatatcaaaggtgaagattttctcactgattctttaaaattacttgcattacataaatatgtttgacattttctctcacatttttctgaaggaaaggtaatactaaatacaactttggaaaatcacttttgcataggctaatttttatttcttgcttgtggcatcaatgttttaaatcataatcatatttgttacattaggcaaaattttggcgtagtttgttaaagtggcttcatatgattgagcccatcagattataaataattgataatcttccaaagtgtta

SEQ ID NO: 365931 - DNA, 567 bp, Homo sapiens
ccatgtgcctaatttttccttgttgtgagacaaraacccggatttaactgagctaaggagcaaaaaatcttgcatcgatattgtatatcaggttaaatggtgaagacataatagatttgtgtgtgtgtgtgtgtgttttcctctctttcactcagaaaatctttttgttggtcttattgaacctaaactagcctaattctagtggattaaattttatttattccccaaaagtaaatataggtttaaagacaaatactccaaaaagttgattttctcttctggattataatattgactttaaataacttttatatgatgcttctctgagcacattttaactaaatgttccagagcaatttatgtgtgactcaggactcagttacagcaagtgaaataatttgtctttgataaattacaattaactatcaatatgccagaactaaatgcatgggttgaaatatcaaaaaaagaaaaaaaaacccaaccatcggttagtttttcctttgggctctgcaggaaatgttgtagaggtggaagagcatgttttgagatctactacatatagaa

SEQ ID NO: 365932 - DNA, 607 bp, Homo sapiens
agttgggttaaaactggaaagcagaggcaatgccccaatggcccagaaaactggcatctaatctgagagagatatgatacagttcgacaagctgacaggttatttataaagcataagaagcctccagaatctcactagaactcatattttttgttctacagatggaaaagccctgatgataatctcagaatagtttaagtcagtggtgaactaaagctgtaggaatgcctatacccagattaactacatatcagattgatccagcctccatctctagcaaactgaaagaaaatgtcatatattttctggaggtaaatactacataattcagtctccactgttaaaaaagtgactaatagtcaaagaagaaatagtcaacagagaaaacatagatggcttgatgacacagttatctgaccatattagataataagraaactaatgtatctacaggaaatgaacacatgcataataacatatgaaaatacataaaagaaccaaatgaaatgtagaaatgaaaagcaaaatctattatcagaaatgaatttgttagatttaacaacagatgagcagagcagaatatggaatcaatatattaatatttgaa

SEQ ID NO: 365933 - DNA, 620 bp, Homo sapiens
tgtgcattactagagaaagacatgcataatgtaaggtggaatagatccaaagtcaaaacaggagatgaatattgagaaaataagcagatgaatattaagaaataagcactttacatgaaagaagtcaggaaaggaagcacagggactaaagcacatgtgtgaatataaaacacatagcataataaaagtattaaacccaaccatagtgaccactatatttaatrtgatggactaaacacaagtcagagattatcatactggttaaaaagcaagaacaaatacactttctttttttttctaaggcatattaaaataaacatgttaagcaaaacatagatgaacttccaggttcagtaccaacggaggaagagcttagaagtcagcactctcattcttaaacagctggaaaaaatgaaaatcagttctttttcttggactcatcagagcactgaggtggcagtgcaaatccaccccaaaatgtggaaattcagagtcatccagagaaaatcagtcaagatcataacttcttccctggagtaaaacagctgtaaactggctggaacatatcaatggtaactctaattgatgtaggctggtgtggaagtgaagcatgagattgg

SEQ ID NO: 365934 - DNA, 563 bp, Homo sapiens
taattgatttttctatttaatatctaatcaagctaattatattatctttgtctctaaggtaaacactttttaacttattgtcatgtgatacttgtttattttagaggtgctctctctgtctttggaaaattttttcattattcagttttcttaatgtgtaattttctcttccggagacctaaaaaatacyttcaaggaatttacaagaaaatgttatggtcaattttaataaattagtgagccgctttaaatcatttaatgtaacatgctaataagaaaagactactttgaagaactatgatgctagctaggtttgggtagaggcggatctgaagtttataacgaaaggaggaagtaagtagtatctctctgcgtctcctaccttctcaagctcaatggcaaagggcactgtcgtcaacacatacaatacttttgaagagcaaggaaaagagaccaaaccagcaacacatcttttcctgtgcttgttatttgcggtctttggctattccatgctctccctgacacaaacttcctactttcttaaccttagtgtgacaggccca

SEQ ID NO: 365935 - DNA, 593 bp, Homo sapiens
gggttagttttggatacatgtgttaagaaacccacgagtcttaagctccttgctgtaacttacatgagcaagataaaatgtcatgattaaactagttatgatagttytaatcagatcaaatgtttgcttgtttctatgtcctctgacctcttttaccaacacaatatctattatgaaatgctttatttcttactaacatcattttagaaaatttagaatatataagtttttaaaaatttaaatgtcaaactgttatttaagatagtaagaagcaagtgttaacttacttgaattagatctaaaatgccaagttcactttctgaagaatccacacagaagacaaaatataacgttgcataatgtctataaatcagtttgttgtcagatcctccaattaatctaaatgacaaaaaaattgtaatgttattggaaacaaaatgcgaatcattttcattagctcaagcaaactgacaatttgtttaaaaaccacttgtcaaatgaaaggtgacattcaatggcaaagtatttaagtgaacttattcagagactaggtgaattaaggtggctgttttcttcagaaacatcaagtaaaa

SEQ ID NO: 365936 - DNA, 483 bp, Homo sapiens
caaatactaggtcttatttattctttaagtaatttttgtacccattatccatacccagtgtcccgtaaatccccccagttacccttcccagcctctggtggtcatccttttactctctagcttcatgagttcaattgttttaatttttagttgccacaaatgggtgagaaygtgcaaagttagtgtttctgttcctggcttatttcatgtaacataataatgaccagttccttaaacaaatttactagaaaaaacaaaccaccccattaaaaattgggaaaaggacatgaacagatacttttcaaaagaagatatgcttgcagctaataatcatatgaaaaaaagctcaacatcactgatcattagagaaatacaaatcaaaaccacaatgagataccatctcacataagtcaggatggctactattaaacagtcaaaaaataacagatgctggcaagtttacagagaaaaaagagtgcttat

SEQ ID NO: 365937 - DNA, 549 bp, Homo sapiens
ttataaatcacagtcaccgtaagtcaggtgtctgttaaataatggtgtcatttaatatgatacaagtaagaaatagaaactctgaaaatgaaatatacgtaattgaggacataaacttgagggaaaggatgatgctattgcattaaaaaataacatgctccttacaattaaaatactagtaagaaaatcacaaaatgcacacaattagattaattatgttacatggccatccaagaggtacaaaattaaataaggggaatgccttactataattgataaatggtagctgagtgttttacttggtttatcaacaaattataattttatctatttaataacttgaattctatgatactcaggatgtattctcacatatctgtgcttggttcaaaaatgatctaattaaaaatgatttttttttttttgagacacagtcttgctctgttgcccaggctggagtgcaatggcaccatctcaattcactgcaacctgccgcctcctgrcttcaagccattctccctgcctcagcctcctgagcagctgggatta

SEQ ID NO: 365938 - DNA, 615 bp, Homo sapiens
gcagcagcagtaatgtattttgctaaatttgcataattttagataagcttttagaaatggtgtaaaaatgctttgggaaatatgttcctaatcaaaacccaaatgacctatgaattgagtaaggcaagagttggatcatacatgtgtaagactgtcagagcccaagtctggttctgattgactgccctgacactcaggctggaagacaatggcatgatcatagctcactgcagtcttgaactcctggcctcaagcgatcctcccagcttggcctcccaaaggaggaatcttggctgggattgtaggtatgacccactgccgcgaagctgttttaaatgacacatctcagagccaagtctcccagccccagtacctcatccagataaccatctatccaaraaacaactctgatcacttcactctctgcctgaaattcctggtggcttcatcctctgaggatgatttcattcatcctcagaatgaaatcctggttcctctgtggacccttcagtagcctcgatgtaccttcctagccttgtcttctattctccctgccatgggagccccaacagtgccatgctcgttctcgtctccacgtatttacacatgctgtac

SEQ ID NO: 365939 - DNA, 393 bp, Homo sapiens
ttgagtaatctcttctcaatgttaattccctctgtatttgcgcttgattttgcctggttagtttcttatttttgggatttgctctttctccattgattcatgattcatctggctgatgatttgtttgttttactttatttcttcaagaaatgaatttgggatatatttattatttttattgttttaccatttttatcttgattttttaattaatgttttcattttggttctcttttgttctgtatttctaacatcttaggttagatgcttaacacacatttttttctytcccatttatttacataaatattgtggctatacatttttcttcaaaaatagctctccctctatgtgtctgatgagctcattatcattattttctatatattttgc

SEQ ID NO: 365940 - DNA, 590 bp, Homo sapiens
ttgcttttgtcacccaggctagagtgcaatggcgcaatcacggctcaccgcaacctccgcctctcaggtacaagtgattctcctgcctcagcctcctgagtagctgggattataggcacctgccaccacrcccagctaatttttttgtattattaatagagacggggtttcaccatgttggccaggctggtcttgaactcctgacctcaggtgatacacccgccttggcctcccgaagtgaccaaagctttataacagttttatttgcagtgagtacacatagtattaaatggatgcatgattgactaaatctagagtgtttgaataaatgcatcactctaatgcatgatcaaatgtagacaaataaaaagcctctaggtgtcttcagaatctccaaaccagggcaataataggcagttctttcttgttgcattcaccatctccaagcatgacagctaaatgtaaagtagctgagttagtggcatcctttaaaggtaatcatgaaaaatgaccacgcttccggcatcctcaaactttgatgttattctcttgttttcttcaagatgagtcagatccatacatggatttac

SEQ ID NO: 365941 - DNA, 598 bp, Homo sapiens
tggccctgcagcctccacagcctggcccctcccttcccttgcatggattctgagctctgcagatgctgggctcctcacagggccctgattgtgcttggccattcctctcctcactgttgttaagtctgttctatctccatctggggcatgccagcactgtcacctggccagtgcctaggtgtcacccacagaaagtctttgatagcccacgagccyatcccaggagctcacattcgagctctcagagcagtcataattctcctctcacctgaataacactggactctctttcctgactccatctaccctgggagctccgtgagggaaggaactttgtctttgatctcgggcacatagcagatactgcttactggtcagacataatataaaatattttttgttgactctcccagaacaaaaatacatgtttccctttttcaaagatagcatgatccataatagaaacagctttaattttggagccaggaagacttgagctccaatcccagttctgcatgaattggttgtatgaattttagtaagtgatttagcttctctggccatctgtttacttatcggtaaaagaggaccaataatg

SEQ ID NO: 365942 - DNA, 500 bp, Homo sapiens
agttaattattgtttcaaaaayttataatatgcaacttccaaaacaactctttctcttgaaaatatactcctcgcaacatggatggagctggaggccattatccttagcaaactaatgcaggaacagaaaactgaataccacgtgttctcacttatcagtgggagctaaatgatgagaacacatggacacatagagggaaacaacacacactggggcctctcagagggtggaggttgagaggaaggagaggatcaggaaaaataactaatgggtactaggccaggtgatgaaataatctgcacaacaaacccgcatggcccatgtttacctatgtaacaaaccaaaaaaaaaagaaagaaaacataccctcatctgtttgttctttgagtctcagaataagctcacttgtgttaaatccctggtggatgtgaggttagtttttatctaattggtctcaacacctccactctggctgtaagatttttatcctttttccatc

SEQ ID NO: 365943 - DNA, 583 bp, Homo sapiens
catttgtgaaactgttttcttttctgtatagggccgaattaaacaaacatatcatgtcagttttgtctgggaagtgcaaatattagctagagaagtttgtataggtgaactatttctttttaaattaatttttgtcttcagtataaaaagaaaaaatagcattatctacttaaagtagtcatgaagggtctactttgtaaatatatttttatatattactatagtatagataatatataaatttatgttgtaaattgtgtgtatatataggagtgtgtgtatgtacaggtatatatatcataatgtaaaagccaataatttaaaactgggtgagaaaataaaatgccacatagaaatcattgtaagagtaaagatttgtagcraatttttttagaacagctggcagagtgagcatgaacctgcctgtcattgtgttgtatgtctgtgtctgcatgaacaacttctatttcagttttgcaccagcaactcctaattattctgtcccttcaagaataagctattacaatctcagtgtttgccagtaactttaatggtttttttcttaatagcagtggatctgaaa

SEQ ID NO: 365944 - DNA, 429 bp, Homo sapiens
cagactacaaaacaatagctcacctgcccygttgcttccagatggtcttaaattaaactaaagtcagttgggcctgggtaatgattttgagagaagcatcaccaagaccctgcagacaagcatgacattgctgcagataagctgaggggacagaagcagggagggtatggtggctattaactgtggggtgccccagggcttggcgagatggccttgctcccactgtgcatgaaccctggggtcagggactgaaggtttctctctccccagccagtgcttgggagcacccaatcctctgattcaatccagagcaccttacccagggtgttcccagtgggacacagagctagaagcacgagagcaacctctatttccttctcaatatggaaaggaaaatgtgagggaatagcaaacatgttaaggttagaa

SEQ ID NO: 365945 - DNA, 551 bp, Homo sapiens
ccactacacacaaaccaatgaagcactgggtttttaaatccaaacaattcaagcaattctcatgcttcagcccccctgtagctggattacaggtgagcgccaccacacccggctaatttttgtatttttagcagagacagggattcaccatgttggccaggctggtctcgaactcatgaactcaggtgagcctcccgcctcagcctcccaacgtactgcaattacaggcatgagccaccatgcccagccacacctgacttttgagaaggagtcactcakgggtgaagagaggtggtaaaaggatccaggaagccatgcagagcccccagccctggcgtccatcacctgatccccgagcctaggatacccagcagcccagagctgcacgagctgcattcctttctctggttaacaaaagggatctgagtgtaaggggccacaccaggaaattccagcctaggacagggttttccttctcactctctccaggttcacaggggttacaggtgccagatctggcttatgcctctgggaataaagcaagcgatccg

SEQ ID NO: 365946 - DNA, 471 bp, Homo sapiens
tgtgtgtgtgtgtgtgtgtgtgtgtgtgtgtgtgtgtgtgacagagtctcattctgtcgctcaggctggagtrcagtggtgtgatctcggctcactgcaacctccgcctcccagcttcaaatggttctctgcctcagcctcccgagtagcttggattacaggcgcccgctgccatgcctggctaatttttgtatttttagtagagacagggtttcaccatcttggccaggctggtcttgaactcctgaccccgtgatccacctgcctcggcctcccaaagtactgggattatttatacgcatgagccaccgtgcccagccgtcattcttatattattatttcctaggtgtctttcctgaagactatcttctggtctcgaaatggacatgatggatccatggatgtacagcagagagcctggaggtccaaccgcagtagacagaaaggtatggctctgttggagtccccata

SEQ ID NO: 365947 - DNA, 471 bp, Homo sapiens
tgtgtgtgtgtgtgtgtgtgtgtgtgtgtgtgtgtgtgtgacagagtctcattctgtcgctcaggctggagtgcagtggtgtgatctcggctcactgcaacctccgcctcccagcttcaaatggttctctgcctcagcctcccgagtagcttggattacaggcgcccgctgccatgcctggctaatttttgtatttttagtagagacagggtttcaccatcttggccaggctggtcttgaactcctgaccccgtgatccacctgcctcggcctcccaaagtactgggattatttatacgcatgagccaccgtgcccagccgtcattcttatattattatttcctaggtgtctttcctgaagactatcttctggtctcgaaatggacatgatggatccayggatgtacagcagagagcctggaggtccaaccgcagtagacagaaaggtatggctctgttggagtccccata

SEQ ID NO: 365948 - DNA, 640 bp, Homo sapiens
cctggagtttacttctactggattgcgccagtggtgtgcttgtcccttaagctgattgtgtagatttcttcctggcttcaagttcaaggatgtcatgttggtagctcaacatcagccatagtgggaatatttaggccatagaaattggcaattgctgaaaataaggcttttattatttacagagccagttgtcaaacatttgtcagcacacctgtttgtacccaacttttaagatttaccagaaaaatgggcttatgccattcataggtggcttaggtactagaagtgaagttcaatctcaatcaaattacacatctaaaaaggaggtaagatggtgacccaaaatatattcagggcactcttaccaaggaagaggggtaatggatgctagccctaaacaacagatactttattttccacagaaggaaaaaatgctggctctgtattttygatgaagcagctgagactcaagtgctactcaggctttcagtggaggaagtgctagatctgacactagaacccaattcttctgcatgtcagtttcattgttctttcttctacacacttcactattcttacctgacctctccagggtctgcctaacatggagattgccaagcctggggatgatatgagtcat

SEQ ID NO: 365949 - DNA, 575 bp, Homo sapiens
gtccacccaagcctggcaccaagtatgctgctccaaggaggagcccgattttgggttaggagtgagaacactaaacgtgattaatgagcagtaggactgccctcgtgcattagattagagtacagacgccaggagggaagcacagcagtggctgtagggcaccaaccccgcaaccgcactggacccaagaggcgtccacgctcacacccactaacctaacttcattttttttctgaaacaccaagaactaactacataggctatgtactggaaagaaacatactagaacaagtgttttacattaagactttgtatcaggagcatttaaaagatgctgagatgcgctctttcctctaagaatatgtggtgttcatatgaaaacataaacaattagcaagggaaattagactcgtccatagcaatgaagtcctgaattacactagaggctaatataaagaaaatgcaaacacttttccagtccactgragctttatagtttgctcagtattattttctaaaaacatatgttcaaagtctcaataacattgccaagtgcctttagtagagtgcagggc

SEQ ID NO: 365950 - DNA, 515 bp, Homo sapiens
actctgaaaacgttaaaggcgatcatcgctgctaaaagccccttggggccaaaggcagagacagatggatgaggaagcagcagcagattacagtggctgattcacagcagcaggtgttgaacttggactcagctttggtttttagccagttgcttacctttctgtgttctcttattaattttaaaagctgtgaagttgttttgagtcttgagagttgtcaaattccatctaatttattatagtttcttgatttcatcagacactatataatgatatattcattcttcaatgctaaataatagtcacgtacatgttgcattctgatctttttgtagacatatgattcttattgttcatttkctgaattcttcctcattcatcaagatcaattatttttgcttatagataatagtaattattaaaacagcataaaacaaaaatgatcaaatgatcattcagtgactgctcaatactcctcaggcacttggctaagcactttgatttggtcacatcac

SEQ ID NO: 365951 - DNA, 593 bp, Homo sapiens
aaaggacgctgttcttcaaattgggccaaaagtatatgaattaatttagcaatatacttctcacattttagaatagaagtatttttcgatttagcatttgtggttgtatacttatatattcattcaaaatagacgtgatctccattgttttgtgtacttctttttcctttcttttttttttttttgagatggagtctcactctgttgcacaaataagagccccaataacacaaaaagccgaatttaaatagctaataacaattttcaatgtcactgaatgtttcarttctgaggaagacttaatagattgggtttctttcaacagggcaagggaggtgacttgaggccttggttaaatggacaggaaagaatagttcctgatatcagtgtagttggaatctcattactattcaaggctcttgctgtccctttgttctctgtactttctaaggctccaggcattttttgggggtttcattttcatttcattaattttttgatttctttcccctcagcctggagacttaaataaaattttgcctcggtcattcaaaagcaaagggcaagctcctctcttcaatagaagagtagga

SEQ ID NO: 365952 - DNA, 593 bp, Homo sapiens
aaaggacgctgttcttcaaattgggccaaaagtatatgaattaatttagcaatatacttctcacattttagaatagaagtatttttcgatttagcatttgtggttgtatacttatatattcattcaaaatagacgtgatctccattgttttgtgtacttctttttcctttcttttttttttttttgagatggagtctcactctgttgcacaaataagagccccaataacacaaaaagccgaatttaaatagctaataacaattttcaatgtcactgaatgtttcagttctgaggaagacttaatagattgggtttctttcaacagggcaagggaggtgacttgaggccttggttaaatggacaggaaagaatagttcctgatatcagtgtagttggaatctcattactattcaaggctcttgctgtccctttgttctctgtactttctaaggctccaggcattttttgggggtttcattttcatttcattaattttttgatttctttcccctcagcctggagacttaaataaaattttgcctyggtcattcaaaagcaaagggcaagctcctctcttcaatagaagagtagga

SEQ ID NO: 365953 - DNA, 439 bp, Homo sapiens
catctcaaaacaaaaaaaaaaaagaaaagaaaagaaaattcacggtgtgaatagttaggttttattgttttattggtttatccctaatgcgtcagggatatataaataatgcrtcagtatatgtaaactgttgacttttgcttttttaaggaaaaaccactagttgaatttttccactgatcagtttttaaaatagtgttgtttgtttctctgtaatccttcaaactgataaatgagttttgtttttcagaattatcatgaatctgtgaattgaaacacctatgtgtttcaggctattgaatgtactgactcaatgcttaaattaccctaacttctgctagtagtaccatatgcaatttgactccacatgtacctattttctttgaaagtgtctgtgctctgatctccatcattttgtgtatttttttttttttttttt

SEQ ID NO: 365954 - DNA, 568 bp, Homo sapiens
tccttacggctccttgcctcttttcattttactgtattttccggatatcattttacagtaatttatagatttattctgaattattttatcctgtttcatgatactgtggatactgtgatgtgtagttgtrcagtattttattgaaagtgtcctctattgaagaaaatttgttttacctcagtcttttgctatcacaaatagtgctgaagtaaatggtcttgtgcatatcttttaaatattttttctaagtatcttccagtaaattcctggaaatgggatttctagatcaaagagtaaatacacattttattttgctagatatcaccagattctcctccacaggagcttgtttcattttgcatttccactgtcaatgcacaagacttcagctgggcttttgaccacagatattcacaggtcaagtcttcggtgaatatctgaagggtagatgaactatgcattgcctgaaagaaaatgcatgtcacatgtgaacttcaaaaacacagatccttcaagactcagttccagttgtatcatctcctagatttaatatttatgatagctatcc

SEQ ID NO: 365955 - DNA, 568 bp, Homo sapiens
tccttacggctccttgcctcttttcattttactgtattttccggatatcattttacagtaatttatagatttattctgaattattttatcctgtttcatgatactgtggatactgtgatgtgtagttgtgcagtattttattgaaagtgtcctctattgaagaaaatttgttttacctcagtcttttgctatcacaaatagtgctgaagtaaatggtcttgtgcatatcttttaaatattttttctaagtatcttccagtaaattcctggaaatgggatttctagatcaaagagtaaatacacattttattttgctagatatcaccagattctcctccacaggagcttgtttcattttgcatttccactgtcaatgcacaagacttcagctgggcttttgaccacagatattcacaggtcaagtcttcggtgaatatctgaagggtagatgaactatgcattgcctgaaagaaaatgcatgtcacrtgtgaacttcaaaaacacagatccttcaagactcagttccagttgtatcatctcctagatttaatatttatgatagctatcc

SEQ ID NO: 365956 - DNA, 640 bp, Homo sapiens
tgtcttcaaatgacttggttaatatttttttgcattttcctatcttaattccaatatatttgaaattataagcctgaaagaggaaaaaaaaaaacctaaaaactaaagcaatctcttcttgccttgttttgtagagactacatgtgatttcctaaccattgaaatgcattggccatattctagcatccttgggtatgaggtctacatacagtttgtcgcatctgcttattgtttactaaaatacttagagattgatttgcttgcagtaataaggctttagagatgaaagataaattttaaaaatataaaaataggaaaatgaaacatacgtaagaataaagacaagagaaaataattcttaattaactcaacacatagtaatttaatactatttgccaaatactgttgtaagttctcagagtacagtagtcaataaaacacacaaagtasctaccttcagaaaatttacagactcacggtgggaaggtttagtaagaaaataagtaagcagaactcaagtatgttagatggttacatgtacattggcaaacagtaagcagatgaaagaggagaaagacttttggaggcagacacgtggaaggtggggacaatgtgacatttgatctgatactcaaataag

SEQ ID NO: 365957 - DNA, 569 bp, Homo sapiens
aattctccaattgcacacgtacgcatacccagagcagcctaagaaactgaattgaccaggcccccagagttgccctgtgcttctcccaaccagtgtgtccatctcagggcgacaataatccatagcctggtatctagtaccatggatgagttttggttacttttgaaatttatgtaaatgaaataatacaatatgcattctttttgtgtctggtttctttcatttaaccttatgtttgaaaatcaccttttgaagttaaaaaaaaactttatataatacattgaaatgatttttaaacrttcaaataggataaaaagattacagtgaaaaactcttctgtctcccaacccagtcctctacctcccttctctgaagataaccaatattaacaatttcttgatcatctttggaaagaaattttaggcacaaatagacctctgaatgtgttatctttcttcccctgcacataaatggtggcacatactacacatagaagaaaagtccttgggagatgtacttcctaaatatctcctgagtcctactgtttgttcatttctattattccactc

SEQ ID NO: 365958 - DNA, 577 bp, Homo sapiens
tggacgcttgactatgtattcccaaattcttttttttttaattttattattattatattttaagttttagggtacatgtgcacaacgtgcaggttagttacatatgtatacatgtgccatgttggtgtgctgcacccattaactcgtcatttaacattaggtatatctcctaatgctatccctcccctctcyccccaccccacaacagtccccggtgtgtgatgttccccttcctattcccaaattctttagcaagttgttctctggacttaatcccagacttagagttgtttataaataccttgatgatagtgtgtgattggaagaaggtgtaagtggtaagacactgtctggctactctgcttggaatctcctcttcaggatattcttggccttggcttgattctaaggcctcctcaggtccaggtctttgctggaatcagcagctccctcttcaattctgaaaccatatctggattgtagaccagattcttttctgtgttgatttctaaagcaagttttcattcgttagcataacctgggtaaagttttttgttaaatgaagatttgcagctga

SEQ ID NO: 365959 - DNA, 506 bp, Homo sapiens
tccaggtctttgctggaatcagcagctccctcttcaattctgaaaccatatctggattgtagaccagattcttttctgtgttgatttctaaagcaagttttcattcgttagcataacctgggtaaagttttttgttaaatgaagatttgcagctgatctgtgaagttggtgctgctgcacctataattttttgctatgatctcctttgaagagctatccttaactagtccatataggaaaagtcttggtacctatggattcaactaggcatcttctggctcagtgttcatctgtatgcacagttatgtgtaagcactaggagctgagcctgaaaagtacctatgaggcaagattaactttcttgggtatttgttggaatgtcggaaaaagtcttgagtgrttcacatgaaaactgttaatttagcaagaacacaatttagagaggggaaaacctagctctgctcactgacgcatgtgcaagatgagatgctggcagtggaattgtg

SEQ ID NO: 365960 - DNA, 534 bp, Homo sapiens
taaaagaagataatgaaataatatctttgtagtgataaaaataatgttttaaactttcgacacaattctmtatctaaaaaatattttttttcaaacattagggtgaaatacagataatttaagataaataaaagtatagatactttgtcaccaatagatatgcactgtaagaaatgttaaaggatgtcttcaggcaaaagataaatgatacccaagcaaaagagaaagatggaaaattgaatctacaggaaggaataaggtgcactagaaatcatttttaaaatatataaatatttttaaaaatatttgtcaacttataatttacttaaaatacaaccaactatttaaagcaaaaatataatttataatatttagaagtgaagggtgtgatgacaattgcacgaaggactggaggtcacacatacaactacagagtggtagcatcattactttgcagtgtggagtatatgagtgagaagcaagaaacaataagtggtaaggaaagtaggaaatgagcagggctgggggtgggga

SEQ ID NO: 365961 - DNA, 617 bp, Homo sapiens
aattctcctgttctagcctcccgagtggctgggactacaggtgcccaccattaagccyggctaatttttgtatttttaatagagatgggatttcaccatattggccaggctggtcttgagctcctcacctcaaatgatgcacccaactcagcctcccaaagtgttgggattacaggaatcagccaccgtgcccggctaaagtatgggtttaactatgttttttttttttttttttttttttttggagacggagtcttgctctgtcacccaggctggagtgctggagtgcagtgatgcgatctcagctcactgcaacctccgcctcccgggtttaagcgattctcttgcctcaacctcccgagtggctgggattacagacgcacgtcaccatgcccagctaattattttcgtatttttggtagagacgggatttcaccatgttggccaggatgggctccatctcttgacttcgtgatccgcccacctcagcctcccaaaatgctgggattacaggtgtgaaccatcgcacccggccggttttagcctttaaacagacctttaaaatgttcatcaattggcgaataaacaaactgtgatatatctgaacaatgaaatgc

SEQ ID NO: 365962 - DNA, 617 bp, Homo sapiens
aattctcctgttctagcctcccgagtggctgggactacaggtgcccaccattaagcctggctaatttttgtatttttaatagagatgggattwcaccatattggccaggctggtcttgagctcctcacctcaaatgatgcacccaactcagcctcccaaagtgttgggattacaggaatcagccaccgtgcccggctaaagtatgggtttaactatgttttttttttttttttttttttttttggagacggagtcttgctctgtcacccaggctggagtgctggagtgcagtgatgcgatctcagctcactgcaacctccgcctcccgggtttaagcgattctcttgcctcaacctcccgagtggctgggattacagacgcacgtcaccatgcccagctaattattttcgtatttttggtagagacgggatttcaccatgttggccaggatgggctccatctcttgacttcgtgatccgcccacctcagcctcccaaaatgctgggattacaggtgtgaaccatcgcacccggccggttttagcctttaaacagacctttaaaatgttcatcaattggcgaataaacaaactgtgatatatctgaacaatgaaatgc

SEQ ID NO: 365963 - DNA, 617 bp, Homo sapiens
aattctcctgttctagcctcccgagtggctgggactacaggtgcccaccattaagcctggctaatttttgtatttttaatagagatgggatttcaccatattggccaggctggtcttgagctcctcacctcaaatgatgcacccaactcagcctcccaaagtgttgggattacaggaatsagccaccgtgcccggctaaagtatgggtttaactatgttttttttttttttttttttttttttggagacggagtcttgctctgtcacccaggctggagtgctggagtgcagtgatgcgatctcagctcactgcaacctccgcctcccgggtttaagcgattctcttgcctcaacctcccgagtggctgggattacagacgcacgtcaccatgcccagctaattattttcgtatttttggtagagacgggatttcaccatgttggccaggatgggctccatctcttgacttcgtgatccgcccacctcagcctcccaaaatgctgggattacaggtgtgaaccatcgcacccggccggttttagcctttaaacagacctttaaaatgttcatcaattggcgaataaacaaactgtgatatatctgaacaatgaaatgc

SEQ ID NO: 365964 - DNA, 601 bp, Homo sapiens
ccctcactatcagaaaaacagcatgggggaaactgcctccatgatccaatcacycccctccctcgacacatggggattacacttccctcccttgaaacgtggggattgcaggtccctccctcaatacctgcagattagatttgggtggtgacacagagccaaactctatcagtccttttaaccataaccatagatagggcccaaatgctccttatttcctgttcccttttcttctttcagtttctgctcctcttcacttcttcaaagactctaacttaacctcgaacctattatttataattgagatggttaggattcacctggttccaatttggatggcaataggtaatcttcagtgaggagcgtctttaagcctctgctttgttaataagaatggttaatgggcatagaaagaatgaataagacctattatttgatggtacaatagggtgactacagtcaataaactgtacatttttaaaataacttaacgagtgtaattggattgtttgtaactcgaaggataaatgcttgaggggatgagtacatatacatatatactatatatatagtatatagtatatatatatagtgtatatac

SEQ ID NO: 365965 - DNA, 588 bp, Homo sapiens
aaaatgatccactttgactttatgtctcacatacaggtcactctgatgtaagaggtgggctcccacagctttgggcagcttcactgctgtggctttgctgctttcacaggctggtgttgagtgtctgtggcttttccaggcacacagtagatctaccattctggggctgagaggagggtggctcttttctcacaactcagctaggcagtgccacagtgagcactctgtgtgggggcagtgccgcagtgggcactatgtgtgggggctctgactctgcatttcccttccacactgccctagtagaggctctcaatgagggctcagctgctggagcaaacttctgcctagacatccaggcatttccatacatcctatgaaatctaggtagaggttyccaaacctcaattcttttttttttttagttattatactttaatttctggggtacatgtgcaggtttgttacacaggtgtacatgtgccaggtaggtttgctgcacccatcaacttgtcatttacattaggtatttctcctaatgctatccatcccccagccccccagcccccaacaggccccagtgtgtgatgt

SEQ ID NO: 365966 - DNA, 449 bp, Homo sapiens
tgaaattgcttatcaccttaaggagattttgggctgagattatggggctttctaaatatacaatcatgacatctccaaacagaracaatttgacttcctcttttcctaattgaataccctttatttctttctcctgcctgattgccctggccagaacttccaatacgatgttgaataggactggtgagagaggtttacttgactcacatttccgtgtagctgaggaggcctcaggaaacttacaatcatggtggaaggggaagtaaacacatccttcttcacatggcagcaggagagagaagtgctgaggaaagggggaaaagccccttataaaaccatcgtatctcatgaaaactcattcaatatcataaaacagcctggggctgttttatgcccccatgattcaattacctcccactgagtttctcccgtgacatgtggggattatg

SEQ ID NO: 365967 - DNA, 556 bp, Homo sapiens
aattttcttcagttaagattgtaccagggcyccatcttcttaaccagcaaggtagggtggcctcaattcaacatcagctgaattcaaggctgttttcagaaactatagtgttacttggggcagaacattctcaaaagcaacaacaaaaactttctcaggaaagtttcatggaaagaagaatgtaattaacatctggtggaagttaattaaggatctctggtgtaaaggcaatgaggtgatatggaaattacattgggtcgaggaggcagagacctggtcctaatgtagtgtctgccatcaaccagctgtgtgacatggattaaatcacttgtcctcaggaaacctcaggtcctaatttataaataaagctctttgtgcttaaagtgtattttgagaccctgaagagggaagcaacaagcaacattacatttaagtagtacattactttacaaatgtggatggttatatgtattttgaaccaggcactttggagtattagtatagaatgctttgggtagttagacttttgtatgctgattgaacctcataaaatgcc

SEQ ID NO: 365968 - DNA, 587 bp, Homo sapiens
taagagaatagagttaatgacacgatgtctaaatattttaagtgtgttgctcaaaaacaaataacaaatgaaatattagaagtcaggttacccaagccgagggtgcccacatgacacttctcgagagactgaggaattttcttcagttaagattgtaccagggctccatcttcttaaccagcaaggtagggtggcctcaattcaacatcagctgaattcaaggctgttttcagaaactatagtgttacttggggcagaacattctcaaaagcaacaacaaaaactttctcaggaaagtttcatggaaagaagaatgtaattaacatctggtggaagttaattaaggatctctggtgtaaaggcaatgaggtgatayggaaattacattgggtcgaggaggcagagacctggtcctaatgtagtgtctgccatcaaccagctgtgtgacatggattaaatcacttgtcctcaggaaacctcaggtcctaatttataaataaagctctttgtgcttaaagtgtattttgagaccctgaagagggaagcaacaagcaacattacatttaagtagtacattactttacaaa

SEQ ID NO: 365969 - DNA, 617 bp, Homo sapiens
actataagatacattttgccagaatgaactccattaaaattaattttcaatgagtagaaagatgaggatgggtttatttttagatttaaaggaagcagtcagactccaaatctcaaaataatatcactgtaaaattggaatttctataatgaaaacatttgctaagatttgcatttaattcagtatttcaatagcaggttatatggtaatcaaaattccacaggaaatgatgtgaatttcactaaactggtagtggaaacttttggagaggtgacgtctctgctttgttcattattctgcctccaatgttttgcacaatggctgtcttgttataagaacttagctgaatccaagtaagtaattgatatattattaataattgatcattaatcatcatctttaactctagtccagcagctccctggcttctgatcatttttgttattcctactgggatcattccttgggctacattcatggtcctrttagattttcccttcactctgatcctcagaattttctaggacagaggttttatttaatcctttggggctttctagttctaaactttgaatgaccatttatgcctctggaaatatcagcctaatattagtacc

SEQ ID NO: 365970 - DNA, 560 bp, Homo sapiens
gaggcaaacaaaccaaacccttcattgttcagtacaggaaatagaaacatccttgctatggaggagaaagttagtataactaaaatatctgatcctaagtttcaactcacgtaattaaaatgtgaggatttacttgttctcactgtcaaaagtattagaatgaaatgactatccagactgttaaaaaaaaaattatgagtgatgactgaatatttgtaaaatacaatgcactgtatacatttgttcttaatcatagatctaataattaatttctacctctaatactacttaaagtaagaaattttgttttggtgtattttataatcagaatttcagctttgagtgtgatttgtaactacaaagaagaaattacgtttaggctgatttttattgtaatacaagttgagtagcctttatcagaaatgtgtgggaccagaagagtttcagatttcaatttgttttcagattttggaatatttgcataaacataataaaagatgttgggcacrggacccaagtctaaacatggaatttgtttgttttgtatataccttatacat

SEQ ID NO: 365971 - DNA, 575 bp, Homo sapiens
ttgtttggaaagatatagccattgtatattaactattatrtaacattaagatgaatatatttgcatcaaagaaaaatattttttaaaatggaaatgttagataggttatattggtatagattctccagagaaatggaatcaataggtagatttggaaattggttaatgtaatcaaaaaagtttcatcatctgctttttccaagctggagaatcaggtaagccagtgcaatttcgtataagtccaaagacctgagaactgggttgggccgctggtttaagtcccagatttcaaaagcttgaaaaccaggatctctgttatcttggggcaggagaagatggatgcaccagctaaagaggagggaataaatttacttttcctccacctttttgtcctaagagtgcctcagtggaatctatgatgtctgcctacattggtgagggtgatcttctttactcagtcggccaattcaaatgctaatctcttttggaaacaccctcacagatacacctggaaataatgttttgttagctatctagatatcccttacccctgtcaaatttatatgtatattaac

SEQ ID NO: 365972 - DNA, 622 bp, Homo sapiens
agattctccagagaaatggaatcaataggtagatttggaaattggttaatgtaatcaaaaaagtttcatcatctgctttttccaagctggagaatcaggtaagccagtgcaatttcgtataagtccaaagacctgagaactgggttgggccgctggtttaagtcccagatttcaaaagcttgaaaaccaggatctctgttatcttggggcaggagaagatggatgcaccagctaaagaggagggaataaatttacttttcctccacctttttgtcctaagagtgcctcagtggaatctatgatgtctgcctayattggtgagggtgatcttctttactcagtcggccaattcaaatgctaatctcttttggaaacaccctcacagatacacctggaaataatgttttgttagctatctagatatcccttacccctgtcaaatttatatgtatattaaccatctgaagtctactccttcttaacttggcacccatatccatttccttaaaccatatctaatttccaaataaagacaataacagggttataattccacctctcatgatagaactgtcctgtgtacaactcaaaacacagtaacccctttccagaaagagcagtc

SEQ ID NO: 365973 - DNA, 588 bp, Homo sapiens
actctctgtttttttatgttaactggattgcccacttataaatccaaacaaggctgtgcagatgtcagctcagccaatagctaacctctcctttttgtccaactattaatagaatgagaattgagtcacatgagtgaactgactgtatgtatatatagaaagtattaaaatagggagcataaggcttattgctaatacttttttgaagccaccagaagctggggcccatctmtgttcatatgtgtgagatttctgcaaataaatccctttttcagttatgagaaataaatatctccttgtttggctggtggttgttacttttcctttggcttttgacaagtttataaatgcagaaactaacatcgtctccaagagaggtaatttgtcaaatattaggattcatatcaaggcagtcctgaaataataaaaatatatactatattcacataagcagtcacataaaaaagctagattttaggcaattgatgctgaaagcattcacagtattttcacgtggtgcatgtagctaccttttctaagacagccttctttgatgaagttggtggcgtcttgcgtttctgctattac

SEQ ID NO: 365974 - DNA, 558 bp, Homo sapiens
gtaaactgtggatattcaacaaaagtgtggtggtctcactaatgatccaagatgtaacagtctctcattgtctgagataatgctaggagttctttgtctcacgtccaagatgattaaggagcatggacacaagggtgagtttggagcaaaagttcaataagcaaaaaagaaagctctccactagtggagagtgggcccaaatgggttgcctactatgaggcyggggtctggggtttttacggactgggaaggggaaggaatgtgcttagtttgagggctgtcttggataaaatgtgattcagcttggccccgggaccaatcaggatgtgaagtgatgattaataggggctacacagcttggcctaagaccttggcccaggaccattcaggagcttaagtgatgattcatagaggccaggctcccagtccaaaaaaaaaaaaaaaggaaagtgcccactggagccctctgtgttcatgcccacaaaaggagacaaaacattttcctaggagcctgctgattatacaaaagacaaagaccaaagacatttctatgtcagg

SEQ ID NO: 365975 - DNA, 558 bp, Homo sapiens
gtaaactgtggatattcaacaaaagtgtggtggtctcactaatgatccaagatgtaacagtctctcattgtctgagataatgctaggagttctttgtctcacgtccaagatgattaaggagcatggacacaagggtgagtttggagcaaaagttcaataagcaaaaaagaaagctctccactagtggagagtgggcccaaatgggttgcctactatgaggctggggtctggggtttttayggactgggaaggggaaggaatgtgcttagtttgagggctgtcttggataaaatgtgattcagcttggccccgggaccaatcaggatgtgaagtgatgattaataggggctacacagcttggcctaagaccttggcccaggaccattcaggagcttaagtgatgattcatagaggccaggctcccagtccaaaaaaaaaaaaaaaggaaagtgcccactggagccctctgtgttcatgcccacaaaaggagacaaaacattttcctaggagcctgctgattatacaaaagacaaagaccaaagacatttctatgtcagg

SEQ ID NO: 365976 - DNA, 590 bp, Homo sapiens
tgggaataaaatatggacatcactctagaaattatggacactaaaaggataataagaaacactacagacaactctacataaatttgacaacttaaaataaataaaccaatttctcaaaaaatatmaactgccataactcactcagtatggaacaaatcacttgaaaagacctataaatgttaagaaaatagaatttctaatttgaagacttgcaaaatagaaatctccaggcccaaattgtttcagtggagaattctaccaaatacttaaagcattaatgccaattctacagaatcttatctaataaaatagaaaaggagagaacatttaagaattcattttctgaaactagcattaccttaatacttgtattagtcagttctcccaatcctataaagaactacctgaggctgggtaatttataaagaaaagaggtttaattggctcacagttcttcaggccatacaggaagcacagctaaggagggactagtccactgtcacattgctataaataactacctgacattgagtaattcatttttaaaaaagtttaattaattcacagttctgaaggctgtacaggaagca

SEQ ID NO: 365977 - DNA, 561 bp, Homo sapiens
ttagactctattctctacttttgtatatattcaaaattattccttataaattactattattaaaagtaaaaacaaaggcaagcttgaggatttttttcttcttacagagaggaaatccttataaggcttcttagattttgttgaggaggaactttgggaatcaagaaagaaaattacaatttgttgatgcttattacagtccagaaatttgtgctaggagattgcatgtgttagctcaaattatgtatgacaattaggtttgagtaaaaaacaaggtggctgctttcaatttaaaatatgcctcaatgtatatctattcccggtatacaagatacaggagcttccatgcacgtggaaaacactgggaagcaagaatgcagcattaactttcacaggatccagaaggtaggctggggtagaaggagcrcaaaataaaccaaaacattccaggtggtgagtatgaggattatgggaaggattagcttttctacttctcattcagctgttgaatagccagattattctgactatgcatatgattgacaagttgctaagcagata

SEQ ID NO: 365978 - DNA, 561 bp, Homo sapiens
ttagactctattctctacttttgtatatattcaaaattattccttataaattactattattaaaagtaaaaacaaaggcaagcttgaggatttttttcttcttacagagaggaaatccttataaggcttcttagattttgttgaggaggaactttgggaatcaagaaagaaaattacaatttgttgatgcttattacagtccagaaatttgtgctaggagattgcatgtgttagctcaaattatgtatgacaattaggtttgagtaaaaaacaaggtggctgctttcaatttaaaatatgcctcaatgtatatctattcccggtatacaagatacaggagcttccatgcacgtggaaaacactgggaagcaagaatgcagcattaactttcacaggatccagaaggtaggctggggtagaaggagcacaaaataaaccaaaacattccaggtggtgagyatgaggattatgggaaggattagcttttctacttctcattcagctgttgaatagccagattattctgactatgcatatgattgacaagttgctaagcagata

SEQ ID NO: 365979 - DNA, 521 bp, Homo sapiens
ctcatctgtataatgggaaaaatttttttttactgtattgtgattgtgagaattaatgtctataatgcatgcaagactcctggcatactaaagtagcatgtctcagataacctagcagagtgtttgtaattaacagaattaatagacttcatatcaaagcstggctctgtcatttaggagctgggagctcttaagcaagttacttttactctctgagcctcagtttctccgcctaaaaatggatctcacaaacctgtctgaaaggctaatatggaataaatgaagtgcttattccgatgtctggcaaataatgctcaatgctggtgagtcgtcctttataggcttttgataataatttactaatattattgttattatattttatacggaattttatgttctgctctttttcaattaatatcagagcagtaacatttaccatgctattaagaatacttcataaacgtccccattaatggaagaagtactatgttgacaggtgcgtatggatgctggaagat

SEQ ID NO: 365980 - DNA, 590 bp, Homo sapiens
tgggaataaaatatggacatcactctagaaattatggacactaaaaggataataagaaacactacagacaactctacataaatttgacaacttaaaataaataaaccaatttctcaaaaaatatcaactgccataactcactcagtatggaacaaatcacttgaaaagacctataaatgttaagaaaatagaatttctaatttgaagacttgcaaaatagaaatctccaggyccaaattgtttcagtggagaattctaccaaatacttaaagcattaatgccaattctacagaatcttatctaataaaatagaaaaggagagaacatttaagaattcattttctgaaactagcattaccttaatacttgtattagtcagttctcccaatcctataaagaactacctgaggctgggtaatttataaagaaaagaggtttaattggctcacagttcttcaggccatacaggaagcacagctaaggagggactagtccactgtcacattgctataaataactacctgacattgagtaattcatttttaaaaaagtttaattaattcacagttctgaaggctgtacaggaagca

SEQ ID NO: 365981 - DNA, 573 bp, Homo sapiens
ctactcagaaaatagtaacaaaagcaaataaaccttaattacgattttgaaattcaaacccaacataatatgccctcaggtcaataatctgttttattccaatgaacttagtaactgcttggtgaaaggataaatttatccttttggttaatttgtttttgaatacagaatttcacagagctactagaatatacctcttgyttttcccagaacagacattctcaaagaggggtctaggaagttttgcctttcaacgacacttgtttgtgaggccaaattttcttcatttatttcaaccaaaaggatatgcaatagactgaacacagaagcagctatgatactccagctgtcttttactgagacattaaaatttgaaaagtataaaacaatgctgcatttctaactccttttttgtagatgttaacgtgttatttatgttaacatgtgctatggtctgaatgtttatgtctctccaaaattcatatgttgaaatcctcacctccaaggtgatggtatttggaggtaataagagagaattaggtgatgaggatagagcatgaatgaatggggtta

SEQ ID NO: 365982 - DNA, 573 bp, Homo sapiens
ctactcagaaaatagtaacaaaagcaaataaaccttaattacgattttgaaattcaaacccaacataatatgccctcaggtcaataatctgttttattccaatgaacttagtaactgcttggtgaaaggataaatttatccttttggttaatttgtttttgaatacagaatttcacagagctactagaatatacctcttgcttttcccagaacagacattctcaaagaggggtctaggaagttttgcctttcaacgacacttgtttgtgaggccaaattttcttcatttatttcaaccaaaaggatatgcaatagactgaacacagaagcagctatgatactccagctgtcttttactgagacattaaaatttgaaaagtataaaacaatgctgcatttctaactccttttttgtagatgttaacrtgttatttatgttaacatgtgctatggtctgaatgtttatgtctctccaaaattcatatgttgaaatcctcacctccaaggtgatggtatttggaggtaataagagagaattaggtgatgaggatagagcatgaatgaatggggtta

SEQ ID NO: 365983 - DNA, 588 bp, Homo sapiens
aactttttgaagccccatctgataacataaaatgagtgaatattctgcaagatttgtgagaaaccatgcaataatttatatgagaataaattttcattttgttttatttgaaccctaagttgtgtcagcaaaattggttttatatctaattgaaatctcacaaacaatgtttacgacttacatagtttttattttatcccacagcattatcactgttaaagccatcacaagtagagaaaaaaggaaaaaggcagatttaagtaatatgacctgccatgctaagaatcctcctattccaaaaaggccagtgacaatgtcaaactttatttgagccctgtgctcctgaaaaacagggacracaggaacagccaagaaatcttcccatcccttttgtgttcctggaagtgcttagtgcaaaggaccccccttttccatatggcttgcataagagtcaaagatgaccccttgtacctatgacaaagccagatatatcgatcctccaaatttccattctttgtctcacaagcaattagctgaatggtttgtctctactaacctatcgggacaaaatgtccagtaactttactt

SEQ ID NO: 365984 - DNA, 588 bp, Homo sapiens
aactttttgaagccccatctgataacataaaatgagtgaatattctgcaagatttgtgagaaaccatgcaataatttatatgagaataaattttcattttgttttatttgaaccctaagttgtgtcagcaaaattggttttatatctaattgaaatctcacaaacaatgtttacgacttacatagtttttattttatcccacagcattatcactgttaaagccatcacaagtagagaaaaaaggaaaaaggcagatttaagtaatatgacctgccatgctaagaatcctcctattccaaaaaggccagtgacaatgtcaaactttatttgagccctgtgctcctgaaaaacagggacaacaggaacagccaagaaatcttcccatcccttttgtgttccyggaagtgcttagtgcaaaggaccccccttttccatatggcttgcataagagtcaaagatgaccccttgtacctatgacaaagccagatatatcgatcctccaaatttccattctttgtctcacaagcaattagctgaatggtttgtctctactaacctatcgggacaaaatgtccagtaactttactt

SEQ ID NO: 365985 - DNA, 515 bp, Homo sapiens
gaattgcagatgtgaacagagaacattagattgaatacaaggcctcctatgcatattcaaacagctttatgtatccttcatgaatcaaaccagagtgactaaatgagaagtcayagcaaatggactgcattgaacaagaggatgcaggcagaatcttccttgtgaaatctcagtaactttcggctattgcaaaatcttcaaggtcaagtcaactaaaggaatttaacaccatgtgtgctataatcatctaaaacattttttcatatgtaggttaatctgtaacctaaagtgtatttgttatcaatacttaaacttatgatgtgctaaatgatgccctaaatttttcatagctttaaggtctaccaagagattttctatttggaaaatgcattttctgccatatattattttcaattcaactataacagacatcaggttaagagaaaaatgaagacttcagtgcaactgttcactggtgtgtgtgtgtgtgcatgcatgcatctgtgtgcatgtgt

SEQ ID NO: 365986 - DNA, 515 bp, Homo sapiens
gaattgcagatgtgaacagagaacattagattgaatacaaggcctcctatgcatattcaaacagctttatgtatccttcatgaatcaaaccagagtgactaaatgagaagtcacagcaaatggactgcattgaacaagaggatgcaggcagaatcttccttgtgaaatctcagtaacttycggctattgcaaaatcttcaaggtcaagtcaactaaaggaatttaacaccatgtgtgctataatcatctaaaacattttttcatatgtaggttaatctgtaacctaaagtgtatttgttatcaatacttaaacttatgatgtgctaaatgatgccctaaatttttcatagctttaaggtctaccaagagattttctatttggaaaatgcattttctgccatatattattttcaattcaactataacagacatcaggttaagagaaaaatgaagacttcagtgcaactgttcactggtgtgtgtgtgtgtgcatgcatgcatctgtgtgcatgtgt

SEQ ID NO: 365987 - DNA, 563 bp, Homo sapiens
cacagtagttactcggtaaacattacatcaaaacactgaaaaatcttgagctaggtgattttaaaggtctggccgttttttgatatgtatgtttctacttgtaccatttatcaggtaaattcatgaaatttgtaccagatcttttttacattttcatttatgttttgttttagaaataaagcacatttttcaaaactgcaaattgatgaaagtgtatgttaatgatgtccatgtttaatgtttcaaagaattttcacattatgacatttcctcttcaaagcaatcctatccttatgaacgatactattgccatttttttcagatgatggaatgggttcattatagggccttaggaaaattcctaaattattctgtgtttcagtgatttctctgtcccccattttactctcccattctgatttctgactgagcacaatgttcaaatgccttttctgcataaaatatacaaaaagatactgttggcagaaaaaaaaawttctgtctaaaacgtgtgccaaatatgaacaataaaaaagaatgcctaattatgtaaagtttactgc

SEQ ID NO: 365988 - DNA, 420 bp, Homo sapiens
tagccataatgcaaaagagaggccatagggactaagaaggaatgtggcagattggaaagtacaccttccaggtgtccaaagtatacagatctgctcagcctccactgactgttgccatgtgggaatgtgggctctgcattgtcagatcattagcaagaaatccagattttgttggtagtctctcagtgttaaacaacaactatgttgctaatttttgtctttatggttatttgttaacaccccgatggctatcattttaygtgccatgtctgggagcttcagctacacaaaaggccattcctttccctgccgtggcagaatgttctgtacagcatgaatcagagtcccagaaggaaacagacagcacactcagaccagggcagctgaggagcacgtattgacaaacatgtggacagggtg

SEQ ID NO: 365989 - DNA, 567 bp, Homo sapiens
tcaattgaggacacagccattctcaagtgacatcagaaggaaggagccagktcccctcaatctctggtcagagatgcccgttagccaagtcccaagagaaacaggccctagaggaggtccactgttgtcatcacacagatcagtcccctgggcagagagtaaggtggagaagggcaagctaagagaggatatgttgaacaaattgtaaactgttgttcaaaaagtgttaaagcactcaacagtgctttgtacctttcaggtggcctgctatttctcattccaaacaggatatttacaaccaaatacaaccatttcaccgaagtgcaaccaaagataaattaatgtatgactttatacaccacaatgtaacaggctgttaagcagcatgatcgaattaaaggtcctgaaaatggcataactaatggcactgtcttgaaaaaaaaaatagtgctaatgcggaggctcatgaaatgtgtatgaactgtataacatattcatgccctattactgagaatttcaaagtgtcttactgctcaagataataggccttgattcaattcagtctga

SEQ ID NO: 365990 - DNA, 612 bp, Homo sapiens
gatatatggataagtcactcaatctcccttggagcctcagattttgttcaagttgactgagcacccacttgaggggtgatcaaggattaacagaagtaatgacaatgacaagcttcccctagaacctctgttcccagtggtgctcccaagggggcaaaaatggctcttggggagcaaaacatccttaccctttttatgtataaagcacagataatgatacaatacacaagcatgcagtatatctgcagtattaaaattttatgaaggctgaaagcagtggctcatgcctgtaatcccagcactttgggacgctgaggcggaaggatcacttgagcccaggagttcaagaccagcctgggcaccatagtgaaaccccatctctacaaagaatacccaaaaaatggtggtggcgtgtgcctatagtcccagctactcgggagactgaggtgggaagatcacctgagcccagggaggtcgaggctgcagtgaaccatgatcataccactgcactccagcytaagtgacaaagcgagaccctgtctcaaaaaaataaacaagtaaaataaaatttcatggggcagtacataaggaaccctcatcttctgccagtgg

SEQ ID NO: 365991 - DNA, 648 bp, Homo sapiens
cacctggtcaggtggagaaagagcactgctctggcggggaggccaccagcctgtgtgagatactctcctggagggggcatttcagcctgagggcctggtcactcaatgacccaactggggattcagggcggcccacttccaccacccccgctgtccccaggctgccccacccagtggcctgggacaggaacatgctgcagrccaggcaagcagcttacagctcagtggcccccgacaagcccagagctcctcaccgcagccacacacctactttctaaagctgccagcaggatggagaagtcttcgtcctctatgagaagagaattgaatgtcaggggcctgtttctagacacccctcttccagctcacaggccctcccgttctcattgagaccgtggcagggtgggagcatgcaggactggcaggggtgaggagaacacaggttggccaggtgcccgtcacaccaaccccaagtgccccaggggtcctgcagacctgtccagctcgtgctgctgaccagcagggctggccgctcacggagacgcgtcaccagcccgctcccagcatcccgctccgtgaaggccgaccgctccgtgactgggtcctcaggttctgagctgaaggagcagaaaaaaagcctgtgagagg

SEQ ID NO: 365992 - DNA, 648 bp, Homo sapiens
cacctggtcaggtggagaaagagcactgctctggcggggaggccaccagcctgtgtgagatactctcctggagggggcatttcagcctgagggcctggtcactcaatgacccaactggggattcagggcggcccacttccaccacccccgctgtccccaggctgccccacccagtggcctgggacaggaacatgctgcaggccaggcaagcagcttacagctcagtggcccccgacaagcccagagctcctcaccgcagccacacacctactttctaaagctgccagcaggatggagaagtcttcgtcctctatgagaagagaattgaatgtcaggggcctgtttctagacacccctcttccagctcacaggccctcccrttctcattgagaccgtggcagggtgggagcatgcaggactggcaggggtgaggagaacacaggttggccaggtgcccgtcacaccaaccccaagtgccccaggggtcctgcagacctgtccagctcgtgctgctgaccagcagggctggccgctcacggagacgcgtcaccagcccgctcccagcatcccgctccgtgaaggccgaccgctccgtgactgggtcctcaggttctgagctgaaggagcagaaaaaaagcctgtgagagg

SEQ ID NO: 365993 - DNA, 648 bp, Homo sapiens
cacctggtcaggtggagaaagagcactgctctggcggggaggccaccagcctgtgtgagatactctcctggagggggcatttcagcctgagggcctggtcactcaatgacccaactggggattcagggcggcccacttccaccacccccgctgtccccaggctgccccacccagtggcctgggacaggaacatgctgcaggccaggcaagcagcttacagctcagtggcccccgacaagcccagagctcctcaccgcagccacacacctactttctaaagctgccagcaggatggagaagtcttcgtcctctatgagaagagaattgaatgtcaggggcctgtttctagacacccctcttccagctcacaggccctcccgttctcattgagacygtggcagggtgggagcatgcaggactggcaggggtgaggagaacacaggttggccaggtgcccgtcacaccaaccccaagtgccccaggggtcctgcagacctgtccagctcgtgctgctgaccagcagggctggccgctcacggagacgcgtcaccagcccgctcccagcatcccgctccgtgaaggccgaccgctccgtgactgggtcctcaggttctgagctgaaggagcagaaaaaaagcctgtgagagg

SEQ ID NO: 365994 - DNA, 588 bp, Homo sapiens
tgtgagccaatgagacaaactgtataattgcccaagattttactctaagagcactggcactgggagtaagaccactaggaaactcagctctgccactttccagctgtaggacttcaggcaaattaattaaataggatggtggtgaagaattaagtgagatactgtatctaacactcagggtacctaggtagagcacagggaagatgaggagctgttaaytgtgatagttatgattttgtatttttttttttttagatttctgagttgaggaatatttgcaagcaggtacagtaattacccaattcagatgtttatagaaaaagaaacacatcttaaaaataaaggtaccacaaaaaacaagaagtagaaaattggaagatggagagatgaaagaaaaatgaagaaatttcagagaaaaatgaaaaaacaaagcagattttaaaaagaaaaagaaaaaaaggtaggaaatacaaattaagaaatttcagagaaaaatgaaaaaacaaagcagatttttttaaaaaaagaaaaaaggtaggaaatacaaatctaagaggagggtttgaattcctaatcctgttctttttc

SEQ ID NO: 365995 - DNA, 623 bp, Homo sapiens
ctgtgtggcaactcaacacgaaagccagctgagcctcctagtaaccaaaacaaaaagagaaacatcacacagtttcaaaagggaggttactggcttatcaagagagaaaaaaaatgtcttggtaagaagctacggagaaacataaggaataggtcaatgtgtagataagagatactaatcataatattaacatatagatatttatgtacctatgtaagactttctcttccactaaaacagatgaagtaatttataatcttttgaattaagcaatcaatagaataatatctgcagaaactcttatctttctggactgtttaaaggtacaaatctagaaccaaagtcgcatatgtgatttaaaacaagcagaaaatacatattggcaaagggctttcttacatgaggtattactgctctagaaaaytgtctacattaatttataactgtaaaaggatctctggcaattacatttatcctattctcttatttttcaggtgtcttttggggatacatgttataaatcttttttatttctctatataacccttctttcttttgggtaacctgatagtaataactaagccacaggtgaaaggtttctcaaggtgtggctattgtgttct

SEQ ID NO: 365996 - DNA, 556 bp, Homo sapiens
tgagagatcatgaacattttactgatgacaaaagtaaggttcaaaaaggtagagtgctttttttagctcacacagttattaggtaacagagccatgcaaaccaaatttctgaatgttttaccctacatccagggacaaacatcacgctaattactgtgcagtattcaaaagaattaaactatggtcgtgagacctcagaggaggttgtaagctagttatggaaagaagccagatacacacaaatgattagcacataatacactggagtattggcaaatattaaatgatggaggtgagtcagctgtcctccagggctgaagaaaakgggtatattgagattagaatggtggggaaggctattttatagggtggaccttcgactgagtcttaaaagattgataaagccattaagcaggaagaggggaagcagaagctcgatgtataatgtgtcttgttatagtcagtctggaaatgtcaggctaagaataattccacaaagggtgcatctccaattttcatttagtacgtagtttgaggccaagaggagttcactaca

SEQ ID NO: 365997 - DNA, 554 bp, Homo sapiens
aaaccaataattttctaagtattcagagtggtgtgtggcccatgatcrtggcacattgagtagctgtggtggaagcactgaatttctgccatgtcccacctgtcagccgtcttaggccttaattgctaagtgtcctgcttgccccagtggggatggggtgccaatctgaaccctggttagctctgttcaggggcaccttcctggcactatttattttgggcctgtagaacccagagtttaagccacaaactgacatttcagggggtaaaatccccactccttcagaaacagatggtaccacagctgcctggggccttgggccccttgccaaatggtgatggccttgcctctgaaaagcaacaggcttttccacccaagactttgggaattcttaatgtttgttttcctaaaccagcaggacctcattcccaagcatgtgcagaatccagctgtttggcaggaagagcacgtcctgtggctgagcttttactcctgctgccacccttcttaccttgagctggagagaaggtgagtcatttcatacctcatcattt

SEQ ID NO: 365998 - DNA, 554 bp, Homo sapiens
aaaccaataattttctaagtattcagagtggtgtgtggcccatgatcatggcacattgagtagctgtggtggaagcactgaatttctgccatgtcccacctgtcagccgtcttaggccttaattgctaagwgtcctgcttgccccagtggggatggggtgccaatctgaaccctggttagctctgttcaggggcaccttcctggcactatttattttgggcctgtagaacccagagtttaagccacaaactgacatttcagggggtaaaatccccactccttcagaaacagatggtaccacagctgcctggggccttgggccccttgccaaatggtgatggccttgcctctgaaaagcaacaggcttttccacccaagactttgggaattcttaatgtttgttttcctaaaccagcaggacctcattcccaagcatgtgcagaatccagctgtttggcaggaagagcacgtcctgtggctgagcttttactcctgctgccacccttcttaccttgagctggagagaaggtgagtcatttcatacctcatcattt

SEQ ID NO: 365999 - DNA, 561 bp, Homo sapiens
agctattacagactagtcagcacaagccaggcaccattttaagttcttcacatgttttaagtgatttgctcctaccagcagactctattattatgtcaattcacagttgaggagactgagccacagaaaggttgcgtcacccacatataagtgacgcagctgggatttgcactcatgcatgctgactgcatcatggtgccctcaacaaccaccctatgctactgtgtcatgtaaaacccaaggacactgaaaatctggcacagagacagcagtgggaaggacactgagctagcagtcaatccctctgcatagctctgtgacctctcagcctcaacatgccatctcacccatcagaggcacagctgcactaactaaccaaggtcccttctagctctgaattgtgacagacagttctacaaaggaagaaatggaggctcagagaggttgagcaacctgcctaggtctcacagccagtaggtggtgaagtgggcagttaaacaagactgccctgaccctgaaccccatgctytttgcacagcctgccttctggaaccctctctt

SEQ ID NO: 366000 - DNA, 577 bp, Homo sapiens
cacagcctgcagaagcttaagagaatcgcttgaaccccgaaggcagaggatgcagtgagccaagactgcaccacggcactccagcctgggcaactgagactctgtctcaaagaaagaaaagaaaggaaacagcaaactggccccagtgtgtggttcacacaccttgagcagcactgcccagcacatccccacaaaaaaccctcaggcttggtctgcccagtgtcactgacaggacactcgttgacccctgagagctccctgttgtgacttggctctgaatctttggaaattcctcccaagctcaggctgaatttgttcctctttcaaatttcagcccttgactacttccaaccactaaagtgactgggaatatggaaggaaatgcccggcatgttcctggcacaatgaagtgtgtgtgatcatgggttccacatgaatacctcacacctgcccatgcaggaatgatggcggattctgcagtttggagggtgtgctggtgstcattaggaaggagtgaggccctggctgacttctaattaaagccaatgattagttccctcggctatgtggagggaat

SEQ ID NO: 366001 - DNA, 561 bp, Homo sapiens
ggagggctgcaccgggactccgggacaggcccagttgaaaacggcggggcgagggggtggggtggagacgcccgcgacgccaaggctggggtcccggaaagcgcggggaggagggtggaaggcaaaggcaacttcggggaaactgggaaaggcggccgggacctcggggacactgcgtaccacccggcgcacagcccctcccgcgcaaacccgagccaaaggggcggtcgagcggcgcwctcggagcggagctcaggggatggtgcgcccggcacttatgctgggctcagcccagcccagcccaggaccgctggcggtgcgaacccagccgggcgggtgcaagcgcggggcagggcctctgcgcccggccccctcccctgagtagaaaagcagccgcaggctgtggcgctccaccacgccgtccgggtgggcctagcagtcgctccatttatcgcttgagatctccagccttaccgcggctcgaaatggaccccaactgctcctgcaccactggtaagagaagccgaccctgcgccctaggaatcccatttcccagcccca

SEQ ID NO: 366002 - DNA, 561 bp, Homo sapiens
ggagggctgcaccgggactccgggacaggcccagttgaaaacggcggggcgagggggtggggtggagacgcccgcgacgccaaggctggggtcccggaaagcgcggggaggagggtggaaggcaaaggcaacttcggggaaactgggaaaggcggccgggacctcggggacactgcgtaccacccggcgcacagcccctcccgcgcaaacccgagccaaaggggcggtcgagcggcgcactcggagcggagctcaggggatggtgcgcccggcacttatgctgggcwcagcccagcccagcccaggaccgctggcggtgcgaacccagccgggcgggtgcaagcgcggggcagggcctctgcgcccggccccctcccctgagtagaaaagcagccgcaggctgtggcgctccaccacgccgtccgggtgggcctagcagtcgctccatttatcgcttgagatctccagccttaccgcggctcgaaatggaccccaactgctcctgcaccactggtaagagaagccgaccctgcgccctaggaatcccatttcccagcccca

SEQ ID NO: 366003 - DNA, 532 bp, Homo sapiens
gagcttttggggtcatgaggacacatccctaaagaatgacttggtgccatcccatggtaaagagtgtgttcatcctctggtaggtcactccagtggtggctgtgaatgaaagtgattagaaagggactggtatagactcaatgttatgccttagtcaggtgtactttagggaaataactggatgtcttgctttttaattttatttttttagagaagttgacttgctatgtggactaggcaggactggaagtcctgggctyaagtgatgctcccgcctcagcctcctaagtagcttggactacagcttcccgccacctcccccatcttgctttttagtttaaagcagggtcagcacatcacatgaagtcatctcctttttggggatatcccacatgtccagaactgccagacggtagtggggtggccggctaggctgtggggagcacggagatttatttgcaaaggaggacctggacaaatgtgcccccacatcctctcaggcgaggagaatggacgagagtgagaggccgac

SEQ ID NO: 366004 - DNA, 454 bp, Homo sapiens
gtccagcagctgctacaaagacttacatacttctatttgaaagaggagccagatcccaaaatacagaatgctcaggggatccagtgcaatgaaaataaccttgctagagcgacagaatttaaaagacagaccttgatctacaataaatagcaaagtaataaatgttagtaccactcttctcacagtcacagggttcaagaggacaaatttttaaaaattattttgttttatttttaaaacatttatctataagatacataaaacatctgcattttaagaaaactcttctggtaataattttatactttattatttaarcattcaatagaaagctaaaatattaataaattaatcaaaatcgggtttcataaaagttgcttctataaatgacattttatagaagtacgattctgtaaaaagacaaagaaacaggtctagaaatctggaatgagtc

SEQ ID NO: 366005 - DNA, 605 bp, Homo sapiens
tgatgagtacagagtttctgtttgggatgatgaaaaagctctggaaatggatagtgatgattgcacaacattgtaaaggcactgaatgccactgaattttacacttaaagatggttacaatggtgacttctgttatgtatattctaccacaataaaaaatgtacaagtgtttttaaaaaggaattaatctggagtataaaattccactgtactaatgctttatctacttggtattaaggatacagataggtagaaaattaaaaaatatatataaagacaatttgctgaagttttccattttccttccttttttttgagacagagtctcactctgtcacccaggctggagtgcaatggcgcagtctctgctcactgcaacctctgccttccggattcaagaaattatcctrcctcagcctcccaagtagctgggactggaggtgcatgtcaccacaccctgctaatttttgtaattttttttttaaatagagacagggtttcactatgttggccaggctagtctcgaactcttgatatcatgatctgcccatctgggcctccccaagtgctggtattacaggcgtgagccaccacacccagccttt

SEQ ID NO: 366006 - DNA, 567 bp, Homo sapiens
tacaccatgccttatcatctgcctgaaagcacaggtccggtttttcgtcattcctctgcttagaagccttcagtagctcctacagcccttcatactccttgatctgccattgactcctgtccaccaaatggtacccaacmtccgcctttgcaaactcatcctccagtgtctccttcacatgtctccctgtgacttcctatctttcccccttgagtccagagatgtcaaatcaccctcctgtttccatctctgcctgtgagtattctaccctcatcttttcaaatgctaccttcttcatgaaggttttcctcacctcacttcacccattcctctcaccaaacacacacacaaagatgacctggtcctctctgaaccccctttgcactctgcacatttctaaagatgtcatcctctagccagtattagagctggtagtgaacttgccctaaccacaagcaccttacagggtcacattcaaattcgctttcctccaatgtttaggacaatgctctaagcacataccaaataatcaggaaacattagtgtgtgcattcattcaaacaatat

SEQ ID NO: 366007 - DNA, 656 bp, Homo sapiens
cttcaccctgcacttttaggttatgaagatggcttctttccttgaacctcatgagccaaattctgctagcttcaaagtcttcttctgcagctttctcacgtttctcagccattatagaattgaagagagttagggccttgctctggattaggctttagtttaagggaaggttgtggctggtttgatcttctttccagaccactcaaactttctccatatcaacaaaaaagctgtttcattttctcaycattcctgtctccactggagtagcacttttaatttccctcaagaacttttcctttgcattcacaagttagttactttggagcaagaggcctagctttttgcctacctcagctttcaatatgccttcatcactaagcttaatcatttccagcttatgatttaaagtgagagatgtgtgacacttctttccatttgaacacttagaggccattatagggttattaattggcctaatttcaatattgttgtgtctcagggaataggaaagctggaggagagggagagagatggggaaacaattggttagtggagtagtcaaaacacacacatttatcgattaagttcaccataccatcttatacaggtatggttcgtggtgccattcatggcacctcaaaacaattatagtg

SEQ ID NO: 366008 - DNA, 614 bp, Homo sapiens
atttctctggcatcagaagagtgtcctacatcttcaaagctttcacttgcatctacaccagcttgttccagcagaacctcttctcctccagggtgctacaaggaaaagatatttactgaaccgagggttctctgaaaagcaaaccaacaagttactttcccatacccccttcttcctttctccctttaatagaaataatggaacaaatkgacattgtgtggtgcctgacaggatgcaatgggaagaacacagcataacttctgtgatactgtggtcaaaaatgcatcatatggggattacagtgaggacacctgggacaaccacaaatttagaaatattctacaaaatctttctggacaggtctggcctgtgatctctaaagataccacagtcatgaaagtcaaagaaagagtgaagaaactgttccagattgaaggaggctagagattcatgacaactgggaataatgggtgatcctaggttggttccttttgccaatattattgagatagctgcagaaacctgactaaggactccaggcaaagggtatatgcaattctttattctattcttgcaacttttctgtaactttgaaattgtttcaaattaaaaag

SEQ ID NO: 366009 - DNA, 625 bp, Homo sapiens
gaataccaatgtaaatcttccctctctcatctaatagcaacccaactcttgaagactcataagccaaaaactttggtgttatccttgactcatttttctttcattccccaaatctggcgcatcattaaatcctattggctcttccatcacaacacatccaaaatctgacacttgttctggtacaacccactatctcttgcctaattactaaaacagcctcctaactggtctcctcaattctgcccttgtcctcttaagaaggcaaagccagctggacttcctgggtggagtggggacttggcaaacttttgtgtctagctagaggattgtaaatgcaccaatcartatgctgtaaaaatgcaccaatcagcactctgtgtctagctaaaggattgtaaatgcaccaatcagcactctgtaaaaatggaccaatcggcactctgtaaaatggaccaatcagcaggatgtgggcggggacaaataagggaataaaagctggccaccccagccagcagcatcaacctgctctggtccctttccacactgtggaaactttgttctttcactcttcacaataaatcttgctgctactcactctttgggtctgtgccacctttaagagcta

SEQ ID NO: 366010 - DNA, 596 bp, Homo sapiens
agatttctcttttaggccccaaattaatcgaaaaaatatttcactagtatatttgcttcagagaaatagaagtgaactttcacaagtcattaatctattgctcaaaataaaatgatcacacacaaaccgaaaatcaaagcttcaaacatacacacaccgaaaatcaaagcttcaaaccaatctttagcggctgcatatcactagttgcctggggttgggagagaatgactgcaaagggaaaggaagctttttagaatgatrgaaatggtttatgtcttaacatggatgaatacatttttcaaaactcatcaaaatgtacattttagataggcacaatttacgtatgtacattacacctcaataaagttttaaatatttagaagtctatcctgtttccttaaaaaaaaaattagttgcaccatggtctcaaaaataatttttaaaatgagatgtaatgcaacagacttgaagattaaataaaacagtcttgaatatttaagaaaaatgacaaaacatgagtcaaaaacaaaaaaaaagggttgatttatgagtttctggcctcaaggtcaactcagattagggggaaaaaaaaacag

SEQ ID NO: 366011 - DNA, 596 bp, Homo sapiens
agatttctcttttaggccccaaattaatcgaaaaaatatttcactagtatatttgcttcagagaaatagaagtgaactttcacaagtcattaatctattgctcaaaataaaatgatcacacacaaaccgaaaatcaaagcttcaaacatacacacaccgaaaatcaaagcttcaaaccaatctttagcggctgcatatcactagttgcctggggttgggagagaatgactgcaaagggaaaggaagctttttagaatgatggaaatggtttatgtcttaacatggatgaatacatttttcaaaactcatcaaaatgtacattttagataggcacaatttacgtatgtacattacacctcaataaagttttaaatwtttagaagtctatcctgtttccttaaaaaaaaaattagttgcaccatggtctcaaaaataatttttaaaatgagatgtaatgcaacagacttgaagattaaataaaacagtcttgaatatttaagaaaaatgacaaaacatgagtcaaaaacaaaaaaaaagggttgatttatgagtttctggcctcaaggtcaactcagattagggggaaaaaaaaacag

SEQ ID NO: 366012 - DNA, 457 bp, Homo sapiens
cctggggtaacaggctccccttggagaaagaaattacaaattactaatagatcatatggcagaaaattgcaaattccaagcaaaataaatatrttcttccatttctagagttttaaattggctataaggtaggagggtgcagtattaataggcagctatcaaatagaacagtggtgttaaattacataatcaatttaatgttctgggtcagttgacaaagaaatctgttctctcactgccactaatttagagctttcaatatcccattcacaagtctttttaaaaaacttttgggaaagattttggtatatcaaattcttccataaacatctgtaacagctgtgtcagggatcccagactagctgacctttctccttttgcagtctgagggtggaaatgagaacataatcgcccatgatgagctggctgagcaaagttgggccaagccatcaaatgc

SEQ ID NO: 366013 - DNA, 602 bp, Homo sapiens
gagtaagccaacaaccagtgaggtcacatcaggtctctgatgggtttaatgtagtaaaatccaccccctgagtaagcatatagacagaaaaatcattgattattaaatacatctttgtttaatgaaagtctgcatgtatgtttgttaatatacacgaatgaattaaaatacctgcaatggaatcaaaagtgggcatggctgtgatgtcctcagatatcctgtccagtttgggctcaggtccaataatgtgaactaaaaagatcttaaccattgcaattcatsattctgaaaggcttaggggcagaaaattccatttgctgctttgatcatattttcaattccaaaagtttcccaagtgaaacaaggcatagttggttcaacaaggagaatggtataatgatattgcagttagcagttaggtttaggagaaaaaaaaaatcaaaagtttttgtaaggttaaagacttttggggaaaaattcactcctacaatatgcttgtttgttcagtatctaattcttcacagtcctgttggcagggcatcaaaggagtggccctatggtcttctcaggcattctgatggtgcaggcaatattgattactt

SEQ ID NO: 366014 - DNA, 567 bp, Homo sapiens
tagtgtatagatgttcattatatccagttggttgatgttgttaaattcaactatattcttactgattttctgcccactggatttgtccattcctgataaaagagtgctgaagtctctaactataatagtggtttcacstatttttctttgcagctatatcaattttgcctcacatattttgacactctgttgttaaagcctaatgactgttaacaaaatatttttgtctctttacatcttgcttaacagtgagtgtgtaactattcccttgtcgtataacatgttactactacaagacaatattcaaattgtcccaagaggaatatttttccccttgtgtgcaaatatgtagtagaaatgtgctcttaattgactgaatactttagctagagagactttatacacattgtctcttgtcttcttaacgtcctattgattatgttatctcatttacttacgggaaaagtaaggtctgggaagtttgctcagaaaaacatagctaataagtagatgaattcggttgaattcaaaaccctatttatgtgattctaaaatattttccaaaat

SEQ ID NO: 366015 - DNA, 567 bp, Homo sapiens
tagtgtatagatgttcattatatccagttggttgatgttgttaaattcaactatattcttactgattttctgcccactggatttgtccattcctgataaaagagtgctgaagtctctaactataatagtggtttcacgtatttttctttgcagctatatcaattttgcctcacatattttgacactctgttgttaaagcctaatgactgttaacaaaatatttttgtctctttacatcttgcttaacagtgagtgtgtaactattcccttgtcgtataacatgttactactacaagacaatattcaaattgtcccaagaggaatatttttccccttgtgtgcaaatatgtagtagaaatgtgctcttaattgactgaatactttagctagagagactttatacacattgtctcttgtcttcttaacgtcctattgattatgttatctcatttacttacgggaaaagtaaggtctgggaagtttgctcagaaaaacatagctaataagtagatgaattyggttgaattcaaaaccctatttatgtgattctaaaatattttccaaaat

SEQ ID NO: 366016 - DNA, 590 bp, Homo sapiens
ctcacattcaggtagtgctgatgcaaaaggtgggtctccatggtacttgggcagctccacccctgaggctttgcagtgtacagcctccctcccagctgctttcacagcctgatattgagagtctgtagctttccaggcagacggwgcgagatattggtggatctacattctggtgtctggaggatggtggccctcttctcatggctccactagatggtgccccagtagggacactgtgtgagggctccaaccccacatttcccttccacaccaccctaccagaggttttccatgaggaccctgcccctgtagcaaacttcttcctgggggctttcaggtgtttccatacagcctctgaaatctaggcagaggttttcaaactccaatccttgactgctgtgcactcataggctcaatgccacatggaagatgccaaggagtggggcttccaccctctgaagcaaaagcctgaactctaccttggctcctttcagcctggctggagtggctaggatgcagggcaccaagtccctaggctgtgcacagcatggggatcctgggcctggcccacaaaaccattttttcctctt

SEQ ID NO: 366017 - DNA, 605 bp, Homo sapiens
gtgctgcccctctcataacccctacaccctcagcactgctgcccctgcccacattgctcttccctgcctaggaatgggattcaagatgtatcctcacactcccttggcagtagcctgaatccagcataggatacttcattgagaaagctgggcaaccccttgtcccagaactgatcgagtggtgccattctgctcaaaaaatgaaggggatgccaggccacaaggggcagaggctcaagaagtctttttttttttcagcctacacagtggttcagaattcagaccacatgagctcaaagcccgacttatctatcttgctatttgtaagacattkagaagggtatttaaattctctatgccttcactttctatctataaattgatgataataatcacatttactgatttttttaaaagattataggtgacaatgtatgtaaagtactcaggacagcacataatgttcaaaatattactatcaccgtcatgatttttaagttggagttagacttctttggagtataatccacatacctttaatggtttcattacatgactgatgtgttatatgtatattatatgtatatatgtaattgtgaatatag

SEQ ID NO: 366018 - DNA, 605 bp, Homo sapiens
gtgctgcccctctcataacccctacaccctcagcactgctgcccctgcccacattgctcttccctgcctaggaatgggattcaagatgtatcctcacactcccttggcagtagcctgaatccagcataggatacttcattgagaaagctgggcaaccccttgtcccagaactgatcgagtggtgccattctgctcaaaaaatgaaggggatgccaggccacaaggggcagaggctcaagaagtctttttttttttcagcctacacagtggttcagaattcagaccacatgagctcaaagcccgacttatctatcttgctatttgtaagacatttagaagggtatttaaattctctatgccttcactttctatctataaattgatgataataatcacatttactgatttttttaaaagattataggtgacaatgtatgtaaagtactcaggacagcacataatgttcaaaatattactatcaccgtcatgatttttaagttggagttagacttctttggagtataatcmacatacctttaatggtttcattacatgactgatgtgttatatgtatattatatgtatatatgtaattgtgaatatag

SEQ ID NO: 366019 - DNA, 605 bp, Homo sapiens
gtgctgcccctctcataacccctacaccctcagcactgctgcccctgcccacattgctcttccctgcctaggaatgggattcaagatgtatcctcacactcccttggcagtagcctgaatccagcataggatacttcattgagaaagctgggcaaccccttgtcccagaactgatcgagtggtgccattctgctcaaaaaatgaaggggatgccaggccacaaggggcagaggctcaagaagtctttttttttttcagcctacacagtggttcagaattcagaccacatgagctcaaagcccgacttatctatcttgctatttgtaagacatttagaagggtatttaaattctctatgccttcactttctatctataaattgatgataataatcacatttactgatttttttaaaagattataggtgacaatgtatgtaaagtactcaggacagcacataatgttcaaaatattactatcaccgtcatgatttttaagttggagttagacttctttggagtataatccacatacctttaatggtttcattacatgackgatgtgttatatgtatattatatgtatatatgtaattgtgaatatag

SEQ ID NO: 366020 - DNA, 576 bp, Homo sapiens
ccacctgccataatactctcctataagagactttcactatctttttaattacctccagaaatagctacccagatcatgcctagttastagaggcatattgcatggctctgaacaaaagctatattcctcctccaacttgggacactctatctcttccctatggggtcattcttgtatcctaagctagtgccttttattaggcatccaaggtctatgcagttcctctactgtagtgatactacacataccactagttgtgatatgtgttcaggctcccaaaccagacaaatgtaaccctgatatttactagttgcataatcttagggttgtcatttatcttttcaaaacttaagttttctcatctgcaaagggcatgatagttgtcttagtcagtttgagctgagtaccatagattgagtggcttaataacaacataaatttatttctcacagttctgaaggctgggaagtctgagcagagcatcagcatggtctgttctagtgagagtcctcttccaggttgcagacacagtcttattgctgtgtcctccttggtggaagagaggtagctagttct

SEQ ID NO: 366021 - DNA, 576 bp, Homo sapiens
ccacctgccataatactctcctataagagactttcactatctttttaattacctccagaaatagctacccagatcatgcctagttactagaggcatattgcatggctctgaacaaaagctatattcctcctccaacttgggacactctatctcttccctatggggtcattcttgtatcctaagctagtgccttttattaggcatccaaggtctatgcagttcctctactgtagtgatactacacataccactagttgtgatatgtgttcaggctcccaaaccagacaaatgtaaccctgatatttactagttgcataatcttagggttgtcatttatcttttcaaaacttaagttttctcatctgcaaagggcatgatagttgtcttagtcagtttgagctgagtaccatagattgagtggcttaataacaacataaatttatttctcacagttctgaaggctgggaagtctgagcagagmatcagcatggtctgttctagtgagagtcctcttccaggttgcagacacagtcttattgctgtgtcctccttggtggaagagaggtagctagttct

SEQ ID NO: 366022 - DNA, 603 bp, Homo sapiens
acattttgcttttgtctctagaataataaaaatatgtcagtttttagaaatagtgatatccaattttaggtaacgccatcataagtatatctatatgtataaataagcctaactttttactacttataattagaaggaagtaacttctgttttcttctgtggatgaaagaagcttttcattccctttataaataagtcttttagaactacaagcttattcttctgaaactgggatgcaggaataaagcagagacaagggtcataatgctctttgactagggagtaacttcaaggcatttatgtgtgcatagaacataaagttagcacaatcatttataacaaaatcatcacagaactgatgtgtacattacaacttagatgactaaattcaatttgctacaacaaacatattctaacaaatacaatttcttataaaaacatacagagagtmaatacaatatccaataacaaatatataaaacgtttttgcagtaattgtagcctcaaggttaaggattctattctataggaaataacaataaaacattatacttaaagaggagaatgttaagaagtctggtcatttttggcaaataaactgcc

SEQ ID NO: 366023 - DNA, 592 bp, Homo sapiens
tggagctgacattgaatcgacacacagaaaccaggtaggctgtgggtccacccagaggagtttttacaggtcaaagcctccttgttttattacagactctcatcttaacattagaacttgatatttatcacaggtgcacttctaaataaagtgttttaagaacaatccatgatttgttatttccttgattttatttgatttctctaaggagacattattctggaagcttgtagaaaatacattttgcaggaatctttcattttgtacaccttccagtgatctggtaagagaaaggaagaacttgagagaaaaggcctaacaagtatttatttggtgttggaatctattcttgaagaccaagagaggtaaaaagcaaagaagacaatttataacgtatcatctagatgcaaactggaaaatgcatggtggtacrctggcctgttggagataggagaattagatattgagaacctggtgacgaagtgagggtggactgagaggagacagagaggtgacatctatactggggcttgatgcttctggctatgaggattgatgacttgttcctgccttcaaacctttgtccttactt

SEQ ID NO: 366024 - DNA, 598 bp, Homo sapiens
ttctaattagtgcaccaagaaggttgcagtggtccacttctcagggatattgtgaggacaataattaatagctataaaacattctgcaatatgcagcagtatacaaacaccaacatggcacaaccaaatctatttcacagtaattaactttatatccaataaggaagaaatcagtagagcaattcctacatgacttggcagaaatgcctattgtctctgtatcttaagaaagtggccgacagccagaaaagagaatcaaactgtgcttgygaatttatcacaagatgttttgtagatgaatattgtttttcttcttaaatattgttttttaaagcatgtgccttttcaatgggaaggaagtgctgatatttatcaaccatgagcataaatcctccatgaatagtaactattatgcatatcgcataaatttaagttattccttggtatgcacagggaattggttttaggaccctgcagatatcaaaatgtgtgagttctcaagtcccttatataaaatggtatagtatttgcatataagctatgcaaatacctcctatatactttaaataatccctgtattacttataatacctaatac

SEQ ID NO: 366025 - DNA, 598 bp, Homo sapiens
ttctaattagtgcaccaagaaggttgcagtggtccacttctcagggatattgtgaggacaataattaatagctataaaacattctgcaatatgcagcagtatacaaacaccaacatggcacaaccaaatctatttcacagtaattaactttatatccaataaggaagaaatcagtagagcaattcctacatgacttggcagaaatgcctattgtctctgtatcttaagaaagtggccgacagccagaaaagagaatcaaactgtgcttgcgaatttatcacaagatgttttgtagatgaatattgtttttcttcttaaatattgttttttaaagcatgtgccttttcaatgggaaggaagtgctgatatttatcaaccatgagcataaatcctccatgaatagtaactattatgcatatcgcataaatttmagttattccttggtatgcacagggaattggttttaggaccctgcagatatcaaaatgtgtgagttctcaagtcccttatataaaatggtatagtatttgcatataagctatgcaaatacctcctatatactttaaataatccctgtattacttataatacctaatac

SEQ ID NO: 366026 - DNA, 598 bp, Homo sapiens
ttctaattagtgcaccaagaaggttgcagtggtccacttctcagggatattgtgaggacaataattaatagctataaaacattctgcaatatgcagcagtatacaaacaccaacatggcacaaccaaatctatttcacagtaattaactttatatccaataaggaagaaatcagtagagcaattcctacatgacttggcagaaatgcctattgtctctgtatcttaagaaagtggccgacagccagaaaagagaatcaaactgtgcttgcgaatttatcacaagatgttttgtagatgaatattgtttttcttcttaaatattgttttttaaagcatgtgccttttcaatgggaaggaagtgctgatatttatcaaccatgagcataaatcctccatgaatagtaactattatgcatatcgcataaatttaagttattccttggtatgcacagggaattggttttaggaccctgcagatatcaaaatgtgtgagttctcaagtcccttatataaaatggtatagtatttgcatrtaagctatgcaaatacctcctatatactttaaataatccctgtattacttataatacctaatac

SEQ ID NO: 366027 - DNA, 552 bp, Homo sapiens
ctagcctttggttcagtttgctcttgttctagttcattttttaatgtgtttatagtcataaatttctcccttagcgctgctttccctgtgtcctataagttctagtatgttgtaytttggttttcatgtatccctaagtattttctagtgtttttttcttggtgatttcttctcttatatattggtagcttaagagagtgttatttaattttcacaattttgtaaattttttcagttttatttcttttacttctgctgatttctaactttatcctattgtagttagagaaggtatcttgtacaatttatgtcatttaaaatttactgagacttaatttatggcctaacatatcatctatcctggaaaatagctaatgtatacttttgataaatgtgcgtgtggtatgtttggatagtgttatgtatatgtttgttagatctagttgatttactgtgtcaagtcttctattttcttaattatcctctctctggttgttctattcattattggattactgacatctccaactattaatgtagaattatctactt

SEQ ID NO: 366028 - DNA, 498 bp, Homo sapiens
ataaaaatcaatattgcataacaaaataacatctatataggggcaaaatcactactttcgtcaactggtctaatccaatgaccaattgtttatagtgaacaaagaaaaagccacatggggtgttgattaactttgccaatcaatttgactaaaacgatctcccaattccaagcagtggcaggtcgagtgaacattaccttcccagacaagtgttttccaagtagtrtcaaaccattaccaccaattgaacacataaacttcttacatgccttataagcagataatgatgaaaatcatcctttacaattatctgcttattcaagataactaattctcagtttaaatatttaagagaggctgatacagacacaaactgtcctgagaaaaatctgaatttacttatcttctgaactactgccaacagaatttgaatttttaaaaaattatgtttggacagtagagcttgcagtgagaatcactcacagtcatttcagctac

SEQ ID NO: 366029 - DNA, 597 bp, Homo sapiens
gtttagttttaaaatgtaaaaaatattaaatccataatcactatgttccttgatcatgcaatacaaagtgaacattatttcgaaaacttttgaagtcattatgaaaaaaatacaaacatttagtctgtccatatttagaagatagttttatatattggtccagatctggctaggctatagttcttgcaaactctctcaatctgttttcgtcccatgtacaaaacataaagattgtttttacagtctcaagctaaacctcgcatgcttcctatttatcaaacccttcaggctgaggacatttatgtgtcaagtatggttcaatccaaaatactttctcttcctgatcatgcgkgtttatcaggctggtaaacatgtcatcaacaggaataggtatataataggtgtatattaccatcttaggtaacaggcaacagacagcctccttcatttgctacatgctatgtttcctgtcatctgtgtatctatgtgttcatttattgtccatccctcattgatctgtccatttcttcattcaataaacaatgaagtactctgctaagtgaaataggggatacgacataaagatgacttagatgc

SEQ ID NO: 366030 - DNA, 551 bp, Homo sapiens
tttctaataaattttggagcatctgggcctttgaactccttgaataaaggtactgttaaaatactaaggttttcctgtttgttggttggtttgactcaagtagttgcatatatttacaggcttaagaatttgatgaagatcacgtggctgtcactagggagctaagacttgggtccacgtctccccttccaccagactctcacttccaccaatgggagttttactatgaacagatgacagttttccttggagctccccagatggacccaaggtccacgattctatcaatcaatttaggctgtaagaatgttggtccaagagagaaatgctgttcctgtaattgtcttttattcatgaaacattagctctcccactctactgcactactgaaaartaaatgaattaagtggtttttaaagcactgccaaaataggtctttgtgaacctggtgatatagtttggatatgtgtaccctccaaatctcatgttgagatatgatcctcaatggtggaagtggagcctggtgggaagtgtttggagcatgggaggtg

SEQ ID NO: 366031 - DNA, 450 bp, Homo sapiens
tcacttcttactggttaaaatagtttaaacrtaatttaaagtcctgactgagttgatgatactgactattttgttttcaattaagcataacagagcaaatggtctttgatgtgatgtactcattttatgaaagaaccaggctggcaaacaaaaattttatggaatttagagatactaactctggctcttccacctgcagcttgtatcttaaatacatcatttatttattcttccagagcctctgttttctcacctgtaaaatgtaaacctatttcctaagttttctatgatactgtcagcaaaatacattttaaataatagcttcttgatcaatgttaatttcagtactcttttttctatgaattgaggacctagaattgaatattttaattcagttagcctaaccacagagtagatatgcaaccttcctattcttgcatagtttattag

SEQ ID NO: 366032 - DNA, 450 bp, Homo sapiens
tcacttcttactggttaaaatagtttaaacataatttaaagtcctgactgagttgatgatactgactattttgttttcaattaagcataacagagcaaatggtctttgatgtgatgtactcattttatgaaagaaccaggctggcaaacaaaaattttatggaatttagagatactaactctggctcttccacctgcagcttgtatcttaaatacatcatttatttattcttccagagcctctgttttctcacctgtaaaatgtaaaccyatttcctaagttttctatgatactgtcagcaaaatacattttaaataatagcttcttgatcaatgttaatttcagtactcttttttctatgaattgaggacctagaattgaatattttaattcagttagcctaaccacagagtagatatgcaaccttcctattcttgcatagtttattag

SEQ ID NO: 366033 - DNA, 634 bp, Homo sapiens
ggggtacaagctttccaaagagggaggtggttttaatactctgtaatcattttgaaacttcaygctataaaagacttcagatgtagaaaagcagtctaggtatcagattataacagcataggacacctagtctaggagcactcaacctggagtcgagaaagcagtaataaatgccctttacactacctctgtccatggaaattgaatatttacctgagataaggttgcccaggctattaaaatctcagatgttgaatggcagttatgtaatgagtttctttgaaaaacagaaaatgaattgccatttaacaaacactgcctggaatgttgataattgaagctgtgtgatgcgtgcttgggggttcattatacattctctccactttggggtatgtttgaaaatgaccaaactaaaaaaaattctgaaaaaacagcctcctttgttcccgcttaaggtaaagcactttctaagtgtacagaagtcccccacagggcagaaataacaaagaggatcgtgttcagacccactcaccttcttccaatagctaggactggactattggtttcttaagccatagccaaactgtgatatggtgaagctttagcagaaaaccatgtgacttgatgagattgc

SEQ ID NO: 366034 - DNA, 634 bp, Homo sapiens
ggggtacaagctttccaaagagggaggtggttttaatactctgtaatcattttgaaacttcatgctataaaagacttcagatgtagaaaagcagtctaggtatcagattataacagcayaggacacctagtctaggagcactcaacctggagtcgagaaagcagtaataaatgccctttacactacctctgtccatggaaattgaatatttacctgagataaggttgcccaggctattaaaatctcagatgttgaatggcagttatgtaatgagtttctttgaaaaacagaaaatgaattgccatttaacaaacactgcctggaatgttgataattgaagctgtgtgatgcgtgcttgggggttcattatacattctctccactttggggtatgtttgaaaatgaccaaactaaaaaaaattctgaaaaaacagcctcctttgttcccgcttaaggtaaagcactttctaagtgtacagaagtcccccacagggcagaaataacaaagaggatcgtgttcagacccactcaccttcttccaatagctaggactggactattggtttcttaagccatagccaaactgtgatatggtgaagctttagcagaaaaccatgtgacttgatgagattgc

SEQ ID NO: 366035 - DNA, 256 bp, Homo sapiens
taatgtgtcaaaattacctactccaatcatcttggtgtcaaacataacacttcctctcaatatacaggtgctttctggttattttcctaatgcatctagaaaatgttaagggaccctttaatcaaattgatttsaacaaaattttaaggaccatactgcagtggaaaacatactagacccgcagtctgaagacttgagtccagcagaagcctatgggaaagctgtcaacctcattggcctaattttgttttctcaa

SEQ ID NO: 366036 - DNA, 612 bp, Homo sapiens
tgggtctaatgtgtcaaaattacctactccaatcatcttggtgtcaaacataacacttcctctcaatatacaggtgctttctggttattttcctaatgcatctagaaaatgttaagggaccctttaatcaaattgatttgaacaaaattttaaggaccatactgcagtggaaaacatactagacccrcagtctgaagacttgagtccagcagaagcctatgggaaagctgtcaacctcattggcctaattttgttttctcaactcaactctgaaatttaaaaaaaaaattaaaaaaagagaaggctgcaggaggggaagtggtctgagagtctggaaatgtcccttccacggctatgattcactgtgaatgaatcatagtcctgtttctgagttcaaaaagaggcccactagccccagtaaatcttgaattacaggaagatgtaaagaaaatatttttgagttaggatgtaaggagagttaagagcacaagtttctcctacccacaagctaatattttaccagaagtaatcaggtagcagttatgaaatgcatttttgagaatggacttttttcctactttcttacctatttcacatactattcataaaccc

SEQ ID NO: 366037 - DNA, 669 bp, Homo sapiens
tcacagtccagaaaatataatagtattctttgtggacattaacagagtcaatttaaataactgtgaggtaaaacaataatttttaraagtcagtaactgtaaacatttgttgacttctttctatgtaacaggctaatgaatcactttacacggctcttatttaatctttaaaaccaatactatgaaagaaataccactattatccccacgttactgatcaggaaattgagtcttagaaagattgtttaatgtgctcgaggtcacagatgcagtaaatagtacagctaagatttgaactctgtttgttagaacaatttcaattgcagagttttcactaccatacaatgctggcccctaagagcagctctatgtgctaggagccatctcatttgtaggttagggacagttctacccccatttgtaggatacacattgagcaaaatggaaaatggcagtataatatacacatagatcagaaagggggttctccttctgattccgcttactagttaagtacgttttcttcagcaaatcacttaacttctcagggtctcaatttccttagctggcgagtgaggaaagtaataatgcacatctgccactcttatcataaacatcaaataaaataagtgatggggagatgctctgtaaacagtcacttacaacaca

SEQ ID NO: 366038 - DNA, 551 bp, Homo sapiens
atgctgtatgaccttgaacaaatcacttattacctccctgtgcggaatgctctttgcaagcaaaatatactattttctggattaaatgactgctcagtaatacttggaaaacagtaatggctccatgattggtagctattgtgattatttatgttccagtgattaaagaatggaaaagactcacatgctagcaattgcctttgatttagaaagagtgaaagaaaggccagaatatagcaatgtggtatgsaatcagaaaggaaggagtggctcattctgaccaggtcaccagggaaggcttgacagagaaatcagagaaatgcccccaaagggacagcagaaaggggagctaaaaaccatcatgggacctaaagtctggagaatctgcctgatttatagggccatgcaacatggggaacataatggccttgccaccactagtagtatgagctcaggcaagcaagctgatcttacctggcctctgctgttttttcttctgtgaaatgggagactaaaattactccttgtaaattaccacgggaagcgaaaag

SEQ ID NO: 366039 - DNA, 551 bp, Homo sapiens
atgctgtatgaccttgaacaaatcacttattacctccctgtgcggaatgctctttgcaagcaaaatatactattttctggattaaatgactgctcagtaatacttggaaaacagtaatggctccatgattggtagctattgtgattatttatgttccagtgattaaagaatggaaaagactcacatgctagcaattgcctttgatttagaaagagtgaaagaaaggccagaatatagcaatgtggtatggaatcagaaaggaaggagtggctcattctgaccaggtcaccagggaaggcttgacagagaaatcagagaaatgcccccaaagggacagcagaaaggggagctaaraaccatcatgggacctaaagtctggagaatctgcctgatttatagggccatgcaacatggggaacataatggccttgccaccactagtagtatgagctcaggcaagcaagctgatcttacctggcctctgctgttttttcttctgtgaaatgggagactaaaattactccttgtaaattaccacgggaagcgaaaag

SEQ ID NO: 366040 - DNA, 502 bp, Homo sapiens
cagattgttgctgggtaaaatacagagagagggatttgaaacttcagtgagcttgaagagaaaacaaatttgtcctgggatagacgttatgaatcacatcgggaggatgacactttgtcatttaaactacatggtaagatagtgttacttcatcaagatttaaaaagcacaacttccaaatatgcttgtttaaagaaaagtagaaataattggaaaatctatcaaagtataataaacaacataagcatgtgctttttttttraacacaagataaatgttatttgtatccaaagcaaattaaacctataatgtctgcaggaaaaagagttgtctgttccttaaaaagagtctcagagggtcacacactaacagtgcaaagtttaaataatttaaaattcatccaagatgaataatctacaatttctatgtgaagtggaacaaaagcacataaaaagttttcagcctaattagtttaacacacaacaaagaataattccaagtc

SEQ ID NO: 366041 - DNA, 569 bp, Homo sapiens
atagagatattttttctttcctcattagccagtataaatgaactatctccattttcctctcttaaaatgttttcctttgacaactttccttcccctactcggtcttcttaagagaaaatatcataaggtatttctagagagagttactatttgttaggcttcacacataaagctgattgtgagatgagaaatgaaggcagctccctttgagtacataagaactagaaggcaggagctactgaatacgaatacggttttttgcctttttctatttgatttagaatggatacaagcggcctytaggactgattcatggaaggtcaggcagagtctccctggatgcctggaaaattgtttctctgtttccaggaccaaagtctggccgcctcatctgtgaaatgggaacagtgtctccagcattacagagctattgtggggattgaagtgatgcccctaaaacacttaacccaaatggctggcacaaacaggcattcaacaaacactagctatcattggttatcagtttgatgacattctggatttttgtgtgtggggggttgttgttataa

SEQ ID NO: 366042 - DNA, 545 bp, Homo sapiens
ggcatttggaaagcatttgctctccattaaacttacygaaccttgacaaaccagaagggccaagaattagtctgccactggccaaggctggactttccaaaactgataacagcaatgaaaacaatagcactgccatttataatcttcaatgggattctgtcaaattttaacccaaaaggatctcacaatctgaaaagaatctcaagctttgttttataggaaaagaagaaaatgtttgagcacaatctctttttctactgcttcatgctcagaattgcccttttagccatagaacaaaatgtgaatgtctccacctcaccttcactttgtgctagggtaagtttactaaggtgacattcaaggactggggaagacataggaggaggagtgagtggtcattaggtcagaagtgttccaccagccaaatgtcaagttccctaaactgttaacaaagtgaagttaacaccagcccagtctctttggccctgacagcatctaacctgcattcattagcacaaaccacaaaatttagtagggcaggaatt

SEQ ID NO: 366043 - DNA, 503 bp, Homo sapiens
actctgtctccttcccatcataaaacacccagccgccatcccagaaggcctgccctggagyaccctgagacatcagaactcccttgacagccctttatactactgattaaggttgtaattatatatttacttgtctgttaagttgctttattgcctattttgaccatgtctcttttattcacctttgctaccctaatgacaaaagagtaaataattttccccagttccaacatgtaatcagtagcagagatgtaatttaatgtagatattgtgatttaaagcctagttttccatcagcacatgcctttaagagagacagaggcaaatttgagcttcttccaagaagaggagccacagtgattaagggaatgaaagctactccataagagaaagaatgcatattatagcctagcaaaggaaatggtaggaattgggataagagctgcctgtgagaagaagagaggtttagatttactctgttgagttccaagttttaaattctg

SEQ ID NO: 366044 - DNA, 503 bp, Homo sapiens
actctgtctccttcccatcataaaacacccagccgccatcccagaaggcctgccctggagtaccctgagacatcagaactcccttgacagccctttatrctactgattaaggttgtaattatatatttacttgtctgttaagttgctttattgcctattttgaccatgtctcttttattcacctttgctaccctaatgacaaaagagtaaataattttccccagttccaacatgtaatcagtagcagagatgtaatttaatgtagatattgtgatttaaagcctagttttccatcagcacatgcctttaagagagacagaggcaaatttgagcttcttccaagaagaggagccacagtgattaagggaatgaaagctactccataagagaaagaatgcatattatagcctagcaaaggaaatggtaggaattgggataagagctgcctgtgagaagaagagaggtttagatttactctgttgagttccaagttttaaattctg

SEQ ID NO: 366045 - DNA, 503 bp, Homo sapiens
actctgtctccttcccatcataaaacacccagccgccatcccagaaggcctgccctggagtaccctgagacatcagaactcccttgacagccctttatactactgattaaggttgtaattatatatttacttgtctgttaagttgctttattgcctattttgaccatgtctcttttattcacctttgctaycctaatgacaaaagagtaaataattttccccagttccaacatgtaatcagtagcagagatgtaatttaatgtagatattgtgatttaaagcctagttttccatcagcacatgcctttaagagagacagaggcaaatttgagcttcttccaagaagaggagccacagtgattaagggaatgaaagctactccataagagaaagaatgcatattatagcctagcaaaggaaatggtaggaattgggataagagctgcctgtgagaagaagagaggtttagatttactctgttgagttccaagttttaaattctg

SEQ ID NO: 366046 - DNA, 503 bp, Homo sapiens
actctgtctccttcccatcataaaacacccagccgccatcccagaaggcctgccctggagtaccctgagacatcagaactcccttgacagccctttatactactgattaaggttgtaattatatatttacttgtctgttaagttgctttattgcctattttgaccatgtctcttttattcacctttgctaccctartgacaaaagagtaaataattttccccagttccaacatgtaatcagtagcagagatgtaatttaatgtagatattgtgatttaaagcctagttttccatcagcacatgcctttaagagagacagaggcaaatttgagcttcttccaagaagaggagccacagtgattaagggaatgaaagctactccataagagaaagaatgcatattatagcctagcaaaggaaatggtaggaattgggataagagctgcctgtgagaagaagagaggtttagatttactctgttgagttccaagttttaaattctg

SEQ ID NO: 366047 - DNA, 487 bp, Homo sapiens
attaatattctgaaaaatacgtaattgaaaacaaaatggaatacctggtagagcaaattattaagccaatgctttatgtcctgaaaataatgctaagattcctcttatagtttgatacctatttgtaagaaggtagtacatggaatgaaagcctccttctggcaaatctctttacgcgctctggtgaaaagacatttcaggtaagttctctctcacasatcctctgcaaatgtggagataagagagatggctatgttctccagaagctctaagatctaatgagtcctgtattcataaaacccaatataacacactgtgcagaaagatgaaggagaaaaaattttagaaaggatggtggtgtgtcctaaaaatattaaccccagattggaagctaaagttaatcagcagtccatttcaagtagatgagactctggtttttaatgtgacatatttagaaagacttttcaaccaacactgtgaaaataaa

SEQ ID NO: 366048 - DNA, 545 bp, Homo sapiens
ttgcccagaactgtaattgtttatttgctaaacaagatgtgttggacaaactgatgccctccagttcttttgagttctaaaataaggtgtctgtctgtgctattcttaaccttcttggactcagamatctctgtgaagttattttaagataaatagaggctttgtgtctctcagattaggtaggaacgcactctgatgctctttcaagctgattcctattgcttctacctttgatgtgctgagatgagatttttcactgaggctgctacttcacatcttgattggaacctgatggggcaaaaaataaacaaaaagcaagaggaagtagtggtactaggtggtctgtccatggaaagaagctctccttggactttagcgggtgataataactaagaggcagtcttggagggaaggcagaatcccaccgtggctccagtggatgcggctgcactacagagatggagatggatgttcagctgagcgtcttaccctgctccaactcacaatttggcttcaaatcccaggtacttttattttctttaagt

SEQ ID NO: 366049 - DNA, 545 bp, Homo sapiens
ttgcccagaactgtaattgtttatttgctaaacaagatgtgttggacaaactgatgccctccagttcttttgagttctaaaataaggtgtctgtctgtgctattcttaaccttcttggactcagacatctctgtgaagttattttaagataaatagaggctttgtgtctctcagattaggtaggaacgcactctgatgctctttcaagctgattcctattgcttctacctttgatgtgctgagatgagatttttcactgaggctgctacttcacatcttgattggaacctgatggggcaaaaaataaacaaaaagcaagaggaagtagtggtactaggtggtctgtccatggaaagaagctctccttggactttagsgggtgataataactaagaggcagtcttggagggaaggcagaatcccaccgtggctccagtggatgcggctgcactacagagatggagatggatgttcagctgagcgtcttaccctgctccaactcacaatttggcttcaaatcccaggtacttttattttctttaagt

SEQ ID NO: 366050 - DNA, 600 bp, Homo sapiens
ataaaaataattcttttacaatttcccagcaatctgctacctgtatctatattctaaaaacagaaccatagatgatgtaggtttatctacggcctcagagtaatgaagtgtagattcattagagtaagctgcatagatgtacaattaaaaaaaacaaaaaagctccaatgaactraagacaatagagataaaaataaactcactcccagagctttctgattttactcttcgattagctttctgagaacaagagtaaagcaaaaaacaacacagccagccagcccttaaaaatgctttttctcttttccgggtaagaaacatcagcaggtatagtctaaggtaggagctagggaataacagatataacagcacttgcttggctacatgtaagagaaagatgccatttacacagctctaattagacagctcttagaaagactgcaagcaacctgtgaaactgctccaggtttcccaggctaagtgctatctacctttctatttaaaagaaattaagctataaaaatttgtctattcactgctactcaaaaaaaggaagtgcttttatgtatttttttaaaaagtaccacgaaataaaatgat

SEQ ID NO: 366051 - DNA, 470 bp, Homo sapiens
tactggcagcagtgaagattaattatactttagaacaacaacctcttttttatccacaactgcaataattaatttttgctaattagaaggcattataataaataacctgccactaattgataccccttggtcaacaagaaattaaagatacatacaacaatatttaaggtaagcagatcacctgtattatcattaggtttacatgtacttgacatttgttctgcaatcttatgactctggtccacytgaatgatgcatttgatgattcccatatgtgtcgttgcctcaggttagtcatgccataaaataggaaatgagataggaaataggaaatgaagttctaaaacctaatatttatgttatccataaggctaatgccaaaagataaaatagatttttaggcaaaaagataagactgagcttttccacccatgctaagtgacttcagacactgtcacatcctgcaccgg

SEQ ID NO: 366052 - DNA, 550 bp, Homo sapiens
tgcacactttctgtcaaaaggcacagaatttatcacaacagtaaaactcacaagtgtcaaaagtcaagtctgttagtagtcttgaatagcctccaagcattctaaaattctcagcagtayagattccagcctctaatttactaaggattattaaactgttttcctttcttagcctgtgttaatctatatacaaaatagtcaatcaatgagcagtattcaggaaaatattaataattatccataccttagagtctgaaaactaatataattaagggactttctagtttgctcttccagggaaatttttcatctcccttgcagaaattaattatctccaagcatgctatgagccgaaggtattgaagcattcagatgtcctggtggaagccttcaagtcaaccttgaaccatgtccacacagaacagctccactcagtgatgagggcctgccttaaaaatctctcaaatttgcaatctcattgctacttcctacatccggaacattggtatctgttgtctgattgaaatcccttctctaatctcttattcca

SEQ ID NO: 366053 - DNA, 603 bp, Homo sapiens
agggcgaggccaggtgtcccatgacacccaaggctctggctgtcagggtgtagctgaggatggaggccagggctttgaccatcaaagcttaaatgccaagtgtcagtgagcagctctgtcctggggacctcatctgtgtcagaaccactttggggagcgtgggtcctggtcgtggctggcctgccttcaggaggcctcagttcttgagagaggaccttgagtgaggacacaccgcatcctgagaagggcgagctacaaagagagctgaatttctgtaatgagttgacttaaaaccatttgtggagtttggcctgactggcactgccattctaactgctttctgcctgccctgggggctgtataactcgtcccctccccctaaatggtgagggggcttgggccaaggttgaagtcatgggcagagccgagcctggctgtctcagccatcaccctgcatttgtctgggtgctattttggcccacgatgtgtggtttcagcatctgggccagcttttcatyacaatatgatcccatcttttatgggttgagtgagttctccaagagaggaaactgccaaagagaggagttgcctcagatgttgagg

SEQ ID NO: 366054 - DNA, 626 bp, Homo sapiens
aaaatgagtgtatctgcttcattccttatgtaccctctgttaagatgaatatgctcttcaaaatgggggaagttgggaatacttgggaactgtgtggtttgaccatttctgccccactagtgactaaayttcacttcctgtttaatgtgctgggcaagtcctgtactgaccctccttccccacaatctactttatttttccaggccctctgatgtgttaagttgcctggcacagccccttcacctatcttcctatcatgacctatgacacaaacaacctgaagtttctctagaacatttcatgattcataataagttcaaatctttcgtgtgtggcctgcaagtcagccagagtactttatggttaacggaaatgatttatattaagccttaaatagactgttaaaaagacgtaacttgaaggggccaaatttatgaagtgacttcaaaaatactatctaaacagtcagaaatccagcctaataaaaagacattttttagaaagtaaaaagaaaacgtgatatataatgaactcttaatataacttcctgtataaataactatgttaactttccatcctacctcctagtatttgtgatgctgtggcactctcttcaattgatgttt

SEQ ID NO: 366055 - DNA, 623 bp, Homo sapiens
tttgtcaaatgctttactccatcaattgatataatcctgtgattatttttcttcctaagcctgttaatatggttggttacattgacttctgaatactgaaccagccttgcatccctggaataacccctacatgattatggtgtataattctttcacatattgctgaattatatttgcaaatattttgttaagaatctatacggactctggtctacagttttcctttttggtactgtttttgtctgcgtttaccatcagagtaatacaggctatacatgagttagaaagtgttctctcctcttgcagttcttggaagagactgtgtagaattgatgttcattcttttttagacattttgtagaattctccagtgaaacaacctgggcctggagatttcttttataggggttcaaaaattatcaattcgatttccttaatagacaattttgaatagccttatagctatttcatatgaagtgagtcatggcagtttgtgccttttgaggaattggtccatttcaactaagtcatcaaattyatgtatgtagagttgtttgtagttttcttatctttttgatgtctgcaaagacaccctggtttcattcctgatattagtagtttgc

SEQ ID NO: 366056 - DNA, 629 bp, Homo sapiens
acatacaaataaacacatttagacatgtatacacgcacacaaatgaagatccaaatggcttttaccttggaactctagccatgagatagcaatacaagctcgccggttttacatggttacactctgtttgccccagtaggtaatccagtgaaggctgtgaaccaaaattttggggtaaagcagtttccatgccagtttgatttttaaattccaaagaacaccggggccaaacagcaccaaaagagagyaccacatgctaaccaggcctgaccctgcttagaacagcagcacaaaagcttggatacatacaacaccatcccactttcccattcaacaacaaactccagattccaagcaatattggggacaaactattgcaaaagaatatcaagcatttcctccttagattattggggtcaaattgataccagtggttgaggatgcagccaagcgggggatcaggtagcatagatggagtctttcccgttattgtcccctggctggaacgccaaaatatgttaccagtggagggtgtccaggttcttggcagtttgaacaaagactcagacaaaacatacaaagcaatgaaagagtaaatcaatgaaagcacagatttgccggatgcagtg

SEQ ID NO: 366057 - DNA, 609 bp, Homo sapiens
ctcccaggtcatacccatgctgcaggtatcacatttagtagcaagaatgtaggaaacatggtcttttctggtggctctcttgatgttttgctacacttgtatttacttgtctcaactagactccacctcctgcagtctcacatgacccatgcaactcaacggaagtcatacaacaatcactagcagtaagtacccgcagctgtagaaacaaacaaacaaatgaaaaaacccaaacaataacgtttgcacaaggacccaaacttggcagtgcacctagaagagtttgtagcataccattggttataaacattgtacaacacaaacctaaactattacatttgtgaggggataggttgccatttcccttgcttgtttatgagcaaaaacttgagagctgcattatttttgccttcccagatagcactgaccctcagtaaatgtttgatgagctaaaagtgcctttagtgagtgggaaattaagcaaggcccttgattgtacatctattgctccaaacttcagaaaaaccaatyataacttttacagaacatctcctccctatgctgctttatttctttccatacatagctgaactcatcacctgagactca

SEQ ID NO: 366058 - DNA, 499 bp, Homo sapiens
cttggggcaagattgctactccaaatcattgattttgagaaaattgatcatatatatttgataaaatactgaatggggcttaccaattgttgttgtaaataaaaacttctgcattttaagatgaaagtgagttatatttttctaagaagaatatacttttgagaaaataaggcatttccttagagtcctgttaaaaataggtgagttggcctggcacggtggctcacacctgtaatcccagcactttgggaggctgaggtgggtggatcgcttgaggtcaggagttcragaccagcctggccaacatggcaaaaccccatctctactaaaaatacaaaaattagcagggtgtggtggtgcatgcctgtaatgccagctactcgggaggctgaggcaggtgaaccacttgaatgttgcagtgagatcacactactgcactccagtctgggtgacagagtgagactgtctcaaaagaaaaaaaagttattaagtgaagttc

SEQ ID NO: 366059 - DNA, 606 bp, Homo sapiens
ctatcaggccttttgcagaaagcatttgctgacccttatcattaaaaaaaaatttgagaagcttcagagagtgaacatcctttggctacagggcattgcaaggaacatgaacagggatcaggagaagtatattctaggtctagccctatataaccctgcattagtcagttctctgtgcttcsgtttacccatcaaaatttcagtaagtggactagatcaagtttcttctggttttgagtaatatatcaactcaaacaacctggggtattttgttcatgtgaatagcccaactattttcatctgaaatcttattattttgtttttcttttcttggtttaccgtgctagacagcttaaacatgatattaccaacttagagtctaaattcaccatgtcttcaaagaaaataagaactaattcctatttgattgggctttgagactaaatgggacattaccatttagtacaaatgaaccagaagaaagaagggagtttgtgtagagtaactttaattatcacaatcatcatcgtcacatatattgcacgtaagatgttccaggtactgttctaagtgctttaaatattttaattcctttatactctcaca

SEQ ID NO: 366060 - DNA, 583 bp, Homo sapiens
gcccaactattttcatctgaaatcttattattttgtttttcttttcttggtttaccgtgctagacagcttaaacatgatattaccaacttagagtctaaattcaccatgtcttcaaagaaaataagaactaattcctatttgattgggctttgagactaaatgggacattaccatttagtacaaatgaaccagaagaaagragggagtttgtgtagagtaactttaattatcacaatcatcatcgtcacatatattgcacgtaagatgttccaggtactgttctaagtgctttaaatattttaattcctttatactctcacaaaaaccttatgaaataggtactattattaatcccattttacagatagggaagctgaggtacagagatgttaagtaacttatccaaggtcaagaagctggtaagtagcagagccgggattcaaaccccatgcagtctggctccagagtcctttctattaactgacatcccatataaaagaaagaacattcctagccttgacaacatgtcttcagcaaaagcaaaagaaagagaacagtttctccatctgccccaccccttcc

SEQ ID NO: 366061 - DNA, 509 bp, Homo sapiens
tttacctcagtgcctcgttctttaattgctcccacattgtcttgagatctcccttccagaccaggggctgtgtctaattcatttctgtatccacagatcctatcacagggtctgacgcttaatacatgtttgatgaaggaagagagggagagatgctactcttgactcaaagttttcccagtataaagggaaagacggatatgtacacaaagaatgagagcccagtatgaaaaatgctataaaagaaacattaaaaagagcctcacagaatcaaagaagaaagggccatcgaggctggtgatcttgagaaatacttygcaaaggtaatagctggttgaggactaagagcttgccaagcatagcagcaggcagattagagcattctaggcaaggagaattgtacacttcattcccaagcacaaggattaaattcttacagggaatggtaggttggaacaaaaataagtgaaagagatagaataaggaatatatatccttaacataaaaat

SEQ ID NO: 366062 - DNA, 561 bp, Homo sapiens
caaaaagaacaaagtacctatatatgctacaacagagatgaaccttgaacacattatgctaagtgagagaagacaaatgtaaaaaaccaaatattacagtatatgattccatttctgtgaagtgttcagaataggcaaatccaagaagacaaagattagtgtttgcttaaggctggaagggttggagaataattagaactgagaagagtatggggcttttttgggagatgataaaaatattctaaaattgattgcagagataatcacacaactctttgaatatactaaaaatgatcaaattgtacattttcaatgttacgtgaatatctcaatggagctgtaattttaaaaagcaaaaagatacatacagcattaatttataatattttaagtcaatgtattcaaaaygttgtttcgacatagtatcaagaatttaaaattatttttgagatagttacattcttttcttaaaatctagtgtgcattttacatttgcaacacatctccatacagatgctaaattttcattggaaatactatatagttagatttcataaaatt

SEQ ID NO: 366063 - DNA, 605 bp, Homo sapiens
agtgtgcattttacatttgcaacacatctccatacagatgctaaattttcattggaaatactatatagttagatttcataaaatttaccattgaaagagtaaattcatacrcacaagttgttccaaaaatattttaaagtcttccaacagctgaattgagtagtgttagtgaggtagtttctagatatagctgtagatataaatgggtaaatatagttattcagcacagatacatactcagagtatggtatgttaaaatttaactcctactgtgaaaatggaggtcattacgttaagtgaaataagccaggcacagaaagacaaatatcacatgttcttactcatatctgggagctgaaaagttgatctcatggaggtagagggtagaatgatagataccgaaggctgggaagagtgtgtgggtgggggtaatgaagagagtctggttaatggggacagacatacagttagatggaaaaaatcagtactgcagttcaacagcatggcagggtgactgcagttaacaacgatgtgttctatacttcaaaatggctggaagagaggatttgagatgttcccaaaacaaaggaatgataaatgctcaa

SEQ ID NO: 366064 - DNA, 543 bp, Homo sapiens
taaaatttaactcctactgtgaaaatggaggtcattacgttaagtgaaataagccaggcacagaaagacaaatatcacatgttcttactcatatctgggagctgaaaagttgatctcatggaggtagagggtagaatgatagataccgaaggctgggaagagtgtgtgggtgggggtaatgaagagagkctggttaatggggacagacatacagttagatggaaaaaatcagtactgcagttcaacagcatggcagggtgactgcagttaacaacgatgtgttctatacttcaaaatggctggaagagaggatttgagatgttcccaaaacaaaggaatgataaatgctcaagataatggatatcctaaataccctgatttggtcattacacatgtgagacatgtaacaaaatatctcatgtgtcccataaatatgtaaaaatattatgtatccatttaaaaattaatctctactatatacaccaaaaacaaaactaaattcctcatatggcctcaaaaccctacaacatctgccctcacctc

SEQ ID NO: 366065 - DNA, 546 bp, Homo sapiens
gccccattgtaataattgattcatgaccagcctgggcaacatggtgaaacccgtctttactaaaaataaaaaaaatttaggtaggcatggtggtgcacacctgtggytccagctactcaggaggctgaggcagaaggatcgctcaagcccaggtggtggaggttgcagtgatccaagatcgtgctgctgtactccagcctgggtgacagggtaagactttgtttcaaatgatactaatactaataataattgattcatgtaagaatcatcttccccaagaaagtacaattgagcaagagaagaatgatgagatgaagccaccaggaagaaagcgtggggaagggtgttgcaggcagagggaggggacagtgcagtccctgtggcttgcttcagagacagcaagaagatctcggttgctggacagaggaggagaatggtcagagatgacagacccagggcatgttgggctttgtaggtcctaaggaggagctaggattttatcctaagtgtggggggaaaccatgacagtctttggaatggaaagga

SEQ ID NO: 366066 - DNA, 546 bp, Homo sapiens
gccccattgtaataattgattcatgaccagcctgggcaacatggtgaaacccgtctttactaaaaataaaaaaaatttaggtaggcatggtggtgcacacctgtggttccagctactcaggaggctgaggcagaaggatcgctcaagcccaggtggtggaggttgcagtgatccaagatcgtgctgctgtactccagcctgggtgacagggtaagactttgtttcaaatgatactaatactaataataattgattcatgtaagaatcatcttccccaagaaagtacaattgagcaagagaagaatgatgagatgaagccaccaggaagaaagcgtggggaagggtgttgcaggcagagggaggggacagtgcagtccctgtggcttgcttcagagacagcaagaagatctcggttgctggacagaggaggagaatggtcagagatgacagacccagggcatgttgggctttgtagstcctaaggaggagctaggattttatcctaagtgtggggggaaaccatgacagtctttggaatggaaagga

SEQ ID NO: 366067 - DNA, 508 bp, Homo sapiens
ggacggggagacggtgtcccgaggaaagagaggaggagcagaggatgctgcgaatcactgtaatattttccctaggaaagtcccaggggttcttgtagaggccttaatctcctattctgggcttcggatgccggtagctccttgctctttgagagctgcgttccctctggcctctgtctgtctctgttagagcctaatcatatttgaaagtagtttttatctgtgattattcatctgtatatgaggagctyatgtgtctaagctgccacttccatcaaatccaagcgcacggccccgttaatacgcacaggcctgacgttggcagggaaagtggtccccacccctagtccaaggagggagattttagagagttacagggggccagctttgggagtggggaggtggaggtagacagtgctggcatcaagacagggagcaaaacaaatatgagagacctaatagcaggaattccagccaggcccgtaaatcgataggtgggcttaccctc

SEQ ID NO: 366068 - DNA, 424 bp, Homo sapiens
ctttaattttatcaaagtcactaataatgttgcttttgagaccgagtctcactctgtcgcccaggctggcatgatctcggctcactgcaacctctgcctcttgcgttcaagtgattctcytgcctcagccttcagagtagctggaattacaggtgcaagccaccatgcctggctagtttttgtattttgagtagatacggcatttcgccatgttggccaggctggtctcaaactcctgacctccagtgatccacccgccttggcctcccaagttgctgggactacaggcatgagccactgtgcccagccaataatgtttttataatcaagagttctaccaatttgcttctattgacagcaatgatttagtcattacaaaataaaatattattggattaaaactatttggatatattttcaccaa

SEQ ID NO: 366069 - DNA, 520 bp, Homo sapiens
gctggagaataatggtgggcaggggaagggttaagtttgtctctgtatcttcctgtattgtttaactggtccttttttgtcgtgagacagtcttgctctgttacccaggctgcagtgcaccaccaccaccatgccaccatgccaccatgccaccacgccaccacgcccagctaatttttgtatttttagtagagacagggttttgtcatgttgtccaggctgatcttgagctcctgatctcaagtgatctgcgtgccttggcctcccaaagtgctgggattacaggtgtgagccactgcgcccagccttaatgtgcatatagtacaaagctcattttttgattaaaaacacaataaatataaaataataataaaagtcaattaacttttattatttgaatttttagcagacacattgcaccttgtactttttaaaaatagcatctactcaactttattttttatgtgttttttttwatacaaaactccggaccttatttttctagtttttccacgaatgc

SEQ ID NO: 366070 - DNA, 581 bp, Homo sapiens
tgacactcagtattaaccatcacacagtcccatccccagtgctcagagttttgtagattctgaataagtattggtaatatatacacattcatctttttctttaaatacatataatgatgctgagctccctccagacaaatgagaactgatgtgttgcttcttaggtgccaggaccgggatgagggagaggcaagtgagacattctccccgggagcaaaatttaaggaggcaccaaamacccagtcatcaagataaataacacttggatgcaatatgtttaaaaacgaaaaagaatgaaaaaattaatgcaaaattaatgcaaaaatacccatgataaacaaatatcacagtcttcaggaaatgattggtattactaacttttcctttggctcctggcaccagagtgccaggcatcattgaagtgcttttaaaatacaaactcattcttttttcttcttcttcttttaagacagggtctcactacatcacccaggttggagtgcagtggctcactgcagcctcaaactcctgggctaagtgatcctcccacctcggcctcctgaggagctgggactacaggt

SEQ ID NO: 366071 - DNA, 581 bp, Homo sapiens
tgacactcagtattaaccatcacacagtcccatccccagtgctcagagttttgtagattctgaataagtattggtaatatatacacattcatctttttctttaaatacatataatgatgctgagctccctccagacaaatgagaactgatgtgttgcttcttaggtgccaggaccgggatgagggagaggcaagtgagacattctccccgggagcaaaatttaaggaggcaccaaaaacccagtcatcaagataaataacacttggatgcaatatgtttaaaaacgaaaaagaatgaaaaaattaatgcaaaattaatgcaaaaatacccatgataaacaaatatcacagtcttcaggaaatgattggtattactaacttttcctttggcycctggcaccagagtgccaggcatcattgaagtgcttttaaaatacaaactcattcttttttcttcttcttcttttaagacagggtctcactacatcacccaggttggagtgcagtggctcactgcagcctcaaactcctgggctaagtgatcctcccacctcggcctcctgaggagctgggactacaggt

SEQ ID NO: 366072 - DNA, 621 bp, Homo sapiens
ttagttcttgttcaccactgcaaaaagttaaactagactaaatatcacaaatccagtacatattgcttactatctacttttttcttcctaccctggcactactagttttatggtttaggttttcaataactttccttggggcttctctcatacaatggctggatttttattccttcaagttctttttcttaatccatttccccaatgtgaaaagtgagtctgaacgtggttttgctctaaagggtgtgtgtaaaactgtgctctgtagaagcccaagaggttgaacagaagatgcttctggggcagtcagggggagttttcatgtagtggtgatgttggaagtgggaaggagacgacagactttcagaagagagatgtaactgtctccattcaacatcaacaacagcaccactatttcatttccccacaaaaawtttttttaagcaaatgtttctatagcaagtaactatcatcatcatcatcaataatctaaaaataaagcgaaagggtttttttaattctgttcttatttctaactgattttcaacctctctctctttattaagcaggaggagaggggatcacagttctttcttcaacacatactccccagtgctccac

SEQ ID NO: 366073 - DNA, 621 bp, Homo sapiens
ttagttcttgttcaccactgcaaaaagttaaactagactaaatatcacaaatccagtacatattgcttactatctacttttttcttcctaccctggcactactagttttatggtttaggttttcaataactttccttggggcttctctcatacaatggctggatttttattccttcaagttctttttcttaatccatttccccaatgtgaaaagtgagtctgaacgtggttttgctctaaagggtgtgtgtaaaactgtgctctgtagaagcccaagaggttgaacagaagatgcttctggggcagtcagggggagttttcatgtagtggtgatgttggaagtgggaaggagacgacagactttcagaagagagatgtaactgtctccattcaacatcaacaacagcaccactatttcatttccccacaaaaaatttttttaagcaaatgtttctatagcaagtaactatcatcatcatcatcaataatctaaaaataaagcgaaagggtttttttwattctgttcttatttctaactgattttcaacctctctctctttattaagcaggaggagaggggatcacagttctttcttcaacacatactccccagtgctccac

SEQ ID NO: 366074 - DNA, 591 bp, Homo sapiens
atttttgctttctgataattgtattaaaatagtatgattttaattttgggaaattttgagaagaaaaaagaaaaaaaaagtttgaaggaagaggaaatattcaatgaaacacaccaagatagaatgactttaaaatttaagatttttaaacaatcataacatatattttcaattttttgtattatgagttaaatgaggtgtaaaatttttatagaaggacttaaaaatccgattttaggtgttttattggtccaaaaaaaactgtttctctcttcttgtatcttagtaggtaaataggctgtgcaggaataaaacatgtagctatttggaatttgcaagggtagagcaagtcagtcttatttcatgtagataagacttctccccatgaaatgtgagttatgacttctaagcaagactctatggttcaatagcagaattgaaaagacattctaacattttgtccaggatttactccttcccgygggttcttggtcttgctgacttcaagaatgaagccacggaccttcatggtgagtgttacagctcttaaagatgctgtgtccggagttttttctttcagatgttcagatg

SEQ ID NO: 366075 - DNA, 612 bp, Homo sapiens
actggggtttagaaatttactatatatatatatatatatatatatatatatatatatatatatatatttgagggagggagcacgtttcagcctataacactggtcaaagcgggtctattagccctaagttaactctctaaagaaagtcatagatgctggcccttaaaaacataagtatacataaactggagatagtcacacaaaaactgtgtaggaatgctcatgtatttgggcagagatcaacagttwtgtgtctgcaatactgcaatacaattctaatactaattacttagagttaagacagattgcaaaggttgaagccatgctaccatgaatactgccctcacttcagacaccagttgcaatttctggggttctagaccatctgcacttctgacgaactcagggcctcccactagacctttaggtttgataattatctagaatgatgcaaataactcactaaagcactatatttgtgatcacagttttattataaggcatataaatcaggaccagccaaaacaataaatgtacagtatgaggtctgggagggtcccaccagtggagtttctgtgtcttctggccatggaatcaggcctcatcatcctc

SEQ ID NO: 366076 - DNA, 577 bp, Homo sapiens
tgttacttgcattagtttcttgtggctgccctaaccaattgatagaaagttggtagcttaaaacgattgaaatctatttttttgcagttctggargccagaagtttaaaaccaaaatctcaacagagcctcattccctccaatggctctggaggagaatccttcttgcctcttccagcttctagtggctctgatgttagctcctggtgactgcagatgttccttggattgcggctacagaactccaattttgtcctctttcttcgtatgtccttcttgtctatgtcttcttcccttctgcctgggttgaatcagtgcagggtaatttcctcatctgaagatctgtaagttcgttagccctatgaagacccttttttccaaattaaataaggttcacacttaatgccatataaggtgatattcacaggttccagggcttagaatatgggtatattttgggggtccaccattcaacccactacaatagtctaagccaccctacaggaatattgtaaaaatcccattaagtgaggtatacaatgtacctggaaacacatgttaatatttcttccatcaat

SEQ ID NO: 366077 - DNA, 439 bp, Homo sapiens
taaaggttgaacataaagaagaagatgtgaaatagttatctccgacagtggaagaatgattcagttagggaaagaattactaggcaatccacttgaggttgggacaagggatttaaacaggaacaggtcagcatgttgtgtgcatatattgagacatcatcaattgtgaatttggggttttgaatttaaccatgggtgcagatacgtcaaaagaaggcaatygaagaaaatgcaacaagacaatttcaggcggtttcaatgagctgtggcaaaactgcctgccaaatggcttccattgatgtttgccagaaccctgttctagtttctgcctcaggatagtgtcatcactgttggctctttctcagttgcctaatttgtattgttttagtgattgacatttatagatgcaatagaagagtcaggaatcatgctcagagtt

SEQ ID NO: 366078 - DNA, 627 bp, Homo sapiens
cccattgaagtttactcaatgtttatttggaatcctgaagtcaattaaaggagttttttcctcaacttcaacctctgtagggaaaagaaaccttgtcaagtggttccagataagaactctgcaggtaaccgttctgtggttcttctggagagtgagcccccacaggatgcagggaagaatggatcagcaccatggacagcaaacaacgcccagtcccaaaccacagcccagctgcccagaacccctttttgaattcttcccctctataatcattttttaaaggagaaagaagtttattttgttgacttcactgaaatattgttttctgaaaaatcacactgtgtatgttaacaatgtttatacctcatatgacagaatacagattctgaattttgacagagaataaataaggtcagtggtttgttgataccttatgctagagatacyaacacatgcatacaaagcgtgagaatatgcagcagaaaataatttgtcttttcagtgagcagctgtagctatgtgggctcagtgatgctacgccattttctttcctgattttttttctttttactatgaaagcaaatcaccctgcttataagggggaggtaaagtgtttaaaattcattc

SEQ ID NO: 366079 - DNA, 464 bp, Homo sapiens
atgtgatcaccttacaggatggcattatgcgtgttatctgcagatatgctaaacatgtcaggactaataacctagcctgtcagatccacaagacccctttcatttcatgtaaaatatctgtgtgtgtgtgtgtgtgtgtgtgtgtgtgtctgtgtgtgtgtgtgtgtgtgtgtgtgtttggtaaaagcagaactgcaatcctttgcttacctgctccccccacctcccctgggagacaaagcggaaatcagcaatcttggatatggtgtgactgacaaggataaaaagacagaattaatccacctctgatgcagtgtgataataaagaattaaagcaatttcaaaataacagaaaaggaagcaaatgggaaaaaaaatcataccacatttattctacttattcctgagcaatgttagcaaaaggtgtaaaaatagtrattcaggccaatctccttaattataga

SEQ ID NO: 366080 - DNA, 592 bp, Homo sapiens
actttaatcagcatttgtggtggcgtctcagtccccataggtccaatcacatcctacttctgcagacctccttgtttcttatctttcaattctttaccttctaggcctcagactaacaatacatgctgttatcaaccatccatgagtgtgtatatatatctctgtcttgggttacttttctttcttcataaaatggatgaccaggtacacagtgcaaaactcggacattgaaaggatttcttcacaccagagtagttaataaccatccgtgactaggactggagtgtaggaacacccataatttctacatactttcatcatctttatctaatacattgataactcccagcaagagacatatgattccataatagttgttattatgagattcttagaacttctcagaagactaagatactgcayctggcagagtgtttcctttctcttgtatcacatctcagtttgctataagtaaaaatattcacatttgtacctctatagcatgccaaatgatgtcaggacaccacctcttatgcagtcaacattaacagctgcatagcatgtactctaccaccaaaatcttatttaaata

SEQ ID NO: 366081 - DNA, 579 bp, Homo sapiens
taatcatatctcaacttttgtgactattttagcacaaatatatccctgggcatgggaactcacacctaaagttgtattttaaaaaaacctgaaatccarttataaaccccctgcaatttggttaaaagcagtttaatttactcaactgcataacaataggtggttttcctgatttttttcacaaacacgaaaagcatttgatgtgagttatgattggctagattgctacataataaacagactgaagcaaattgggggtgcgggtgtaggagggtttattttttcaacttagattgatgacttttatgactcaaaacagtcacatggtttatttcttcaagtgctctagccaggactttgattgtctgtcttccacattgttctcaagggcacctttacatcaatattctgaggccaaggtccccagagacattggccaggggaaaactggctgaatgtgatgggtggctgttgccttcctcaacttcaagaaataaagagtgaaggtgattggacagtcaatgtgcagagtcaagcatcatcagtttattttgttgaagcccatacagtggaaattaa

SEQ ID NO: 366082 - DNA, 579 bp, Homo sapiens
taatcatatctcaacttttgtgactattttagcacaaatatatccctgggcatgggaactcacacctaaagttgtattttaaaaaaacctgaaatccaattataaaccccctgcaatttggttaaaagcagtttaatttactcaactgcataacaataggtggttttcctgatttttttcacaaacacraaaagcatttgatgtgagttatgattggctagattgctacataataaacagactgaagcaaattgggggtgcgggtgtaggagggtttattttttcaacttagattgatgacttttatgactcaaaacagtcacatggtttatttcttcaagtgctctagccaggactttgattgtctgtcttccacattgttctcaagggcacctttacatcaatattctgaggccaaggtccccagagacattggccaggggaaaactggctgaatgtgatgggtggctgttgccttcctcaacttcaagaaataaagagtgaaggtgattggacagtcaatgtgcagagtcaagcatcatcagtttattttgttgaagcccatacagtggaaattaa

SEQ ID NO: 366083 - DNA, 593 bp, Homo sapiens
tgatacatattgacacaagttctggaaaaatacagaagtaagcaataaatgggctctttcttaacaaaccattgaagcattatcttgtcattgggaataaaacagcagctgcttgattacaaacagcaccatttggtagacttctatgaacattaaacaaagaataacccatttgatttcttcatatttctaaacaaggtttgaatttctgccttaagcsgtacttcatgccaataaaataaactgagggtgtcctttaataaaaggtgcactgaaactttatgatttcctacatatctctcttcagcttaggaaaaataatcactcattctgataaattgtgcagcaacatacatttattcattcaagaaatattttattcacaaattttgcatcaaacattataaaatagagtagtaaatatcatatggcccctgatcttagaaagcttaaagccaaatcaagccactttaaattgaagcaaattaatctatccaacattacctgatttgttcaaggctacccagctaataaatgatgtgtactgtgacttaaactcttctcttctgatttccaaatgaatgcccttttta

SEQ ID NO: 366084 - DNA, 574 bp, Homo sapiens
tgttaagacagtaaacccctactcatatctatgctcttatagccttttaaataatgcatactagcttctgaacattatatatgatctttttttcttagtttattgattatataattcatgctttgaacatgcgctgtggagaaccaggactttgcctttttgatcattgctgtgtctgcagaccttaaaataaagtccttcacagagtaggcactttattcactttatttgaatgagcaaatcaccatttyatgaggtaggcactattattctcaaaatttacaaatgtggataatgagacacaaatagataagtattgtgctttgcttagccaaggccatatacctggtaagtggagagatgggttcgcatataactagaggtcaagttcttaaactgaatgctaattttgcccccttcagatatagcatgcactctccaatttgccatagcccccaaccagcacactgtattctttcatgttatctgcttgacccttgttgaatttaggtttgtaatttcaagctgaaataatagaagacacaaggaaactgtgagagatgaaagacagact

SEQ ID NO: 366085 - DNA, 603 bp, Homo sapiens
acaaatgccaagggaatttgttaccaccagacctaccttacaaaacctcatgaagaaattgctaaatgtggaaaggaaagactatcatcagccactacaaaaacacacttaagtacgcaaaccagttacactataaagcaaccacacaaataagtctccataataacgagctaacatcatgatgatgggatcaaatccacacctatccatactaaccttgagtgtaaatgggctaaatgccccaattaaaaggcacagagtggcaagatggataaagaagcaagacccaatgatacactgtcttcaagagaccaatcttgcatgcagtggcacacataggctcaaagtcaagggatggataaaaatctatcaggcaaatggaaaacaaaaatgyagaagctgcaattataatttcagacaaaatagactttaaaccaacaaagataaattaagacaaagaatataattacacaatggtaaagagattaattaaacaagaagacctaactattctaaatatatatgcacccaacacagaagcatccagattcataaagcatattcacagagagcttcaagagacttagtctctgacacaataat

SEQ ID NO: 366086 - DNA, 654 bp, Homo sapiens
aaaaaatagctcccaataaaatggtattgaattaaaatacttcaaaataattttccggtttctgcaagtccttctctgaatattaacaaagataaatatcttttaaattttgatatggcataaaaaagagtgtacaacctattgggagaggaagtgacagtggttctgaatttgagggatgaagaagtttgaactggacctgaacaaaccctcttagtgtcactggaccctggggagcaaattctgctttgtaacttacataattgaactcagacgtttgttgaaagccagaatgtgagagatgaatttaaaaatgagagtatgtgatttctttcatagaaagtcagagcaaattggtcaaagctgcaggccagcaaagaaacatgatcaaaatggatsggattatcttaaatcatagaatcccaggaaacattagggaaagggcagtgttcctggaattaatagaaaatacctgaggtgcagcatatgtaatctgtcaattatttttaaagtggtttgaggaaagatcacgtgataatagttgctatcattagcttcagaggctacacgttttcaaatgactcttaatttgttccaaatatttctagaacttctctctgagatggttttcattactttttacttcaaatttgt

SEQ ID NO: 366087 - DNA, 697 bp, Homo sapiens
ccatatacttttgtcaatctgtggtagggggtcgtgtacaggggaaatgcactcactttgggtgggtcacaggaggcttaatgttacctctattaatctaagtcttcaaacatatgtaatattattccattagacacttcaagaaaggtccctctggtaaaagagaacaacctttgcaaatatgttcagggtttacatgttcagggaattgttaatagtttgatattcctagaggaggataaatgtctatgagaaggcaaaagagattaaaccgttaaagtagacaagttggaggcagttgacaacctattatgctattttgggagctttgctatttttctgctgtagagttttaagttgaggaattcaggctcagattgtcttgcatacattcctrggaactttcaccatatcccagctgcatctaatctcttcatcttatatttttaaagtcactctatgagcaaataagttgggcacaaattgtgctcatttgtcttgaaagagcatgtaacattcatgccaaaagccatgtagcatccccttctctgcccacttcagcactcttacagtggacagctctatactctcagcccaggttcccgcttgatagaggcttttctgcttttgttttctcagaagctgtgaaagccagctgctggaggtagttcgcacataatgggaataggagcccaag

SEQ ID NO: 366088 - DNA, 513 bp, Homo sapiens
aaggttctagaataacttgtgtcctgaagcctagatacgtkccagaagaaaaatgaaaacatattggaagaaaatagtatacagagattcaacttatctctacattttaaataaacagtctcaattcctcaaacaagaataaccagccagggaggggccaagatggtggactagaaacagttgcggtcagaggccctcaccaaggacacaaacagcgagtgaatcctgctggtgaatccagcgagtgaatcccacctggtagccacaaggggaatggggatctcctaccccaagccaagggaggcggtgagcgattgtgctacccctacctggaaagtcacgctttatccacagatctgtgcaacctgtggataaggagattccctcaggagcccacgccaccagggcgttgagtcccaagcacagtgctgtgcagaatctcagtggacactcagctggagactgcctaagactaccaaattcctgaggagaggggcagctgccatccctttg

SEQ ID NO: 366089 - DNA, 513 bp, Homo sapiens
aaggttctagaataacttgtgtcctgaagcctagatacgtgccagaagaaaaatgaaaacatattggaagaaaatagtatacagagattcaacttatctctacattttaaataaacagtctcaattcctcaaacaagaataaccagccagggaggggccaagatggtggactagaaacagktgcggtcagaggccctcaccaaggacacaaacagcgagtgaatcctgctggtgaatccagcgagtgaatcccacctggtagccacaaggggaatggggatctcctaccccaagccaagggaggcggtgagcgattgtgctacccctacctggaaagtcacgctttatccacagatctgtgcaacctgtggataaggagattccctcaggagcccacgccaccagggcgttgagtcccaagcacagtgctgtgcagaatctcagtggacactcagctggagactgcctaagactaccaaattcctgaggagaggggcagctgccatccctttg

SEQ ID NO: 366090 - DNA, 609 bp, Homo sapiens
ttcgtctccttaaaagtctgagtactttttaaaacattttttaattaattatttttttaccagttatgagaaagaaacatttgtggctttatcccagagagaagtgatgggcccttactgttttcagagttaagcaataaaaactgcatctaaaataatagacaccttgtctcattatagttctgatatattgtcatgatagaaaaacaaagtgaggaggttttttttaaggattcacttacgtttataaatatggacaaacataatttatgagaaaattcaagaaacataaactatgataaaatggtaatcttttcttttattaaaacttagyctaatctgaatttcacattgtactgatttaatttattagataccattaaaatgcacagacaagttactatttgaacaaatacattttttttttgagttgagagtaagaagtaaggtattcacagtgaaagaagtaacagtataagggcctagtgaaaagaaagtatggttattcaggaaaactagatgtttgataaaatgagatcatagaattcaagggaaaaattgctgagaaataaggcagagacatagaaaaaaagatcagagaagacgttg

SEQ ID NO: 366091 - DNA, 641 bp, Homo sapiens
gataatggatgtttcctgaggttggcaaaaacctaactggattcccattagcttgagtggtcaaggtttattcctgaaataagtctattctatttgttacagtaagctagatggaagtgccaagaatttattcaccaggcacttgattatagagggctttggtatgcaatgtggactgttaaaacgttaatgcattcaattatacagtcttttcagaagacttaatagaaactttggaaacgtattctttggttttctagtctccaaatgtcattggtttgctattgaaaattaatytaaattgaaaatgaatgatggctaattccatagtgatgccagacctcaagccaagggatttgagtgaattaagttatgactaactaaaaagagtatcactgtttaaacatgagacattccatctggacaccaaattgaattggttgagcatctataatgagaactgaatactgctgggcacagcaagggtgaatatggagattactaaaattaatctttgcccatgggcatctcataatcttttattatagttttcaatcgtgggtgcatgcactctaagagttctgcataacaatctgtttgagtgcagaaagacaatagaacaagccaaaatagtgttgcag

SEQ ID NO: 366092 - DNA, 672 bp, Homo sapiens
tgacaacaaatgctggtgaggatttggagcctcaagaacactcatagcacggccactatggaagacagtttgatagtttcctactaaactaaacaaactccatatggcccagcaattataatgtttggtatttacccaaaagaagtgaaaatacatgaccagaaaaagggatattcaacctataattacgtttaaaatttggaaatattacaaaaacagagagaaagtacttttaaaaaaactaatttctatatttgaaatattattttaacatataatcttctcatctttttgctgagctttttatgttgccttttttcaacattggggtcatactgttcacactatgtgataaactttttttacctaaagaatgttatgagtattcattccttctcacagcaaatattatttcatttttattttgtgaactcagtcaccattatcttaactaaaatgtgtaatggctttttgagttttattcttgaacttcttttagtgcackgcagaaattgtgtaataccctaaagttctttcagagggagagcaactacacctgggggataaaaggggaattagagagacacctggagatgttagaaatgtgcattttcttaataattagcacatcacatatctagttagcatctcataaataatcatagagtatgt

SEQ ID NO: 366093 - DNA, 605 bp, Homo sapiens
atataggtatgcatatctgtcatatctgtcaaaacaccttgtatttatatatgttagaaaatagctatctatatacatttatgttatggcaagcctatgaatatgcatgttcagtgtaattgtacatttccttttcaatctagactttctgccaaaatcttgccccaagttgcattttgatggtgtacactttttcctcttctaatatataagtggcttgtgaaacagggatcatcagcatttgtctcttcaaaatgtctttttaaattcctyatctcttttgcccatgttttaaaatatttcttttattaataagattaattttgtaaacacttttctattagctagtgctgtataaaattcacctcaaaactaaatgggttaaaacaacaacagtttatgatcttcatcattctaaagttgcttgagcagttctcttgctggtctcaactgcgctcattcatgcatactcagtcagctggtgactcagtgggagtgggatggtctgagaggcctctctcacaagtctgagatctcagctgggacagacaaaatggctggaattatgggcctccctctctacatgagctttcatctcagtctta

SEQ ID NO: 366094 - DNA, 511 bp, Homo sapiens
tagtcatgtgctgcataatgacatttcagtcagtgatggattgcatacatgacagcagtcccctcagattatactactatatttttactataccttttctaagtgtacatatgttaagacacacaaatgcagcctgggcaacatggtgaaaccccgtctttactaaaaaaaaaaaaaaaaaaaaaaaaaaaaaaaatccgtgcacagtggctgatgcctgtaatcccaragctttgggaggccgaggcaggtggattgcctgagctcaggagttcgcaaccagcctgggcaatacagtgaaaccccatctctactaaaacacaaaaaattagccaggcgtggcagcatgtgcctgtagtcccagctgttcgggaggctgaggcaggagaattgcttgaactcgggaggcggaggttgcagtgagccaagatcacaccactgcactccagtctgggcgacagagtgagactccgtctcaaaaacaaacaaacaaacaaaaacaaacctgagg

SEQ ID NO: 366095 - DNA, 511 bp, Homo sapiens
tagtcatgtgctgcataatgacatttcagtcagtgatggattgcatacatgacagcagtcccctcagattatactactatatttttactataccttttctaagtgtacatatgttaagacacacaaatgcagcctgggcaacatggtgaaaccccgtctttactaaaaaaaaaaaaaaaaaaaaaaaaaaaaaaaatccgtgcacagtggctgatgcctgtaatcccagagctttgggaggccgaggcaggtggattgcctgagctcaggagttcgcaaccagcctgggcaatacagtgaaaccccatctctactaaaacacaaaaaattagccaggcgtggcagcatgtgcctgtagtcccagctgttcgggaggctgaggcaggaraattgcttgaactcgggaggcggaggttgcagtgagccaagatcacaccactgcactccagtctgggcgacagagtgagactccgtctcaaaaacaaacaaacaaacaaaaacaaacctgagg

SEQ ID NO: 366096 - DNA, 602 bp, Homo sapiens
agaagaataatttagaaagtagttcagataatagattattggtagcagcaatgaaggtgaaaaagaggaagaaaaagagatattaggttgagaaaactgagagaattggggtttaaattcagcatccagaatgtttacattgaaattcatttaagtcaacttttaaaaatttagcttgtgtgagaccttttaactgcaaatccctacctctatcccaaattgattgttcaggcaagttgtttatgtcaggaaatgacacaacgtggtggaaacaccaacatctgtttctgacaacttgcaactaaccctcagccacacagcgaagagattttgagacctctggatgatccacatcatggggcattgacacggaaatatcaatttctgaatcttatctcacaataattctacactgggggctttgagcatgaagattcatcctggagataattkcagtgaacgagagttataccttggaagataagatcctatcatcagtatggtgactgacagtaaattatagtggtgttgatgacacatctataattacattacaaatatttatctcccagaaatccttcctgaatcgcttctcatatatg

SEQ ID NO: 366097 - DNA, 542 bp, Homo sapiens
agttggggaggcctcaggaaacttacatttatggcagaaggcgaagaggaagcaaggcaccttcttcacaaggcagcaggaaggggaagtgctgaacaaagggggaaaagcaatttataataccatcagatctcatgggaactcactattaccagaagagcatgggggaaaccaccttcatgatctagttacctrcacctggtctctcccttgacatgtggggattatggggattacaattcaagatgagacttgggtggggacacaaagcctaaacataccaggattcatgtcttccatcttcagaacataaattcagatggagcggtggtaagggactgtttcagttctttctttctcaagtttaatatgcttatgatacaattccatcattagtagagtacccatggaaggagttatttcaaacaaatagattgaatacttttaactgctttgttaaaagttttcaaactaaggctaaatgggcatcacacaataaccaataacttgacacaaaaatcctttatataacgcatactttc

SEQ ID NO: 366098 - DNA, 620 bp, Homo sapiens
aaaacccccatcaatttgggtgttaggaataactcattgtgcttgctttttgttaaacttaagagcatattataagtaatagacaaattaaattcaattcagaagactcttgtggggacagttcctttaaatactggaaatgctgttatttgaaagaaataattactttagaatttacttaaatttattgtaatcaaattagcataactcaagaaagacattgtcatcacacatctttcccataacgctttattaattacatatttccaaagaaatggcgtcttaaggtcccagaatccaccagagtgttcacaaaaacattgtaaaatatcccttgaaaggtagttaaaaatcaggtcatgatagagctgccttacatacctaccctttcctgagaaaacctcacatctttgccaaatgacagacagcttacctggattaaggttcacaacttaaaatagaatattagaaaaagagactgacgcgacttacctrttattaaggctagctgttgttgtacacactccagattttatgtgtgcatgttaattaagtaatgagaaccccagggcaacatttagtatacatgtttgaacatttttccccttagaacagtgagc

SEQ ID NO: 366099 - DNA, 556 bp, Homo sapiens
aatccatggatgatacatacaaaggaaaataaaactaagcacatcttacttgaagtgctgtaaaccaaaaataaagagagcaccttaaaggcagccagaataggactcactccatacagtgaaacaaaatgagaatgacagtagacttcttgtcaataactatgcaaactaaaagagagtggagcattatctttaaaayacagtcatgtgctgaataatgacattttgttcaatgacaggtcacatatatgatagcgataccataagattgtaatggagctgaaaaatttccattgcctgctgacatcttgataatcgtgaacctgcataggcttaaaataatgtgtttttgtcttagtttttaacaaaaatgtttaaaaagtaaaaataaataaataaataaaattgtaaaaaatagaaaaaagcttacagaataaagatataagaaagaaaatgcttttggacatctgtacaatgtgtgttttaagctaaatgttattacaaaacagccaaaaagtttttaaaaattaaaaagtttataaaatcaaaatgttac

SEQ ID NO: 366100 - DNA, 607 bp, Homo sapiens
tgatcagcataaatggctgctcatgtggttccaatcactcatcactcattaaaaaacaaagtctgttacacactcgaaaggccaggattatgtagaataggccatggtttatacagtgtttagataactctgatgaatacataatgcttgaacacaaaagtagctgcatctctcccataatcagaatctaaaattacagtgaaggtgaggttgatgggctgccctccactcagcrtcctaatgctcatttatcagcattgccattatcagtttccttcccaaggtctttggttctctgcttggctttgtttgaaatgcgatttgcttccatagtttacttgttgtgtttactatagactatgagctttactgccagacgtggcctttcaaccttttagatttgtgatgcacaactatgcctaggaggtaataagtgttgagcaaatccaataaatatgataagaaagtaaccacctcactgtctaaaaaattttcctggcaagtaggctaaattttcttttctacaaattcatatttatttatttcatgccctgcttggaactataggtccttcaggtacagtttggtttagaccctagttctatat

SEQ ID NO: 366101 - DNA, 528 bp, Homo sapiens
tttttcacttctcttgaaaaatgggaagacgtggccaaaccaggtgtgtatgattctatggcaacagtcaaccagagctgagtagtcatttgacagggtgctctgcagttccccgcagcctcagccagcctggtgcatgctccattaaattccctgcctgctggtccctctagacatttaagtgtgacacttatggtttccgttcccattctcccacatcccactatcctttccagattattctagggccctccaatgcccctgaagaattattcaggacaatgaaagaaatcttttagaattatattttaaaataaaaataacacctcccaacatatggaaaacaataagagacataactttcacatagaaaagastgaccaacttctcatatattttcaaaataataatctaaatagattctggttagttgtccaatttagtgcaacctgggaaaccattggacataaactctgactttcccctaagcctagccctccccgaccccgggctcctctagcaaagcct

SEQ ID NO: 366102 - DNA, 570 bp, Homo sapiens
tcagtgtctcattacttcatgtgttgcagatgatttaattcaaagggtggatacatttcattggtaataggaatggacawaatttaccctgggaaacttggctttcaaatgacatgccttttgattaaataaaacacatacttttctttggttgtagtgcttctgtgaataaacaactttgcaactctcttgtgctttgggggaacacgtcctctcagtttctcatgttgcctcacctttgtttgcactggactcaagctctgcaagcagtaccaggaggggtggtcagggccatttgtctacctttaaattgtgaattaataactggtaaaaacagaaggacaaaggacaagggcagagggcaaaatccctggctgtggttttggagagtgtgtagagagagaaaagttggttggccttgtcatttttccccgctcccccaagctgtggagggtctctgagacccctctttgtgccttttacttacccagctatgtgaggcaggttcctggcctctgttctgagtggaatttgaagatagggccacacttatgctatgaactcttgacc

SEQ ID NO: 366103 - DNA, 570 bp, Homo sapiens
tcagtgtctcattacttcatgtgttgcagatgatttaattcaaagggtggatacatttcattggtaataggaatggacaaaatttaccctgggaaacttggctttcaaatgacatgccttttgattaaataaaacacatacttttctttggttktagtgcttctgtgaataaacaactttgcaactctcttgtgctttgggggaacacgtcctctcagtttctcatgttgcctcacctttgtttgcactggactcaagctctgcaagcagtaccaggaggggtggtcagggccatttgtctacctttaaattgtgaattaataactggtaaaaacagaaggacaaaggacaagggcagagggcaaaatccctggctgtggttttggagagtgtgtagagagagaaaagttggttggccttgtcatttttccccgctcccccaagctgtggagggtctctgagacccctctttgtgccttttacttacccagctatgtgaggcaggttcctggcctctgttctgagtggaatttgaagatagggccacacttatgctatgaactcttgacc

SEQ ID NO: 366104 - DNA, 570 bp, Homo sapiens
tcagtgtctcattacttcatgtgttgcagatgatttaattcaaagggtggatacatttcattggtaataggaatggacaaaatttaccctgggaaacttggctttcaaatgacatgccttttgattaaataaaacacatacttttctttggttgtagtgcttctgtgaataaacaactttgcaactctcttgtgctttgggggaacacgtcctctcagtttctcatgttgcctcacctttgtttgcactggactcaagctctgcaagcagtaccaggaggggtggtcagggccatttgtctacctttaaattgtgaattaataactggtaaaaacagaaggacaaaggacaagggcagagggcaaaatccctggctgtggttttggagagkgtgtagagagagaaaagttggttggccttgtcatttttccccgctcccccaagctgtggagggtctctgagacccctctttgtgccttttacttacccagctatgtgaggcaggttcctggcctctgttctgagtggaatttgaagatagggccacacttatgctatgaactcttgacc

SEQ ID NO: 366105 - DNA, 515 bp, Homo sapiens
tgccttttacttacccagctatgtgaggcaggttcctggcctctgttctgagtggaatttgaagatagggccacacttatgctatgaactcttgacctttccaccactctatgcagaggaaagagtcctgcactggaagttaaagaaactgaagcttcctaaaatgagagactgagctacatgacctttggatatccttcaatgtccatgactctgtgagtctctaatgcaggagctctgcagaggcaagaatgttgctgtttcttttttattcagaaactctagaagcaaaattaagggtgaattttccagcccagggtatgtgatgcaggtcctctgttctgtattggcaactccttccttcttcctacactayagtttggttccaaaatcaaacattttctgagtgtgtacaaaagaagcctgaataccctaatctggtgctgcaaaaaagacacagagttggatgtaacacatgactttacccggtcgatctcaaaaaaaatattgcttat

SEQ ID NO: 366106 - DNA, 490 bp, Homo sapiens
aatggggtgcctgggaatatcttacttttctccttcaatatgcccacagctgttgattctgaacatctgggataattcaactctaaacaaaatacagtgtgcataatgccaggcacacttaatccctcttttgaaggaattaccaaaattagtgtgaaggaaaaaattcagtagatctaatagaaccaaccttgaatagcactgctaatrtattgcaaaacaaaaatctcccttgaatgttccataagatttattcatatggaagtgctgtcacatgagctgaaaacacgccagagtaccacatccaaaagcagtgataaatggccatccccagacaggggaagttgtccagtaagttctctatggtattagaataaaaccaggttaatttaatatctttattcgtggcctgttagagggtagggggtaaatagtatcccttgctaatatgataaatgtgctacattggcagctgtttaaaaattgtaat

SEQ ID NO: 366107 - DNA, 490 bp, Homo sapiens
aatggggtgcctgggaatatcttacttttctccttcaatatgcccacagctgttgattctgaacatctgggataattcaactctaaacaaaatacagtgtgcataatgccaggcacacttaatccctcttttgaaggaattaccaaaattagtgtgaaggaaaaaattcagtagatctaatagaaccaaccttgaatagcactgctaatgtattgcaaaacaaaaatctcccttgaatgttccataagatttattcatatggaagtgctgtcacatgagctgaaaacacgccagagtaccrcatccaaaagcagtgataaatggccatccccagacaggggaagttgtccagtaagttctctatggtattagaataaaaccaggttaatttaatatctttattcgtggcctgttagagggtagggggtaaatagtatcccttgctaatatgataaatgtgctacattggcagctgtttaaaaattgtaat

SEQ ID NO: 366108 - DNA, 490 bp, Homo sapiens
aatggggtgcctgggaatatcttacttttctccttcaatatgcccacagctgttgattctgaacatctgggataattcaactctaaacaaaatacagtgtgcataatgccaggcacacttaatccctcttttgaaggaattaccaaaattagtgtgaaggaaaaaattcagtagatctaatagaaccaaccttgaatagcactgctaatgtattgcaaaacaaaaatctcccttgaatgttccataagatttattcatatggaagtgctgtcacatgagctgaaaacacgccagagtaccacatccaaaagcagtgataaatggccatccccagacaggggaagttgtccagtaagttctctatggtattrgaataaaaccaggttaatttaatatctttattcgtggcctgttagagggtagggggtaaatagtatcccttgctaatatgataaatgtgctacattggcagctgtttaaaaattgtaat

SEQ ID NO: 366109 - DNA, 546 bp, Homo sapiens
cttaattacaaagtccagatgaggtcacagaatagaaacttttcacattaaatatttctcccccacagaacacattgttttctcagtctactggagtggagaggaacagatataaattatgtcaaaagaaaacaaaatgtctcccttaaaagggattagaaaactagaaggaagacttagagttctgcaaacagtggatgtgtggttgatgttattcatgaaggatgataaagttagggataatggaataaaatgaggcaaattgaagttaaccttagccctgaaaataaagatctaaaatatgaacagtttatgaagatatttattagtccactcatcttctgatctatagatcaaaaccagtgacttcctattcataaattactgcttgggagttagttgggcaattttggaaggttttcaactcccaggtcatttgagagctattaatgtaagagytactttgctaactggtaccctaaggagcttgtaagaattaagagagacagaagtgacttctgcacttggagaatttggccaagaata

SEQ ID NO: 366110 - DNA, 560 bp, Homo sapiens
tgggagttagttgggcaattttggaaggttttcaactcccaggtcatttgagagctattaatgtaagagttactttgctaactggtaccctaaggagcttgtaagaattaagagagacagaagtgacttctgcacttggagaatttggccaagaataagacaaataggaaatgggatagatccttttgtgattcaggcaagtcaaaaggagagttgagatttacatgcccttcttcagcgattctcaatcccagtaaattgcaagagagacagaagagcccttatcttgattagtgtctccattcccctgtagccctctagcaacttcctttgagacaaacttatcattgaggattcagcgagcaattgcattcccatgtgtttaatttgtcattagaatatcactatgtatctttcatagtgcaacatttataatattttagtagagtattataattaaaataatctgayttgattgcacaaactttattctggctaaaagatgctgtccctgacacaatttttgttaaaaatttaatacttatttttcaatggaaaag

SEQ ID NO: 366111 - DNA, 587 bp, Homo sapiens
ttgaactaacttctgtcctacacctcaagtcagagcatgctgatcaagccatagcagtgcttctcccacactgggcagaaattctctttttatttatgtttatatacaaagtacatgcaaggcatcaacacagagaatagggtaagtatgcaataggtgtttgttgagtgactaaatgatgcttatcatttctgacactcaatacatggaaatactctgcaaagcctacacaaagcatggctttaaatcacttgtttagaaaatatatacaaaattttaccatgttgtttttcattaaaccagtttaatctctcwtgtcacatttcataatgtaacttgaattgttatatgatgtattactagataattattccctttaaagccctgagtgttaggattatcaaatgatcgattcagtaaggcgattgctgccttagacaaattttcagcatttcaggaggatattactaaaattaggccttcttaacagctaaagttccactgattcctatgtgctagggtgccctacaattgtcctaaaccctctgtaaattttgcctatgtgaaaagcagaagtggtctttgga

SEQ ID NO: 366112 - DNA, 435 bp, Homo sapiens
ggtattgtgagatggcacagcacttacagagaattagaagaagtttggaatgaaggaagcctaaattgcagaattagaagaaggtgagaatgagataatcaaacataagcctggagaggaaggcagagatcaggtcaggaggacatttgtgagcttgttcttcgttctgtagttcatgggaaacagataacagccttaaatagagaaaagaagtaatattatttgaatttctgaaagtcactttagttgccaagacaagtcctggaagacttgcagaaggcaagttagtaatgagtgasgtcttgaggaagagattccagttaggaagcttgttttagtaatccaggtgatagatggatagcctgaactaggacatagcaactgaggtagaggggaaaggatgggtttgaaaggtttgggaagggattggctata

SEQ ID NO: 366113 - DNA, 581 bp, Homo sapiens
tgacacaattaatgcctggttctagttttgttaatgtatctgttatgggctgactatctgtgtatccgctaaattcatatactgaaatcctaacccctagtgtgatggtatttggaggtgggatctttgggaggtgattagagttggatgacatcatagggtggtgtcccatgatggtattagtgttcttagaagaagagagaccagagatctctctctctctctctctctctctccctgccatgtgaggacacagtgagaaggtggccatctgcaagccaggaaaatgacctccaccaggaatggaatctgccaacaccttggtcgtggacttctcagactccagaacaatgagaaataaatgtctgtcaagtcacccagtctatggtattttcttatagcagcttgagctaagacagtagccatgcaagttgcacccagttacaccacatacttttcatgttcagcagtccccaatgaggacagtatggkgtttatgagctgacagcattatgaacaatctatattccacagtgaactgttggcaaagcaacttccttttgtgaagcaacgtcacaaca

SEQ ID NO: 366114 - DNA, 593 bp, Homo sapiens
tccaatgctgagaagctgggatgcagtgatggcaaatggaccaccctggctctccacgagtgggcaatggtgcaatccttctcaaggcctccaggcctattgcaatgacagacctggttacaaatcaaaggatatcatttacatgtgtgacatacataatgttgattcagcagaaatctgtcttggccattttctaagagtggacaggccttaatcctcctatagttctccctcagagtctttagcacttataaaccaagccctagaatctttgctgatgttgttgagaagccaagagcgaggccactgtcaggtcagaatggtgaggtcctgaagaagaaattagcctaggagatgggaaatgtgttggaaggcaaagtggaagacaggcagggcaagtggttcatgacagtgcctgttggaaggccatgtggtccagtctattcttataaagacagtccttccagctycacatggcccctctaggcacttactaagtgccagcctgaacgtttgcagcagtgtgggaaaacaaagaccacaccaagtgtcctttgcagatgggggctcaattggtggatgcaggtccagca

SEQ ID NO: 366115 - DNA, 602 bp, Homo sapiens
acttaactaatatgtaatgactttttttcatctataaaatgggtagataataatagtacctacactatatgattgtaatgaggattaaatragttaatatatgcacagtacacataagagtctctggcaaataactaatcctgcataaatataagctattactattttaaggagtaggaaatacaaaagagctatttgtgggagatgtaggagagacacaaacatgtcacgtaactcacagcaaaccttgatgaggaaaacaattaagtagaaagaaggaaatattaacagactgacaatagtctagaatcaaagaaagataaaaatctctgatccttcagatttcaatcttcagatggattatcatagataactcaacaaaatagatgaaaaaaaccctataccttgatacattgtgataaaatttaagatcaaagagagagaaataataagtgattacataaaggaagaacataaaatcttcaaaagaacaagattaggttgacatcagactcatccataataacactggaggcaaaaacataatgaagtactatttcaaggtactgatgtaaaaagaatttatacctagaaaaactaat

SEQ ID NO: 366116 - DNA, 555 bp, Homo sapiens
actgagtgactgatagatataattagcccattttcacattgctataaagatactacctgagactgggtaatttataaaaaaaaaaaagatgtttaattgacttgcagttccctatagctggggatgcctcaggaaacttacaattatggcagaagatgaaggggaagaaagcaccttcttcacaaggcagcaggagaaagagagagtccaggggaaactgccacttttaaaccatcagatcttgtgagaactccctatcatgagaacagcatgggggaaactgcccccatgacccagtcacctgccaccaggaccctccctggactcacagggattamaacttgaaatgagatttgggtggggacacagagccaaaccacattaaccactatgcttacataagagaggggggccttcatgtcttcatctcttcctgcttggacagagtcttggttacctccttcttggcctgaagtggctcctcggggcactcctgtacttccttggtcttaaccttgggggcctatctggttagccaggggcttcttgcaggcc

SEQ ID NO: 366117 - DNA, 555 bp, Homo sapiens
actgagtgactgatagatataattagcccattttcacattgctataaagatactacctgagactgggtaatttataaaaaaaaaaaagatgtttaattgacttgcagttccctatagctggggatgcctcaggaaacttacaattatggcagaagatgaaggggaagaaagcaccttcttcacaaggcagcaggagaaagagagagtccaggggaaactgccacttttaaaccatcagatcttgtgagaactccctatcatgagaacagcatgggggaaactgcccccatgacccagtcacctgccaccaggaccctccctggactcacagggattacaacttgaaatgagatttgggtgggkacacagagccaaaccacattaaccactatgcttacataagagaggggggccttcatgtcttcatctcttcctgcttggacagagtcttggttacctccttcttggcctgaagtggctcctcggggcactcctgtacttccttggtcttaaccttgggggcctatctggttagccaggggcttcttgcaggcc

SEQ ID NO: 366118 - DNA, 555 bp, Homo sapiens
actgagtgactgatagatataattagcccattttcacattgctataaagatactacctgagactgggtaatttataaaaaaaaaaaagatgtttaattgacttgcagttccctatagctggggatgcctcaggaaacttacaattatggcagaagatgaaggggaagaaagcaccttcttcacaaggcagcaggagaaagagagagtccaggggaaactgccacttttaaaccatcagatcttgtgagaactccctatcatgagaacagcatgggggaaactgcccccatgacccagtcacctgccaccaggaccctccctggactcacagggattacaacttgaaatgagatttgggtggggacacagagccaaaccacatyaaccactatgcttacataagagaggggggccttcatgtcttcatctcttcctgcttggacagagtcttggttacctccttcttggcctgaagtggctcctcggggcactcctgtacttccttggtcttaaccttgggggcctatctggttagccaggggcttcttgcaggcc

SEQ ID NO: 366119 - DNA, 624 bp, Homo sapiens
ttcaccacattaaagagttccttgttcctgagcgatgtgctgtagatcattaattctataaacatgcaagtagctgccatgtttttggtggatctgtgtcatatcactgccacagtgataaaggaagctgaagaagctccaacacatggaaaataaaccagatcactgcacaggctcatttatatggaacagaggactaagttggatgttaaacattttaaagatttcccattgcttctctttcctttgtcagggggtgtattttgcagaatgtatatgaaaataacttctaagtgatataaaagcttgcatcttaacttctaagtgatataaaagcttgcattttatatggggaaaatacatgtattcagactatttttaaccacttgaattttgcatctcttccttttttttttttttttttttgagacagggtttcgctctgtcatccaggctggagtgctgtggcacggtcatagctcactgcagcctcaaactcctgggcttaagtgatcctcttgtctcagcctaactcaragtagttaggactacaggtgtgtgccaccacacccggctccttccaattttttattgataacttttacttcccatgtcacacagtca

SEQ ID NO: 366120 - DNA, 549 bp, Homo sapiens
aatttaatttaaagagacaaagcattaaacaataatcacattttaacataatgttctaacactggaaatcttgatgatactatattgctggttaaagattatttcagcattcactgcactgcaaatcctgagagttttgtcagtattacctttcctttactcacgcaatgtttcagagatcttaccagaatgaattcttggatatctactatttcttggagttttgattatagaaaaagagaacgtctcatttctcttgctctacaaagaagcttcttttaaatttggttctaaggggtagtccatgaagaaaagataaaaaacagtgaattcatatttgctttttttttttctttgaagctgtattaggyatcaaaccagcagaaacattcacccctggactgcaaaaacatttggtataaactagctggccaatatttcattatttaaatactaatataaacacttatctaactcaacatactgatttaacattaaaagtcctactggtatgataaaacagtataatgaatcacctttattaaataa

SEQ ID NO: 366121 - DNA, 471 bp, Homo sapiens
tatcttcaggtaatgcagcctattcatgaattgtgaacacagaaggttatcttcagggaaagatttcagaaagcrgatagccaagcagttggctactagcataatgcttagcttatcttcattcctgatggtccccactgtaaaccttgaacttaagcccttaaatatacaatgatcatttgttgtactgcatattttcaaggagactaaattaaatacaaaattaaaagttgatgactttattcatgtagcataaatccaaaggaaaaaaatccttcacaaataacaaagattaggaaacaaaaggtttcagaagtttgtaagattttacaagcatttcaaaaataaaattttttactaaaatcactaagaatctaaatatattcaggaagacatctagctggttggaaaatacaatacaaaccaaacttcaatgaatgaaatgtaagctgaaaatgcttagtgggatga

SEQ ID NO: 366122 - DNA, 479 bp, Homo sapiens
ctgttcttagacttcatataatatgcattaagtatttttatgtctatcttctttctctcaacataattttaagcacatttgaattaatttttaccaataaaaaattagttacaaaaagaggcggcctctatacaaaataaggatgctttttttttccattcacaaagagaatccactgacatatcttgccttgccaagtcgaaactcaaatagcttgtttcggtataattrttccagaaagataatccagacaatctctcaatataatttctaagattcgttcacattgtatctttcagtagtttcttcatttttatggttattacttcattgtgtgaatatacttcaatttcattatctatttgcctaatgatgaatatctgggttgtttctaagttttattatgaataaagctgctatgaacacttttatacaaatcttttggtggatatatgttttcatttcttttggggcaatac

SEQ ID NO: 366123 - DNA, 534 bp, Homo sapiens
aaataactgaaaaacaattagttgtcattatgcaaataaaacagttgactgactgaatcttttatttatttatttttttttccagctgttctgctgtgaagtaggggggcataagctttgaattcyataaaggaagggatattaaactgatggattatttcttgcaaaagcagctgttggttttaaactacttgtactcaaatatgtatctctgcagacataaaatattttaaagtattatttttggttctacataggattttgaccatattttaaatgaaaccataatctttttagaaaaaagattccttaaaacttactaaataaaatcctgatattttagatctgaggacattgaagtccaatgactaaacaattcatttgccattctaaggtcacacaatttgttgatggctgagaaaggattctcaattcttatacttttattctggtaatcattctattaagctgcttctctcactgtactaactccataatatatatggtgcattaatacaagtgtttgtaagatga

SEQ ID NO: 366124 - DNA, 536 bp, Homo sapiens
ctcacctgggaagtgcaaggggccagggaactccttcccctagccaagtgaagctgtgagggactgtgccatgagggattgtgctatccggcccaggtactatgcttttcccatggtttttgcaacccacagactgggagatccccttgggtgccttgccaccagggccctgagtttcacgcacaaaactgggcagctgtttgggcagacactgagctagctgcaagagttttgttttgtttttggtgcctcagtggcacctggaaccccagtgagacagcatcattcactcccctggtaaggggrctgaagcgagggagccaagtggtcttgctcagcgggtcccactaccatggagcccggcaagctaagaacaactggtttgaaattctggctgccagcacagcagtttgaagtcgacctgggaagcttgagcttggtggggggaggggcacccaccattactgaggcttgagtaggcagttttcccctcacagtgttaattctgactgtgcagatctcaccacagtgcagca

SEQ ID NO: 366125 - DNA, 536 bp, Homo sapiens
ctcacctgggaagtgcaaggggccagggaactccttcccctagccaagtgaagctgtgagggactgtgccatgagggattgtgctatccggcccaggtactatgcttttcccatggtttttgcaacccacagactgggagatccccttgggtgccttgccaccagggccctgagtttcacgcacaaaactgggcagctgtttgggcagacactgagctagctgcaagagttttgttttgtttttggtgcctcagtggcacctggaaccccagtgagacagcatcattcactcccctggtaagggggstgaagcgagggagccaagtggtcttgctcagcgggtcccactaccatggagcccggcaagctaagaacaactggtttgaaattctggctgccagcacagcagtttgaagtcgacctgggaagcttgagcttggtggggggaggggcacccaccattactgaggcttgagtaggcagttttcccctcacagtgttaattctgactgtgcagatctcaccacagtgcagca

SEQ ID NO: 366126 - DNA, 584 bp, Homo sapiens
tcccatactttgcacatgggtcccgtgagtattaggascatgtgattttctgcaacacatgaagtagaggtgtgcagttagtttgtgaggaaaagaaacacttttttttttttggatggggtttcatttaaggttacaaggagaagtggaaagtacagaaatcacttcagtgctcagcagatgaatagtcactgctccctgctcagctcacaactgttcctgcatcctcaaatgactctagtgatatcttcttctcgagtctggattctggtgctgctatttgctcccatttagcttatgatggctactcgcgtggcggcccacctactgccgctaactcacactgcaccattgtttctgctgccttgtggttttcattacacttctaccctgttacttttagcttctgctccactgtacctggtcgccgtctttcatttaaaattgcaaagggatctaaccaagctgaccagtcactatgcaatatttgtggtcacagtaaacagttctctagccaggctactgaatggaccattgattcccctgatggcctttaggtctggtaccttcagatcaggtgacat

SEQ ID NO: 366127 - DNA, 584 bp, Homo sapiens
tcccatactttgcacatgggtcccgtgagtattaggaccatgtgattttctgcaacacatgaagtagaggtgtgcagttagtttgtgaggaaaagaaacacttttttttttttggatggggtttcatttaaggttacaaggagaagtggaaagtacagaaatcacttcagtgctcagcagatgaatagtcactgctccctgctcagctcacaactgttcctgcatcctcaaatgactctagtgatatcttcttctcgagtctggattctggtgctgctatttgctcccatttagcttatgatggctactcgcgtggcggcccacctactgccrctaactcacactgcaccattgtttctgctgccttgtggttttcattacacttctaccctgttacttttagcttctgctccactgtacctggtcgccgtctttcatttaaaattgcaaagggatctaaccaagctgaccagtcactatgcaatatttgtggtcacagtaaacagttctctagccaggctactgaatggaccattgattcccctgatggcctttaggtctggtaccttcagatcaggtgacat

SEQ ID NO: 366128 - DNA, 587 bp, Homo sapiens
ttaaccatggtaaattatttcacactacatgcaatttttctggatgggaagttgaggtgacaataaactttatatttaaaaatataaaggcatttaaggaataattcaagatgggagaaaatctgaaaatgagattgaaggaagtggatttgcaccacctcagtakgtttgaggggcacctcctctgtgaagtgaagcagcaggcaaccagcagcgttcatctcactgctgcagcagcagctggtgcatcgccacagctcagccagatttctccactttgctagtgctcgtcctgaccaccctgcgagccagtgtaatggggattctccctcatcagatatttttgaggcaacgttctttttgcatttattctcaacacacctcagctgtgggatttctagtctcaaaatatggccctttgcttggttttcaaactcaaacttatccccgcaaaaggaagtccattcttcagtgtgtactagaaagtgggaatgaatggtgtagattagtggcagtctttttcttcttctaatagagcagaaatacaagtttcagtcactattttggggtactgtgtggtttcaatg

SEQ ID NO: 366129 - DNA, 603 bp, Homo sapiens
ctacccttttccctctccaggaagaaaacaggagttgtaaatttcctcccaattcagcctcaccatgctgggggtaggggctctggtgatagtgccacaaatcttcttattgggcttcaatttggtctacgtattactaaatccacatttccgtaagggaagaaaggtctagggattcctattctgccrtcttgctgatgtcacccatgctcttttggttctctttgtcttgcaggattctgaatttcccctttgcttttttccctttcatcatccacaaaaaaagggtacctcccagttctttttaactcttttctcccataagtaatgcctttccaaaactgccatctcaagtctacgtgattttaagtcattctccattagtcagtacttttatataccagggtattcttacagtattttcatacctgggatggacattgttagctcacctttagggcctctgcactcttgttctctcttgtgtagttttccagcccctcaaaacaccccttcttctccaaaggcttgtggcaagagctaaaaacataattgctggaacttgatgtccatatatatttatttttattaacaggtaatttg

SEQ ID NO: 366130 - DNA, 588 bp, Homo sapiens
taagacaaaaaagtggtttcataggctgggcccagggtccccatgctctgtgcagcctagggacttggtgacctgcatcccagtcactccagttgtggctgaaagggatcaacgtagagctcagtctgtggcttcagaaggtgcaagcctcaagccttggaagcttccacttggtgttgagcctgccagtacacaagtcaagaattggggtttgggaacctttgcctagattttagaaaatgtatggaaacacctgaatgtagaggcagatgtttgctgcagaggcagggctcgcatggaaaacctctgctagggcagtacagaagggaaatgtggggttggagcccccacacagagtccctactggggcactgcttagtggagctgtgagaagagggtcactgtcctccagagcccagaatggtacatcygctgacagcttacaccatgcacctggaaaagccacagacactcaaagccaatccatgaaagcagctgggagggagtctgtaccctgcaaagccacagaggtggagctgtccaagaccatgggaacctacctctggcatcagcatgacctggatgtga

SEQ ID NO: 366131 - DNA, 603 bp, Homo sapiens
agtcctgtaaccctattttaggaaagcttcagagatgctgtgtataattattaactatttacattcttcctgttccacctcttgcaaaacatgtagtgttgctccatgcatatatattttaagtgttcataaatggtcttaaggtacaattgtatcctgattcttacatattttttcaaagaattctgttattaccatcaattcatgttgctatatgaaaatctagctkcaaactgtagcatagtagttcctagtgggaagctccaagtttttgattatccatctatccaccccatcccccgaatgcatactagattaccttcagctccctgctatcataaatgctgctatagtgaacatctgtaaacatgttcctttgtggatctgtgtaagaatttctcttttcagtttcatcttctcttaattgcccattaacattcttttttttctctgcttctcagtaatttggaagtatttcttgtaaatacagatacttttaaatatcattccatcactcattttagattttgcaaataacttcactcaagttgtcatttctctcttactctgatcatggtgtcaagattcagaaccaaatgcagg

SEQ ID NO: 366132 - DNA, 603 bp, Homo sapiens
agtcctgtaaccctattttaggaaagcttcagagatgctgtgtataattattaactatttacattcttcctgttccacctcttgcaaaacatgtagtgttgctccatgcatatatattttaagtgttcataaatggtcttaaggtacaattgtatcctgattcttacatattttttcaaagaattctgttattaccatcaattcatgttgctatatgaaaatctagcttcaaactgtagyatagtagttcctagtgggaagctccaagtttttgattatccatctatccaccccatcccccgaatgcatactagattaccttcagctccctgctatcataaatgctgctatagtgaacatctgtaaacatgttcctttgtggatctgtgtaagaatttctcttttcagtttcatcttctcttaattgcccattaacattcttttttttctctgcttctcagtaatttggaagtatttcttgtaaatacagatacttttaaatatcattccatcactcattttagattttgcaaataacttcactcaagttgtcatttctctcttactctgatcatggtgtcaagattcagaaccaaatgcagg

SEQ ID NO: 366133 - DNA, 603 bp, Homo sapiens
agtcctgtaaccctattttaggaaagcttcagagatgctgtgtataattattaactatttacattcttcctgttccacctcttgcaaaacatgtagtgttgctccatgcatatatattttaagtgttcataaatggtcttaaggtacaattgtatcctgattcttacatattttttcaaagaattctgttattaccatcaattcatgttgctatatgaaaatctagcttcaaactgtagcatagtagttccyagtgggaagctccaagtttttgattatccatctatccaccccatcccccgaatgcatactagattaccttcagctccctgctatcataaatgctgctatagtgaacatctgtaaacatgttcctttgtggatctgtgtaagaatttctcttttcagtttcatcttctcttaattgcccattaacattcttttttttctctgcttctcagtaatttggaagtatttcttgtaaatacagatacttttaaatatcattccatcactcattttagattttgcaaataacttcactcaagttgtcatttctctcttactctgatcatggtgtcaagattcagaaccaaatgcagg

SEQ ID NO: 366134 - DNA, 603 bp, Homo sapiens
agtcctgtaaccctattttaggaaagcttcagagatgctgtgtataattattaactatttacattcttcctgttccacctcttgcaaaacatgtagtgttgctccatgcatatatattttaagtgttcataaatggtcttaaggtacaattgtatcctgattcttacatattttttcaaagaattctgttattaccatcaattcatgttgctatatgaaaatctagcttcaaactgtagcatagtagttcctagtgggaagctccaagtttttgattatccatctatccaccccatcccccgaatgcatactagattaccttcagctccctgctatcataaatgctgctatagtgaacatctgtaaacatgttcctttgtggatctgtgtaagaatttctcttttcagtttcatcttctcttaattgcccattaacattcttttttttctctgcttctcagtaatttggaagtatttcttgtaaatacagatacttttaaatatcattccatcactcattttagattttgcaaataacttcactcaarttgtcatttctctcttactctgatcatggtgtcaagattcagaaccaaatgcagg

SEQ ID NO: 366135 - DNA, 625 bp, Homo sapiens
tatcaccaaactatgtcttatgagtcattaaacatcagaaggaggtcaagtgaagaaacgagaatcctagagagacttagtatcttcattagggtgggtgtccagggaatcattaaagtgagtatctagggagaaaatacacagctgttgctttcaaaactgaaacagaaatgcttcaagatattaaaaaaataaaaaaataagtgagcttcctaatgctaaatgaatcctaaatcctttgaatatttattagagtgcaacttagcagaaaattttcacatggaaatgttgaaaaatakatttgtgccagatattgcttttgttttaaactaaagtagtccatttaaatctccttttcaagtgggcatattcctaatgcaaagaaaacaactgaattgatcatgaatttggtctttgcccgtatgtctttgatgaaattaaattttagtgatgtgttcatttctcttgttttgttttatttctcaccaaaaaaatatatatcattctgaaaaggttaatgttagcttgtttttgttttaaatacaattctctgctaacatttccattttctgaaagttgctaggtcatatctcctatattaatgccacagatatatgtgagatct

SEQ ID NO: 366136 - DNA, 566 bp, Homo sapiens
ggtgccagtcaatttggttccaggtgagggctcttttcttggcttgaagatgacctcctttttactgtgtcctcacatggaagagaaaaagaggagcaagatctctctctcttcctcttcttgcaagaccayagccctatcagattaggtccccaccttatatcctcatttaaccttaattgtctcttgaagaacctatctccagatgcagtcacattgtgggtttcaacttcaacagaggaatttggaggggatataattcattccatagcagaaggccaggaaatacaacctatctgtagtctcaggagaaaaagagggaataggcttagtaaatggctactcaggctctggcacagcccaaccttctgctcattaaatatccattccactcttctttccacacaagaaacacagttagcccctcctagagggatagaagccaatgtcccatccaggtactgcctctagctccaataccagggtctttgggtgatgcatgttcccctccatcatgtataggggtgtctttttatagttcagtgacttataacctaaaaatataa

SEQ ID NO: 366137 - DNA, 566 bp, Homo sapiens
ggtgccagtcaatttggttccaggtgagggctcttttcttggcttgaagatgacctcctttttactgtgtcctcacatggaagagaaaaagaggagcaagatctctctctcttcctcttcttgcaagaccacagccctatcagattaggkccccaccttatatcctcatttaaccttaattgtctcttgaagaacctatctccagatgcagtcacattgtgggtttcaacttcaacagaggaatttggaggggatataattcattccatagcagaaggccaggaaatacaacctatctgtagtctcaggagaaaaagagggaataggcttagtaaatggctactcaggctctggcacagcccaaccttctgctcattaaatatccattccactcttctttccacacaagaaacacagttagcccctcctagagggatagaagccaatgtcccatccaggtactgcctctagctccaataccagggtctttgggtgatgcatgttcccctccatcatgtataggggtgtctttttatagttcagtgacttataacctaaaaatataa

SEQ ID NO: 366138 - DNA, 566 bp, Homo sapiens
ggtgccagtcaatttggttccaggtgagggctcttttcttggcttgaagatgacctcctttttactgtgtcctcacatggaagagaaaaagaggagcaagatctctctctcttcctcttcttgcaagaccacagccctatcagattaggtccccaccttatawcctcatttaaccttaattgtctcttgaagaacctatctccagatgcagtcacattgtgggtttcaacttcaacagaggaatttggaggggatataattcattccatagcagaaggccaggaaatacaacctatctgtagtctcaggagaaaaagagggaataggcttagtaaatggctactcaggctctggcacagcccaaccttctgctcattaaatatccattccactcttctttccacacaagaaacacagttagcccctcctagagggatagaagccaatgtcccatccaggtactgcctctagctccaataccagggtctttgggtgatgcatgttcccctccatcatgtataggggtgtctttttatagttcagtgacttataacctaaaaatataa

SEQ ID NO: 366139 - DNA, 566 bp, Homo sapiens
ggtgccagtcaatttggttccaggtgagggctcttttcttggcttgaagatgacctcctttttactgtgtcctcacatggaagagaaaaagaggagcaagatctctctctcttcctcttcttgcaagaccacagccctatcagattaggtccccaccttatatcytcatttaaccttaattgtctcttgaagaacctatctccagatgcagtcacattgtgggtttcaacttcaacagaggaatttggaggggatataattcattccatagcagaaggccaggaaatacaacctatctgtagtctcaggagaaaaagagggaataggcttagtaaatggctactcaggctctggcacagcccaaccttctgctcattaaatatccattccactcttctttccacacaagaaacacagttagcccctcctagagggatagaagccaatgtcccatccaggtactgcctctagctccaataccagggtctttgggtgatgcatgttcccctccatcatgtataggggtgtctttttatagttcagtgacttataacctaaaaatataa

SEQ ID NO: 366140 - DNA, 613 bp, Homo sapiens
agactctctctttttcaatttaatgtaggctaacatgaggctcactgctcctaatctcatctttgccacagggctgagtctcaacagactctttcagtattatcttttacaattttcattctagaagttgttggcctcatcatctttataatcctggagtatgtgagacatttcaaggagtactggaacaggcttaataccatgagatcagtgtcaaggtgttttatgtctttatgtagtttttttcctaaaacatacctgccttaakacatgcctgaatttcagacctaattctggtttttctctcccatcatcattcctttcttcagaatctctcttccacccccaaaagaaggggaaacacacacacacacacacacacacacacacacacacatttctttactcatcagaatttgtaatggtaccccaggcttgggatgttaaaaacctttgcataccgaacaaagggacagttagaaatatcagttctcagttgagaaagtgaatggctctactgactgcattacaaatctttaaatcttttttgttgttatgatatttagataactatgtttttcactttcaatagaattaaaggaggaccgaatgt

SEQ ID NO: 366141 - DNA, 498 bp, Homo sapiens
gcttataattacatattgttggtgagtgtattttttattacctatttccttgaaggcaaggaaggacccatgtatatacagcacttaggataatacataaaagtttctcaataactgttagttgaatgaaagttggattgatgaatgctgctgtaataaatcttcctggatgggcacaatggctcatgcctatatttccaacactttggtaggctgaggcaggtggattgcttatgctcaggagttacagaccagtctgggcaacatggcaaaactccatctcttaaaaaaaaaaaaaaattagctgagcatggtggcacgtgcctgtggtctcagttacctgggrggctgaggtggtgggatcacctgagcctgggtggttgtggctgcagtgaaccgaaatcgcaccactatactccagcttgggtgacagagtgagaccctgtctcaaaaaaaataataataaaaaaaaataagtcttcccaaagcctagttctg

SEQ ID NO: 366142 - DNA, 636 bp, Homo sapiens
tatgagtgtaaagtacaggcaaaggaagttttatggtggaagctaaagtttaaataactttggaggtgctctatgagaaaaataatataaaattaagtgagaaagtatatttatttagaatgagaaaagaaatcacaacgaatttaaaatttgaaatgacgataataccataatcattacaaaatccagaaaaataacattttatatatgtgtacattgtacatatatacataaatatttataaatatgtgtatatttttagagacagggtcttgctcagctgcctgggatggagttcagtggtgctatcacagttcacatcagccttgaaatcctaggctcaagcagtcttcccaccttagcctcccgagtgggactacaggtgcacaccaccacacccagctaatttttaaattttctgcaragatggggtcttcctatgccaagctggtctcaaaccccaagcttcaagtgttccttctgcctcagcttcccaaaatactgggattacaagcatgagcaatctgacacatatttctaggacattttccctatatctttggcaacataattttttattgcctattcatgtgacaataattaatataatttttatggcaaagtcagaaagataat

SEQ ID NO: 366143 - DNA, 610 bp, Homo sapiens
tatgagtgtaaagtacaggcaaaggaagttttatggtggaagctaaagtttaaataactttggaggtgctctatgagaaaaataatataaaattaagtgagaaagtatatttatttagaatgagaaaagaaatcacaacgaatttaaaatttgaaatgacgataataccataatcattacaaaatccagaaaaataacattttatatatgtgtacattgtacatatatacataaatatttataaatatgtgtatatttttagagacagggtcttgctcagctgcctgggatggagttcagtggtgctatcacagttcacatcagccttgaaatcctaggctcaagcagtcttcccaccttagcctcccgagtgggactacaggtgcacaccaccacacccagctaatttttaaattttctgcaaagatggggtcttcctatgccaagctggtctcaaaccccargcttcaagtgttccttctgcctcagcttcccaaaatactgggattacaagcatgagcaatctgacacatatttctaggacattttccctatatctttggcaacataattttttattgcctattcatgtgacaataattaatataat

SEQ ID NO: 366144 - DNA, 549 bp, Homo sapiens
ccctgtggctttgcagggttcagcctctctggctgctctcacaggttggagttcagtgcctgtggcttttccatgtgaagggcgcaagctgccagtggatctaccaccattctggggttccggagggcagtgacctccttccacagcttcatagacagtgcacactctgtgtggggcctccaaacccacatttcccttccactgccctagtagaggctctctgtgagggctcaactcctttagcagacttctgcctgtataccagcctttttcatacatcctgtgaaatctaggcgacactgccaagtctcctttactcttgcactctgcatacctgcaggcttaacagcatrtggaagtctccaacgcttacagcttgcaccctctgaagcagcagtccaagctgtaccagtggccctttcagccacagctggagctggagcagtggggatgctgggaacagcctcccaaggtggtgcagggctttggcactctgggcctggcccatgaaaccattctttcctcctaggcctctggacctgtgatgtg

SEQ ID NO: 366145 - DNA, 572 bp, Homo sapiens
agtaatgaccagcagataatgaattttttacaggttagactgtaccctgctctaatatttgagtatcttcaaaatagtctaaccagggaaaccaaaaacagtgataatttttctttgtgctgcaacaataaatacttgaggtctgtttgaaatgagtttgaagatttgatttagtttgaaggtgggatctctccaatagccaccaaacaatttcaaatatactcttcggtggttacctgctatattagtcagggttctctagagggacagaacaaacaggatagatacatatatraaggggagtttattaaggagtattaaactcacataatcacagggacccacaataggccatctgcaagctgaggagcaaggaagccaatctgagtcccaaagctgaagaacttgaagtccaatgtttgagggcaggaagcatccagcacaggggaaagatgtaggctgggaggctaagccagtcttgtcttgttttttcatgttcttctgtctgctttatatcctagctgtgatagcaggtgattaggttatgcccacccagattaaaggtgagtttg

SEQ ID NO: 366146 - DNA, 585 bp, Homo sapiens
tgtgatagcaggtgattaggttatgcccacccagattaaaggtgagtttgcctttcccagcccactgaatcaatgttaatctcctgtgacaacaccctcacagacacacccaggatcaatactttgcatctttcaatccaatcaagttgacactcagtgttaaccatcacacctgtattcataagccaaatttcagagaccagggaaaaagtaaagagagatatagagaaagagcaatgggtatgtrcatggagtcagtgtctgtcttattcctgattatttcccacaatctcatcaatgtctactacaaaatacaggcacttgaaaactgctgctaggcttgaatttagtggcaagtaaaactagaaaatgcttgaactattggttttatttactaacacatacttccagtattcttttcctagagaattgaatatgttattagcttttaatggaaatattgcaataagaaattttacaattaattctttaactcttattttactggctgatgataaaacatctttcctaaaatgtgactatgctaatggaatggaggaggcaaattaaaaataagtaaagtag

SEQ ID NO: 366147 - DNA, 600 bp, Homo sapiens
aggtctgtctttcaattttcatgaaagagaaaagagccagactcctggaaaggaagcttgtctatgaaaaggagatgatctggaagttgtgacctttcctttctttcacttcccatcttctcaaactaagtcacatggccacaggcagctgcaaggaagggcttggaattgtaccccctaactgggcagccatgtgcatggaagagggaaggacagacttggtgggttcaattcgcaatctgccacatttgatatgatcattttaagcagcatccatgatttttatattgaaatacatcagaatagtagtacacattttcctttctttaggtagtaaagtatattcaaaagaatctcaagtggatgacaacatgaaataaagcactgctgacaggacagtcagactgctgtgtgggaaacaaagcatttcatttaaactgatggtgagatatgctggtgggccagacttcttcaaaccactgcactctagcatgggcracagagagagacctgtatcaaaaaagaggaggaggaagaagaagaagaagaagaagaaagacataaaatgctgtgtggtgagaatttttttattagaacagt

SEQ ID NO: 366148 - DNA, 394 bp, Homo sapiens
agctgcacccactgtagtttttattgtaaccagagcttctgaatctatgtcgcagccctgccatgttttcctgaatcagagcttcttgtggctttattatgctggtgagtaagccaaagtggtgtgacacagtgttagggcatagcatttggagtgagacactcctagacttattcactcagcaaatattgtaggcacatgcttcactcttatgtaccttgyctcttaatcctctgtgggcaaaagattacctaggtgtcaaggcaagagactgaagacacaaactgtttcagtaaataaagaaaatagttagaataagaatagtcataatacaaattagatatagagatgatcatggacaattatcaatcattattataaacattatttaatc

SEQ ID NO: 366149 - DNA, 468 bp, Homo sapiens
gggcactccaaagctaacctaaaaggttggttcagtccattactggaagggatagtgttggacatatttaattatgccctccctccttttggaattcaggaaaatctgaccagcatttaacatcaacatagaccttaagtctgataggaaacatttacaatctattctctctgaagcctgccacctggaagcttcatctgcatcacaaaaacttggtcttcacaacctcttaaaacctggacagtcctttctatagataataactgtttcaaccaattgccatcagaaaatttttaaatctacttataacctgaaagcccacttgcttcaaactgtcccatttttytggaccaaaccaatgtatatcttaaatgtatttgattgatatctcgtgtctccctataatgtaaaaaaaaaaaaaaaaaaaaattgagctgcatcccaaccaccttgggcacatgttctcag

SEQ ID NO: 366150 - DNA, 508 bp, Homo sapiens
gactttcacattttatgttatcttaatctcctaaaactttatccatgagatgaatagaaattattattttcattattcaaagaaaatggaactcagataaattgagtatggtgaaattacagcttagacatatttaatatactaaagttcaacaggtaaaatttagccaaatgagaaagagaagaatcttctgaaatagtatgggctgctagcttgccaatacactcagtgagcatgtgcaccascatgaacaggaaatggagtccctcaatctgccctcactgtctcaggcccccatctctctggggaataagaaataagcagctcccctcacttgtacatgaagctaaaagctaaatgtttgtatctttataccccattttcactacacacaagcacaattaccgcctttggtgtcttccctatgaagcaacaatctggtccaagaggaacctatgtgtgttggactcatggagagatggtgagttgatgcccaattaggtagatg

SEQ ID NO: 366151 - DNA, 508 bp, Homo sapiens
gactttcacattttatgttatcttaatctcctaaaactttatccatgagatgaatagaaattattattttcattattcaaagaaaatggaactcagataaattgagtatggtgaaattacagcttagacatatttaatatactaaagttcaacaggtaaaatttagccaaatgagaaagagaagaatcttctgaaatagtatgggctgctagcttgccaatacactcagtgagcatgtgcaccagcatgaacaggaaatggagtccctcaatctgccctcactgtctcaggcccccatctctctggggaataagaaataagcagctcccctcacttgtayatgaagctaaaagctaaatgtttgtatctttataccccattttcactacacacaagcacaattaccgcctttggtgtcttccctatgaagcaacaatctggtccaagaggaacctatgtgtgttggactcatggagagatggtgagttgatgcccaattaggtagatg

SEQ ID NO: 366152 - DNA, 575 bp, Homo sapiens
ggatattttcatattgtcaaagtatttcaccacaaattattattaattacaaagagaagattgtatttccagattcttttttttttttatgatgaagtatctatccggtttcacccttttctttcctgaaatctagtctctgtttggacaaacttggtttgtcttacctttttctgtttatcttttgcttttttctgagacagggtctcgctctgtcaccraagctggagtgcagtgatgcaatctcggctcactacaaactccacctcctgggttcaagcaattcttgtgcctcagccacccgagtagttggtattacaggcatgtgcctcacatctggctaatttttgtattttttgttggggggtggtcctcatgatgtttcccatgatggtctcgaactcccggcctcaagtgatacacctgcctcagcctcccaaagtgctgggattacaaatgttttctaccgcgtctggcctcgtctactttttgtgtataacagaaccttgatgatgacagtgttcataggttaacttcatatgtgatttctcagtttcattgtgaactagtgattc

SEQ ID NO: 366153 - DNA, 575 bp, Homo sapiens
ggatattttcatattgtcaaagtatttcaccacaaattattattaattacaaagagaagattgtatttccagattcttttttttttttatgatgaagtatctatccggtttcacccttttctttcctgaaatctagtctctgtttggacaaacttggtttgtcttacctttttctgtttatcttttgcttttttctgagacagggtctcgctctgtcaccgaagctggagtgcagtgatgcaatctcggctcactacaaactccacctcctgggttcaagcaattcttgtgcctcagccacccgagtagttggtattacaggcatgtgcctcacatctggctaatttttgtattttttgttggggggtggtcctcatgatgtttcccatgatggtctcgaactcccrgcctcaagtgatacacctgcctcagcctcccaaagtgctgggattacaaatgttttctaccgcgtctggcctcgtctactttttgtgtataacagaaccttgatgatgacagtgttcataggttaacttcatatgtgatttctcagtttcattgtgaactagtgattc

SEQ ID NO: 366154 - DNA, 575 bp, Homo sapiens
ggatattttcatattgtcaaagtatttcaccacaaattattattaattacaaagagaagattgtatttccagattcttttttttttttatgatgaagtatctatccggtttcacccttttctttcctgaaatctagtctctgtttggacaaacttggtttgtcttacctttttctgtttatcttttgcttttttctgagacagggtctcgctctgtcaccgaagctggagtgcagtgatgcaatctcggctcactacaaactccacctcctgggttcaagcaattcttgtgcctcagccacccgagtagttggtattacaggcatgtgcctcacatctggctaatttttgtattttttgttggggggtggtcctcatgatgtttcccatgatggtctcgaactcccggcctcaagtgatacacctgcctcagcctcccaaagtgctgggattacaaatgttttctaccgcgtctggcctcrtctactttttgtgtataacagaaccttgatgatgacagtgttcataggttaacttcatatgtgatttctcagtttcattgtgaactagtgattc

SEQ ID NO: 366155 - DNA, 554 bp, Homo sapiens
aaacacacatgaaagtcacagttgcytcattatttcaacaatacagagggcttttgatgattggaaagattatcatgagggctaatgacccaagatgaaaattgtttacattcaattcaacaagcattgattgaacacatcctatgtgctgacttctggaaagatgcatattaatatggttcccaacctcaaagaaatcatagtactggaaagcagataaacatataaacaaataaaatgtaacattgtgatatggtttggctgtgtccccaccaaaatctcatctcgaattcccatttgctatgggaggaacctggtgggaggcaattgaatcatggggacgggtatttcccgtgctgttctcataatgaaaaagtctgttgagatcagatggttttaaaaatgaaagtcttcctgcacaagctctcttctcttgcctgtcaccgtgtaagacatgcctttcaccttctgccatgattgtgaggcttctccagtcacgtggaagtgtaagtccaataaaactctttcttggttatgtctttatcagcagtgtg

SEQ ID NO: 366156 - DNA, 554 bp, Homo sapiens
aaacacacatgaaagtcacagttgcctcattatttcaacaayacagagggcttttgatgattggaaagattatcatgagggctaatgacccaagatgaaaattgtttacattcaattcaacaagcattgattgaacacatcctatgtgctgacttctggaaagatgcatattaatatggttcccaacctcaaagaaatcatagtactggaaagcagataaacatataaacaaataaaatgtaacattgtgatatggtttggctgtgtccccaccaaaatctcatctcgaattcccatttgctatgggaggaacctggtgggaggcaattgaatcatggggacgggtatttcccgtgctgttctcataatgaaaaagtctgttgagatcagatggttttaaaaatgaaagtcttcctgcacaagctctcttctcttgcctgtcaccgtgtaagacatgcctttcaccttctgccatgattgtgaggcttctccagtcacgtggaagtgtaagtccaataaaactctttcttggttatgtctttatcagcagtgtg

SEQ ID NO: 366157 - DNA, 554 bp, Homo sapiens
aaacacacatgaaagtcacagttgcctcattatttcaacaatacagagggcttttgatgattggaaagattatcatgagggctaatgacccaagatgaaaattgtttacattcaattcaacaagcattgattgaacacatcctatgtgctgacttctggaaagatgcatattaatatggttcccaacctcaaasaaatcatagtactggaaagcagataaacatataaacaaataaaatgtaacattgtgatatggtttggctgtgtccccaccaaaatctcatctcgaattcccatttgctatgggaggaacctggtgggaggcaattgaatcatggggacgggtatttcccgtgctgttctcataatgaaaaagtctgttgagatcagatggttttaaaaatgaaagtcttcctgcacaagctctcttctcttgcctgtcaccgtgtaagacatgcctttcaccttctgccatgattgtgaggcttctccagtcacgtggaagtgtaagtccaataaaactctttcttggttatgtctttatcagcagtgtg

SEQ ID NO: 366158 - DNA, 554 bp, Homo sapiens
aaacacacatgaaagtcacagttgcctcattatttcaacaatacagagggcttttgatgattggaaagattatcatgagggctaatgacccaagatgaaaattgtttacattcaattcaacaagcattgattgaacacatcctatgtgctgacttctggaaagatgcatattaatatggttcccaacctcaaagaaatcatagtactggaaagcagataaacatataaacaaataaaatgtaacattgtgatatggtttggctgtgtccccaccaaaatctcatctcgaattcccatttgctatgggaggaacctggtgggaggcaattgaatcatggggacgggtatttcccrtgctgttctcataatgaaaaagtctgttgagatcagatggttttaaaaatgaaagtcttcctgcacaagctctcttctcttgcctgtcaccgtgtaagacatgcctttcaccttctgccatgattgtgaggcttctccagtcacgtggaagtgtaagtccaataaaactctttcttggttatgtctttatcagcagtgtg

SEQ ID NO: 366159 - DNA, 559 bp, Homo sapiens
tgctgcttagcatacactgggtggactctgtgcctgtccagagtgcccttgagaaagggaacagtcagaaaaacaggcagagcacgtgtagctttctggratgtccacagtatggtgggaaccgccaggccacagtgtggtcttcaccttgacagctttaagagaccttgtcagatcacttgacgtggagtcctgcagtcctcatggtagccgacttcaccaaacagactcgggatgcttgtttactctgaccaatacagcaccagggaaacaatgccagattcttactgtgattcttctatagatggtgaaaaaactacctgtatcgtgacatcacattagacatggtacaactaatgagatcttaacttcgtttctattcttagtagtcactcttgggttttgatgagatttgcgattcacttaactcttttgataatactagcgggcatcctggcggctcccattccctctgagcagcagcactgaccccatgtttgtgcaggatagctggaggagatgctgtgctgaaaagaagcacatttgctggcccatcaac

SEQ ID NO: 366160 - DNA, 578 bp, Homo sapiens
acatggtgaaacgccatctctaccaaaaaaaaaatagctgggtgtggtggtgtgtgcctgtggccccagccacttgggaggctgaggtgggagaatcacttgagcccaggaggtcaaggctgcagtgagccataatcatgccactgcgctccagcctgggtgacagagtgagactgtcttaaaaaaataaataaattatagaagaaatacaaattagagctgcaatgccataccattttaacttgttagatgagcaaagattaaacatatgaaaaatcccggtgttggccaggatggggagggacacaggtactctctgacactttactggaggaagtaaactgttacgcattttaaaactacaaaasgttcgacaagatcaaattagaatccagaagaaaaatatatacacatttcctaaaatgtaatctgtgatgataactgaaacagaagccgatttggggatactatttgactttggtaaaaacacaagtaaggtttaatctcttaccccaacctcctggccacagctgactgaatggggacagacactacctaaaatgggccaggtttccctc

SEQ ID NO: 366161 - DNA, 537 bp, Homo sapiens
agctctggcatactttccttttcagttagacattcagctggctttcagaaactaccatatcagattcacckactctccaaacattcagtgtgttttcatgatgctttagctagtggaaatgcaaaaactgaacaaacgaagataaaacaaaccccattcctcaagatgctaatggtttagtggcagagacaggcatataaataaagttacaacacagtgtgataagcactacattaaaggtatgtctcattcctggaaattaaaacgcaactagaaatactccattctcagtggggaatgggagatgacacggcatcacagaccccccagcatcctgctcagcatcgggaagctattcaacagacgtttgaggatggaagagtgaagctctcactcaaggcttagaagcagcattccaccattttaaaacgtcacttagcttttgctatacagcctcaacaactaaataataagtctcccagaaaaaggcaactttgtgtctatggaataatgtaatgaaaaaccttgtcaagtacc

SEQ ID NO: 366162 - DNA, 537 bp, Homo sapiens
agctctggcatactttccttttcagttagacattcagctggctttcagaaactaccatatcagattcaccgactctccaaacattcagtgtgttttcatgatgctttagctagtggaaatgcaaaaactgaacaaacgaarataaaacaaaccccattcctcaagatgctaatggtttagtggcagagacaggcatataaataaagttacaacacagtgtgataagcactacattaaaggtatgtctcattcctggaaattaaaacgcaactagaaatactccattctcagtggggaatgggagatgacacggcatcacagaccccccagcatcctgctcagcatcgggaagctattcaacagacgtttgaggatggaagagtgaagctctcactcaaggcttagaagcagcattccaccattttaaaacgtcacttagcttttgctatacagcctcaacaactaaataataagtctcccagaaaaaggcaactttgtgtctatggaataatgtaatgaaaaaccttgtcaagtacc

SEQ ID NO: 366163 - DNA, 562 bp, Homo sapiens
tgacagaagactggttccagctgcagtaaacaagagaggaacagtgacaccaagagactgatttctgtcctttgagatgcaaagagtatacaaagtcaacatgaagataaactcttatcaccaactaaatattgtgctacgagaggtagtcaaagggccagggcagtggctcacacctgtaatcccagccttttgggaggctgaggcaagaggattgcttgagcccaggagtttgagaccagcccgggcaacagggcaaaatccgtatcttaaaaaaaaaaaaaaaaattagctgggcatggtgacgcacacctgtagttccagctactcaggaggctgaggtgggaggatcrcttcagcttgggaggtcaagcctgcagtgagctacaatcacaccattgcattccagcctaggtaacagagtgagatcctgtccccgccacagacacacacacacacacacacacacacacacacacacacgaaaaaaaagaaaagaaaaaagagaaagtcaaacagctccagatggagaacttgctcctgaaataaagtgtgtgtgtat

SEQ ID NO: 366164 - DNA, 537 bp, Homo sapiens
  misc_feature (1)...(537): n = A,T,C or G
tctgagacagttttactctgttgcccaggctggaatgcagtggtgtgatctctgctcactgcaacctccgcctgctgggttcaagcaattctctgcctctccccccgagtagctgggattataggtgcccaccaccacgcctggctaatttttgtattttttwagagagacggggtttcaccaccttggccaggctggtcttgaactcctgacctcatgattcagcctcccaaagtgccgggattacaggtgtgagccaccgtgcccagatgttttgggcttgttttaaagtccattcccctctcctgaatggacgaacaaagagatttttctccaatcttcaatgtaagaacctggtaaggttgctggcagaaaaacacacaagtgtggaagcccctctgactgggcccttctggagcttttaactctcaaacttgtcctcaatgagcctccagcaactcaccaagtttctgcaaccctgaaacggttcccacaaggctttctgttccaaatttgggggcatcagtttgnnnnnnn

SEQ ID NO: 366165 - DNA, 479 bp, Homo sapiens
cttattatgcacagcacatccagcactaataaggatttgtgtgcaaatcttcrtcctcgaactttaagagcattaattaatacattcagccccctgttgaaagaggtgagttctgtctccctattttcggagactcaggattatgtgcacttcacctcagggtgctaagtgaagcagtgatgaaacttgggtattaaatgtgtaaaattattatcttcaatttttgtaagagcctttaagtatgtcctcctccattctcttcaactttcaccctcttcactttctcctactttttctcaccagtcttagagatcagcagtttgaaaacaaagtatgttaagaaattaacagaagagaaagaagtaaaactgaaacgaaaaaatattttttttgtaaataattcacagtaacttataagacacctactttttctccccatgatttattactattttactaaagtgattaataatagctac

SEQ ID NO: 366166 - DNA, 604 bp, Homo sapiens
attttttaatggaagagacaaggtctttgccttcaaggaatttatggtatattgggaatgcaaccttggaaacaggtaattttgatgtaatgtggcaaatatgatggttgtactcacagcgtgtaaagtcagcacagtgaaaaagcatttgacctcatctaaatcagwcatagaagagttcctagaggagatgacatccgggcagtcttatgagatgaatgggcttgcccggatgaagtggggagagggattccaggccaagagacagcgtgggcaccagcaaggaggtctggaccagcatggtgtgcagggggtcggggatggctggggatagaggcaggttgaggaagcagcaaattcttgatctttgttacagcataaagataaaggtgaagagtgatagcagttaaatttagagcatggatagaagccaaccccatagcaaaggggaagccataatttccccccaggggcactgtattatctatattgtacgcattttatggaacaaaactgcattcctaaatatatttttcataaaatttatttctctcatctgagcctgtaatggcaccagcagctacagtttttctggattctaaat

SEQ ID NO: 366167 - DNA, 604 bp, Homo sapiens
attttttaatggaagagacaaggtctttgccttcaaggaatttatggtatattgggaatgcaaccttggaaacaggtaattttgatgtaatgtggcaaatatgatggttgtactcacagcgtgtaaagtcagcacagtgaaaaagcatttgacctcatctaaatcagtcatagaagagttcctagaggagatgacatccgggcagtcttatgagatgaatgggcttgcccrgatgaagtggggagagggattccaggccaagagacagcgtgggcaccagcaaggaggtctggaccagcatggtgtgcagggggtcggggatggctggggatagaggcaggttgaggaagcagcaaattcttgatctttgttacagcataaagataaaggtgaagagtgatagcagttaaatttagagcatggatagaagccaaccccatagcaaaggggaagccataatttccccccaggggcactgtattatctatattgtacgcattttatggaacaaaactgcattcctaaatatatttttcataaaatttatttctctcatctgagcctgtaatggcaccagcagctacagtttttctggattctaaat

SEQ ID NO: 366168 - DNA, 604 bp, Homo sapiens
attttttaatggaagagacaaggtctttgccttcaaggaatttatggtatattgggaatgcaaccttggaaacaggtaattttgatgtaatgtggcaaatatgatggttgtactcacagcgtgtaaagtcagcacagtgaaaaagcatttgacctcatctaaatcagtcatagaagagttcctagaggagatgacatccgggcagtcttatgagatgaatgggcttgcccggatgaagtggggagagggattccaggccaagagacagcgtgggcaccagcaaggaggtctggaccagcatggtgtgcagggggtcggggatggctggggatagaggcaggttgaggaagcagcaaattsttgatctttgttacagcataaagataaaggtgaagagtgatagcagttaaatttagagcatggatagaagccaaccccatagcaaaggggaagccataatttccccccaggggcactgtattatctatattgtacgcattttatggaacaaaactgcattcctaaatatatttttcataaaatttatttctctcatctgagcctgtaatggcaccagcagctacagtttttctggattctaaat

SEQ ID NO: 366169 - DNA, 469 bp, Homo sapiens
gctgtcttttttaccttcagcttatacctgcagctccacacttycacagctatttcaggagaaagacaaatttaacagaggtaccaacagcagttactcttacctccccatgggcccttatcgccttcctcttcaagctcagacttaaaaatcaggtgacaaatatcctgggctaaaatactacacagtcagcaatctgttggataccaacgggttagatcataaccagatcaggatttccacttagtttcattaaatgtgttgagtcttacatttggacaaagaaaataatgaaaatcatgacataagtgcacgaaatatacagaaaatctgtacattatcaaatagaaatagcaagatgtaaatactgcattgcagaggtattttttcattattaccatgacaatttttaaatactccaaaatcaaactatatttcaaaattacctctataatactaaacctgacat

SEQ ID NO: 366170 - DNA, 575 bp, Homo sapiens
ggcagcacatgactgtatatatggagagagagagagtcggggtggaggagagagatttactgtaaggaattgattcatgtgataagggaggctggggaaatcgtaagatctgcagttggcaagctagaartccaaaaagctggtggtataagttccagtctaagtccagttccgaagataatagaaaactgatgtccccactcaaagacagcagcagaaaaagagccagttctcccttactcagactttttaatgtattcatgccttcagcatattggaagatgcccacccacattgggaaggcaacttgctttactctgtctaccaagtcaaaatgctgatcttattaagaaacaccattacagacatccccagaataacatggaaccaaatacctggtcaccctgtggcccagtcaagttgacacataaaattaaccatcaagagattgatattgcttcccccaaacactgctgaatttgtgtatctccaggtcctcattgccttctgtggaatatatactgtcttcacaagctggttgctgctgctgcttggccaggcctacagacatgtac

SEQ ID NO: 366171 - DNA, 565 bp, Homo sapiens
atcaagtcaaagtacgttcctcctgagatattcctttgttcaactaacatttgttaaatatcttttctgcaagtctttatggtaagtgccatgggatcaaagataaataacactcatactgtctatgatacaaacatacacataaatattagcaacaaatgacattgaagactacgttatcaaggtacttatacactgctggtggttatacagaaaaggaagttgttgttgggaaatggtaggtaaagaaagacttcccagagctgaatctgaagatgaatgttaaacgaacaactgagggacagtattctagacggagaagtctgccagagagcagccacagaggagtgaatgaggaagacagacaatgtggagctccaaaaggtcaagatacccaagaaggagaaggaagaaaaatccccaggaaatgacagaaggcagactaggsaaggactaggcagagcacacagagcccctgttaaataaggaggatctacaagtaaccgggagagttggaaggaacttaatttacttaggaaaggaatagaaaacaggcgttccaggg

SEQ ID NO: 366172 - DNA, 573 bp, Homo sapiens
gcaagaaaatatgacatgaaataaatgctaaggcacacaaaacagtgacaaaagaatattatcaattacataaaaatacctgaagttaaatttaaagacataaagcacaagactaacagtaaataataayaacaataatttaaaacaaagcaaatttcaggtggcttggtaaatggcctagaaaaataaaggtgaaattataaacagagtggacactttatgatttgatcttcagcatattcacaagacagaactttcataacctttcatctttctcaccctcaaaccaaaaaactcaggaggcaccggcaagcagtacgctgagggaagcccatgcttctgccaagtcggtttggaccaaaatgaattcctcagtaataggtagaaaattttgcaagataaatgacccttccataaacaagctaagatgatattttttacatttccactttcattacagtacaacgcccccactccccacccacatacattcacctaagtttattcatccattcactgaaccaatattgcatggcagggactccctaaaaaccgttaacatcccctaaaaca

SEQ ID NO: 366173 - DNA, 629 bp, Homo sapiens
catgtttttgaacttttgtctcctttagtttaatgctttaaaagcmttaaaaacttaattacacaaataaatatgaagttttaaatatgtagttacactgttggtaagtttagtgaaggacaagtacagagcactctgagtgagatgacctggtgtgtgacagtgtacacacagtgaggggtcaaggaagacctctctaaggaggtgtcatgcaggctgggttccaagggagggtagcagaagttagctcaacagtgggaaggtgctacggggaggctggagaggtgtggggggcagatgaggtggcgtgcttccgaattgaggaggcttctaggtagcagtgtctaagatcatcctgggggaggaaccagtttggcagcttctaaggattttaatgtaggccagtgtagctggagcctggattcatcactgttcatattctttcatgtttggttcgcatgcgcttgtgtgtcctgtgtgcatgttgataggtagatttggaggctgaaccatggtgaagaaagttgcaaatatcataacacttcatccctgaatttgtcagcatgcatcttttaaaaagtaaggggaatagttattcattatttttacacttgatcttagccaaaagg

SEQ ID NO: 366174 - DNA, 583 bp, Homo sapiens
tattgcaaaacacttgtggcctaagccaagccaaaaaatgaaagtaagagcagcttcgctagcagatacagagttaaagaagaaggcccagagggagcaagaaaagccagttttgcaggagccaccagagggaataaagattcctactccatatgtcacagcctaccccactttaccaaggccagcagccccctgggaaccagattcaggtgctagcacaccycaactctcaccctgaaatgaaagactggagacttgagaggtcagggaaagaagtcaagatagtcaagcaggccatctcagatctggttgtgcttgagatatgcaaatgcctctcagggagacacgaggacccatttattaagataaccaaggccaagtccaagggtgggaacggactttcatctgtcagcccttttcaaccactgatctcttaaactggaaacaccatactccctcctatatggagaagccccaagctcttatagatctgatgcagtccatctttctgacacagaatccaacctgaccagactgcaggcagctgcttctcatgctgtataacactaaggagcacaggata

SEQ ID NO: 366175 - DNA, 583 bp, Homo sapiens
tattgcaaaacacttgtggcctaagccaagccaaaaaatgaaagtaagagcagcttcgctagcagatacagagttaaagaagaaggcccagagggagcaagaaaagccagttttgcaggagccaccagagggaataaagattcctactccatatgtcacagcctaccccactttaccaaggccagcagccccctgggaaccagattcaggtgctagcacacctcaactctcaccctgaaatgaaagactggagacttgagaggtcagggaaagaagtcaagatagtcaagcaggccatctcagatctggttgtgcttgagatatgcaaatgcctctcagggagacacgaggacccatttattaagataaccaaggccaagtccaagggtgggaayggactttcatctgtcagcccttttcaaccactgatctcttaaactggaaacaccatactccctcctatatggagaagccccaagctcttatagatctgatgcagtccatctttctgacacagaatccaacctgaccagactgcaggcagctgcttctcatgctgtataacactaaggagcacaggata

SEQ ID NO: 366176 - DNA, 574 bp, Homo sapiens
atagggtcacaatcccccaccttttacaggattcaggaagaaaaggagagtaacatcacttaagtgataaacaaaacatatgtcatacatcccctattagcaaggcctatgcaggagagtcacattacctaggtgttggaccagccgtatttcaacagacacaatgtaagcagggccyaaggaggagaggagagtcacatcaccaaggtgctgggtccagtgatatgtcacaatcaccctttttggcaggttccagtgaaaagacgagagtcataacacctaagtgaggaacaaatgatatgtcataatacccttctgaacagaacccatgagttagagtcatattacctgggtcttagacccagtcatatatcagaatacacaatgtatgcaaagcccaggggaaaaaaaaaagtcacatctcaggcagagcccaagcagaagagagtcacatcacctaggttctaggtcaagaaatgtcacagtatcctctgagaaaagagccctggcagaaaagtcacatcatctagatgagagccccagagatatgtcacaatgtcccctgtgagtagtg

SEQ ID NO: 366177 - DNA, 510 bp, Homo sapiens
cacacgtggatgcagtccacagtaaaaattgtgactgtcatatgtgatcatgtgaccacagtcaagatgttgactcatttcaaaacaaagctcataggcagatgaggactcttctctctggtcctagccaattagagagatgttgactctaacacatgggcttaggtccatagctacgattatcagttcatactagaacagaattctcagagcaaattgtgactatcatgcatattgtataaagccctcagatggtaacagagagttttgtaacagggcccagcacacaggtgacattgtgatactcatacacacactcagccaasagtaaagattgtcatcttttcatatgaacacagttcattgttgaagttctgaatctcacacctagagatagccaaaagttggaaaattgactttcacacatggattcagtccacatgtgggctggtgactctcagaccaagattcagcgtatctgtgaggctgtgagtccactaaggggacaca

SEQ ID NO: 366178 - DNA, 601 bp, Homo sapiens
tttccacaggttctgtttattgttctaggtgaaagtattcatgttgttttaattgtgtctcatgtgactctaaggtgaggccagaatcaagtgtgtggggttcaagatacattcatgagagttaagttccacctttgcactaaaaggtagtcacagggacygttctgtttggttttgatagggagaggtcagtgtcacccatatttccattactgtagcagaaattgctggtgtttgtggcaaaagcaggcacctgaagacagaaatagagaaacatatttttatattcattgagcagttcattgttcctgaatctctgctgttataaaggacagaaatgggtgtgctttttctgcagttcttagttcttttttctgtgggtgtgagactagcaggtaaacaggtggtgctgacgccttttaaggaattttttcaagacacaggtgtaacttctccagagaatgtcatctgaaaagcatttccaaagaagacgaaagaggaaaaatggctttttttttttttcagctaaacatgtgtcagatgaagagctgtgtccactctgcctcctggagtgcgatgcatttagtccttgcaaacattt

SEQ ID NO: 366179 - DNA, 601 bp, Homo sapiens
tttccacaggttctgtttattgttctaggtgaaagtattcatgttgttttaattgtgtctcatgtgactctaaggtgaggccagaatcaagtgtgtggggttcaagatacattcatgagagttaagttccacctttgcactaaaaggtagtcacagggactgttctgtttggttttgatagggagaggtcagtgtcacccatatttccattactgtagcagaaattgctggtgtttgtggcaaaagcaggcacctgaagacagaaatagagaaacatatttttatattcattgagcagttcattgttcctgaatctctgctgttataaaggacagaaatgggtgtgctttttctgcagttcttagttcttttttctgtgggtgtgagactagcaggtaaacaggtggtgctgacgccttttaaggaattttttcaagacacaggtgtaacttctccagagaatgtcatctgaaaagcatttccaaagaagacraaagaggaaaaatggctttttttttttttcagctaaacatgtgtcagatgaagagctgtgtccactctgcctcctggagtgcgatgcatttagtccttgcaaacattt

SEQ ID NO: 366180 - DNA, 445 bp, Homo sapiens
taccctttaactatccctacaccaccctaccccttcccttctcagcctctgataattatccttctactctatctccatgagatcaattgttttaatttttagctcccctaaataagtgagaatatgcaaatttcatctttctgtacctggcttatttcmcttaacataataatctccagttccatccatgttattgaaaatgacagcatctcattcttttctatggctgaatagcatttcattgtgcatacgtaccacattttctttatccattcatctgttgatggacaattaggttgctttcaaatcttgggtattatgaatagtgctgcagtaaatgtggaaatacagatatctcttccatatactgatttcctttcttgtgtatatatacttagcagtgagattgctggatcatatgggagctctatttttagttttttcc

SEQ ID NO: 366181 - DNA, 445 bp, Homo sapiens
taccctttaactatccctacaccaccctaccccttcccttctcagcctctgataattatccttctactctatctccatgagatcaattgttttaatttttagctcccctaaataagtgagaatatgcaaatttcatctttctgtacctggcttatttcccttaacataataatctccagttccatccatgttattgaaaatgacagsatctcattcttttctatggctgaatagcatttcattgtgcatacgtaccacattttctttatccattcatctgttgatggacaattaggttgctttcaaatcttgggtattatgaatagtgctgcagtaaatgtggaaatacagatatctcttccatatactgatttcctttcttgtgtatatatacttagcagtgagattgctggatcatatgggagctctatttttagttttttcc

SEQ ID NO: 366182 - DNA, 457 bp, Homo sapiens
gttcattggtctatgtgcctgtttttatgccagtaacatgctgtttggttacaatagctctgtagtataatttgaagtcaggtaatgtgatgtctttagttttgctatttttgcttgggatagctttggctattctgggtctttcatgcttccatataaattgcaggattacttttcctattttggagaagagtgtcatttgtattttaatatggattgtrtcaaatctgtagactgctgtgggtagtatggacattttaacaatatttattctactaatccatatacatggaatatctttcaattttttgtgttctctttcttgcatcaatgttttatagttttcattgtagagatcttttacttctttgattatttcctaggtatttaattttatttatagctattgcaaaataggattactttatttcatttttagattgttcactgttggcat

SEQ ID NO: 366183 - DNA, 525 bp, Homo sapiens
ctgatgtgtgtgtgttaaaacattcttgcgcccctaggataaatcccacttggtcatgataaatgatctttttaatatgttttcgaatttggtttgctagtattttgttgaggatttttctgtaaatatttatcagagatattggcctgcagtattctttttttgatgtgtctttttctgtttttgatattacggtaatactggccttatagagtgagtttggaagtattccctcctcctctatttttcagaataatttgagtagggttagtattagttattytttaaatgtttggtagaattcagagtgaagccatttgttgccaggcttttttttgctggggtactttttattatggctttgatcttgttacttgttattggcctgttcagattttggaattcttcatggtaaatgttgataggtttttagtatctaggaatttatccatttcttctaaattttctaatttattgtcatgtagttgctcatagtagccactaatgatcatttgaatttctgct

SEQ ID NO: 366184 - DNA, 525 bp, Homo sapiens
ctgatgtgtgtgtgttaaaacattcttgcgcccctaggataaatcccacttggtcatgataaatgatctttttaatatgttttcgaatttggtttgctagtattttgttgaggatttttctgtaaatatttatcagagatattggcctgcagtattctttttttgatgtgtctttttctgtttttgatattacggtaatactggccttatagagtgagtttggaagtattccctcctcctctatttttcagaataatttgagtagggttagtattagttattttttaaatgtttggtagaattcagagtgaagccatttgttsccaggcttttttttgctggggtactttttattatggctttgatcttgttacttgttattggcctgttcagattttggaattcttcatggtaaatgttgataggtttttagtatctaggaatttatccatttcttctaaattttctaatttattgtcatgtagttgctcatagtagccactaatgatcatttgaatttctgct

SEQ ID NO: 366185 - DNA, 528 bp, Homo sapiens
tgcccctaggtttttaaggaaccactgtcttgtcttccagaacagttgaactaatttacackcctaccaacagtttaaaagtatttctttttctccacaacctcaccagcatctgttgttttttgactttctaataatagtcattctgaatggtctgagatggtctcgtggtggttttgatttgcacttctctaatgaatggtgatgttaagctttttttcatatccttgttggctgcatgtatgtcttcttttgagaagtgtctgttcagtccctcatccactttttaatggggttgtttttctcttgtaaatttaagtttcttatagatgatggatattagacctttgtcagatgcatggtttgcaaatattttcccccattctataggttgtctgtttactctgttgaaagtttcctttgctatgctgaagctctttaattacatcccatctgtccgtttttgcttttgttatgattgatttggtgtctttgtcatgaaagacacccattcctagtggtattgcc

SEQ ID NO: 366186 - DNA, 596 bp, Homo sapiens
gagcctgaattgcttgcattgtgcctggaagggtgctgctagctcaccaagagttacaaaaaaagaaaattagatttaaaaaaatgtttaaatgatatgcaaatggcaagtatcatttagctgtaaratatgtaagcccaaaacctatccttattgctgtgagcttaaagagcaatgtctttcccaaaaattagttttaaagagatttctcagtgtcttagggtgaaaacaatatttggaagcagtgaggtagatgagattaactgaattattatttaatatatatgatttaaactcaaattttgaagcatgactcacatcattttattaactaagtgactaaaccagacttaacactttgttatgccactgaatagtggatgttttggaacttaagaagggagaaagaatatctgtgtcagaggttggagtgttcctagggaaagaataactcagatttctactcattttgctcttagcagatatgctttaagattctctttaagcaaggtaaatagaggaaactgagttagctattttaaagaagtttaaaaaggccagaaggaaatcagttttcacaggtaaaatagcaaacc

SEQ ID NO: 366187 - DNA, 590 bp, Homo sapiens
tctttcccaaaaattagttttaaagagatttctcagtgtcttagggtgaaaacaatatttggaagcagtgaggtagatgagattaactgaattattatttaatatatatgatttaaactcaaattttgaagcatgactcacatcattttattaactaagtgactaaaccagacttaacactttgttatgccactgaatagtggatgttttggaacttaagaaggkagaaagaatatctgtgtcagaggttggagtgttcctagggaaagaataactcagatttctactcattttgctcttagcagatatgctttaagattctctttaagcaaggtaaatagaggaaactgagttagctattttaaagaagtttaaaaaggccagaaggaaatcagttttcacaggtaaaatagcaaaccgtggtttccactgttaatattcactccttatcttattttccccctgtatttcttgattaggagaaaagctatttaaaatgctgaagaactttataaactcacttctaccagttacacaagatcgtggttaaggtgacacacagcaccgacaagaatggctaattatgtcaa

SEQ ID NO: 366188 - DNA, 550 bp, Homo sapiens
agtcatatagctttagcgcgagtaaaatgtgattctgcccatagctgttgtagatgcttcagagtagacattaaagagacactcaaggctgggcgtggtggctcatgcctgtaatcccagcactttgggaggccaaggcaggtggatcaygaggtcacgagatcaagaccatcctggctaacacggtgaaaccccgtctttactaaaaaaaaaaaaatacaaaaaagttagctgggcatggtggtgggcgcctgtagtcccagctactcgggaggctgaggtaggagaatggcgtgaacctgggaggcagagcttgcagtgagccgaaatcatgccactgcactccagcctggacaacagagtgaaactccgtctcaaaaaaaaaaaaaaaaaaaaaaagagtcactcaagaatttgtaagagctctctaagcagagaatgtagtaaggagggtatttgatggagagggaataggaggaacaaaagaacaaagatatggaaatatgtgaggccttcagggaacaactttttgattgtaaagaggaaaatg

SEQ ID NO: 366189 - DNA, 604 bp, Homo sapiens
agggaaggtttgctctatccagtccttcagggatccagcattctttcatgctggggctccaccatctctaacctgtagtatcaaggttgctctggtgtcattttgttgtctagtcagcagatgggtcaaggaagagggaacatgataaagcccattcacctttagctgccttattaatttttcctgcataatgagttatgccagagtttatcaggatgaaacaacacacgwttataatctcacgtttctataggtcaagaatctgggcatgacttgaatgggtcctttgtttcatagtctgtcttaaggctgcaattaggttgtcatccagagctgaagtctcatctgaaggcccaaatgagaaagcatctttattcaagcacacttgcacttacatggctgttggtagaattaagttcctttaaggctgttggactgagggtattagttacttgcatatgaggctcttccaacatggcagctcacttcaacaaacttggtgagagagagcatctgctagcaagagggacatgatgctcttatataatgtaatcatggaagtgactttgatgtatttaattgggtagaagaaagtcactagaca

SEQ ID NO: 366190 - DNA, 604 bp, Homo sapiens
agggaaggtttgctctatccagtccttcagggatccagcattctttcatgctggggctccaccatctctaacctgtagtatcaaggttgctctggtgtcattttgttgtctagtcagcagatgggtcaaggaagagggaacatgataaagcccattcacctttagctgccttattaatttttcctgcataatgagttatgccagagtttatcaggatgaaacaacacacgtttwtaatctcacgtttctataggtcaagaatctgggcatgacttgaatgggtcctttgtttcatagtctgtcttaaggctgcaattaggttgtcatccagagctgaagtctcatctgaaggcccaaatgagaaagcatctttattcaagcacacttgcacttacatggctgttggtagaattaagttcctttaaggctgttggactgagggtattagttacttgcatatgaggctcttccaacatggcagctcacttcaacaaacttggtgagagagagcatctgctagcaagagggacatgatgctcttatataatgtaatcatggaagtgactttgatgtatttaattgggtagaagaaagtcactagaca

SEQ ID NO: 366191 - DNA, 597 bp, Homo sapiens
ttgctaaacctctttaacatagtaaataataatctcaaactagtggttgatatctcaatagaaacttaactgtgaaaagcaaaaacaatttgacaatgtctgctggtactactatccattgttgtcctgtaaccataagttaatgcattaaagggaaaaagtattaaaaagagagtctggaataacatttttaaaactaataactaatgagagagcttaataaaatgaatgaaacaataagtgctatccaagtcctatgcaagttataaaacttcactgagaaatgaaaaagatggcttgaataagcatggaaatatatcaagtttccagtaagtaatttgytataaaattattcactgcagcattatttatcataataataaaaacaaaaaccaactaaatatttgacaacagggaataggtaaaataaagtatggtagagtcatataatgcacatgaacagccataaaaatatataaaagaaaaatattttatggcttgcaaaaattttcaaagtggacagtacatttccgaaaagcaagttacaaaacaatttcgttgttaaaaatgtatatttttgtaaatatacacacatgc

SEQ ID NO: 366192 - DNA, 536 bp, Homo sapiens
cttctactacatgccagacagttttgggagctagggaaacgtcaagagaaaaacaatcagtactaagtaagtgtgttagaagttattagagctaaaaaaaaaaaaaaaaaaaaaaaaccccagagcagatggagggggrgctcaaaagggaaaaatgcagcttgcaattttatatggggttataagggggggcttaaattgaaaaagtaatatttgaaaaaaaatccgtaaaaaaagcaatatatgataggaaacagttacaggtaaaaacagttaagcctagggccttatgataggagcacacctaaaattttgaagaaccaacaaggaggccaaatcttgctagagctaagtaagtaaagggaatatggcaaaaaacaggtcagaaaagtaacaggatgtatagcacttcttagtaattttaaacacctagctttaattttgacaaaattgttgacttcgaaggattttatcaggatcactccagcttgaaaatacattataagtctcagatgaaaaagtagaaaaagcagagg

SEQ ID NO: 366193 - DNA, 536 bp, Homo sapiens
cttctactacatgccagacagttttgggagctagggaaacgtcaagagaaaaacaatcagtactaagtaagtgtgttagaagttattagagctaaaaaaaaaaaaaaaaaaaaaaaaccccagagcagatggagggggagctcaaaagggaaaaatgcagcttgcaattttatatggkgttataagggggggcttaaattgaaaaagtaatatttgaaaaaaaatccgtaaaaaaagcaatatatgataggaaacagttacaggtaaaaacagttaagcctagggccttatgataggagcacacctaaaattttgaagaaccaacaaggaggccaaatcttgctagagctaagtaagtaaagggaatatggcaaaaaacaggtcagaaaagtaacaggatgtatagcacttcttagtaattttaaacacctagctttaattttgacaaaattgttgacttcgaaggattttatcaggatcactccagcttgaaaatacattataagtctcagatgaaaaagtagaaaaagcagagg

SEQ ID NO: 366194 - DNA, 536 bp, Homo sapiens
cttctactacatgccagacagttttgggagctagggaaacgtcaagagaaaaacaatcagtactaagtaagtgtgttagaagttattagagctaaaaaaaaaaaaaaaaaaaaaaaaccccagagcagatggagggggagctcaaaagggaaaaatgcagcttgcaattttatatggggttataagggkgggcttaaattgaaaaagtaatatttgaaaaaaaatccgtaaaaaaagcaatatatgataggaaacagttacaggtaaaaacagttaagcctagggccttatgataggagcacacctaaaattttgaagaaccaacaaggaggccaaatcttgctagagctaagtaagtaaagggaatatggcaaaaaacaggtcagaaaagtaacaggatgtatagcacttcttagtaattttaaacacctagctttaattttgacaaaattgttgacttcgaaggattttatcaggatcactccagcttgaaaatacattataagtctcagatgaaaaagtagaaaaagcagagg

SEQ ID NO: 366195 - DNA, 542 bp, Homo sapiens
gctagagctaagtaagtaaagggaatatggcaaaaaacaggtcagaaaagtaacaggatgtatagcacttcttagtaattttaaacacytagctttaattttgacaaaattgttgacttcgaaggattttatcaggatcactccagcttgaaaatacattataagtctcagatgaaaaagtagaaaaagcagagggtaataagtaatagtggcttaaactgggatggtagcactgaaggtaatgtgaagatgttatgttctggctatgtaaatatatttgaaaatagaacctacaggatcttatgaagaagatttatgcgagttttttttttaatagaggagtcagaatggctatttttgcctgaataagtaaaaatattaggtttagcattaactaagatgggaaaaactgggtagaacaggaggttttggaggagtttagatattagattgggaatttagatttaagtgtgttaagtctgagatgtggaatggaagtgtcagagtggaaatgttgaaaacgcagttggaaaagaagttga

SEQ ID NO: 366196 - DNA, 583 bp, Homo sapiens
ttagttcttttttataagttagggataattcatcagtaaagccatctggctctggaattttttcgttggaagactttttattattgatttaattactttgcttgttattggtatgttcaggttttcttaatttctttctgcattccatcttgatagattggatgtgtctagaaattatccaggtttggataagttctccagtttgttagcatacgtttgttcataatagtatctaakgatcctttatatttctgttatatccgctgtcacattttttaatcctgattttatctaggtcttctctttttttcacttaaagtctacctagaggtttatcattcttgtttatctttaaaaaaaaaacttttcattgttagtctctatttcatttagttcagctctgatctcttgttttttgtttgtttgtttgtttttgtttttgtttttttgagaaagagtctcactctgacgtccaggctggagtgcagtggtgcaatctcggctcactgtaacctctgccttcccggttcaagcgattctcatgcctcagactcctgagtagctgggattacaggtgcgtgcc

SEQ ID NO: 366197 - DNA, 583 bp, Homo sapiens
ttagttcttttttataagttagggataattcatcagtaaagccatctggctctggaattttttcgttggaagactttttattattgatttaattactttgcttgttattggtatgttcaggttttcttaatttctttctgcattccatcttgatagattggatgtgtctagaaattatccaggtttggataagttctccagtttgttagcatacgtttgttcataatagtatctaatgatcctttatatttctgttatatccgctgtcacattttttaatcctgattttatctaggtcttctctttytttcacttaaagtctacctagaggtttatcattcttgtttatctttaaaaaaaaaacttttcattgttagtctctatttcatttagttcagctctgatctcttgttttttgtttgtttgtttgtttttgtttttgtttttttgagaaagagtctcactctgacgtccaggctggagtgcagtggtgcaatctcggctcactgtaacctctgccttcccggttcaagcgattctcatgcctcagactcctgagtagctgggattacaggtgcgtgcc

SEQ ID NO: 366198 - DNA, 583 bp, Homo sapiens
ttagttcttttttataagttagggataattcatcagtaaagccatctggctctggaattttttcgttggaagactttttattattgatttaattactttgcttgttattggtatgttcaggttttcttaatttctttctgcattccatcttgatagattggatgtgtctagaaattatccaggtttggataagttctccagtttgttagcatacgtttgttcataatagtatctaatgatcctttatatttctgttatatccgctgtcacattttttaatcctgattttatctaggtcttctctttttttcacttaaagtctacctagaggtttatcattcttgtttatctttaaaaaaaaaacttttcattgttagtctctatttcatttagttcagctctgrtctcttgttttttgtttgtttgtttgtttttgtttttgtttttttgagaaagagtctcactctgacgtccaggctggagtgcagtggtgcaatctcggctcactgtaacctctgccttcccggttcaagcgattctcatgcctcagactcctgagtagctgggattacaggtgcgtgcc

SEQ ID NO: 366199 - DNA, 583 bp, Homo sapiens
ttagttcttttttataagttagggataattcatcagtaaagccatctggctctggaattttttcgttggaagactttttattattgatttaattactttgcttgttattggtatgttcaggttttcttaatttctttctgcattccatcttgatagattggatgtgtctagaaattatccaggtttggataagttctccagtttgttagcatacgtttgttcataatagtatctaatgatcctttatatttctgttatatccgctgtcacattttttaatcctgattttatctaggtcttctctttttttcacttaaagtctacctagaggtttatcattcttgtttatctttaaaaaaaaaacttttcattgttagtctctatttcatttagttcagctctgatctcttgttttttgtttgtttgtttgtttttgtttttgtttttttgagaaagagtctcactctgacgtccaggctggagtgcagtggtgcaatctcggctcactgtaacctctgccttcccggttcaagcgattctcatgcctcagactcctgagtasctgggattacaggtgcgtgcc

SEQ ID NO: 366200 - DNA, 589 bp, Homo sapiens
ttttcactaaaagcagcaaataatgggattaaatatttaattagacagggaagattccagattggaagagattcaatcacaacttttacagagcaagtattcaatttgcatttcccagggaaaaaacactgttaagtgatccctctgtaaatwatgcagaaaaactatttcattccccagaatgttttccaaggatcaaatatataagtgtatatgctggagataacactcttaccttcagataagattataaatgagttttacaggatttcctctttctcaaatgtggatgaataaagtttgtatggatggagtcactgagtaaatcattggaaggcagtgtattgcaaaagtgaaactgttttgaaagatggaaaaccttggttcttgcaccagctgtggctctcgttagttgtgccaccttggagaagccacggctgtctgggccttagtttcctcatctttaaattgaatgacttgtctgcataaatttaatcgacatcaagattcttaagacctcactcatatttctgctgacttcacattctctcattgtcctctgtgggtggccctatagcaatatctgtgg

SEQ ID NO: 366201 - DNA, 609 bp, Homo sapiens
tttatttttgtggtgacttttaaatccatttatcatcatgttgccaatgatcagctataaaacaacaaaaatgggttgttttttccccaactcattccaaaatgaataatgaaaggatttgccagaaccaaaagatgggtggtgccttgatccttcttgctttcaatgtatctttatacaaatgaracaggttgctcagcccttctgaagctgtaaaccagccttaaatgtgtaagtgacatgactctagacaagcacagataccctaagaaaatgaaatgctgaaattagaaatgttcattgctttgcattgcaaacaggctcactgtgcatttttcaaacaaaataacataaagtgatgaccaacttgacctgcttggcgctttcttttagggcaaacaaaaggcaaattgacttattcttctaaagtaataactgcaatgacaacataattggtatccaagtggcatattttacttgaactgttgaaaggctccacattaaagatcaaaccactatgaaaaattccaactttaaaactcaattttatctaagatggctaagtatgaaacatttctgaagtgctgagatatcccaatacacttgata

SEQ ID NO: 366202 - DNA, 609 bp, Homo sapiens
tttatttttgtggtgacttttaaatccatttatcatcatgttgccaatgatcagctataaaacaacaaaaatgggttgttttttccccaactcattccaaaatgaataatgaaaggatttgccagaaccaaaagatgggtggtgccttgatccttcttgctttcaatgtatctttatacaaatgagacaggttgctcagcccttctgaagctgtaaaccagccttaaatgtgtaagtgacatgactctagacaagcacagataccctaagaaaatgaaatgctgaaattagaaatgttcattgctttgcattgcaaacaggctcactgtgcatttttcaaacaaaataacataaagtgatgaccaacttgacctgsttggcgctttcttttagggcaaacaaaaggcaaattgacttattcttctaaagtaataactgcaatgacaacataattggtatccaagtggcatattttacttgaactgttgaaaggctccacattaaagatcaaaccactatgaaaaattccaactttaaaactcaattttatctaagatggctaagtatgaaacatttctgaagtgctgagatatcccaatacacttgata

SEQ ID NO: 366203 - DNA, 609 bp, Homo sapiens
tttatttttgtggtgacttttaaatccatttatcatcatgttgccaatgatcagctataaaacaacaaaaatgggttgttttttccccaactcattccaaaatgaataatgaaaggatttgccagaaccaaaagatgggtggtgccttgatccttcttgctttcaatgtatctttatacaaatgagacaggttgctcagcccttctgaagctgtaaaccagccttaaatgtgtaagtgacatgactctagacaagcacagataccctaagaaaatgaaatgctgaaattagaaatgttcattgctttgcattgcaaacaggctcactgtgcatttttcaaacaaaataacataaagtgatgaccaacttgacctgcttggcgctttcttttagggcaaacaaaaggcaaattgacttattcttctaaagtaataactgcaatgacaacataattggtatccaagtggcayattttacttgaactgttgaaaggctccacattaaagatcaaaccactatgaaaaattccaactttaaaactcaattttatctaagatggctaagtatgaaacatttctgaagtgctgagatatcccaatacacttgata

SEQ ID NO: 366204 - DNA, 585 bp, Homo sapiens
ttccccatacagcattccttctaattgaattacttgattttatttttctggctagatcctgattgatacagatattatggagttttagctagacctggaaagaatgggtggattataggatttttaaaaatgaggttgagtagtccttgcagcagctctcagccttgtcttccctctttcacactcatgaccattccaagtaggaaatgggaacaatctttcttgtcatttaaaaaaaaaaaaaaaacaccttgagttagacatcctttttaaagagactactaagtggaagacattctggcatgggtcttattttttgctgcccaggactattaagtcaarcaaaacaaaaatttgtttcagcctcttggaaaaacagatggtgagtgatgttaaaggcatatatagcattgaagtgtggctgggccttctgtacttcctgctttttggattctgggcgcagtgtattgaaagaaaattaaacaacagaaaccagaaaggaggacattctatgcctgctgcaatttgtgtgaccaagatgcaggtggcctggcaaaatggctatagatgctccatattgccaag

SEQ ID NO: 366205 - DNA, 585 bp, Homo sapiens
ttccccatacagcattccttctaattgaattacttgattttatttttctggctagatcctgattgatacagatattatggagttttagctagacctggaaagaatgggtggattataggatttttaaaaatgaggttgagtagtccttgcagcagctctcagccttgtcttccctctttcacactcatgaccattccaagtaggaaatgggaacaatctttcttgtcatttaaaaaaaaaaaaaaaacaccttgagttagacatcctttttaaagagactactaagtggaagacattctggcatgggtcttattttttgctgcccaggactattaagtcaagcaaaacaaaaatttgtttcagcctcttggaaaaacagatggtgagtgatgttaaaggcatatatagcattgaagtgtggctgggccttctgtacttcctgctttttggattctgggcrcagtgtattgaaagaaaattaaacaacagaaaccagaaaggaggacattctatgcctgctgcaatttgtgtgaccaagatgcaggtggcctggcaaaatggctatagatgctccatattgccaag

SEQ ID NO: 366206 - DNA, 585 bp, Homo sapiens
ttccccatacagcattccttctaattgaattacttgattttatttttctggctagatcctgattgatacagatattatggagttttagctagacctggaaagaatgggtggattataggatttttaaaaatgaggttgagtagtccttgcagcagctctcagccttgtcttccctctttcacactcatgaccattccaagtaggaaatgggaacaatctttcttgtcatttaaaaaaaaaaaaaaaacaccttgagttagacatcctttttaaagagactactaagtggaagacattctggcatgggtcttattttttgctgcccaggactattaagtcaagcaaaacaaaaatttgtttcagcctcttggaaaaacagatggtgagtgatgttaaaggcatatatagcattgaagtgtggctgggccttctgtacttcctgctttttggattctgggcgcagtgtattgaaagaaaattaaacaacagaaaccagaaaggaggacattctaygcctgctgcaatttgtgtgaccaagatgcaggtggcctggcaaaatggctatagatgctccatattgccaag

SEQ ID NO: 366207 - DNA, 591 bp, Homo sapiens
acaaaaatagaatttggaatatttctatagataggagcaaagatcataaagattcaggaaaatgggaaaaccaatccaagtaaaataagagtcacaataaagtcatacaggagctgaaggacaaaatagctagtawaaaaaagaagctagtgggtctgacagagccgaataacacaatacaagaatttcacatgcaatcacaagtattaacaacagagtaaaccaagcttaaggaagaatctcagaacttgaagactggttctctgaaataagaaagtcagacaaaaataaagaaagaataaaaatgaataaacaaaacctccaagaagtatggaattatgtaaagaggccaaatctatgaatcattgatatccctgaaagggagggggagaaaacaaacaatttggaaaatatgtttcaggatatcatccatgaaaacgtccccagctttgctagagggatcaacagtcaaattcaggacataaagagaactcctccaaggttctatacaagaagatcatccccaagacacataattttcagattttccaaggttgaaaatgaaagaaaaaatgttaaaggcagttagag

SEQ ID NO: 366208 - DNA, 591 bp, Homo sapiens
acaaaaatagaatttggaatatttctatagataggagcaaagatcataaagattcaggaaaatgggaaaaccaatccaagtaaaataagagtcacaataaagtcatacaggagctgaaggacaaaatagctagtataaaaaagaarctagtgggtctgacagagccgaataacacaatacaagaatttcacatgcaatcacaagtattaacaacagagtaaaccaagcttaaggaagaatctcagaacttgaagactggttctctgaaataagaaagtcagacaaaaataaagaaagaataaaaatgaataaacaaaacctccaagaagtatggaattatgtaaagaggccaaatctatgaatcattgatatccctgaaagggagggggagaaaacaaacaatttggaaaatatgtttcaggatatcatccatgaaaacgtccccagctttgctagagggatcaacagtcaaattcaggacataaagagaactcctccaaggttctatacaagaagatcatccccaagacacataattttcagattttccaaggttgaaaatgaaagaaaaaatgttaaaggcagttagag

SEQ ID NO: 366209 - DNA, 591 bp, Homo sapiens
acaaaaatagaatttggaatatttctatagataggagcaaagatcataaagattcaggaaaatgggaaaaccaatccaagtaaaataagagtcacaataaagtcatacaggagctgaaggacaaaatagctagtataaaaaagaagctagtgggtctgacagagcygaataacacaatacaagaatttcacatgcaatcacaagtattaacaacagagtaaaccaagcttaaggaagaatctcagaacttgaagactggttctctgaaataagaaagtcagacaaaaataaagaaagaataaaaatgaataaacaaaacctccaagaagtatggaattatgtaaagaggccaaatctatgaatcattgatatccctgaaagggagggggagaaaacaaacaatttggaaaatatgtttcaggatatcatccatgaaaacgtccccagctttgctagagggatcaacagtcaaattcaggacataaagagaactcctccaaggttctatacaagaagatcatccccaagacacataattttcagattttccaaggttgaaaatgaaagaaaaaatgttaaaggcagttagag

SEQ ID NO: 366210 - DNA, 397 bp, Homo sapiens
tctcagccaggttttagtatcagaatgttgctggcctcatagaataagatatggaggagtcccttccgagttttgggaataatttcagtagagttggtaccatctctacttkgtacatctcgcagaatttggctgtgaacccgtctggtccagggctttttatggttggtaggattttttcgtactgatttaattttgcaactcattattggcctgttcagaatttcagtttcttcttggttcagtcttgggagactgtatctttccaggaatttatcaatttcttctaggttttctagtttgcgtacagaggtgtttgtaatagtctcttagggttttcttgtatttctgtggggcctgtggcaatgtcccttctgtcatttctggttgattggga

SEQ ID NO: 366211 - DNA, 591 bp, Homo sapiens
acaaaaatagaatttggaatatttctatagataggagcaaagatcataaagattcaggaaaatgggaaaaccaatccaagtaaaataagagtcacaataaagtcatacaggagctgaaggacaaaatagctagtataaaaaagaagctagtgggtctgacagagccgaataacacaatacaagaatttcacatgcaatcacaagtattaacaacagagtaaaccaagcttaaggaagaatctcagaacttgaagactggttctctgaaataagaaagtcagacaaaaataaagaaagaataaaaatgaataaacaaaacctccaagaagtatggaattatgtaaagaggccaaatctatgaaycattgatatccctgaaagggagggggagaaaacaaacaatttggaaaatatgtttcaggatatcatccatgaaaacgtccccagctttgctagagggatcaacagtcaaattcaggacataaagagaactcctccaaggttctatacaagaagatcatccccaagacacataattttcagattttccaaggttgaaaatgaaagaaaaaatgttaaaggcagttagag

SEQ ID NO: 366212 - DNA, 604 bp, Homo sapiens
cctgttactctcacacccttgtgcaggagcctgctctgcctattgcaaatgcaaaatctctgcatgggctcttcactccctctctgcctttgcacatgctattccctttatgtgaaaaccctagcttagcccctctgacctatctgttgaactctgactcatcctttgggaaatccatggagaactactcttggagaactcctgcattctacagcatcaggaactgcaacctctgtgcccagtgacccttagtccatgtctctcatacagcacttaccacrttatattatcattttctgtttttgcacgcctccccagttagattcgttaaagatgtgcctttcttgggaaagcttttatcaatatttaaaaagagataaccatggataaaacaaccctgctggagctgacatatttgattgtaaggctgtatgaatttggatggtgttagtggcaaaaccaatacgctgaggatagcaagaaaacagatggaacaaaactggtctttgacaaaaccattagaaatctaaattaaccatcccaaaagctttacacctctggataatgtgatatgtctgatagcaatatttttacttatttttaa

SEQ ID NO: 366213 - DNA, 603 bp, Homo sapiens
tatttcttgctagtaactcatcctaattgacacaaatactaaaattatcattaaaataactatatttcagctctaaggtaatcttaaacaagagacataccctctaaacttgagtttccccatttttaagtaggtttaataatgcctaagtttgcaatcttatttgaaaagaaataatacagtttacataaaagcaccgtgttagttacaaaatccaggaagaaaatyctaatgtcccctcaggagccagagaggtaacataaataaatgaactattcaggacaacaatatgtactaacctgcatttttttttttttttttttttgagacagaatcttgctctgtcactcaggctgcagtgcattggcgcaatcttggacacactgcaacctctgcctcccaagttcaagcaattctcctgcctcagcctcctgagtagctgggattacaggcatgcaccaccacactcagctaatttttgtacttttagtagagacagggttccaccatgttggtcaggctggtctcgaactcctgacctcaagatctgcctgcctcggccttccaaaatgctgggattacaggcatgagccactatgccca

SEQ ID NO: 366214 - DNA, 603 bp, Homo sapiens
tatttcttgctagtaactcatcctaattgacacaaatactaaaattatcattaaaataactatatttcagctctaaggtaatcttaaacaagagacataccctctaaacttgagtttccccatttttaagtaggtttaataatgcctaagtttgcaatcttatttgaaaagaaataatacagtttacataaaagcaccgtgttagttacaaaatccaggaagaaaatcctaatgtcccctcaggagccagagaggtaacataaataaatgaactattcaggacaacaatatgtactaacctgcatttttttttttttttttttttgagacagaatcttgctctgtcactcaggctgcagtgcattggcrcaatcttggacacactgcaacctctgcctcccaagttcaagcaattctcctgcctcagcctcctgagtagctgggattacaggcatgcaccaccacactcagctaatttttgtacttttagtagagacagggttccaccatgttggtcaggctggtctcgaactcctgacctcaagatctgcctgcctcggccttccaaaatgctgggattacaggcatgagccactatgccca

SEQ ID NO: 366215 - DNA, 581 bp, Homo sapiens
taagggctaaagcattcaattattttttcttgtatatttagtttgacttgacaattcattaagatattccacatctgtattactcaatgtgaatattctatttttagacattgggaaaactgaatagaggtggtgcaactcacctagaagcaatatttgtgaaaccccaaatgcccttggcatagataattattttgccctaaaataatgattakgagtatggttctatggggaaaaactgggaactcccaattttcttcccactttctgttgtatcctcaatagcacctggactgggatttccaaaggtgagttctaggattaagaggtgatggttgtcccaggattaagggctttgtttgagaaccataatgatcccatccatttaaatagcttgaacctttctggtcctttgccagctattgtctttttcttataagaagaagggaataaacttttaatgtgcacatgctagcctctgaaatctgaggcctgcctttcctccttactagatgcgtgtatgactttaaacacagcacttagacatctcgatcttcaatttcttcatgtggaaaagatga

SEQ ID NO: 366216 - DNA, 581 bp, Homo sapiens
taagggctaaagcattcaattattttttcttgtatatttagtttgacttgacaattcattaagatattccacatctgtattactcaatgtgaatattctatttttagacattgggaaaactgaatagaggtggtgcaactcacctagaagcaatatttgtgaaaccccaaatgcccttggcatagataattattttgccctaaaataatgattatgagtatggttctatggggaaaaactgggaactcccaattttcttcccactttctgttgtatcctcaatascacctggactgggatttccaaaggtgagttctaggattaagaggtgatggttgtcccaggattaagggctttgtttgagaaccataatgatcccatccatttaaatagcttgaacctttctggtcctttgccagctattgtctttttcttataagaagaagggaataaacttttaatgtgcacatgctagcctctgaaatctgaggcctgcctttcctccttactagatgcgtgtatgactttaaacacagcacttagacatctcgatcttcaatttcttcatgtggaaaagatga

SEQ ID NO: 366217 - DNA, 602 bp, Homo sapiens
ctggctttttcatactaacagatgcctaacaaagcacagaatggggcttaatatatgttgtattgagatgatctcagattttcttaaataacttttaaacacttaactgatttgctacatttttgttatttgtacacactctgtgatatgtgatttttaaatttatgtaaacatcatctatactttctttacagaaggtatgaaatcgtgaatacatcacaccacccagaaatcccccatggtgcgctttacaatgcaacagaacctcatagttcccattgtatactctttcaattataatagatgaaatacttgaaaatgcttggtagaaataccatagaagttataatgacctttgcaacaaaaggagtaaatctagtggcattttagagttttcttataattggatgttttctttttttttttttttttttctattttgaccttagtttccccagtgtatgccatttttaggctccaayagttcagagaaactgcaatttcactgagacttgacctacagaatcagagattcaggattctagtcactttgctgagatggatccaaggtatagaaagaagtcagatgtcagcccaaaggt

SEQ ID NO: 366218 - DNA, 563 bp, Homo sapiens
  misc_feature (1)...(563): n = A,T,C or G
gttactactgaccccacagaaatcaaaacaaccataagaaactactgtgaacacctctacacacacaaactagaaaacctagaagagatggataaattcctggacacatacaccttcccaagactgatccaggaagaagttgattccttgaacagaccaatgatgagttccaaaattgaatcagtaataaatagcctaccarccaagaaagcccaggacatgagggattcacagccaaattctaccagatgtacaaagaagagctggtgccattcctgcagaaactactccaaaaacatgaggaggagggacttctccccaactcattccatgagaccagcatcctcttgataccaaaacctggtagagacacaaacaaaaaacataacttaaggccaacacccttgatgattattgatgcaaaaatcttcaacaaaacacaaatcaaatgcagcagcacatccaaaaactaatccatcattatcaagtagccttcatctatctctaggatgcaaggttagtttaatatactaaaatcanntagtgtattcatnnnnnnnnnn

SEQ ID NO: 366219 - DNA, 563 bp, Homo sapiens
  misc_feature (1)...(563): n = A,T,C or G
gttactactgaccccacagaaatcaaaacaaccataagaaactactgtgaacacctctacacacacaaactagaaaacctagaagagatggataaattcctggacacatacaccttcccaagactgatccaggaagaagttgattccttgaacagaccaatgatgagttccaaaattgaatcagtaataaatagcctaccagccaagaaagcccaggacatgagggattcacagccaaattctaccagatgtacaaagaagagctggtgccattcctgcagaaactactccaaaaacatgaggaggagggacttctccccaactcattccatgagaccagcatcctcttgataccaaaacctggyagagacacaaacaaaaaacataacttaaggccaacacccttgatgattattgatgcaaaaatcttcaacaaaacacaaatcaaatgcagcagcacatccaaaaactaatccatcattatcaagtagccttcatctatctctaggatgcaaggttagtttaatatactaaaatcanntagtgtattcatnnnnnnnnnn

SEQ ID NO: 366220 - DNA, 563 bp, Homo sapiens
  misc_feature (1)...(563): n = A,T,C or G
gttactactgaccccacagaaatcaaaacaaccataagaaactactgtgaacacctctacacacacaaactagaaaacctagaagagatggataaattcctggacacatacaccttcccaagactgatccaggaagaagttgattccttgaacagaccaatgatgagttccaaaattgaatcagtaataaatagcctaccagccaagaaagcccaggacatgagggattcacagccaaattctaccagatgtacaaagaagagctggtgccattcctgcagaaactactccaaaaacatgaggaggagggacttctccccaactcattccatgagaccagcatcctcttgataccaaaacctggtagagacacaaacaaaaaacataacttaaggccaacacccttgatgattattgatgcaaaaatcttcaacaaaacacaaatcaaatgcagcagcacatccaaaaactaatccatcattatcaagtagscttcatctatctctaggatgcaaggttagtttaatatactaaaatcanntagtgtattcatnnnnnnnnnn

SEQ ID NO: 366221 - DNA, 664 bp, Homo sapiens
cattgggctggataaagaaaatatggtatttatacaccatagaatactatgcatccatwaaaaagaacaaaatcatgtcctttgcagcaatatggatgcagctggagaccattatcctaagcaaattaattcaagaacagaaaaccaaacactgtatgttctcacttataagtgggagctaaacattgagtacatgttgatacaaagaggggaacaatagacaccacagcctacttgagggtggagagtggaaggagggtgagggtcgaaaaattacctattgggtattatcctcattatctgggtgacttaattatttgcacaccaaactccagtgacacgcaatttacccttgtaacaaatgtgcacttgtaccccctgaacataaaataaaagctgaaaaaaaaaattaaaaaaatagaaacatggggaaagagtgaaatcaaggaattttaaaagtgggttgggcataaatttatgaatatgctaaaagtctaatgagaggaaaatgattaaataagaaaagataattatacaatactttgcataaaagagtcactcaaatatttgatgaataggtgaatgaataaatgaattaactgctagagcaagatccatggttgtctactgttttggattatccattttaccataaaactttatt

SEQ ID NO: 366222 - DNA, 664 bp, Homo sapiens
cattgggctggataaagaaaatatggtatttatacaccatagaatactatgcatccattaaaaagaacaaaatcatgtcctttgcagcaatatggatgcarctggagaccattatcctaagcaaattaattcaagaacagaaaaccaaacactgtatgttctcacttataagtgggagctaaacattgagtacatgttgatacaaagaggggaacaatagacaccacagcctacttgagggtggagagtggaaggagggtgagggtcgaaaaattacctattgggtattatcctcattatctgggtgacttaattatttgcacaccaaactccagtgacacgcaatttacccttgtaacaaatgtgcacttgtaccccctgaacataaaataaaagctgaaaaaaaaaattaaaaaaatagaaacatggggaaagagtgaaatcaaggaattttaaaagtgggttgggcataaatttatgaatatgctaaaagtctaatgagaggaaaatgattaaataagaaaagataattatacaatactttgcataaaagagtcactcaaatatttgatgaataggtgaatgaataaatgaattaactgctagagcaagatccatggttgtctactgttttggattatccattttaccataaaactttatt

SEQ ID NO: 366223 - DNA, 664 bp, Homo sapiens
cattgggctggataaagaaaatatggtatttatacaccatagaatactatgcatccattaaaaagaacaaaatcatgtcctttgcagcaatatggatgcagctggagaccattatcctaagcaaattaattcaagaacagaaaaccaaacactgtatgttctcacttataagtgggagctaaacattgagtacatgttgatacaaagaggggaacaatagacaccacagcctacttgagggtggagagtggaaggagggtgagggtcgaaaaattacctattgggtattatcctcattatctgggtgacttaattatttgcayaccaaactccagtgacacgcaatttacccttgtaacaaatgtgcacttgtaccccctgaacataaaataaaagctgaaaaaaaaaattaaaaaaatagaaacatggggaaagagtgaaatcaaggaattttaaaagtgggttgggcataaatttatgaatatgctaaaagtctaatgagaggaaaatgattaaataagaaaagataattatacaatactttgcataaaagagtcactcaaatatttgatgaataggtgaatgaataaatgaattaactgctagagcaagatccatggttgtctactgttttggattatccattttaccataaaactttatt

SEQ ID NO: 366224 - DNA, 563 bp, Homo sapiens
tgcacttgtaccccctgaacataaaataaaagctgaaaaaaaaawttaaaaaaatagaaacatggggaaagagtgaaatcaaggaattttaaaagtgggttgggcataaatttatgaatatgctaaaagtctaatgagaggaaaatgattaaataagaaaagataattatacaatactttgcataaaagagtcactcaaatatttgatgaataggtgaatgaataaatgaattaactgctagagcaagatccatggttgtctactgttttggattatccattttaccataaaactttattaacctagatcaaaagttaaaatatgcactttgattcagttacagatataacttccaaaccagaaaatatttctaactggttcctctacacaatattaagtctataggccctcgtctctctgtcttatacttgacattttaatgtttatcatctcaatatttatcatgtcaaatgtttatcatttgaaacgccgttttattcattttactttctcaaaagggcatacacagtcctgtgccttatgcacaataggcactcaataa

SEQ ID NO: 366225 - DNA, 491 bp, Homo sapiens
tggggctctgaccccacatttcctttctgctctgccctagcagaggttctccatacccctgcagcagacttctgcctggacatccaggctattctatacatcctctgaaatcttggcagaggttcccaacctcaattattgacttctgtgcacccgtaggctgagcaacaggcagaagctgccaaggcttaggacttgcaccctctgaaaccatggtctgagctgtactttggccactttcagctacagctggagcaactgggacaccaggcaccaagtcctgaggctacacacagcaggggccgcyggatccaacccaggaaaccatttttatctcccggacctctgagcctatggtggaagaggctgccaggaaggtctctgacatgcactggggacattttccccattgtcttggcaataaatattaactcgttagttatgtaaatttccgctggcttgaatttctcctcataaaatggggttttctt

SEQ ID NO: 366226 - DNA, 491 bp, Homo sapiens
tggggctctgaccccacatttcctttctgctctgccctagcagaggttctccatacccctgcagcagacttctgcctggacatccaggctattctatacatcctctgaaatcttggcagaggttcccaacctcaattattgacttctgtgcacccgtaggctgagcaacaggcagaagctgccaaggcttaggacttgcaccctctgaaaccatggtctgagctgtactttggccactttcagctacagctggagcaactgggacaccaggcaccaagtcctgaggctacacacagcaggggccgccggatccaacccaggaaaccatttttatctcccggacctctgagcctatggtggragaggctgccaggaaggtctctgacatgcactggggacattttccccattgtcttggcaataaatattaactcgttagttatgtaaatttccgctggcttgaatttctcctcataaaatggggttttctt

SEQ ID NO: 366227 - DNA, 491 bp, Homo sapiens
tggggctctgaccccacatttcctttctgctctgccctagcagaggttctccatacccctgcagcagacttctgcctggacatccaggctattctatacatcctctgaaatcttggcagaggttcccaacctcaattattgacttctgtgcacccgtaggctgagcaacaggcagaagctgccaaggcttaggacttgcaccctctgaaaccatggtctgagctgtactttggccactttcagctacagctggagcaactgggacaccaggcaccaagtcctgaggctacacacagcaggggccgccggatccaacccaggaaaccatttttatctcccggacctctgagcctatggtggaagaggctgccaggaaggtctctgacatgcactggggacattttccccattgtcttggcaataaatattaactcgttagttawgtaaatttccgctggcttgaatttctcctcataaaatggggttttctt

SEQ ID NO: 366228 - DNA, 611 bp, Homo sapiens
catgtcatatggtcagagtactctagtttagtggacagagatatatgattctggtattaattgttttccattttatattcagtaaccacacttgaaataattgaggcagataccatcatacaaagataatttgatgcagtagctttgtaktcaatgtggtaactagattccaaaattttcccgtaataattccagtctccaggtgttcatgccaaggtagcttccctccacattaaatccaggctgcttctctgtaaccaataaaatgcagtagaatgacattgctttgtctcacagctaatctagatcataaaaaaggtcctgcagcttctttcttggtcttttagaacttttgcttttgtgaatcttccttttgcaaacaactaccatgctgaaaagcctgaaccatatggagaaaccatgtgtaatcactgtcttacagctcaagaaaaatgatcaatcaacagacaacatcaactctgttacacaggtgaaccgtctttgatattacaaacttaacaggcacctgagcacctgatgcttatagcactagctgacgtcatgtggaacagctgatgctaatcaagggaccaaagcaggaacaataacaa

SEQ ID NO: 366229 - DNA, 484 bp, Homo sapiens
gaaagtatacaaaaaaccctcatgaaagttatacagacttgcctccttttctgagcaaaatgaaaaaatttgtatgaatcagtatttctttagtaattttgttttattattctttgtaaaaatttcaactccaggctttcttgatggagtgtgcagttggggggttgtgagaggctcgcctgaagtggtgacagaagcaaattttattcctttctagaaacagggacatttagaatcagtcttggtttctttgttctctgctgaatacaaacaaaaaattaagttccataaatttcaattctcttttgaagctttatcttctacatcgaaggaactaaactttaaaaagtatattttcacagcatattttcttctgaaggggtgttgaatcttttaatttggatgataactgcaamatttgatttgcactcatgaatatttatgtactcaggaagtgtctgcaaaaaaaaaaacaatatttcaa

SEQ ID NO: 366230 - DNA, 620 bp, Homo sapiens
gaaactcgtagcatttattgagaacttactgcatgcccagcactattttaatgtattcctgtgtaacacctctattaattatcacaatagtttcaaaaggtaggtgttactatcatcttatacttacaaatgtggaaaattaaaataaaatttgagtgatttactgaatgtctcaaagtagtaaatatggtggtaatatttgaagtaaagccatttgacctyggacccattgagcctaaggactgagttctacagcttagtcaatgtgtggcaggacaccttgtgttcacaaggtaatttcttcattgccacttctctagtccaagacaacatcctttcttatatgaataggatggctgtatatacttttgtattggtttccctatttccatacttacatttctttttttccatttagtaatagagctacaagttttagctggttatgtggccatacagttaattctagacagtgaagtgtgagcagaagtagtgtgtgtaatgttcactaaaaagagaaattgcttactttccactttcttttcattctctgtaagctggaatgtggacataatgctggtaaatcagctgcaatgggggaaatggagctgtcacaaaat

SEQ ID NO: 366231 - DNA, 620 bp, Homo sapiens
gaaactcgtagcatttattgagaacttactgcatgcccagcactattttaatgtattcctgtgtaacacctctattaattatcacaatagtttcaaaaggtaggtgttactatcatcttatacttacaaatgtggaaaattaaaataaaatttgagtgatttactgaatgtctcaaagtagtaaatatggtggtaatatttgaagtaaagccatttgacctcggacccattgagcstaaggactgagttctacagcttagtcaatgtgtggcaggacaccttgtgttcacaaggtaatttcttcattgccacttctctagtccaagacaacatcctttcttatatgaataggatggctgtatatacttttgtattggtttccctatttccatacttacatttctttttttccatttagtaatagagctacaagttttagctggttatgtggccatacagttaattctagacagtgaagtgtgagcagaagtagtgtgtgtaatgttcactaaaaagagaaattgcttactttccactttcttttcattctctgtaagctggaatgtggacataatgctggtaaatcagctgcaatgggggaaatggagctgtcacaaaat

SEQ ID NO: 366232 - DNA, 532 bp, Homo sapiens
tgttgaatatctaatgtgaagtgattcagtagatgaaggaacagaaaagtgactgagaataccccattattcttcattgtatgacatatatcaactttctttgatttttaatagtgtactaggatcattagagtttgtaaaaggaaagaaagaagatacagagccagtatacatacatacatacatatatatatatacacccataaccacgttgaacctagctgacaaatgactttcaaatctatatttgatacttgayttttatattcaatggattcaatggaacataaatttctgaggaaattaaatgttctggatgtaatcagaaacttaggttcttatagtttagggagatagagagtggcttgatcacttgagatagatacaagagtaaaaaggccatataagcaaatgtaggtcgtgggattttggatcatttaaaattttttagcttgagtttcagagaaatatttataactaacatctatattattcagtctttattttcaagaattaacttcttaccataaat

SEQ ID NO: 366233 - DNA, 532 bp, Homo sapiens
tgttgaatatctaatgtgaagtgattcagtagatgaaggaacagaaaagtgactgagaataccccattattcttcattgtatgacatatatcaactttctttgatttttaatagtgtactaggatcattagagtttgtaaaaggaaagaaagaagatacagagccagtatacatacatacatacatatatatatatacacccataaccacgttgaacctagctgacaaatgactttcaaatctatatttgatacttgatttttatattcaatggattcaatggaacatraatttctgaggaaattaaatgttctggatgtaatcagaaacttaggttcttatagtttagggagatagagagtggcttgatcacttgagatagatacaagagtaaaaaggccatataagcaaatgtaggtcgtgggattttggatcatttaaaattttttagcttgagtttcagagaaatatttataactaacatctatattattcagtctttattttcaagaattaacttcttaccataaat

SEQ ID NO: 366234 - DNA, 617 bp, Homo sapiens
atacagagagaaattacatacttatttaaaagcttagtcagtgtttctgttattgttgcttttttagttttttccattaattgtcctaaccttatgtatttatttatttttatattgtactactttataggtagagtctttagatggagttacatctacattaatatttaygttataataaaataatatggcaatgaatagatctttagattgcacatagaaaccatacattagcatattataaatgttttaaatgtttgtttataatggctgctggataaaagggtgtattcctgacttatgatcaccaattaaaagtctgtattctaatattacattcagaattatttttggctaactcataaaacttagatcttctctgtcttcattaaagtgcaactgtttaagctttctataattaaaggcaatcttcttccttacataaccgaaggtcaatccctggcatgtagtactcaaatacattgttagaaaagtaaaaagataaaaaaaaattcattttacctcccataatgctacctcaccattattttttctctccctatttctcctactttgacaatggaaccctattttcttcctgaaatactaaatcacaa

SEQ ID NO: 366235 - DNA, 569 bp, Homo sapiens
ttccctataattacatgagatatattcgaatggtatttatttcttaaatcactcacctacaagtatctattatacaccattatatgtcaaatatgataacaattggtagagatgaaaagataaataaaacatagcttccctcttctaaaaactcagtcctctgaaggaagtagrtatgaaaataaataaattataattccatatgatatatggcactacaagggaaaaaactgttgcatcattaagaatggaataaatatttctgcctgagacgcactttggaggatacactgatgtagtaacatgtaacttgttttagcagaaattccctggatgttcatcaactgccctgtgatttttcccttcctggagctttgaaactagaaaggccatgtgactatttctcaccaatgaaaacagaaatggcacatggcatttccagaagtggcccttaaaattgctcataagacatttcttctctcaacacttgattaaatgtagagaatccaatggaggactctgagaccatagaaaatcagtgttgaaataaaagttgtctgggttcctgc

SEQ ID NO: 366236 - DNA, 546 bp, Homo sapiens
agtaagtctgttatgttttattgctttagtatttgatttcagattgtggtaggcagaacactaagatggcccacaagattcctatcccctggtgtacacaccctgtgtaatcccctccctttgagtctaggcaggagctgtgaacatgatggatgccacgtccacgrttaggttaggttatatagcaaaggtgaaaggtaattgaagcccctataagttcactttgagttaattaaaaaaggagattattctgaggagtctttacctaatcagatgaacccttgaaagaggatctagaagtgagagagatttcaagcaacagaaatgctgtcttgatggctttgaaggaacaaacaaccatgtgaactacttatggaggagacaatacagcaggaacctaagggtgacctctagtaactgggagtaattcccaactgacagtcagcaagaaaaatagggtcttctgtcctacaatcacacagaactaattctaccaagaagcaatgagcttggaggaggacccaagcttcagatgaaattgtacct

SEQ ID NO: 366237 - DNA, 541 bp, Homo sapiens
tacatttcagaaacattactccagctatactgtggaccatactttggagagaacaaatcttcatttggccatactgaatggagamtagttaggagaatgactaagttagaaattatgatggcctgacttaggttatggcaatcaatgaagatggaaaaaaaaatgacatacagttgattctcattattcccaggttccatatttgcaaattcacctactcattaacatttatttgtaaagcaaaattaatgcttcctatttcacagtcatttggatgagtgtcgagtggtgaaaattttgagtaatccaacacatacattcccagctgtggtggcacaaagcaacactctgccttctagctccagctctcatgttgtaaacaagcatcttcttcttggcctatttcagcccatgtttttcacatgtttgtgctttttcttggcgctcttgttgtttaatatggcctccaagcacagtgctgaaatgctgtctagcattcctaagtgcaagaaggctataatgtgccttctgaaaaaaacat

SEQ ID NO: 366238 - DNA, 608 bp, Homo sapiens
ctgggggtaaagagatcctataagtcccagacctactatctaactgaccttaaacaagtacttaatctctccaaatctcagtttcttcaactgtaaacragattattattatcctcttttactaaagttgtaaggataaacaaaaatcaagctcacagtaagcattaatattaactattatatatagaaagataatgatattttctttagctcttgattccttggaatattttaaatcaactggtggttgaagaatatgaaaataaaagaagtggctgggcacagtggctcaagcctgtaatcccagcactttgggaggccaaggtgggcagattgccggaaatcaagagtttgagaccagcctgggaaacatggtgatacccatctctataaaaaaaattagctgagtgtggtggtgcgcacctgtagtcccagctactctgggggctgaggtgggaagaaaatcgcttgagcccaggaggttgaagctgcagtgagttgaggtggtgccactgcactccagcgtgggtgacagagcgagaccctatctctaaaaaaaaaaaaaaaaaagaaaagaacttagttacctcaacctaccaaatattcaa

SEQ ID NO: 366239 - DNA, 424 bp, Homo sapiens
ttatctggcaatgactgtctaacccacccagaaatatgtgcattttaaaaagaagcccaggatgataattcaaacaaagaacaaatkggcagaatttcaggcagccatcgaacagaagactttttttgcatgggagaggcatctggggacaaggacaggttaggactgggacctcctaaattatagcatttaggctgctcatggggctttgactacccaatgagcaaagtgcactcgtgagtatggcttcctctgtggaaggaaggggttaatactctagggaccttttcttctggagacccattggctgtatgtttttctcccccagcaccacaactgtataagaaatgccagttgaaagtatgaaaatcaaagtttcatcccacagaaaaatttaaatactgtaacttcaatagcatttttg

SEQ ID NO: 366240 - DNA, 571 bp, Homo sapiens
ggggaaactagaacctgttcttatcttcttgaaatatcacttgcagaaaataagcattaactccactgaagcacagtgagaatttttcctcaaagcctcttcacaccctgccttaattatggcctcactgatgctctctgggaaaaagtgttttggagtaattagaactgccaacatcaatagtgccaccagaaatgctggtgccagaccccccaggtggtttgcatgtcaagaatggcctcccagatagcttcttctcctagaaatgtaaataaacacagctggttctctttcacacttgagataagccaagagctctgagtccaaatcctcacctccctgtgggtggagaccacctcaccyggccagaacagtcccaggcctctccaagaccattcccccttggctgctgttctcaaagttttgcccctggctgctttaccactcctgacttaatgtaaggtcaaatcttacattcattctcattcattttatcagtgagtctttattcctcagatacctccattctcttttccttgttacataaccagtactttagagaaatacagag

SEQ ID NO: 366241 - DNA, 454 bp, Homo sapiens
aaatctgtcacactatccaaattttcattccctgccctatgatccaaaagcctaaactagagtgatcatcacattaatgtcaaagaacaagaagtaaaaaaagcctcctgccccatctcttgcgggggagactgaatttccactttcaaatgtagaatcatatgagtaacaagatatacaagcacaattcatgtgagtttttctgtctccattcccagcctaagctacygtgacaaggccaacttcacacagggctgagcaacagctgtttataccgaatgactgtagagccccaagagacacttctaccactaaaatgcctttcttttcttccttggagagctcttccctgttgactgtagggggttgaactgcataaccacaaaaattcatgtgttaaaagtcctaatccccattacttcagaatgtaaacttgtttggtaatagggttgtt

SEQ ID NO: 366242 - DNA, 585 bp, Homo sapiens
tgggtaggactgcagaaaaaggacctctggcagggccagaagaaaaaggatacttcttgattttgctttcagaccaatgttttcaaatattttaattgcttgcatacccttaacagttaaaaataattgagtgccttccccaagatatgatgtttaatttatttgtaaattgtagacatatattatcattctaacaaagtatgtacacatacaaaatagaattaaaaaataaatataaacaaaaattcatacattttcttgctaaacctcagtggatagtcttgagcaacccctggagtacaccttccatgtccccttctctctctctctctcacacacacacacacacacagagtgcaccactggtctagactcaactggtacaagtaggcctggccttacttttaaaaacatgagtcccctgactggcaacaatcttaatgcatttaacttctagaaacatgataaaggaacatttgaaaaaatcactatgtttattcaggaataaygtttctagagagattgtgtccaatggtgaacaagaatttccctggtatctaaactattggttgcattgtgaagtat

SEQ ID NO: 366243 - DNA, 606 bp, Homo sapiens
tagacatccaaacggaatgaaagaaaaatctggttttaagaatttctaagtggaatcacacacacacaaatgggtaactgagaaaaactaaatattcaaaatttaagtaagaagatttataayagaaaaaagtggcaaattgttactgtgacttgattttctgaaaacatctgcaaattcacactggcattaagaaaacccaagtctcaaaaattctcctttctttctctccagataatgtgttttctgtgcaaaaataaatatctgaaaattgcactaatacttattttaacttctatattatgaataatctgcacatgctgctttacagacgatacatatttgtaaacttactcatgcaaaattagtgtgcgcaacagggatattgttaattttcatacttaaaaatgataccttattatcttttaaaaattgccaaactctctgaaatggttaacaaatcttatatggatattcttgtctgccagctaaaaatcaatttatgttgctgaaaacaaaaagttatacaagaaaaagaaacatggtttttgttttgcaagattttgatttttaaatgagaaaatttataaaagaaagaaattcatg

SEQ ID NO: 366244 - DNA, 638 bp, Homo sapiens
ggctaatgtaaacttcagcagtgaccaaaacctgtttttataaagactcaacacattgataaaaagcaattttctggggagctgggtgtgatggcayatgcttgtagtcccaggtattcaggaggctgaggcaggaggatctcttaagcccagagtttgaatctagcctgggcaacacagtgagatccccatccctgaaaaaaaactttaaataatttgtttaaatttgtaaagagcccatagtggcaaaattttatttcacacttgctgagagcaaacagatcttgcaggacaatccaaagatttactattggctgtgcatggtggctcatgcctgtaatcccagcaatatgggaggctgagctgaggcgggtggatcacttgagtccaggagttcgagaccatcctgggtaacatagcaaaaccctgtttctattaaaaaaaaaaaaaaattagccaggtgtgatggtgtgcatctatggtcccagctactcgggaggctgaggtgggaggatcacctgagccccaggaggttgaggctgcagtgagccaagccatgattgtaccactgccctctagcctgggtgacagagtgagaccctctctcaaaaacaaaacaaacaacaacaaaacccaaa

SEQ ID NO: 366245 - DNA, 484 bp, Homo sapiens
gaaagcataatctgagggaatatgttgttgggggtggcctttgcgaaaacaagacacatcttcctggaatatcaatttattcaaatattccagaagagaggggagaggaagaaattattttagtgggaatcagttatagctatatcatggagtagagtgtaaaaygctaaaaaattgttaatataaaatacaaacttaaaaaaactcaagcttttgtctgagctgttacggttttggctcctgggtcctagatatataggtttaatttctttagtcgttaggaggcatttgagtgtttaattacaatagggaggatggtgaccaactttctgtgagcctgatagaactaaaattataggttacataaagagttttaacttaaatacaaaggaggacttttattgagggttattatgataaatcagattagcaaaatgagtttaggaacatttaggagtgtattccttaccttggagaaaaaagt

SEQ ID NO: 366246 - DNA, 527 bp, Homo sapiens
atttacagaaaaagtttgccaacctctgatctacaatgatgaaggagcaaacgggagatacataatgtgatkaatatgaatgcatggagaattctccagtgagttaatatcttaggagtcttgagaaagtttgaaaagaaatataagagaaaggctcataaataataattttaatgagaaataatttggagaaatagcaaggaatttataaaaatgatatcagtgaagctaaaagctcagaagattctcaggcttgtgaaaattatttaagcaagaaaaaaagttttatttgtgagttaaggaaacaagaatggcataaaagctacagaatggggtaaatggcacaatgctaccaaaaagaagaaattaagttgaattacttaactctttttaactcagctaactccttaagcatgttctatattttctgtggagacatcatcatgtagaaagagcaaaataaatattagcacaaagaaatgagagaccaagagaataaaatagtaaagaaatatccatctgtttta

SEQ ID NO: 366247 - DNA, 527 bp, Homo sapiens
atttacagaaaaagtttgccaacctctgatctacaatgatgaaggagcaaacgggagatacataatgtgatgaatatgaatgcatggagaattctccagtgagttaatatcttaggagtcttgagaaagtttgaaaagaaatataagagaaaggctcataaataataattttaatgagaaataatttggagaaatagcaaggaattyataaaaatgatatcagtgaagctaaaagctcagaagattctcaggcttgtgaaaattatttaagcaagaaaaaaagttttatttgtgagttaaggaaacaagaatggcataaaagctacagaatggggtaaatggcacaatgctaccaaaaagaagaaattaagttgaattacttaactctttttaactcagctaactccttaagcatgttctatattttctgtggagacatcatcatgtagaaagagcaaaataaatattagcacaaagaaatgagagaccaagagaataaaatagtaaagaaatatccatctgtttta

SEQ ID NO: 366248 - DNA, 531 bp, Homo sapiens
agcacacatttaaagtgcacatattgatgagttttgacatatatacacacaagtaaaatcattaccacaattaaaatagcaaatatttccatcattctaatctatttgggagctcctttatgagccccttaataagaactctaatctatttggtagtccctctctccatcctcatccccaggtaaccactgatgtgcttcttgtctctacagattagtttgcagttcctagaattatttataaatagactcatagattttactttttattctttttttgcctgacttctttcacttagaatgactttgaaatacatccatgtttgggtggrcactatggcccactttgggaggcagcactttgggaggctgaggcgggcagatcacttgagcccaggagttccagaccagcctgggcaacatggtgaaaccccgtctctactaaaaaacacattttatataatcagcacttttctagaatggaatatgtttactacttcatttactagtataagtagtaacgatggactaa

SEQ ID NO: 366249 - DNA, 571 bp, Homo sapiens
gatgaagttattgctgaacatagctcaagtaagccagaggacacttttgaaaaattcttcttagaagcactgaagatttaatcagatagtgatgaactactaggctgatatctaggtagtggaagaaattcagaactatgggcctgggatttgatgccaatttttcagagtccagagctcagtagatgtggagactcttaccactccttccttgttttgggattcctctttgtgtaagaatataacmaaaataaaccggccctcacatggaaaaatgcctggttttaggtcatctgggtattctcccaaatcctgaggcttaaaaaagataaagagtattattgaagtgccttcagacacctcacagaaagaataaaaaatatccaaaggaagatagaattatgtaagtcttcaaaattgtcttttagacatattttcaaagagaatgactagcacatccttaaagacaataagccacataatgacacaagtcagataagtgaaatagcagaaagaaaaccaagaggactccaaatgctagaattatcagataaagactgaaaaaccatga

SEQ ID NO: 366250 - DNA, 610 bp, Homo sapiens
tagaaaatagaacagaaaaatatcaaaattaagcacaggggaacaaaatcatggaaaatagaggaagtaatgacaagacacataaaggrgagagattgtctaatgtataatcatgaactgcataacaacattttggccaaggatggacctcctatccaatgatggtctcataagattataatgtgtattttcactatatcttgtctatatttagatatgcttatatacacaaatatcattgtgttaaaattgcctacagtattcagtaaagtaacatactttgcagttttatagcttaggagcaataagctataccatatagcctaggtggcagtaggcttatataaactaggtttgtgtaagtacactctataatatttgtagagtgatgaaatgacctaatggggaatttctcagaatgtgttctcgttgttaagccatatatgactacttagttaaattcccagaagaaaagaaaaaaaagataattgaatagaagcaactttgaagagataatggcacagaattttcaaaattggtggtgaaaaacagagatttatagatttaacaagtctaaagcaccatgagcagcataatttttttaaaccca

SEQ ID NO: 366251 - DNA, 610 bp, Homo sapiens
tagaaaatagaacagaaaaatatcaaaattaagcacaggggaacaaaatcatggaaaatagaggaagtaatgacaagacacataaaggggagagattgtctaatgtataatcatgaactgcataacaacattttggccaaggatggacctcctatccaatgatggtctcataagattataatgtgtattttcactatatcttgtctatatttagatatgcttatatacacaaatatcattgtgttaaaattgcctacagtattcagtaaagtaacatactttgcagttttatagcttaggagcaataagctataccatatagcctaggtggcagtaggcttatataaactaggtttgtgtaagtacactctataatatttgtagagtgatgaaaygacctaatggggaatttctcagaatgtgttctcgttgttaagccatatatgactacttagttaaattcccagaagaaaagaaaaaaaagataattgaatagaagcaactttgaagagataatggcacagaattttcaaaattggtggtgaaaaacagagatttatagatttaacaagtctaaagcaccatgagcagcataatttttttaaaccca

SEQ ID NO: 366252 - DNA, 526 bp, Homo sapiens
tttaaaacaatatttctaaaaccagttttctgattagaaaactaaaacacaggaaaggtcagagatgtgttcaaggtcacaaagcatcagtgacagctttgaccaaactrtttgcatataaatgtatgcatgcatattttaataagaatgcatattttatacattaagaatattcccattcattgcaatgcataaagattaggaatctagggtctcatatctttagttgtttttattaatatgtcttatattacaaaatttttacagcatacttttgttactataaggacgttgctggaaattgcatatatagcctgtagaaagaaaacataaacaagaaaagatgtgtagaattcttgtaaaagattagaaagtgaagaaaattactctctactgatacagattttgaacttttcatttggatatttgtcatagaaaagttactataagcagatacattgttatagaataattatttttaaagtcttggtgttgactgtttgacaaaaagccattcacacttaca

SEQ ID NO: 366253 - DNA, 561 bp, Homo sapiens
ctttactttactgagcattttatgtgtgccgagagatatggtgaacactttgtatattctatctcactttaccctcacacggatgttgaaatctacatgttgttatcattattttatagatgagaaactgagacttagatttctgtagattaacaagaacttggattcaaacaagctttgggtcttctaattcgagaataaacttcaagttttttcttctggcatgtaaaatcttaaacaatgtcttccaatgccctgaattttatataagtttgcaggactgatatttcttcagctttagttcatctccaaaatctgttctttcccctctgattgaacaaaattgaacattttctcttaacaaggagacgactttgtgtgtattgtttgccatgggttactttccacagttgttcaattagtcagtttatctttcttagagggttaaaatattttatgttgacaagatcagtgtctgactyaaatgtgacttgctgaaaagaattgtgttatatttgcttttgaatgaacaaaataaatagacctaaattattagcagga

SEQ ID NO: 366254 - DNA, 588 bp, Homo sapiens
ccttcactgtggatgaactaactgaatgttttagttgaggttgtttcatcgaaggctttttcttttgttttctttttttcttccttttcttttacttcttcttattctttgtctcttcccttaggctactaagatttctgattcttttttttttttttttgagatggagtttcgctcttgttgcccaggctggagtgcartggtgtgatgtgatctcagctcacggcaacctctgcctcccaggttcaagcgattctcctgcctcagcctcccaggtagctgggattacaggcatgcaccaccatgcccagataattttgtatttttagtagagacggtgtttctccatgttggtcaggctggtctcaaactcccaacctcaggtgatctgcccgccttggcctccgaaagtgctggaattacaggcatgagccaccgcgcctggccagaagactctttaaatatgtttactggacagtgcaaatttagcttgagtgttttggtaacctaagaaacccagagaaggaagagcactgagtatatctcatatgtattcatttatatgtctatatgcccacacagttattt

SEQ ID NO: 366255 - DNA, 486 bp, Homo sapiens
agtgcaagtcaatattcacactgtcagaggagtatcagtgggagtaatcttttcagtcctggagagaaacagtttgccacaggcagatcatgactagagaaggggagtggtgaacagtgacataaaacacttttaagttaattcaaacaatgtctttgacacagccaggaattttatccaattttagttataacagtgcctactggtccctctaaactgcaaagatgtcattttgatataataaagagatagaatttaaaatgaagcctgttargttgactcattcctttttttcctacctgggttttcccccaaatatatgcatttctgaagggcactcagaaatgaacattattatttttaatggttgccagtaattctcttctccctccatgaaaaatctgataccgtgatggaattttaataatcttgggagagggaattctaattttttgccttttgcaccacaagttgctatagggttta

SEQ ID NO: 366256 - DNA, 464 bp, Homo sapiens
cttataaaggtatttataagttaacatcatgtttaatatgatagaacaaatacattccccytaagatcaggaatgagaaaaggatccctactcttgacacttacatttaacgttgtattggggttctagtgaggacaatcagttaagaagaaataaacagaatgaaaattgtgatgaaaaagtaaaactattactatttttgcgtcatgaatggcatgatctgtatggtcgtccctctgtatccctgggggactggttctaagaacactgtggataccaaaattggcacatgctcaagtgcattatataaaataacatagtatttgcatatgatctacatcctccttcataactttaaatcatctctagattacttaaaataccaaatattatgtaaatattatgtaaagagttatgctatattttaattggtattttattgtatcttttttcggaaaaaaaaa

SEQ ID NO: 366257 - DNA, 568 bp, Homo sapiens
attttattatgctttgacatatattgtcagttaacatctgcaactactctatgaatgtcatattagtcacagctattatagtagcaatgactgataataatatcaaatataatgtagattaacaaaaagaaaaaatcatctcaactaataatgaaatacagagaggatcgtagagctaacaacatgtaaaaatatgtttaaacccaaatctttctgattatagactttctattgattctcaaatcctgcatataatttccagctctacattccattgacacctcatgcctgcctttccatttyctttactgcctcatatattctctttgccatcttctgggtcactcaagcataaaacctttatatcatttctactttttcttgctctccacatgcagtaagtaattttcataatcccctagcattcattgccatcttccttttcctgttggcatcacttcttgtaaggcgttgaaatcatattttaactagatcttttgtttccagcccccttcctgcagtagcttaattaccaaagtaatcttcctagagcctaagtacaatcctg

SEQ ID NO: 366258 - DNA, 564 bp, Homo sapiens
attttataaattaggaaactgggtttcaggtgatgtattcaagctcatggcattaaatgatgctagcaaatgctttaaaagctaacttagattttctgctgcaacctgtgattcataactggtattagactgctacttttacagtaaacaaacataaagctggagaaaaatatatataaatgagcccattgttttcaggcattggaytgcaaggcgaggaacactctgatccctgaaaggagactcaagtgagcatcacggtagctcaggctttctttctgggtaagaaggaagttacagtgttggagccacagaaattcatgtgaataggtctcctgggaatggttggctgtggactgggctatgaacacacggagtgagactataaaatagatactggaaagtgttgctacagggttgagaacaaaacaaatatactagaggtcaagcattgctggaagatggaattctggcttagggtagaaaaacttcagtaatattttattgtttttggacataatggtaggttcatttattttttaacttttaatttttaggtaatga

SEQ ID NO: 366259 - DNA, 564 bp, Homo sapiens
attttataaattaggaaactgggtttcaggtgatgtattcaagctcatggcattaaatgatgctagcaaatgctttaaaagctaacttagattttctgctgcaacctgtgattcataactggtattagactgctacttttacagtaaacaaacataaagctggagaaaaatatatataaatgagcccattgttttcaggcattggactgcaaggcgaggaacactctgatccctgaaaggagactcaagtgagcatcacggtagctcaggctttctttctgggtaagaaggaagttacagtgttggagccacagaaattcatgtgaataggtctcctgggaatggttggctgtggactgggctatgaacacacggagtgagactataaaatagwtactggaaagtgttgctacagggttgagaacaaaacaaatatactagaggtcaagcattgctggaagatggaattctggcttagggtagaaaaacttcagtaatattttattgtttttggacataatggtaggttcatttattttttaacttttaatttttaggtaatga

SEQ ID NO: 366260 - DNA, 570 bp, Homo sapiens
gggattaaatgagaaattttaaaatataaaaagaacagggctgtgaaaaaattttcgttgccttactctattgttggctcttaaactttggttcctgttttakgctgtgcattttaccacaacagtcagcgaacaggattcatatatttaaaatttttctgtttgtattcaacagaactgtgaagtgcttcaggaagtggatgaatatgattttatcttggtgaatgctattgtactaacataatgtctagtcatggcaaagcatgtttatcaagacgtactgcaatacccataattaaattcatgccagagagaagcaaatttgtttatcctgaaatttatttgctcatgtcaaatttctctacatcttttccagtttggtcctagatggctgcattttttttttctttgctacagtgaagtcagtttcaatagttgacatgaagtaaacagactttgaatatttagtaattgtgagaattcccacaagatcgttctccacttacttcacctctttgtcttgggtttttgtttgttgcctaaattctttgcatggcattttttccaatt

SEQ ID NO: 366261 - DNA, 574 bp, Homo sapiens
ttattcgttctataactttaaagctgtgacccagtgccttgtatgtgctttcttgtaaagttataacctaattatgaagtgaccagatatgaaagagttgctatgaatctgctgcagcctccaagtgtgacgtctgatgtttaaaactcttctaatgaaaattgcacggaataaccatcaatagaaaaagattagatactatggtgcagtaaagcgaaatagaaattggttttactccctgtcaggttatgattggattatcatggactcaatactggaaccagagaaaattatttctttctttaaatatacaattcagtaactgaataggcaaggttattcctgttagttaaggagttttttttaaaaccattggaaataattatatattgtacctttccttctattcaaaatgcccttttacctctattgttattttatgaaaatactttacagtgctgcaagagaaaaacaaacaaacaaacaaacaaaaaaacaagtctctcaactccagaaactctccaggatattgtcttgtatttctatgcaracgtttatgtgggggggggggggt

SEQ ID NO: 366262 - DNA, 600 bp, Homo sapiens
tgttttctggatttatctctaacatgttttcatgtgcgtaatttcatacttgtgtctcttgttktccaatattatcttggccaataggtttattcacttctgaagtatacaatgaaatatataaatgttgagcctttgtttttgccagctcattattattaatctgtttattttccagcatctttttatgcttttttgcaacttcgttacttttctatttagctgtaaagacttaacaaaatcagaaggctgatgtttgcagaacacagggttttcatactacaagtcttcctggcagcatattttcaaattttatgcctcatctgccaaaatctctctcagcataaacccctactgggcagctgtataaatcatgtgttcctgtgaccaggtgtgccaaggatgactgtggagatacccctgttaagtaatcctcccactagaagagatactgataacattgattttcagatgttgacaggctgtctgacttaggagtcagtcagttcaagactgttccagaatattttcatttaaagcatgatggctaacagtgagctatcagcttgggaacagtgggagcaccttttctgtgctaaa

SEQ ID NO: 366263 - DNA, 600 bp, Homo sapiens
tgttttctggatttatctctaacatgttttcatgtgcgtaatttcatacttgtgtctcttgttgtccaatattatcttggccaataggtttattcayttctgaagtatacaatgaaatatataaatgttgagcctttgtttttgccagctcattattattaatctgtttattttccagcatctttttatgcttttttgcaacttcgttacttttctatttagctgtaaagacttaacaaaatcagaaggctgatgtttgcagaacacagggttttcatactacaagtcttcctggcagcatattttcaaattttatgcctcatctgccaaaatctctctcagcataaacccctactgggcagctgtataaatcatgtgttcctgtgaccaggtgtgccaaggatgactgtggagatacccctgttaagtaatcctcccactagaagagatactgataacattgattttcagatgttgacaggctgtctgacttaggagtcagtcagttcaagactgttccagaatattttcatttaaagcatgatggctaacagtgagctatcagcttgggaacagtgggagcaccttttctgtgctaaa

SEQ ID NO: 366264 - DNA, 600 bp, Homo sapiens
tgttttctggatttatctctaacatgttttcatgtgcgtaatttcatacttgtgtctcttgttgtccaatattatcttggccaataggtttattcacttctgaagtatacaatgaaatatataaatgttgagcctttgtttttgccagctcattattattaatctgtttattttccagcatctttttatgcttttttgcaacttcgttacttttctatttagctgtaaagacttaacaaaatcagaaggctgatgtttgcagaacacagggttttcatactacaagtcttcctggcagcatattttcaaattttatgcctcatctgccaaaatctctctcagcataaacccctactgggcagctgtataaatcatgtgttcctgtgaccaggtgtgccaaggatgactgtggagatacccctgttaagtaatcctcccactrgaagagatactgataacattgattttcagatgttgacaggctgtctgacttaggagtcagtcagttcaagactgttccagaatattttcatttaaagcatgatggctaacagtgagctatcagcttgggaacagtgggagcaccttttctgtgctaaa

SEQ ID NO: 366265 - DNA, 576 bp, Homo sapiens
tttctatgaagatactttgtataaataaaatgtgctgggtgaatacaaggtagtgctattgtttgttattacatagtgagaaggcattctgcttattttgttttgtttttgttttcacctagttgtgttcaattttttaaatgccctagttcttkttttctttagtgttagcttcttatggtctccttaactcaatggtagattattttcccttatgtttatttctgtttttctacctaccatttcttgttgaaataggccttactctatagtcaagaaaatgttgcatctgtaggcttggaaaagcctttgcaggctatttcaatacaataaagaacatatgaaatcttaatcatgtccaacaatatagtatatgaaaacttgcaattacacttgtattactggaagctgttggtaatttcaggaagcataatctctcatgaattttattatgtgatataattccagtataatagctaaagcctatactttttgtttctatttatcaatctatatcttaatctatttatagtcttcttcataattcattttgacaaataatgaatttttttgttt

SEQ ID NO: 366266 - DNA, 576 bp, Homo sapiens
tttctatgaagatactttgtataaataaaatgtgctgggtgaatacaaggtagtgctattgtttgttattacatagtgagaaggcattctgcttattttgttttgtttttgttttcacctagttgtgttcaattttttaaatgccctagttcttgttttctttagtgttagcttcttatggtctccttaactcaatggtagattattttcccttatgtttatttctgtttttctacctaccatttcttgttgaaayaggccttactctatagtcaagaaaatgttgcatctgtaggcttggaaaagcctttgcaggctatttcaatacaataaagaacatatgaaatcttaatcatgtccaacaatatagtatatgaaaacttgcaattacacttgtattactggaagctgttggtaatttcaggaagcataatctctcatgaattttattatgtgatataattccagtataatagctaaagcctatactttttgtttctatttatcaatctatatcttaatctatttatagtcttcttcataattcattttgacaaataatgaatttttttgttt

SEQ ID NO: 366267 - DNA, 507 bp, Homo sapiens
agaacgttgtcttttaaacatgtttacctcccatatcagagcgaccagcttgtatttatggcagacatcattgatacccgcctcaggcaggaaagacttatgcagtagatatcttgaaggtcaatggaataataatctcactgtttccctatgggtgacatcacactacagtcctctgtggcttcccctggaggtcccaggaaacattttcccctaaatcttgtcatagcaacaacttaatcacttcacctgcttactggaggcttkttggcatgctgcttttactctaccctgatcatttttctttccctttctactaactctgctaaccctttatgttttagaagtttgcagccatttgccaatgcagactaattattaatcagggttcttcaatagataccaaaaacaaagagcatacagtcatgtgctgcataattagctttggttaataatggactatatatgtgatagtgctctataagattataaccactgtatttttct

SEQ ID NO: 366268 - DNA, 593 bp, Homo sapiens
gagtctttagggttttcaagtatagaatcatatcgtccacagacagagatagtttgacttcttgttttcctttctggatgctttttatttctctctcttgcctgatttctctagcttgcattcatagtattttgttgaataagggtggttatggtggcatccttatcttgttttagttctyaaggaacatggttctagtttctgtccagccagtatgatattggctgtggttttgtcataggtggtgtgtttagagtttttatcataaagggatgttgggttttactcaaagatttttctgcatctattgagatgatcatatggtttttgtttttaattgcatttatgttgtgaatcacatttattgattttagtatgcgaaccaaccttgcatccaaggaataaaaactgcttaataatgctgagttaacttttggatgtgctgctggatttgacttgctagtatttgttgaggataattgcatctatgttaaaaagaaatattggcctgtagttttctttttttcattgtgtatctgccaggttttaatatcaaggtgatgctggcttcatagaatgattaagggaagagt

SEQ ID NO: 366269 - DNA, 602 bp, Homo sapiens
tttcatcagttattggaaaattagatagccacatgcagaagaatgaggctggatccatatcacttaccatatacaaaaataaactcaatatggagtaaagaattaaatgtaagatctgaagtcataaaagttctagaagaaaacctagaaaaaattcttctggatgttgcctagccaaagaattgataactaagaccccaaagtcagatgcaacaaaactaaaaataacgggaagtaattaaactaacaagcttctgcacatcaaaagaaatgatcatgagaataaatagacaacctacggaatgggaaaaatatcacaaactatacatctgacaaaaggcaaatatcaacaacgggttcaaacaaatctgcaagaaaaaacaactattcccattaaaaagtgagcaaatgacataaagagacatttatcaaaataagattttgaattggtcaaaaatatatgacaaaatgttcaacatcactaatcttagggaaatrcaaaataaaaccataatgagataccacctttccctagtcagaatgactttcactgaaaagtgaaaaaacagtaagtattggcatgggtacagtgaaaagggaat

SEQ ID NO: 366270 - DNA, 602 bp, Homo sapiens
tttcatcagttattggaaaattagatagccacatgcagaagaatgaggctggatccatatcacttaccatatacaaaaataaactcaatatggagtaaagaattaaatgtaagatctgaagtcataaaagttctagaagaaaacctagaaaaaattcttctggatgttgcctagccaaagaattgataactaagaccccaaagtcagatgcaacaaaactaaaaataacgggaagtaattaaactaacaagcttctgcacatcaaaagaaatgatcatgagaataaatagacaacctacggaatgggaaaaatatcacaaactatacatctgacaaaaggcaaatatcaacaacgggttcaaacaaatctgcaagaaaaaacaactattcccattaaaaagtgagcaaatgacataaagagacatttatcaaaataagattttgaattggtcaaaaatatatgacaaaatgttcaacatcactaatcttagggaaatacaaaataaaaccataatgagataccacctttccctagtcagaatgactytcactgaaaagtgaaaaaacagtaagtattggcatgggtacagtgaaaagggaat

SEQ ID NO: 366271 - DNA, 620 bp, Homo sapiens
gtaaggtgggaggcatgaatagataaaacacacaggatgtttagggcagataaactactctgtataatactataatggaagaacatgtcattatacaattgtgaaaactcacagaatgtacaccaagagtgaagcctaaagtaaactatggacatttgtgaatatggcgagtctacgtagctcagatttttttaatgtgtgctttcaatgtgggatatttatagtggcaaaatgtggatcagtgggagaaaaggatatataaatctctgtaatattctcgtgagtaaaaactgctacaaaatatgaagtgcatatatttttataaagtaaagcagaatactctaatgatacattattttaacagcgatggcacagaaaaaattgaaatttttgttaagataattatataaagggttagctttgggtacattcagttagaggtgacaaaaatttcraagtaaatgttaaaatagaggcatgtcctaaaatcataggtagaacattttttaaaattccagattactactaaaaatatgaattacactacaaaatagggagaaaacaaaagcaaaaaaaaaatcatggattgtaattcgggtaaggttattcatttcagatga

SEQ ID NO: 366272 - DNA, 620 bp, Homo sapiens
gtaaggtgggaggcatgaatagataaaacacacaggatgtttagggcagataaactactctgtataatactataatggaagaacatgtcattatacaattgtgaaaactcacagaatgtacaccaagagtgaagcctaaagtaaactatggacatttgtgaatatggcgagtctacgtagctcagatttttttaatgtgtgctttcaatgtgggatatttatagtggcaaaatgtggatcagtgggagaaaaggatatataaatctctgtaatattctcgtgagtaaaaactgctacaaaatatgaagtgcatatatttttataaagtaaagcagaatactctaatgatacattattttaacagcgatggcacagaaaaaattgaaatttttgttaagataattatataaagggttagctttgggtacattcagttagaggtgacaaaaatttcaaagtaaatgttaaaatagaggcatgtcctaaaatcataggtagaacattttytaaaattccagattactactaaaaatatgaattacactacaaaatagggagaaaacaaaagcaaaaaaaaaatcatggattgtaattcgggtaaggttattcatttcagatga

SEQ ID NO: 366273 - DNA, 640 bp, Homo sapiens
tggaataagttttgtaacttttccaagtctttttttatttcrggctacatcataaaaagattgatctgtatttcatacctgtattgcatatactaggtaaaaagtctctgctgtataatacgatgtgcctatagttgaaaaattatatggttgagaagtcccccttttactcgaataccttatcatggagtttcccctgaaggttgatatctacagtgaatgaggtttctcctagtgaaaggccatgaaaaacagattttaattctataaatatatacctacacccaaacccctccccagacacctttaaaggtgttggcaatcagcacaggtttctgccatctggattgtaagaatctctttcttcaaccagattgctgcttctttccaactacacactttccagtactatcaaatatttcactgacctgttctatcttttcatatcctagtctacagaaatttctagtttcttccctctgaaaattatattggtacacaaatattcaatggcatgaattaagatagaagggcttacccttctatcttaccttatcctggtatttttttcccttagtacatggcttctgtccctgagaacaagtggttaggcagatttattttgaataatattgcatag

SEQ ID NO: 366274 - DNA, 640 bp, Homo sapiens
tggaataagttttgtaacttttccaagtctttttttatttcgggctacatcataaaaagattgatctgtatttcatacctgtattgcatatactaggtaaaaagtctctgctgtataatacgatgtgcctatagttgaaaaattatatggttgagaagtcccccttttactcgaataccttatcatggagtttcccctgaaggttgatatctacagtgaatgaggtttctcctagtgaaaggccatgaaaaacagattttaattctataaatatatacctacacccaaacccctccccagacacctttaaaggtgttggcaatcagcayaggtttctgccatctggattgtaagaatctctttcttcaaccagattgctgcttctttccaactacacactttccagtactatcaaatatttcactgacctgttctatcttttcatatcctagtctacagaaatttctagtttcttccctctgaaaattatattggtacacaaatattcaatggcatgaattaagatagaagggcttacccttctatcttaccttatcctggtatttttttcccttagtacatggcttctgtccctgagaacaagtggttaggcagatttattttgaataatattgcatag

SEQ ID NO: 366275 - DNA, 589 bp, Homo sapiens
aggtcatgagcatggagccctcagaatgaaattagaatctttatgaggagagaaagaggccagagctcccttcctctctcccaatgtgaggataaaatgagaaggtaacatgtatgtatgcgaatcagaaagayggccatcacctagaaccaaatttattaccaccttgatcctgaatatcttagcctccagaactatgagaaatgtctgttgtttaagccactcaatccacggtattttgttatagcagcttatgctgtacatccacttcatgtacacaactatactacccgataataccatgggaatatgatttgaaatatgacaattattaggaaatactaactctaataccatattcttgactctgctcttaaagaaaaaataacaatacaaaatgctgtaatgttttctgtctcttttaattgcagaatatagtcatttacgtgtaaggtggacatttttaatgacaaaacttggtgtaggacaccaaaaatatttttattaatttatatctaataactattaatgtatatctaatttccttaccatgttattttgtttattcatacttatatgctcattattt

SEQ ID NO: 366276 - DNA, 589 bp, Homo sapiens
aggtcatgagcatggagccctcagaatgaaattagaatctttatgaggagagaaagaggccagagctcccttcctctctcccaatgtgaggataaaatgagaaggtaacatgtatgtatgcgaatcagaaagacggccatcacctagaaccaaatttattaccaccttgatcctgaatatcttagcctccagaactatgagaaatgtctgttgtttaagccactcaatccacggtattttgttatagcascttatgctgtacatccacttcatgtacacaactatactacccgataataccatgggaatatgatttgaaatatgacaattattaggaaatactaactctaataccatattcttgactctgctcttaaagaaaaaataacaatacaaaatgctgtaatgttttctgtctcttttaattgcagaatatagtcatttacgtgtaaggtggacatttttaatgacaaaacttggtgtaggacaccaaaaatatttttattaatttatatctaataactattaatgtatatctaatttccttaccatgttattttgtttattcatacttatatgctcattattt

SEQ ID NO: 366277 - DNA, 601 bp, Homo sapiens
aaattactcagttttagatattttgctatggaagcataaatggactaagaagtagcatatatagacttagcaatggatcccccaaaatacagaaatcaaaaactaacataagtgaagaagttaataaacaattctacaataatagttggaagctacaatacatcatttgaaataatgaataggactattaggcagaagattgacaaggaaatagaagactcaacagcactataaaccaagaatacccaacaaacatctttaaaaccctccacctaacaacagagaacaacacattcttctgaagtacaccaagaacattctttaagaaaaaacatatatcaggccataaaacaaatcttaataaatttaaaatrattgaaatcatacaaattaacataggagaaatcataaaaagtgcgttctattcccacaacaaattggaataagaaacaaatttgataatttaaacaatatttggagattaaacaatgcactcaaattcccaataggttaaacaaaagggagattacaaaatagttggagatgtatgaagatgaataaacaacatcccagaacttaagaaattcagtaaaaatagtgc

SEQ ID NO: 366278 - DNA, 491 bp, Homo sapiens
aatgcaagaaaaggcaaataaattgaattccatcaaaattaaaattgttttattcaaaggaaccactgaaaatgagaaaagacaagagaatcatatccagattatataaagaactcttataaattaacaataaaaataaatacaacttaaaaaggacaaatatttccaatagatgtttttccaaaaaagaaaaatatcaccataagttccaaaaaagagagacaaatgatcaatggccatgtgcaaagattttaaatatcattagtcattagataatttcaaatacaaaccacaatgtgataccaatttcactcactaaaagggttawtattaaaagtcaataagtcttgacagggtgtgaaaaaattacaattctggtacattgcttctgtgaatgtaaaatagtacagctactttggaaaacagtttggcatttctcctaaatgtcggacatggagttaccatttatacaagcaattccattcctgggt

SEQ ID NO: 366279 - DNA, 582 bp, Homo sapiens
gcaatttcacttaaggactgggtaaactttttaaataaaatactgatttattawagaatagcatagaatgccacatgaattttataataaaacatgaaacatcaaagcaatatcatgcttataaaatcaatcatctttggattttgagttcaaacaccttatcataccatataattatcttcacaactggacaccagctaacatgatatcctgtaactccttggtacttacattcttatgagatatctctcatggactactagtagcatttcttaaacagtcataattttcatgcatctctaacttctctcatgttgtcgtctctgcctagaatatcatttcccaacctttctgaattctgaattgctgtacactcttaaagtttacaaattcatccaaaccacatacatgtattatttcttcctctgtatctaaaatatttaatacatctgagtatattttatattgtattaggcttatttatgtatttactttttactagttatgaaatcctggaagtaaaatgatgtgtcctattcatgttttgtccctccattgttaaaaaataaggccacgaatcaa

SEQ ID NO: 366280 - DNA, 587 bp, Homo sapiens
cttaagccaggaaaggttagggttgaaaagtggctataagatttggacattaacagctgactagataatcattagggaacaaagtgagttagaataagattttttggggaaagaaaaataatcttaattgatcaatttaaaagagtgagaacagattcagaatatttggacagagagatgtaaatgtgaggttaattgactgatagaaactcttaatatatcatgcatgtaactttcagagaaagaccaagatagaggatttgaaatctcgaaccccgggaaatrtgttcaccaagctattaatttcaataacttgaaagatacttgctatgtttttattactcctttttattgcttgtcactatcaattaggtgactttggagggaagtgtgtctcgatagaaaacgaatttaaagtgttagaagtaaagtttctagaatggatacagaaaataattcaggatgaaaactagaaggaatgttatcctaaaaatgtgcatgataatccttagcagcataacagatggaaatttgggaaagtataaagacaatagtgacaaagagtggtatagattattcatcacaag

SEQ ID NO: 366281 - DNA, 582 bp, Homo sapiens
gtaatatacaatagctgaaatgggagataacgtagtcacaaaggacaaacatcagtgaacagattaggattaagaatgcatcatgataatctcattctgaaatcatagactgtgctagaaaagctgtttctgtttagtttttttttttgagttcttgagtctaaaatacatatgttcctcttcatatatctcagtagtagactttggcctttggtctgggcctcagctgagtgttggaatgagttattagaggagttgaagatggtgtgtwtgactgatgaggcaatttgccctttctatatccacaaaagccttcttgaatctaaccttctgtcctgaaaagaaaggcaacaaaatctctgaaatgtgacattttccaaataggagaatatgagaaacccaattaccaacttattcattcactctttcactctttttaccactctcttctttatagtcactaaaatcagaggttttgttatagtctcaacagaccagccagttactaattgtatccattctctattcatgttttataaggcagatttcttcaaatttccatctagcctatgtacaaaccag

SEQ ID NO: 366282 - DNA, 568 bp, Homo sapiens
caaataggagaatatgagaaacccaattaccaacttattcattcactctttcactctttttaccactctcttctttatagtcactaaaatcagaggttttgttatagtctcaacagaccagccagttactaattgtatccattctctattcatgttttataaggcagatttcttcaaatttccatctagcctatgtacaaaccagttgcatttgatctacacttttaaattataaaattctctactgtgctaaatttcggagggaaatgaagcagcaaaagagaatagttygtggtcaaagagtttgcagggtgaatataatttgccccaagtgaaactagaatgaatatccatgagatgctcctcagtctttctttttagctctgcctctgacaaacgcagatagtatagtgtgaacacgtttattttccacgtgacctggtcagatacttggtaatggcagtagctgacatttctcagggaaaaatctaacaacttaactttaattgagtgcactgcaagatagccaccaacataattttatttttcaaatatttcccaggatggg

SEQ ID NO: 366283 - DNA, 534 bp, Homo sapiens
acagtacagtattgttacctgtaagcacaacattgtacagcagatacctagaacttttcatcttgtataattgaaactcggtatgcattgaacaacgaccccttttttcttctccyccaatcttatggcagtcaccattttcttcttggcttctatgagttgtgactacttcagatacctcatataagtggaatcatgcagtatttgtccttcattgacttacttatttcatttagcataatgtttcaacgttcatctatgttggtgaatatgattttcctcttttttatggctgaataatattccattgtatgtagagaccacattttctttatctatttgttgttgatggacatacaagttgtttctatctcttggctactgtgagtaatgcttcagggaacacaagagtgcaggtatctctttgagattttgattttaatgtctaacccttctgtgtctcagttttctcacctataaattgggaatgataatcgagttgttggatgatatgattatgtacacaagttatta

SEQ ID NO: 366284 - DNA, 594 bp, Homo sapiens
ggtctttaatgcctcatgccacattaaaaaaaaaagtcaactctaggtggtttaaagacttacatatccaaaccaaaatcttaaaaccctttaaaaaaaagttggagaccttaagataaggaaggccaataagacagtgaaaggcatcccctagaaaaaaaataattttgactaaaaataagaacttgtatttatcaagagcccttaaagaagctgaaaaggtaagttacaaattggaggaatctgtttacaatccacacaactaacagagcatttgagtaaaaaatatatcagtaactataatcagtgagaacatcacaacaagtcagaagaaaaagtagcaggagaatggatgagcatgtcgtagaagagcgaacacacrggttcagcacatgtgtgcagaaatgttcaacagcatgggggtcatggagatgccaatgaagacaattagttaccattttatgccttttccatcagcagaagttaagcctgacaatgccaagtcttgatgaacatgtggacccacaggatccttttacatagttggtgggaatgtaagcggacgtcccctgggaggcattgccttctatagtt

SEQ ID NO: 366285 - DNA, 562 bp, Homo sapiens
ttgagatctgttatttagaggattgctgcaatggcacaagagatgtatttggaaaaatctgatcagtgaatattaagaccattctacttgtcaactactgtgcatgttttatgtcttaaccttcatattaaccctaggaggtagtttttctttgtgtattttataactatataaactgaatcatagacaactgaaataacttccctaagtcactaggaccattaggtggcagaggcatgattcaaatgctagtccgtttgattccgagtgcctctcagcccccatcactctgctttagtacttagtagtggacaccgtaggggagaagaaagggcaagggctttggaaccatctaacttcagtttgaatsacagccgtactattgactgtgtaatctctagtgggtgacttctctcagtcttagtctctgttttcatatctcaagattaacactgacctaatggtgatgataaaaggataaagtgaaatcacatgcaagaatatgtttttggatacatagcaggcatttattaatggaagctgttaatattttaattgttta

SEQ ID NO: 366286 - DNA, 562 bp, Homo sapiens
ttgagatctgttatttagaggattgctgcaatggcacaagagatgtatttggaaaaatctgatcagtgaatattaagaccattctacttgtcaactactgtgcatgttttatgtcttaaccttcatattaaccctaggaggtagtttttctttgtgtattttataactatataaactgaatcatagacaactgaaataacttccctaagtcactaggaccattaggtggcagaggcatgattcaaatgctagtccgtttgattccgagtgcctctcagcccccatcactctgctttagtacttagtagtggacaccgtaggggagaagaaagggcaagggctttggaaccatctaacttcagtttgaatgacagccgtactattgactgtgtaatctctagtgggtgacttctctcagtcttagtctctgttttcrtatctcaagattaacactgacctaatggtgatgataaaaggataaagtgaaatcacatgcaagaatatgtttttggatacatagcaggcatttattaatggaagctgttaatattttaattgttta

SEQ ID NO: 366287 - DNA, 485 bp, Homo sapiens
agtggttaagggcagagtcatggggatggaggacagagagcttccgttrtccaggcgggagcttatccagctagacagttgtcagttttgcctgtggcttaattgttccttcctcagaggccctgcccactcctaactccagcctctagctgcccttcatttgatcaccctagcttccattgtggacaatggaactaagcaggaaagagagagaacaaatctttttttgcatgtggcagcattatgcaaatttatttacacatgtaatctgatttcaccctcaacacagtcctctgggactatttttctagttctgtttttcaaatgaactgaaaggcatggaagtccttcaaagatctggcttctatttgctcctccatctcccatcctctcttccatatactctttgcctcctgtagctctatcaacctgcttcaacttcttcctcccatgcttagttcagtgtctcttaacttggggtaata

SEQ ID NO: 366288 - DNA, 620 bp, Homo sapiens
ggtcatatgctacatggaacaggtactgtccaacagtcttggggaaaaaatgattacaaagtaagactgagtttcttccatcaagaaggatactgaacagtgttgtatgggaagtgctcagtgtccatctcctatacacagaccatctgtctttatcttatagccaatcttaaagttattacttctaggaggacaaaatataacattctcctctcactcttgctgcatccacagaagtcagactgcagatggggaggagctgggatgaatacagaaacagttgagtggagtctaagaggaacagagcagagtttaaaattttaatgaaaaaattgacaatataattaaaaggtccgattttttctttagaatatggacttttcaaagaaatattttaccatgaggttaaaaaatattttttcattattcatctaaatgttttgaagctttgtttttttatgtatgtttttaatccactgagattttttgttttggtaraagtgacaaaggaattcatttgtgtcttagtccatatagctaacaaatgattccagcttacctgtatgaagtagtctgttttttacttgtggtagaattgctagaaagttaaaaaaacataa

SEQ ID NO: 366289 - DNA, 548 bp, Homo sapiens
cttttctagtcacaaggtgaaagctatcagtggatctaccattctagggtctggaggatggtggccctcttcccacagctccctcagtagggattctgtgtgggggctaccaycccacatttcccttctgcactgcccgagcagatgttctccatgagggccccacccctgaagcagacttctgcctgggcatccaggcatttccatatatcctctaaaatctaggtggaagttcccaaacctcagttgacttctgtggagctgcaggctcaacaccatgtggaagctgtcaaggtttggtggcttctaccctctgaagcaacagcctgagctgtaccttggccccttttagtcacagctggagcaggtgggatgcaggacaccaaatccctaggctgcacacagcagggcagccctgggcctggcccccaaaaccattgtttcctcttaggcctgtgatgagaggggctgcctcaaaggcctctgacatgcaatggatacattttccccattgactttaggattaacagttgagtctttgttacttc

SEQ ID NO: 366290 - DNA, 587 bp, Homo sapiens
catatctgtctgtctgctaagagcaaggaaccagggatggtagaaaatattgcctagacgggaccgacggaagctgtttgatgatgtgaggtcttggagacccaagaggacatgggatgcctatgggagragaaatatcatgttttacaagttgggagagtggagaataaagagggaagaaggtatagataaatctgtgctgactgagtagatgagattgcaatattcccaaagttgagggacttactaaacttttctgagaggtaagagacaagattttggctgactatgaaagctgaggtgttagggttaatgacttgagggtgtggtgaaggtttgaactactgtgaacaatacaaggagatattgcttaggaagaggcagaagggtagctggacaggttggcagctttgaatgagctgaaggaaactgtaaacttgttgtggcaccactctactcattctttgatgcatagcttcagcctccactgtattataactaactattcccgagaccacagtgatggcaaggaccatatctcatataagctggagaatcttcagtattcacaacagggcatgactcat

SEQ ID NO: 366291 - DNA, 587 bp, Homo sapiens
catatctgtctgtctgctaagagcaaggaaccagggatggtagaaaatattgcctagacgggaccgacggaagctgtttgatgatgtgaggtcttggagacccaagaggacatgggatgcctatgggaggagaaatatcatgttttacaagttgrgagagtggagaataaagagggaagaaggtatagataaatctgtgctgactgagtagatgagattgcaatattcccaaagttgagggacttactaaacttttctgagaggtaagagacaagattttggctgactatgaaagctgaggtgttagggttaatgacttgagggtgtggtgaaggtttgaactactgtgaacaatacaaggagatattgcttaggaagaggcagaagggtagctggacaggttggcagctttgaatgagctgaaggaaactgtaaacttgttgtggcaccactctactcattctttgatgcatagcttcagcctccactgtattataactaactattcccgagaccacagtgatggcaaggaccatatctcatataagctggagaatcttcagtattcacaacagggcatgactcat

SEQ ID NO: 366292 - DNA, 545 bp, Homo sapiens
tctgaacatccaaataaaatcttccagagagaatcatctatggacacaaatagaaatgttacagaggaaaaataacaaactagtaattacctttggtttcccatagactttctatacagaattaattcctcccttatctcggcagtatctaaagcaatagttatcaatctctagttcgttcattcaaaggagctagttacatctttaaaatgtagattctgagacacctccagggcttctgattcattaggtctggaaaggaccccaaagtctgaaatatatatatatatgtgtgtgtgtgtgggtgtgtatatatgtgtgtttgtgtgtgtgtgtgtgatattttggtattttattgataggaataacattttgatgactttttcttttaaattttattttaggttcagtggatgcatgtgcaagtttgctacctgggtaaaccacatgaygctaagtttgagatatgaatgatcacgtcattcagatagtgagtatagtacccaacaggtagtttttcaatccttgccccaccccaacactcc

SEQ ID NO: 366293 - DNA, 581 bp, Homo sapiens
gcagtgctggcacagaacagagaaagtcctcagcaaactcagagagccataaaaaataataagctattaagttttgggattttctttatgcagcaaaattaattaatacaagtaactgtgaagaagagtgaatgtggggatatggcttccttgaacaatgaagaggtgggcagaggtattactctgagacatttgggccttttttctccttagaggaacatgatactgtgcttgttgaaaacttggttcaagaaacaagacacctcaatatttgtaaagcttacttaaatcgaaagaataacaaattgttagcataagttttgtaagaatcgtggtgtatattctgacagtaagacttaggaagttagcaaatatttgcctattttctcaactctttccttcctgggtagagagtaacactgaaagaaactaattggtaattagttacagattagtgattgctaattagagatttctaattgtcttccagtgtccattctccagtatggttttgggggagtatggcttcctacctactgyggaccacctgtcaactctgggctgtaacatgagagaattgt

SEQ ID NO: 366294 - DNA, 422 bp, Homo sapiens
tattcttgtgtttttggctaaataaactgggaaattatagtagagaggtgtgtggagtctctttgctcaattctataacccatctggagaggttataaacttgtaaagaaatctgtgatatgtaaactcagtttgtgattgtartgtatataatttttgagtcaggatttctctctaattggactatgcttgtaaatgtttagtttatatgtgttaacccaatagggccatgacacaagtatcctaaattaaatttagccagtattaatggaataagtactcaattaatactcaaaatgtgccagaaatgatcctacatgggatacagagttataaaatacggttcttatccttcgggagttaacattttgatgagggagaaaggagattcttaattataatttccctaaatggcaatttca

SEQ ID NO: 366295 - DNA, 602 bp, Homo sapiens
gatactgttgtagtttacagagttaacttttttgtttcaattatagctttccttaccaaagatttgctattctagtactagtggtaagccttaatcaaccagaaattatatacaaaataattagcttaaaataacaatgttttctttccyattttatgaagaagagaaaaacgattcttaatagaatgatgcctggattggtggaatcctcacatttcctaaaattcttcagtactagaaaagctaatgccaatccacttccactatagtttcaagttggtggtgcatggaaatttttcatttttggcttcgtctctaaactcaagtgattacattttataataaagagaaatttaaaattaatataatagcaacttaagttctgagctattgaacactaaacttatgctatttaaaaaaaatttggctacaactgtttagtctatacattcttccttttcttctctgagataattcaggtcaataattccaatcaaaaaatgttcattgagctactgctaatatataaggcaatgtgctatgtaggcccaagagttaaaggcagtttcaagctagtgaataaatgtgcatactatatgatg

SEQ ID NO: 366296 - DNA, 602 bp, Homo sapiens
gatactgttgtagtttacagagttaacttttttgtttcaattatagctttccttaccaaagatttgctattctagtactagtggtaagccttaatcaaccagaaattatatacaaaataattagcttaaaataacaatgttttctttcccattttatgaagaagagaaaaacgattcttaatagaatgatgcctggattggtggaatcctcacatttcctaaaattcttcagtactagaaaagctaatgccaatccacttccactatagtttcaagttggtggtgcatggaaatttttcatttttggcttcgtctctaaactcaagtgattacattttataataaagagaaatttaaaattaatrtaatagcaacttaagttctgagctattgaacactaaacttatgctatttaaaaaaaatttggctacaactgtttagtctatacattcttccttttcttctctgagataattcaggtcaataattccaatcaaaaaatgttcattgagctactgctaatatataaggcaatgtgctatgtaggcccaagagttaaaggcagtttcaagctagtgaataaatgtgcatactatatgatg

SEQ ID NO: 366297 - DNA, 620 bp, Homo sapiens
gtaaaggagtaactaagatagacttgtccacccatcataaagaactagaaaaatggactacatatgtgaaacaactgtttttgctaattggaacatatatttcaaagaactatgatccctaagttaagataaataatcaaaatggacaatacaatcactctggctttcttcctgctggtactttacaatccatgctggaagaaagaacccgggcagagcataggagagtcactaagtttgtgaagggaagattggaattcagggacgctcatgtggttggaatytgtaggaaagaaccagagatgaggggactaggcaaggaaagagctccaggaatctgatagggatctgctccaaactataacttaatgctaagctgtgcttgcatggggtaaaatttcacaatgtcaggaaaggacgattagaaactataaatgagacaattctcagagctcacaaaggaatgagagacttctgagtttcaacaaactattgttggagaggctgcattgcccacctgcgacattccctaccaagagtagagacttgagcggtatcatttctaaatgataaagtagccttgcagtaaaggctacactagacatgccctttaaaacagg

SEQ ID NO: 366298 - DNA, 620 bp, Homo sapiens
gtaaaggagtaactaagatagacttgtccacccatcataaagaactagaaaaatggactacatatgtgaaacaactgtttttgctaattggaacatatatttcaaagaactatgatccctaagttaagataaataatcaaaatggacaatacaatcactctggctttcttcctgctggtactttacaatccatgctggaagaaagaacccgggcagagcataggagagtcactaagtttgtgaagggaagattggaattcagggacgctcatgtggttggaatctgtaggaaagaaccagagatgaggggactaggcaaggaaagagctccaggaatctgatagggatctgctccaaactataacttaatgctaagctgtgcttgcatggggtaaaatttcacaatgtcaggaaaggacrattagaaactataaatgagacaattctcagagctcacaaaggaatgagagacttctgagtttcaacaaactattgttggagaggctgcattgcccacctgcgacattccctaccaagagtagagacttgagcggtatcatttctaaatgataaagtagccttgcagtaaaggctacactagacatgccctttaaaacagg

SEQ ID NO: 366299 - DNA, 603 bp, Homo sapiens
aacaaaaaaagtttgaaagttacagaaaaactttaaaagttagaaatagaaaaaagcttctagaatgagggtataaagrgaaaatatttttgtatagctgtacaatgtgtttgtgttttaagttgtattattataagtgtcaaaaagctttggaaaatttaaaaattcataaaataaaaatgttaccataagctaaggttactttattgttaaagaaagaaaacatgttcaattaaatttagtgtagcctaagtgtatagtgtttataacgtctacagtagtatatggtaatgtcctaggtgttcaaattcattcatcacccaccactcactgacccagagcaagttcagtcctgcaagctccattcacggtaagtaccctatacaagtatgccattttttatcttatataccatatttttactgtaccttttctatgtttagatctgcttagatacacgcacacttcccattgtgttccaattgctacagtattcggtacagcaatatgctgtacagatttgtagctgaggacaaataggctataccacagcttaggtgtgtagtaggctgtaacatctaggtttgtgtgagtaaactctga

SEQ ID NO: 366300 - DNA, 603 bp, Homo sapiens
aacaaaaaaagtttgaaagttacagaaaaactttaaaagttagaaatagaaaaaagcttctagaatgagggtataaagggaaaatatttttgtatagctgtacaatgtgtttgtgttttaagttgtattattataagtgtcaaaaagctttggaaaatttaaaaattcataaaataaaaatgttaccataagctaaggttactttattgttaaagaaagaaaacatgttcaattaaatttagtgtagcctaagtgtatagtgtttataacgtctacagtagtatatggtaatgtcctaggtgttcamattcattcatcacccaccactcactgacccagagcaagttcagtcctgcaagctccattcacggtaagtaccctatacaagtatgccattttttatcttatataccatatttttactgtaccttttctatgtttagatctgcttagatacacgcacacttcccattgtgttccaattgctacagtattcggtacagcaatatgctgtacagatttgtagctgaggacaaataggctataccacagcttaggtgtgtagtaggctgtaacatctaggtttgtgtgagtaaactctga

SEQ ID NO: 366301 - DNA, 619 bp, Homo sapiens
aatgatgtttaaaatacagtttcagatctggagatgaaatttgccatatyaaaccatcatgattattaaatatagagcaaaggcaatatgataagacaagagcaatatgggaaccattcactgaccacattgcaaatgtaaagcattctgcaggttgctttgcatacctcattgtgaattctcaccaccatcctataaaataagtattcttcttcccaccttttctaacaaataagctaaatgaggtttatagaagtcaaataatttggatatgttcccacatataacaagtagcacagcctgggactaaatacagcttcacctcaagctcttatgagcaagctatagctatgaaattgccatgaagtttagaagaatttagggggaaggagtaggcatccatacacgttacaggtatcccaacatctcaagtgatcacatggtgactgtgtgtgtgtgtctgtaaaacatcagctcacttgctccttttttctcctgtgttacttttttcctaagtcacagtaaatatttagccatctttgggcccttccacaaaatatggggcttagtccactggtcctaggtgttgctcctagtaatagctcttgttggatattaa

SEQ ID NO: 366302 - DNA, 619 bp, Homo sapiens
aatgatgtttaaaatacagtttcagatctggagatgaaatttgccatattaaaccatcatgattattaaatatagagcaaaggcaatatgataagacaagagcaatatgggaaccattcactgaccacattgcaaatgtaaagcattctgcaggttgctttgcatacctcattgtgaattctcaccaccatcctataaaataagtattcttcttcccaccttttctaacaaataagctaaatgaggtttatagaagtcaaataatttggatatgttcccacatataacaagtagcacagcctgggactaaatacagcttcacctcaagctcttatgagcaagctatagctatgaaattgccatgaagtttagaagaatttagggggaaggagtaggcatccatacacrttacaggtatcccaacatctcaagtgatcacatggtgactgtgtgtgtgtgtctgtaaaacatcagctcacttgctccttttttctcctgtgttacttttttcctaagtcacagtaaatatttagccatctttgggcccttccacaaaatatggggcttagtccactggtcctaggtgttgctcctagtaatagctcttgttggatattaa

SEQ ID NO: 366303 - DNA, 505 bp, Homo sapiens
gtgcagcaatcacccccacctggccacaccaaaaagagtaagaaacttaagaccgaatataaagcaatgaaaaggccacgaccatgttgaaaatagtattaataggatccaaggaataacgcaaaagtaaggcaacgtaggamgttttttaggcatttccattttcaaaaaacatcctgagagatccttttaaaacctggtaatatttaaaactagacttataaaatacagcaacccaaaaatcactttgatttatgtgccaaaatcaatacacttaaccatgcaatatatatatataactgacttatgtgtaactctaattaaaataccccaaaccactaatttcattaaaatagaactaaatgcttatattgtaaaatataaaaataacagatcgacacaataacaaacacctatttattatattaaatacaagcctgaaatattaagtacaaattacagattccaagaaattacatttcacatcccaaaatgtcctgttggt

SEQ ID NO: 366304 - DNA, 531 bp, Homo sapiens
ggggcagtagcatatgcctgtagtcccaactactcaggaggctaaggtgggaggatcacttgagcccaggatgttgaggctgcaggcagttgtgatcacaccactgcactccagcctgggtgacagagcaagaccctgtctcaaaaaataatatgtgcaaatatgtatgtatacacacacacacacacacacacactatatatatatatattatatatagatggtaagggaatctttggaaggtgagtaaaaacagaaattatgaacaaatttaaaaaacagtttctcactgaactttaaggtaaacagaagtagtctaaacaatgttcagagggcaacatatagctttagatatatrtatttgaaaaggaaaattatatatatatatatatatatatatatatatatatatatatatttacaaaggaaaataattaaaaacctactttaagaaattagaaaaaaacaaaaatttaaactccaaaaaatggaaagaaggaaataagagcaaaaggcagtaatggtagaaag

SEQ ID NO: 366305 - DNA, 607 bp, Homo sapiens
ctttgtacagaaagattcagtgctcttagtaaatgtcagtaaggtataatgagaggagagcagtgttacaattgagagcagctagattcaaatcttcatcaccatacactagctgtgtggaattacgcaaatcattgtatccctttgaattttactgtcctactcaaaaagttgagatgacaaatagaactattggttaaaagtttctagaagttttcatgtcattgtaaatgtaatatgctacgtagattattttaaagcactgcgaaactgttcaacattttcattaacaatattagctaaaatgtaattaatttatcaaggaataaataaaatatgttaaacccagtgtgaagtccacagtaggtcttcgataatggtgataaatgaaagttgtattgaatatgttatttattgtctttatttttcattaaaaaatctgctaaatgttgaatgatgagtacttcaattcatgtaaacaaagttaactggtcaaataaacattaaaaatattaagtgatattgatgctagtaatatttgttcaatgttgtagtggtaatgtataagtygtagtaataataaaaatttatattaatgccttcttat

SEQ ID NO: 366306 - DNA, 635 bp, Homo sapiens
aaacaaatataacccaccccagagagcctcattttctgatttgtttttctcttctgggtttatatctatattagccctttttatattgtggtgcaatcaaatattcaaatatcttcagccctaatttgagtcagagcaacatgagatggcaggaaaaaaagaatctgttaaacaattgttgattctacccaaaaaagcataaatgtttctcttattaaaaataaaataaattaaaattgattaatttttaaaaatatttttaaaaaatgttttaatttgttaagagtaaatgaatatatttattggcattttatgtctaagaagtttgtttttggttatctagcatgtaagtgtggtatcttctaatattttatatcttctgttttatttgtggctttgtagatttcattaatctgaattaaattgatcatttgagcaagtgcttcaccagtgacttctttcacacttctagaagggttttaattagartaacctttcatagcatttttagtctagtaacttcaagcctcataatatattcactccacataaaaacacttatcaatagagtccacaggatgatttaacatgccacacacacctcttgttcttcacattgatatgtatgtaataca

SEQ ID NO: 366307 - DNA, 648 bp, Homo sapiens
tccagaatatttgagatttctcactgcctgaggcatgtatttatttcatatctttttattttagtttattctgttcaatcctctacttaatccatctacctgtacctgatgcgtgggtctctgatactaggccacagacaaatactcacccaggattgaccttgaaaataaaacatgatgtttgtgtcataatcatagttcacatctgacttcatacttagtacagctaattttactcctttttccttgtgaaaatgccagatcctgatgagttttaaatttaaaaaatcctctttcctatgtaattataaattatttcgttgtttaaaccttatagtatcatgaatttagtacttttttttctggaaatatttggcatatgaacctctctcacttatgagcagcatatttgttaattgagattattgtagattcacacgtgrtagaaggaacgatacagagagatcccttgtatacttcatccagtttcccctaatggtgacattttgcgtaaccatagcataatagcataaccaggatattaatatcaataaaatccattgatctaattcagacttacccagttttacttacacacatatatgtgtgtattaaatctgatacaattttaagatgagtaggtgtgtt

SEQ ID NO: 366308 - DNA, 648 bp, Homo sapiens
tccagaatatttgagatttctcactgcctgaggcatgtatttatttcatatctttttattttagtttattctgttcaatcctctacttaatccatctacctgtacctgatgcgtgggtctctgatactaggccacagacaaatactcacccaggattgaccttgaaaataaaacatgatgtttgtgtcataatcatagttcacatctgacttcatacttagtacagctaattttactcctttttccttgtgaaaatgccagatcctgatgagttttaaatttaaaaaatcctctttcctatgtaattataaattatttcgttgtttaaaccttatagtatcatgaatttagtacttttttttctggaaatatttggcatatgaacctctctcacttatgagcagcatatttgttaattgagattattgtagattcacacgtgatagaaggaacgatacagagagatcccttgtatacttcatscagtttcccctaatggtgacattttgcgtaaccatagcataatagcataaccaggatattaatatcaataaaatccattgatctaattcagacttacccagttttacttacacacatatatgtgtgtattaaatctgatacaattttaagatgagtaggtgtgtt

SEQ ID NO: 366309 - DNA, 555 bp, Homo sapiens
gcatatttgttaattgagattattgtagattcacacgtgatagaaggaacgatacagagagatcccttgtatacttcatccagtttcccctaatggtgacattttgygtaaccatagcataatagcataaccaggatattaatatcaataaaatccattgatctaattcagacttacccagttttacttacacacatatatgtgtgtattaaatctgatacaattttaagatgagtaggtgtgtttatccacaaataggagtaaaaatgctaaacactaacaacgtcaggatcctttctattctttgataaccatacacacctcccaccatttctcccactcattttaaatgttgccactaaacttatcctctatttctaaaatttcatcatgaatagaacaatacagaatataaactttggggttagtatttttttactttgtgtgattctctggagacttgcctaagttgatatgtacataaatgatctattccttttaattgttaagtagtattccatggtgcatatgtactgccatttgtttgaccattca

SEQ ID NO: 366310 - DNA, 559 bp, Homo sapiens
tatcttttcattgcttcttgatgacgcccttcaccctatccatattatcactaccaagtggtgattacttttcaggttcacatacttattctttagaaaaatcttgtctgtgccttataaagaatatgattgttggcattcaaaagccagtgaagtatayattattagcctgttgcctaactcatttctttaagaaactacactaattacccacatacttatgtttttatttcctcattatttctggaggaaacaaatactgctaacatgatatttgtaagacagaaaaaagtcttttcttgaaaagtgctgtcattgtagtactaacttatagtatcaacttctttatcaactccttatgcgctttttattctgagagaaataaaaaagctaaaagtgaaatgactttttttactgtccatattataagcacccatcttggtaatttagggtctttatagttagggtaagttgtgtcataccgaggttacaaaatgaaaagtatttcgtctctttgggcctttctttattcagtaatactgtcagtttggcttttttt

SEQ ID NO: 366311 - DNA, 516 bp, Homo sapiens
ttcattgcaatgactgattttgtaatgttgaaccatccttgtattgctggaataaacacacttggtcatgtgtgtagttatttttatatattattgagttttatttcataatattttgttaatgatttttatatctatatttgcgaggaatactaatcaattattttctttkttgtacactggcttgggtattggtgtaatacttcataagaatagttaggaaattttcaattcatttctattttctggtaaagcttgtataaatttagtaataattacttcttaaatgtttattactattctccggtgaaactatttcagccaggaattttatttttcaggaccttttaattaataattgatttgattgaaatagagctattttagattgttaattttatcttggtaatttttgatagtttgtgttttcaaaaaattagtccgtttaagttgatgaaactataagcatgaagttgttcgtattattctctttatctttttaaaagctacagaatc

SEQ ID NO: 366312 - DNA, 516 bp, Homo sapiens
ttcattgcaatgactgattttgtaatgttgaaccatccttgtattgctggaataaacacacttggtcatgtgtgtagttatttttatatattattgagttttatttcataatattttgttaatgatttttatatctatatttgcgaggaatactaatcaattattttcttttttgtacactggcttgggtattggtgtaatacttcataagaatagttaggaaattttcaattcatttctattttctggtaaagcttgtataaatttagtaataattacttcttaaatgtttattactattctccggtgaaactatttcagccaggaattttatttttcaggaccttttaattaataattgatttgattgaaatagagctattttagattgttaattttatcttggtaatttttgatagtttgtgttttcaaaaaattagtccgtttaagttgrtgaaactataagcatgaagttgttcgtattattctctttatctttttaaaagctacagaatc

SEQ ID NO: 366313 - DNA, 564 bp, Homo sapiens
taaacacacttggtcatgtgtgtagttatttttatatattattgagttttatttcataatattttgttaatgatttttatatctatatttgcgaggaatactaatcaattattttcttttttgtacactggcttgggtattggtgtaatacttcataagaatagttaggaaattttcaattcatttctattttctggtaaagcttgtataaatttagtaataattacttcttaaatgtttattactattctccggtgaaactatttcagccaggaattttatttttcaggaccttttaattaataattgatttgattgaaatagagctattttagattgttaattttatcttggtaatttttgatagtttgtgttttcaaaaaattagtccgtttaagttgatgaaactataagcatgaagttgttcgtattattctctttatctttttaaaagctacagaatcaagagcgttatttcttactttaattttgacatgagcaatagctgtctttttgttacttttgttkagtatttttggagttttattaattttattgataaac

SEQ ID NO: 366314 - DNA, 607 bp, Homo sapiens
gcgttatttcttactttaattttgacatgagcaatagctgtctttttgttacttttgtttagtatttttggagttttattaattttattgataaacatatttgaaagatatttggttatattaattttctttattgcttttctgttytcaattttattgatttctgctttgattttttattattttttctttttgttttgagcttattttgctcttctgtttctacttttgttaatagaaatgtagattatcaacttgagacctctcatttttaatgtaagcctgcactgctatcagtttttctctaatcgcttctttagttctatctgacataatattttgtatcttttaaatcattcacatctatgtatttgtttttaaattatttgagacttcctttttgacccatggatcatttaaaaatacgttatttcccacatgttctcagattcctcttgttttgttatttatttctagtttggtatcacaaaaaatacataacacaatttaaactatttttttaagtttgttgaggcttgattaatgtctacttatgtctatgatctatcttgatgagtattccatgaaggtctgaaaaaaattgtgt

SEQ ID NO: 366315 - DNA, 562 bp, Homo sapiens
gagacacaaccttaagcattagaagtagtgaaaagacaaatatagaggagaaccctgaaggtagtaaaaataagagagctttctttgtactatccttgagtgtttcactacgtattaaatttccacaatgcatcactagagcctatattgtatctgtggacactctttaaatgtggacatttaagcaaaagtygaaagaataaatctagaaataaaaatgaatgtgaaatttgatgagaaggattggctcctgctgcaaataaatttctgttcattatacattacagtcagtggtattctattatagcagcatgaaatggtctaatacatctgatcaagaatggagaatctcagtcctatgaggacaaagaggcttccatgacctactaagttgcctggtattgttcagtctctcctgcaggctctttgtcttgtagcctaagtatctcttggtagaaaaaagaagtctcaggacaggtgggtgaggagatgcactctcatgtcttaagttcagctggtgctatgctgggggctactgtttgatctggagaaacaatgggcc

SEQ ID NO: 366316 - DNA, 597 bp, Homo sapiens
aaaatgcttggatggtcagtgttgtttgacttgtgtctgtatttggttaggatccatttaaactctctaggataatgtcaaaatcaatttcttcctttatactttcttattttcaaagaaatggtgctaaatatttctatgaatatatggaaatatctrtgcgaatatgtatctgactaaaaatgttgcaggcatcttttctgtttttttaaccctttgtaatatttttattttgtttatttagtgatataagggaaaattgtgagcatttaactacataatctttatgtttccaccaaactcaattttttagttcttagtatatggcctataatctaactttaatttatcccttttatattagcttattttcttgttaacaacaaggatatctcttctggagtatctcaagtcaaggtagaaaaagtagtcaacaggaaaatgaacagaacagttttggatatgtatgagaatttaaagcaaatgtttctaaatgagaaattgtaactcaggaaatatttggcacattctatcaaaattttgtgaattttgataataaaacattcacaattcaattaggagtaaaggaagaaaata

SEQ ID NO: 366317 - DNA, 670 bp, Homo sapiens
gggggaaataataatgcaggtggaattaaggtttctcttcagatgaccctgaaatggcgatattgcctctgattatgtatgaacccaatgtaatctcaagggttttataagtaaaagaaagacataagagagtgtgatgatgcagcatgcaaaaggscctactggctgttactggcttagaaaatggaagaggggcaggagccaaggaatgagggcaccttctaggagctgcaaaagacaaggaaacattttgtttgttttgcaaaagcaatgctgcccttctaacatcttgattttagcccagtgagatctgtttcaggcttctgctctctagaattgttgagataattaattatttttttgagacagtctcactgtgtcaccaggctggagtacagtggcccgtgatctcatctcactgcaacctctacctcccaggttcaactgattctcctgcctcagtctcccaaatagctgggcctacaggctaatttttgtatttttactagagacagggtttcaccatgttggccaggatggtcttgatctcctgacctcataatccgcccgcctcagtctcccaaagtgctggaattacaggcgtgagccaccgctcctggcccactttgtgttgttatacccaaatttgtggtaatttgctacagcagca

SEQ ID NO: 366318 - DNA, 594 bp, Homo sapiens
tttagcaatctaactttgcacctaaaggaactagaaaagaaaaagctagcagaagaaaaaaataactaaaattagagaacttactgaaattgagatagaaaaatccgtagaaaaaataataaaaaagcaagagtttgttctttgaaaagatgaatagactgctatttaacrgctagatttacaatgaaaaaaagagaagataagtatagtcagaaataacaaagataatataactgatcccacagaattacaaaagtttcccatagaataccatgaacaactctatgcatacaaattagaaaatctgtagatgaaattgataaattcttagaaacacacagtctctaattgaatcaggaaaagattgaagcattgaatagtgaaatatctcactctgaaattgaatcatatgtaataaaaaaaaactaccaccaaccaaaaaagtcctagaccagatggattcacagtcaaattctaccagatatacaaagaaaaactggtaccaattctactgaagctattacaaaaaaaggagggaatcctttcaaactcaatctctggcagaaacacaatgaagaaagaaaacttgaggcc

SEQ ID NO: 366319 - DNA, 649 bp, Homo sapiens
aagtcagagccagagcaatcaagcaggagaaaggctactggaactaataaatgattttagcaaagttccatgatacaaaatcaatgtagaaaacatcagtaccatttatatgtgccaataacatccaggctgagagtcatattaagaacacaatcacatttacaataaccacaaagaaaatgaaacagctgagagtacaggtaaccaagaaggtgaaaaatctctacaaggagaactagaaaacaatgctgaaagaaatcaggtgacataaataagtgggaaaacattccatactcatggratgttttaatgtttcatagaaatgaaaaatcaatatcactgaaatggccatactgcccaaagcaatttacagatgcaatgctattcctatcaacctatcatagaattagaaaaactattctaaaatttatgtggaaccaaaaaagagcccaaatagccaatgcaaacctaagcaaaaagaacaaagctggaggccttacactatcaacttcaaacaataaggctacagtgaaaaaacagcatagtgctgatacaaaaacagacacatagactaatggaacagaatagaaagctaaaatataaagctgctcacttacaaccatctgattttcgacaaggtcaatgaaaa

SEQ ID NO: 366320 - DNA, 626 bp, Homo sapiens
tgagagtaactatccctcatagtcacaggtctgctcatccttgatgttggaattacatgggacatacacaccagggggtgaaactcttagaggtcatcttagaattctgcatacacaaattacaaaatggagagaaatgacaagaaaagcaatatgtactataaatttgatgtttccgaagaaaagagcaaaacaaataaaatatgaatttttgactttawgatgatagagaacttttgacttctttctccttcaaaaaacacacagaacaagaaggagacacagtaaagaattagctgaagtctcattctctaacttgtgagtgaaaaagcctcaaacaattgcagaaactagtaagaaacaagcaattcaactttgcagaacaaatgaatttaggaatgagcactagtactactgtagttggtggtggctggtgtgaaagttcacagaagaaacaaagagcttccatttcccaattacatcccacggagtccagtacctgttctttctagaatgaggcataaggctagatatttattctctggagaaatatgtcaagagaagggccaggtgtagggacacaattcacaaaacaagagaataaggtctaccaaacagaagggtaa

SEQ ID NO: 366321 - DNA, 626 bp, Homo sapiens
tgagagtaactatccctcatagtcacaggtctgctcatccttgatgttggaattacatgggacatacacaccagggggtgaaactcttagaggtcatcttagaattctgcatacacaaattacaaaatggagagaaatgacaagaaaagcaatatgtactataaatttgatgtttccgaagaaaagagcaaaacaaataaaatatgaatttttgactttatgatgatagagaacttttgacttctttctccttcaaaaaacacacagaacaagaaggagacacagtaaagaattagctgaagtctcattctctaacttgtgagtgaaaaagcctcaaacaattgcagaaactagtaagaaacaagcaattcaactttgcagaacaaatgaatttaggaatgagcactagtactactgtagttggtggtggctggtgtgaaagttcacagaagaaacaaagagcttccatttcccaattacatcccacrgagtccagtacctgttctttctagaatgaggcataaggctagatatttattctctggagaaatatgtcaagagaagggccaggtgtagggacacaattcacaaaacaagagaataaggtctaccaaacagaagggtaa

SEQ ID NO: 366322 - DNA, 648 bp, Homo sapiens
aataaggcataagcaccaaatgtgtgttgagaactgtgatggtatttcttgggggtgttagagctgacattggccttgtatgaagggaaaggttcacacatgtggacacagcacagaaagggcactccaggctgttcaagttgtgttcaggataagacattaggagcagcccagagcagctgctggtgacaccacttagtggccacaagggtgatgctggagccagaaggctttggattgcctggttccacaacttccagaggttggcagtttagggtcattattcaaaccctttgtgcctctgattactgaaatgtaaaaaaaacaggaagctctggcaatttaatgtgtcagyacatctaaagcacaagaacagagcacttacacaagtccagtaaaaattagctaatgttggtgttatttactgcacgtggagaagtgagtatggggaagatgttctggaatattttcagcctggatcgcttgagcagcagcctcttcaaacccacggaaaatgtcttgtatggagcaatttcatgcactcttacaggagtgggcaagagagttcaactagagttgaagttcaatgaggatagaaattagattttgctgttgtaattcacctatttatcctcagcactcaatgtc

SEQ ID NO: 366323 - DNA, 648 bp, Homo sapiens
aataaggcataagcaccaaatgtgtgttgagaactgtgatggtatttcttgggggtgttagagctgacattggccttgtatgaagggaaaggttcacacatgtggacacagcacagaaagggcactccaggctgttcaagttgtgttcaggataagacattaggagcagcccagagcagctgctggtgacaccacttagtggccacaagggtgatgctggagccagaaggctttggattgcctggttccacaacttccagaggttggcagtttagggtcattattcaaaccctttgtgcctctgattactgaaatgtaaaaaaaacaggaagctctggcaatttaatgtgtcagtacatctaaagcacaagarcagagcacttacacaagtccagtaaaaattagctaatgttggtgttatttactgcacgtggagaagtgagtatggggaagatgttctggaatattttcagcctggatcgcttgagcagcagcctcttcaaacccacggaaaatgtcttgtatggagcaatttcatgcactcttacaggagtgggcaagagagttcaactagagttgaagttcaatgaggatagaaattagattttgctgttgtaattcacctatttatcctcagcactcaatgtc

SEQ ID NO: 366324 - DNA, 613 bp, Homo sapiens
acaatataacaaaataaatcgatccatatggagaatagaggtacaaatattatatcctcttctattaaatatgaatatgaagtcactatttcaagttgaattgtagaaaaaatgacacaatactcttatttttatcttctgtttttgttgcttttgctgtttttaatttagaactacattttagaattaaatttttttgtgccagaataatttttgctataattttacttctgctttattatattcattaaattaaatattataaaagtaaaaataacgtagtgtggtacagaatctcatttgtgggattgtatgaattgatctattactctgtttatttacatgtctattcatatgtctgtctccacagagaaatatgaagaatgctgttcactaaataataacaatgtgtgtattttggtttcatttctgagtagcaggattttggtaattgtttagtggccttttattactcttctatagaaagcttgccctaatgttgtaacaacaacacgtgacgggttttttttttkttttgttttttgaggcaagtcttgctcttgtcccccaggctggagtgcgatggtgctatcttggctcactgcaccctgcg

SEQ ID NO: 366325 - DNA, 502 bp, Homo sapiens
ttgcctttacagtactagaatggattgagggcatatcgagaaaaaaaaattccagcaattcctcttttagctcatctcacttctcacattctttattgtaggcaattaaaggaaccacttggtgcattcaccactctgcmcggaaattttattagccagatttgcaagtttattagccacatttgctatcttccacataagaaggtggcagcttcactgatttttgtgccaatatcattaaggtccatttgttttttgctctttctaacagtttcctcaaggtttttagtccataacttccacctgatcataaagccagtgctgcatattttgatattttgttgctgaagcacccctcttctggtgtcattctatcttttgttaatcttcttccatggagcaaactacctttcaaatattgtggcttaaaacagcaatcacttgttatttctcatgattctgagggtcaggattttacagaggcagtgggcttatctacgct

SEQ ID NO: 366326 - DNA, 506 bp, Homo sapiens
ggattgagggcatatcgagaaaaaaaaattccagcaattcctcttttagctcatctcacttctcacattctttattgtaggcaattaaaggaaccacttggtgcattcaccactctgcacggaaattttattagccagatttgcaagtttattagccacatttgctatcttccacataagaaggtggcagcttcactgatttttgtgccaatatcattaaggtccatttgttttttgctctttctaacagtttcctcaaggtttttagtccataacttccacctgatcataaagccagtgctgcatattttgatattttgttgctgaagcacccctcttctggtgtcattctatcttttgttaatcttcttccatggarcaaactacctttcaaatattgtggcttaaaacagcaatcacttgttatttctcatgattctgagggtcaggattttacagaggcagtgggcttatctacgctcgcttcagtgcctgctgtcactgga

SEQ ID NO: 366327 - DNA, 506 bp, Homo sapiens
ggattgagggcatatcgagaaaaaaaaattccagcaattcctcttttagctcatctcacttctcacattctttattgtaggcaattaaaggaaccacttggtgcattcaccactctgcacggaaattttattagccagatttgcaagtttattagccacatttgctatcttccacataagaaggtggcagcttcactgatttttgtgccaatatcattaaggtccatttgttttttgctctttctaacagtttcctcaaggtttttagtccataacttccacctgatcataaagccagtgctgcatattttgatattttgttgctgaagcacccctcttctggtgtcattctatcttttgttaatcttcttccatggagcaaactacctttmaaatattgtggcttaaaacagcaatcacttgttatttctcatgattctgagggtcaggattttacagaggcagtgggcttatctacgctcgcttcagtgcctgctgtcactgga

SEQ ID NO: 366328 - DNA, 574 bp, Homo sapiens
ttggcccagcacagaagttttggtgtgttgtgttttcattcatctcatagtattttctaatttcccttgtgatttcttctttgacccactgattgtttaccatgtgttgtttaattttcatatacttgtgaattttccacttttccttttgttattaatttctcatcatttccttttggttggagaaggtaacttgtatgattttcgtctgtttaaatttgagactttgtggcctaacatatggtytggtcagtctaagagagtagtcctgtggtatacttgagaagaacgtgtattctgctctttttggtgaaatgttctgtatatgtctattaggtctgattggtttatggtggtgttctttggctaaaactgagatgctgcagggccagttgtcaaagtcacagtgaaaaagcaaggttttcccaagctcttataatcacatcagttttagagttcacattaatccattcaaaaatatgtatcaggccaggctgtaattgtagcactttgggaggctcaggcgggtggattgcttgagctcaggagtttgagaccaacttgggcaacatag

SEQ ID NO: 366329 - DNA, 574 bp, Homo sapiens
ttggcccagcacagaagttttggtgtgttgtgttttcattcatctcatagtattttctaatttcccttgtgatttcttctttgacccactgattgtttaccatgtgttgtttaattttcatatacttgtgaattttccacttttccttttgttattaatttctcatcatttccttttggttggagaaggtaacttgtatgattttcgtctgtttaaatttgagactttgtggcctaacatatggtttggtcagtctaagagagtagtcctgtggtatacttgagaagaacgtgtattctgctctttttggtgaaatgttctgtatatgtctattaggtctgattggtttatggtggtgttctttggctaaaactgagatgctgcagggccagttgtcaaagtcacagtgaaaaagcaaggttttcccaagctcttataatcacatcagttttagagttcacattaatccattcaaaaatatgtatcaggccaggctgtaatygtagcactttgggaggctcaggcgggtggattgcttgagctcaggagtttgagaccaacttgggcaacatag

SEQ ID NO: 366330 - DNA, 521 bp, Homo sapiens
gtaattgtagcactttgggaggctcaggcgggtggattgcttgagctcaggagtttgagaccaacttgggcaacatagcgaaaccctctctctacaaaaaatacgaaaattagctgggcatagtggtgtgtgcctgtggtcccagctacctgggaggctgaggtgggaggattgcttgagccagggatgcagaggttgcagtgagcggagatcaagccactgcactccagcctgggctccagcctkggtgacagagtgaaatcctgtcttgggggtgggtggaatctttctatctatctgtctgtctgtctgtctctctctctctctatatatatatatatataattattttttaatttatatattatgtttatatgttgtattatgttaaatatatattttaatatgtgtattacagctgaaaagaatcatctagtaagggttatatctgatttcctgaggcctcattagcaaccaaaagttgcatttaaaaattacaaaagcatatctccatcgagaaa

SEQ ID NO: 366331 - DNA, 537 bp, Homo sapiens
catgcgctggcattcacgcttagcttttaatttcagattaatgaatcatatttttatctttttcttcaaggcatacttcaagtttagcaaagctactcaattccactctccttataactactacgtctccaatatttctcaaatatttaacacatcacaccacatcatctagtgcattctcttctactgagtgtataccattctcttctactgagtgcataccattctcttctactgagtgcataccatccctccgccaatgaagattttaaaaatggcactgttcccttgtgccaggggctgcctttacttatttatcacyattgatggtgtccttgtttcctttttttttttttttttcgctctgtcatccaggctggagtgcagtggtgtgatgtcggctcactgcaagctccacctcctgggttcacgccattctcctgcctcagcctcccgattagctgggactacaggcgcccaccaccacgccaggctgattttttgtatttagtatttgtatttgtatttagaaaagac

SEQ ID NO: 366332 - DNA, 537 bp, Homo sapiens
catgcgctggcattcacgcttagcttttaatttcagattaatgaatcatatttttatctttttcttcaaggcatacttcaagtttagcaaagctactcaattccactctccttataactactacgtctccaatatttctcaaatatttaacacatcacaccacatcatctagtgcattctcttctactgagtgtataccattctcttctactgagtgcataccattctcttctactgagtgcataccatccctccgccaatgaagattttaaaaatggcactgttcccttgtgccaggggctgcctttacttatttatcaccattgatggtgtccttgyttcctttttttttttttttttcgctctgtcatccaggctggagtgcagtggtgtgatgtcggctcactgcaagctccacctcctgggttcacgccattctcctgcctcagcctcccgattagctgggactacaggcgcccaccaccacgccaggctgattttttgtatttagtatttgtatttgtatttagaaaagac

SEQ ID NO: 366333 - DNA, 537 bp, Homo sapiens
catgcgctggcattcacgcttagcttttaatttcagattaatgaatcatatttttatctttttcttcaaggcatacttcaagtttagcaaagctactcaattccactctccttataactactacgtctccaatatttctcaaatatttaacacatcacaccacatcatctagtgcattctcttctactgagtgtataccattctcttctactgagtgcataccattctcttctactgagtgcataccatccctccgccaatgaagattttaaaaatggcactgttcccttgtgccaggggctgcctttacttatttatcaccattgatggtgtccttgtttcctttttttttttttttttcgctctgtcatccaggctggagtgcagtggtgtgatgtcggctcactgcaagctccacctcctgggttcacgccattctcctgcctcagcctcccgattagctgggactacaggcgcccaccaccamgccaggctgattttttgtatttagtatttgtatttgtatttagaaaagac

SEQ ID NO: 366334 - DNA, 581 bp, Homo sapiens
ctgtggtgggagtttctttccaaattccatggtgttttctcctgtcaattctgttcttattttctatcgttagtttcacaccatttgagaggcactggaaattattaagagcatgcactcaggtcctgggtctgctactacttagctgtgtggccttaggcaagttatttaacctccgtctccaatttctttctgtgtaaagggaccctcaataatccctaccttaaaaggttttttgagggttaggtataatgtaaacaagtgccttgtacctattttactgagcaaaataaatgcatttgtaactttttagttacaaggtttcctttgagtaagcaagcgtgtaaaaactatatgtctttagttaccttgtattttataatttgtcctggcaactttagttccctgaagagaaaatagaaaattaaatgtcaaataacrtaacataggtaattgtgttaaatgtcagaatatttcaggaataataatgttgtgatatacaggccagcatgcatttgttgcttgctggagtagtcaagttttatttctgacaagtctgcagttccagggagcctctccct

SEQ ID NO: 366335 - DNA, 522 bp, Homo sapiens
aatagtgcagttgctgtgaaaaatagcttgatggtgtctcaaaaagctaaatacctctacacaattaccatagaacttggtaattccactttcagatatatacccagggactcagatacttttataccaatgttcattgcagcattatttacaatagccaaaagattgaaataacccaaatgtccgtcaacagaagaatgtataaagaaaatgtggtatatgaatgcaatggaatattattcagtccgagaaagaaatgatgttctgatacatgctaccgcatgaatgaaccttgaaaatactgtgctaagtgatktaagttgcctgggaaaatattacatgataccacttacatgaattatccagacaaggcaaattcattgaaaaagaatgtacaagagattaccaggggaaaggcagaaatggaaagatattgcttaatgggtacagtgtttctgtttaggtgaggaaatttttggaaaaagatagtagtaatgggttgcacaacattatgttgtaatt

SEQ ID NO: 366336 - DNA, 566 bp, Homo sapiens
aagaatgtggttgtcatcggagttaattgcctaaaaggatcatggggtcgggcagattgtgatttactgtgattctatgtcctggtgtttgagaatttttccaaattctttttatgcttcaataaaaaaagttacaaagataaagaactaaaaactaaaagtacattgtaagtgaccaaaactatttgtctcattcttttaaatgttacactagagaggcaaatgtgattacattggtaagtagcaactatataaattactgacagattccttggtaatattatagtcaactaattgcaaacctagtataaagtttttttttttttaaatgctgacaagagagaaatgggmttatggagtaactagtaaatagctgagcttatggggaggctgaaaggcatgaatgtctttggctaataaccgactgatgggcaccaggtccatgatgaagctgctacctcctcagcacaaaataatgcacatttcacaaaaccctctcttggagtttaatccccaagtcatggacagtgtagtatcctattcactgtataatcatttacaaaaga

SEQ ID NO: 366337 - DNA, 566 bp, Homo sapiens
aagaatgtggttgtcatcggagttaattgcctaaaaggatcatggggtcgggcagattgtgatttactgtgattctatgtcctggtgtttgagaatttttccaaattctttttatgcttcaataaaaaaagttacaaagataaagaactaaaaactaaaagtacattgtaagtgaccaaaactatttgtctcattcttttaaatgttacactagagaggcaaatgtgattacattggtaagtagcaactatataaattactgacagattccttggtaatattatagtcaactaattgcaaacctagtataaagtttttttttttttaaatgctgacaagagagaaatgggattatggagtaactagtaaatagctgagcttatggggaggctgaaaggcatgaatgtctttggctaataaccgactgatgggcaccaggtcyatgatgaagctgctacctcctcagcacaaaataatgcacatttcacaaaaccctctcttggagtttaatccccaagtcatggacagtgtagtatcctattcactgtataatcatttacaaaaga

SEQ ID NO: 366338 - DNA, 558 bp, Homo sapiens
tatagggtttcccccgagaggtcctctgtagtctgatgggttttcatttgtaggtgacctggcctttctctctggctgccattttttctttcatgtcgaccttggagaatctgatgattatgtatcttggggatgatcttctcatggagcatcttactggggtttgttgcattttctgaagttgaatgttggcttgtcttgctaggtggggaagatgtccttgatggtatcctgaagtayattttccaaatcgcttccattctccctgtctcgttcaagtaccgcaattagttgtagattccatctctttacataatcccatattttccaaacgttttgttcattccgttttattcttatctctctattcttgtctgcctgtcttatttcagacagagagtcttcaacctctaatattcttggtctagtctgctattaatactgtgattgcactatgaagttcttgtagtgtgtctttcagctctgtcaggttggtcatgttcctctgtattgcacctattttggctttcagttcctccattgttagatcatgattct

SEQ ID NO: 366339 - DNA, 614 bp, Homo sapiens
aactacttcatctgcacctgcaatttactgtaactaacttgccttgtgatataaaatatgtttgctcttattttatcatatatacatattttttgagttggagtctcgctttgctgcccaggctggagtgcagtggtgagatctcggctcactgcaacgtctgcttcctgggttcaagtgattttcctgcctcagcctcccaagtagctggaattacagctgcataccacaacacctggctaatttttgtatttttttaaatagagatggggtttcaccatgttggccaggttagtctcaaactccagacctcaagtggtccacccgctttggcctcccaaagtgctgagaatacaggcgtgagccattgcacctggcctattttactataattgtcctgccattttaggaacaactttacattctgacttgcccytgatttgtgtgtttttctctctaatatatttcagctcaattaagaaagtaccctctaagctaaatatcaacagggctgtcattagaggtgactagaagagcaaacaaattaggactcagagtttttggacaatagagaataaatgtcccttgagcaagtaattccttaatacttaaca

SEQ ID NO: 366340 - DNA, 578 bp, Homo sapiens
ttttaggaacaactttacattctgacttgcccttgatttgtgtgtttttctctctaatatatttcagctcaattaagaaagtaccctctaagctaaatatcaacagggctgtcattagaggtgactagaagagcaaacaaattaggactcagagtttttggacaatagagaataaatgtcccttgagcaagtaattccttaatacttaacaaaatttgtttaccctagaagacacataaaaaaaatgacaagttgatgrctgaactaagtttcttggtctacgaaagtgagtgttctagctgagtggtgaaagaatttgtggaaatataaaaaggaggaaggaaattccagggttgtggaaacaattgtcagggaaagtagagcgatatcaatccctgaaaatagtagtgaatatggatttcttattttagtctgttgaaaagtgaatgggaattgaataagatgacgataatgtatgtatcattccttcgagaatcagcttctgatgaaaatagaagagaaggtatttagcatattaaggggtatttatattgagagacaataaaggaagtaaggaa

SEQ ID NO: 366341 - DNA, 578 bp, Homo sapiens
ttttaggaacaactttacattctgacttgcccttgatttgtgtgtttttctctctaatatatttcagctcaattaagaaagtaccctctaagctaaatatcaacagggctgtcattagaggtgactagaagagcaaacaaattaggactcagagtttttggacaatagagaataaatgtcccttgagcaagtaattccttaatacttaacaaaatttgtttaccctagaagacacataaaaaaaatgacaagttgatggctgaactaagtttcttggtctacgaaagtgagtgttctagctgagtggtgaaagaatttgtggaaatataaaaaggaggaaggaaattccagggttgtggaaacaattgtcagggaaagtagagcgatatcaatccctgaaaatagtagtgaatatggatttcttattttagtctgttgaaaagtgaatgggaattgaataagatgaygataatgtatgtatcattccttcgagaatcagcttctgatgaaaatagaagagaaggtatttagcatattaaggggtatttatattgagagacaataaaggaagtaaggaa

SEQ ID NO: 366342 - DNA, 504 bp, Homo sapiens
ttatttgagccatattgaacccgtgagtttggaaaacaggcattaaagtcttactcacaggcataaattaaacggcatttcataggaaataaacattttgtaagccacgatttgctcaattgtgagacgtttttgtttgtttgtttgtaactattgtttcaactgcaaagtcaccaaaaacactgagtcattgaaaacagagcaatggtccttaggaaaaatacagggttaggttcctgtgaatctctgatcacaacatttttatcatctgatcaatacataactttcttttatgttatttctgtttagaaatacctgattataatatatttttgatttaacattgaactgacagccaacaacattatctgcctgaacgaagctcatctagcacacacagtgtctgttctctstaaggcacgctacagctttcttgtgtacagggacactagacaacattccagcactctgctttgaggccatgttgaacaatgaaatcaccaa

SEQ ID NO: 366343 - DNA, 581 bp, Homo sapiens
tgaaaacagagcaatggtccttaggaaaaatacagggttaggttcctgtgaatctctgatcacaacatttttatcatctgatcaatacataactttcttttatgttatttctgtttagaaatacctgattataatatatttttgatttaacattgaactgacagccaacaacattatctgcctgaacgaagctcatctagcacacacagtgtctgttctctgtaaggcacgytacagctttcttgtgtacagggacactagacaacattccagcactctgctttgaggccatgttgaacaatgaaatcaccaatacaaagcagaaaacgtggtactaaatagaccacaaacagacatgtgtttatagtacgagagctgaaaaaataaggaagattatcaccttttttacttcagctgtgcatgccggcgactcaaatttttcactgctgtgaacgtttttacaaactatgaaggtgccatgagtatgggggttataaagaaaatgtattattagacaaacttgcaagtatgaaatccacaaataatcaggattgactttaattatatgtgaagggcacgtg

SEQ ID NO: 366344 - DNA, 488 bp, Homo sapiens
ccagtcaagttaacacgtaaaattaatcatcataattagcattacatattttattatctaatttttacataaattttgaacaatatatatcacatatatgcacattataaaacttaaaccacttcatgaaaatcccatcaaagccagaactccattttggtaatgcttctctgccgtggctctttccctttctgacacacaagatacaaatgggtggtattcattcatgatttcataattctaacataattctaagaggccytgacatctccatcatatggcctaagggtcaaaaagccttcaaacagctaaccttatatggaatgctcactataggtcaggagattttaaaaattattttgtggtataagttcaccaattttttagccaggctttgagctagccacaattagtagcactatatgaaagatgaggaggcttgaaatgtagagaaatttgtaaggaacacatagttcctattatggaaa

SEQ ID NO: 366345 - DNA, 589 bp, Homo sapiens
tatttcattttctgaaagttcatagaatcatatgctttcttctttttattttagagtctctctctttctctctctctccatatatatatatatatacacacacacacatagtcttccaaaactcctcggaagaaagggaagcattctgtaagactttgggcagattttttttttttttttttggacagagtctcactttgytgcccaggctggagggcggtggcaggatgtcggctcactgcaacctccacctctcaggttcaagcaattctccaggatcagcctcccgagtagctaggattacaggcctgtgccaccacactcagctaatttttgtatttttagtagagatgaggtttcgccatgttggccaggctggtctcagactactcttgacctcaactgatccacctgtcttggccccccaaagtgctggaattacaggtgtgagccactgtgccctgtgattttgggtacatttttgttgttattttgtcttaccccatttctctgtacaaaatgtgaaacacatgagtcctcttaactggtgcatgtgtgtggaggggagcattttgttgtttagtgccaa

SEQ ID NO: 366346 - DNA, 589 bp, Homo sapiens
tatttcattttctgaaagttcatagaatcatatgctttcttctttttattttagagtctctctctttctctctctctccatatatatatatatatacacacacacacatagtcttccaaaactcctcggaagaaagggaagcattctgtaagactttgggcagattttttttttttttttttggacagagtctcactttgttgcccaggctggagggcggtggcaggatgtcggctcactgcaacctccacctctcaggttcaagcaattctccaggatcagcctccygagtagctaggattacaggcctgtgccaccacactcagctaatttttgtatttttagtagagatgaggtttcgccatgttggccaggctggtctcagactactcttgacctcaactgatccacctgtcttggccccccaaagtgctggaattacaggtgtgagccactgtgccctgtgattttgggtacatttttgttgttattttgtcttaccccatttctctgtacaaaatgtgaaacacatgagtcctcttaactggtgcatgtgtgtggaggggagcattttgttgtttagtgccaa

SEQ ID NO: 366347 - DNA, 520 bp, Homo sapiens
aaaactagcagggcactgagcagagagcctcaaaaacaaaaatgtgcattatcttgtgtgtgtgtgtgtgtgtgtgtgtgtgtgtgtgtgtgtgtggtatgatttttatatatgagatgtgtgcttggggcggtgtggtttgtctggtatgtgtgcatatgtgtgtagtgtaatgtgtggtaggtgatgtgtggtgtgggtgtgatgagtgtgagtggtgtgactgtggtgaattatctgtggtgtatgtgtatatatgcataggtggagtatgttatatggtgtgtgtgtgtgtgtgtgtgtgwgagagagagagagagagagagagtacatgagagagagaaaggaagaaacctctcaactatgttgtaagcatttagtaaaattacacatataacaatattcttggggcagttgtctcctatgaaggtcagtgaaggagatgagttttgcataacgaagatgtataagccagaccatgtgcagcagagagaaagccagcatgtgaaatactatttta

SEQ ID NO: 366348 - DNA, 520 bp, Homo sapiens
aaaactagcagggcactgagcagagagcctcaaaaacaaaaatgtgcattatcttgtgtgtgtgtgtgtgtgtgtgtgtgtgtgtgtgtgtgtgtggtatgatttttatatatgagatgtgtgcttggggcggtgtggtttgtctggtatgtgtgcatatgtgtgtagtgtaatgtgtggtaggtgatgtgtggtgtgggtgtgatgagtgtgagtggtgtgactgtggtgaattatctgtggtgtatgtgtatatatgcataggtggagtatgttatatggtgtgtgtgtgtgtgtgtgtgtgagagagagagagagagagagagagtacatgagagagagaaaggaagaaacctctcaactatgttgtaagcatttagtaaaattacacatataacaatattcttggggcagttgtctcctatgaaggtcagtgaaggagatgagttttgcataacgaagatgtataagccagaccatgtgcagcagagasaaagccagcatgtgaaatactatttta

SEQ ID NO: 366349 - DNA, 544 bp, Homo sapiens
tcttttattaaatacttgttcattatatttatagaaaggagagataaagaaaatagtttcaagattatacgtttgacaaatgyttatctgaaaattactaaagtcatttttgctcatataaaattagtcctttcagtaaatcaaactatttaatttacggatgttctctaggtgttactgtatagtaatgatattctgcaggcaattatgtagtaaaagattccaagcatgtttgtgatatgtttaattcctgacccttggctttatttagttaatattcttttgttctttcattcatttaatttaattcattcattcatgcaaaagctacttattgagagatttctacatgctaagcattattttaggtgttaagggacatgatagtgaacaaaaccagcaaaactctctgcccttatggatttcacattcatgtggctgcaaatgcaagagatcaatacaggcaagtgttaacacaaattggaaaaatcaaaaaagaagagggtggtgactaaaggaaccaaaagattgaagtacaacttgg

SEQ ID NO: 366350 - DNA, 544 bp, Homo sapiens
tcttttattaaatacttgttcattatatttatagaaaggagagataaagaaaatagtttcaagattatacgtttgacaaatgcttatctgaaaattactaaagtcatttttgctsatataaaattagtcctttcagtaaatcaaactatttaatttacggatgttctctaggtgttactgtatagtaatgatattctgcaggcaattatgtagtaaaagattccaagcatgtttgtgatatgtttaattcctgacccttggctttatttagttaatattcttttgttctttcattcatttaatttaattcattcattcatgcaaaagctacttattgagagatttctacatgctaagcattattttaggtgttaagggacatgatagtgaacaaaaccagcaaaactctctgcccttatggatttcacattcatgtggctgcaaatgcaagagatcaatacaggcaagtgttaacacaaattggaaaaatcaaaaaagaagagggtggtgactaaaggaaccaaaagattgaagtacaacttgg

SEQ ID NO: 366351 - DNA, 631 bp, Homo sapiens
gatccagtcacatccaaaaacattttaatctaatttttgcttcaaactccaagaataagttttctgattatactaggttggtcaacttttgtctcaactgtgacagattgggggcataattaaatggactaaatggttgccaccaatataatsttatgaatgagtgaaaatctaaaaacagtaataaaactgtagagaactctgagatctctttttgacactcagggtgtccttatggctttatgtctattctggttccctctatgtctggtaaaaagtatttccctttgggattctaactcctgtatgtctatgtgtggatacttacatatttttacaatttaaagcaatatagttggttctttagttttggttggtaaacgggtttgtaagatttaaagcaataaagaagataacagagaaaaagatgagctggtttaattactcatatataaactatttcaaatatctttacatattcaatataatatcaagaaaaaaggtaagagatctatgttcatatgaattgaggaatatcacctagccattttgagctttcatttttaatacctataaaactttcattatgaatacatatttatgtgacacattctatctgatgttgtccagg

SEQ ID NO: 366352 - DNA, 588 bp, Homo sapiens
attctaactcctgtatgtctatgtgtggatacttacatatttttacaatttaaagcaatatagttggttctttagttttggttggtaaacgggtttgtaagatttaaagcaataaagaagataacagagaaaaagatgagctggtttaattactcatatataaactatttcaaatatctttacatattcaatataatatcaagaaaaaaggtaagagatctatgttcatatgaattgaggaatatcacctagccattttgagctttcatttttaatacctatraaactttcattatgaatacatatttatgtgacacattctatctgatgttgtccaggtcctgagggggaaacatattttcttgctttcttggcagggtttttgcaaggatcagaaaaaaagaagcaatataaaatgacaaaagtaatgcataaagggcctaaaaatggaagtgatcactattaaagaaggtcatgctgttaagagagcgttgcaaatgtggtgtagccactctacatatggctaagtttgcaacatatttgtcaggctttctgggagtttactcagaggtgtctgggtcattacca

SEQ ID NO: 366353 - DNA, 588 bp, Homo sapiens
attctaactcctgtatgtctatgtgtggatacttacatatttttacaatttaaagcaatatagttggttctttagttttggttggtaaacgggtttgtaagatttaaagcaataaagaagataacagagaaaaagatgagctggtttaattactcatatataaactatttcaaatatctttacatattcaatataatatcaagaaaaaaggtaagagatctatgttcatatgaattgaggaatatcacctagccattttgagctttcatttttaatacctataaaactttcattatgaatacatatttatgtgacacattctatctgatgttgtccaggtcctgagggggaaacatattttcttgctttcttggcagggtttttgcaaggatcagaaaaaaagaagcaatataaaatgacaaaagtaatgcataaagggcctaaaaatggaagtgatcactattaaagaaggtcatgctgttaagagagcgwtgcaaatgtggtgtagccactctacatatggctaagtttgcaacatatttgtcaggctttctgggagtttactcagaggtgtctgggtcattacca

SEQ ID NO: 366354 - DNA, 586 bp, Homo sapiens
gtacaatactgagtatctttctatgtatttgtgttttattgtggatttattagattatttagaaatgtgctatttaatacctaagaatttggatatttcccgtctctcttgatttctmgtttaattacactatgtacataaataatatattacattaatttgaatcactcaaatttgttaaagtttcctttacaatatgtctgttttggtgaatgttccccatatacttgaaaaaaatatgccattcatgtgtttgagtagaatgttctataaacatccattagatccagttgcttgataatgttgttctaaattcttgcggttttctatccatttatcatttacagataaatgttgaagttctctattgtgaatctgtatgtttcttctttctcttctgtcagatttttccatttataaaacacttcgttagacatatccccatttgagattgttgtgtcttttaggtgaattgatcattttatctttatatactatctctttttgttttgttagttttctttgttctaacctctgttttgtctccagcttactactgatttgtttttgcatggtataacttttt

SEQ ID NO: 366355 - DNA, 473 bp, Homo sapiens
aaataatatattacattaatttgaatcactcaaatttgttwaagtttcctttacaatatgtctgttttggtgaatgttccccatatacttgaaaaaaatatgccattcatgtgtttgagtagaatgttctataaacatccattagatccagttgcttgataatgttgttctaaattcttgcggttttctatccatttatcatttacagataaatgttgaagttctctattgtgaatctgtatgtttcttctttctcttctgtcagatttttccatttataaaacacttcgttagacatatccccatttgagattgttgtgtcttttaggtgaattgatcattttatctttatatactatctctttttgttttgttagttttctttgttctaacctctgttttgtctccagcttactactgatttgtttttgcatggtataacttttttccatgtttctaactgtagcctatct

SEQ ID NO: 366356 - DNA, 586 bp, Homo sapiens
gtacaatactgagtatctttctatgtatttgtgttttattgtggatttattagattatttagaaatgtgctatttaatacctaagaatttggatatttcccgtctctcttgatttctcgtttaattacactatgtacataaataatatattacattaatttgaatcactcaaatttgttaaagtttcctttacaatatgtctgttttggtgaatgttccccatatacttgaaaaaaatatgccattcatgtgtttgagtagaatgttctataaacatccattagatccarttgcttgataatgttgttctaaattcttgcggttttctatccatttatcatttacagataaatgttgaagttctctattgtgaatctgtatgtttcttctttctcttctgtcagatttttccatttataaaacacttcgttagacatatccccatttgagattgttgtgtcttttaggtgaattgatcattttatctttatatactatctctttttgttttgttagttttctttgttctaacctctgttttgtctccagcttactactgatttgtttttgcatggtataacttttt

SEQ ID NO: 366357 - DNA, 586 bp, Homo sapiens
gtacaatactgagtatctttctatgtatttgtgttttattgtggatttattagattatttagaaatgtgctatttaatacctaagaatttggatatttcccgtctctcttgatttctcgtttaattacactatgtacataaataatatattacattaatttgaatcactcaaatttgttaaagtttcctttacaatatgtctgttttggtgaatgttccccatatacttgaaaaaaatatgccattcatgtgtttgagtagaatgttctataaacatccattagatccagttgcttgataatgttgttctaaattcttgcggttttctatccatttatcatttacagataaatgttgaagttctctattgtgaatctgtatgtttcttctttctcttctgtcagatttttccatttataaaacacttcgttagacatatccccatttgagattgttgtgtcttttargtgaattgatcattttatctttatatactatctctttttgttttgttagttttctttgttctaacctctgttttgtctccagcttactactgatttgtttttgcatggtataacttttt

SEQ ID NO: 366358 - DNA, 575 bp, Homo sapiens
tatactccatttctggtgcctaatcacattggctaacttctctacaatggcgttgaattgtcatagagatggtggccttccttgtctagttccagacaaaggaaaataacagaaaaagtaataaagaagctgctggtgtgttacaattaaatcagaactcttgtttgctggagggttacatctctatctaatctacatctacgtctacatctactgtgtcaaggaagtatttaagtgctttttacaggaattgtctgtttaaggctttttcagattttcttaagatggttatatgatttatttcattttttagaattttatatttaattgacaataagtaaaaatgattgtgtacatcacatacactgtgatgtctatatacaygtgtacattgtggaatgatcaaatcaagctaattaacgtctatcacctcacatactcatttgtggtgagaaaacttaaaatctattcccttcacattttcaaatatacattattattaactacagtcaccatgctgtgcaatcgatcagcagtacttattcctccagtctaactaaaactttgcacccatt

SEQ ID NO: 366359 - DNA, 474 bp, Homo sapiens
tgtgtgtgtgtgtgtgtgtgtgtgtgtgtggcaattgtgaatgggatttcctttttgatttagctctcagtttagttgttgttggtgtatacaaatgctagtgcwttttgtacattgattttatagcctgcaacattgctgaagttgtttatcagctgaagttgatactgattttaatgataaaaaattcctccaatatatgataaatctagacaataggttttattgtattttttgagattgtatatgtttcttttatatttcctgtttgatcacagtatttaaaatattttaatactattaaatgtaaagtattttttaaattttgtcattaatttctacttatatgtgatttctgattaatacatttgtattattcattttcttgtaatgtgtcaagtttttccttgtagtcaactacaacaaattttatgaatattctatttttatttgaaaagactgtgtgtgtgttta

SEQ ID NO: 366360 - DNA, 474 bp, Homo sapiens
tgtgtgtgtgtgtgtgtgtgtgtgtgtgtggcaattgtgaatgggatttcctttttgatttagctctcagtttagttgttgttggtgtatacaaatgctagtgctttttgtayattgattttatagcctgcaacattgctgaagttgtttatcagctgaagttgatactgattttaatgataaaaaattcctccaatatatgataaatctagacaataggttttattgtattttttgagattgtatatgtttcttttatatttcctgtttgatcacagtatttaaaatattttaatactattaaatgtaaagtattttttaaattttgtcattaatttctacttatatgtgatttctgattaatacatttgtattattcattttcttgtaatgtgtcaagtttttccttgtagtcaactacaacaaattttatgaatattctatttttatttgaaaagactgtgtgtgtgttta

SEQ ID NO: 366361 - DNA, 562 bp, Homo sapiens
tatgataaatctagacaataggttttattgtattttttgagattgtatatgtttcttttatatttcctgtttgatcacagtatttaaaatattttaatactattaaatgyaaagtattttttaaattttgtcattaatttctacttatatgtgatttctgattaatacatttgtattattcattttcttgtaatgtgtcaagtttttccttgtagtcaactacaacaaattttatgaatattctatttttatttgaaaagactgtgtgtgtgtttattaccttcttaatcatgctcttttcattttctatatctttactaatttttgttgattttatttgtcctggattgagaatctgtgttttagattcttcattttagtgtatttttctctaaagcattttttagttttattttctcttacaaacttatttttattttttcttgaagctctgtattttcttcctcatgaagatttttgctgcattattgaggctatagacattaatatctggtgttttctttgagtattaaaacttttaatattataaagtgaactagaa

SEQ ID NO: 366362 - DNA, 562 bp, Homo sapiens
tatgataaatctagacaataggttttattgtattttttgagattgtatatgtttcttttatatttcctgtttgatcacagtatttaaaatattttaatactattaaatgtaaagtattttttaaattttgtcattaatttctacttatatgtgatttctgattaatacatttgtattattcattttcttgtaatgtgtcaagtttttccttgtagtcaactacaacaaattttrtgaatattctatttttatttgaaaagactgtgtgtgtgtttattaccttcttaatcatgctcttttcattttctatatctttactaatttttgttgattttatttgtcctggattgagaatctgtgttttagattcttcattttagtgtatttttctctaaagcattttttagttttattttctcttacaaacttatttttattttttcttgaagctctgtattttcttcctcatgaagatttttgctgcattattgaggctatagacattaatatctggtgttttctttgagtattaaaacttttaatattataaagtgaactagaa

SEQ ID NO: 366363 - DNA, 562 bp, Homo sapiens
tatgataaatctagacaataggttttattgtattttttgagattgtatatgtttcttttatatttcctgtttgatcacagtatttaaaatattttaatactattaaatgtaaagtattttttaaattttgtcattaatttctacttatatgtgatttctgattaatacatttgtattattcattttcttgtaatgtgtcaagtttttccttgtagtcaactacaacaaattttatgaatattctatttttatttgaaaagactgtgtgtgtgtttattaccttcttaatcatgstcttttcattttctatatctttactaatttttgttgattttatttgtcctggattgagaatctgtgttttagattcttcattttagtgtatttttctctaaagcattttttagttttattttctcttacaaacttatttttattttttcttgaagctctgtattttcttcctcatgaagatttttgctgcattattgaggctatagacattaatatctggtgttttctttgagtattaaaacttttaatattataaagtgaactagaa

SEQ ID NO: 366364 - DNA, 583 bp, Homo sapiens
tatttaaaatattttaatactattaaatgtaaagtattttttaaattttgtcattaatttctacttatatgtgatttctgattaatacatttgtattattcattttcttgtaatgtgtcaagtttttccttgtagtcaactacaacaaattttatgaatattctatttttatttgaaaagactgtgtgtgtgtttattaccttcttaatcatgctcttttcattttctatatctttactaatttttgttgattttatttgtcctggattgagaatctgtgttttagattcttcattttagtgtatttttctctaaagcattttttagttttattttctcttacaaacttatttttattttttcttgaagctctgtattttcttcctcatgaagatttttgctgcattattgaggctatagacattaatatctggtgttttctttgagtattaaarcttttaatattataaagtgaactagaatctattatgattttattctgaaagtaatcatgctagacactaatattttattcttcactctcttcctacttctccatagttcatcattgtcacgtttttat

SEQ ID NO: 366365 - DNA, 594 bp, Homo sapiens
gaatttattacatattaataaaaagaaaacatattattgatatatttaggaagaatatttgataaaattaagcaaccatcaatatgtttcatgataatatgtaagyagatggaaatttatacaatatgacgaagaatattaaccaaaaacatactgtaaattttatagttacagtgaattgttgaatgtatttcctttggcatcagaaatgccatgtgtccctgatcttacaaattctattaatgatattacaagttctacttagtgtagtaataaaagaaaaagaaataaagaccacaagattacaaaggaagaaataactctcattattcagagatcatacaattacatatatagaaaatccaaaagcatccattggcaaactataggaatcaataaataaatttagcatgttggttgtataaaagtcaatatatagattaatttttcttatatgcaataaaaattagaaaataaaagtttaaaatattcataataaaattaagaatatcaaataactgagaataattataataaattatatttaaattgacaccaaatgctgcaaaactgtgctgtaagaaatagcagaat

SEQ ID NO: 366366 - DNA, 594 bp, Homo sapiens
gaatttattacatattaataaaaagaaaacatattattgatatatttaggaagaatatttgataaaattaagcaaccatcaatatgtttcatgataatatgtaagtagatggaaatttatacaatatgacgaagaatattaaccaaaaacatactgtaaattttatagttacagtgaattgttgaatgtatttcctttggcatcagaaatgccatgtgtccctgatcttacaaattctattaatgatattacaagttctacttagtgtagtaataaaagaaaaagaaataaagaccacaagattacaaaggaagaaataactctcattattcagagatcatacaattacatatatagaaaatccaaaagcatccattggcaaactataggaatcaataaataaatttagcatgttggttgtataaaagtcaatatatagattaatttttcttatatgcaataaaaattagaaaataaaagtttaaaatattcataataaaattaagaatatcaaataactgagaataattataataaawtatatttaaattgacaccaaatgctgcaaaactgtgctgtaagaaatagcagaat

SEQ ID NO: 366367 - DNA, 567 bp, Homo sapiens
atccgttttctgtggagatgggggacagaactggtagcttgagctagaggctgttacttgagctaaatgctgtttctctggggattactggtccaggaactccttgggcaatccagcctcagccccgtacttctggaactctgggaagactgtccccrttctctgttctaatcctctacacctaacagttttgctcaggccagctcaggttgagaacaacaaaaacttaaaaaaaaagacagatatatatatatatatatgtgttttggatgttgccctggaaactatagtctccccagaagaaatctgtcagatgatttagcatttaatagaccacagagatttgaaacagcgggaccctggaggaaaggggtttggaaacaaagggtgcctttgcatgtggggattttaattttgatgagaaagagaaacatgtcttttggctcttttcatgtgtcctaatagggaaactcttgggtctaaatgtagaggtacaggagctgtgttcatctctagcaaaaaaatagagctggcctgttgagcctgggaacagggtttgcatctgcc

SEQ ID NO: 366368 - DNA, 567 bp, Homo sapiens
ggaagtgaagggcaaagagcctcttatgaaactgtcagatctcatgagaactcactatcatgagaatagcctgggggaaactgcccccatgagccaatcacctctcaacaggtccccttctcaacacctggagattacaatttgagatgagatttgggtagggacacaaagccaaactgtatcaatccgttttctgtggagatgggggacagaactggtagcttgagctagaggctgttacttgagctaaatgctgtttctctggggattactggtccaggaactccttgggcaatccagcctcagccccgtacttctggaactctgggaagactgtccccattctctgttctaatcctctacacctaacagttttgctcaggccagctcaggttgagaacaacaaaaacttaaaaaaaaagacagatatatatatatatatatgtgttttggatgttgcsctggaaactatagtctccccagaagaaatctgtcagatgatttagcatttaatagaccacagagatttgaaacagcgggaccctggaggaaaggggtttggaaaca

SEQ ID NO: 366369 - DNA, 567 bp, Homo sapiens
ggaagtgaagggcaaagagcctcttatgaaactgtcagatctcatgagaactcactatcatgagaatagcctgggggaaactgcccccatgagccaatcacctctcaacaggtccccttctcaacacctggagattacaatttgagatgagatttgggtagggacacaaagccaaactgtatcaatccgttttctgtggagatgggggacagaactggtagcttgagctagaggctgttacttgagctaaatgctgtttctctggggattactggtccaggaactccttgggcaatccagcctcagccccgtacttctggaactctgggaagactgtccccattctctgttctaatcctctacacctaacagttttgctcaggccagctcaggttgagaacaacaaaaacttaaaaaaaaagacagatatatatatatatatatgtgttttggatgttgccctggaaactatagtctccccagaagaaatctgtcagatgatttagcatttaatagaccacasagatttgaaacagcgggaccctggaggaaaggggtttggaaaca

SEQ ID NO: 366370 - DNA, 566 bp, Homo sapiens
tttaatttttattttatttattgttggagacaaggtcttcttctgttccctaaactggagtgcactggtgcaattatagctcactgcagcctcgacctcctggccttaagggatcctcccgcctcagcctcataaagtgcttggataataggcatgagccactgttcctagctaatttaatattttggaataattgtagacatcatgaagaaaatcaatgtttatttatttatttccttttttgagatggagtctcgcttttgtctaccaggctggagtgcaatggtgtgatctcagctcactgcgacctccatctctgggttcaagtgattctcctgcatcagcctcccaagtagctgggaytacaggtgcctgccaccatgcccagctcatttttgtatttttagtagagatggggtttcaccatgttggtcagactagtctcgaactcctgacctcaggtgatccacccaccttggcctcccacagtgctgggattccaggcatgagccactgtgcctgacctgatgacttggtttaaatataggcctgattaggcttgtgac

SEQ ID NO: 366371 - DNA, 566 bp, Homo sapiens
tttaatttttattttatttattgttggagacaaggtcttcttctgttccctaaactggagtgcactggtgcaattatagctcactgcagcctcgacctcctggccttaagggatcctcccgcctcagcctcataaagtgcttggataataggcatgagccactgttcctagctaatttaatattttggaataattgtagacatcatgaagaaaatcaatgtttatttatttatttccttttttgagatggagtctcgcttttgtctaccaggctggagtgcaatggtgtgatctcagctcactgcgacctccatctctgggttcaagtgattctcctgcatcagcctcccaagtagctgggactacaggtgcctgccaccatgcccagctcatttttgtatttttagtagagatggggtttcaccatgttggtcagactagtctcgaactcctgacctcaggtgatccacccaccttggcctcccacagtgctgggattccaggcatgagccactgtgcctgacctgatgacttgktttaaatataggcctgattaggcttgtgac

SEQ ID NO: 366372 - DNA, 616 bp, Homo sapiens
taatttattgaagaaaagctttaaaaawttttggtgtagcctaagcatatggtgtttataaagtctacagtagtgtacagtaaggtcctatgccttcacactcactgactcaccacagcatcttccagtcctgcaagctcctttcatggtaagtgccctatacaggagtaccattttaaaatctcttatactctattcttactgtaccttctctatgttcaggtacacaagtacttacattgtgttacaactgcttatagtatattcagtaaagtatcaggctgtacaggtgtgtagcctaggagcaataggctacaccatacagcctaggtgtgtagtagactgtacaaggctatacaaggtttgtgtaaatgcactttgctgtttgcacaatgatgcaatcacctaaggaggcatttctcagaaccatcccgtgattaagagaggcatgatcgtacagtcatcatctccctgaaagctcagtcagccctgtgcagtgctactgccacactccccttttgcacatgtagaaatcaaggatctttggctcctctgagtgacttgttccaggtttctcagttttcaagagatggaggtgggactcgaattgagattt

SEQ ID NO: 366373 - DNA, 543 bp, Homo sapiens
tgtgtgggacttaagtgccgttgctactgagttctggccacattcttaccatcgtggagtcggggcccgtcggtggagccatcctaataaggcagggccatctgtgtaggaatctgctgtttgcagagatttttgttggtgatcaccaggcttggactctgagaaccttggaggaacccaktgggtagcacacaatgcggagtgggacgttcactggaccagggaggtcgggccgtggttaggaacctgggggaggaagagctgagggggttggggatctgagcttttctcagtggctcagccacgaccctgggctacccctgccccaggcctccctcctgtgcctgtgagctggggatgatcattagtgtcccctcccccagcatgtagggctgtgccaggcacaaggaggaggcttgcggcattcccactgaggacagactacccgggaaagcactcggacagcctcagggaagatgagggtgggtccaggagatgccaagggcaggcccttgggcaggtttttcaacagtgcctctgccc

SEQ ID NO: 366374 - DNA, 543 bp, Homo sapiens
tgtgtgggacttaagtgccgttgctactgagttctggccacattcttaccatcgtggagtcggggcccgtcggtggagccatcctaataaggcagggccatctgtgtaggaatctgctgtttgcagagatttttgttggtgatcaccaggcttggactctgagaaccttggaggaacccagtgggtagcacacaatgcggartgggacgttcactggaccagggaggtcgggccgtggttaggaacctgggggaggaagagctgagggggttggggatctgagcttttctcagtggctcagccacgaccctgggctacccctgccccaggcctccctcctgtgcctgtgagctggggatgatcattagtgtcccctcccccagcatgtagggctgtgccaggcacaaggaggaggcttgcggcattcccactgaggacagactacccgggaaagcactcggacagcctcagggaagatgagggtgggtccaggagatgccaagggcaggcccttgggcaggtttttcaacagtgcctctgccc

SEQ ID NO: 366375 - DNA, 289 bp, Homo sapiens
aggagtttggaaccagcctgggcaacattgtgaaaccccatctctactaaaaatgcacaaaaagagctgatttaagtttcttgtaggattctggttataaaacactgstcaaacacacagggcatggatagggcagggccagggacaaggtcaggccaggaaggggccagggccaaggcagggccagagctggacttggaggtgtcctggtctgatttgccctgccccaacgttggcccagccctgctctggcacttctgtcatgccctgtccctggcctgagcattgg

SEQ ID NO: 366376 - DNA, 606 bp, Homo sapiens
gccctgccttggccctgtgctaccctagccctgccctggccttctgctgaccctgatcctgccatggccctggccctgccatgtccctgccctggccctggttctgccctacttctggccctggccttggtcctctcatgtccctggctatgaccctgcccctggtttttctctgtccatgaccctgccccggytctgtcctatccctggccctgtctcagttctgtcctagccctggcctttcacagtactttatgcttagtaagggctccatggtgtctgtgagttgaatgttgtgttcatagtatctgccaaaacagaaagaaaaaaaaatctgatgatgagaagttaaagctttgtatataatatgccttgaattgtaagtgcttgttattagttgtattacatataggtcatggttttgtacacataactccaaaccattgatactgttaaaagagtatatgaatatatgaaagaatgtataaacgtaagaatgtatgagtatctaatgaactttccaaattaatttttatttttagctctattagatttttctcagtgtaacaaatgtttattcctatgtaattaagggcgtatttcctg

SEQ ID NO: 366377 - DNA, 606 bp, Homo sapiens
gccctgccttggccctgtgctaccctagccctgccctggccttctgctgaccctgatcctgccatggccctggccctgccatgtccctgccctggccctggttctgccctacttctggccctggccttggtcctctcatgtccctggctatgaccctgcccctggtttttctctgtccatgaccctgccccggttctgtcctatccctggccctgtctcagttctgtcctagccctggcctttcacagtactttatgcttagtaagggctccatggtgtctgtgagttgaatgttgtgttcatagtatctgccaaaacagaaagaaaaaaaaatctgatgatgagaagttaaagctttgtatataatatgccttgaattgtaagtgcttgttattagttgtattacatataggtcatggttttgtacacataactccaaaccattgatactgttaaaagagtatatgaatatatgaaagaatgtataaacgtaagaatgtatgagtatctaatgamctttccaaattaatttttatttttagctctattagatttttctcagtgtaacaaatgtttattcctatgtaattaagggcgtatttcctg

SEQ ID NO: 366378 - DNA, 599 bp, Homo sapiens
tgagtatctaatgaactttccaaattaatttttatttttagctctattagatttttctcagtgtaacaaatgtttattcctatgtaattaagggcgtatttcctgtacagagtattcatattacctaattgaaaattatataatacaaaaatataatattatttttaggccaggcatggtggctcatacctgtaatcccaacattttgagaggccaagttgggagaatcatttgagtccaggagttgaccagcctgggccacatattgagaccttttctttattaaataaataaataaataaataggttgggcactgtggctcatatctgtaatcccagcattttgggttgcaraggcaggaggattgcttgagcccaggagtttgagaccagcctgggcagaatagcaagactccatctctacaaataataaaatattaaccaggtgtggtggtgcgcacctggggtcccggctacccgggaggctaaggtgggaggtttgctcaaggctgcagtgaactgtgaatgcaccactgcattgcagcctaggccacagaacaggaccttgtctataaataaagaaataagtaaaaacataa

SEQ ID NO: 366379 - DNA, 608 bp, Homo sapiens
gttgagattaaatgcgatgagacgaattgagatgatatgaaataatgaaactaggtgaaataatgaaatgagatgaaacgaaataatgaaatgaaattgaaatgagatgagaagaaatgagatgaaatgttgaaatgaaaggaagaaatgatgagatgagatgaaatgatgagatgaaatgagatgaaaaattatgagatgaaaatatgagatgaaatgagatgatatgaaatgacataatgarataaatgagattagatgaaatgaaatagtgaaatgaaatgatgaaatgatgaaaatgaaatggagatgagatttgatgaaatgatgagatgatatgatgagatgggatgggatgagataaaatgatgagatgaaatgatgagatgatgagatgaaatgatgaggtgaagtgatgcactgtcacgtgtgtgtctattctttttcccaaccaacaaaaattataattcattaattttaattttatttaacaatactcttaagagttgaaggaaaaatattatctacattatgggttacaatctaagtataaataatacataaatatattaaaacttataaagaatatgttttggaatcgaatatac

SEQ ID NO: 366380 - DNA, 534 bp, Homo sapiens
gatcatcacatcttgagctcagcctccccggagcttttttttatattgacagccacttcagagagagtcctctttgagctttacaagaaatatcctggtgtgaaaaaagaccaaaaccagatagccagcctgaacactctctgtttagagaaagctggcttakcaatgttgtatgtcttttggatgtgctgtgttattcacatatgagaagaaagagtttcaagggttagcaaatagcgtcacattcagcagagaacatgtggttggggactagggcaatggtgactcctcagacctcagctgcagcctgataaatatggttaacagagtagaaggcagtgacatgaaatgggtgtccacagccttgtgttgggaattgaatgagaaagaagagcttgaacttggatgttccccagaggcagcacagggtcagatgagcttttcaagataggcgtgattggtctttcccagggttgggcccataacgaaaggcagttatagattaatgggtaataagtaactggaggagggcac

SEQ ID NO: 366381 - DNA, 573 bp, Homo sapiens
aacattctcactgtgatgtgtttctttgatttttagttgtgctgatcatcttttcatattctcatgatccgttttaattctttgaatttctggctatattctttttcccattttttggtgggctttttctttgttatttgtaagaattttgttttatatttggagacataataagagcaaccatccatatttcattaaatcctcaccacgactccataaggtaaatattattgtttytggagatgagaaaacaaacaggaagtagtagaagcacacaaaaaatgttaatatctataaaatttacctcttttccctcgtctttcttggtttctttgcaagcatataaaggctattccatgttaacattataaaaatattcatcaatatattcttctagttgttccatggttctattttattttgtacacttaagtctttgatctgttatggaagaacatgttcttccttaatgtgcttctttttcactttctctattgtattatttttagcacaagaggttttaattttcatgatgtccaatttatttctttttgtcacttgtgctttttggtg

SEQ ID NO: 366382 - DNA, 558 bp, Homo sapiens
ctggacagggatcatctagcctgcagcctcagtgartaatcattccctccttgatgttctcatggtacatttttcctcttattgctacgtcacattttgttgcaattaaaagttgacacatttgtttctcccatagtctgtgaactccttccactccttcccgtcatactgagtcctcctagtgcacactcctctgtcctgtctttcacagagttagaactcaatgaatgtttacaaaattaaaccatgaaaatcattggtctacacacagacacacacacacacacacacacacacatacacacacacacgggccttaaagtaatggacacatttcatgtacttgctcaaatgatacagactgatactgccagccatgctgaggtcgtgcactgcccagcctctaggggtacagagatgaagagtaagttctcatcaaggacctggctttggaactgggttttgagtaattccaggcaactggaagaggaaggcccctcaacactccagacagcaggaacggaagaagcaaagatgtggaattctgggcatgtgtgg

SEQ ID NO: 366383 - DNA, 619 bp, Homo sapiens
atcagaaatgaaaaaggaaacacagcaactgacaccacagaaatacaaaggatcattagcgattattgtgaactctatatgccaacaaattagaaaacctagaggaaatggatacatttccaaacacaaacaatctaccaagattgaatgaagaagaaatagaaaacctcaacaaaccaatataagtaacaagattgaagcagtaataaaaagtctctcatcaaagaaaagcccaggaccagatggattcactrctgaattctaccaaccatttttaaaagaattaataccagttccactcaaactattacagaaaaatgaagaggagagaatacttccaaactcatcctgtgagaccagtgttaccctgataccaaaaccagacaaggacacaacaaaaaaaaagaaaactgcgggcccatatctctgacgaacatagatgcaaaaatctcaacgaaacaccagcaaaccaaatccaataatatgttaaaaagataattaatcctgatgcatttattgatatattgatatgaatacattgacagaatttaggacagaactcatatgttgtagatgctgaaaaaacattcaacaaaattcaacgtccctttatgataca

SEQ ID NO: 366384 - DNA, 561 bp, Homo sapiens
tattcaaccataaaaaaaagaaaccctgtcatttaccgtaacatgaataaaactggaggacattatgtcaagtgaaatgagtcaggcacagatagataaataccacatgttctcactcatatatgggagctataaaaatggtgagctcatagaagtcaagagtagaatttcggtattagggtatrggaaaggtaagggcaggggaggatagggagaagttgattaaaagatacaaaattacagctggagagaaggaataagctcttgtgttctatagcactgtaggttgtgaatatagtcaacaatgattgattgtatattttcaaaaaactagaagaaacagttttgaatgcttgcaacacaaagaaatgataaatgtttgcagtgttggatatactaattaccctgattcggtcattacacattgtatatatgttttgaaatatcactttgtattctataaatatgtacaattgttatgtgtcaactaaaaataaaagggggaaaacgcaaatgcaaatccaaatccaacaaaaataataaaactttttataaataagc

SEQ ID NO: 366385 - DNA, 474 bp, Homo sapiens
ggccctggggagagcactcctccttcccggggactggatgacttgcaggataagaaattggatttccactagcacaatacttacaagataaagaacatcaaagacaggtaggagaggaggcaccctgatttcctaaaccaaaagtggagcccaaargatttccctgtcatttatagctaggagagatgatccagatcataggtacaacaatgaaatattggcctttgggaaatctttctatgcactgcaagacaacaggaacaaaactcagagacatctagggccaaggttgcttaagtggaatttccactccaagtttgcccatccagccaaatgggagttcctcagcctgtgcttggacacctccaatacgagggagctcattactctcaggaccagcctctttctacttcatggaattcagatggttagaaaatgagctttcttatcatgcccaacatttcttcctcataa

SEQ ID NO: 366386 - DNA, 474 bp, Homo sapiens
ggccctggggagagcactcctccttcccggggactggatgacttgcaggataagaaattggatttccactagcacaatacttacaagataaagaacatcaaagacaggtaggagaggaggcaccctgatttcctaaaccaaaagtggagcccaaaggatttccctgtcatttatagctaggagagatgatccagatcataggtacaacaatgaaatattggcctttgggaaatctttctatgcactgcaagacaacaggaacaaaactcagagacatctagggccaaggttgcttawgtggaatttccactccaagtttgcccatccagccaaatgggagttcctcagcctgtgcttggacacctccaatacgagggagctcattactctcaggaccagcctctttctacttcatggaattcagatggttagaaaatgagctttcttatcatgcccaacatttcttcctcataa

SEQ ID NO: 366387 - DNA, 611 bp, Homo sapiens
gatatgtgcaataggatctttgttatgtactattttcatgaatgactagatgtgtacagactagttcacttcattttagcccctcaaatggggaaagtagttgaaaacaaggggttaggaaaaagatttaaataatccatctgaaaattaaaaaataattaattcttagagacaaaaagaaggaagctcattaaacacattttagaaatctgtctcttaaaaagtaaattggacaaagatgaaaattttcataaaataaacactagatttaaaaattggattccaggaaycttttgaacattattctagggtaggatcaacagctgaaaatggactctgattttaattaggagccacaaatgaaaatatatatatagaaaatcgtgaatttagaaggtaacattttctgataagtaactgagccataggaaaaaaagaagctagaaataaaaataaatatacagctctataaatgaaacaactggtcccccaaataaaaacaagactctaagagcctctgtagtctctaagaatcatgaggttataaataaggacacctgtagattttgaggagaaagacattggaaaagccaatgccgtctactgagggt

SEQ ID NO: 366388 - DNA, 611 bp, Homo sapiens
gatatgtgcaataggatctttgttatgtactattttcatgaatgactagatgtgtacagactagttcacttcattttagcccctcaaatggggaaagtagttgaaaacaaggggttaggaaaaagatttaaataatccatctgaaaattaaaaaataattaattcttagagacaaaaagaaggaagctcattaaacacattttagaaatctgtctcttaaaaagtaaattggacaaagatgaaaattttcataaaataaacactagatttaaaaattggattccaggaaccttttgaacattattctagggtaggatcaacagctgaaaatggactctgattttaattaggagccayaaatgaaaatatatatatagaaaatcgtgaatttagaaggtaacattttctgataagtaactgagccataggaaaaaaagaagctagaaataaaaataaatatacagctctataaatgaaacaactggtcccccaaataaaaacaagactctaagagcctctgtagtctctaagaatcatgaggttataaataaggacacctgtagattttgaggagaaagacattggaaaagccaatgccgtctactgagggt

SEQ ID NO: 366389 - DNA, 611 bp, Homo sapiens
gatatgtgcaataggatctttgttatgtactattttcatgaatgactagatgtgtacagactagttcacttcattttagcccctcaaatggggaaagtagttgaaaacaaggggttaggaaaaagatttaaataatccatctgaaaattaaaaaataattaattcttagagacaaaaagaaggaagctcattaaacacattttagaaatctgtctcttaaaaagtaaattggacaaagatgaaaattttcataaaataaacactagatttaaaaattggattccaggaaccttttgaacattattctagggtaggatcaacagctgaaaatggactctgattttaattaggagccacaaatgaaaatatatatatagaaaatcrtgaatttagaaggtaacattttctgataagtaactgagccataggaaaaaaagaagctagaaataaaaataaatatacagctctataaatgaaacaactggtcccccaaataaaaacaagactctaagagcctctgtagtctctaagaatcatgaggttataaataaggacacctgtagattttgaggagaaagacattggaaaagccaatgccgtctactgagggt

SEQ ID NO: 366390 - DNA, 584 bp, Homo sapiens
cctcacaaaacccttgacagccaagtgactctagctgcagctggatttactcggcctctgttgggtccaaggtggtgcctgagacacaccactcaaaaactctagatccatggagagaatgaggtctcgagagtggaacctcagctttcactggcctcaccattctgcagccccagtcgagacccgatggaaagccgggttttccatcaaaagcctctgcctcccagagcccagacttccctttgcctccctggcagggtcccctgagtgccccccatttccaggtctctgccctgttaccttggaccgggtatcagagatggtgttcttgactacccggatagccaggtagatggccctgatactcatcctgggctctgaaagaggaaaactgggtgggctggagggctgtggctcagggagaggtcaggtggctcgtcccacatcagkgcctcacgttctgtctcctcccacattctccaagctcaggggcactttcttaggagcctccctggccatgctctccctggccatctccctcccctctgttgtttccacgcctcgttcccttggccactgctttg

SEQ ID NO: 366391 - DNA, 584 bp, Homo sapiens
cctcacaaaacccttgacagccaagtgactctagctgcagctggatttactcggcctctgttgggtccaaggtggtgcctgagacacaccactcaaaaactctagatccatggagagaatgaggtctcgagagtggaacctcagctttcactggcctcaccattctgcagccccagtcgagacccgatggaaagccgggttttccatcaaaagcctctgcctcccagagcccagacttccctttgcctccctggcagggtcccctgagtgccccccatttccaggtctctgccctgttaccttggaccgggtatcagagatggtgttcttgactacccggatagccaggtagatggccctgatactcatcctgggctctgaaagaggaaaactgggtgggctggagggctgtggctcagggagaggtcaggtggctcgtcccacatcagggcctcrcgttctgtctcctcccacattctccaagctcaggggcactttcttaggagcctccctggccatgctctccctggccatctccctcccctctgttgtttccacgcctcgttcccttggccactgctttg

SEQ ID NO: 366392 - DNA, 613 bp, Homo sapiens
ctgagagaggataggagcctggagtggggccatggggtgggacaggggaggagagagtgtcagcagtcatggagtggcaggggagggcaggggagtcacccgctctgctcctaggtggtctgcatggagtttagctgcgatgaggtggtctcgctcatccagaagctctgcgagaacactggggccatgaacctgcagcatgacaaggcctctgtcacctggatagcctycttcctccagatgcgggccaaggagctggaggacaaggtggcagagccgcggcagggccaccagagagaggggggggggctgcctggtgtgcccagatgaagagggaaggacgagggcctcaccagcactcgctgagaatgcctcccccaacccctggctgctaaagaggaggaggaaacagagttctagagctagaaagaagcgtgttgaaggtagcctcgttagttaagtgcacgctgacctggagatcaaggttctcctccccagagcacaccacctcctgcactgaaagcctgggaaaatgagtttgaggcagagaccagaggatgcactagagagggtgctgggcgcttaacctccccattgtccaactgggccagag

SEQ ID NO: 366393 - DNA, 605 bp, Homo sapiens
ttcccctgttgctgttggtagccatggagaccttctgtgagacggtgcagttttatctgaagcacctggaggagagcgtgtaccccgtgatgactgaggaggagtttgccctgaaggtgttccccatgtatcgctacttcgtgacagtgtggctgaggcacyacaaccccgaggtgagatgcacccctcttaggagggcctggtggtccccaggccacagctccccagcctgtggggccgggaggtgctgagggaccgtcgggtccacacttactcccaggaccctagagggcagtgacctgactcatggcagagccggggaactcatggatgctgaacagctgggacctaggagcctcatccacgaggccaggcttgatgaaggttggtgataatcctgagagcacttgttacatgctgggcactctaccagcgtcttacccatgggagctattttcacacccactctgtgatataggactagttgacaaatgaggaaactcaggcacagaggggttaagtacctgctcaaggtcatgtggctgctaagtgggagggactcaaacccggccgcctgtgcaggaaagaccttgctctgcttctga

SEQ ID NO: 366394 - DNA, 421 bp, Homo sapiens
ctgaatcattgcatcggctgccacctgaataaccccacctcaccaccacttctggaaccttggtcagcagcttcctgggcacagaaaattcagagtcctctgccttgctctcaaaactctgggatagaccccagcccacctgtccaagctcattcctcctctctagcccttctgcttgccccctccctctgcctcttaccctctagccattctggatcccttgctgttccccaaacttcctttgatgttctcaaattgctttgttcamactgaactctacccttggccagcttactatgactgttcattgcgtgcttaccaagtgccaagtccgggtttcaggttatgtaactagaggttatataaactcagaagtttgttctggtgagataacacatcctcattacacctaatacccttt

SEQ ID NO: 366395 - DNA, 377 bp, Homo sapiens
  misc_feature (1)...(377): n = A,T,C or G
gtgggaacctgtctccctcacacgctgatagtaagtttggggatgcagtgtggggatttcttaagctatttgtccagggtagcagtgcaggtggtgccccacacagatccncctgtgtacctcttcagtgacaagggcgtgtgttttttctcgtcagctctctctgtcagcgccccctttgtggcgctaatggaagggcagagaaattactactacctgggagtacgtttcaatccctgacgaggcaagtactcargcacccaacagccgtgttcctcattgggataagtctggggtgtcttttctccactggctcccagagtcacccagcaggattaagctccgattgaccacaagagagccagctgtggatgacc

SEQ ID NO: 366396 - DNA, 381 bp, Homo sapiens
tggaaatttatttagatagggaactaatacttttactaccattttagtggtggaaactgaactaattcttcatctaaactcatttagctgaaaaaactgagcaagcttctgatgctgttgaacttttaaaatcacacagctggccaggaacaaaggcaggcctcaagctggcctgatttctgagtctagtaacaaccactacactaggcctggatttgccactgatggatattggaaggctctcaaattctccaggcctcagttttctagtctataaagaaacagaaccagattactttccgttytaacagttaaagttgatatttacaattatagcactaatggaatgttgtgaaacattgtgaaaggtcaaagtgaccc

SEQ ID NO: 366397 - DNA, 605 bp, Homo sapiens
ttttttgcaggtaactgtgtagatcagagaagagccattggtctcactttttatcatctgcaaagaatcaccccgcccttgccaggtgcgatggctcacatctgtaatcccagtactttcggaggccgaggcgggcagatcacaaggtcaggagtttgagaccagcctgaccgaaatggtgaaatgccgtctctactaaaaacacaaaaattagccgggcatggtggcgtgtgcctgtaatcccagstactcagcaggctgaggcaggagaattgcctgaacccggcagacggaggttgcagtgagtggagatcgcaccactgcacttcagcctgggtgacagagcaagactccatctcaaaaaaaaagaaaaaaaaaaaaagaagaatcacccagccctgatggcttcctttagacactccctttaccccacctggtctgcactgttcagtacagtagtcactacccatatgtggttatttaaatttgatccattacaatgaaataaaatgagaaattcagtgcctcagttatactaggcatatttcaagtgcccagtagccacgtggttggcagctaccatactaaacagtctggaaagttct

SEQ ID NO: 366398 - DNA, 548 bp, Homo sapiens
gaccactcaaaaataggtactgactaacgtcaatgtatactcagtgaaagcattttcttatcctcagcttttcccaatttaattcttcttctcacctaaccaagacgttaaggggatttctttrggagacaccctttctaaatatatttgtgaaagtaaaaaacagaaagaaacctataaataaagcacgagaagaaacagcaagaatcccagaaacagagatggggtaggagagattgaagccattacgctagaggaaaagaacttacttagaacttcagtggaattttatgtgcgtaagaaaatcaagtcggaatttaattttgaacttaacaatcttaaatttaatttaatagcattttagaagatgataacatattttctttagcacatgccaaatgccatataaatatctcaggaattgtctgtttcagaacttcttaagtccatgttatttagaacttaggtatgtattttattttaccatctgtccttcccccaacctctgacttctctcctgaatcctacctgaagaatatgttctgctt

SEQ ID NO: 366399 - DNA, 536 bp, Homo sapiens
caatgttgccaactaaaagaatattcagtacatgcagcaaaagtttttttaaaaagcagcatgccattatactytgggaattaatttttctccatgattacttcctgtgcataaagaatcagctagaagtgtcttcattgctgcaaaacatgaacaaaaataaacaaatgcctagcagcccagagaccccatctgtgcacacgaaggagtactgtgtggctattaagtgctgctgtttaaagagaatgaaatcaacaacagctagcctttagtgagccgtttgtatagtcagaaactattctaagctttacacaagactgatcctctttgttctgcctaagtcaacaacaacggttagaggaacaccaatgaatcacccaactagttttcacataaagtagtggttcaaagagccacttacttgtgccctgactcatgagcgatggtgaaggcaaggccaagtcctgtgtcctcattgatggtacaacttcggtacttagagcacattccactgatgggggcaaaccctattgaaa

SEQ ID NO: 366400 - DNA, 536 bp, Homo sapiens
caatgttgccaactaaaagaatattcagtacatgcagcaaaagtttttttaaaaagcagcatgccattatactctgggaattaatttttctccatgattacttcctgtgcataaagaatcagctagaagtgtcttcattgctgcaaaacatgaacaaaaataaacaaatgcctagcagcccagagaccccatctgtgcacacgaaggagtactgtgtggctattaagtgctgctgtttaaagagaatgaaatcaacaacagctagcctttagtgagccstttgtatagtcagaaactattctaagctttacacaagactgatcctctttgttctgcctaagtcaacaacaacggttagaggaacaccaatgaatcacccaactagttttcacataaagtagtggttcaaagagccacttacttgtgccctgactcatgagcgatggtgaaggcaaggccaagtcctgtgtcctcattgatggtacaacttcggtacttagagcacattccactgatgggggcaaaccctattgaaa

SEQ ID NO: 366401 - DNA, 590 bp, Homo sapiens
acttaactttaaaccatgtggttgtcaaggccagtctcaagagatgatcagatacagtggtttttaaaatgtgtgttacagaagcctcaggatcttcagaggatttcagtgctgaaatggggcaaggacaggctgggttctggtcccttcactcctggcttcagtgaaagaagctctccttttatgttttgcttccatgtaaaatttttcaatttgaaagaagattgcaacgaatgaattttatcattggatgttgttcactccatacattttcttaaacatcccacgatgttccagacactgtgccaattgtggaagctacaagtataaataagtcattgtctgataacatagggtttgggggtgctctaraagtacttcaggacagtagtatagacacagtggaagacattagttcagtctggggaaatcatttctgaaatgaggaaactgggaccctgatcatttcagtgatttttccaaagtcacatagtttgtagcagagcaacctatatcccagctatttatgcagatgcttcttgtctaacccatgttgcttcccaaaagaatggaatccacgtaccaatgct

SEQ ID NO: 366402 - DNA, 558 bp, Homo sapiens
gtggcctccaaatctcttctggcttgtagggtttcagctgagaggtctgctgttagtctaatgggcttccctttgtaggtaacctgacctttctctctagytgcctttaattttttgtttgtttgtttgttttttgcattttgacattgaataatctgattattatgtcttgggaatgatcttcttgatctatcttactggggttctctgaatttcctgaatttaaatgttggtgtctctagctaggttagggaagttctcatgaatgatagcctgaaatatgttttccaagttgcttgcactctccccatctttcaagaacactaatgagtcatagtttctatctctttatataaatctgtgtttcttggaagttttgttcattccttttcattcttttgtctctattcttatgtgactgacttatttcagaaagctggtcttcaggctctgagattattttctcagcttggtctgttctattaatacttgtgattgcattatgaaattcttgtagtgtgttttcagctctatcaggtaagttccagtcttttctat

SEQ ID NO: 366403 - DNA, 531 bp, Homo sapiens
ccaagtcacaggtattttgctatggcatcagataaaagactaagacagtagtcattcccatttattttttgaatccacaccaggctgttccaaagtcagttcacaactaccttcacacccagttcagtctcctacaatccttatcacctactcaatagcccaagcaatatccatctagraggaaagaataaataaccactgcccatctgatcactgatgaaaccaatatggttatcagttaagtaccatgccacattttgaagaaaataatgtggctgcacagccgagaatcaaggatgtgtttgttcactgtttgtgtggtaaactgaacaaaataccatttggggcctagaattagtgttcaacagtgaaattgttaacaaaaaataagaaatttttgctcacagtgactggaatttaaataccaaatttgttgcatactatctgcctggacttgagccacctaatttgctgctactctccatgtctgttaccgtttctatatatttgggatagtaattcatatttcac

SEQ ID NO: 366404 - DNA, 466 bp, Homo sapiens
aatatgtttgctaaatttaactgccacaaatatatccagtgactgttcatgtataatatatggtattttattgcacagacatagttaaaacaatgtttcaagcctcaaagcaaatgaaattaccatgcacttcagatgactgtgtgagaaagacattcatactgctattttacagatcagttaagttcacagagggtcagggaaatgatgtgaattcccaaagggcaaaagacttaccttaagacttacacctatatcatataattagcctcaggtgtgtaaaaaggacctcagaataatcctcagtccatggtatattaccatcatggggcccctcttgtattattttccttccctgatccgtttctcattcctatcacttttaaagtgctctaataaacacagwatgtctcagattccatgtcaaataaaaacttgtgaccccagctgtcagcagatagactcc

SEQ ID NO: 366405 - DNA, 580 bp, Homo sapiens
gtaggagggatagataatttggctgagaaagacagtaagggtttttcttagactatgactaataccaaggaaccagagaatgaagaaaggagtcattgctcttcctgggataatcgaccacatttattaggakctagggctgctaatacacagaataaagggagaaatacatctggaattcagtagattcattgaatatctcttgatggttccaatttcagcaataactgtgaatagggcaattcaacaactgtaacctgacaaaacaaggcaactaacgcttcagaaaccatgaggatgaaggtccatgctattctacaaggcaaacaaccaggggaagctaaatgctaccagcaggtatggtgaatgtagaatggcttatggaggcagagatgataatttgtagtcctgagagagctgcagcagtgaagactgtaccttattttttaatcattgttaaccattttattgcttctttcaaggatgaagtgagagtatctccttctcagatattcatatagtaccagatatcatagaggacactagatatgagtagtgaaatggattgatttttgcactt

SEQ ID NO: 366406 - DNA, 569 bp, Homo sapiens
agaaataacccgatgttgtgcagggtggtggattcctggaccaggcccacaaaacagtttttccctcctagacctcaggacctgtgatgagaggggctgccatgaaggtctctgaaatgccttcggggcattttccccattgtcttggctgttaacattggttttctctttacttaygcaaatttctgcagctggctggaattcctccccagaaaatgagtttttcttttccaccacatggtcaggctgaaaattttctaaactgttacactctgcttcccttttaaatataagttgcagtttcagatcatctctttgctcatgaatataaacatgtgagtttagaagaaaccaggtcacatcttgaatgctttgctgcttagaaatttcttctaccagataccctaaatcatctctctcaagttcaatgttccacagatctctagggcaggggcacaatgcctccaacctcttcacaaatgcataacaaaagtgacctttgctccagttcccaataagtacctcattttcatctgacaccacctcagcctagacttcactgtccatat

SEQ ID NO: 366407 - DNA, 566 bp, Homo sapiens
tgttttacgaatctcagaattaacagatttgaaattatcagcagtctccctctatctctattttatttttgttaccataaatgatcataatttttaatatcatgactttttaactcaatgtttagaaatcaaaatgtccaattgtagacctggcttggtggctcacacttgtaatcgcagtgcttggggggccaaggtgggaggagggcttgaggccagcagtgttcaagaccagcctggacagcayagcaagactccatctgtacttcttttttttttttttaattagccagatatggtggtacaaacctgtagttctactactaggtaggctgaagcagaatgatcccttgagcccctgagtttgcagctgcagtgagccatgatcacaccactgcactcctgtctgggcaacagtgcaagaccctgtctataaaaataataaataaaaaataaataaaaattcccaatttcatttgaatgtttacttaaaaaattcagcaaatatgtatttcaattagcaagacaagaattcaagtgcaacagatttatgcaagtgcaggatc

SEQ ID NO: 366408 - DNA, 684 bp, Homo sapiens
acaaaactctatctaactgggaaatatgtacatacatatgtaagttataagatgaaaaccatgccatctctatttttgaatagaagaacctagaagcatcacttttatgcctattttcaaacaagctcaataatgtagagaggaagtatccttcagcgctgcctttcttctttctgcagtcttctggcatgtactgaaatcaacaaaagcttcaatggcagaagaacatygacagatacgtaggtgacctgagagggactgacacaaatagaataagtattgcacaatgagagtgggaattgctgtcctcgtgacaggctagacaaattggaggaggttttgatgcatattagtacaagatagctttaagttgtatgttgaatttatgattctcaataagagagtgggaggctagatagacatgtaatagatttgatttgggtagaacttagttctaaatgcaatgccacatcactctagatttattattatttttttccattctgaatttctaaacatattgaatttttttattatccagatcagtggatggtagaattgacatagatgcagaaatttcaagaaatgcaaattttcttatatttagctttagtgtgtgattttgtttcagccctagctaaacatttcttaattgtatatattttaggcaacattcaaattatt

SEQ ID NO: 366409 - DNA, 606 bp, Homo sapiens
attatcaattcttttaagaaataaattttgaggagttgtggcaagacaaaatacatatcataaaatattacagtgaaatccacaattggcttttgactagtagaagttttaaatatgttgttcataatctataataaacagttaaagaaattaccagagaaagacacttacaaagctcaccaaaccaggatttcagtgtggattttgtctttatcaaatgaactttaaggaacaagtttacaattaaagtttaaatggaagagtccaccattgctaagttttcaacatatgctggctaaacagcttatggagatgtaggctcaacaaaggaatgtaaacagcaacaacaagatgtgggacaaaaatggcakactcttccattcaaactccagttgtaaacttcttgttgctatttacattcttttgttgaggccatatcataaactttttagtcagtatatgttgaaaatataggtttcatggtcaaggcagaatcagaggccatggatacgtatatctgacgtgtctgttttcttccattttttttgtcataactatatctaatgcctcatcttgattcataagccaaacctggaaaacctgtaa

SEQ ID NO: 366410 - DNA, 606 bp, Homo sapiens
attatcaattcttttaagaaataaattttgaggagttgtggcaagacaaaatacatatcataaaatattacagtgaaatccacaattggcttttgactagtagaagttttaaatatgttgttcataatctataataaacagttaaagaaattaccagagaaagacacttacaaagctcaccaaaccaggatttcagtgtggattttgtctttatcaaatgaactttaaggaacaagtttacaattaaagtttaaatggaagagtccaccattgctaagttttcaacatatgctggctaaacagcttatggagatgtaggctcaacaaaggaatgtaaacagcaacaacaagatgtgggacaaaaatggcagactcttccattcaaactccagttgtaaacttcttgttgctatttacattcttttgttgaggccatatcataaactttttagtcagtatawgttgaaaatataggtttcatggtcaaggcagaatcagaggccatggatacgtatatctgacgtgtctgttttcttccattttttttgtcataactatatctaatgcctcatcttgattcataagccaaacctggaaaacctgtaa

SEQ ID NO: 366411 - DNA, 573 bp, Homo sapiens
tggaagtttgaggatttcttgcaaagttacacatacacttaccayacggcccagcaattctacttctaaataaagaagttgtgttggttaatattaagtgtcaacttgatttcattgaaggatgcaaagtatcgttcatgggtgtgtctgtgaaggtgttgtcaaaagagattaacatttgagtcagtggactgggagatgcagactcaccctcagtgtgggtgggcatcatacaatcaactgccagcaccactagaataaagcaggcagaagaagaggggagaagctgacttgctgaatcttctggtcttcgtctttctccccgtgctggatgcttcctgccctcaaacatcagactccaagttctttggcttttggacccttggacttacatcagtggctctcaggccttctgccaaagacttaaggctgcactgtcgtcttccctgtttttgaggttttgggactcagactgagtcactacttgcttccttgctcctcaacttgtatatggcctgttgtgtgaattcaccttgttatcctatgggtcaaatctccttagtaaactccctt

SEQ ID NO: 366412 - DNA, 591 bp, Homo sapiens
aagataaaagtataactagataagtcctttatttatcatgaaccatgaattatataaaattgtataraaattaggaaaaagataaaaactataatgtagatgatacagtttacttacttttattgcaataaactaaagaaattttgatgaacaactggcacagatctataaccatggccagacagaatggcttaagactaataattctttccaccaataccaccaaaaaattatcattttgggtagctttcattcagtttttacctaatttaacaacaaaacaaacctactaattaatgagtcaaagaatatactttataactgtttcatcttgaagttttgacaagataccacatagttcaaattttgtggacgttcctcctttaccgtcttactccccatccccttcacccttccacctttccaccctcccacctttcctctctctctccatctctctttatttctttaattcactattagagattagaaatgaccaaattctccatgaaggtattgagcaatgtctgttttacataacagtttgcattcaactcttggcacacaaaataggtattgaatacatatttg

SEQ ID NO: 366413 - DNA, 591 bp, Homo sapiens
aagataaaagtataactagataagtcctttatttatcatgaaccatgaattatataaaattgtatagaaattaggaaaaagataaaaactataatgtagatgatacagtttacttacttttattgcaataaactaaakaaattttgatgaacaactggcacagatctataaccatggccagacagaatggcttaagactaataattctttccaccaataccaccaaaaaattatcattttgggtagctttcattcagtttttacctaatttaacaacaaaacaaacctactaattaatgagtcaaagaatatactttataactgtttcatcttgaagttttgacaagataccacatagttcaaattttgtggacgttcctcctttaccgtcttactccccatccccttcacccttccacctttccaccctcccacctttcctctctctctccatctctctttatttctttaattcactattagagattagaaatgaccaaattctccatgaaggtattgagcaatgtctgttttacataacagtttgcattcaactcttggcacacaaaataggtattgaatacatatttg

SEQ ID NO: 366414 - DNA, 556 bp, Homo sapiens
tattttaattctattaaattgagtttctactttggattttaaaaatctatatttcagaagttggtacactcaacaagcatttaaaattcttcagaatatagcaaagctagtactaaagacacattttcacgttaatggtttctgtcactaccttatcaccgaaaaataaatgacaaatataaaattatttaaatttaatttacctgaaacattttttattatagaataaatgaggcaatacagaattttgttcatttaactcccacttcaactcrccttattattttcatgcaatcttcaccagttttaggagacaggtctttggttaaatagaaaacagaaaaagtaaaaaattctgttgacacaaaaacatcaggttatgttataaaaagaagtttctgaccccatgcagacaggtacagacaatggaggtgggaatgaaatgttctaggagtaaggggaataaaggaaaaatcaatgttcaagagcctgattagagattcaggcaaagtaaagaacttctaaaaattataccgtgttctctgaatatttatga

SEQ ID NO: 366415 - DNA, 502 bp, Homo sapiens
cccactctctggcaatactatattttgggagtactatgatttcctagaacatcaccatcagatgcatccatttcctcctaatagtctctttcttacagtcacttttctctcataatagcagtagattttttcctttcactcttatcctcacttactagcactatctacaataatataaattatcatgagttactcaggaaataggcagaagctaaatcttattactgcccttatttttttatgtggagaaactgaggcaacatggtagaaaatttcttcaatggtaaaagtaaacttgacaatgcacctgaaactattaatgcacctggaactaatttgcacatattttttttcaattacatttrtttagttagtgaatgaatggatcaatcaatatttccactgggctaaacaaaattttatttatttaaacatactgaaagtgtcaatcaggctgaagaatatttcagaaattctaggaacaagacagagatagctccta

SEQ ID NO: 366416 - DNA, 491 bp, Homo sapiens
atcaatatttccactgggctaaacaaaattttatttatttaaacatactgaaagtgtcawtcaggctgaagaatatttcagaaattctaggaacaagacagagatagctcctaagtggtagatcattcaaaatagagctcagaaagatgagggcatttttaatactcagaatattaacaggcatgataatagagccttcatcttaaagttatctatctatcatctctatctatctatctatctatctatctatctatctataaaatgatacataatgatagaatggtagctactcttgactgctttataaaacaattttcttaagtatttgaaatataaatgtttaaattaatagccacactagccctttgagggttaagtctttttatcatcattttacagatgagaaaatgaagactagaaagttttagtagcctacagtatctttcaggtcagagaaggctatgctgtgataacaaataacactgaaa

SEQ ID NO: 366417 - DNA, 443 bp, Homo sapiens
gttgtcctcattatggcaatccaattattcaggctaagggagattccaaagcctgtagcccaaagcatgtgggytcctaaagaatcaaccactggctctaaaaggttcccactaaaaagtaatacacatcatgtctactcatgtttcattagtcaaagataggttcaagttcattcttatcttcaaggggataagaatcacaatcttctgctattgcctaggagaagaagagaactacatatcagtagagattaatagtatctgccacaatggcctgagtttatctatccaggcagtagaagaactaggatcccagcacagatatatctccaaattttatgctcttaatcactgatctgtctatcatttcttaatgtgtattagttagaaaataatttttaaacctatgggaactcagaacaagaatacttcaaaaaaaggaa

SEQ ID NO: 366418 - DNA, 583 bp, Homo sapiens
gttcgtaaatttatagggggaatacaaccataagctcagaagtttgaatgttcttacatggcaataacatggagcatattttcattcctttaattttgttttgcaaaatggaagtagcctgaaaaataaaggagaaatttaatcttgatttacataaataaatctagctatttattttctcctatcaaaattaatggagactaaaaacttagacaaaataaaacagatcmctccgtaagaattcttaggtctttctcctttttttttgagatgggggtctcactctgttgcccagtctggagtgtagtggtgcaatcttggctcactgcaacctcttgcctccaatcactccactgcaaataattctcctgccttagcctcccaagcagctgggattacaggcactcaccaccatgcctggctaattttttatattttcagtagagatggggtatcactatgttggccaggctggcatcaaactcctaacctcaagtgatccacccacttcagcctcccaaagttctgggattacaggtttgagccaccacgcctgcctgtaatagtcttctgacagtcactc

SEQ ID NO: 366419 - DNA, 583 bp, Homo sapiens
gttcgtaaatttatagggggaatacaaccataagctcagaagtttgaatgttcttacatggcaataacatggagcatattttcattcctttaattttgttttgcaaaatggaagtagcctgaaaaataaaggagaaatttaatcttgatttacataaataaatctagctatttattttctcctatcaaaattaatggagactaaaaacttagacaaaataaaacagatcactccgtaagaattcttaggtctttctcctttttttttgagatgggggtctcactctgttgcccastctggagtgtagtggtgcaatcttggctcactgcaacctcttgcctccaatcactccactgcaaataattctcctgccttagcctcccaagcagctgggattacaggcactcaccaccatgcctggctaattttttatattttcagtagagatggggtatcactatgttggccaggctggcatcaaactcctaacctcaagtgatccacccacttcagcctcccaaagttctgggattacaggtttgagccaccacgcctgcctgtaatagtcttctgacagtcactc

SEQ ID NO: 366420 - DNA, 545 bp, Homo sapiens
atcctgctaaactatgtcaactacttcttagttacctggggtaacgtatttggtttcactcattttagggcttttctaagactcacctgaacagtgtcttaacatgtaggttcaacacttgcctgatttctccacttcagctctaccagttccagagctasccgggaaaggcaaagatttggaccagtaattattaattattgttataaaattaactgattctatacattcataatataattatccttatcatataagtattaaattcaatttctcctttatataatacatttgacatgcctaattttaaaaaattctgactttgtcatatttgctcatttagtcattaaatgtgggcagttatctgatattcctagattatccttgactttcagtttaatctatatactgtctcatcataatttatttctatacctctgatgtctctattgttagagattcttaccatgtaagataataattctttattcccaattcttcaaaatataaacatgttcctatgggaggttttttttttaattgta

SEQ ID NO: 366421 - DNA, 334 bp, Homo sapiens
caatggaaacacttctagttcatggattaaatgtcttttcctgcttcatcttagagggacattttccagtttctgttttttatccagcttgcagcagaaaaaaaagtttccatagagtaratatttttctccctccattcctattatctcgagacacgtccagatctctgattgcctatttcttatataataaaacttttcctcaaatgaggaaggaggaaataatacttaaattatgagccatatgtacaaaaaggttgtagggattttaactttgattatgacagagctaggagaactttgcattgaaaggtcacaaagtttattcatgata

SEQ ID NO: 366422 - DNA, 571 bp, Homo sapiens
aaatcttttcaccatagtcacaggaagtttcaatgtatgtactagcggtacattsagtaactgtgtgggaggatgaaaaagaaaataagatgtagtgctacttttggcatggataaataatgtgtttttattttccagtatatcatgctgctttctgattttatacacatttgaatcaagttaatattttggtttttcttcttaccaatttaatgtatactatagtctttatttgaatatggctgatttttccccaaattcttataaatgtgtttataaaaccaatttaagcatatgtaatacaaaaggaaaggcccaataagacaatgtaatgcacaattactctcactgaaagggaactctgaagatgtggtaaaggaaataagcctggaaaagaaatgggtatatggattactttggaggagttttttatttgctttgctttattttcccccactaagataatcagaatttttaaaacactattttcctattcaaaaataaaagaaaataactaacatgtcagcatcattttaggcctcaagtcattggcccacaatgaagaaataca

SEQ ID NO: 366423 - DNA, 609 bp, Homo sapiens
catttaccagacttaataggcacaattaataattcattcctatgtctttggcatagtctactcgctccagttttataatagaactttctttagcattttcacttaatctattctgggaatgttttgggaacacatttgagcagtgaggattaaaaacaacaccactaccctatagacataaaacatgtattagttaaactactactttatatcaggagtccagaaaactaaagcttataaccaaatccatcccacagcctgtytttcttctttattgtggtaaaatacacataaaatttagtatcttaaccattactaattgtccattgtagtagcattaagtcattcacattgttatataatcatcatcacaatctatctccaggactctttttgttgtaaaactgaaagtttgtgcctattaaacaataatgtcccattctcccctcccccagcccttagaaatcaccattctagtttctgtctctctgaacttgattaccctagatactttatacaagttgaattatacaatatgtattttctgtgagtagcttatttcacttaacctggcatacttaaggttcatttatgttgcagcatgcatca

SEQ ID NO: 366424 - DNA, 609 bp, Homo sapiens
catttaccagacttaataggcacaattaataattcattcctatgtctttggcatagtctactcgctccagttttataatagaactttctttagcattttcacttaatctattctgggaatgttttgggaacacatttgagcagtgaggattaaaaacaacaccactaccctatagacataaaacatgtattagttaaactactactttatatcaggagtccagaaaactaaagcttataaccaaatccatcccacagcctgtctttcttctttattgtggtaaaatacacataaaatttagtatcttaaccattactaattgtccattgtagtagcattaagtcattcacattgttatataatcatcatcacaatctatctccaggactctttttgttgtaaaactgaaagtttgtgcctattaaacaataatgtcccattctyccctcccccagcccttagaaatcaccattctagtttctgtctctctgaacttgattaccctagatactttatacaagttgaattatacaatatgtattttctgtgagtagcttatttcacttaacctggcatacttaaggttcatttatgttgcagcatgcatca

SEQ ID NO: 366425 - DNA, 591 bp, Homo sapiens
agtcacagcattggacctatcatctagacagaaaattaacaaagaaacattatgttgaaactctactatagaccaaatggacccaacatacatttacagaacggtttatccaacagctgcagaatacacattcttctcatcagcacatggaatattctctgggatagaccatatgttagaccataaaacaaatctcaagtttaaaaaaattgaaatcatatcaagcatattttctgaccacaattaagtaatactagaaatcaataagaagaaatttcaaaaatgtacaagcactttgaaattaaataacatgttccatccaatggatcaatgaagaaattttaaaaagcattaaaattgcttgaaacaaataaaaatagaaatacaacataccaaaacctactggatacagcaaaaacaggaccatgaggaaaatttatagcaataaatttatacatcaaaaaagtagagtttaacctactgaggcacctcaaggacctagaaaagccagaacaaaccaaaccccaaattagtaaaasagaagaaagaataaggatcagagaataaataaataaaattgagaatgaaaaa

SEQ ID NO: 366426 - DNA, 496 bp, Homo sapiens
aacaaaaggcagagatattcagattgcatgaaaaaaacatgactcaaatataatctgcctgtaagaaatacagtttaaatatataaacaactgaaaagcagtagtgaccaaaacaggattgtactggtataaaaacaaatacatagactaatgaagtggaataggaaacctagaaatatatccatatatatagccaactgatttttgacaaaatygccaagaacatgcattgggaaaggaatagactctttaaatatataaacaacattaggttgaagtaaaatgtggacaactatacataataataatgctatttgaaagaatatgtacagtggctatattagcaaggagcaacgtgaattcaaagcaaaagtgttaccagggataaggtcatttaataatgctaaaaaatcaatcccttgataaaacatcataatcctaaatgtttatgaatctattttcagagcttcaagatacatgaagcaaaaactgatgg

SEQ ID NO: 366427 - DNA, 500 bp, Homo sapiens
tccataatagctgcaccattttacattttgccaacaatgcacaagcaatccaatttctcctcatcttcatcaacacttttttaaacttatagggctgggtgtggtggctcatgtgtataatctcagcactttggaagaccgagacagaagatcacttgagctcaggagtttgagcctgggcaacatagtgagacctcatctccactaaaaattgaaaaaacaaacaaacaaacaggcatggtggcatgcacctgtagtctcagttactcaggagactgaggcagaaggatcacttgagctcagaagagtgaggctgcagtaagccaygatcacgccactgcacaccagcctgggtgaaagagcaaggctctctctctcaaaaaaaaaaaggaaaaaaaaaagaaaaaaaaggtagtcattctattggatgggtgtgaactgttacctcattgtacttttgattttaatttctattttatcactaatcaataccaatgctt

SEQ ID NO: 366428 - DNA, 445 bp, Homo sapiens
gtggggaagctaagaatcaactgtaaagattctaacccaaggatgtagtactgttaaaggactgagatttagtagtaaaattatatcacactaacccttcctcaaatcttaccagcatacaccaacagggctgcagtagaaaagcagtgtattacaaaaaagacctgcaggatgtagactttgtttaaggagagacttttagggaagctcaaagacaacaggggagacaaaatcaaaaacagtagtggaatgtatagtttctgatgcctacagttacagaaaacattaagcaagcccagcttcaggccagattaacatacaaccatatattaaaaatctatttaacccaggttctattatccaatacattatgtccagctttcaacaaaaaaattrcaaatcatgctgaaagacaggacaaacataatctgaagacacaaagcag

SEQ ID NO: 366429 - DNA, 585 bp, Homo sapiens
atggtgctccatatatttttgttaaagaattgaaaaaaagaattaaaatatatattgtaattcctcaactgccaagtagctttaacattgatagagytcaaaccaaacaagacaaattttgatgcttaggtataataagatacattttggctcttaatttgctttggtagtacataaattgattgccatttaaatggaaaaataatagtttcaaatatcagtctctagagaaacagatttacagaattctaaccaggtggaactctaaagaaatgagttgaaatagctccatggtagaaatataattaaaaactagtattaacttttgtgtgtatcacacattagggaactctaagcaataagtatgtcaaaaataaataagatctaacatccattgagattaaagtaataaaaatcaacttcataaaaagagaaaaatgtattaaatctctgactatatttacaaataattgttataaagtattatacatttcatattataaaaatgtggaaaacaaatggaaaatgtatgcgagatatttatatcttatcacaaataaatcgctcttcagtgcttgaatactc

SEQ ID NO: 366430 - DNA, 602 bp, Homo sapiens
catgagcaaatttcttaggtgccaaatgtattgctatatgccgttttgcatgtgtaaaggtagtctgacttccccttgatgatctaccaagatagtgactcttattgattgcttgttctgtggaatgagtatccaaagttcccaggggttgccataacctaaagcttaagaggacttttactatatactcaggtagaaacatttctctttttggaaacaatatacctaaaccacagggcctacctgggacctgtggttgaacatacccatggctcagcttacatccttgcattcacttggctatattgactgagctgtattcccagataggaatactcttattccagaaacctgagaggcccaccaggtatcgtgctcccttcttcatggtaggaagtgcatgatgcaataatttaamctttcctttgaaggggatgatctggcatgttccagcccactggctcctaaaaaattcctggatagggatgactcctgaatcttcatagctttcattttaccctttctggaggacatgtgtcttcctaaggtcatgaacatacttgccacttgttgctcaaccagtcagattagcatgatgccgt

SEQ ID NO: 366431 - DNA, 573 bp, Homo sapiens
gtgcctcagttcatgactacataggctactctggaagctttcacaaaaagagactgcctcagagctctgtttctgctcagtctcatgaaagagttgtggtttttttttgtttgttttggtttggttttttttttaatcagtgaagaatgactcattatttatcttgagggtgtaacaatgaattgttgtaagatttattcaatgtcttgtctttttttttttttttttcctacagctgtggactcttccaggaaagaagaaatcagaaaacatcaccttttctccacacccaccctcaacttccacttctgtactatagaagcaaaattgattaggctggctaatttgaagagaaaaagatgataggggctttgtgctttagaggtagaagagggtaatagtcaggttcactctgacaaagcccactagagatggtagacccactggtagaaatgrctacctggatacccaaggagagcattaatcatcccatctcatatctgagctcagtactgggggaggggataatcaggtctcaccaaacctggcagccttccactgtacgtgtgggca

SEQ ID NO: 366432 - DNA, 597 bp, Homo sapiens
tatcctgctcagctcctatctgactagctacctactgtaatagtggcatccaaaagtgactcaaaaccaagagtctctattattgtccttgaccattgggtcagaagggccataaaaacagggagatgctgacagttgtatcaatcttgatgaaggaagaaattaacttcatataattatttttagaaaaatagacacgatattttttatgttcastattatagattgattatctctgttaactttatgtaatttatatgccagatacctaaggtatctaataatagtacaagatagaaaaaatttttatacacttcatgagggttctgcaagacctaactgtggtatttacaagaaatatgccataaatacattttttaataatttcaacttttattttggattcagagagtacatgtgcaggtttgttaccctggtatatggcatgatgttgagttttggggtatgattgatcccatcatgcaggtactgagcatagtacccaatagttaatttttcaactgctgcctccctgcctccttcctccttcctctagtactccccaatgtctgttgtttccatctttacgtccatgag

SEQ ID NO: 366433 - DNA, 597 bp, Homo sapiens
tatcctgctcagctcctatctgactagctacctactgtaatagtggcatccaaaagtgactcaaaaccaagagtctctattattgtccttgaccattgggtcagaagggccataaaaacagggagatgctgacagttgtatcaatcttgatgaaggaagaaattaacttcatataattatttttagaaaaatagacacgatattttttatgttcagtattatagattgattrtctctgttaactttatgtaatttatatgccagatacctaaggtatctaataatagtacaagatagaaaaaatttttatacacttcatgagggttctgcaagacctaactgtggtatttacaagaaatatgccataaatacattttttaataatttcaacttttattttggattcagagagtacatgtgcaggtttgttaccctggtatatggcatgatgttgagttttggggtatgattgatcccatcatgcaggtactgagcatagtacccaatagttaatttttcaactgctgcctccctgcctccttcctccttcctctagtactccccaatgtctgttgtttccatctttacgtccatgag

SEQ ID NO: 366434 - DNA, 354 bp, Homo sapiens
cttacactcagtgggctgctcccrctgtccagccagtcccaatgagacgaacccagtatcccagttggaaatgcagaaatcatctgtcttctgcatcactcctgctgggagctgtagacgggagctgtagactggagctgttcctattcagccatctgggaacaatcccaatttccctttttttaaacttactgagccttgttttgtggccaagcatgtggttgatttaagaatatgttctatttgcagatgagaaaaatatataatctgtagttgatgggaggagtattctgtagatgtcctaggtccaattgatcaaatgttgaagttcacaatttctccgttagttttctg

SEQ ID NO: 366435 - DNA, 354 bp, Homo sapiens
cttacactcagtgggctgctcccgctgtccagccagtcccaatgagacgaacccagtatcccagttggaaatgcagaaatcatctgtcttctgcatcactcctgctgggagctgtagacgggagctgtagactggagctgttcctattcagccatctgggaacaatcccaatttccctttttttaaacktactgagccttgttttgtggccaagcatgtggttgatttaagaatatgttctatttgcagatgagaaaaatatataatctgtagttgatgggaggagtattctgtagatgtcctaggtccaattgatcaaatgttgaagttcacaatttctccgttagttttctg

SEQ ID NO: 366436 - DNA, 456 bp, Homo sapiens
gtttctgctgggaagtctgctgttagcctttgtacatgatctgagcttttcctctagctgcctttaagtcttttctttagtattgaccttggacagtctggtgactacatgccttgatgayactcgttttgtatagtatgttgcaagtgttttctagaatgtctacctctctagcaagataagggaaatgttcttgaattgttccctgaaatacgtttattttctttttttccatttctctcaggaatgtcaataattcataagcttggttgctatacataatcccatgtttctcaaagactttgtttattttttaaattcttttttctgtatttttgtcttactgagttagttcaaaagactagtcttcaagctctgaaattttttcttctacttggtccagtctattgctaaagctttccattgtattttgaaattccttaagtgagtttttca

SEQ ID NO: 366437 - DNA, 567 bp, Homo sapiens
ttcttgccattccaagtcaagagcccttagttttaataatcaacctgcacctggctgatagtcagctggtttgtacagtttggctatatcagtggtttacacagccaaggtctgatctgactctytgtgtctatgcctggcctgtggttaggaatgataaatatcaccctggattggcatagctatttttcaggatgttacccttgagtaagtcgttggttctagtcaccagcattgctcataacaggcaaaaaagcagaataatctaaggctccctgagtgcttagcgctaacacatttggggttatttgcttgtactaaagagattgatctaaaaccttctctgcaaagaagcagagcattttcaggtagctgagtacatcatttttaaaggggtagcaggtctaatttctagggcttggcactcatcagaattaaaaaaaataaaaggtccttaacagcatgccagggagacacaactttggaatttttagtaaaaccacagagtagaggagtgtctgtaaaatatgcagtatgagtcagacacatagctaatagggattacta

SEQ ID NO: 366438 - DNA, 582 bp, Homo sapiens
gagtaagaaccaccacctgttttctattgtgtgcrttgagcggggcaggtcctgttatcagtaagcccaggtctttagtggcattttctactgacagcctggcctgctgaggagtgctggcactgaacttcttactgatgctggagcttctcacaccaggaaaattcttattgcttcagtaacacagatggctagtgggctttccagccttacacagcatactcaccctggtatgtgtacttctctgagccttttattcttttctaccatctaccttggcaactctggtatttaccttactgagtgtgagctattgacctttccatgcctctaagagccatcttaggggtgtgtttgcaccatctctttgtgtccttgctagaatttcaagtcgcataccctagaagagtctcccaaactgctaaattctcttttcaaacaacatgctctgacaccttgatccagaacccttagaaaccaatactatctatactcttctagttcttgtttataaaaaatggctaggtcctgaagttcctttatcacttctaagatgcctctggctgtttttgcagcaactta

SEQ ID NO: 366439 - DNA, 428 bp, Homo sapiens
gcagcaaaccaccatggcacgtgtatacctgtgtaacaaacctccacattctgcacatgtatcccagaacttaaagtaaaaaaaaaaaaaaaaaaaaaaacctttgtttacatttaaaaaaaaatcccagtgactcagcacagtgagcgaggagcacaatagggtggttacccaracaggacgtccatctaggagccctgcgggaggcatgcaggtatttctttggaggtcatgcctggcaggcgtccactgttaaagccagaggacccggagcattatctgaatgaactaatgaccaacaggcgggcaaaaatgagtgctgcggattgataacagggacagccaaaccccctcccatccccacgaggcaaaggcaccaggtaaagctccttggaaatgaggctggaccccattaaaatgaggaaggt

SEQ ID NO: 366440 - DNA, 428 bp, Homo sapiens
gcagcaaaccaccatggcacgtgtatacctgtgtaacaaacctccacattctgcacatgtatcccagaacttaaagtaaaaaaaaaaaaaaaaaaaaaaacctttgtttacatttaaaaaaaaatcccagtgactcagcacagtgagcgaggagcacaatagggtggttacccaaacaggacgtccatctaggagccctgcgggaggcatgcaggtatttctttggaggtcatgcctggcaggcgtccactgttaaagccagaggacccggagcattatctgaatgaactaatgaccaacaggcgggcaraaatgagtgctgcggattgataacagggacagccaaaccccctcccatccccacgaggcaaaggcaccaggtaaagctccttggaaatgaggctggaccccattaaaatgaggaaggt

SEQ ID NO: 366441 - DNA, 428 bp, Homo sapiens
gcagcaaaccaccatggcacgtgtatacctgtgtaacaaacctccacattctgcacatgtatcccagaacttaaagtaaaaaaaaaaaaaaaaaaaaaaacctttgtttacatttaaaaaaaaatcccagtgactcagcacagtgagcgaggagcacaatagggtggttacccaaacaggacgtccatctaggagccctgcgggaggcatgcaggtatttctttggaggtcatgcctggcaggcgtccactgttaaagccagaggacccggagcattatctgaatgaactaatgaccaacaggcgggcaaaaatgagtgctgcggattgataacagggacagccaraccccctcccatccccacgaggcaaaggcaccaggtaaagctccttggaaatgaggctggaccccattaaaatgaggaaggt

SEQ ID NO: 366442 - DNA, 555 bp, Homo sapiens
agaaggcaggtagaagttctcaagtcttcgagtccatgtgtctgttaagggttccatccaactggatgatgagggcagaattcctgttttccaaagtgacacattagagtaagtgtgtatctagctagtcaaatggtgtaattttaggaaagacataggtttctaactctaaaataatgcccttcggtagtgagtcatgttcgtgccactgtactgcagcctgggcaacagaaggagaccctgccccacggacccccaccggaaaataatgctctcaactccatgctcaatatcaaaatgcytcagtcagagacaaaatattttattttaaggttaaaaagagatagaaatatttctgaaagatttaagacactggtttatattagaatgttaataaatcacatcaagtgctttcttggatttttttttaattgggtgagtcatgtgcacggtcatctgcgtgtgtgtgtgtgtgtgtgtctgtgtgtgtgtgtgtgtgtgaataagattagggacatggacatcaaattcctaatacccaattttacctagagc

SEQ ID NO: 366443 - DNA, 555 bp, Homo sapiens
agaaggcaggtagaagttctcaagtcttcgagtccatgtgtctgttaagggttccatccaactggatgatgagggcagaattcctgttttccaaagtgacacattagagtaagtgtgtatctagctagtcaaatggtgtaattttaggaaagacataggtttctaactctaaaataatgcccttcggtagtgagtcatgttcgtgccactgtactgcagcctgggcaacagaaggagaccctgccccacggacccccaccggaaaataatgctctcaactccatgctcaatatcaaaatgcctcagtcagagacaaaatattttattttaaggttaaaaagagatagaaatatttytgaaagatttaagacactggtttatattagaatgttaataaatcacatcaagtgctttcttggatttttttttaattgggtgagtcatgtgcacggtcatctgcgtgtgtgtgtgtgtgtgtgtctgtgtgtgtgtgtgtgtgtgaataagattagggacatggacatcaaattcctaatacccaattttacctagagc

SEQ ID NO: 366444 - DNA, 611 bp, Homo sapiens
atcatgggacatcaaaaaacttgttgccctaggtggttaactgcatgactaagagacaacaatggggtggacaaggtgaaccttgttcagtagtgatctcaattgcattttggttctgtaaagcgcaaataggttaactgaataccaaagagtagtgaactgcctatgatttgcatctttatatgatggytaagaattcaagaaattggaatatagtatttataacactctgtgaccacgaccacaatgtcccatcaatttcctagacttctgagtgtaggaaaacagaaaaggccatattctcaacttatgtaattgataactactaattttctaacaattttccaatgattgcttgctataaaaatgtaaaatggagccagaagctttagcatatattattcacactgtaattttggtttatttccttctagacttttttccatattttttagaacagttgtaatcatgttgtacatataatctacccttattttttaaaacctactgttataaatgttacttatgtttaaaatagcaaaaaaaaaaaactatcttgaagatattggttataaagatgatataatttattttataatttccatatggct

SEQ ID NO: 366445 - DNA, 611 bp, Homo sapiens
atcatgggacatcaaaaaacttgttgccctaggtggttaactgcatgactaagagacaacaatggggtggacaaggtgaaccttgttcagtagtgatctcaattgcattttggttctgtaaagcgcaaataggttaactgaataccaaagagtagtgaactgcctatgatttgcatctttatatgatggctaagaattcaagaaattggaatatagtatttataacactctrtgaccacgaccacaatgtcccatcaatttcctagacttctgagtgtaggaaaacagaaaaggccatattctcaacttatgtaattgataactactaattttctaacaattttccaatgattgcttgctataaaaatgtaaaatggagccagaagctttagcatatattattcacactgtaattttggtttatttccttctagacttttttccatattttttagaacagttgtaatcatgttgtacatataatctacccttattttttaaaacctactgttataaatgttacttatgtttaaaatagcaaaaaaaaaaaactatcttgaagatattggttataaagatgatataatttattttataatttccatatggct

SEQ ID NO: 366446 - DNA, 631 bp, Homo sapiens
gttggctgttctgcctcgcaaatcataaagatctctgatttctgaccttgtctgctgatggggtgctcacgtgggttaccagtttctgcatttgagttgctggttccccaggggtatgctcctttcgggccctgctggttttcaggcatctatcgtgtctagaaactatcgccccagaaccctgatcttcctgagtcctcaaacaccacacaagactctcttctaactcttcccgtaaacccgaaaccatctcaaggaacaacacggagtcgttatctaagacaaaaaaggaggccaggcacagtggctcacacctgtaatcccagcactttgggagtctggtgcaaatggatcacctgaggtcaggagctcaagtccagcctggccaactggtgaaatcctgtctctactaaaatacaaaaattagccaggcrcggtgccacatgcctgtagtcccagctactcgggaagcctagacaggagaatcgcttggacccgggacagaggctgcagtgagccgagagcgcaccactgcactccagcatgggcaacaaagggaggttctgtctcaaaaaaagaaaaaaaaaaaaaaaagaaaaattcaaattaaaactatctttaggctcaacac

SEQ ID NO: 366447 - DNA, 627 bp, Homo sapiens
tggggatgttattagaattgctaaatatgagccttggctgaatcagacaccracaacaataatttcaacaatggaaattgccaccaggcactgaagacttgacaagtcactgcgacagagcacatactggttggaatactaaaaatacacatgggctgcattacctttatttcattttcctcttttagaataaaaattttgacctttaaaagaaaagggccagtcacttgttgaaaatagaaattgctggacataaatattttagatttctttcttctgacagtattgaaaatactttgtatgtgttgtgcttttttattgtttgtaaattcttttctttatataaaaaagaattttttccctcttattccaacatttgcttcaggtaggtttgaccaatatcttggattctttccacttgtgtaattataaacccaacttgttggtgatggatttgcttgtagatgcaactcagttgtaactttgtgttacttaaaaaaaattgttagtggattggctggtgtataattcttgttaacctttgcagctctgaattagtagatgatagttgcttgtccaagggtacacagttaatatgctgcagccacacattgaactttgtcttga

SEQ ID NO: 366448 - DNA, 657 bp, Homo sapiens
tgggattacaggcgtgtgccacgacgccagctaatttttgtatttttgatagagacaggacttcaccatgtttgccaggctggtcttgaactcctgacctcaagtgattcacccgcctcagcctcccaaagtgctgggattacaggcatgagccaccgcacccagccacttcagacaactttttaagcttgaaaactatgaacacagcctttaaagtgagacacastgggtcccaacatcatcgctgtcaccaagtaagggttgggaaactcaccaatgcatttttttctcacctgaaaaattgggataatctacctccatcatagagttggtgagagaattccttgaaataagctgcaaattattattatcaggtgtccaataaatagtttctgtcatgatttgtgtaagtattaaaaggaaaatggcaattatcacttcatcttccctccacatttttcaattgctttcatctgaaaagtctggtgcaattcaaattgcatattaagtcacgagtgctgcttcattgcctctgtggatttaaaagatacagaggactctcacatgttcttgtctgaatgcactttcattcaaaatgctttacattttgaaattgtcaaattcaggtcatttgtgatgcaaaaattagtatggctg

SEQ ID NO: 366449 - DNA, 657 bp, Homo sapiens
tgggattacaggcgtgtgccacgacgccagctaatttttgtatttttgatagagacaggacttcaccatgtttgccaggctggtcttgaactcctgacctcaagtgattcacccgcctcagcctcccaaagtgctgggattacaggcatgagccaccgcacccagccacttcagacaactttttaagcttgaaaactatgaacacagcctttaaagtgagacacactgggtcccaacatcatcgctgtcaccaagtaagggttgggaaactcaccaatgcatttttttctcacctgaaaaattgggataatctacctccatcatagagttggtgagagaattccttgaaataagctrcaaattattattatcaggtgtccaataaatagtttctgtcatgatttgtgtaagtattaaaaggaaaatggcaattatcacttcatcttccctccacatttttcaattgctttcatctgaaaagtctggtgcaattcaaattgcatattaagtcacgagtgctgcttcattgcctctgtggatttaaaagatacagaggactctcacatgttcttgtctgaatgcactttcattcaaaatgctttacattttgaaattgtcaaattcaggtcatttgtgatgcaaaaattagtatggctg

SEQ ID NO: 366450 - DNA, 588 bp, Homo sapiens
caagtatttttaaatgactgcaaagacattaattccctaggtgcagaataatcattcagtatcaagaataaacatataatttaaaatattagtcttgctggtgcttgtgatctatgactaagctgtactttcaaagagaattccaaatctctcctctctgcaacccaagagaatctgcacaaagacttgtgaccttatgaattttcacaggttttccccagtggatgtctttggcgtctgctatctctactgcggatacaccggtgagtcagtaaatcttttcaaaatagttctgttctttcatactcagttcagatttgggggaaaaaaagtaggarcgacagttctatttagaacaaagcagcttagaaaaaatacgttagtcttataaaaataaatctatctatacgtgtattcttgtcagaagaaaacaacatcataaactacaagtccatttcccactagtgtcttcatttccatgttttattgcattccacagtggttttgcaaccagccatatcaagagtttccaagaaaaatgtaaacaaggattttgcagtgactccagctagaacacatgaatatgac

SEQ ID NO: 366451 - DNA, 627 bp, Homo sapiens
gtatccctgtgccaaaatatatcatgtaccccaaaaaaagtacacctagtacattcccataaaatttttaaaatataaaattaccttaaaaaatagcaaatactggaaattattccaacaaaaatgtttaagatgcctatatagaatactgtaatacattacagaaagtaattttagatcttaataattggcatgatttatcctgttcctggattagaaaaccctattataattctctatcaattttacatcaactgacctataaatacaatttagtctcaatcaaaattatwttgggatattgagttaaaattgatagatattattctaaaattaatatgcaaaaaatactatcaaaaaatcttaagacaatagtagaagagttacattttcagatattatgactcattagaaacttggcaattaaatttcatattattacaaccataagtcaatagaacaaaacatttaaaaaagagtgaaatatatataaacatttaatttataaagtaatttttgcatatgcaagctgtgtggacaaacaataggcatttcaataactaaaattggtaattaagtatctatgtttttaaaagtgattttttttttcctcacactagtcacaaa

SEQ ID NO: 366452 - DNA, 612 bp, Homo sapiens
aatccctaagttttttggcttagagtttgtagattaattacatgcatgatgctttggcttcatttctgtgaattttaatggacctattacatattttctacaaaatataaatacagtagataagaaaacactagacacaagagaaaattgctttcatggttcagatccatttttttgtataggcataaatcacactttgaggaaatgaaagcactatactattcttgtattttgtttaaaatatacaaytttaaatttattttcataattatgctgacctattactgtaacaatttttacaaagtttcctcaattattaagaagacaaacataccttgggcatactcacagaattgttcaacgtcatatttgtatatatgcaggaaatgacttgaagacctaaaaaaagcctttatattttttacattttaaagcatttaagtgtttggagtgtaggcctccacatataaaaataattagaaatatcaactaaaacaaaatctagacatattaatattttgtttaaaagtttgcatttctgcatttacataaatttaatttcaataaacttcagcttgtttgtgtttggggattatttaatgtgagaaactt

SEQ ID NO: 366453 - DNA, 612 bp, Homo sapiens
aatccctaagttttttggcttagagtttgtagattaattacatgcatgatgctttggcttcatttctgtgaattttaatggacctattacatattttctacaaaatataaatacagtagataagaaaacactagacacaagagaaaattgctttcatggttcagatccatttttttgtataggcataaatcacactttgaggaaatgaaagcactatactattcttgtattttgtttaaaatatacaattttaaatttattttcataattatgctgacctattactgtaacaatttttacaaagtttcctcaattattaagaagacaaacataccttgggcatactcacagaattgttcaacgtcatatttgtatatatgcaggaaatgacttgaagacctaaaaaaagcctttatattttttacattttaaagcatktaagtgtttggagtgtaggcctccacatataaaaataattagaaatatcaactaaaacaaaatctagacatattaatattttgtttaaaagtttgcatttctgcatttacataaatttaatttcaataaacttcagcttgtttgtgtttggggattatttaatgtgagaaactt

SEQ ID NO: 366454 - DNA, 590 bp, Homo sapiens
tccagttgtttctctgtcctgaaatcttttaaccattctttcacctatgttcctagtacttgcaaaaaactaggcctatctcttatttttcttgtctagtctcttcatgtctttattattatactttgagtttgtatcacatgattaatatattaatattggccatgtaatattctatattaatagatttctgcatatttgaaattttttctaattgccattagtaatgacagaagatgaattgccacagagagtgaactcaaggttttatgaattaaataattgtgtatctttacaatacaaaatttagacacaagtaacctccacaaccttagcatggaacattttactaaagcttgttcatgtgtacctgaatatttatttcaaaaggcaaatttatagaaaattattactaagccaccaaataacttttgactattagctcttattttttcagtgtaatttaatgaatggatttaaacccagagtaaatgatcatggctgacacttgcaaatgagttaaaatatctggtcatgttatcagtaactgttgtggagyaatttgaaacgacttgatagatagttatatt

SEQ ID NO: 366455 - DNA, 587 bp, Homo sapiens
gactaatcattgtttaaaattttttctcaacttagaaatacaatccattaccattagctgttttaatcgtttgctttcagaaactaagataattattttgcaaaaaccacaacaaagttaacacttaattctactgtgaaaatgagataaaattaataatttcattgtctccctacaaaatcaaaatatgcgcacaattttaaatgtagattttaattctaatatttgactcatttatatgtgcaatgcaagatttctctaacataataggaacagaaggcaaataacaatggtaaattctactttccccataaagccttctgttacatctttagatctcgtctagtgccatgttgagacagccaggtggaaggtggtccctggaaaaattccaactggcctactccctgggatgggaccttgggatattcgagctatttgctcaaacctgagattcatgcagctggtggagagtgytctagcagggactctggcctagggagagttcctgtttcccccttttcttcctttttcacccagtaaaaccctgtcttattcaccattcaaattgtctatgagcctggatt

SEQ ID NO: 366456 - DNA, 493 bp, Homo sapiens
atttaaaaaacattttcactatcactcagctatgagtctcagaggcaaaattcaagcatggkctctttgtctattcccttaattatgattgtataatgcctctagtgtgtaagtttactacagattataaacacagtgggtaaagaactggaacgttattcattgggttatgtacatcaccccttgaacaatagctgagacactggggacagagtagatacttgtttattatattgagatatatggagagtttggtttcttagtttaaatttatttattaaaaaatgtataatggatgtttctaagaatatgtaatataaaatacctaaaaaaaggaaaagatattattaggattcactaaagaaataaaaacgcattaaaattattacaagagcagacttgagggaaagaaacatcattgaagatgtatatatggttgaaagttttttataatgatctgtttgagcagtcttttttgatcattatattaaaa

SEQ ID NO: 366457 - DNA, 553 bp, Homo sapiens
ttgtctgtgtgaacatattactaaattcaaaaaggttataaaatatttttgcttctttaaagtttctgagtcatcattttgagaaaataaatagttaatggtaatctggaattctatttcataacattaagtgtttgaaaccttgaaaatttaacagcccttcccaaatcaaacttcagtttcaaattttgtctttcctgacacctggcttttcagatgtttcagagggaccctgagacatccagaaaagagaggaaaacaggattatttgacckgtttaggtacatgggattgccaaaatgatgtccaatcttctttaagttatatcttggtaaataatgctaatatatctttcaaaattgtatgggatttctatgattctaatgtctaagtatatgctatcaatcataattaaggttgttaagttaagctattgtaaaccacagagataaccaaacatctttgccaatcgtgtttctaactgtaactaccctggacgttttgctattcacagacaattgttgtctcattttaatccttccaaaagatggtt

SEQ ID NO: 366458 - DNA, 493 bp, Homo sapiens
atttaaaaaacattttcactatcactcagctatgagtctcagaggcaaaattcaagcatgggctctttgtctattcccttaattatgattgtataatgcctctagtgtgtaagtttactacagattataaacacagtgggtaaagaactggaacgttattcattgggttatgtacatcaccccttgaacaatagctgagacactggggacagagtagatacttgtttattatattgagatatatggagagtttggtttcttagtttaaatttatttattaaaaaatktataatggatgtttctaagaatatgtaatataaaatacctaaaaaaaggaaaagatattattaggattcactaaagaaataaaaacgcattaaaattattacaagagcagacttgagggaaagaaacatcattgaagatgtatatatggttgaaagttttttataatgatctgtttgagcagtcttttttgatcattatattaaaa

SEQ ID NO: 366459 - DNA, 583 bp, Homo sapiens
gagtttctgagtagactgaagatcctatacactatccaccaggtttagaaaactataacttaattaaaatgtgtaattctaagtaataattagatcrctttttaataaaagtgcaatggatgtatatttacgggtaaaaaaataaataaaatgctttgttaaagagaagtagtctctgttaaagaagaattgaatttagctctgctatttaatgcctcttgaaataagaatttaatcttgttaaacttcaatttctgtctaaagaaatatcattaagatatgtttttaaaaaatcaaatatattcttgatatatagtcacttaaatatttctaggctcagaaaaaataaattcctctcttttatatcccattttgtctatttaaactcatagtctcttctgtattttaggatgcataagataaaaatataatattgaagacaatgcatgtgtctcctacagctgagcccggattatcttattgtaggagacagaaaacacaggggtcatacactagaaattagaagcaggaagtaacaaatgaaatagacattttcttcttgcttcctttgaaatatgagctt

SEQ ID NO: 366460 - DNA, 583 bp, Homo sapiens
gagtttctgagtagactgaagatcctatacactatccaccaggtttagaaaactataacttaattaaaatgtgtaattctaagtaataattagatcgctttttaataaaagtgcaatggatgtatatttacgggtaaaaaaataaataaaatgctttgttaaagagaagtagtctctgttaaagaagaattgaatttagctctgctatttaatgcctcttgaaataagaatttaatcttgttaaacttcaatttctgtctaaagaaatatcattaagatatgtttttaaaaaatcaaatatattcttgatatatagtcacttaaatatttctaggctcagaaaaaataaattcctctcttttatatcccattttgtctatttaaactcatagtctcttctgtaktttaggatgcataagataaaaatataatattgaagacaatgcatgtgtctcctacagctgagcccggattatcttattgtaggagacagaaaacacaggggtcatacactagaaattagaagcaggaagtaacaaatgaaatagacattttcttcttgcttcctttgaaatatgagctt

SEQ ID NO: 366461 - DNA, 523 bp, Homo sapiens
attaatcccagtatgagcatatgtgaaatacatttatacaaaagaatcttattcaaaattgatatttgattattttkggaaaatatttattttaaggagagtaaaattagttatataatatataatacattatacaaggaactctactttaactcattgcaatttccctagacaccatttaccacccactgaatgaaaatactttaatagaaataccttctaaattatatatttcaaaataacatgttatgtattacatggtataaagagcagaaataaaggagagtgacaaatgagaggacaaagcaaaagggtctgttatgcaaaatattgtggtaatcttagtatatatttacaatgcatccattcacaaggaggggaacacaatgatgataagaattaaaaggaattttgatgttgaagaaggatggaagagaaataaaaatatctatcaggttttgctgcacaataatcaatcattaactcctggtgaaacagaaaaattatacattcattttaaatt

SEQ ID NO: 366462 - DNA, 590 bp, Homo sapiens
caggtcttttttcaacaaggcttatttcaatgaggttaatatttataattttttattaatatgttttccatttatctaggatttttttattaacaaacattcagaagagtataagcctatatttttggctaaaacttttaaagttttgtttttaatatctagatagtttaatcatgtgtagttaatttttttgtaatgtgatacggagttagagttaggcaatatttttctacatattcatattttgtgagtctgtttctgracactattccatgtcatcggcccttgtgtcagaactacgctgttttccctttcgctttatatgtctttacataataaggcagtccttctttttatttaataaatcacttattattatggttgtaaagtctgaatccaattctgtctttcacaagctggctattcaatattctccgcatcacttccataagatccaactatactgcagtattttgaaatatcacctttattgtatactaaatttatgtatctacttggttctatttctaggcttcctattctagttccctgatccagttgtcgcttctgtatgatgtagttgtattatt

SEQ ID NO: 366463 - DNA, 590 bp, Homo sapiens
caggtcttttttcaacaaggcttatttcaatgaggttaatatttataattttttattaatatgttttccatttatctaggatttttttattaacaaacattcagaagagtataagcctatatttttggctaaaacttttaaagttttgtttttaatatctagatagtttaatcatgtgtagttaatttttttgtaatgtgatacggagttagagttaggcaatatttttctacatattcatattttgtgagtctgtttctgaacactattccatgtcatcggcccttgtgtcagaactacrctgttttccctttcgctttatatgtctttacataataaggcagtccttctttttatttaataaatcacttattattatggttgtaaagtctgaatccaattctgtctttcacaagctggctattcaatattctccgcatcacttccataagatccaactatactgcagtattttgaaatatcacctttattgtatactaaatttatgtatctacttggttctatttctaggcttcctattctagttccctgatccagttgtcgcttctgtatgatgtagttgtattatt

SEQ ID NO: 366464 - DNA, 597 bp, Homo sapiens
tctacttggttctatttctaggcttcctattctagttccctgatccagttgtcgcttctgtatgatgtagttgtattatttctgctgcaaggtttctttcttaatttacttgytttcttgttgtttttgtaattttttaaaattccacttaataaattcacatttgagggtattctgctctgagtactttacaattaatcactatttttgaaataacatttcacttatcataatagtttcaaggcctatctatgttgcatcatgttgtttacattaggattgctgacctcagcctgtcaacattcatccttgattattttagttttatggattgacagtttccttgttgcttgcccatcaacattgccaccagaggtgtcatattcattttatcagatgtgtagttctatatggctcaagaactgcactgacagtccaaattatatatgtatctcattttataataatgtgtcttatcataataattacacatttttatgtttcttatatataaatgtgtctatttgatctacattattttttgatattatcattcccattataactgagaagccatttctgaataagcatatacta

SEQ ID NO: 366465 - DNA, 597 bp, Homo sapiens
tctacttggttctatttctaggcttcctattctagttccctgatccagttgtcgcttctgtatgatgtagttgtattatttctgctgcaaggtttctttcttaatttacttgctttcttgttgtttttgtaattttttaaaattccacttaataaattcacatttgagggtattctgctctgagtactttacaattaatcactatttttgaaataacatttcacttatcataatagtttcaaggcctatctatgttgcatcatgttgtttayattaggattgctgacctcagcctgtcaacattcatccttgattattttagttttatggattgacagtttccttgttgcttgcccatcaacattgccaccagaggtgtcatattcattttatcagatgtgtagttctatatggctcaagaactgcactgacagtccaaattatatatgtatctcattttataataatgtgtcttatcataataattacacatttttatgtttcttatatataaatgtgtctatttgatctacattattttttgatattatcattcccattataactgagaagccatttctgaataagcatatacta

SEQ ID NO: 366466 - DNA, 600 bp, Homo sapiens
aaacttcattctcctttcatgtaattacatacatccttatttttatatcaggaaaatcaccacactatgttctaatgtttactaaattgtcagcatcacctrtatgattaactatgtgtttaattggtggtctgtgggaagtgactattttgtctcaaaatttagcacagttcctggtaaagagtaagcacacaacaaatatttgttggaagacttaatgattgtaatagcataatgtattgatattttattgtatttgtgttcaaagatggactaggaacaaggataatggaattatatcatttattctctgtcattagacagctataaactgtaggaaatcactctatcactcttgaggaaatatttttatttataaaaaagtatatttgaatttaaaaagtttagtctttttttcagcataaaatgagcttgaggtaaattaattttccctctgggaaaaaatttgttttaatttttcctaccaataacataataataaccttatccacttataggcacattgttataatgttgttaaatattctgatttcatatatttagatttttgttttaatcaacactagaaggtatgagtat

SEQ ID NO: 366467 - DNA, 583 bp, Homo sapiens
ccaatatcagaacactaagtgtgcttgtttctactggggtatcattgtttcaagccccaattcactgacagacagagaaataaaatatatctgtatactgacaaatgtatatgctcatatttgtaatatttctatatgtaatcatctatacctaaatatgagcctaaaccagagctagaattttcagaataagctaagtagcacattaatgaaaagttcaaacgtattatatcctcaaaaagcatttggcaaatttgttaatgatattctactttccaagggcatctaatttkaattctaacagtgtattgctttgaaataaacattgtgttggcaaagtaacaagaaaaatgtggataattctactaagttttagcttatataggggtgctcaatcttaatgtttatatataaaacccctgttatttaatttagaaataaaccaggtgtaacaggatgctactataaaaaataagaaaaaaatgttagtcatgaagtgaataaatttgaacttttgtatatgtttgacaggaattcaaaatggtgaagcaactgtgaaaaacagactggaagttactaaaaa

SEQ ID NO: 366468 - DNA, 582 bp, Homo sapiens
ggcaatatggacaacatgaatgaatcttgaggacattatgctaagtgaaataaggcagtcacagagacaactactatgtgattccaagtatatgagatatctaaaacagtcaaatttataaaatcaaagagtgggatggtggcttccggaagcagaaagaaaaggaatgtggaggagtttctaatcaataggcacaaaatttcagtcaagcaagatgaatatgctctagatatgtgctgtacagcaacgtgcctatagtcaacaatagcrtactgtatacttaaaaattttgttgggaggatagatctcctgttaagtgttctcagcataataaaataaaaattaacaaaataaaccatgttgtatcagttacagccaatcttgaacctgtagaaatatgcataaaattatattttgagtaaattattacaaaaaaaatttagattcatttctaaagataaaaccaaataccacaaattaacagcacactcaatacaaagaattttgaaacattgtaagtggaaattagaagtatatgtataacttaagaacactagttagaaactggtattttaataaaac

SEQ ID NO: 366469 - DNA, 543 bp, Homo sapiens
gagcgtataacacagttcctgattgtgccatatgcagaaatgaggaaaagtgaaattaaacaaacaggaggatttggaaacacaaataaacaaggccacagcttattgggtgactcaaattactgacaaacrtcctacctgtgaaataagtattcagggaaagaaatgtaaaggtttggtagatacaggagcagacatttcaatcatttctctacaacactggccatccatgtggccaattcaacctactcaatttaacatagttggagttggtaaagcccctgaagtatatcaaagtagttatattttgcattgtgaagggcccaattgacaatctgggactattcaaccaattataacttctgtacctataaatgtatggggaagagatttattacaacaatggggagcacaagttctaattccagaacaattatatagccctcagagtcaacatacaatgcatgaaatggggtttgtcccggtatgggactaggaaaaaatttgcaaggtttgagggaaacacttcaggtggaaagacaa

SEQ ID NO: 366470 - DNA, 543 bp, Homo sapiens
gagcgtataacacagttcctgattgtgccatatgcagaaatgaggaaaagtgaaattaaacaaacaggaggatttggaaacacaaataaacaaggccacagcttattgggtgactcaaattactgacaaacgtcctacctgtgaaataagtattcagggaaagaaatgtaaaggtttggtagatacaggagcagacatttcaatcatttctctacaacactggccatccatgtggccaattcaacctactcaatttaacatagttggagttggtaaagcccctgaagtatatcaaagtagttatattttgcattgtgaagggcccaattgacaatctgggactattcaaccaattataacttctgtacctataaatgtatggggaagagatttattacaacaatggggagcacaagttctaattccagaacaattatatagccctcagagtcracatacaatgcatgaaatggggtttgtcccggtatgggactaggaaaaaatttgcaaggtttgagggaaacacttcaggtggaaagacaa

SEQ ID NO: 366471 - DNA, 546 bp, Homo sapiens
tacctttgtgctgcccccactcaagaagtattactccaatgttatgatcacttgcaaaatttgatttctcgcactggtttaattatagctcctgacaaaattcagactactactccttactcctacttgggtaccttagtaaatgacactaccattgtgccacagaaagtaaccatacgtagggatcaattgaaaacattaaawgactttcaaaagttactaggggacattaactggatacgacctgctctaggctttcctacctatgccatgagtaatctattttctatccttagaggagatcctggtctcactagccctcagcaattaacaaaagaagctgaggcagagctgcagctaatcaaaaagcaagtccataaagctcaaataaatagaatagatccagagaagactcttgatttgctaatttttccaactcagcattcacctactggtgttattgtccaagagcaggacttagtagagtggctttttcttccacatactaattcacagactctatcgctactacgataggaaatggga

SEQ ID NO: 366472 - DNA, 566 bp, Homo sapiens
tgatttggataccatcaagacgttatcatgagccagatgctgaggaatagattccgggaggattccaaggacccaccagttgtagccatgttgagactgacactgaagaggaccccaactatcatgtgcaacccctgttgaacacaaccacctacctggggacaggtcaagaagctgtcacagatggcagaagaaaacctgaggaaagcaggacaaccagtcacaatgagtggtctaatggtagctrtaatagagttgatcaccatttccatgagtattccttcaacaagggctggcacagagaacaattatacttattgggcatatttatcaatcttggctggcaataatgcctggatgtaatcactctctgacacagttacacatgttttctgatctcagtatttaccataataaatctgctcctatatgtatatgtatactgtcgtaaagtaaatagaactgcaatttatgatcataaccattttaacaactattttaatatcctatgttgtatacttctctagcacatttcaaagtgaaataattttattctcctttaggaa

SEQ ID NO: 366473 - DNA, 548 bp, Homo sapiens
gataagcatgcctagctagcccttccaaatttgcatatctgagcattctttttacccttcagaatcaagagtgattataaaggaagactgaagtattcccactaacaaatgagattaagtctcttatttagtactaatatattygactgtcttctttgacaagtacactattttcaatatctgaacttcaaagactgctgtttgaaagttacatttagtgaatttttcaaaaattattaatctttggtggattctaaatacctcttttctatcattacattcatagtcaataggcacatcaataacattttattttcatgactatacactgctgattgtaatgtactcattagagatttatgtagactaatatttatttccgtaaaatattctactgtaatgtaaaaccagttgaattctgatttctgcaattctggagggctgctaaagcataatttttttctcattgttgtgttaaatagtacttctcttttatacattctgaaattttattagtaaactgtgcatattataaatgttagaaataa

SEQ ID NO: 366474 - DNA, 618 bp, Homo sapiens
aaacttttttttccccaacaattattgattcttcttttcatctacattattgtggtttttgagagactaaaattagcactagtaaggaaagctttatttcttaatccagattattatttctatttccttctcttattttctctcctcctcatttatctcttcaactccttctctgtctcattcttctttccaaatttcttaagaacaaaccagtattttaaataaagaatgtatgctattaccatagtaagggaattggaggwttttttaattccagtagattttaatataacattgtttgagatatgattgttagagtcatatttgaatattttaaaggcaagttactatcacatataaaacatatactttcattggacagttgttttactgtggccactcttgtttaagaacattttgatagcaaaccagcataacactttttgaaaattctatccactggtgatgtgtgtaattctgtcagttggattgacaccaaatatgtattgtttgaaacatctgctgctcctcctgaggaaggattatactgccatatcctatcaatgtcaggattgtcagtgttatccacagtgtctctctttgcacaaggatcatact

SEQ ID NO: 366475 - DNA, 559 bp, Homo sapiens
tgtactgcatatagccccctctcctaaaaggtgagaaatacttgctccctaatattttagaatgctttgtaatgtaaatagccagcttaatgactcaggtttcattctgaattgaaatatraaaactttttttttgttgttaagagacagagtcttgctctgtcgcccaggccagagtgcagtggcgggatctcagctcactgtaacctttgcctcacgagttttagcaattctcctgcctcagccttccaagtagctgggactacagttgcatgctgccacgcccagctaatttttcgtattttgtagagatggggtttcgctgtgttgcccaagctggtcttgaactcctgagctcaaggaatccacccacctcggcctcccaaagtgctaggtttacaggcatgagccactgcactctgcctataaagacattttaaagataaacccctaaatctctctggaggtctctctttctatctcttgtcagtcatctttaacttccaagtcttgccctttaacctaggttccagtttctttgcttagaaaagtataactg

SEQ ID NO: 366476 - DNA, 628 bp, Homo sapiens
accatctgtgatttactgactttcttttatgttctctagcttctcctttttattttttattttcattttattatgtatttgagacagggtctcactgtctctcaggctggagtgcagtggcatgatcatggctcactgcagcatcagcctccccrggctcaggtgatccttccacctcagcctccagagtagctgggagtacaggtgcatgccaccatacccagctaatatattgtatttttagtagagatggagtttcgccatgtttcccagtctggtcttgaactcctgggctcaagcaatactccctcctttgcctcctaaagtgctgggattataggcgtgagtcactgcacccagcttagcttctccttcttttaattttaacttacatttgcatagcttcgcaggttattaccaagtgcattcagacagtcttatgggcatcttgattgttataatccctgttttgcacatgacgaaactgaagcacagaaaggtccaataacttgcccaagattacacagctagtgagtgacatagtcaggatttgaacttgggtattctggtcccataacatataccctaacttctctcctctttccaaatctcctgttcacctataacg

SEQ ID NO: 366477 - DNA, 628 bp, Homo sapiens
accatctgtgatttactgactttcttttatgttctctagcttctcctttttattttttattttcattttattatgtatttgagacagggtctcactgtctctcaggctggagtgcagtggcatgatcatggctcactgcagcatcagcctccccaggctcaggtgatccttccacctcagcctccagagtagctgggagtacaggtgcatgccaccatacccagctaatatattgtatttttagtagagatggrgtttcgccatgtttcccagtctggtcttgaactcctgggctcaagcaatactccctcctttgcctcctaaagtgctgggattataggcgtgagtcactgcacccagcttagcttctccttcttttaattttaacttacatttgcatagcttcgcaggttattaccaagtgcattcagacagtcttatgggcatcttgattgttataatccctgttttgcacatgacgaaactgaagcacagaaaggtccaataacttgcccaagattacacagctagtgagtgacatagtcaggatttgaacttgggtattctggtcccataacatataccctaacttctctcctctttccaaatctcctgttcacctataacg

SEQ ID NO: 366478 - DNA, 594 bp, Homo sapiens
  misc_feature (1)...(594): n = A,T,C or G
nnnnnnnnnnnnnagaccacggacatctaagagttttcagtggtaggtcacccataaagtgcatagtcttgtgcctggcatatattaagtactccataagtggtagttactatgatgcagtgatgatggtaggaaaaccatgtatatgggggcttgtgaatttttaaaaatatatataaaagtggcgagcttagaaagaccaatgcttagggcacaggtattggaagggacttaattatgagccaaaataggcggaggttttataacttttttgcctttgtcagcatctaagtttatgttttcttaagagtagaccctgagacaaagatgtgaatgtaagtagkttatttgggaggtgatcctaggaaatactagggccttggggtggggagggcaggctgggaaagtaagacaaatgaacaaagcacgtgtaactaggcagatggaacttaactctactgggaaacagtgtagatcttgtgcctcagggttataccactggaggggtagtaaccacaggagctggagtatttatccaacttctttttcttttgagacagggtctcactgtgttgctcaggctgcagtgtagtg

SEQ ID NO: 366479 - DNA, 604 bp, Homo sapiens
gtactttttttttttttttttgagacggagtctcgctctgtcaaccaggctggagtacagtggtataatcttggctcactgcaacctctgcctcctgggttcaagtgattcttctgccttagcctcctgagtagctgtgactacaggcatatgcyactatgcccagataatttttatatttttagtagagacggggtttcaccatattggccaggctggtatcaaactcctgacctcatgatcggcccacctaggcctcccaaagtgctgggattacagtcatgagccaccgcaccctgctgggggtactttttatgtgattttagacacatttggaaaagccaagatttggggattataataatggtggttttggatgtaaaatttggggtctgtgtctccagagttctttataacctgtaacctgttatatttgttttattttctatgtcattttgaggagacagcaatccatactacctgtattaagtattaccccaattgtaaaatggaatagtaacattaatgatccaacaacagattgcaggattattgtgagggttgaacaagatgatctgtataaagcacatgacacagttcttgt

SEQ ID NO: 366480 - DNA, 604 bp, Homo sapiens
gtactttttttttttttttttgagacggagtctcgctctgtcaaccaggctggagtacagtggtataatcttggctcactgcaacctctgcctcctgggttcaagtgattcttctgccttagcctcctgagtagctgtgactacaggcatatgccactatgcccagataatttttatatttttagtagagacggggtttcaccwtattggccaggctggtatcaaactcctgacctcatgatcggcccacctaggcctcccaaagtgctgggattacagtcatgagccaccgcaccctgctgggggtactttttatgtgattttagacacatttggaaaagccaagatttggggattataataatggtggttttggatgtaaaatttggggtctgtgtctccagagttctttataacctgtaacctgttatatttgttttattttctatgtcattttgaggagacagcaatccatactacctgtattaagtattaccccaattgtaaaatggaatagtaacattaatgatccaacaacagattgcaggattattgtgagggttgaacaagatgatctgtataaagcacatgacacagttcttgt

SEQ ID NO: 366481 - DNA, 604 bp, Homo sapiens
gtactttttttttttttttttgagacggagtctcgctctgtcaaccaggctggagtacagtggtataatcttggctcactgcaacctctgcctcctgggttcaagtgattcttctgccttagcctcctgagtagctgtgactacaggcatatgccactatgcccagataatttttatatttttagtagagacggggtttcaccatattggccaggctggtatcaaactcctgacctcatgatcsgcccacctaggcctcccaaagtgctgggattacagtcatgagccaccgcaccctgctgggggtactttttatgtgattttagacacatttggaaaagccaagatttggggattataataatggtggttttggatgtaaaatttggggtctgtgtctccagagttctttataacctgtaacctgttatatttgttttattttctatgtcattttgaggagacagcaatccatactacctgtattaagtattaccccaattgtaaaatggaatagtaacattaatgatccaacaacagattgcaggattattgtgagggttgaacaagatgatctgtataaagcacatgacacagttcttgt

SEQ ID NO: 366482 - DNA, 572 bp, Homo sapiens
tgctggtggcagtgtaaaatggtacagttactattgtggtagactgttacaaaatgctgcccccatgacttctatttcctgtattcatacccagtgtagtctctgtattagtccattctcccattgctataaagaaatacctgagactgggtaatttacaaagaaaagtggtttaattggcttacaattctgccagctgtacaggaagcatgtctgcagaggcctcaggaaacttataatcacggtggaaggcaaaggggaagcaagcaggcatgtcttcacatggccagagcaggaggaagagagagaagggggaagtgctacacacctttaaacgatcagatctcatgaaaactcactcactgtcacaaaaacagcaaaggggaaatcagcccccatgatccaatcacctcscactaggcccttcctccaatactggagattacaattcgacatgagatttgggcagggacacaaatccaaaccgtatcagtctccttccatgtgaatgaatatgaactagccctgtgacttgcttttaccaatcaaatgggggaggcaatgttatgtga

SEQ ID NO: 366483 - DNA, 682 bp, Homo sapiens
aatgatttcatgtacatgacgttctggaactacagggaccaaaagatgaccctagtggttgccaggagctcatcttgagtgaagaggttgaagacaaagaaactggyagaaaactcttttatatcttcattatactggtaaacatttgtcaaaactcacagaagtatacactaaaaagtatgaattttctaaatatagaaaagctgtctgtaaattacaccttaatttttaaaatgaaagaaaacatcaaagcatacatacacgtaaatagacaacatagcgaatgagtaaacctcatatataatattgagaaaaaagaaaaattgaaatgttttatgtgaagataactataaaccttctttaaagacacaaaaatagacttaaacaatgaaaaggcatcctttgtttcgcttccttttctatgtgcttcaaaacattccttcataatggagatttcattggttgtgtcgaggatcagtacacagatatttcaatttgtacactattcttaacatacacacacaaaaaagtttaaaaagtcatgtattgtaattgtttttaaaagttattctagtgactttccagcttaaaatttggaggcaaattttccttaagaggatatgaagtaccagtatctacaattgttgaaaagctgttacatatgtcccaccaattcacaatt

SEQ ID NO: 366484 - DNA, 682 bp, Homo sapiens
aatgatttcatgtacatgacgttctggaactacagggaccaaaagatgaccctagtggttgccaggagctcatcttgagtgaagaggttgaagacaaagaaactggtagaaaactcttttatatcttcattatactggtaaacatttgtcaaaactcacagaagtatacactaaaaagtatgaattttctaaatatagaaaagctgtctgtaaattacaccttaatttttaaaatgaaagaaaacatcaaagcatacatacacgtaaatagacaacatagcgaatgagtaaacctcayatataatattgagaaaaaagaaaaattgaaatgttttatgtgaagataactataaaccttctttaaagacacaaaaatagacttaaacaatgaaaaggcatcctttgtttcgcttccttttctatgtgcttcaaaacattccttcataatggagatttcattggttgtgtcgaggatcagtacacagatatttcaatttgtacactattcttaacatacacacacaaaaaagtttaaaaagtcatgtattgtaattgtttttaaaagttattctagtgactttccagcttaaaatttggaggcaaattttccttaagaggatatgaagtaccagtatctacaattgttgaaaagctgttacatatgtcccaccaattcacaatt

SEQ ID NO: 366485 - DNA, 682 bp, Homo sapiens
aatgatttcatgtacatgacgttctggaactacagggaccaaaagatgaccctagtggttgccaggagctcatcttgagtgaagaggttgaagacaaagaaactggtagaaaactcttttatatcttcattatactggtaaacatttgtcaaaactcacagaagtatacactaaaaagtatgaattttctaaatatagaaaagctgtctgtaaattacaccttaatttttaaaatgaaagaaaacatcaaagcatacatacacgtaaatagacaacatagcgaatgagtaaacctcatatataatattgagaaaaaagaaaaattgaaatgttttatgtgaagataactataaaccttctttaaagacacaaaaatagacttaaacaatgaaaaggcatcctttgtttcgcttccttttctatgtgcttcaaaacattccttcataatggagatttcattggttgtgtcgaggatcagtacacagatatttcaatttgtacactattcttaacatacacacacaaaaaagtttaaaaagtcatgtattgtaattgtttttaaaagttattctagtgactttccagcttaaaatttggaggcaaattttccttaagaggatatgaagtaccagtatctacaattgttgawaagctgttacatatgtcccaccaattcacaatt

SEQ ID NO: 366486 - DNA, 532 bp, Homo sapiens
aatgactaatatcacacagttgcccttctgagcactccttggtaaaattaatcctaggaaaacatggtattttgttttcataagggccatgagccaagcatatctcctgtccccctccttccttccttctgtgcgccattctttttctgtttcatttttcctttttggatccctgcttgggcactctaattgcatggcctcagcctcagcctccttgcctctcctctggcccgaatgcttctccaaatctagcgacatgaaagcggaattaggggttgactagatcccgataggtcatcatccataagatgccagtggaaaaggtgcccattctgggagctgcaggtcactggcttcccattgcagaccagggaggcccttgagccagcagatcacctctgggctcttggcccaccaagtagtggtgggyctgtaaggagggaactttgccgactttccctccaaagctcaaatctcccaacccacaatcacttcagaatatcatccttgctcccaatctgagggccactag

SEQ ID NO: 366487 - DNA, 588 bp, Homo sapiens
gtggcatctgcaagaggggaggccgagtgatgggagagaagctggggctgtgtgtttccttgaccccaaataaagcagtgttgcaagtcgaggggggcggggggattatcattccagtgctaccgatacctcaggtcagagaagtgtctgctggactgctgrggagcggcaagcatagtctcctggtgaggagggaggagagggagatggcagctactgaagactgaaagggagggaaggaagtggaagcagagagcgtaacacgctctttgcagaaatgtgaccgtgaaggggaagaaggagccaggcagtaggttgtggggttacaggatcgggctgaatttcagaatgaagagaaccagagatgggccaaatggtttacctggcttttatttcggctctgtaataatcctaaacagtacacagatattttctcctgcctccagcttgctacctgcagatggcgctcatcatctgatccaaaactgctctggacccccgcatgcggaagacgggaggacaagcgccctcagccagacttggtgactgtttctccccagggcctttacatctcatcccaaaccacaa

SEQ ID NO: 366488 - DNA, 577 bp, Homo sapiens
gacaaacatcctaactataccaattactttgcagggcgttcatctttcatcagaaccccttgggtcctaggatttctgtaggttgcgtagcatttcaagaaagattttagactgctcccttaaaacccattatctgaagttcttgaaatgtttccagtattgcagaggcaatgataagctcagggaattaacttccctgagcaaattttcccaattctaatatatttcctaatagagcattcataggccctctttccctattttagttttgatcatttagcaccacactttaaaatttactgagtctaaaatccaaagactggggaagatgggaaagacctttcagggacaagtgaactggcctacagttcrctcctattatggccattttgattcacctagctcatatgagtttagatgtggcatatattgcaggaataagggtggcaaatggcatgttttcttcaaaagaacatagaaaccagcagagggtggttggcagagcagagggagataaaggtgtcatcattccaatggaaggttctctttgcttccagggagagtcaagagttataac

SEQ ID NO: 366489 - DNA, 429 bp, Homo sapiens
ttatgttttataatcctccattcgatgttcttttttgtatgtgtctagagataacggtttctctctagatccatccttctaggtaactgtatggcattcaggaaggcatctgtacaatttctcctctcttcagaaatcaaaactactgctgactgcagcaaagagtaaggaacacttagagagatggagcaatatttcaaaaatacttcttagaaaagaattggaagtctttgcaattctaaatcctacgyttttatgttttcaaatgaatcagatgatattgtgtcaacaaaagcatatcttatttcaacacttatttctatatctcagttggaatttcgatactctttctgtcattttcattttcttctcatgccatgtaaccttgtcccgtttgagaaggcatgctaaaaagtttgcaaagaataa

SEQ ID NO: 366490 - DNA, 432 bp, Homo sapiens
agtaactagcactttgggagtacccaaaatgtactaaaaatgatagcaataaattgtcattttgatgattaattctaccattcactttgtgcctatttttttttttgccagatattacagtagggactttataaaacactatatttattaatcatcaataaaaccctacacaacagtaattattatcttacaaytgaaaaaactgagactcagaaaaataaactgccacatccaagaactcacagtctatagctgatggcacaaacatcttattgtttgatagaaccactttgacttaattcaattataccacctcagatccacttttggtattgcctgaactagctgcagaataaaattagactttttattgtcacactgtcctttggtgctctctttttccatcccacactcattttttgcagcgggttc

SEQ ID NO: 366491 - DNA, 613 bp, Homo sapiens
aacatcttattgtttgatagaaccactttgacttaattcaattataccacctcagatccacttttggtattgcctgaactagctgcagaataaaattagactttttattgtcacactgtcctttggtgctctctttttccatcccacactcattttttgcagcgggttccagggagatctgtcttgcattcattccacacctcccttcccrtggaagtgcctggaagtgcagactctgggggtaaagaagatactgtctctctattgctctgaccaggattgatgcaagcatgaatgtgtggctgaagtcaatatggccagagtgacttctggggattccctgaggattctggaacggggactcattctctgagtgatgcagggtgtggatttggtgccatgaacacaaaagcacacaaaacagggctgaactgagagactgagaagagaatcctgaaccctgaacaaaccaagcttgaagcttataaaccttccagatgtgaaaactgacacaaccccatattgtttaagccagcttgaattggtcatctcttatttataagcaaaatgcatcctgataaactctcttgcttttgtgtccagtacatcattc

SEQ ID NO: 366492 - DNA, 613 bp, Homo sapiens
aacatcttattgtttgatagaaccactttgacttaattcaattataccacctcagatccacttttggtattgcctgaactagctgcagaataaaattagactttttattgtcacactgtcctttggtgctctctttttccatcccacactcattttttgcagcgggttccagggagatctgtcttgcattcattccacacctcccttcccgtggaagtgcctggaagtgcagactctgggggtaaagaagatactgtctctctattgctctgaccaggattgatgcaagcatgaatgtgtggctgaagtcaatatggccagagtgacttctggggattccctgaggattctggaacggggactcattctctgagtgatgcagggtgtggatttggtgccatgaacacaaaagcacacaaaacagggctgaactgagagactgagaagagaatcctgaaccctgaacaaaccaagcttgaagcttataaaccttccagatgtgaaaactgacacaaccccatattgtttaagccagcttgaattggtcayctcttatttataagcaaaatgcatcctgataaactctcttgcttttgtgtccagtacatcattc

SEQ ID NO: 366493 - DNA, 605 bp, Homo sapiens
agattggcatacaccatacaagctgcaggctatcataagccctataagcaacactgaccaaaattcagatagaaatttcagctgccaggaatccagtgactgcaagttaagaatcaccgacaccatttcatttaattgacatctttctaaaagttcttacttaaagcaacctttccttcaccttattctattcccarattctcactaatggaaaccaaggctggaaatcaacatccaagttcatattttatagtttctctggaacctattgaccaaagatcagaaaggaaaatgaggtccaaatctaggccaggatagaatactagttccaggatcgtattctaaaacctacgcttttccacgtgaacaggtcagtagtcaagaattaaaaataaaaataaggagatttccttcaagcattttaatatgttggaaaaaaagcattgctagaaaccctattgtttcattccaggggtatctatggcaaccattttgagccactaactttaaagatagttatgtgtcaccagctgacagtgttgtccagccactccttaatattgtctagacacctttctcttggatttccttcagaatttccctgg

SEQ ID NO: 366494 - DNA, 622 bp, Homo sapiens
tgtgggcgtgatgtttaagttcaaaaaatttgctatttgtcaagtattttgcagtaatcaaatgagtggaaagtatgaggaaagttaaggaggaaatagtaattttgagactatgctacattccacatacaggctttttttttttttacaatttgatttcattgatttttttctttgttattggayttattaattttttgtggcttctgtattctgtctgacttggaatgacgtttctaatatatctgggttttcttgtttactttcaaagaagcacatagattcctgcttttctggaaaatttctgattataaatgtttgtaatatttgtacaatattatcggactatgctaccagaatttgatttcaaaaataagatagctacagtaactctagttaccacaacatagctatgtcatggtctacattaattagacatcctttaaaactgtttgtactcattcctccaccttcctgttctgtgctctcaaaacaactttccaatcattccttcagtgttcaggaaggtgatgctccagagaaggaatgcagttagaaagccccctgtaaatgatcaatttgtgttctagtgcaaagcactgttttctgaaagctgggtttc

SEQ ID NO: 366495 - DNA, 622 bp, Homo sapiens
tgtgggcgtgatgtttaagttcaaaaaatttgctatttgtcaagtattttgcagtaatcaaatgagtggaaagtatgaggaaagttaaggaggaaatagtaattttgagactatgctacattccacatacaggctttttttttttttacaatttgatttcattgatttttttctttgttattggacttattaattttttgtggcttctgtattctgtctgacttggaatgacgtttctaatatatctgggttttcttgtttactttcaaagaagcacatagattcctgcttttctggaaaatttctgattataaatgtttgtaatatttgtacaatattatcggactatgctaccagaatttgatttcaaaaataagatagctacagtaactctagttaccacaacatagctatgtcatggtctacattaattagacatcctttaaaactgtttgtactcattcctccaccttcctgttctgtgctctcaaaacaactttccaatcattccttcagtgttcaggaaggtgatgctccagagaaggaatgcagttagaaagcyccctgtaaatgatcaatttgtgttctagtgcaaagcactgttttctgaaagctgggtttc

SEQ ID NO: 366496 - DNA, 387 bp, Homo sapiens
agtggttttctacacagcaataatgatacaattaggaatcacgccttatacatctttttaatttctagcacattaacccrgtacttaacatccactgggtgttccatcaatatatgttgaactgaaaagcctagaagagatagaatgaaagttccaatctattgcaaagcatttttctttcctctctttctactaaacattatggctataccccaaggttcccactaacttttacctctgagattttaggagctaagactgcaggggtggttgtgggaaatccagcatgcgcagtgtggtttgaaatccacagacaaggggcgatggcttccttccttggcccactgccctacgcgcggtgagcagagcagccaagccagagtggca

SEQ ID NO: 366497 - DNA, 321 bp, Homo sapiens
agcctggccaacatggtgaaaccacatctctactaaaatataaaaaaatagccaggtatgatggcccatgcctgtaatccgagctaattgggaggctgagatgggaggactgcttgaacctgggaggtggaggctgctgtgagccaagattgtgccactgcactccagcctgggcaacagagtgagaccctgtstcacaaaaacaagaaacaaaacaaaacaaaagacaagaaacttgagaagcgcagtagattcaattatatatatctacttttaatttgctagctctgtgaccttaggaaagttacataacctctctga

SEQ ID NO: 366498 - DNA, 596 bp, Homo sapiens
aactccaaaatggaggcaacaatgtagccatgatccctacaagaagaaaaacatgttttggtcaaaatctaaaagttaatacagcaaaaaggggctaggagatcatctatcctccttgtattatgggaaagaataaaagtcacatgacatggaaatgcgggaatttatccagtctattgcctaacagagaggtgccttcatcagagtttacctgtcttagggaaagactggagaatagagcctagatagatagatgggtttccttaaaatcttaaggcttagttttcctttcacttccccttctccttccctttcatttaaggttcaaattaaagaatggtgcagtccccctcaggatcataaagagaaccagggaatgcagcacttactgatttatagcttaatttgaaacaaatccctgaaccaggaaagccttatcaccctgtgyacaattaactttcaagtggatcttttaaagcttttcccaatgagaatgaccctagaaaaataacattttactattttaagaggtgtgtgaaagatgaacagatgccagagacaagagtcagctcaaaccaggtgatgtccgttcattt

SEQ ID NO: 366499 - DNA, 395 bp, Homo sapiens
ccagcctggggaacagagagtgactcagggaaaaaaaacgaacaaacaaaaaaccaaggagatgtggagagagtttgccatctttggcaaaaagtgaagatcactaatttggtgatcttaatttgatctctaaatgttgttttgctttgaaaaatagctgaacacatagcaatgttcagtttaaaaatcataattaatgaaattatgtatcttttctcagacccmgatcacagaatcactgggaggagattaaatattgggatagagcagagtaaaaagaaccatgaaggaaaatcatctttaacttgaaactaaatttggtaacatctaatatcaaacgggattcttatagcatgtggaattgtttagtcactaccataatcatttcaaaacca

SEQ ID NO: 366500 - DNA, 583 bp, Homo sapiens
taaactacatcatgcattctgcaggtcaagcatttaattattatattatttttcaatcggcccacaacaagttaaaattcaggctcctctctgggtcctcccagttcattgcctcttctacataaatgttggcaagtcatttttccacggactgtcttagagatcctctcatctctggcaattctacaactatgcctactcaaaacattgtattacctgtggactccagaatgggggttctttttttaaaaaagctgttgttcaggaccttccatattatagttccaccaccattcaagagttactgtgcccaccactttttttttttttttaatttggctgaacatgtttgtgaacccagattaraaattcatggcccgacaaggttgttgttggttttttttaattgattcacaaatgtgtttaattaaagagcaagagggaatatttgaaattaagactggccccataacatctggggtccaattcaatctattcatgctctctagaacattcctcccactctcagctacatgtcactgcttctttctgttattccttcttcctctcacactcgcttagg

SEQ ID NO: 366501 - DNA, 518 bp, Homo sapiens
  misc_feature (1)...(518): n = A,T,C or G
ataatgagtccctatcatcgatggcactaaaagggtacaaactaatcatataactcaatgcagtaggcaagtgagtatgaatgtttaaacagttattatcagggttggagaggaggtggggatgttgaagaagaaagaataaaaaagtggtgtgagaaagcgaagtattactggaatgttgagactgcaaatgaaacccacagaagtcaggaaattcaagagttaaggctcccgttgctcccttaattcagcccctgttgttgggcatacacattgtgtttgtatcttttattaccagatcccataacacttagcaacmcagcccacttaggacggtgatgaagcagcatatggctccttatgaaatgagctttaaatatatccaaaggttaacaactagtataacaaggtactttttcctataaaagtttaatgttaattataaaatcggataacattgttatggtgtgaaatatgtaatacacaaggcaacactccccnnnnnnnnnnnnnnnnnn

SEQ ID NO: 366502 - DNA, 634 bp, Homo sapiens
aacaggggtcaacaagaactgtcccaggcacacaggacctgtggtcactccataaagccctccctgacatttccagatctcagctctttctcttctctgaaatcccattccatactttgtctatgcaacttttaacactatttgttatctatctcatagtggtcttgagcttcctttcccctgacacatttatttgtaattgtcttaatttcttaaactttctttgtatgaattggtagtagctatcagagtgatacatctcagtaaacttttataaatgcttttaagtttgatttaacttactggtacattgaaatattttatcttttttattctcaaaaacatttatttgaataattaggagttactaggaggctaagtacatataaaatagttaggtcctttccttgattgtaagctgcttgagatcagaaatgtttattaaaaaagtaaaactaattggtggtttaattcaaagtgccctcaagtttttaaaatgttttaagtgcaggattcagaaaagatctgattgtatcacagaaaaaaaaataaycagttgacaaatgaaacttcagttattgatacaactgttggagttacttctttatgagtgatttccccagatttatattta

SEQ ID NO: 366503 - DNA, 528 bp, Homo sapiens
tagctggagatcattacctaagcaaattagaaaactaaataccatatgttctcatgtatacgtgggagctaaacactgagtacacatggacacaaagaagggaacaataaatactggggcctacttgagaatgaaaggtgggatgaggcgaacattgaaaaattacctatcaggtactatgctcactatttgggtaacaaaataatttgtacatcaaatccaggaaacacacaatttacccatggaagaaacctttacgtgtacccccataactaaaagaaaagttggaaggaaacagatccactacttttagatcatgtsttatttaaggcactgcctggccttcagaaagctaacgctgcccagatgatggtggtgactgagcttggaattcacacttgccactttcattcatgatgtgaagcatctcaaaggccttcactattgtttctaggagcctgagataggtctgagaataatagcacattatttatactcatgtgataggttgttagaaaattaagctaa

SEQ ID NO: 366504 - DNA, 589 bp, Homo sapiens
agtaatgtctgccattgcggtgcctttatggtgagtggggaaggggatgggcaatggggtgtcagcacagacatgtatattctatttctggtcttggcaaatgttcattcaaacaactaatatgtcaaggaaattatgtgggaactgaccaaactgaatagagacctgagcgtttccttttgagtatgtggctggatcaaaacacatctcgaggtactgttaacccgacgattcctcatctatgtaatcatatttttatcctgacacataagtaaatgacttggagattggtcctagtttaagacgtaagcaataaaaacacacttaaaatttgcactggaaattgaaaatccctttcatgtatacacatgcaacatgctattcaccccctgctgccttctgcatctttctggtgccatattctttgtgcctcctagacagaagctgtggaactgatgctagaagaaagagagaaatttaaatgaagaaatgatgctgycattatttttaatggttgatttgtttttcttgtttacctagaaaacaggtggagaatagaacaaagagatttttggcctgagccaggact

SEQ ID NO: 366505 - DNA, 347 bp, Homo sapiens
aggtgtatcaaacagaaggaatttaatagagggacttgacagaaatatggaggagcaaggaacccatagaagggatggtgaggcaacccacatgttaatgacagcaattaacctctaaggttagcaggagtaaatggtgttaccagggccagaatttggaagctacggccatggtgaggtcttctcagtggaagtttaaatcatagaggggacaatcattgccagggatgtaatcygaagcacagacagagggggagaattaccctggcttcttccatctcccccctccagccttccaacagagcctctgtttgcctaaatctacaagaaacccagggagaaaagca

SEQ ID NO: 366506 - DNA, 493 bp, Homo sapiens
tgtgatttgcaaatattttctctctcagtctgtagcttgtcttttttcatcttaataggatcttttacaaatctttttcattttttttatttttgatgagatcaaattatcaatttttcatttatggattctgcttttggtgtcatgtctaacaactctttgccaggttctaggtcttgaaggcttttttctatgtttttcytaaaaattttattaatttacatttaaatctatgatcctgatccattttgagttaatatctatataacatgtaaggtttaggggtttttttgcctatggatatccaattactccagcaccattggttggaaaaaacaggttcttccttcattgaattttaccatcgtcaaaaatcagtttttcatatcgaagtggggctgttttggggttctttattctcttctattgatctatatgtcaatctgtttgctaatactatacattttcagccaggagcagtagctcacacctg

SEQ ID NO: 366507 - DNA, 571 bp, Homo sapiens
ctgctgttccttctgcctggaattccctccccccaccttgtctatctgcccaacacctgctcagttttcatgatccaactcaagtgctatgtcctcccaggaaaccttttctgaccttcagctgtaggtggtaactctattcttggttcaatttctgtaccttgtataaacttctgtttggttgatttttatacatcgccatattcatctttgtagctccggaaacttagcagtgcttggaaaagtgaaagtcattgaatgaataaataaagcaagggcaggaggaaacaggtctccaaagccaacagttttatttcatttgtggcaaagtgccattcgatttaaattcaaagccattttgataggcactatctcagttcaacagaaactccagtgttcattttgggttcctccagaagctcactggatggcaagagttcaagtacaagtaagatagagggaggtgaaaacacaattaggggaatgggaagctgaggtagggaaggsaaggcagcctgtgaaggatgcattcttaagccagttatcattgtggctcactgagtcagttcag

SEQ ID NO: 366508 - DNA, 569 bp, Homo sapiens
gggttactaaaaatgtatcagtgccttcagataagattgcacaagcatgcacagaagtgaaaaatcactttctcctctgtttcctcctgccttcttcctcccacatctccatcccccaatcagcctcctgctaagtattagttaacctcctaaattaatacgtcttgatcttaaacctaataggaaggaatgtttacttttgtatctgggttcaaagtacagactacagtagttagcttttaagtttatgttattggcttaattttcttgctcaaaatgagataagggagggayacattaagattaataaagaaaaaaatgattgataaactggcttatgtgactaaagttcctttagcgacaaaaatatttggtaccttcccttaattattgaaatcaagcaatgcgcctggatctacatgacacaaaatggtttgaattacagtcaaataattgccattctgggtgaacataagctttttcaaggggagtggtgaatggggataaaataataactaataaactctgaagcaaagctcacatctaagacttaagcttcaaagctctta

SEQ ID NO: 366509 - DNA, 612 bp, Homo sapiens
gagattaccaaaagatcactgaaattctgtagaacttgtcttgggactggccccaaacaaatgagaactggctgaatctgtgggtagaaaaatatgtgagtgacagcaaagaggcttccagtgagcccctgctggttcagaagacttgacatggccagcaccaaaggatccctttagggtacccccaccatgarccacatactgggagaaatttcttgtagcactctgctttaaaacaaaaccataatgataactaatcatttccctgattttggaaattaaccagagacatctaaaatcaccactaggacatcccaatctgcaccagatggccagggttatcagccaaagctgatctctttccaggcaaaacaaaaagtataaacactttgaattttaatcgcagagcagtattacctaagtaattatacaatttcccttaagtttaaaacaaaatagcttgcaggtcccacttttttccctaggctctatgggctaggaacctctgcaggtgactgtttcaatatagttgtacacaatatgttgagactgagtatagctccatgggtggttaactatacaatctccacagtcagcccaatgtagttgtaa

SEQ ID NO: 366510 - DNA, 585 bp, Homo sapiens
gtggggctagtcttgcttccctctcccatttgtctctctgcctccttaggaagggcgctgtctaccctgagcctgagtaagagctctagtaataggaaaatgagctaagagctgatagaggggcctgggtcctgctcacctggaggttgggcatgcagtctgaggtgtgtgtgttgttcagactttattctccagttccagttatactcatggttatttctttgggatctgaaagaaacaaacatttgtggaaaacccacagtatgctagatattgtgytagatgtttaatattctttatctcatttgcttctcagataatgtaataggctgtctttattctacagaggagaaaactgaggcacaaagagtttaagtcctttactaaggcacccagcatgtgtgaagccagaacttaaatccaagaaagggactgggaagagcttgccctgctgactttatctcaaaggtatcccaaagagtatatgggatgggggaaaggcaacacagcacccacaatgacctaaaacccacctagaccctcattttaagtcttgacaccctgaagagagtctagccagccagg

SEQ ID NO: 366511 - DNA, 585 bp, Homo sapiens
gtggggctagtcttgcttccctctcccatttgtctctctgcctccttaggaagggcgctgtctaccctgagcctgagtaagagctctagtaataggaaaatgagctaagagctgatagaggggcctgggtcctgctcacctggaggttgggcatgcagtctgaggtgtgtgtgttgttcagactttattctccagttccagttatactcatggttatttctttgggatctgaaagaaacaaacatttgtggaaaacccacagtatgctagatattgtgttagatgtttaatattctttatctcatttgcttctcagataatgtaataggctgtctttattctacagaggagaaaactgaggcacaaagagtttaagtcctttactaaggcacccagcatgtgtgaagccagaacttaaatccaagaaagggactgggaagagcttgccctgctgactttatctcaaaggtatcccaaagagtatatgggatgggggaaaggcaacacagcasccacaatgacctaaaacccacctagaccctcattttaagtcttgacaccctgaagagagtctagccagccagg

SEQ ID NO: 366512 - DNA, 632 bp, Homo sapiens
ctcatccttcctaataaaactcttgccccattgcattccatgcttcctggttgggatttttctagaccaactcagccaccagttttatgagggactgtgggtgtgagcaggtctttaggagtcaggaagaggaggagtcaggggggtggctacacagtgcaggcmgctcaatggacagcagtctttctgggacctgtgatctagaagacaggagaagatgaacacatctggagacccagcccagacgggccctgaaggctgtagagggtgagtggctcatttgtccagctttccatgccagggacaagggaaaggtgggattatttgcctttgtgggatctacaaaaggtaactgtgtctgccttgggcagaaatcagaagatctgagctctattcttgccttgctactagcaagctgggcaatcttggataagtcaccagccctctctgggtctgttttctcatctgtaaaataaagaactggccaagtcagtgtaatagcaatacccagcatttgtacaatgctttccagttgtacttttccaaacagcatctcatttggtcctcatagccctttgttggagagatgcttgtgggctggtcattcagctggtgcaaagcaaggctggacc

SEQ ID NO: 366513 - DNA, 632 bp, Homo sapiens
ctcatccttcctaataaaactcttgccccattgcattccatgcttcctggttgggatttttctagaccaactcagccaccagttttatgagggactgtgggtgtgagcaggtctttaggagtcaggaagaggaggagtcaggggggtggctacacagtgcaggcasctcaatggacagcagtctttctgggacctgtgatctagaagacaggagaagatgaacacatctggagacccagcccagacgggccctgaaggctgtagagggtgagtggctcatttgtccagctttccatgccagggacaagggaaaggtgggattatttgcctttgtgggatctacaaaaggtaactgtgtctgccttgggcagaaatcagaagatctgagctctattcttgccttgctactagcaagctgggcaatcttggataagtcaccagccctctctgggtctgttttctcatctgtaaaataaagaactggccaagtcagtgtaatagcaatacccagcatttgtacaatgctttccagttgtacttttccaaacagcatctcatttggtcctcatagccctttgttggagagatgcttgtgggctggtcattcagctggtgcaaagcaaggctggacc

SEQ ID NO: 366514 - DNA, 567 bp, Homo sapiens
tacatacccagttctgttacaactgcctaatatctactaatgggcccctcacaacaacctcatttatcaatgaaaataatgaggcacaaagagctcaaaaaagggagggaatttgagtgagcatgtgctgctgtctttatgcaagctgctaaacagcttggtgctctgctctcagttacaataacagggaggcaggaagagcatcaatgatacaagttccttgataaatcaaaggctcaactgaaaaacgtgggcyagatggcagtggaagtaaatgtgtaaatgggttcatcattaagtgaaacaatgaatgttgcagtgccatggacagtgcctggcacagtgtatatcctcctggacaagcaggagctgtctcagaccacaggcaaatggctagctgcctgggctggacactgggcaggggccagtgatcctggggctgcagagtgtgggcctatacccaggggtgaacctgagacctagaaccaaatatacagttcaatcaggaatcattcttggaattccagaccagagtggagatttcagacttatctggaggacagcctg

SEQ ID NO: 366515 - DNA, 467 bp, Homo sapiens
ataactaacaggtctttaacaccactctcaggtatcaccattttgggtttttggtctcagcacattatttatagattacggtgtccttatgataacacatttatwtgaatttttgttggtccagttgaagagagataatttgaatctttacagatggctgtatgcaaacatttaaaacttttgagagaatacagtgcaccagggaggttaccattatgactatcaagaggataatatcaagagtttagaatgtgctccgtaaccagggtctccatgaatgaaaccaactaaaattaaatagattaaataacaagctagataaagagtctacttgttttaaccaagcagccttttcattaatcccttacaattgaatttccataatacttgatgtattcctccatgtgtaacaagaagtatcagcaactgcacagatacttttctgtttagcaaggaggtaatctaaa

SEQ ID NO: 366516 - DNA, 575 bp, Homo sapiens
agttatcataagtaatttggcttggaccatggagtttatttaaattgcatatctaaactttagtactggttgatttarcatgaaaatctggaagagtgttttcttggtattcaattaattcttgtcctgcttgcattagcagttttataagccagctcctttcttggagttctgggaattcttacccagtccaaatgatatgatcctaaaatgaccaaaaaccagtatttaagagtgcttttcagtgtccttctcatcctttttatgaacctccttgaagacacaatgatctaggattttactttgcttgtgaagagtttacagaaactgcatcagaattaagcaattaactataaaagtgatttaaaatggtcatagtgaaagatacaatagacaaagaaatttggtcatttttgtgacctactgttagaaataccaaaattgttagaaatagataatcggtgccacaaagaaaagtcagcacagagaccaaagatctctcagcaaggccatctttactttctgcagaaacgttgcttaatcacagatggaaaaatggcaagagcacacttgaa

SEQ ID NO: 366517 - DNA, 385 bp, Homo sapiens
cagtgattttaatctgggcaagtggattacaccgatttttactctttttttgtgcttttaggctttttttctaatttttaaataataataatwattattttttaaaatcaagatggggtctcactctgtcacccaggctggagtgcagtggtgtgatcttggctcactgcagcctctgcctcctgggctcaagcgatcctcccatctcagcctcctgagtagctgggactataggtgcacaccaccacacccagctaatgtttttgtatttttggtggagatgggttttcgccatgttgcccaggctggtctcgaattcctgagctcaagtgatccacaaaccttggcctaataattaatgtttataatttgtgtaattataaaa

SEQ ID NO: 366518 - DNA, 590 bp, Homo sapiens
cttaatctgataatagtgtactctccaggagggagaagagaactccctctgtagtagcaccagacacagtgcagtgacacactgtgaaccagaaagatcttgaagatggtttatcagggtggggtgagtgttgggaacccacgggtgggtgggacttaaaggaatcgagcaccccagcggagcctgagctctaactccgtggctattttggatatcaactgctgcttttgtgtgtttcccagctgcacgtctgtgaggcttgcaggtgttttacattattaatcagctagatcttttttcttcctaataatctagcctccttcctacctgtgaaagccctttgaaaaacaggcagcagtgcatacattcagtgtttaatggaaggggcagggcagggcccacgtttccattaagcacagcaggctttgtgcctggggcccataggactttcaggggccatgaatttgttttaattgtggtttcttttaaaatcagaagaawaaaatgaatataataataatgatatagaagaataaatccagcctacattatacttgtctttgtaccaatgcaatcataaaatataactt

SEQ ID NO: 366519 - DNA, 511 bp, Homo sapiens
tgaggggacagctacaatttgcagcaatactaccaacccttcccccaacatacccttctccccttcttccctgaaaaatgatccccaaatatgtccatgtcctaatccctggaatttatgaataygataacttacatgccaaaagtgtctttgctattgtgattaaattaaaggtgttgagatggggaggttgccctggattatctgggtgggcccagtgtaatcacaagggtccttataagagggagctaggaggctcagagaagacatgagggtgtaaacagaggtcacacagggaagaaaaggccactttgctgctgcttttgaagacggaggaggtgaccacaaaccaaggtggtctgtataagctggaaaaggctccccagagccaccaggggaatgcagccctgcccacccactttagagctctgacctcctgaactgtaagacaataaatgagttgtttaaagccactaagtttgtggtaatttgtcacagtagcagtaggtag

SEQ ID NO: 366520 - DNA, 543 bp, Homo sapiens
gcactaattaacaagggaatcatagaatggtgtaatttatgaaattgagcattggagaaaaggatagagtctttccagtacattcttgctattaagatacycgtgcaaaggcagagggtgtgggaaacagaaaatgcacatatttatacttcaaggtatagatcaactctacatgtcattaccctaccaagaaattcagtggctctgctgctaccacctttagatgcagacaggcagggcttccctttaaaggctctgctctggctcttccccagctgtgctcctacatctgaggagtccattaagccaagaaatgtgtccacctggaggtgactgtaccccttcagacctcacatcaggtacccaggagccagtattccctgcccaaatggctctgagccacttccagagcctgcataggcttctcccctagatcctgagatatgcacccctggacctgtggaatagccaagaaatgactgttttggaggggagaaagtgaagacagagcttggacatgtgggctagtgcgttcatggagtg

SEQ ID NO: 366521 - DNA, 598 bp, Homo sapiens
cactataactacctacataacatttacattgtacttggtatcataagaaatctagagatgatttaaagtatgtgacagtgtggatgtaggtgtataaaatactattatacatcattttatggaagggtcttgagcatctgtagatttttgtgtctgagggttcctagaaccagtaccccacaaatacaggggaacaactgtaatgagttcctagtaaactaggctgaagtattataactgtacacaaaataatttaaggcagaatgattaaataatatatagcagtatgtataagaagtgaagataattgaaaattaaattsataggaaagacatgacaaatataatgaaatcaatggaaaagttaaaactttagcaagatgtacaagcaaggattgggtagatttcatctgaaagatgtaatttctaatgacaaagtactttaatagtctagcctaatattttattgtaccttaaaacttccctctggctcattctggtcttatcacaccagctttcttatggcttcttttatctgccaagaattatgctctggtctaattgacctccccaaatttgtatattaaaattctcaccac

SEQ ID NO: 366522 - DNA, 598 bp, Homo sapiens
cactataactacctacataacatttacattgtacttggtatcataagaaatctagagatgatttaaagtatgtgacagtgtggatgtaggtgtataaaatactattatacatcattttatggaagggtcttgagcatctgtagatttttgtgtctgagggttcctagaaccagtaccccacaaatacaggggaacaactgtaatgagttcctagtaaactaggctgaagtattataactgtacacaaaataatttaaggcagaatgattaaataatatatagcagtatgtataagaagtgaagataattgaaaattaaattcataggaaagacatgacaaatataatgaaatcaatggaaaagytaaaactttagcaagatgtacaagcaaggattgggtagatttcatctgaaagatgtaatttctaatgacaaagtactttaatagtctagcctaatattttattgtaccttaaaacttccctctggctcattctggtcttatcacaccagctttcttatggcttcttttatctgccaagaattatgctctggtctaattgacctccccaaatttgtatattaaaattctcaccac

SEQ ID NO: 366523 - DNA, 547 bp, Homo sapiens
ctaaactgtgaatacatgagagaaaataacagaagcctggggtaaaatgccaacacaaagrgtttgaagaacaattctcaaagctcaagaaagctctgcaaatattattgttgccacaaaccaaagtagaagacagggtaatatatgagctattaggtagaatctttggaagaatcctgcttttgtgatggaactcactcattcctaaacctaaagcaactctacatcttctctaagaaaattttatagcaatctctaaaagcatcaaactgattccaaataatttaactgtgtttgagaacaaaatacaaatatacaaaaggaattcaacaaaatccatcacataacaatatagaattcacaatatctggttttgatgaacataataattagtgttgaaacatgttaattcagttgttaaaaatatgctttattttttcaaataagatgggaaaatatgtatattatgagaaaataaaaatggaagaaataaaaacaagcagactcctaaaacagaaaaaataagtatattagattaaaaatgtat

SEQ ID NO: 366524 - DNA, 547 bp, Homo sapiens
ctaaactgtgaatacatgagagaaaataacagaagcctggggtaaaatgccaacacaaagggtttgaagaacaattctcaaagctcaagaaarctctgcaaatattattgttgccacaaaccaaagtagaagacagggtaatatatgagctattaggtagaatctttggaagaatcctgcttttgtgatggaactcactcattcctaaacctaaagcaactctacatcttctctaagaaaattttatagcaatctctaaaagcatcaaactgattccaaataatttaactgtgtttgagaacaaaatacaaatatacaaaaggaattcaacaaaatccatcacataacaatatagaattcacaatatctggttttgatgaacataataattagtgttgaaacatgttaattcagttgttaaaaatatgctttattttttcaaataagatgggaaaatatgtatattatgagaaaataaaaatggaagaaataaaaacaagcagactcctaaaacagaaaaaataagtatattagattaaaaatgtat

SEQ ID NO: 366525 - DNA, 573 bp, Homo sapiens
ggagtggagcccttatgaaaggtgccagagagacccctccctcttccaccatgtgaggttagactgagaaatacatctctgtggtttataagcttctcagtctatggcattttgttatagcagcccatgctaatgaatacagatgaccgtgtgtctgcagaccttcctaggaaattattgagtccttcattgaatactaaactgtgaatacatgagagaaaataacagaagcctggggtaaaatgccaacacaaagggtttgaagaacaattctcaaagctcaagaaagctctgcaaatattattgttgccacaaaccaaagtagaagacagggtaatrtatgagctattaggtagaatctttggaagaatcctgcttttgtgatggaactcactcattcctaaacctaaagcaactctacatcttctctaagaaaattttatagcaatctctaaaagcatcaaactgattccaaataatttaactgtgtttgagaacaaaatacaaatatacaaaaggaattcaacaaaatccatcacataacaatatagaattcacaatatctggttttga

SEQ ID NO: 366526 - DNA, 573 bp, Homo sapiens
ggagtggagcccttatgaaaggtgccagagagacccctccctcttccaccatgtgaggttagactgagaaatacatctctgtggtttataagcttctcagtctatggcattttgttatagcagcccatgctaatgaatacagatgaccgtgtgtctgcagaccttcctaggaaattattgagtccttcattgaatactaaactgtgaatacatgagagaaaataacagaagcctggggtaaaatgccaacacaaagggtttgaagaacaattctcaaagctcaagaaagctctgcaaatattattgttgccacaaaccaaagtagaagacagggtaatatrtgagctattaggtagaatctttggaagaatcctgcttttgtgatggaactcactcattcctaaacctaaagcaactctacatcttctctaagaaaattttatagcaatctctaaaagcatcaaactgattccaaataatttaactgtgtttgagaacaaaatacaaatatacaaaaggaattcaacaaaatccatcacataacaatatagaattcacaatatctggttttga

SEQ ID NO: 366527 - DNA, 546 bp, Homo sapiens
gtccttcattgaatactaaactgtgaatacatgagagaaaataacagaagcctggggtaaaatgccaacacaaagggtttgaagaacaattctcaaagctcaagaaagctctgcaaatattattgttgccacaaaccaaagtagaagacagggtaatatatgagctattaggtagaatctttggaagaatcctgcttttgtgatggaactcactcattcytaaacctaaagcaactctacatcttctctaagaaaattttatagcaatctctaaaagcatcaaactgattccaaataatttaactgtgtttgagaacaaaatacaaatatacaaaaggaattcaacaaaatccatcacataacaatatagaattcacaatatctggttttgatgaacataataattagtgttgaaacatgttaattcagttgttaaaaatatgctttattttttcaaataagatgggaaaatatgtatattatgagaaaataaaaatggaagaaataaaaacaagcagactcctaaaacagaaaaaataagtatat

SEQ ID NO: 366528 - DNA, 546 bp, Homo sapiens
gtccttcattgaatactaaactgtgaatacatgagagaaaataacagaagcctggggtaaaatgccaacacaaagggtttgaagaacaattctcaaagctcaagaaagctctgcaaatattattgttgccacaaaccaaagtagaagacagggtaatatatgagctattaggtagaatctttggaagaatcctgcttttgtgatggaactcactcattcctaaacctaaagcaactctacatcttctctaagaaaattttatagcaatctctaaaagcatcaaactgattccaaataatttaactgtgtttgagaacaaaatacaaatatacaaaaggaattcaacaaaatccrtcacataacaatatagaattcacaatatctggttttgatgaacataataattagtgttgaaacatgttaattcagttgttaaaaatatgctttattttttcaaataagatgggaaaatatgtatattatgagaaaataaaaatggaagaaataaaaacaagcagactcctaaaacagaaaaaataagtatat

SEQ ID NO: 366529 - DNA, 547 bp, Homo sapiens
ctaaactgtgaatacatgagagaaaataacagaagcctggggtaaaatgccaacacaaagggtttgaagaacaattctcaaagctcaagaaagctctgcaaatattattgttgccacaaaccaaagtagaagacagggtaatatatgagctattaggtagaatctttggaagaatcctgcttttgtgatggaactcactcattcctaaacctaaagcaactctacatcttctctaagaaaattttatagcaatctctaaaagcatcaaactgattccaaataatttaactgtgtttgagaacaaaatacaaatatacaaaaggaattcaacaaaatccatcacataacaatatagaattcacaatatctggttttgatgaacataataattagtgttgaaacatgttaattcakttgttaaaaatatgctttattttttcaaataagatgggaaaatatgtatattatgagaaaataaaaatggaagaaataaaaacaagcagactcctaaaacagaaaaaataagtatattagattaaaaatgtat

SEQ ID NO: 366530 - DNA, 547 bp, Homo sapiens
ctaaactgtgaatacatgagagaaaataacagaagcctggggtaaaatgccaacacaaagggtttgaagaacaattctcaaagctcaagaaagctctgcaaatattattgttgccacaaaccaaagtagaagacagggtaatatatgagctattaggtagaatctttggaagaatcctgcttttgtgatggaactcactcattcctaaacctaaagcaactctacatcttctctaagaaaattttatagcaatctctaaaagcatcaaactgattccaaataatttaactgtgtttgagaacaaaatacaaatatacaaaaggaattcaacaaaatccatcacataacaatatagaattcacaatatctggttttgatgaacataataattagtgttgaaacatgttaattcagttgtwaaaaatatgctttattttttcaaataagatgggaaaatatgtatattatgagaaaataaaaatggaagaaataaaaacaagcagactcctaaaacagaaaaaataagtatattagattaaaaatgtat

SEQ ID NO: 366531 - DNA, 632 bp, Homo sapiens
tacattttgatttaaaaaatttgtataggattattttattaaaagtagaaaagcatttgatgacatttcacacatattcataataaagacttacagaaaagtaggcaagagaaacaaattatttcaaaagtaataaacatatataaaaatagttaatatagtgaaataccaaatggttcctcctactataagaaagaatgcaaaaatatccactatgaaccattctgtttgatacttagaaaactgcaatacagtgctgagagacattaaggcagacctaaataaatggagagataaaccaagttcaataatttgaatgctttakagtgttaagaaggtagttctactaaattgatttctagattaattgcaatatcagtccaaatctcagcaggctttttatataaataacaaatattttttcaaaattactatgtaatgttataaaatattataaattaatattgaaaatattttacatgaaagttcaaatttctggacccttttaaggtaagaggatggcagtgtttctatggtataaacactaagtatataaaaactgaagacttctattaatatcagacaaaatgggccacaaatcaagaaatatttttagcaggataaagatcaat

SEQ ID NO: 366532 - DNA, 632 bp, Homo sapiens
tacattttgatttaaaaaatttgtataggattattttattaaaagtagaaaagcatttgatgacatttcacacatattcataataaagacttacagaaaagtaggcaagagaaacaaattatttcaaaagtaataaacatatataaaaatagttaatatagtgaaataccaaatggttcctcctactataagaaagaatgcaaaaatatccactatgaaccattctgtttgatacttagaaaactgcaatacagtgctgagagacattaaggcagacctaaataaatggagagataaaccaagttcaataatttgaatgctttatagtgttaagaaggtagttctactaaattgatttctagattaattgcaatatcagtccaaatctcagyaggctttttatataaataacaaatattttttcaaaattactatgtaatgttataaaatattataaattaatattgaaaatattttacatgaaagttcaaatttctggacccttttaaggtaagaggatggcagtgtttctatggtataaacactaagtatataaaaactgaagacttctattaatatcagacaaaatgggccacaaatcaagaaatatttttagcaggataaagatcaat

SEQ ID NO: 366533 - DNA, 558 bp, Homo sapiens
atagaaattaaacaaaaacagatacccaagtatcagctggaatggttctcaaaaatatcatagtgagattataaagcatgtgttgaaataatacagagaaaacaataacatcttatttaaatttgaagatacaaacactacygtatgcggtataaaatattctatacacagacctgtacttaaaaatagagaaatatacaaggggatgctaaacaattttagcctgtagttatcccttgtagaatttcttataatcttgtttctggttatgttgctgtatcaattatttttcagttttgggtatgtgtgaaatatttcataaaaggaagttggacgttttaataatacattgactttaagaggaggaagaataggtgattggggtattttgttatataccaacacatgactgaaataatcatctattctaattctgttcagttcagtggaaagtctttgaagcttttttaacagagttgcactttgtcatatctttgagaacattgtgttagattaagtggaacaggaatgcttagagggaaggagattaaaataatg

SEQ ID NO: 366534 - DNA, 558 bp, Homo sapiens
atagaaattaaacaaaaacagatacccaagtatcagctggaatggttctcaaaaatatcatagtgagattataaagcatgtgttgaaataatacagagaaaacaataacatcttatttaaatttgaagatacaaacactactrtatgcggtataaaatattctatacacagacctgtacttaaaaatagagaaatatacaaggggatgctaaacaattttagcctgtagttatcccttgtagaatttcttataatcttgtttctggttatgttgctgtatcaattatttttcagttttgggtatgtgtgaaatatttcataaaaggaagttggacgttttaataatacattgactttaagaggaggaagaataggtgattggggtattttgttatataccaacacatgactgaaataatcatctattctaattctgttcagttcagtggaaagtctttgaagcttttttaacagagttgcactttgtcatatctttgagaacattgtgttagattaagtggaacaggaatgcttagagggaaggagattaaaataatg

SEQ ID NO: 366535 - DNA, 490 bp, Homo sapiens
tgctcactttttttcagactcctccatctcaggagggccccagtattgccaggctgggagaaacccaaaccatgaggatagaccacgaataggagttctggttgacaatcccagttcattcctagcttcaaatacacaaggccaagtgccagatatgggcataaaaagcaattttggaagtggacactccagtccaagctgtcctagccctcagctatttgagttgcatccagacatgtaaatcttcccagctgaggcctcatcattgasgtgcagaaaaggggcatgcccactgtgcctgtttctaaattcctgacccacagaacctgtgagcataatacaagtttactattttataccagtaagtttggggtatagtattatgcaacaatacaacctgatgcacaaaaaatctcttctttgttacataaactctatataaactggcatatgcttagttcttaaacctctctccaatctccttctcttt

SEQ ID NO: 366536 - DNA, 490 bp, Homo sapiens
tgctcactttttttcagactcctccatctcaggagggccccagtattgccaggctgggagaaacccaaaccatgaggatagaccacgaataggagttctggttgacaatcccagttcattcctagcttcaaatacacaaggccaagtgccagatatgggcataaaaagcaattttggaagtggacactccagtccaagctgtcctagccctcagctatttgagttgcatccagacatgtaaatcttcccagctgaggcctcatcattgaggtgcagaaaaggggcatgcccactgtgcctgtttctaaattcctgacccacagwacctgtgagcataatacaagtttactattttataccagtaagtttggggtatagtattatgcaacaatacaacctgatgcacaaaaaatctcttctttgttacataaactctatataaactggcatatgcttagttcttaaacctctctccaatctccttctcttt

SEQ ID NO: 366537 - DNA, 490 bp, Homo sapiens
tgctcactttttttcagactcctccatctcaggagggccccagtattgccaggctgggagaaacccaaaccatgaggatagaccacgaataggagttctggttgacaatcccagttcattcctagcttcaaatacacaaggccaagtgccagatatgggcataaaaagcaattttggaagtggacactccagtccaagctgtcctagccctcagctatttgagttgcatccagacatgtaaatcttcccagctgaggcctcatcattgaggtgcagaaaaggggcatgcccactgtgcctgtttctaaattcctgacccacagaacctgtgarcataatacaagtttactattttataccagtaagtttggggtatagtattatgcaacaatacaacctgatgcacaaaaaatctcttctttgttacataaactctatataaactggcatatgcttagttcttaaacctctctccaatctccttctcttt

SEQ ID NO: 366538 - DNA, 490 bp, Homo sapiens
tgctcactttttttcagactcctccatctcaggagggccccagtattgccaggctgggagaaacccaaaccatgaggatagaccacgaataggagttctggttgacaatcccagttcattcctagcttcaaatacacaaggccaagtgccagatatgggcataaaaagcaattttggaagtggacactccagtccaagctgtcctagccctcagctatttgagttgcatccagacatgtaaatcttcccagctgaggcctcatcattgaggtgcagaaaaggggcatgcccactgtgcctgtttctaaattcctgacccacagaacctgtgagcataatacaagtttactaytttataccagtaagtttggggtatagtattatgcaacaatacaacctgatgcacaaaaaatctcttctttgttacataaactctatataaactggcatatgcttagttcttaaacctctctccaatctccttctcttt

SEQ ID NO: 366539 - DNA, 279 bp, Homo sapiens
tcaactaattgcaggaatcttttatttggttgaaatgttcaaacaagtcccactctgaattctattagaagtccatcattggcttctctctctttctcactgtcttaaatcatgtattttataacactatgaagaatgaagttcaaaagaataagctaaatttaattaattaaattatttatttatttattttgrgacagagtctcactctgtcacccaggccagagttcagttgcacgatcttggctcagtgcatccttcacctcctgggctcaagag

SEQ ID NO: 366540 - DNA, 279 bp, Homo sapiens
tcaactaattgcaggaatcttttatttggttgaaatgttcaaacaagtcccactctgaattctattagaagtccatcattggcttctctctctttctcactgtcttaaatcatgtattttataacactatgaagaatgaagttcaaaagaataagctaaatttaattaattaaattatttatttatttattttgagacagagtctcactctgtcacccaggccagagttcagttgcacgatcytggctcagtgcatccttcacctcctgggctcaagag

SEQ ID NO: 366541 - DNA, 561 bp, Homo sapiens
ggtgccccatttactcagcccactgctctcaactcctcaagggagggagtgcgcaattgaacaaggcaggaactggagtacaygagtgctggaaccagtggcctctttggtgccagaaggagtgaactcacccactctgacctgctgtgttccacctcttgcaggagagagcatgcaggtgagcaggtacaggagccaggaagagagctttggggtgttggcaggagcaaactccatgtgggccccatagcagcccctggggttaggggggtgcctgtgattcctgaagccccagtgggcatattacagtgctcctttagctctgccgtcttcagacagctgaagtgttagcagctcagcatgcctttttgtatccacactcactcctgagctcttgtttggcatccaggaaaaaatcagctcacagaaacgaattgaaggatggtaaatgcagaggattttattgccaaggaaagtggctctcagcaggaagggcagctgggaaggagatgtagcaggaaggtttctggctggactcttctccaaagttgcactgtcaag

SEQ ID NO: 366542 - DNA, 561 bp, Homo sapiens
ggtgccccatttactcagcccactgctctcaactcctcaagggagggagtgcgcaattgaacaaggcaggaactggagtacacgagtgctggaaccagtggcctctttggtgccagaaggagtgaactcacccactctgacctgctgtgttccacctcttgcaggagagagcatgcaggtgagcaggtayaggagccaggaagagagctttggggtgttggcaggagcaaactccatgtgggccccatagcagcccctggggttaggggggtgcctgtgattcctgaagccccagtgggcatattacagtgctcctttagctctgccgtcttcagacagctgaagtgttagcagctcagcatgcctttttgtatccacactcactcctgagctcttgtttggcatccaggaaaaaatcagctcacagaaacgaattgaaggatggtaaatgcagaggattttattgccaaggaaagtggctctcagcaggaagggcagctgggaaggagatgtagcaggaaggtttctggctggactcttctccaaagttgcactgtcaag

SEQ ID NO: 366543 - DNA, 587 bp, Homo sapiens
aattaattaaattatttatttatttattttgagacagagtctcactctgtcacccaggccagagttcagttgcacgatcttggctcagtgcatccttcacctcctgggctcaagagatcctcctgaagcagggcatttccctgaccccttcatgggactcgtgacaggggtgccccatttactcagcccactgctctcaactcctcaagggagggagtgcgcaattgaacaaggcaggaactggagtacacgagtgctggaaccagtggcctctttggtgccagaaggagtgaactcacccactctgacctgctgtgttccacctcttgcaggagagagcatgcaggtgagcaggtacaggagccaggaagagagctttggggtgttggcaggagcaaactccatgtgggccccatagcagcccctggggttaggggggtgcctgtgattcctgaagccccagtggrcatattacagtgctcctttagctctgccgtcttcagacagctgaagtgttagcagctcagcatgcctttttgtatccacactcactcctgagctcttgtttggcatccaggaaaaaatca

SEQ ID NO: 366544 - DNA, 561 bp, Homo sapiens
ggtgccccatttactcagcccactgctctcaactcctcaagggagggagtgcgcaattgaacaaggcaggaactggagtacacgagtgctggaaccagtggcctctttggtgccagaaggagtgaactcacccactctgacctgctgtgttccacctcttgcaggagagagcatgcaggtgagcaggtacaggagccaggaagagagctttggggtgttggcaggagcaaactccatgtgggccccatagcagcccctggggttaggggggtgcctgtgattcctgaagccccagtgggcatattacagtgctcctttagctctgccrtcttcagacagctgaagtgttagcagctcagcatgcctttttgtatccacactcactcctgagctcttgtttggcatccaggaaaaaatcagctcacagaaacgaattgaaggatggtaaatgcagaggattttattgccaaggaaagtggctctcagcaggaagggcagctgggaaggagatgtagcaggaaggtttctggctggactcttctccaaagttgcactgtcaag

SEQ ID NO: 366545 - DNA, 561 bp, Homo sapiens
ggtgccccatttactcagcccactgctctcaactcctcaagggagggagtgcgcaattgaacaaggcaggaactggagtacacgagtgctggaaccagtggcctctttggtgccagaaggagtgaactcacccactctgacctgctgtgttccacctcttgcaggagagagcatgcaggtgagcaggtacaggagccaggaagagagctttggggtgttggcaggagcaaactccatgtgggccccatagcagcccctggggttaggggggtgcctgtgattcctgaagccccagtgggcatattacagtgctcctttagctctgccgtcttcagacagctgaagtgttagcagctcagcatgcctttttgtatccacactcactcctgagctcttgtttggcatccaggaaaaaatcagctcacagaaacgaattgaaggatggtaaatgcagaggattttattgccaaggaaagtggctctcagcaggaagggcagctgggaaggasatgtagcaggaaggtttctggctggactcttctccaaagttgcactgtcaag

SEQ ID NO: 366546 - DNA, 657 bp, Homo sapiens
aacagcattgccaatttattagcttgtcatgatgattaaatgagataatccatatatcacaccaagtacccactacgtaataagcaactaattaaatttgactaatattaataatttcattattattcatcttaatatcatggcatgacttctaaggtatattattaaatagaaaaagakaagttttaaactgagccatagtttagaacttgacttaaagcagactcacaaagcaaatgctcatatctaggacaggtaaatctacacgtgtttatacacacattcactgtattggggaaaatacacaccaaactggaaacactggttgtctctgaagaagagacagggctttggcaatattcaaattaggctttaactgtttctgaaagtttcagttctctataaggagaaggtattacttatgtaatttttaaaaattacatattaagtactaaatgactgaagcttcttagaattgatgggtgcaggcatcacatgggcagcaaggcattcacataatggagaatcatggtctcctgtagatgtctaggagtgataaaattaactaccttttaggtggtgtagtttcctggttgagctgataattattaagttaatgattagtaggttatttctcaacaccgaagagattattag

SEQ ID NO: 366547 - DNA, 586 bp, Homo sapiens
aaaataccttattaacatttttataacactctgaactgaaataaacagaccactctcgattttagcatctggttccaaacaattcttgtttgggtgataactttttaaaaacaaatgttgggcatctttcatcgacttttcatcaagtaacagctgttcctttagagcaaaatgtatgcatgttggaagtgtgactgatgctyacttctgttttgttctgtgtgagaaagctttatgttgggtgcaattcagaaaacaaatggtttcaaatcttttgaatagatgccatagcacagtttaaatgcagcttcttgtgatttttagaataatttcagccacaatttttacattcaatttataactatactaagacattctccttcagaacaaaggcatttctgttttcatgtgctcttgggcatcttcgggtcattcattatatcaatcatttatcttcgtaaagcgtttggctatgaacaattacttactacaccaaagcatgaaagaaatagatatagctcatctgctcttgaatgcatttctacagattcccttaggataattcctgtttcaacttaagctatta

SEQ ID NO: 366548 - DNA, 463 bp, Homo sapiens
tgaaggttcaggtgtatttaagggcagcttaattataagacactatgaaattctcctaattaatttggagctaaatattctacatcaaatattttacaaaacttaaagaaatatttacttttcacatgattacgattttgatactaggttaaaaatgacttataytggcattttttaaacagtttaagacaaataatgtttttgatactgtttattataacatatgaaaagtctttatgcagatatactctattttatcgtctgttcatttcatgttgcatttgcatgcactcctgaattacttgttactaaaacatacagaacagacagaaagttaaaattggttaatttctatctaatctggataagataaacacaatgagtgaaataaataattatgtcaaataacaaaaacctcatgcatagaaacttcaacatttctgaataacaaaaagtataacat

SEQ ID NO: 366549 - DNA, 463 bp, Homo sapiens
tgaaggttcaggtgtatttaagggcagcttaattataagacactatgaaattctcctaattaatttggagctaaatattctacatcaaatattttacaaaacttaaagaaatatttacttttcacatgattacgattttgatactaggttaaaaatgacttatactggcattttttaaacagtttaagacaaataatgtttttgatactgtttattataacatatgaaaagtctttatgcaratatactctattttatcgtctgttcatttcatgttgcatttgcatgcactcctgaattacttgttactaaaacatacagaacagacagaaagttaaaattggttaatttctatctaatctggataagataaacacaatgagtgaaataaataattatgtcaaataacaaaaacctcatgcatagaaacttcaacatttctgaataacaaaaagtataacat

SEQ ID NO: 366550 - DNA, 463 bp, Homo sapiens
tgaaggttcaggtgtatttaagggcagcttaattataagacactatgaaattctcctaattaatttggagctaaatattctacatcaaatattttacaaaacttaaagaaatatttacttttcacatgattacgattttgatactaggttaaaaatgacttatactggcattttttaaacagtttaagacaaataatgtttttgatactgtttattataacatatgaaaagtctttatgcagatatactctattttatygtctgttcatttcatgttgcatttgcatgcactcctgaattacttgttactaaaacatacagaacagacagaaagttaaaattggttaatttctatctaatctggataagataaacacaatgagtgaaataaataattatgtcaaataacaaaaacctcatgcatagaaacttcaacatttctgaataacaaaaagtataacat

SEQ ID NO: 366551 - DNA, 463 bp, Homo sapiens
tgaaggttcaggtgtatttaagggcagcttaattataagacactatgaaattctcctaattaatttggagctaaatattctacatcaaatattttacaaaacttaaagaaatatttacttttcacatgattacgattttgatactaggttaaaaatgacttatactggcattttttaaacagtttaagacaaataatgtttttgatactgtttattataacatatgaaaagtctttatgcagatatactctattttatcgtctgttcatttcatgttgcatttgcatgcactcctgaattacttgttactaaaacatacagaacagacagaaagttaaaattggttaatttctatctaatctggataagataaacacaatgagtgaaataaatmattatgtcaaataacaaaaacctcatgcatagaaacttcaacatttctgaataacaaaaagtataacat

SEQ ID NO: 366552 - DNA, 537 bp, Homo sapiens
cagttaggcttctgcaaaaaatcttaaataatcactgatatgggttggttctgtgtcttcacccaaatctcatcttgtagctcccataatttccacgtgttatgggaagkatccagtgggagatgtctgaatcatgagggcacgtatgtcccatgctgttcccatgatagtgaatggatctcacgagatctgatggtgttaaaaatgggagtttctccacacaatctcttttttgcctgctgccatccatgtaagatgtagcttactccttgccttccaccacgattatgatgcctctccagccatgtggaactgtaagtccaacaaaccactttctttcgtaaattgcccagttgcaggtatgtttttatcagcagcatgaaaatgaactaatacagtaaattgttaccagtagagtggggtgctggtggaaacatatccaaaaatatggaaacgacattggaactgtgtaacaagcagaggttggaacagtttggaggactcagaagaagacaggaaaatgtggccaagtttgga

SEQ ID NO: 366553 - DNA, 524 bp, Homo sapiens
catgggggcaggtctttcccatgctgttctcataatagtgaatgggtctcacaagatctagtggtgttaaaaacaggattttctctgcacaagctctttttttgcctgctgccacccacataagatgtgtcttgctcctttttrccatgattgtgagtcctccccagccatgtggaactgtatgtccaataaacctttttcttttgtaagttgtccagtcgtgggtatgtctttatcagcagtgttaaaatggactaatacaatcactctatcaaatgagataatatttattcctttaccactgacaactctctctcggctcttctattcaatcatgttactgatagacgctttgctttttgtttttgttgtttaacctgattgttatagcttattttatgaatttctgttcttcttttaattttacaacaattttactatttctccttacatgtttataagtcatatggagactccttctcatctaccctgaccccagaatattaaaacttttcagagtttca

SEQ ID NO: 366554 - DNA, 572 bp, Homo sapiens
tctttttaaataggtaaatgttacagtgattattactcaagtgtatatcctgagaatttttacawtaatttgttacatagattaacttttttttcttcaaaatacaactaatttactgattatactttttgggtcttctattaacattattagcaaaatttagaaaatttattcatttatatacaaaattaatagatacattaaatactctgtgccacccaatgcccaattcactgagagcattttactgaataaacaaaaaattttgacccttgattaccttattgttggaggtaacaaaccatagaagatagacaatagtcaatgtaaaaataaataagtggttttgacaatggacaataagcaaaaatacctgttcacttgttgtattggtccgttctcacactgctataaagagctgctagatgctggttaatatataaaggaaagaggcttaattgactcagaattctgcaggtctggggaagcctcagaaaacttacaatcatgccagaaggggaagcaaaccatgtccttctgcacattgtggcaggaaggaaaagtgcagagtg

SEQ ID NO: 366555 - DNA, 572 bp, Homo sapiens
tctttttaaataggtaaatgttacagtgattattactcaagtgtatatcctgagaatttttacaawaatttgttacatagattaacttttttttcttcaaaatacaactaatttactgattatactttttgggtcttctattaacattattagcaaaatttagaaaatttattcatttatatacaaaattaatagatacattaaatactctgtgccacccaatgcccaattcactgagagcattttactgaataaacaaaaaattttgacccttgattaccttattgttggaggtaacaaaccatagaagatagacaatagtcaatgtaaaaataaataagtggttttgacaatggacaataagcaaaaatacctgttcacttgttgtattggtccgttctcacactgctataaagagctgctagatgctggttaatatataaaggaaagaggcttaattgactcagaattctgcaggtctggggaagcctcagaaaacttacaatcatgccagaaggggaagcaaaccatgtccttctgcacattgtggcaggaaggaaaagtgcagagtg

SEQ ID NO: 366556 - DNA, 572 bp, Homo sapiens
tctttttaaataggtaaatgttacagtgattattactcaagtgtatatcctgagaatttttacaataatttgttacatagattaacttttttttcttcaaaatacaactaatttactgattatactttttgggtcttctattaacattattagcaaaatttagaaaatttattcatttatatacaaaattaatagatacattaaatactctgtgccacccaatgcccaattcactgagagcattttactgaataaacaaaaaattttgacccttgattaccttattgttggaggtaacaaaccatagaagatagacaatagtcaatgtaaaaataaataagtggttttgacaatggacaataagcaaaaatacctgttcacttgttgtattggtccgttctcacactgctataaagagctgctagatgctggttaatatataaaggaaagaggcttaattgactcasaattctgcaggtctggggaagcctcagaaaacttacaatcatgccagaaggggaagcaaaccatgtccttctgcacattgtggcaggaaggaaaagtgcagagtg

SEQ ID NO: 366557 - DNA, 572 bp, Homo sapiens
tctttttaaataggtaaatgttacagtgattattactcaagtgtatatcctgagaatttttacaataatttgttacatagattaacttttttttcttcaaaatacaactaatttactgattatactttttgggtcttctattaacattattagcaaaatttagaaaatttattcatttatatacaaaattaatagatacattaaatactctgtgccacccaatgcccaattcactgagagcattttactgaataaacaaaaaattttgacccttgattaccttattgttggaggtaacaaaccatagaagatagacaatagtcaatgtaaaaataaataagtggttttgacaatggacaataagcaaaaatacctgttcacttgttgtattggtccgttctcacactgctataaagagctgctagatgctggttaatatataaaggaaagaggcttaattgactcagaattctgcaggtctggggargcctcagaaaacttacaatcatgccagaaggggaagcaaaccatgtccttctgcacattgtggcaggaaggaaaagtgcagagtg

SEQ ID NO: 366558 - DNA, 570 bp, Homo sapiens
tctgcaggtctggggaagcctcagaaaacttacaatcatgccagaaggggaagcaaaccatgtccttctgcacattgtggcaggaaggaaaagtgcagagtgaagggggtaaaagctttttataaaaccaccaaatctcatgagaactcactcactatcaygagaacaacatgggagaaccaccccatgatctaatcacctcccggagatccctcccccaacacatggggattataaatctgattataattcaagatgagattttgtgtgggaatggagccaaattatatcactagaatagataatatatataatacataagtaaattttatagtatactagcagatggttaattctactaacaaatacagaaaggtaaaggatgaaagggatctcttgcttaagaaagggatacacatttatatgtgttgattttaaggaatcaacaaggaatgattagcaagacttgaagagaaaggagaagccatgtgagtctctggggtggaatgttacaggcaaagataaaagccaggaaaaagcagacacttcctatattcctgtattcatcca

SEQ ID NO: 366559 - DNA, 570 bp, Homo sapiens
tctgcaggtctggggaagcctcagaaaacttacaatcatgccagaaggggaagcaaaccatgtccttctgcacattgtggcaggaaggaaaagtgcagagtgaagggggtaaaagctttttataaaaccaccaaatctcatgagaactcactcactatcacgagaacaacatgggagaaccaccccatgatctaatcacctcccggagatccctcccccaacacatggggattataaatctgattataattcaagatgagattttgtgtgggaatggagcyaaattatatcactagaatagataatatatataatacataagtaaattttatagtatactagcagatggttaattctactaacaaatacagaaaggtaaaggatgaaagggatctcttgcttaagaaagggatacacatttatatgtgttgattttaaggaatcaacaaggaatgattagcaagacttgaagagaaaggagaagccatgtgagtctctggggtggaatgttacaggcaaagataaaagccaggaaaaagcagacacttcctatattcctgtattcatcca

SEQ ID NO: 366560 - DNA, 570 bp, Homo sapiens
tctgcaggtctggggaagcctcagaaaacttacaatcatgccagaaggggaagcaaaccatgtccttctgcacattgtggcaggaaggaaaagtgcagagtgaagggggtaaaagctttttataaaaccaccaaatctcatgagaactcactcactatcacgagaacaacatgggagaaccaccccatgatctaatcacctcccggagatccctcccccaacacatggggattataaatctgattataattcaagatgagattttgtgtgggaatggagccaaatyatatcactagaatagataatatatataatacataagtaaattttatagtatactagcagatggttaattctactaacaaatacagaaaggtaaaggatgaaagggatctcttgcttaagaaagggatacacatttatatgtgttgattttaaggaatcaacaaggaatgattagcaagacttgaagagaaaggagaagccatgtgagtctctggggtggaatgttacaggcaaagataaaagccaggaaaaagcagacacttcctatattcctgtattcatcca

SEQ ID NO: 366561 - DNA, 570 bp, Homo sapiens
tctgcaggtctggggaagcctcagaaaacttacaatcatgccagaaggggaagcaaaccatgtccttctgcacattgtggcaggaaggaaaagtgcagagtgaagggggtaaaagctttttataaaaccaccaaatctcatgagaactcactcactatcacgagaacaacatgggagaaccaccccatgatctaatcacctcccggagatccctcccccaacacatggggattataaatctgattataattcaagatgagattttgtgtgggaatggagccaaattatatcactagaatagataatatatataatacataagtaaattttatagtatactagcagatggttaattctactaacaaatacagaaaggtaaaggaygaaagggatctcttgcttaagaaagggatacacatttatatgtgttgattttaaggaatcaacaaggaatgattagcaagacttgaagagaaaggagaagccatgtgagtctctggggtggaatgttacaggcaaagataaaagccaggaaaaagcagacacttcctatattcctgtattcatcca

SEQ ID NO: 366562 - DNA, 338 bp, Homo sapiens
atctctgtgcaaatgctctctctcttctatttacctctgcaattctagctaaattttcctttctaagccccaatcttcaatttctcaatatacagggagagttatcctttctttggattatcctttcactgtgtyttctggaaactgagagaaagcttgggataagtcagattttattttttcttttgtcagggatcagcatcctcagcttcttgtcaatggttaaaaaatcactgttgattatattttgtctgcagttagtttttatttgtgtgtgtgtgtttttgttttttgtttgtttgttttgtaaagaatttagtttagttcctcttactgta

SEQ ID NO: 366563 - DNA, 544 bp, Homo sapiens
catgtcttgacacctcattatgagaaaacaccagacaaatcgaaattgggagacattctaaaaatagaatccattggaatattaccttcaaaaaatgtttaggatgctatgaagggtgaagaaggactatggaatgcttctgatttaaagaagttaaagagacatagraaccaggaacaacacattatcctgaagtggattgttttttataaaaagcatcagggcagtttgtgaactagaatgggtcctctcttggtgattgttacatgacagctgtttgcatcaccttagcaacttaaagataaattgtttaaagataaattggcgtcgtttcatacaaacattaaagaaaatggtaatgtccaacagagtgcccacctaattactgttccaggggtcctcagaggctgttttcctactgtcttcttgatttttaaaatatattttagttgattggttttattcatgccataattggtggaaattaatccttgattctataaatttttacctagtccgtttccaatgttttttgtttgtttgt

SEQ ID NO: 366564 - DNA, 516 bp, Homo sapiens
agggcagtttgtgaactagaatgggtcctctcttggtgattgttacatgacagctgtttgcatcacyttagcaacttaaagataaattgtttaaagataaattggcgtcgtttcatacaaacattaaagaaaatggtaatgtccaacagagtgcccacctaattactgttccaggggtcctcagaggctgttttcctactgtcttcttgatttttaaaatatattttagttgattggttttattcatgccataattggtggaaattaatccttgattctataaatttttacctagtccgtttccaatgttttttgtttgtttgtttctctttccttacttatttatttatgcttttcttttactttttttgtaaagtggaataagttaggaatgagtatattatgaccaactaaactgagtagttttatgtcaagttgcaaattatgttaagtatcaaatatttgatttttttagatttcaaaatagtcacgttttcagaaaaaatcattagtagt

SEQ ID NO: 366565 - DNA, 516 bp, Homo sapiens
agggcagtttgtgaactagaatgggtcctctcttggtgattgttacatgacagctgtttgcatcacctyagcaacttaaagataaattgtttaaagataaattggcgtcgtttcatacaaacattaaagaaaatggtaatgtccaacagagtgcccacctaattactgttccaggggtcctcagaggctgttttcctactgtcttcttgatttttaaaatatattttagttgattggttttattcatgccataattggtggaaattaatccttgattctataaatttttacctagtccgtttccaatgttttttgtttgtttgtttctctttccttacttatttatttatgcttttcttttactttttttgtaaagtggaataagttaggaatgagtatattatgaccaactaaactgagtagttttatgtcaagttgcaaattatgttaagtatcaaatatttgatttttttagatttcaaaatagtcacgttttcagaaaaaatcattagtagt

SEQ ID NO: 366566 - DNA, 544 bp, Homo sapiens
catgtcttgacacctcattatgagaaaacaccagacaaatcgaaattgggagacattctaaaaatagaatccattggaatattaccttcaaaaaatgtttaggatgctatgaagggtgaagaaggactatggaatgcttctgatttaaagaagttaaagagacatagaaaccaggaacaacacattatcctgaagtggattgttttttataaaaagcatcagggcagtttgtgaactagaatgggtcctctcttggtgattgttacatgacagctgtttgcatcaccttagcaacttaaagataaattgyttaaagataaattggcgtcgtttcatacaaacattaaagaaaatggtaatgtccaacagagtgcccacctaattactgttccaggggtcctcagaggctgttttcctactgtcttcttgatttttaaaatatattttagttgattggttttattcatgccataattggtggaaattaatccttgattctataaatttttacctagtccgtttccaatgttttttgtttgtttgt

SEQ ID NO: 366567 - DNA, 516 bp, Homo sapiens
agggcagtttgtgaactagaatgggtcctctcttggtgattgttacatgacagctgtttgcatcaccttagcaacttaaagataaattgtttaaagataaattggcgtcgtttcatacaaacattaaagaaaatggtaatgtccaacagagtgcccacctaattactgttccaggggtcctcagaggctgttttcctactrtcttcttgatttttaaaatatattttagttgattggttttattcatgccataattggtggaaattaatccttgattctataaatttttacctagtccgtttccaatgttttttgtttgtttgtttctctttccttacttatttatttatgcttttcttttactttttttgtaaagtggaataagttaggaatgagtatattatgaccaactaaactgagtagttttatgtcaagttgcaaattatgttaagtatcaaatatttgatttttttagatttcaaaatagtcacgttttcagaaaaaatcattagtagt

SEQ ID NO: 366568 - DNA, 516 bp, Homo sapiens
agggcagtttgtgaactagaatgggtcctctcttggtgattgttacatgacagctgtttgcatcaccttagcaacttaaagataaattgtttaaagataaattggcgtcgtttcatacaaacattaaagaaaatggtaatgtccaacagagtgcccacctaattactgttccaggggtcctcagaggctgttttcctactgtcttcttgatttttaaaatatattttagttgattggttttattcatgccataattggtggaaattaatccttgattctataaatttttacctagtccgtttccaatgttttttgtttgtttgtttctctttccttacttatttatttatkcttttcttttactttttttgtaaagtggaataagttaggaatgagtatattatgaccaactaaactgagtagttttatgtcaagttgcaaattatgttaagtatcaaatatttgatttttttagatttcaaaatagtcacgttttcagaaaaaatcattagtagt

SEQ ID NO: 366569 - DNA, 428 bp, Homo sapiens
tcaaaaattgaatgtttttacttgtaagttattctttcaataataataaagagatgatcactagtcaktttatttttcatagttgaattgatttagttgaacttcattgggtgttcttatgttttagtcatgagtccatgctctttaacaagctaaaggaaaccatattatatgctaaaagatgtcagtttgtgaacaatttaatgaatatatagagttacaacatttttcccgattggatgttggggtttactataattctttgttactttatatgtgaatatactcactactcactatgtttatgtatgtaggaaacatgctagtgatgaaaattcaagcagttattaccctagttttctttcattaacaaaatacagaatagaaattatctacttattcttggaggtcttaaaatatcttttcag

SEQ ID NO: 366570 - DNA, 428 bp, Homo sapiens
tcaaaaattgaatgtttttacttgtaagttattctttcaataataataaagagatgatcactagtcagtttatttttcatagttgaattgatttagttgaacttcattgggtgttcttatgttttagtcatgagtccatgctctttaacaagctaaaggaaaccatawtatatgctaaaagatgtcagtttgtgaacaatttaatgaatatatagagttacaacatttttcccgattggatgttggggtttactataattctttgttactttatatgtgaatatactcactactcactatgtttatgtatgtaggaaacatgctagtgatgaaaattcaagcagttattaccctagttttctttcattaacaaaatacagaatagaaattatctacttattcttggaggtcttaaaatatcttttcag

SEQ ID NO: 366571 - DNA, 365 bp, Homo sapiens
tcaaacaaaaccatttcatgtatacaatgtacttttatttatgcttttctctatcattaagtagaaagccatttgcaccttagtctaaatctgaaatgtgcctctacctaacctttctaatacattttcactatttcttagttattagaataaatttacataatttctgaaacaactttctctatggagtattccctttrgtttcttttcccttccaaacaatttaatgaattacaaatatgggggagatattttttcaatgggtaagacttgacttctacaaatacatgtttaattccttctcaaaattatttctacttcctcttattcaacactgtgctagattttagggatatataataaga

SEQ ID NO: 366572 - DNA, 408 bp, Homo sapiens
ttcacctgtgtgggaattcttgcagatctctgtattattgatagtcattttgctctgacattttatacaaagctgaatcagcaacagtatgactaaacacaaccaaaaaagaaagctagaaagattatattagacacttacgtgtatggatcattatggtgaggactgctaaaaaaaamaaaacaaaacaaaaaaaaccttcagccaaaatagatttacagtttaatcgagtaatgaatgattcataaattggaaagcccccacaatcacagcagattcagagagactccaggggtgtctcatggtcagaatgaatttatagacaatacaaagtaaagtgacccatagaaatcagaagtgaggtacagaaacagctggattggttatggcttggcacttgccttattt

SEQ ID NO: 366573 - DNA, 408 bp, Homo sapiens
ttcacctgtgtgggaattcttgcagatctctgtattattgatagtcattttgctctgacattttatacaaagctgaatcagcaacagtatgactaaacacaaccaaaaaagaaagctagaaagattatattagacacttacgtgtatggatcattatggtgaggactgctaaaaaaaacaaaacaaaacaaaaaaaaccttcagccaaaatagatttacagtttaatcgagtaatgaatgattcataaattggaaagcccccacaatcacagcagattcagagagactccaggggtgtctcatgrtcagaatgaatttatagacaatacaaagtaaagtgacccatagaaatcagaagtgaggtacagaaacagctggattggttatggcttggcacttgccttattt

SEQ ID NO: 366574 - DNA, 576 bp, Homo sapiens
tacctattgagttaggttgcagttcattcacaaggactgaaatatagaagtatggcgtttttcctcaggccatatttaatttgatttaacaggactttgggtatgtcattgtattttactaatatattttacaaacaccccatgttatcttaatctatttaagttcacactttttaatcaaattttactttaaatgtatctaacctcctaaatttctgcctttgtgaaccaataatactttttccaaattcttattatagcayatatcagactatatagctatagacactttggcatcattgttttcccatacaaaacacaatacatttaatgaattaatgaatgatgcatcagcaaagaaggttttactgaaagtaagaaaaattataagccagtttgggtttcccaagaatcagacaccaagatggaattacacgtataagagagtaaccagagaaaacgcctttgaagaataaagagaagatagagcaagaggctgcaagagcctccagatcatgatgcaagccggcacctcaaaagaagagagagcatgaaagataattggaaaggaggagc

SEQ ID NO: 366575 - DNA, 576 bp, Homo sapiens
tacctattgagttaggttgcagttcattcacaaggactgaaatatagaagtatggcgtttttcctcaggccatatttaatttgatttaacaggactttgggtatgtcattgtattttactaatatattttacaaacaccccatgttatcttaatctatttaagttcacactttttaatcaaattttactttaaatgtatctaacctcctaaatttctgcctttgtgaaccaataatactttttccaaattcttattatagcatatatcagactatatagctatagacactttggcatcattgttttcccatacaaaacacaatacatttaatgaattaatgaatgatgcatcagcaaagaaggttttactgaaagtaagaaaaattataagccagtttgggtttcccaagaatcagacaccaagatggwattacacgtataagagagtaaccagagaaaacgcctttgaagaataaagagaagatagagcaagaggctgcaagagcctccagatcatgatgcaagccggcacctcaaaagaagagagagcatgaaagataattggaaaggaggagc

SEQ ID NO: 366576 - DNA, 576 bp, Homo sapiens
tacctattgagttaggttgcagttcattcacaaggactgaaatatagaagtatggcgtttttcctcaggccatatttaatttgatttaacaggactttgggtatgtcattgtattttactaatatattttacaaacaccccatgttatcttaatctatttaagttcacactttttaatcaaattttactttaaatgtatctaacctcctaaatttctgcctttgtgaaccaataatactttttccaaattcttattatagcatatatcagactatatagctatagacactttggcatcattgttttcccatacaaaacacaatacatttaatgaattaatgaatgatgcatcagcaaagaaggttttactgaaagtaagaaaaattataagccagtttgggtttcccaagaatcagacaccaagatggaattacacrtataagagagtaaccagagaaaacgcctttgaagaataaagagaagatagagcaagaggctgcaagagcctccagatcatgatgcaagccggcacctcaaaagaagagagagcatgaaagataattggaaaggaggagc

SEQ ID NO: 366577 - DNA, 576 bp, Homo sapiens
tacctattgagttaggttgcagttcattcacaaggactgaaatatagaagtatggcgtttttcctcaggccatatttaatttgatttaacaggactttgggtatgtcattgtattttactaatatattttacaaacaccccatgttatcttaatctatttaagttcacactttttaatcaaattttactttaaatgtatctaacctcctaaatttctgcctttgtgaaccaataatactttttccaaattcttattatagcatatatcagactatatagctatagacactttggcatcattgttttcccatacaaaacacaatacatttaatgaattaatgaatgatgcatcagcaaagaaggttttactgaaagtaagaaaaattataagccagtttgggtttcccaagaatcagacaccaagatggaattacacgtataagagagtaaccagagaaaacrcctttgaagaataaagagaagatagagcaagaggctgcaagagcctccagatcatgatgcaagccggcacctcaaaagaagagagagcatgaaagataattggaaaggaggagc

SEQ ID NO: 366578 - DNA, 510 bp, Homo sapiens
agtccatgtgggacaagaatgaaaagccctataatatcttccttgctcagcattggcagggagcaacctaaggagagcatggcacctgcatgtaagccaaaaataaaattcaatgtccgttaaccaactaaatgggcyctttatcttggccaagggcattttaaactaaacctgaaacagtaatggccatgatggaaatgggtggttgaacatgcttcgttatttactttcatcctttcggaattcatgcatagctgaacagtgttaacattaaagtagagacttaagaatgacaaaacagactcttcgtagcaataagatatcaacatgacagatagcaggccttgaaagaaatcaaagtatttcaccacaaaaatacatttctttgacatattttgaaatggccctacaaggctgtttctgtggggaaaatctccattttgtagagaatccccttctctttccaagtctttttcctgatttttcctgattccaagtcctttttccttt

SEQ ID NO: 366579 - DNA, 510 bp, Homo sapiens
agtccatgtgggacaagaatgaaaagccctataatatcttccttgctcagcattggcagggagcaacctaaggagagcatggcacctgcatgtaagccaaaaataaaattcaatgtccgttaaccaactaaatgggccctttatcttggccaagggcattttaaactaaacctgaaacagtaatggccatgatggaaatgggtggttgaacrtgcttcgttatttactttcatcctttcggaattcatgcatagctgaacagtgttaacattaaagtagagacttaagaatgacaaaacagactcttcgtagcaataagatatcaacatgacagatagcaggccttgaaagaaatcaaagtatttcaccacaaaaatacatttctttgacatattttgaaatggccctacaaggctgtttctgtggggaaaatctccattttgtagagaatccccttctctttccaagtctttttcctgatttttcctgattccaagtcctttttccttt

SEQ ID NO: 366580 - DNA, 510 bp, Homo sapiens
agtccatgtgggacaagaatgaaaagccctataatatcttccttgctcagcattggcagggagcaacctaaggagagcatggcacctgcatgtaagccaaaaataaaattcaatgtccgttaaccaactaaatgggccctttatcttggccaagggcattttaaactaaacctgaaacagtaatggccatgatggaaatgggtggttgaacatgcytcgttatttactttcatcctttcggaattcatgcatagctgaacagtgttaacattaaagtagagacttaagaatgacaaaacagactcttcgtagcaataagatatcaacatgacagatagcaggccttgaaagaaatcaaagtatttcaccacaaaaatacatttctttgacatattttgaaatggccctacaaggctgtttctgtggggaaaatctccattttgtagagaatccccttctctttccaagtctttttcctgatttttcctgattccaagtcctttttccttt

SEQ ID NO: 366581 - DNA, 466 bp, Homo sapiens
aatctctcctgtttttcttagaaatgtaaagatgttgcatctgtaaccacaggctgcttktaatcctaaaagtcagcgtgataatgaaatccagtgattaatttctgtcttctaatcaataagtagacatatcaatttatagtatgttagaaagcctcaacttcactgaaacaaaaagcaagaggctctgcaaatgttggagtgtgctaaaggaaaagcatggactgatgtttggggaaaggttggtcaatgtgatgaggccatctgtgtttgctaatagtgcttatcaaaattaggttcctacgcagagacagagaccaggagacaatcctgtatccttcttgatccttatagtccaaagggatggctcccaagtctttcagaaagacatttccatgttgtaggagatttaaaggggcagagaaagggtttataactgcaggttatctgtctttttttttttttt

SEQ ID NO: 366582 - DNA, 373 bp, Homo sapiens
ccaacaaccttggcacatgttcttaggatctcctgggctgtgtgacaggccgaggtcactcatatttgcctcagaataaatctcttcaaatatttcacagagtttgactcttttcttcaacatgcattaccactgtagtagctctgaagtggttgagttggaggtaacccaccaacaaccctcctcatggaaatttctcttgaatgaaaatatgggaggagtaaattcttcactgccaaatrctatttcaaattctttcaagcataaggtaaattcattatttaacataaaagtcaatcaagaggtaaaaagaggtcacagtttgcttacgtattttctggcacttctttgctattggctgtgtcacttttac

SEQ ID NO: 366583 - DNA, 530 bp, Homo sapiens
ttgactcttttcttcaacatgcattaccactgtagtagctctgaagtggttgagttggaggtaacccaccaacaaccctcctcatggaaatttctcttgaatgaaaatatgggaggagtaaattcttcactgccaaatactatttcaaattctttcaagcataaggtaaattcattatttaacataaaagtcaatcaagaggtaaaaagaggtcacagtttgcttacgtattttctggcacttctttgctattggctgtgtcacttttacccttaacattkctgcaaaaatgtctgcagacatttagggtcatcatattcagatacaaccttacccagaagaccaagaaagagacaccaagagaaacatttatcttaaaaactcttaaggtaatttgccctgatttgcctttgtactgaattgggccatatgcgtatttttgttcttatttttggcaaagaatcaggctatacttagagtaatcacatcatacctgaatctgaagacgagacagtaaacttagagaagta

SEQ ID NO: 366584 - DNA, 530 bp, Homo sapiens
ttgactcttttcttcaacatgcattaccactgtagtagctctgaagtggttgagttggaggtaacccaccaacaaccctcctcatggaaatttctcttgaatgaaaatatgggaggagtaaattcttcactgccaaatactatttcaaattctttcaagcataaggtaaattcattatttaacataaaagtcaatcaagaggtaaaaagaggtcacagtttgcttacgtattttctggcacttctttgctattggctgtgtcacttttacccttaacatttctgcaaaaatgtctgcagacatttagggtcatcatattcagatacaaccytacccagaagaccaagaaagagacaccaagagaaacatttatcttaaaaactcttaaggtaatttgccctgatttgcctttgtactgaattgggccatatgcgtatttttgttcttatttttggcaaagaatcaggctatacttagagtaatcacatcatacctgaatctgaagacgagacagtaaacttagagaagta

SEQ ID NO: 366585 - DNA, 530 bp, Homo sapiens
ttgactcttttcttcaacatgcattaccactgtagtagctctgaagtggttgagttggaggtaacccaccaacaaccctcctcatggaaatttctcttgaatgaaaatatgggaggagtaaattcttcactgccaaatactatttcaaattctttcaagcataaggtaaattcattatttaacataaaagtcaatcaagaggtaaaaagaggtcacagtttgcttacgtattttctggcacttctttgctattggctgtgtcacttttacccttaacatttctgcaaaaatgtctgcagacatttagggtcatcatattcagatacaaccttacccagaagaccaagaaagagacaccaagagaaacatttatyttaaaaactcttaaggtaatttgccctgatttgcctttgtactgaattgggccatatgcgtatttttgttcttatttttggcaaagaatcaggctatacttagagtaatcacatcatacctgaatctgaagacgagacagtaaacttagagaagta

SEQ ID NO: 366586 - DNA, 530 bp, Homo sapiens
ttgactcttttcttcaacatgcattaccactgtagtagctctgaagtggttgagttggaggtaacccaccaacaaccctcctcatggaaatttctcttgaatgaaaatatgggaggagtaaattcttcactgccaaatactatttcaaattctttcaagcataaggtaaattcattatttaacataaaagtcaatcaagaggtaaaaagaggtcacagtttgcttacgtattttctggcacttctttgctattggctgtgtcacttttacccttaacatttctgcaaaaatgtctgcagacatttagggtcatcatattcagatacaaccttacccagaagaccaagaaagagacaccaagagaaacatttatcttaaaaactcttaaggtaatttgccctgatttgcctttgtactgaattgggycatatgcgtatttttgttcttatttttggcaaagaatcaggctatacttagagtaatcacatcatacctgaatctgaagacgagacagtaaacttagagaagta

SEQ ID NO: 366587 - DNA, 505 bp, Homo sapiens
aatcacatcatacctgaatctgaagacgagacagtaaacttagagaagtactgaagccttrgaagccttggatatattgaatatgttctattttagaaagaaaaggtgagataatgtatgctggcagtcaaccaacagcatatgctcctaatgaacaactggagagtcatttaagttcaatgttggggattttattagaaactgtaagatgaacacacaattcattttctctttccttgtaaatttggacaatatttgctatattcgcctatattttggcatagaaatttaggttctaagtatatagtagtgatgtagccttcttacagggtcacatagacccagaattaataatttttaacactctttttattctctctggttggctaacattaaaacaatccacagaaaacccccaagagctatgtattgaggatggcaaaaccacagatgggaaaataataaatctttgaatgaccctgcaggaaatcacagatagcattcc

SEQ ID NO: 366588 - DNA, 505 bp, Homo sapiens
aatcacatcatacctgaatctgaagacgagacagtaaacttagagaagtactgaagccttggaagccttggatatattgaatatgttctattttagaaagaaaaggtgagataatgtatgctggcagtcaaccaacagcatatgctcctaatgaacaactggagagtcatttaagttcaatgttggggattttattagaaactgtaagatgaacacacaattcattttctctttccttgtaaatttggacaatatttgctatattcgcctatattttggcatagaaatttaggttctaagtatatagtagtgatgtagccttcttacagggtcacatagacccagaattaataatttttaacactctttttatyctctctggttggctaacattaaaacaatccacagaaaacccccaagagctatgtattgaggatggcaaaaccacagatgggaaaataataaatctttgaatgaccctgcaggaaatcacagatagcattcc

SEQ ID NO: 366589 - DNA, 574 bp, Homo sapiens
attttttcagcattactgttaccacaattattacaggaaatgaaaccagtaaaaaaaaaatagagggaacaaggtttattgacatctatgaggcattttctttcccctaatattacatactctagattttatttctgcacaaaaaatattctctatgtctagcctaaagaactatgtcttattcatatttatactcttcatagatcaaaagtgtgcttaaaatactgtacatttaatgagttayttttgaatgtaagcaactttgaattcatctttgcatttttaatcttatgtttctattaaatgtattattaaattctactaacactttcctcaaaataattctcaatattttggtttttaattttttactgcctttgcattctcctggcagagacccatttcacctctcctatagattatttcataaagattttatcgtctgtatcatatatatttacaatattaaaagttatctgtagcacgctctcattgttgcttatagattaggtttgcttctctatgtactactctggtaggcagtggttaaatatactgctttaagccttttcac

SEQ ID NO: 366590 - DNA, 574 bp, Homo sapiens
attttttcagcattactgttaccacaattattacaggaaatgaaaccagtaaaaaaaaaatagagggaacaaggtttattgacatctatgaggcattttctttcccctaatattacatactctagattttatttctgcacaaaaaatattctctatgtctagcctaaagaactatgtcttattcatatttatactcttcatagatcaaaagtgtgcttaaaatactgtacatttaatgagttatttttgaatgtaagcaactttgaattcatctttgcatttttaatcttatgtttctattaaatgtattattaaattctactaacactttcctcaaaataattctcaatattttggtttytaattttttactgcctttgcattctcctggcagagacccatttcacctctcctatagattatttcataaagattttatcgtctgtatcatatatatttacaatattaaaagttatctgtagcacgctctcattgttgcttatagattaggtttgcttctctatgtactactctggtaggcagtggttaaatatactgctttaagccttttcac

SEQ ID NO: 366591 - DNA, 574 bp, Homo sapiens
attttttcagcattactgttaccacaattattacaggaaatgaaaccagtaaaaaaaaaatagagggaacaaggtttattgacatctatgaggcattttctttcccctaatattacatactctagattttatttctgcacaaaaaatattctctatgtctagcctaaagaactatgtcttattcatatttatactcttcatagatcaaaagtgtgcttaaaatactgtacatttaatgagttatttttgaatgtaagcaactttgaattcatctttgcatttttaatcttatgtttctattaaatgtattattaaattctactaacactttcctcaaaataattctcaatattttggtttttaattttttactgcctttgcattctcctggcagagacccatttcacctctcctatagattatttcataaagattttatcrtctgtatcatatatatttacaatattaaaagttatctgtagcacgctctcattgttgcttatagattaggtttgcttctctatgtactactctggtaggcagtggttaaatatactgctttaagccttttcac

SEQ ID NO: 366592 - DNA, 574 bp, Homo sapiens
attttttcagcattactgttaccacaattattacaggaaatgaaaccagtaaaaaaaaaatagagggaacaaggtttattgacatctatgaggcattttctttcccctaatattacatactctagattttatttctgcacaaaaaatattctctatgtctagcctaaagaactatgtcttattcatatttatactcttcatagatcaaaagtgtgcttaaaatactgtacatttaatgagttatttttgaatgtaagcaactttgaattcatctttgcatttttaatcttatgtttctattaaatgtattattaaattctactaacactttcctcaaaataattctcaatattttggtttttaattttttactgcctttgcattctcctggcagagacccatttcacctctcctatagattatttcataaagattttatcgtctgtatcatatatatttacaatattaaaagttatctgtagcaygctctcattgttgcttatagattaggtttgcttctctatgtactactctggtaggcagtggttaaatatactgctttaagccttttcac

SEQ ID NO: 366593 - DNA, 365 bp, Homo sapiens
cacagatcttgagcatatagcattaaacatttttagaaygtaaaatactaatgtcatcacaacctacatgaatatgaattgagtattactagaatccaggagtctctattgtgaacctccaatcattactataggcaaccactgttcttacttttatctttataaattacatttgcttgacattgaacttcatagaaattgaaccatacaatagatattaatttcaatctggttcaaaaaaacacaaccaacagcgtgggtgtcagtgtgatattctgtgctgcttctcagctgaatcaatggtgctgacagctgcaatagcaacagcagtgtcttcagaagttttactgagagtttggagtcca

SEQ ID NO: 366594 - DNA, 365 bp, Homo sapiens
cacagatcttgagcatatagcattaaacatttttagaacgtaaaatactaatgtcatcacaacytacatgaatatgaattgagtattactagaatccaggagtctctattgtgaacctccaatcattactataggcaaccactgttcttacttttatctttataaattacatttgcttgacattgaacttcatagaaattgaaccatacaatagatattaatttcaatctggttcaaaaaaacacaaccaacagcgtgggtgtcagtgtgatattctgtgctgcttctcagctgaatcaatggtgctgacagctgcaatagcaacagcagtgtcttcagaagttttactgagagtttggagtcca

SEQ ID NO: 366595 - DNA, 517 bp, Homo sapiens
attcaagtgatcctcacacttcagcctccagagtagctttgatgacaggtgtgtgccaccaggcccagctacttttctttactttttgtagagacatggtcttgccatattacccaggctagtctcagatccctgggctcaagtatcctcctgcctccamctcccaaagtgctgggattataggcataagccaccatgcccagctaatgttttctatttaccatagcttttcacatatatatgttattatatatgtaatatacatatataatatagtatggatgtgtatatactatattattaacaattagatctaaaatatagaaagaattttaatacctttattttctgtaccttcatagttaatctcatattttccaaatctgttaatgtggcactggtcagttatagctccaaagaatgagcatccacttaatctcataaccaggacccaacctgcaacattagtattacaaattaattcctaattccagtctcactctttcatcaccagttc

SEQ ID NO: 366596 - DNA, 256 bp, Homo sapiens
atattttccaaatctgttaatgtggcactggtcagttatagctccaaagaatgagcatccrcttaatctcataaccaggacccaacctgcaacattagtattacaaattaattcctaattccagtctcactctttcatcaccagttctatctttgcacacttactaatcccaattattttaaagcaagttgcttaacctgctgtggcagttttcccctctccttcaactttctctccctttttttttctcctaata

SEQ ID NO: 366597 - DNA, 256 bp, Homo sapiens
atattttccaaatctgttaatgtggcactggtcagttatagctccaaagaatgagcatccacttartctcataaccaggacccaacctgcaacattagtattacaaattaattcctaattccagtctcactctttcatcaccagttctatctttgcacacttactaatcccaattattttaaagcaagttgcttaacctgctgtggcagttttcccctctccttcaactttctctccctttttttttctcctaata

SEQ ID NO: 366598 - DNA, 629 bp, Homo sapiens
ccagagactaaagacaggaggacgaaaagaaggatgaggaaactttgattggtggtataaaattacaactagataagagcaaaaaattctggtgttgtgttgcacgtagagtaagtatggttaacagtgaaatatcgtatattacaaaatagcttgaagagttgtcttcgaatgttctcaccacaaagaaatgataaatatgtaagataatagattcactctgaatggatcattatacaacatggataggtatccaggtatgaaattataccccatgaatatgtacaattattacatgtcaattaataaataaataataagatcactagatttaatcgagactcttattgacttgctctcattttagagttttaaaactagtctgccctattgcaaactacctatttttaaaactactcttctcctgcacaaaaatytctcaaagtctcctttctcctgaaagaaaaatgacctatttaatttacaaatatttcaaaaattagtacacaacattttatatatgaaaagaatgctgtagactgacttgcaaataacattctaagattcccattacctttaagaggagtcagctgtcattttggaaaaattaagatttcaacaattttaca

SEQ ID NO: 366599 - DNA, 483 bp, Homo sapiens
caaatagcaaaaataattttcaactgacatacatatggaatacttactcttcaactatctcaaaatgcccagattttctcmataactttcctattgatttaattataggcattagaaatgagtattctagtacaagaataaatagtgttgtctctccttcatcccccagtactcctaaatatttactaaaaatctcaatgctaatcaatagtggaagtatttggtgcctaatgatggcattccattccttccttgaagtccaacacacagagtaatagaaatctcatgaatgtgattgtgtgaggttgctcataatacttggatctatagagagaatcacttaacagacattagctgaatcagaaactacttctcatttcattgagttctatgtagtccccaacctttgtggcaccagggactggttttgtggaagacaatatttccacggacaggggagcagaggatggtttcaggattgta

SEQ ID NO: 366600 - DNA, 612 bp, Homo sapiens
acttagttcaccataattgttacataattgtgcatatgttgcaagtaatgtattragaaaagtatttatatctgtatacatgtttggtccttaatgatgaaattaatgcacagttgtctaactgtaataatttccttataatcacactagttttcctttggtgccacaagatgatgaatctcactttagtgtgaccaagcaaaatgaggtacaaaaacagtccaatcaatgtgaaaatatctcaaattcacatgaattttaaaaatattttatatgtaaattaaattagaaattaaatatatataatatattttatttcagaaatatttgcttgccttttggaactcaaagttcaaaaccttctattgtcatctttaaataactaatttttaagttaatttctacttggttctatgaaaatactaccacacaatgtggagataaagaaaacatttacagaaaaattgtccatatggacacattttaaacagatgatctaattagcataatagccaccaaactggtaaataaacagttttgttgatttgctgcttaatcagcatctattcagaattctgtaatattgtttagtaaaacagtttatttccatcc

SEQ ID NO: 366601 - DNA, 612 bp, Homo sapiens
acttagttcaccataattgttacataattgtgcatatgttgcaagtaatgtattgagaaaagtatttatatctgtatacatgtttggtccttaatgatgaaattaatgcacagttgtctaactrtaataatttccttataatcacactagttttcctttggtgccacaagatgatgaatctcactttagtgtgaccaagcaaaatgaggtacaaaaacagtccaatcaatgtgaaaatatctcaaattcacatgaattttaaaaatattttatatgtaaattaaattagaaattaaatatatataatatattttatttcagaaatatttgcttgccttttggaactcaaagttcaaaaccttctattgtcatctttaaataactaatttttaagttaatttctacttggttctatgaaaatactaccacacaatgtggagataaagaaaacatttacagaaaaattgtccatatggacacattttaaacagatgatctaattagcataatagccaccaaactggtaaataaacagttttgttgatttgctgcttaatcagcatctattcagaattctgtaatattgtttagtaaaacagtttatttccatcc

SEQ ID NO: 366602 - DNA, 612 bp, Homo sapiens
acttagttcaccataattgttacataattgtgcatatgttgcaagtaatgtattgagaaaagtatttatatctgtatacatgtttggtccttaatgatgaaattaatgcacagttgtctaactgtaataatttccttataatcacactagttttcctttggtgccacaagatgatgaatctcactttagtgtgaccaagcaaaatgaggtacaaaaacagtccaatcaatgtgaaaatatctcaaattcayatgaattttaaaaatattttatatgtaaattaaattagaaattaaatatatataatatattttatttcagaaatatttgcttgccttttggaactcaaagttcaaaaccttctattgtcatctttaaataactaatttttaagttaatttctacttggttctatgaaaatactaccacacaatgtggagataaagaaaacatttacagaaaaattgtccatatggacacattttaaacagatgatctaattagcataatagccaccaaactggtaaataaacagttttgttgatttgctgcttaatcagcatctattcagaattctgtaatattgtttagtaaaacagtttatttccatcc

SEQ ID NO: 366603 - DNA, 442 bp, Homo sapiens
tttgttatattggttccaatatttctcacatatggaaaatgtcattttccctgggaattaatatttggaactggtgtttaagaaaaaccatgtttgatgttggaaaatgctatgtccggtataactatagatgtttggaaagcagctcagttatgctaaagataaagaaaggagagaaaaatgacagaaggggaggtttgaacaaaacaaaataatacctgaaaatgttgaatggatatgtaatatttgtgaatgtttatgttctctatttcaccattatttaaacatttatattttcaaagggagaaaataattatattttgaaatcattttrtttttttatagagtgctgtattttttcttttcaatttcaatttggtaagcaaacaaaatcagtcagaatattatacataattaggtttcctttttgagatttgttgaa

SEQ ID NO: 366604 - DNA, 578 bp, Homo sapiens
tacctgaaaatgttgaatggatatgtaatatttgtgaatgtttatgttctctatttcaccattatttaaacatttatattttcaaagggagaaaataattatattttgaaatcattttatttttttatagagtgctgtattttttcttttcaatttcaatttggtragcaaacaaaatcagtcagaatattatacataattaggtttcctttttgagatttgttgaaactctttatcctttatgtatgtatttcaagtagtataataaaaaagaaatataaaatgattagatatacataaaagtattgtagattatgtttttcatattttctttcttttaatgtattttgcagatatagccattccagattatgatttcacaaactaagatgattctcagtagggaagcgttactgcatgtcgttttcatcaaagggagcttagtttatttgcctgtctgaatattgacattatattactaatttacacattggggaaagggtcaagagaactccaaatttttgttgacttgatattaacctgaaaggggaatgttaataaatgacaaaatatatcca

SEQ ID NO: 366605 - DNA, 442 bp, Homo sapiens
tttgttatattggttccaatatttctcacatatggaaaatgtcattttccctgggaattaatatttggaactggtgtttaagaaaaaccatgtttgatgttggaaaatgctatgtccggtataactatagatgtttggaaagcagctcagttatgctaaagataaagaaaggagagaaaaatgacagaaggggaggtttgaacaaaacaaaataatacctgaaaatgttgaatggatatgtaatatttgtgaatgtttatgttctctatttcaccattatttaaacatttatattttcaaagggagaaaataattatattttgaaatcattttatttttttatagagtgctgtattttttcttttcaatttcaatttggtaagcaaacaaaatcagtcagawtattatacataattaggtttcctttttgagatttgttgaa

SEQ ID NO: 366606 - DNA, 578 bp, Homo sapiens
tacctgaaaatgttgaatggatatgtaatatttgtgaatgtttatgttctctatttcaccattatttaaacatttatattttcaaagggagaaaataattatattttgaaatcattttatttttttatagagtgctgtattttttcttttcaatttcaatttggtaagcaaacaaaatcagtcagaatattatacataattaggtttcctttttgagatttgttgaaactctttatcctttatgtatgtatttcaagtagtataataaaaaagaaatataaaatgattagatatacataaaagtattgtagrttatgtttttcatattttctttcttttaatgtattttgcagatatagccattccagattatgatttcacaaactaagatgattctcagtagggaagcgttactgcatgtcgttttcatcaaagggagcttagtttatttgcctgtctgaatattgacattatattactaatttacacattggggaaagggtcaagagaactccaaatttttgttgacttgatattaacctgaaaggggaatgttaataaatgacaaaatatatcca

SEQ ID NO: 366607 - DNA, 578 bp, Homo sapiens
tacctgaaaatgttgaatggatatgtaatatttgtgaatgtttatgttctctatttcaccattatttaaacatttatattttcaaagggagaaaataattatattttgaaatcattttatttttttatagagtgctgtattttttcttttcaatttcaatttggtaagcaaacaaaatcagtcagaatattatacataattaggtttcctttttgagatttgttgaaactctttatcctttatgtatgtatttcaagtagtataataaaaaagaaatataaaatgattagatatacataaaagtattgtagattatgtttttcatattttctttcttttaatgtattttgcagatatagccattccagattatgatttcacaaactaagatgattctcagtagggaagcgttactgcatgtcgttttcatcaaagggagcttagtttatttgcctgtctkaatattgacattatattactaatttacacattggggaaagggtcaagagaactccaaatttttgttgacttgatattaacctgaaaggggaatgttaataaatgacaaaatatatcca

SEQ ID NO: 366608 - DNA, 415 bp, Homo sapiens
gatagattgatttattagatgtacaggaaatagaattcactggtgggcatgcgtaaagagggggcagctcttttctaatgcagggctagctgcttgtccaggggcccatgattccagggctatatttggccccacagccatccaggatgagttgtttctcagccaccaagtcttaaaatgtatatgcattaaacttrgtaaaatcgcacttctttgagatgtggctttttgggcattcactgaacttgaatttggccctaaataaggcctcagtcacatgctccagggtttgcagcttggtatggatgaacatggccaatgtgaactctgacctctgggtcctgaggctttccaaaggcatactacatccggtcttaaacctagactagggaaagcactagatccaagacataaa

SEQ ID NO: 366609 - DNA, 592 bp, Homo sapiens
tgctccagggtttgcagcttggtatggatgaacatggccaatgtgaactctgacctctgggtcctgaggctttccaaaggcatactacatccggtcttaaacctagactagggaaagcactagatccaagacataaatgtccaatggcaaaggctgttgtacgcaaggaacaggctgctgyacactacctaggatgatgctgtttgcagcccttgcacaccaggccccatgtggcttaattgattgtagaaattattttatatattaagtttttggggattcatatcttttattcaagatagctaaatgtaatttatattagaccatatacagtaagttgtaaattatagaagttgtgcttatcaaaatcatattcagtgggcaatatggcctttaatataatgaagtttactgataaaaattaaaataaaataatgtggttttgtagtgctcttgtatgtcaactaaaacaaattaacaaaacctattgaaacccataatcatttagactatctacttacactttgggaggccaaggtgggcagatcacctgaggtcaggagttcaagacgagcctggccaacatagtgac

SEQ ID NO: 366610 - DNA, 592 bp, Homo sapiens
tgctccagggtttgcagcttggtatggatgaacatggccaatgtgaactctgacctctgggtcctgaggctttccaaaggcatactacatccggtcttaaacctagactagggaaagcactagatccaagacataaatgtccaatggcaaaggctgttgtacgcaaggaacaggctgctgtacactacctaggatgmtgctgtttgcagcccttgcacaccaggccccatgtggcttaattgattgtagaaattattttatatattaagtttttggggattcatatcttttattcaagatagctaaatgtaatttatattagaccatatacagtaagttgtaaattatagaagttgtgcttatcaaaatcatattcagtgggcaatatggcctttaatataatgaagtttactgataaaaattaaaataaaataatgtggttttgtagtgctcttgtatgtcaactaaaacaaattaacaaaacctattgaaacccataatcatttagactatctacttacactttgggaggccaaggtgggcagatcacctgaggtcaggagttcaagacgagcctggccaacatagtgac

SEQ ID NO: 366611 - DNA, 592 bp, Homo sapiens
tgctccagggtttgcagcttggtatggatgaacatggccaatgtgaactctgacctctgggtcctgaggctttccaaaggcatactacatccggtcttaaacctagactagggaaagcactagatccaagacataaatgtccaatggcaaaggctgttgtacgcaaggaacaggctgctgtacactacctaggatgatgctgtttgcagcccttscacaccaggccccatgtggcttaattgattgtagaaattattttatatattaagtttttggggattcatatcttttattcaagatagctaaatgtaatttatattagaccatatacagtaagttgtaaattatagaagttgtgcttatcaaaatcatattcagtgggcaatatggcctttaatataatgaagtttactgataaaaattaaaataaaataatgtggttttgtagtgctcttgtatgtcaactaaaacaaattaacaaaacctattgaaacccataatcatttagactatctacttacactttgggaggccaaggtgggcagatcacctgaggtcaggagttcaagacgagcctggccaacatagtgac

SEQ ID NO: 366612 - DNA, 592 bp, Homo sapiens
tgctccagggtttgcagcttggtatggatgaacatggccaatgtgaactctgacctctgggtcctgaggctttccaaaggcatactacatccggtcttaaacctagactagggaaagcactagatccaagacataaatgtccaatggcaaaggctgttgtacgcaaggaacaggctgctgtacactacctaggatgatgctgtttgcagcccttgcacaccaggccccatgtggcttaattgattgtagaaattattttatatattaagtttttggggattcatatcttttattcaaratagctaaatgtaatttatattagaccatatacagtaagttgtaaattatagaagttgtgcttatcaaaatcatattcagtgggcaatatggcctttaatataatgaagtttactgataaaaattaaaataaaataatgtggttttgtagtgctcttgtatgtcaactaaaacaaattaacaaaacctattgaaacccataatcatttagactatctacttacactttgggaggccaaggtgggcagatcacctgaggtcaggagttcaagacgagcctggccaacatagtgac

SEQ ID NO: 366613 - DNA, 616 bp, Homo sapiens
tagtcagcattaaattgattgaaaaaatgaaaaacactgtttcatttttaaatagattaacaattaagcaagttgtttatgttgtcccactgatatactagaatatgctacattcttttgggcatcttttagaccatagggctaaaatgttgagaatgacagagagacaattaggwgctcagcacaaagcaaaatgttatgaatcaggaaaataaatagaacagagatcaaaattagatagatgcagaattggaatgatactgaaaacaagagatggaactgcagaaaatactatggcagatcattcattcctttgaatggtgaaagtagttaatacaatggctaacaattgaaatggaaaaccagacccagatgaaaaaatgcaaaccagtaaacttacctagtcctattattttactcaattgtaggaaatacatgaaaaaaaaagttgttcattatgaatccttttttctaacatgggaagaagtcaccactaaacctttctcatttttttactcaaatgtttgtgttttctcatagaacttataattttaatttatttttcaatatatgtttcccatacagtctagttggattcatagttgcgatgtttcat

SEQ ID NO: 366614 - DNA, 518 bp, Homo sapiens
caaaatgttatgaatcaggaaaataaatagaacagagatcaaaattagatagatgcagaattggaatgatactgaaaacaagagatggaactgcagaaaatactatggcagatcattcattcctttgaatggtgaaagtagttaatacaatggctaacaattgaaatggaaaaccagacccagatgaaaaaatgcaaaccagtaaacttacctagtcctattattttactcaattgtaggaaatacatgaaaaaaaaagttgttcattatgaatccttttttctaacatgggaagaagtcaccactaaacctttytcatttttttactcaaatgtttgtgttttctcatagaacttataattttaatttatttttcaatatatgtttcccatacagtctagttggattcatagttgcgatgtttcatgtggtatatttgctccctatggaacagaacataacattaatctttagatgtgtcactagagagatttgtatatatccacataaatctacag

SEQ ID NO: 366615 - DNA, 518 bp, Homo sapiens
caaaatgttatgaatcaggaaaataaatagaacagagatcaaaattagatagatgcagaattggaatgatactgaaaacaagagatggaactgcagaaaatactatggcagatcattcattcctttgaatggtgaaagtagttaatacaatggctaacaattgaaatggaaaaccagacccagatgaaaaaatgcaaaccagtaaacttacctagtcctattattttactcaattgtaggaaatacatgaaaaaaaaagttgttcattatgaatccttttttctaacatgggaagaagtcaccactaaacctttctcatttttttactcaaatgtttgtgttttctcatagaacttataattttaatttatttttcaatatatgtttcccatacagtctagttggattcatagttgcratgtttcatgtggtatatttgctccctatggaacagaacataacattaatctttagatgtgtcactagagagatttgtatatatccacataaatctacag

SEQ ID NO: 366616 - DNA, 578 bp, Homo sapiens
atatccacataaatctacagttgcaactagaaaaattatcctgtgaaaattttgtgatatgaatgtctttcaactttttaaaawttaaagagaaaatgatgaacaaatatgagttggaaatcagaatgaacaaatcatgaaaatatagtgtaccccttcaaaaattttgaaaattaagagaaatcggtagaacagctgtattatcatttacaaaaatgtttctctacctatagaacaaacaattactttgtcctctaatttccaaataacttacagaacatttatttcctactgtcactggaatggcaggctggcaggctgagttggtagcccaattggttcctcacatcaaaagattccctttattatttccttattttctctttaattctggcactccttcatgattgaacttacagatgttcttttgtctactaattttcgagtaagcctgtgctctctataactttcagtctcaatatccttctaccatcagccttttgtctaaacattcttattctggtttgtttccctgaactcttgacatcaatctctgttccttcaatattctgtttctt

SEQ ID NO: 366617 - DNA, 578 bp, Homo sapiens
atatccacataaatctacagttgcaactagaaaaattatcctgtgaaaattttgtgatatgaatgtctttcaactttttaaaatktaaagagaaaatgatgaacaaatatgagttggaaatcagaatgaacaaatcatgaaaatatagtgtaccccttcaaaaattttgaaaattaagagaaatcggtagaacagctgtattatcatttacaaaaatgtttctctacctatagaacaaacaattactttgtcctctaatttccaaataacttacagaacatttatttcctactgtcactggaatggcaggctggcaggctgagttggtagcccaattggttcctcacatcaaaagattccctttattatttccttattttctctttaattctggcactccttcatgattgaacttacagatgttcttttgtctactaattttcgagtaagcctgtgctctctataactttcagtctcaatatccttctaccatcagccttttgtctaaacattcttattctggtttgtttccctgaactcttgacatcaatctctgttccttcaatattctgtttctt

SEQ ID NO: 366618 - DNA, 486 bp, Homo sapiens
agtgtaccccttcaaaaattttgaaaattaagagaaatcggtagaacagctgtattatcatttacaaaaatgtttctctacctatagaacaaacaattactttgtcctctaatttccaaataacttacagaacatttatttyctactgtcactggaatggcaggctggcaggctgagttggtagcccaattggttcctcacatcaaaagattccctttattatttccttattttctctttaattctggcactccttcatgattgaacttacagatgttcttttgtctactaattttcgagtaagcctgtgctctctataactttcagtctcaatatccttctaccatcagccttttgtctaaacattcttattctggtttgtttccctgaactcttgacatcaatctctgttccttcaatattctgtttcttctactggaagcattctttcccagatttcacccactttactcttctcaatctctg

SEQ ID NO: 366619 - DNA, 585 bp, Homo sapiens
ttactttgtcctctaatttccaaataacttacagaacatttatttcctactgtcactggaatggcaggctggcaggctgagttggtagcccaattggttcctcacatcaaaagattccctttattatttccttattttctctttaattctggcactccttcatgattgaacttacagaygttcttttgtctactaattttcgagtaagcctgtgctctctataactttcagtctcaatatccttctaccatcagccttttgtctaaacattcttattctggtttgtttccctgaactcttgacatcaatctctgttccttcaatattctgtttcttctactggaagcattctttcccagatttcacccactttactcttctcaatctctgtgtctgagttaaatgcttccttaggtttctatgtaggattgtctgtccatctgtaatttttctatatctctcatgttaacatacttatatcctttactgaaaaatgtctcctttaaaaaaaaatcaatgtgtttgtttactttcttaaaatgccgtcttaaactgcaaggtcaaagaaggtaagtatgatatttg

SEQ ID NO: 366620 - DNA, 569 bp, Homo sapiens
tttctctacctatagaacaaacaattactttgtcctctaatttccaaataacttacagaacatttatttcctactgtcactggaatggcaggctggcaggctgagttggtagcccaattggttcctcacatcaaaagattccctttattatttccttattttctctttaattctggcactccttcatgattgaacttacagatgttcttttgtctactaattttcgagtaagcctgtgctctctataactttcagtctcaatatccttctaccatcagccttttgtctaaacattcytattctggtttgtttccctgaactcttgacatcaatctctgttccttcaatattctgtttcttctactggaagcattctttcccagatttcacccactttactcttctcaatctctgtgtctgagttaaatgcttccttaggtttctatgtaggattgtctgtccatctgtaatttttctatatctctcatgttaacatacttatatcctttactgaaaaatgtctcctttaaaaaaaaatcaatgtgtttgtttactttcttaaaatgccg

SEQ ID NO: 366621 - DNA, 486 bp, Homo sapiens
agtgtaccccttcaaaaattttgaaaattaagagaaatcggtagaacagctgtattatcatttacaaaaatgtttctctacctatagaacaaacaattactttgtcctctaatttccaaataacttacagaacatttatttcctactgtcactggaatggcaggctggcaggctgagttggtagcccaattggttcctcacatcaaaagattccctttattatttccttattttctctttaattctggcactccttcatgattgaacttacagatgttcttttgtctactaattttcgagtaagcctgtgctctctataactttcagtctcaatatccttctaccatcagccttttgtctaaacattcttattctggtttgtttccctgaactcttgacatcaatctctgttccttcaatattctgtttcttctactggaagcaytctttcccagatttcacccactttactcttctcaatctctg

SEQ ID NO: 366622 - DNA, 585 bp, Homo sapiens
ttactttgtcctctaatttccaaataacttacagaacatttatttcctactgtcactggaatggcaggctggcaggctgagttggtagcccaattggttcctcacatcaaaagattccctttattatttccttattttctctttaattctggcactccttcatgattgaacttacagatgttcttttgtctactaattttcgagtaagcctgtgctctctataactttcagtctcaatatccttctaccatcagccttttgtctaaacattcttattctggtttgtttccctgaactcttgacatcaatctctgttccttcaatattctgtttcttctactggaagcattctttcccagatttcacccactttactcttctcaatctctgtgtctgagttaaatgcttccttaggtttctatgtaggattgtctgtccatctgtaatttttctatatctctcatgttaacatacttatatcctttactgaaaaatgtctcctttaaaaaaaaatcaatgtgtttgtttactttcttaaaatgccrtcttaaactgcaaggtcaaagaaggtaagtatgatatttg

SEQ ID NO: 366623 - DNA, 613 bp, Homo sapiens
taagtatgatatttggatattaatatctaccacttaatacagaaactattctagcacttgtataggcagtataagacataattttagaactctaaaataaaaactcataaactgaagttaaatatccatttcccactgctatctccttttccttttaacacattgatatcatttggatctgtgtccccacccaaatctcatgtcaaactgtaagtcccactgttggaggtggggcctgttgggaggcaattggatcatcgggcrgtttctcttaaatggtttagcaccatctccttggtgctgttcttgtgacagtgagtgagttattgtgagtctggttgttaaaagtgtatagcacctccccacctctcactcttcttcctgcttccagccatgtgaagtgctggctcccccttcaccttctgccatgattgttagcttactgaggcccccgcagaagcccagcagatgcatcatgctttctgtataacgtgcagaaccatgagccaattaaactgcttttctttataaattacccagtctcaggtatttctttagagcaatgtaagaaaggactaatatagaaaattggtagaggaatatgatattgttg

SEQ ID NO: 366624 - DNA, 530 bp, Homo sapiens
tgttaaaagtgtatagcacctccccacctctcactcttcttcctgcttccagccatgtgaagtgctggctcccccttcaccttctgccatgattgttagcttactgaggcccccgcagaagcccagcagatgcatcatgctttctgtataacgtgcagaaccatgagccaattaaactgcttttctttataaattacccagtctcaggtatttctttagagcaatgtaagaaaggactaatatagaaaattggtagaggaatatgatattgttgtaaacatacmggaaaatgtgaaagtggctttgaaactggatagtgggcagagattggaagggtttggagagatcagaagaagacaggaagatgagggcaagttttgaacttactagagtcttgttacattgttgtgaccaagctactgatagagactcacaatgaagtccaggctgaggaggtctcagatggagataaggaacttaatgggaactggagcaaaggtcactttagttaggcattagcaaaaaggttg

SEQ ID NO: 366625 - DNA, 518 bp, Homo sapiens
tggtagaggaatatgatattgttgtaaacataccggaaaatgtgaaagtggctttgaaactggatagtgggcagagattggaagggtttggagagatcagaagaagacaggaagatgagggcaagttttgaacttactagagtcttgttacattgttgtgaccaagctactgatagagactcacaatgaagtccaggctgaggaggtctcagatggagataaggaacttaatgggaactggagcaaagktcactttagttaggcattagcaaaaaggttggctgcactgtgggcctgccctagggatctgtggaattttgaacttgagagtatctcaagttctggtgggtatctggtggaaaaaatttctaagcagcaaagcattcaggaggtaagctcactacttctgacaaactattttgatgtgtgtgagcaaagaaatgacctcaaactgaaacttatatttagaagggaagcagagtgtagaaacttgaaaaatttgcagcctggccatgtgg

SEQ ID NO: 366626 - DNA, 548 bp, Homo sapiens
tttgaacttactagagtcttgttacattgttgtgaccaagctactgatagagactcacaatgaagtccaggctgaggaggtctcagatggagataaggaacttaatgggaactggagcaaaggtcactttagttaggcattagcaaaaaggttggctgcactgtgsgcctgccctagggatctgtggaattttgaacttgagagtatctcaagttctggtgggtatctggtggaaaaaatttctaagcagcaaagcattcaggaggtaagctcactacttctgacaaactattttgatgtgtgtgagcaaagaaatgacctcaaactgaaacttatatttagaagggaagcagagtgtagaaacttgaaaaatttgcagcctggccatgtggtagaacaaaaagcccattttcaggagagaaattcaagcaagctgcagaaacttgcttaactaaaaggaaggcacatgctgatagccaagaaaatgagggataccctccagggcatttcagagacctttgtggcagctcctcccatcacaggctcag

SEQ ID NO: 366627 - DNA, 534 bp, Homo sapiens
gatagtgggcagagattggaagggtttggagagatcagaagaagacaggaagatgagggcaagttttgaacttactagagtcttgttacattgttgtgaccaagctactgatagagactcacaatgaagtccaggctgaggaggtctcagatggagataaggaacttaatgggaactggagcaaaggtcactttagttaggcattagcaaaaaggttggctgcactgtgggyctgccctagggatctgtggaattttgaacttgagagtatctcaagttctggtgggtatctggtggaaaaaatttctaagcagcaaagcattcaggaggtaagctcactacttctgacaaactattttgatgtgtgtgagcaaagaaatgacctcaaactgaaacttatatttagaagggaagcagagtgtagaaacttgaaaaatttgcagcctggccatgtggtagaacaaaaagcccattttcaggagagaaattcaagcaagctgcagaaacttgcttaactaaaaggaaggcacatgc

SEQ ID NO: 366628 - DNA, 548 bp, Homo sapiens
tttgaacttactagagtcttgttacattgttgtgaccaagctactgatagagactcacaatgaagtccaggctgaggaggtctcagatggagataaggaacttaatgggaactggagcaaaggtcactttagttaggcattagcaaaaaggttggctgcactgtgggcctgccctagggatctgtggaattttgaacttgagagtatctcaagttctggtgggtatctggtggaaaaaatttctaagcagcaaagcattcaggaggtaakctcactacttctgacaaactattttgatgtgtgtgagcaaagaaatgacctcaaactgaaacttatatttagaagggaagcagagtgtagaaacttgaaaaatttgcagcctggccatgtggtagaacaaaaagcccattttcaggagagaaattcaagcaagctgcagaaacttgcttaactaaaaggaaggcacatgctgatagccaagaaaatgagggataccctccagggcatttcagagacctttgtggcagctcctcccatcacaggctcag

SEQ ID NO: 366629 - DNA, 548 bp, Homo sapiens
tttgaacttactagagtcttgttacattgttgtgaccaagctactgatagagactcacaatgaagtccaggctgaggaggtctcagatggagataaggaacttaatgggaactggagcaaaggtcactttagttaggcattagcaaaaaggttggctgcactgtgggcctgccctagggatctgtggaattttgaacttgagagtatctcaagttctggtgggtatctggtggaaaaaatttctaagcagcaaagcattcaggaggtaagctcactacttctracaaactattttgatgtgtgtgagcaaagaaatgacctcaaactgaaacttatatttagaagggaagcagagtgtagaaacttgaaaaatttgcagcctggccatgtggtagaacaaaaagcccattttcaggagagaaattcaagcaagctgcagaaacttgcttaactaaaaggaaggcacatgctgatagccaagaaaatgagggataccctccagggcatttcagagacctttgtggcagctcctcccatcacaggctcag

SEQ ID NO: 366630 - DNA, 518 bp, Homo sapiens
tggtagaggaatatgatattgttgtaaacataccggaaaatgtgaaagtggctttgaaactggatagtgggcagagattggaagggtttggagagatcagaagaagacaggaagatgagggcaagttttgaacttactagagtcttgttacattgttgtgaccaagctactgatagagactcacaatgaagtccaggctgaggaggtctcagatggagataaggaacttaatgggaactggagcaaaggtcactttagttaggcattagcaaaaaggttggctgcactgtgggcctgccctagggatctgtggaattttgaacttgagagtatctcaagttctggtgggtatctggtggaaaaaatttctaagcagcaaagcattcaggaggtaagctcactacttctgacaaactattktgatgtgtgtgagcaaagaaatgacctcaaactgaaacttatatttagaagggaagcagagtgtagaaacttgaaaaatttgcagcctggccatgtgg

SEQ ID NO: 366631 - DNA, 544 bp, Homo sapiens
taggcattagcaaaaaggttggctgcactgtgggcctgccctagggatctgtggaattttgaacttgagagtatctcaagttctggtgggtatctggtggaaaaaatttctaagcagcaaagcattcaggaggtaagctcactacttctgacaaactattttgatgtgtgtgagcaaagaaatgacctcaaactgaaacttatatttagaagggaagcagagtgtagaaacttgaaaaatttgcagcctggccatgtggtagaacaaaaagcccattttcaggagagaaattcaagcaagctgcagaaacttgcttaactaaaaggaargcacatgctgatagccaagaaaatgagggataccctccagggcatttcagagacctttgtggcagctcctcccatcacaggctcagaggacaacgaaggaagaatgggacactactacatgcatctcatctgttgcagctctagccatggctccaagtggcccaggtacagctcaggatgctgctccagagggttcaagccataagtcttgatgg

SEQ ID NO: 366632 - DNA, 548 bp, Homo sapiens
tttgaacttactagagtcttgttacattgttgtgaccaagctactgatagagactcacaatgaagtccaggctgaggaggtctcagatggagataaggaacttaatgggaactggagcaaaggtcactttagttaggcattagcaaaaaggttggctgcactgtgggcctgccctagggatctgtggaattttgaacttgagagtatctcaagttctggtgggtatctggtggaaaaaatttctaagcagcaaagcattcaggaggtaagctcactacttctgacaaactattttgatgtgtgtgagcaaagaaatgacctcaaactgaaacttatatttagaagggaagcagagtgtagaaacttgaaaaatttgcagcctggccatgtggtagaacaaaaagcccattttcaggagagaaattcaagcaagctgcagaaacttgcttaactaaaaggaaggcamatgctgatagccaagaaaatgagggataccctccagggcatttcagagacctttgtggcagctcctcccatcacaggctcag

SEQ ID NO: 366633 - DNA, 545 bp, Homo sapiens
ccagaccccagaatggtagatccaccagcacttgtaccgtgtgcctggaaatggtgcaagcactcaacaccagcccttgagagcagctgtaggagctgaaccctgcaaagtcacaggagtggagcagcacaaggctttgggagctcaccccttgcagtggtatgccctggatggcgtcaaaggagattgttaagctttaagacttaataactttcctactgggtttcagacttgcatgcggcccgtagccccttacttttggccaatttctcccttttgaaatgggagtatttacccaatccctgtacccccattatacattatatcttgggagtttttgttttttttttttattttacagggtcttaggcagaaggggcttgcctcatctcagataagacttyagactttggatgtttgagttaatgctgaagtgagttaagactttgagggactgatgggaaggcatgattatattttgcaaactgagaaagacaaaatttgggagggactagggcaaaataatatggtttggatctatgtcc

SEQ ID NO: 366634 - DNA, 503 bp, Homo sapiens
ggtgtagcacctcctcacctctcacttttcttcctgctcccmgctatatgaagcaccggctccctcttcattttcccaccatggttatacatttcatgaggcctccccacatgcccagcagatgcaacattctttctgtacagcatgcagaactgtgagtcagttaaacctcttttctttataaattacccaatctcaggtatttctttatagcaatgcaataatggactaatacacacctaataatattatttccttgaatcacgcaatcaattaacaaaatcctctgtgtgaaatggctggcttccttttattggtggttaactgctaaacaatatttttggcatttcaattttgttgttattattgttcaaagcttgtacaaagcctccatcaagtagtccaattctccagcttctgtcactcctggacaacatttgtatttaaaaatacctttcagccaggtgacacacacctgttgtcccagctactcaggatgctga

SEQ ID NO: 366635 - DNA, 503 bp, Homo sapiens
ggtgtagcacctcctcacctctcacttttcttcctgctcccagctatatgaagcaccggctccctcttcattttcccaccatggttatacatttcatgaggcctccccacatgcccagcagatgcaacattctttctgtacagcatgcagaactgtgagtcagttraacctcttttctttataaattacccaatctcaggtatttctttatagcaatgcaataatggactaatacacacctaataatattatttccttgaatcacgcaatcaattaacaaaatcctctgtgtgaaatggctggcttccttttattggtggttaactgctaaacaatatttttggcatttcaattttgttgttattattgttcaaagcttgtacaaagcctccatcaagtagtccaattctccagcttctgtcactcctggacaacatttgtatttaaaaatacctttcagccaggtgacacacacctgttgtcccagctactcaggatgctga

SEQ ID NO: 366636 - DNA, 503 bp, Homo sapiens
ggtgtagcacctcctcacctctcacttttcttcctgctcccagctatatgaagcaccggctccctcttcattttcccaccatggttatacatttcatgaggcctccccacatgcccagcagatgcaacattctttctgtacagcatgcagaactgtgagtcagttaaamctcttttctttataaattacccaatctcaggtatttctttatagcaatgcaataatggactaatacacacctaataatattatttccttgaatcacgcaatcaattaacaaaatcctctgtgtgaaatggctggcttccttttattggtggttaactgctaaacaatatttttggcatttcaattttgttgttattattgttcaaagcttgtacaaagcctccatcaagtagtccaattctccagcttctgtcactcctggacaacatttgtatttaaaaatacctttcagccaggtgacacacacctgttgtcccagctactcaggatgctga

SEQ ID NO: 366637 - DNA, 503 bp, Homo sapiens
ggtgtagcacctcctcacctctcacttttcttcctgctcccagctatatgaagcaccggctccctcttcattttcccaccatggttatacatttcatgaggcctccccacatgcccagcagatgcaacattctttctgtacagcatgcagaactgtgagtcagttaaacctcttttctttataaattacccaatctcrggtatttctttatagcaatgcaataatggactaatacacacctaataatattatttccttgaatcacgcaatcaattaacaaaatcctctgtgtgaaatggctggcttccttttattggtggttaactgctaaacaatatttttggcatttcaattttgttgttattattgttcaaagcttgtacaaagcctccatcaagtagtccaattctccagcttctgtcactcctggacaacatttgtatttaaaaatacctttcagccaggtgacacacacctgttgtcccagctactcaggatgctga

SEQ ID NO: 366638 - DNA, 558 bp, Homo sapiens
caccggctccctcttcattttcccaccatggttatacatttcatgaggcctccccacatgcccagcagatgcaacattctttctgtacagcatgcagaactgtgagtcagttaaacctcttttctttataaattacccaatctcaggtatttctttatagcaatgcaataatggactaatacacacctaataatattatttccttgaatcacgcaatcaattaacaaaatcctctgtgtgaaatgrctggcttccttttattggtggttaactgctaaacaatatttttggcatttcaattttgttgttattattgttcaaagcttgtacaaagcctccatcaagtagtccaattctccagcttctgtcactcctggacaacatttgtatttaaaaatacctttcagccaggtgacacacacctgttgtcccagctactcaggatgctgaggcgggaggaacacttgagcccaggatttctgggttgtatgcactatgctgaggaagtgtctgcactaagtttggcatcaatatgttagcttccagggagcagaggac

SEQ ID NO: 366639 - DNA, 560 bp, Homo sapiens
aaaatcctctgtgtgaaatggctggcttccttttattggtggttaactgctaaacaatatttttggcatttcaattttgttgttattattgttcaaagcttgtacaaagcctccatcaagtagtccaattctccagcttctgtcactcctggacaacatttgtatttaaaaatacctttcagccaggtgacacacacctgttgtcccagctactcaggatgctgaggcgggaggaacacttgagcccaggakttctgggttgtatgcactatgctgaggaagtgtctgcactaagtttggcatcaatatgttagcttccagggagcagaggaccaccaggttgcctaaggagtggtcaactcaaaaattgagcagaataaaactcctctgcttatcagtagtgggatgacccctttgaatagtcactgcactacaacctgggcaacatagtgagaccctatttcttaacaaaaaaaagaaagaactaccttccatatttctgcaagtatgtgagttatctttgatgtagtgttaccttttcgcagtgaatgaagtgtaat

SEQ ID NO: 366640 - DNA, 550 bp, Homo sapiens
gctaaacaatatttttggcatttcaattttgttgttattattgttcaaagcttgtacaaagcctccatcaagtagtccaattctccagcttctgtcactcctggacaacatttgtatttaaaaatacctttcagccaggtgacacacacctgttgtcccagctactcaggatgctgaggcgggaggaacacttgagcccaggatttctgggttgtatgcactatgctgaggaagtgtctgcactaagtttggcatcaatatgttagcttccagggagcagaggaccaccaggttgcctaaggagtggtcaactcaaaaattgagcagaataaaactcctctgcttatcagtagtgggatgacccctttgaatagtcactgcactacaacctgggcaacatagtgagaccctatttcttaacaaaaaaaagaaagaamtaccttccatatttctgcaagtatgtgagttatctttgatgtagtgttaccttttcgcagtgaatgaagtgtaataacctcttgctcattttgtttacaaaaataaataaata

SEQ ID NO: 366641 - DNA, 527 bp, Homo sapiens
aatactatttatagaataattcaattttatgatatatttcatgtgttgctatcctcagttatatttactcatgtatagttacayttgtcaatgtcctagctataatcacctatttttagattttaataaatgtaattaaattaatagcatttctatttttataacaagttctaaaattaagccacagtagaaaattcatgataagattaagtttgatttttatttcacttttatatgtatgaatcttaagaatttggtatttcctatctaatatttgtctttctgttcttggaaactaatttcaaattatttacaagtttcagaagtatgcagccagtgaagaatccaatatcattttgttcaatatacctataatttgaacttaaataagtatacttccacaaatgtcactgaagcaagtatttcaagtatttatttccaggtataatttcaattatggggtattcagatatcttgttatatcaacaactaaacataatatattacattatttgagatataaaaag

SEQ ID NO: 366642 - DNA, 568 bp, Homo sapiens
tttatgatatatttcatgtgttgctatcctcagttatatttactcatgtatagttacacttgtcaatgtcctagctataatcacctatttttagattttaataaatgtaattaaattaatagcatttctatttttataacaagttctaaaattaagccacagtagaaaattcatgataagattaagtttgatttttatttcacttttatatgtatgaatcttaagaatttggtatttcctatctaatatttgtctttctgttcttggaaactaatttcaaattatttacaagtttcagaagtatgcasccagtgaagaatccaatatcattttgttcaatatacctataatttgaacttaaataagtatacttccacaaatgtcactgaagcaagtatttcaagtatttatttccaggtataatttcaattatggggtattcagatatcttgttatatcaacaactaaacataatatattacattatttgagatataaaaagtatatcttgaaaacagtgcagttgtaaatctttaaggtaggaaagcagctcagcaaatgttttcct

SEQ ID NO: 366643 - DNA, 568 bp, Homo sapiens
tttatgatatatttcatgtgttgctatcctcagttatatttactcatgtatagttacacttgtcaatgtcctagctataatcacctatttttagattttaataaatgtaattaaattaatagcatttctatttttataacaagttctaaaattaagccacagtagaaaattcatgataagattaagtttgatttttatttcacttttatatgtatgaatcttaagaatttggtatttcctatctaatatttgtctttctgttcttggaaactaatttcaaattatttacaagtttcagaagtatgcagccagtgaagaatccaatatcattttgttcaatatacctataatttgaacttaaatawgtatacttccacaaatgtcactgaagcaagtatttcaagtatttatttccaggtataatttcaattatggggtattcagatatcttgttatatcaacaactaaacataatatattacattatttgagatataaaaagtatatcttgaaaacagtgcagttgtaaatctttaaggtaggaaagcagctcagcaaatgttttcct

SEQ ID NO: 366644 - DNA, 568 bp, Homo sapiens
tttatgatatatttcatgtgttgctatcctcagttatatttactcatgtatagttacacttgtcaatgtcctagctataatcacctatttttagattttaataaatgtaattaaattaatagcatttctatttttataacaagttctaaaattaagccacagtagaaaattcatgataagattaagtttgatttttatttcacttttatatgtatgaatcttaagaatttggtatttcctatctaatatttgtctttctgttcttggaaactaatttcaaattatttacaagtttcagaagtatgcagccagtgaagaatccaatatcattttgttcaatatacctataatttgaacttaaataagtatacttccacaaatgtcactgaagcaagtatttcaagtatttatttccaggtataatttcaattatggggtattcagatatcttgttatatcaacaactaaacataayatattacattatttgagatataaaaagtatatcttgaaaacagtgcagttgtaaatctttaaggtaggaaagcagctcagcaaatgttttcct

SEQ ID NO: 366645 - DNA, 471 bp, Homo sapiens
aagtttgatttttatttcacttttatatgtatgaatcttaagaatttggtatttcctatctaatatttgtctttctgttcttggaaactaatttcaaattatttacaagtttcagaagtatgcagccagtgaagaatccaatatcattttgttcaatatacctataatttgaacttaaataagtatacttccacaaatgtcactgaagcaagtatttcaagtatttatttccaggtataatttcaattatggggtattcagatatcttgttatatcaacaactaaacataatatattamattatttgagatataaaaagtatatcttgaaaacagtgcagttgtaaatctttaaggtaggaaagcagctcagcaaatgttttcctccactgtccatgaggcaaatgtctaatgactgtacacacacactcacactcacacacatacatacacattctgtctcaaatataga

SEQ ID NO: 366646 - DNA, 518 bp, Homo sapiens
agcaagtatttcaagtatttatttccaggtataatttcaattatggggtattcagatatcttgttatatcaacaactaaacataatatattacattatttgagatataaaaagtatatcttgaaaacagtgcagttgtaaatctttaargtaggaaagcagctcagcaaatgttttcctccactgtccatgaggcaaatgtctaatgactgtacacacacactcacactcacacacatacatacacattctgtctcaaatatagatatatattcacactctgattcaatgaattcaacctcatgactaaggatttgaatagatagtgttttttaaccttcatcctttcctctactgcaatttataattgaattagcttacttatttcccagtaaaaacattccagcattgtgatactatgataaggttaagatgtgaaagtgttttttaccatttattatagaaaaactatcttattttcagatttctaagaaccttttcaaatccaccaaggaaaag

SEQ ID NO: 366647 - DNA, 518 bp, Homo sapiens
agcaagtatttcaagtatttatttccaggtataatttcaattatggggtattcagatatcttgttatatcaacaactaaacataatatattacattatttgagatataaaaagtatatcttgaaaacagtgcagttgtaaatctttaaggtaggaaagcagctcagcaaatgttttcctccactgtccatgargcaaatgtctaatgactgtacacacacactcacactcacacacatacatacacattctgtctcaaatatagatatatattcacactctgattcaatgaattcaacctcatgactaaggatttgaatagatagtgttttttaaccttcatcctttcctctactgcaatttataattgaattagcttacttatttcccagtaaaaacattccagcattgtgatactatgataaggttaagatgtgaaagtgttttttaccatttattatagaaaaactatcttattttcagatttctaagaaccttttcaaatccaccaaggaaaag

SEQ ID NO: 366648 - DNA, 518 bp, Homo sapiens
agcaagtatttcaagtatttatttccaggtataatttcaattatggggtattcagatatcttgttatatcaacaactaaacataatatattacattatttgagatataaaaagtatatcttgaaaacagtgcagttgtaaatctttaaggtaggaaagcagctcagcaaatgttttcctccactgtccatgaggcaaatgtctaatgactgtacacacacactcacactcacacacatacatacacattctgtctcaaatatagatatatattcacactctgattcaatgaattcaacctcatgactaargatttgaatagatagtgttttttaaccttcatcctttcctctactgcaatttataattgaattagcttacttatttcccagtaaaaacattccagcattgtgatactatgataaggttaagatgtgaaagtgttttttaccatttattatagaaaaactatcttattttcagatttctaagaaccttttcaaatccaccaaggaaaag

SEQ ID NO: 366649 - DNA, 553 bp, Homo sapiens
ttatcctatgttatatattgtacataattatatgagagataatggcaatttaaacaaataaaatgatggctatttctttttattaacttcatcatatttcactgaggttttccttactttaggcttcctcgatggctgcaatgtatgctaaaagtaaatttttatgtgaaatgtttaaaatatttgaaaawgatgcttattgtttgtcaggttttgccactgttagcatgactcagtacccatagagtctgtctcttagggatgtgaagcaaatgatttctctgatccaaaacatttcatatgccttaaaagtcaaacaatgcaaagatgtgatatttagaatactagttacataataatggataatgacttagcttttaaaacaactgctttaaacatgacacatttaaagctaatttgtaactttcatatgtttctgaaacttttacagtcactaaataatttgagtaaagcaaatgggtttcagaccgattacaatttggaaagattgattataaatttttaataatatgtaacaaagaaaaatgtggtc

SEQ ID NO: 366650 - DNA, 578 bp, Homo sapiens
ggctgcaatgtatgctaaaagtaaatttttatgtgaaatgtttaaaatatttgaaaaagatgcttattgtttgtcaggttttgccactgttagcatgactcagtacccatagagtctgtctcttagggatgtgaagcaaatkatttctctgatccaaaacatttcatatgccttaaaagtcaaacaatgcaaagatgtgatatttagaatactagttacataataatggataatgacttagcttttaaaacaactgctttaaacatgacacatttaaagctaatttgtaactttcatatgtttctgaaacttttacagtcactaaataatttgagtaaagcaaatgggtttcagaccgattacaatttggaaagattgattataaatttttaataatatgtaacaaagaaaaatgtggtcacttgattatatacctcttccccaagatcaagtaaatactttatcaatagaaaaaagaaagaaaagcaaaaagaaaagaaaaagaaagcaacactgctatatagaacattttttttttctaaatggaatccagcagcaaaaaaaaagataattgaaga

SEQ ID NO: 366651 - DNA, 553 bp, Homo sapiens
ttatcctatgttatatattgtacataattatatgagagataatggcaatttaaacaaataaaatgatggctatttctttttattaacttcatcatatttcactgaggttttccttactttaggcttcctcgatggctgcaatgtatgctaaaagtaaatttttatgtgaaatgtttaaaatatttgaaaaagatgcttattgtttgtcaggttttgccactgttagcatgactcagtacccatagagtctgtctcttagggatgtgaagcaaatgatttctctgatccaaaacatttcatatgccttaaaagtcaaacaatgcaaagatgtgatatttagaatactagttacataataatggataatgacttagcttttaaaacaactgctttaaacatgacacatttaaagctaatttgtaactttcatatgtttctgaaacttttayagtcactaaataatttgagtaaagcaaatgggtttcagaccgattacaatttggaaagattgattataaatttttaataatatgtaacaaagaaaaatgtggtc

SEQ ID NO: 366652 - DNA, 398 bp, Homo sapiens
aggttttgccactgttagcatgactcagtacccatagagtctgtctcttagggatgtgaagcaaatgatttctctgatccaaaacatttcatatgccttaaaagtcaaacaatgcaaagatgtgatatttagaatactagttacataataatggataatgacttagcttttaaaacaactgctttaaacatgacacatttaaagctaatttgtaactttcatatgtttctgaaacttttacagtcactaaataatttgagtaaagcaaatgggtttcagaccgattacaatttggaaagattgwttataaatttttaataatatgtaacaaagaaaaatgtggtcacttgattatatacctcttccccaagatcaagtaaatactttatcaatagaaa

SEQ ID NO: 366653 - DNA, 398 bp, Homo sapiens
aggttttgccactgttagcatgactcagtacccatagagtctgtctcttagggatgtgaagcaaatgatttctctgatccaaaacatttcatatgccttaaaagtcaaacaatgcaaagatgtgatatttagaatactagttacataataatggataatgacttagcttttaaaacaactgctttaaacatgacacatttaaagctaatttgtaactttcatatgtttctgaaacttttacagtcactaaataatttgagtaaagcaaatgggtttcagaccgattacaatttggaaagattgattataaattttkaataatatgtaacaaagaaaaatgtggtcacttgattatatacctcttccccaagatcaagtaaatactttatcaatagaaa

SEQ ID NO: 366654 - DNA, 578 bp, Homo sapiens
ggctgcaatgtatgctaaaagtaaatttttatgtgaaatgtttaaaatatttgaaaaagatgcttattgtttgtcaggttttgccactgttagcatgactcagtacccatagagtctgtctcttagggatgtgaagcaaatgatttctctgatccaaaacatttcatatgccttaaaagtcaaacaatgcaaagatgtgatatttagaatactagttacataataatggataatgacttagcttttaaaacaactgctttaaacatgacacatttaaagctaatttgtaactttcatatgtttctgaaacttttacagtcactaaataatttgagtaaagcaaatgggtttcagaccgattacaatttggaaagattgattataaatttttaataatatgtaacaaagaaaaatgtggtcacttgattatatacctcttccccaagatcaagtaaatactttatcaatagaaaaaagaaagaaaagcaaaaagaaaagaaaaagaaagcaacactgctayatagaacattttttttttctaaatggaatccagcagcaaaaaaaaagataattgaaga

SEQ ID NO: 366655 - DNA, 536 bp, Homo sapiens
aggttttgccactgttagcatgactcagtacccatagagtctgtctcttagggatgtgaagcaaatgatttctctgatccaaaacatttcatatgccttaaaagtcaaacaatgcaaagatgtgatatttagaatactagttacataataatggataatgacttagcttttaaaacaactgctttaaacatgacacatttaaagctaatttgtaactttcatatgtttctgaaacttttacagtcactaaataatttgagtaaagcaaatgggtttcagaccgattacaatttggaaagattgattataaatttttaataatatgtaacaaagaaaaatgtggtcacttgattatatacctcttccccaagatcaagtaaatactttatcaatagaaaaaagaaagaaaagcaaaaagaaaagaaaaagaaagcaacactgctatayagaacattttttttttctaaatggaatccagcagcaaaaaaaaagataattgaagatactattaaaagatacaatttaatattaatatt

SEQ ID NO: 366656 - DNA, 661 bp, Homo sapiens
tatagttaggtaaataaatcaactaaatttttcctttttccttcatattgcagagtgtattattccagccggtttaccrtgcaggcttcccaatttgatactaattttaacctgacttttatatatcaatattaaagagacgaaaaataaatgtgattttctccagctctatatccctccaaggagagctttggaactgaaatcctaatcaggggatacatttttaatatttttgtctcaaatgaatttggagtcctccatagtatttccaaagttgcagagcagaaaagaggttaccaataaaattgggtagttctcatcccaattacagaattaggccaagttatcagatatgcaacaaatatccactcagaaagattgaatatttaaatattttaatttatgaagtattagcctattgctcagttaaagtattttggaaatttttctttaaaaaatgtatcaaacttgtggttagatgacattactgactcattttgcatctgatcaaaacaaataatgcatgaaacaaagcaatgtaagttataaagcattttaaaattgaaataagagatctttatttctgttgcatatcaaatgggatttattgacttccttttctcaaaaatgtcatatagaaaacatttctaccctctaaaaa

SEQ ID NO: 366657 - DNA, 661 bp, Homo sapiens
tatagttaggtaaataaatcaactaaatttttcctttttccttcatattgcagagtgtattattccagccggtttaccatgcaggcttcccaatttgatactaattttaacctgacttttatatatcaatattaaagagacgaaaaataaatgtgattttctccagctctatatccctccaaggagagctttggaactgaaatcctaatcaggggatacatttttaatatttttgtctcaaatgaatttggagtcctccatagtatttccaaagttgcagagcagaaaagaggttaccaataaaattgggtagttctcatcccaattacagaattaggccaagttatcagatatgcaacaaatatccactcagaaagattgaatatttaaatattttaatttatgaagtattagcctattgctcagttaaagtattttggaaatttttctttaaaaaatgtatcaaacttgtggttagatgacattactgactcattttgcatctgatcaaaacaaataatgcatraaacaaagcaatgtaagttataaagcattttaaaattgaaataagagatctttatttctgttgcatatcaaatgggatttattgacttccttttctcaaaaatgtcatatagaaaacatttctaccctctaaaaa

SEQ ID NO: 366658 - DNA, 474 bp, Homo sapiens
attttgaatattttattaataatgacccttttctacaatttttatatgcacttaaattttaaacagccaaacattcaaaggcttaaaaatcaacacttgaattttaaaatactatttgtatgaaatgaaatatttaattacaaatgttaactatatgttattgctgtaactattgggatagacagtgggcagttagtataagctactttgttaataaataaaattttaaaartaatcaatggaatgttcatttcaaactactttgttatttcatttcatttaaatttagcataaactttacttcggcagccaattccttagttgttcttctccattaactcatgactactttagctcttgatgctaagcatgatgatgtttggtttcagaagttgccacattaacaataggatccttgaagctacaatcatgctaagcaattttgacaattttatattttatagggcctagttc

SEQ ID NO: 366659 - DNA, 474 bp, Homo sapiens
attttgaatattttattaataatgacccttttctacaatttttatatgcacttaaattttaaacagccaaacattcaaaggcttaaaaatcaacacttgaattttaaaatactatttgtatgaaatgaaatatttaattacaaatgttaactatatgttattgctgtaactattgggatagacagtgggcagttagtataagctactttgttaataaataaaattttaaaaataatcaatggaatgttcatttcaaactactttgttatttcatttcatttaaatttagcataaactttacttcggcagccaattccttagttgttcttctccattaactcatgactactttagctcttgatgytaagcatgatgatgtttggtttcagaagttgccacattaacaataggatccttgaagctacaatcatgctaagcaattttgacaattttatattttatagggcctagttc

SEQ ID NO: 366660 - DNA, 501 bp, Homo sapiens
gtaagaggattcttgctgaaggcaagccagagtgatcagatatcaagagtgggagattctctctaaactgacttagcagcattcttgcaacagctggactaggcagtgtaaagacagggcccaaggacaaagtagagtcaaaaagagtgttcytagaagcctgactaaagcgtagacaagaagaaagtcttcatcagttccaaagtcactttctatacttatgatttggccatgagcattcctatgtttacttagtttggaggagtggactcagcagcatgtatgttatgggaaaaaaagagatttggaaaaattacttacataagtttgaaaggcaagatgaatctggccatatggtaaaatccaacagaactcttctggttatgagtaatttgtaaaataattcatacattgcccattatatgcattagatatatgtaaattttaccatgcttattcttcagaacagaaaaagtgaaatacaaaggcaaacatggtaaa

SEQ ID NO: 366661 - DNA, 580 bp, Homo sapiens
aactgacttagcagcattcttgcaacagctggactaggcagtgtaaagacagggcccaaggacaaagtagagtcaaaaagagtgttcctagaagcctgactaaagcgtagacaagaagaaagtcttcatcagttcmaaagtcactttctatacttatgatttggccatgagcattcctatgtttacttagtttggaggagtggactcagcagcatgtatgttatgggaaaaaaagagatttggaaaaattacttacataagtttgaaaggcaagatgaatctggccatatggtaaaatccaacagaactcttctggttatgagtaatttgtaaaataattcatacattgcccattatatgcattagatatatgtaaattttaccatgcttattcttcagaacagaaaaagtgaaatacaaaggcaaacatggtaaagcaatttattttagtttttgtgagttgttcttctagagtatgttatatgactctatgccctcagtttgaaactctcattgaaccatatctaaattaactaataaaatgaactttgaattatatatgccactgtgtgcaaattaa

SEQ ID NO: 366662 - DNA, 580 bp, Homo sapiens
aactgacttagcagcattcttgcaacagctggactaggcagtgtaaagacagggcccaaggacaaagtagagtcaaaaagagtgttcctagaagcctgactaaagcgtagacaagaagaaagtcttcatcagttccaaagtcactttctatacttatgatttggccatgagcattcctatstttacttagtttggaggagtggactcagcagcatgtatgttatgggaaaaaaagagatttggaaaaattacttacataagtttgaaaggcaagatgaatctggccatatggtaaaatccaacagaactcttctggttatgagtaatttgtaaaataattcatacattgcccattatatgcattagatatatgtaaattttaccatgcttattcttcagaacagaaaaagtgaaatacaaaggcaaacatggtaaagcaatttattttagtttttgtgagttgttcttctagagtatgttatatgactctatgccctcagtttgaaactctcattgaaccatatctaaattaactaataaaatgaactttgaattatatatgccactgtgtgcaaattaa

SEQ ID NO: 366663 - DNA, 580 bp, Homo sapiens
aactgacttagcagcattcttgcaacagctggactaggcagtgtaaagacagggcccaaggacaaagtagagtcaaaaagagtgttcctagaagcctgactaaagcgtagacaagaagaaagtcttcatcagttccaaagtcactttctatacttatgatttggccatgagcattcctatgtttacttagtttggaggagtggactcagcagcatgtatgttatgggaaaaaaagagattyggaaaaattacttacataagtttgaaaggcaagatgaatctggccatatggtaaaatccaacagaactcttctggttatgagtaatttgtaaaataattcatacattgcccattatatgcattagatatatgtaaattttaccatgcttattcttcagaacagaaaaagtgaaatacaaaggcaaacatggtaaagcaatttattttagtttttgtgagttgttcttctagagtatgttatatgactctatgccctcagtttgaaactctcattgaaccatatctaaattaactaataaaatgaactttgaattatatatgccactgtgtgcaaattaa

SEQ ID NO: 366664 - DNA, 501 bp, Homo sapiens
gtaagaggattcttgctgaaggcaagccagagtgatcagatatcaagagtgggagattctctctaaactgacttagcagcattcttgcaacagctggactaggcagtgtaaagacagggcccaaggacaaagtagagtcaaaaagagtgttcctagaagcctgactaaagcgtagacaagaagaaagtcttcatcagttccaaagtcactttctatacttatgatttggccatgagcattcctatgtttacttagtttggaggagtggactcagcagcatgtatgttatgggaaaaaaagagatttsgaaaaattacttacataagtttgaaaggcaagatgaatctggccatatggtaaaatccaacagaactcttctggttatgagtaatttgtaaaataattcatacattgcccattatatgcattagatatatgtaaattttaccatgcttattcttcagaacagaaaaagtgaaatacaaaggcaaacatggtaaa

SEQ ID NO: 366665 - DNA, 525 bp, Homo sapiens
aattacttacataagtttgaaaggcaagatgaatctggccatatggtaaaatccaacagaactcttctggttatgagtaatttgtaaaataattcatacattgcccattatatgcattagatatatgtaaattttaccatgcttattcttcagaacasaaaaagtgaaatacaaaggcaaacatggtaaagcaatttattttagtttttgtgagttgttcttctagagtatgttatatgactctatgccctcagtttgaaactctcattgaaccatatctaaattaactaataaaatgaactttgaattatatatgccactgtgtgcaaattaacattcattgactgtatgtgtatgtaaatattggccagtaaacagagccatttacatcttcataaagagaataacacttccaactaaaattccttctaaaattggactcatatcaattggaagtatttcaaacaattactaaactgatttacttgaacaaatatagaaaatattatctaagctatgtgtacc

SEQ ID NO: 366666 - DNA, 630 bp, Homo sapiens
gttattatactttaacatgtgttcattaactgtgtgtgttcctaaaccttgycatatttggatatgatttttagcaataaatagtggggcaagatggaaaatctgaagttttacaaaaactaaatataagacaaaaacaatatatattcaactaaaaaggagttggcaacaaacttctctgattctatatcaaatcccaaaaaacaatggaatatgtatcagtaattattgactaccatagggtaataataataataaatggtcataaaataaattagttaatggaaaatgatagatattaattattgaatgataaagcacaatgtaaaacaaaatgatagaaataatcatactcacaaacataacaatctgtatgtacaagtctaggttttccaaattaaagctggttactcacaaaatccttgaaaagagtgagaagttggtggggtgattatatttttaagctatgaagtcagatagtgtgatgtttcatctcagtaccactataaaataaagttttaatcctgttcatgtcaatcttaattttcactagctttttaggtaaggaaaattcatgtccatcccttccttgattcatctctttcaaaagcaacactttaaatggttgat

SEQ ID NO: 366667 - DNA, 630 bp, Homo sapiens
gttattatactttaacatgtgttcattaactgtgtgtgttcctaaaccttgtyatatttggatatgatttttagcaataaatagtggggcaagatggaaaatctgaagttttacaaaaactaaatataagacaaaaacaatatatattcaactaaaaaggagttggcaacaaacttctctgattctatatcaaatcccaaaaaacaatggaatatgtatcagtaattattgactaccatagggtaataataataataaatggtcataaaataaattagttaatggaaaatgatagatattaattattgaatgataaagcacaatgtaaaacaaaatgatagaaataatcatactcacaaacataacaatctgtatgtacaagtctaggttttccaaattaaagctggttactcacaaaatccttgaaaagagtgagaagttggtggggtgattatatttttaagctatgaagtcagatagtgtgatgtttcatctcagtaccactataaaataaagttttaatcctgttcatgtcaatcttaattttcactagctttttaggtaaggaaaattcatgtccatcccttccttgattcatctctttcaaaagcaacactttaaatggttgat

SEQ ID NO: 366668 - DNA, 651 bp, Homo sapiens
aatattgggcaggcaaaatccatgttggtatatccttatgcatataactagaaatatattgctaattttaataaacttactttcaaaaatgtattctgtgttattatactttaacatgtgttcattaactgtgtgtgttcctaaaccttgtcatatttggatatgatttttagcaataaatagtggggcaagatggaaaatctgaagttttacaaaaactaaatataagacaaaaacaatatatattcaactaaaaaggagttggcaacaaacttctctgattctatatcaaatcccaaaaaacaatggaatatgtatcagtaattattgactaccatagggtaataataataataaatggtcataaaataaattagttaatggaaaatgatagatattaattattgaatgataaagcacaatgtaaaacaaaatgatagaaataatcatactcacaaacataacaatctgtatgtasaagtctaggttttccaaattaaagctggttactcacaaaatccttgaaaagagtgagaagttggtggggtgattatatttttaagctatgaagtcagatagtgtgatgtttcatctcagtaccactataaaataaagttttaatcctgttcatgtcaatcttaattttcacta

SEQ ID NO: 366669 - DNA, 397 bp, Homo sapiens
catgtccaggcaactgccaaagcactggatcattggaatagcttmataaatgatgaccctatttctctcactttcattcctagaggctgtttttcagccaggagtcagaatgattataaaacataaatcaaataatttcacagtcttgctcatagctttctaattgttccccttctcaaagtaaaacccaaaaccttgtcattgtttgtgaaagaaacaatatgggatccttctccatacctcccccaatttattttatcacagccctcattgttttggtcattctatccttaagagcctcctgatatttcttggaaatgccaagattcacccaccttaaaaaccactttgtttttctgtctttgaaagagacatgcgctgtagatatttgcttgct

SEQ ID NO: 366670 - DNA, 397 bp, Homo sapiens
catgtccaggcaactgccaaagcactggatcattggaatagcttcataaatgatgaccctatttctctcactttcattcctagaggctgtttttcagccaggagtcagaatgattataaaacataaatcaaataatttcacagtcttgctcatagctttctaattgttccccttctcaaagtaaaacccaaaaccttgtcattgyttgtgaaagaaacaatatgggatccttctccatacctcccccaatttattttatcacagccctcattgttttggtcattctatccttaagagcctcctgatatttcttggaaatgccaagattcacccaccttaaaaaccactttgtttttctgtctttgaaagagacatgcgctgtagatatttgcttgct

SEQ ID NO: 366671 - DNA, 397 bp, Homo sapiens
catgtccaggcaactgccaaagcactggatcattggaatagcttcataaatgatgaccctatttctctcactttcattcctagaggctgtttttcagccaggagtcagaatgattataaaacataaatcaaataatttcacagtcttgctcatagctttctaattgttccccttctcaaagtaaaacccaaaaccttgtcattgtttgtgaaagmaacaatatgggatccttctccatacctcccccaatttattttatcacagccctcattgttttggtcattctatccttaagagcctcctgatatttcttggaaatgccaagattcacccaccttaaaaaccactttgtttttctgtctttgaaagagacatgcgctgtagatatttgcttgct

SEQ ID NO: 366672 - DNA, 397 bp, Homo sapiens
catgtccaggcaactgccaaagcactggatcattggaatagcttcataaatgatgaccctatttctctcactttcattcctagaggctgtttttcagccaggagtcagaatgattataaaacataaatcaaataatttcacagtcttgctcatagctttctaattgttccccttctcaaagtaaaacccaaaaccttgtcattgtttgtgaaagaaacaatatgggatccttctccatacctcccccaatttattttatcacagccctcattgttttggtcattctatccttaagagcctcctgatatttcttggaaatgccaagattcacccaccttaraaaccactttgtttttctgtctttgaaagagacatgcgctgtagatatttgcttgct

SEQ ID NO: 366673 - DNA, 574 bp, Homo sapiens
aagaataaagtgctagtgacaaattcccagttgtgttttcctttcttaatatttgagagccacagcaaatgttgcataccctttgatgttaagcagaaacttttgtctagacattgacttcaggctttaaaatatgtagtatctcccccagattaaaggtaactagtccctgatttctattaaaatataatytttagaagcttaaaatcatagctttcagacaaatataaaatgaataggttttaaagatattaacttgaattaataaataacaaatagatgttttaaatgacacaaagggaatctgagaaactgggacatttagaagcaatttagcaaaataacattaagattgtttggttaaataaataaatatagattgatatataacagtgtcataaatctgtgaggttatctgttctactaaggagatatatttgtatctttacaggaaaaaaaaattcatggtgcaaaatccctttactaaatctggtacctttaattattattgtatagcacttaagtataggaacttgaatatagccaatatattcctaaagatctaaattactct

SEQ ID NO: 366674 - DNA, 574 bp, Homo sapiens
aagaataaagtgctagtgacaaattcccagttgtgttttcctttcttaatatttgagagccacagcaaatgttgcataccctttgatgttaagcagaaacttttgtctagacattgacttcaggctttaaaatatgtagtatctcccccagattaaaggtaactagtccctgatttctattaaaatataatttttagaagcttaaaatcatagctytcagacaaatataaaatgaataggttttaaagatattaacttgaattaataaataacaaatagatgttttaaatgacacaaagggaatctgagaaactgggacatttagaagcaatttagcaaaataacattaagattgtttggttaaataaataaatatagattgatatataacagtgtcataaatctgtgaggttatctgttctactaaggagatatatttgtatctttacaggaaaaaaaaattcatggtgcaaaatccctttactaaatctggtacctttaattattattgtatagcacttaagtataggaacttgaatatagccaatatattcctaaagatctaaattactct

SEQ ID NO: 366675 - DNA, 556 bp, Homo sapiens
ttcacatttcttctgctaggaaatccatggggaatattggaattgggctagtttttattttatttctaatgtttaaagtttctgaaaaatattggcgtcaaaaaattctacttcaatcctgagtaaagaataaagtgctagtgacaaattcccagttgtgttttcctttcttaatatttgagagccacagcaaatgttgcataccctttgatgttaagcagaaacttttgtctagacattgacttcaggctttaaaatatgtagtatctcccccagattaaaggtaactagtccctgatttctattaaaatataatttttagaagcttaaaatcatagctttcagacaaatataaaatgaataggttttaaagatattaacttgaattaataaataacaaatagatgttttaaatgacacaaagggaatctgagaaactgggacatttagaagcaatttagcaaaataacrttaagattgtttggttaaataaataaatatagattgatatataacagtgtcataaatctgtgaggttatctgttctactaaggag

SEQ ID NO: 366676 - DNA, 574 bp, Homo sapiens
aagaataaagtgctagtgacaaattcccagttgtgttttcctttcttaatatttgagagccacagcaaatgttgcataccctttgatgttaagcagaaacttttgtctagacattgacttcaggctttaaaatatgtagtatctcccccagattaaaggtaactagtccctgatttctattaaaatataatttttagaagcttaaaatcatagctttcagacaaatataaaatgaataggttttaaagatattaacttgaattaataaataacaaatagatgttttaaatgacacaaagggaatctgagaaactgggacatttagaagcaatttagcaaaataacattaagattgyttggttaaataaataaatatagattgatatataacagtgtcataaatctgtgaggttatctgttctactaaggagatatatttgtatctttacaggaaaaaaaaattcatggtgcaaaatccctttactaaatctggtacctttaattattattgtatagcacttaagtataggaacttgaatatagccaatatattcctaaagatctaaattactct

SEQ ID NO: 366677 - DNA, 556 bp, Homo sapiens
ttcacatttcttctgctaggaaatccatggggaatattggaattgggctagtttttattttatttctaatgtttaaagtttctgaaaaatattggcgtcaaaaaattctacttcaatcctgagtaaagaataaagtgctagtgacaaattcccagttgtgttttcctttcttaatatttgagagccacagcaaatgttgcataccctttgatgttaagcagaaacttttgtctagacattgacttcaggctttaaaatatgtagtatctcccccagattaaaggtaactagtccctgatttctattaaaatataatttttagaagcttaaaatcatagctttcagacaaatataaaatgaataggttttaaagatattaacttgaattaataaataacaaatagatgttttaaatgacacaaagggaatctgagaaactgggacatttagaagcaatttagcaaaataacattaagattgtttggttaartaaataaatatagattgatatataacagtgtcataaatctgtgaggttatctgttctactaaggag

SEQ ID NO: 366678 - DNA, 556 bp, Homo sapiens
ttcacatttcttctgctaggaaatccatggggaatattggaattgggctagtttttattttatttctaatgtttaaagtttctgaaaaatattggcgtcaaaaaattctacttcaatcctgagtaaagaataaagtgctagtgacaaattcccagttgtgttttcctttcttaatatttgagagccacagcaaatgttgcataccctttgatgttaagcagaaacttttgtctagacattgacttcaggctttaaaatatgtagtatctcccccagattaaaggtaactagtccctgatttctattaaaatataatttttagaagcttaaaatcatagctttcagacaaatataaaatgaataggttttaaagatattaacttgaattaataaataacaaatagatgttttaaatgacacaaagggaatctgagaaactgggacatttagaagcaatttagcaaaataacattaagattgtttggttaaataaataaatatagattgatatataacrgtgtcataaatctgtgaggttatctgttctactaaggag

SEQ ID NO: 366679 - DNA, 601 bp, Homo sapiens
tttccatgttcctacaaaggatatgatctagttctttagatggctgcatagtattccatggtgtatatgtaccacattttctttatctagtctatcactgatgggcatttgggttggttccatgtctttgctataataartagtatagctgctgcaataaacatatgtgtgcatgtgtcttcataatagaatgatttatattcctttgggtatataccaagtaatgtgactactgggtcatgggatttctgattctagatccatgaggaatctccacactgtcttccacaatggtcgaactaattttcattcccaccaacagtgattcaaggtatttttgatggtttctttgtttgtctattttgcctttcatttgtttttgtaaagggagaaaattttgggcttaaggaataccataatgctttaaacttcgagctatttcttcttttttttctcaaataatgtcattttgtcatagatctctgaaaatgaccttgaaaacttcccataaaaatcaacagaacttacgatgttcagagcataagaaataaatgtcaccttcaagattcatcaaaatgagcttagatgaaattttaattgc

SEQ ID NO: 366680 - DNA, 549 bp, Homo sapiens
taaatagttaaccaagacattctcccttgtttctacagtgatacatagtattgaaaattgctttgactgcacactcaaattattacaattcaactttcttcaacatcataaattgaaaggatatcatgtggatctttgttgttcccaattaggattgaaaataacttctggccaaattagtagtgtagagacttatggaatgaagtcaatttaaaacagaatttttttgagttaatggtaagaaagagtttgttgcaataaaattctttgaaattttagatatgaaattggtacaaaaacttaatacaaattcatctacctgattttttgtggcaatgtcataaataaaagaaatatggtctcatctttcctaaatattttgctcatgctctttgacaataccgtaaaatgtacttaaactacataagaatcttcyagtaaaataaaatgcaacatttcactcagaagtaaaacatttttaaaatagtgtccaacaattgcttcaagagggtgacaacttatgaacaccctgctctaagtgtttccacc

SEQ ID NO: 366681 - DNA, 502 bp, Homo sapiens
aacagaatttttttgagttaatggtaagaaagagtttgttgcaataaaattctttgaaattttagatatgaaattggtacaaaaacttaatacaaattcatctacctgattttttgtggcaatgtcataaataaaagaaatatggtctcatctttcctaaatattttgctcatgctctttgacaataccgtaaaatgtacttaaactacataagaatcttccagtaaaataaaatgcaacatttcactcagaagtaaaacatttttaaaatagtgtccaacaattgcttcaagagggtgacaacttatgaacaccctgytctaagtgtttccaccctaattggtttctttctttttttttttttttttgagacaaaaccttgctctgttacccaagctggagtgcagtggtgtgacctcggctcactgcaacctccgcctcttgggtccagcggattctcctgcctcagccaaccaagtagctgggattagaagcaactgcc

SEQ ID NO: 366682 - DNA, 580 bp, Homo sapiens
tgttggccaggctggtctcgaactcctgatttcaagtgattggactcccaaagtgctggaattacaggcataagccaccatgcctggcctcccctaatttgcttctttaaacctctctacatcatcacaagwtgggtgttactatgatcactattttacaggtgagcatatgaggaacagagaggttaaggaggaacagggtgatctgctacaactcttcagcagggcattctgggcaggactgtctaacttgtgagaggcaaggggactatttatagcctatgtattcccgttaaagtaacaaacatatatcaagaataaatattacagtatatttctagcaaccatctagaaataggaaatagtatcagtaccatattgtcagatgacagtaggattaaataaaaccggagtaactaagtaactgaccctttattccctgcatttaaaagaaaagtatgtcttggagttgaattaagtaacctgggatagatctctaaaaatctgtaagtgaaacaggggtcacatattaacatgttatactagaaacagtgtctaagagaggaatttggcactggaa

SEQ ID NO: 366683 - DNA, 613 bp, Homo sapiens
tccaaataaaatgctttttgtacataattttttctattcccattaattatctttcacagttttattttgttttgattttttcatttgttccttccccctccccttggcattcagttaattcttctattttmtttcccaaacaggcacattatcattaaatgtaatggttggctgaatcataaccacatttaaatattgctctgttttgccatttgtttttcttccttctttctttcctttcttcgttcttgcttttcttggcaagcttatgaagttttatttgtgtaattgctacacaaagaaacttcattgtgtttgtatttgcccttcaattggatcataaatgccttggtggcaatgaatgtacatagctatttctgcatcctaagtagcatatatgtaggttttgaatacaggattgataaatgtttgtcttgtgaaattaaaataattactgatgtctacatattgtttccagcttgcttctctgttgtttcctctttagatatgctagataaccacttcaatatgattcttcttatgtaaaacctcatatattctcaaaagtattatgtatgcattcaactaactgtacatctacagtacagtaaaa

SEQ ID NO: 366684 - DNA, 496 bp, Homo sapiens
gtgtctaagagaggaatttggcactggaatctacatagggaacaattaaattatccataaatgttttttactttatcttgaaaaaggtatagtaccaaaaactccacaaacactgctagaccctccataataygtgtgggctctaagataagagtggaaatagaggcccacataacatgtgtataaatattttaacattataaagcaaactactccaataatctggcctgcatttccacctaggttctcaatggcccacttcctgaccaccaccctctggagtccaaaggagatttgcttattcccaatgttattcctgcaggtcagccaaagaggagcaaagagtcatccacctcaatcatgttcaggaaatgatcaggtcaagatgtggagtgagccagcttttctctttcgtgccacattttctgacccagcatttcaaggtacttctaatacacaaagactattacaagagggaggaaagaaggaaggtcag

SEQ ID NO: 366685 - DNA, 441 bp, Homo sapiens
ggcccacttcctgaccaccaccctctggagtccaaaggagatttgcttattcccaatgttattcctgcaggtcagccaaagaggagcaaagagtcatcyacctcaatcatgttcaggaaatgatcaggtcaagatgtggagtgagccagcttttctctttcgtgccacattttctgacccagcatttcaaggtacttctaatacacaaagactattacaagagggaggaaagaaggaaggtcagttatctgaagaactgaggctagctagaagcccaaatttggtgtgatgggggccatcaaatctcaacagaaacagctttctctctctgttatcctggacagggcttgtgatttttttttttcctccactcagccatagactctcagctacatatcctctagcctggagtagtcaaatcagctcatctctttctctctc

SEQ ID NO: 366686 - DNA, 441 bp, Homo sapiens
ggcccacttcctgaccaccaccctctggagtccaaaggagatttgcttattcccaatgttattcctgcaggtcagccaaagaggagcaaagagtcatccacctcaatcatgttcaggaaatgatcaggtcaagatgtggagtgagccagcttttctctttygtgccacattttctgacccagcatttcaaggtacttctaatacacaaagactattacaagagggaggaaagaaggaaggtcagttatctgaagaactgaggctagctagaagcccaaatttggtgtgatgggggccatcaaatctcaacagaaacagctttctctctctgttatcctggacagggcttgtgatttttttttttcctccactcagccatagactctcagctacatatcctctagcctggagtagtcaaatcagctcatctctttctctctc

SEQ ID NO: 366687 - DNA, 441 bp, Homo sapiens
ggcccacttcctgaccaccaccctctggagtccaaaggagatttgcttattcccaatgttattcctgcaggtcagccaaagaggagcaaagagtcatccacctcaatcatgttcaggaaatgatcaggtcaagatgtggagtgagccagcttttctctttcgtgccacattttctgacccagcatttcaaggtacttctaatacacaaagactattacaagagggaggaaagaaggaaggtcagttatctgaagaactgaggctagctagaagcccaaatttggtgtgatgrgggccatcaaatctcaacagaaacagctttctctctctgttatcctggacagggcttgtgatttttttttttcctccactcagccatagactctcagctacatatcctctagcctggagtagtcaaatcagctcatctctttctctctc

SEQ ID NO: 366688 - DNA, 548 bp, Homo sapiens
gcaacattgcttctcattcgctttccaccatgattttgagggctcmccagccatgtggaactataagtcagttaaacctctttcttttataaattacccagtctcagctgtgtctttattagcagtgtgaggacaaactaatacaacgggtgtccacattctagtccccagaatttgtgaatatgttagttgcatggcaaaggaaaattgaaattgtagactaaactaaggttgttcgtcagttgatattaagataggaaagttattctggattatcctgatgggaccaaaataatcagaaggacatttacaagtggaaggaggcagaagaagttagagtgatgagatgggaactcacaaactgccattgctggccctttaaaacaatttaaatcttgttttatgacacataattattgtacatatttatgggatacagtgtgatgtttcaacacgtgtatgtatagtttaaatattgaatcaggatattcaacatattcttcacttcatacatctttgatatctttacggtgagagaattcaaaaat

SEQ ID NO: 366689 - DNA, 548 bp, Homo sapiens
gcaacattgcttctcattcgctttccaccatgattttgagggctcaccagccatgtggaactayaagtcagttaaacctctttcttttataaattacccagtctcagctgtgtctttattagcagtgtgaggacaaactaatacaacgggtgtccacattctagtccccagaatttgtgaatatgttagttgcatggcaaaggaaaattgaaattgtagactaaactaaggttgttcgtcagttgatattaagataggaaagttattctggattatcctgatgggaccaaaataatcagaaggacatttacaagtggaaggaggcagaagaagttagagtgatgagatgggaactcacaaactgccattgctggccctttaaaacaatttaaatcttgttttatgacacataattattgtacatatttatgggatacagtgtgatgtttcaacacgtgtatgtatagtttaaatattgaatcaggatattcaacatattcttcacttcatacatctttgatatctttacggtgagagaattcaaaaat

SEQ ID NO: 366690 - DNA, 548 bp, Homo sapiens
gcaacattgcttctcattcgctttccaccatgattttgagggctcaccagccatgtggaactataagtcagttaaacctctttcttttataaattacccagtctcagctrtgtctttattagcagtgtgaggacaaactaatacaacgggtgtccacattctagtccccagaatttgtgaatatgttagttgcatggcaaaggaaaattgaaattgtagactaaactaaggttgttcgtcagttgatattaagataggaaagttattctggattatcctgatgggaccaaaataatcagaaggacatttacaagtggaaggaggcagaagaagttagagtgatgagatgggaactcacaaactgccattgctggccctttaaaacaatttaaatcttgttttatgacacataattattgtacatatttatgggatacagtgtgatgtttcaacacgtgtatgtatagtttaaatattgaatcaggatattcaacatattcttcacttcatacatctttgatatctttacggtgagagaattcaaaaat

SEQ ID NO: 366691 - DNA, 548 bp, Homo sapiens
gcaacattgcttctcattcgctttccaccatgattttgagggctcaccagccatgtggaactataagtcagttaaacctctttcttttataaattacccagtctcagctgtgtctttattagcagtgtgaggacaaactaatacaacgggtgtccacattctagtccccagaatttgtgaatatgttagttgcatggcaaaggaaaattgaaattgtagactaaactaaggttgttcrtcagttgatattaagataggaaagttattctggattatcctgatgggaccaaaataatcagaaggacatttacaagtggaaggaggcagaagaagttagagtgatgagatgggaactcacaaactgccattgctggccctttaaaacaatttaaatcttgttttatgacacataattattgtacatatttatgggatacagtgtgatgtttcaacacgtgtatgtatagtttaaatattgaatcaggatattcaacatattcttcacttcatacatctttgatatctttacggtgagagaattcaaaaat

SEQ ID NO: 366692 - DNA, 635 bp, Homo sapiens
ttagttgcatggcaaaggaaaattgaaattgtagactaaactaaggttgttcgtcagttgatattaagataggaaagttattctggattatyctgatgggaccaaaataatcagaaggacatttacaagtggaaggaggcagaagaagttagagtgatgagatgggaactcacaaactgccattgctggccctttaaaacaatttaaatcttgttttatgacacataattattgtacatatttatgggatacagtgtgatgtttcaacacgtgtatgtatagtttaaatattgaatcaggatattcaacatattcttcacttcatacatctttgatatctttacggtgagagaattcaaaaatcctctcttctagctattttgaaatatacaatacaatattgctaaccatagtcaccctgactccattcctcattttaaaaatggaggaagggacagtgatcaaaggagcaagcagcctctgggctgtggaaaaccaaaggaaacaaactcttcccacagacccccccccaagaaaaaaccaaccctggcagtatcttggttttaccatggtgtgatcaagtcagatttctgtcttacagaactgtaacataataaatctgtattgtttaagct

SEQ ID NO: 366693 - DNA, 635 bp, Homo sapiens
ttagttgcatggcaaaggaaaattgaaattgtagactaaactaaggttgttcgtcagttgatattaagataggaaagttattctggattatcctgatrggaccaaaataatcagaaggacatttacaagtggaaggaggcagaagaagttagagtgatgagatgggaactcacaaactgccattgctggccctttaaaacaatttaaatcttgttttatgacacataattattgtacatatttatgggatacagtgtgatgtttcaacacgtgtatgtatagtttaaatattgaatcaggatattcaacatattcttcacttcatacatctttgatatctttacggtgagagaattcaaaaatcctctcttctagctattttgaaatatacaatacaatattgctaaccatagtcaccctgactccattcctcattttaaaaatggaggaagggacagtgatcaaaggagcaagcagcctctgggctgtggaaaaccaaaggaaacaaactcttcccacagacccccccccaagaaaaaaccaaccctggcagtatcttggttttaccatggtgtgatcaagtcagatttctgtcttacagaactgtaacataataaatctgtattgtttaagct

SEQ ID NO: 366694 - DNA, 635 bp, Homo sapiens
ttagttgcatggcaaaggaaaattgaaattgtagactaaactaaggttgttcgtcagttgatattaagataggaaagttattctggattatcctgatgggaccaaaataatcagaaggacatttacaagtggaaggaggcrgaagaagttagagtgatgagatgggaactcacaaactgccattgctggccctttaaaacaatttaaatcttgttttatgacacataattattgtacatatttatgggatacagtgtgatgtttcaacacgtgtatgtatagtttaaatattgaatcaggatattcaacatattcttcacttcatacatctttgatatctttacggtgagagaattcaaaaatcctctcttctagctattttgaaatatacaatacaatattgctaaccatagtcaccctgactccattcctcattttaaaaatggaggaagggacagtgatcaaaggagcaagcagcctctgggctgtggaaaaccaaaggaaacaaactcttcccacagacccccccccaagaaaaaaccaaccctggcagtatcttggttttaccatggtgtgatcaagtcagatttctgtcttacagaactgtaacataataaatctgtattgtttaagct

SEQ ID NO: 366695 - DNA, 555 bp, Homo sapiens
ttgtgaatatgttagttgcatggcaaaggaaaattgaaattgtagactaaactaaggttgttcgtcagttgatattaagataggaaagttattctggattatcctgatgggaccaaaataatcagaaggacatttacaagtggaaggaggcagaagaagttagagtgatgagatgggaactcacaaactgccattgctggccctttaaaacaatttaaatcttgttttatgacacataattattgtacatatttatgggatacagtgtgatgtttcaacacgtgtatgtatagtttaaatattgaatcaggatattcaacatattcttcacttcatacatctttgatatctttayggtgagagaattcaaaaatcctctcttctagctattttgaaatatacaatacaatattgctaaccatagtcaccctgactccattcctcattttaaaaatggaggaagggacagtgatcaaaggagcaagcagcctctgggctgtggaaaaccaaaggaaacaaactcttcccacagacccccccccaagaaaaaaccaa

SEQ ID NO: 366696 - DNA, 496 bp, Homo sapiens
catattcttcacttcatacatctttgatatctttacggtgagagaattcaaaaatcctctcttctagctattttgaaatatacaatacaatattgctaaccatagtcaccctgactccattcctcattttaaaaatggaggaagggacagtgatcaaaggagcaagcagcctctgggctgtggaaaaccaaaggaaacaaactcttcccacagacccccccccaagaaaaaaccaaccctggcagtatcttggttttamcatggtgtgatcaagtcagatttctgtcttacagaactgtaacataataaatctgtattgtttaagctactaagtttgaagtaattttactaaaacttgaaaggaatttacattttgcttttaaagttcttatttttgaaactttagacagagatcaacaaatcctcaacaagagatagctcaatttttacctttgcaaaaggaattatgttacatatctatgagaatgaataacta

SEQ ID NO: 366697 - DNA, 577 bp, Homo sapiens
gtgttctgagttaatacatataaaatctgaaaaaattgcaacaggaacaataaatatggaaattgaaatcacaaaaaaatcaatgaatttgaagaccatttggagaaatgcttatatcatcctaagattaatttattctaaccatgcaccagtgatagtattataagaagaaataaattcattatcattttttactgtatttattttttaagacagagattggtactaattcagtaatggaaaactaattgtaaaatttgtactgtggtaaatttggaaaacaaggcatggcacagaaagagtatataataaaatcatttggcataaaggccatttgaaatggattaattatagtgatgaaacatgtcatcatttcctggacaagtagggaagataggcaatgagaaggctatggaggagagagaagagagtagagtccatagagtgacagtcttcaacaggttaaaaacctgtaygagttcaggtcttgaacaagcgatattggatgaaatgggaggtagagaggaccaaagagtaggatttttttttttttttaatattgagaaacatttgctgt

SEQ ID NO: 366698 - DNA, 533 bp, Homo sapiens
attaggcttaatgaaaagtcctgtaatgcttggacacatgggaaagctgaccagtattagataaaacaaaattgttatagttgggaattrttactatacatattttcatcatcattttgcaacatttataattttttcttaatgaaatatgttgatttttcagtgtttttaaagtaaaattgtattacatttaaaaaattaatagagaactattctgttgaagacaatgaatgcatattatgcttaacatgttaatatgtgtttcacattatttatagattttgtctactgcattgaaatttgctagaatgctgcatatgtagagcttaatgtaatcacttcctaactataatctctggagccaacccagttacaataaaattaactctaattttgtgtcttttatttgtttctacttctaggttaaatgtggtttgagaaaagtgttttagaaaactttgaaaaatcactggcttgttagaatgcatgttctattaaaagatatgagtcctatctccaggttacttaaaata

SEQ ID NO: 366699 - DNA, 609 bp, Homo sapiens
attaggcttaatgaaaagtcctgtaatgcttggacacatgggaaagctgaccagtattagataaaacaaaattgttatagttgggaattattactatacatattttcatcatcattttgcaacatttatawttttttcttaatgaaatatgttgatttttcagtgtttttaaagtaaaattgtattacatttaaaaaattaatagagaactattctgttgaagacaatgaatgcatattatgcttaacatgttaatatgtgtttcacattatttatagattttgtctactgcattgaaatttgctagaatgctgcatatgtagagcttaatgtaatcacttcctaactataatctctggagccaacccagttacaataaaattaactctaattttgtgtcttttatttgtttctacttctaggttaaatgtggtttgagaaaagtgttttagaaaactttgaaaaatcactggcttgttagaatgcatgttctattaaaagatatgagtcctatctccaggttacttaaaatattagttttactccaaattgtattctagtttccctatctttaaaatatgttcatgaaacatttctcttctcttatga

SEQ ID NO: 366700 - DNA, 533 bp, Homo sapiens
attaggcttaatgaaaagtcctgtaatgcttggacacatgggaaagctgaccagtattagataaaacaaaattgttatagttgggaattattactatacatattttcatcatcattttgcaacatttataattttttcttaatgaaatatgttgatttttcagtgtttttaaagtaaaattgtattacrtttaaaaaattaatagagaactattctgttgaagacaatgaatgcatattatgcttaacatgttaatatgtgtttcacattatttatagattttgtctactgcattgaaatttgctagaatgctgcatatgtagagcttaatgtaatcacttcctaactataatctctggagccaacccagttacaataaaattaactctaattttgtgtcttttatttgtttctacttctaggttaaatgtggtttgagaaaagtgttttagaaaactttgaaaaatcactggcttgttagaatgcatgttctattaaaagatatgagtcctatctccaggttacttaaaata

SEQ ID NO: 366701 - DNA, 609 bp, Homo sapiens
attaggcttaatgaaaagtcctgtaatgcttggacacatgggaaagctgaccagtattagataaaacaaaattgttatagttgggaattattactatacatattttcatcatcattttgcaacatttataattttttcttaatgaaatatgttgatttttcagtgtttttaaagtaaaattgtattacatttaaaaaattaatagagaactattctgttgaagacaatgaatgcatattatgcttaacatgttaatatgtgtttcacattatttatagattttgtctactgcattgaaatttkctagaatgctgcatatgtagagcttaatgtaatcacttcctaactataatctctggagccaacccagttacaataaaattaactctaattttgtgtcttttatttgtttctacttctaggttaaatgtggtttgagaaaagtgttttagaaaactttgaaaaatcactggcttgttagaatgcatgttctattaaaagatatgagtcctatctccaggttacttaaaatattagttttactccaaattgtattctagtttccctatctttaaaatatgttcatgaaacatttctcttctcttatga

SEQ ID NO: 366702 - DNA, 609 bp, Homo sapiens
attaggcttaatgaaaagtcctgtaatgcttggacacatgggaaagctgaccagtattagataaaacaaaattgttatagttgggaattattactatacatattttcatcatcattttgcaacatttataattttttcttaatgaaatatgttgatttttcagtgtttttaaagtaaaattgtattacatttaaaaaattaatagagaactattctgttgaagacaatgaatgcatattatgcttaacatgttaatatgtgtttcacattatttatagattttgtctactgcattgaaatttgctagaatgctgcatatgtagarcttaatgtaatcacttcctaactataatctctggagccaacccagttacaataaaattaactctaattttgtgtcttttatttgtttctacttctaggttaaatgtggtttgagaaaagtgttttagaaaactttgaaaaatcactggcttgttagaatgcatgttctattaaaagatatgagtcctatctccaggttacttaaaatattagttttactccaaattgtattctagtttccctatctttaaaatatgttcatgaaacatttctcttctcttatga

SEQ ID NO: 366703 - DNA, 596 bp, Homo sapiens
ttccagcttgcttctctgttgtttcctctttagatatgctagataaccacttcaatatgattcttcttatgtaaaacctcatatattctcaaaagtattatgtatgcattcaactaactgtacatctacagtacagtaaaaaatgagattgtagtaagtgaaaatgcatttataagtataggcaaatttttaggcaagacacctcataaagatcactttagaaattagatcaagtaaaaataagtcacaaaaagaaacgtgaattagtcatcttaaacattgttttaggcagtaaaacaacattgaaaaaagaggatcttgtaaagcctgatactkgattcctataggataactgaatcaaatcaggtgttttagaggtaatggtcacctgattgttttctcttgagttttttcatataataggtgcagtggttcttgcaatgaggattttttttatggaaatgtgaaataaagtacagaaattcctaatgaaaacctgtcttttaagtggatctctaaattctaagaaagtgcttatattatcttagttatttagctattagcctgtcaatcattaggaaagtaagagcaattta

SEQ ID NO: 366704 - DNA, 596 bp, Homo sapiens
ttccagcttgcttctctgttgtttcctctttagatatgctagataaccacttcaatatgattcttcttatgtaaaacctcatatattctcaaaagtattatgtatgcattcaactaactgtacatctacagtacagtaaaaaatgagattgtagtaagtgaaaatgcatttataagtataggcaaatttttaggcaagacacctcataaagatcactttagaaattagatcaagtaaaaataagtcacaaaaagaaacgtgaattagtcatcttaaacattgttttaggcagtaaaacaacattgaaaaaagaggatcttgtaaagcctgatacttgattcctataggataactgaatcaaatcagrtgttttagaggtaatggtcacctgattgttttctcttgagttttttcatataataggtgcagtggttcttgcaatgaggattttttttatggaaatgtgaaataaagtacagaaattcctaatgaaaacctgtcttttaagtggatctctaaattctaagaaagtgcttatattatcttagttatttagctattagcctgtcaatcattaggaaagtaagagcaattta

SEQ ID NO: 366705 - DNA, 488 bp, Homo sapiens
atactgagtaaaagaaaatttaggaatataaataaatgagcatttttgaacatgtaaaaatattttcttgctgtttttaggagacttttagcaggacaggagcttacctctcatctacctctgcttggacaaaccagtgatgtgatttgcaaataggctgtaacttcaccgaaaacacatcacagtaaagaaaggtagtgactttcagagaatttgacctaacttagaatttgtaaaagagaaaagcattgtccttatgcctaaagtacatgactgtttctttttaagttacatgtatatttacctgaccaatttgttttactctgtattttaagttatcaggtgaaatggttttrgaataaattaatgagttgtttcttctgaataaatgtgcatgttacaaatgcaaacacgtgtatgtattatacaactatgcagcttcaagagctgacttatttctatcagctttttattcccttaaaaaaatc

SEQ ID NO: 366706 - DNA, 596 bp, Homo sapiens
ttccagcttgcttctctgttgtttcctctttagatatgctagataaccacttcaatatgattcttcttatgtaaaacctcatatattctcaaaagtattatgtatgcattcaactaactgtacatctacagtacagtaaaaaatgagattgtagtaagtgaaaatgcatttataagtataggcaaatttttaggcaagacacctcataaagatcactttagaaattagatcaagtaaaaataagtcacaaaaagaaacgtgaattagtcatcttaaacattgttttaggcagtaaaacaacattgaaaaaagaggatcttgtaaagcctgatacttgattcctataggataactgaatcaaatcaggtgttttagaggtaatggtcacctgattgttttctcttgagttttttcatataataggtgcagtggttcttgcaatgaggawtttttttatggaaatgtgaaataaagtacagaaattcctaatgaaaacctgtcttttaagtggatctctaaattctaagaaagtgcttatattatcttagttatttagctattagcctgtcaatcattaggaaagtaagagcaattta

SEQ ID NO: 366707 - DNA, 591 bp, Homo sapiens
agcattaaaggttatcattttggagtttcacttgattgggttttgttttgttttgtttttttcatagaaatatttgatatatgtggtcaccactcacaactcttgcttcagtgagcatggatgacaggcagccccagctactgtttttctggttgtatgactatctttgcactcagaccatattttctctggctgttcctggccaatgactgagcatgctcggagtattgatgaaggccatttttaagatttgtgataaccttccaacagaagactttggactggagactcctattgtccgggccaaaayttcctaaactgtgtttcaggctgtgactctttcattctcatccttcttcccctcctttgacagaagccaggcttgcatcactgaagactccctgcacttagatctgctttttcttcttaatctttaactaacgttcctctcataaccttttgagtgacttataattgcatagtatcagcttcttggaaaacctgacttgataaactatcctatttgaaatacagatatatacgcatttaacaatttttgacattattagcacattgagtattaaatagtat

SEQ ID NO: 366708 - DNA, 424 bp, Homo sapiens
cctctgcctttcttaaagtgattggttaaaatgttttagcacttagcagtttcttcctagttttgcagctatggccctgaaatggcttatgagtaaggcaaatagargatgttcttactgggctagtgcttttatttctctctttcgcttgttctattttttaagtgaaaatggcattagcatcttatttgtcaggctttcattttcgtgtttgagaattccacttgtagataaccaatagctataacctgttcaggtctttaaaaaatatagcttattgaatgagcagtcacacacaagaaattccgttcttcccatagtccatcatgctttacccgtattcagcttctcacttctgtatctaaaaacactagattttatcattctactttaaagtttcttttttttttttttttttactttt

SEQ ID NO: 366709 - DNA, 424 bp, Homo sapiens
cctctgcctttcttaaagtgattggttaaaatgttttagcacttagcagtttcttcctagttttgcagctatggccctgaaatggcttatgagtaaggcaaatagaagatgttcttactgggctagtgcttttatttctctctttcgcttgttctattttttaagtgaaaatggcattagcatcttatttgtcaggctttcattttcgtgtttgagaattccacttgtagataaccaatagctataacctgttcaggtytttaaaaaatatagcttattgaatgagcagtcacacacaagaaattccgttcttcccatagtccatcatgctttacccgtattcagcttctcacttctgtatctaaaaacactagattttatcattctactttaaagtttcttttttttttttttttttactttt

SEQ ID NO: 366710 - DNA, 575 bp, Homo sapiens
tgatactgttcttatgcttaaattgggttgtgtgcttacatgtgttcattatgttaatatgtctcataggttaggtatcttaatcaaatatgcagttatataaatacaatacactgagataagataactagcaacacattgaaacaaaaaaacgagaataggattgaatactgtcacgatctttacaaggcctggcctttcactatgtaaatagatatcttttagtccaagaaatcacagaacttacacatttttrggaaaagaagaaaaaattcatagaataaattaattttatgtcctgtaagcaaaagtctactaaggtgaattcataatatcccataacagcaaaaaagaatgcattcagaagtcctaaatctataaacaataaaaatagttaagcacatagaatttacttaagttcaaaagcatcatgttcattagacttatataattcttgtagcatttagtacatcctggataattcttattcccattatttattgctaagcacattgaaatttcacattaataatattattattttttaactttcatttgtattgtaactgttggtt

SEQ ID NO: 366711 - DNA, 575 bp, Homo sapiens
tgatactgttcttatgcttaaattgggttgtgtgcttacatgtgttcattatgttaatatgtctcataggttaggtatcttaatcaaatatgcagttatataaatacaatacactgagataagataactagcaacacattgaaacaaaaaaacgagaataggattgaatactgtcacgatctttacaaggcctggcctttcactatgtaaatagatatcttttagtccaagaaatcacagaacttacacatttttaggaaaagaagaaaaaattcatagaataaattaattttatgtcctgtaagcaaaagtctactaaggtgaattcataatatcccataacagcaaaaaagaatgcattcagaagtcctaaatctataaacaataaaaatagttaagcacatagaatttacttaagttcaaaagcatcatgttcattagamttatataattcttgtagcatttagtacatcctggataattcttattcccattatttattgctaagcacattgaaatttcacattaataatattattattttttaactttcatttgtattgtaactgttggtt

SEQ ID NO: 366712 - DNA, 575 bp, Homo sapiens
tgatactgttcttatgcttaaattgggttgtgtgcttacatgtgttcattatgttaatatgtctcataggttaggtatcttaatcaaatatgcagttatataaatacaatacactgagataagataactagcaacacattgaaacaaaaaaacgagaataggattgaatactgtcacgatctttacaaggcctggcctttcactatgtaaatagatatcttttagtccaagaaatcacagaacttacacatttttaggaaaagaagaaaaaattcatagaataaattaattttatgtcctgtaagcaaaagtctactaaggtgaattcataatatcccataacagcaaaaaagaatgcattcagaagtcctaaatctataaacaataaaaatagttaagcacatagaatttacttaagttcaaaagcatcatgttcattagacttatataattcttgtagcrtttagtacatcctggataattcttattcccattatttattgctaagcacattgaaatttcacattaataatattattattttttaactttcatttgtattgtaactgttggtt

SEQ ID NO: 366713 - DNA, 632 bp, Homo sapiens
ccggcttattttttgtatttttagtagagatggagttacaccgtgttagccaggatggtctcgatctcctgacctcatgatccgccagcctcagcctcccaaagtgctgggattacaggtgtgagccactgcgcctggccagtgtatgccttctaaaagcagagtctgtagtaaatatatatataaatggtaacacaagcatataaaataaaatgtggcaattgctattcaatgaaaaatacagggacatttgggagagcataacaagggagtamatacgtgctgagataaatacatttttgttacatgagtcaggagttaaagaaataaatgaaagatgagagattaggatatagagtatatagggtgccagttcatataacactttatattaaaggaatttgagcttttggttgaaacaatggaagctattgggagttttaaggggattgatatgaaggaggtaaaataggagtctatagcactaatctaaagtggtaagtgaatggaagtcaaagctatttagtggagtaggttgaaccaaaattgatgactaagtaggtggtatctaaaggaaaggaaaagtttgagtcttgggtatctggcatgcatagtatactaacagtgatata

SEQ ID NO: 366714 - DNA, 632 bp, Homo sapiens
ccggcttattttttgtatttttagtagagatggagttacaccgtgttagccaggatggtctcgatctcctgacctcatgatccgccagcctcagcctcccaaagtgctgggattacaggtgtgagccactgcgcctggccagtgtatgccttctaaaagcagagtctgtagtaaatatatatataaatggtaacacaagcatataaaataaaatgtggcaattgctattcaatgaaaaatacagggacatttgggagagcataacaagggagtacatacgtgctgagataaatacatttttgttacatgagtcaggagttaaagaaataaatgaaagatgagagattaggatataragtatatagggtgccagttcatataacactttatattaaaggaatttgagcttttggttgaaacaatggaagctattgggagttttaaggggattgatatgaaggaggtaaaataggagtctatagcactaatctaaagtggtaagtgaatggaagtcaaagctatttagtggagtaggttgaaccaaaattgatgactaagtaggtggtatctaaaggaaaggaaaagtttgagtcttgggtatctggcatgcatagtatactaacagtgatata

SEQ ID NO: 366715 - DNA, 616 bp, Homo sapiens
aatgaaaacctgtcttttaagtggatctctaaattctaagaaagtgcttatattatcttagttatttagctattagcctgtcaatcattaggaaagtaagagcaatttacaaagcatctaccactgtgctagtacttgctcacatgttctcatccacctaagggaatattcaaagcatcttaatagttgctactaattcatataatttaattaatagaatagcaaatacattctcatcttatttcacatttttaacatacacaagatatagctattttatagtgattaggtttagtaaaaataacactgataaaactcaactgttagcatgtacagttttaggctacrtatttttcaaaacaacaaaatataatttttttagactcaacttgaaattttgtaaaaaataaagtttcagaaatagtaaactatcacagaacaagaagcataatagaaagtagaaattgttttactataaaaaatactataaataaaagggctaaatgtttcttaatattcgtatactgataccaaatattagatgccttgagtcactaaattaaattgtccctaaatattacatttattatttaaaatgttaatgttgcttacaaac

SEQ ID NO: 366716 - DNA, 557 bp, Homo sapiens
agaagctagtattattataagcttgattttgctggtgagaacattgagatgtagagattcagtgtagctagtgtttggtataactatgatttaaatttagttctgtcttattataatattaaacaagtatgtgacttcrtagtgtaatgagtctcattcaaaacatacagcagttgcagcctaacatcttgttactttaggtggtgacataatgtattgactcatattgagcatttctaagtgtaagttttaagtagctttttttctttagaaaggtgctgaagataattcaaatacttttttgcatattattttgtgtccctgtagattgctaggactatgagggcagggccatatatattgtgttcatctctctatattcattttctaatgctggtccaagaaacaggttgagatgctaagtagggaggccatagaaaacatcattgaaaagatagcatttatgcaaaaatttaaaggtggtgagggattaaacatgtagatatctgaaagaagggaacccaggcagagggaaaagacggtgcaaaagcccaaga

SEQ ID NO: 366717 - DNA, 557 bp, Homo sapiens
agaagctagtattattataagcttgattttgctggtgagaacattgagatgtagagattcagtgtagctagtgtttggtataactatgatttaaatttagttctgtcttattataatattaaacaagtatgtgacttcatagtrtaatgagtctcattcaaaacatacagcagttgcagcctaacatcttgttactttaggtggtgacataatgtattgactcatattgagcatttctaagtgtaagttttaagtagctttttttctttagaaaggtgctgaagataattcaaatacttttttgcatattattttgtgtccctgtagattgctaggactatgagggcagggccatatatattgtgttcatctctctatattcattttctaatgctggtccaagaaacaggttgagatgctaagtagggaggccatagaaaacatcattgaaaagatagcatttatgcaaaaatttaaaggtggtgagggattaaacatgtagatatctgaaagaagggaacccaggcagagggaaaagacggtgcaaaagcccaaga

SEQ ID NO: 366718 - DNA, 557 bp, Homo sapiens
agaagctagtattattataagcttgattttgctggtgagaacattgagatgtagagattcagtgtagctagtgtttggtataactatgatttaaatttagttctgtcttattataatattaaacaagtatgtgacttcatagtgtaatgagtctcattcaaaacatacagcagttgcagcctaacatcttgttactttaggtggtgacataatgtattgactcatattgagcayttctaagtgtaagttttaagtagctttttttctttagaaaggtgctgaagataattcaaatacttttttgcatattattttgtgtccctgtagattgctaggactatgagggcagggccatatatattgtgttcatctctctatattcattttctaatgctggtccaagaaacaggttgagatgctaagtagggaggccatagaaaacatcattgaaaagatagcatttatgcaaaaatttaaaggtggtgagggattaaacatgtagatatctgaaagaagggaacccaggcagagggaaaagacggtgcaaaagcccaaga

SEQ ID NO: 366719 - DNA, 557 bp, Homo sapiens
agaagctagtattattataagcttgattttgctggtgagaacattgagatgtagagattcagtgtagctagtgtttggtataactatgatttaaatttagttctgtcttattataatattaaacaagtatgtgacttcatagtgtaatgagtctcattcaaaacatacagcagttgcagcctaacatcttgttactttaggtggtgacataatgtattgactcatattgagcatttctaagtgtaagttttaagtagctttttttctttagaaaggtgctgaagataattcaaatacttttttgcatattattttgtgtccctgtagattgctaggactatgagggcagggccatatatattgtgttcatctctctatattcattttctaatgctggtccaagaaacaggttgagatgctaagtagggaggccatagaaaacatcatkgaaaagatagcatttatgcaaaaatttaaaggtggtgagggattaaacatgtagatatctgaaagaagggaacccaggcagagggaaaagacggtgcaaaagcccaaga

SEQ ID NO: 366720 - DNA, 506 bp, Homo sapiens
ttttgtgtccctgtagattgctaggactatgagggcagggccatatatattgtgttcatctctctatattcattttctaatgctggtccaagaaacaggttgagatgctaagtagggaggccatagaaaacatcattgaaaagatagcatttatgcaaaaatttaaaggtggtgagggattaaacatgtagatatctgaaagaagggarcccaggcagagggaaaagacggtgcaaaagcccaagacagccccatatctggcttgtttgaaggggttcaaggaaaccagtgtggctggagatgagtgaggaaggggagttaacgatgagcacacagaagtaatttgggccttgatatacgtttttaatttttaaaaatatatattatatttaaatgacataataattgtacatatttacagggtattttaaaactcacactgccttagaattttaccatcaatgaaagagagggtcactacaggtcctaagaagagaagtgacacg

SEQ ID NO: 366721 - DNA, 506 bp, Homo sapiens
ttttgtgtccctgtagattgctaggactatgagggcagggccatatatattgtgttcatctctctatattcattttctaatgctggtccaagaaacaggttgagatgctaagtagggaggccatagaaaacatcattgaaaagatagcatttatgcaaaaatttaaaggtggtgagggattaaacatgtagatatctgaaagaagggaacccaggmagagggaaaagacggtgcaaaagcccaagacagccccatatctggcttgtttgaaggggttcaaggaaaccagtgtggctggagatgagtgaggaaggggagttaacgatgagcacacagaagtaatttgggccttgatatacgtttttaatttttaaaaatatatattatatttaaatgacataataattgtacatatttacagggtattttaaaactcacactgccttagaattttaccatcaatgaaagagagggtcactacaggtcctaagaagagaagtgacacg

SEQ ID NO: 366722 - DNA, 506 bp, Homo sapiens
ttttgtgtccctgtagattgctaggactatgagggcagggccatatatattgtgttcatctctctatattcattttctaatgctggtccaagaaacaggttgagatgctaagtagggaggccatagaaaacatcattgaaaagatagcatttatgcaaaaatttaaaggtggtgagggattaaacatgtagatatctgaaagaagggaacccaggcagagggaaaagacrgtgcaaaagcccaagacagccccatatctggcttgtttgaaggggttcaaggaaaccagtgtggctggagatgagtgaggaaggggagttaacgatgagcacacagaagtaatttgggccttgatatacgtttttaatttttaaaaatatatattatatttaaatgacataataattgtacatatttacagggtattttaaaactcacactgccttagaattttaccatcaatgaaagagagggtcactacaggtcctaagaagagaagtgacacg

SEQ ID NO: 366723 - DNA, 506 bp, Homo sapiens
ttttgtgtccctgtagattgctaggactatgagggcagggccatatatattgtgttcatctctctatattcattttctaatgctggtccaagaaacaggttgagatgctaagtagggaggccatagaaaacatcattgaaaagatagcatttatgcaaaaatttaaaggtggtgagggattaaacatgtagatatctgaaagaagggaacccaggcagagggaaaagacggtgcaaaagcccaagacagccccatatctggcttgtttgaaggggttcaaggaaaccagtgtggctggagatgagtgaggaaggggagttaacgatgagcacacagaagtaatttgggccttgatrtacgtttttaatttttaaaaatatatattatatttaaatgacataataattgtacatatttacagggtattttaaaactcacactgccttagaattttaccatcaatgaaagagagggtcactacaggtcctaagaagagaagtgacacg

SEQ ID NO: 366724 - DNA, 599 bp, Homo sapiens
ttaaaactcacactgccttagaattttaccatcaatgaaagagagggtcactacaggtcctaagaagagaagtgacacgctcttttatgtaaaaaggatgactgtggatattgtgttggtaactgactgtaagaggacacttttaggaaaagtcccctctttagatattgactttatccaagaggaaaacagtagtaattcacacctcagtagacatggtgagaagtagttgattctacatattataaagtctttgrgtttaagcaaccagaggaaggacttgccatcaaatgaaatggataagcataaacaggtttggtagtagctgggagatggaaatcaacaatttctcttgagtcatactttctttgagatttccattaggtatctgaagtaatcagaaactagccaggaaaactgaaatcattgagaatttaaaacaaagggaattgatacaggtaattgatggtagaaataactttaaaaaaattaaagccaaccaggggacagtgaggcaacctacaatttagcaacaatgggaggctactatcaccttcccttggagaacagggataggaggctgtactactggagctgca

SEQ ID NO: 366725 - DNA, 599 bp, Homo sapiens
ttaaaactcacactgccttagaattttaccatcaatgaaagagagggtcactacaggtcctaagaagagaagtgacacgctcttttatgtaaaaaggatgactgtggatattgtgttggtaactgactgtaagaggacacttttaggaaaagtcccctctttagatattgactttatccaagaggaaaacagtagtaattcacacctcagtagacatggtgagaagtagttgattctacatattataaagtctttgggtttaagcaaccagaggaaggacttgccatcaaatgaaatgrataagcataaacaggtttggtagtagctgggagatggaaatcaacaatttctcttgagtcatactttctttgagatttccattaggtatctgaagtaatcagaaactagccaggaaaactgaaatcattgagaatttaaaacaaagggaattgatacaggtaattgatggtagaaataactttaaaaaaattaaagccaaccaggggacagtgaggcaacctacaatttagcaacaatgggaggctactatcaccttcccttggagaacagggataggaggctgtactactggagctgca

SEQ ID NO: 366726 - DNA, 570 bp, Homo sapiens
agtgattaggtttagtaaaaataacactgataaaactcaactgttagcatgtacagttttaggctacgtatttttcaaaacaacaaaatataatttttttagactcaacttgaaattttgtaaaaaataaagtttcagaaatagtaaactatcacagaacaagaagcataatagaaagtagaaattgttttactataaaaaatactataaataaaagggctaaatgtttcttaatattcgtatactgataccaaatattagatgccttgagtcactaaattaaattgyccctaaatattacatttattatttaaaatgttaatgttgcttacaaacctcaacagatatttttgccaacttatagatgggagaatttaaaaagatgttggtgtttttaaaaatagcttttagaaaagcaacaaagtgattttatgtctggaggtgaagacccttggaggaatttttctcatggactgtcaaaatatatacccaaaccataagtggatgtctgaataataactcatttacttttatttgatttgtcaggttttatttttcaaaacaagagtc

SEQ ID NO: 366727 - DNA, 538 bp, Homo sapiens
attatgagaataatctacttcaaatgctgctgataaatcaagtaaggtgagaaaaataactataagattaacaaagtggaggacaggtttaattagagtagtggggggcaaaaatctgtatggaaatgaaatgattaaagagaaaatgcaaggagcaaatgacacggtgactataaattatccttttaaagagtttgggtgaaaaagggatcaaattccctggtggtatctgacaatgaaaatggggaaaatgaagaatactggttgcttatttgcttttattttctagtatgacagaagtaatagcttatttgtatgatcatgaaatgacccaataaagaggaaaatttgattatgtataagaggggtaagtattgaaaagtatctgtctatagcctgtgtagtcagaaagagttgatgaacaagtaaaggygtaagcttgaggtaggtgtataaacatttcatttctggcagtggttttctttaaggagagatttcactctgcaaggagccaattggcaatgtttggagatgtttt

SEQ ID NO: 366728 - DNA, 572 bp, Homo sapiens
aaatatttatttatgaaattggcagagagtaaatgattaaagttttaatgatcagattgtcattttagagtaattatcattatacaacagygaagaaaagtttgaagaagttaaattatagaaaaaggatgctattgttttaaattaatgcactggtctagctgtgatttcattaagatgatttcataactgtaacagtaacaataggaatattgaggacaagaatgttgaggacaggaattaaagagaaatttattggttgaaataaattaggtttttagattcattatgattaatgtttaagaaggaatatataatttctagtcaacatataataatgcaaatttaacacataagaaatattgatagaaaaagggttctaccttaaacatattgctagaccatgtgagagagttctgtagaatagattcaagaatggtgtggaaaggggtggtacctcctgatcaattttctcccctgatgggggcaggtgtggaggaaaactcctgggaaataaagaagtcaggtgttctggtttaatttttctgcaaacatattaatgcaagtctctt

SEQ ID NO: 366729 - DNA, 548 bp, Homo sapiens
catattgctagaccatgtgagagagttctgtagaatagattcaagaatggtgtggaaaggggtggtacctcctgatcaattttctcccctgatgggggcaggtgtggaggaaaactcctgggaaataaagaagtcaggtgttctggtttaatttttctgcaaacatattaatgcaagtctcttagaaaataaactaaatagtttttggtagccaaagaatcattcytcataaaatgtttctagcagaccatgcagagttgtctaaaattgcttatgaaaaataagccaggaatcaataaatgtagggtgatgattcccaagaaaatgtcacgttagctgtgttgctatctaagtataaaaggagatggtttgtaactgagaatacacctgagtaagtaaagcaactgtacattttacttagaaaccaaatctagaaacttggatgagaccacattcaatgaagatgaaaggacacaggtctctccccacttaacccatacatgattattttatctttgaaattattcagaaagcatgatactgagcaa

SEQ ID NO: 366730 - DNA, 548 bp, Homo sapiens
catattgctagaccatgtgagagagttctgtagaatagattcaagaatggtgtggaaaggggtggtacctcctgatcaattttctcccctgatgggggcaggtgtggaggaaaactcctgggaaataaagaagtcaggtgttctggtttaatttttctgcaaacatattaatgcaagtctcttagaaaataaactaaatagtttttggtagccaaagaatcattcttcataaaatgtttctagcagaccatgmagagttgtctaaaattgcttatgaaaaataagccaggaatcaataaatgtagggtgatgattcccaagaaaatgtcacgttagctgtgttgctatctaagtataaaaggagatggtttgtaactgagaatacacctgagtaagtaaagcaactgtacattttacttagaaaccaaatctagaaacttggatgagaccacattcaatgaagatgaaaggacacaggtctctccccacttaacccatacatgattattttatctttgaaattattcagaaagcatgatactgagcaa

SEQ ID NO: 366731 - DNA, 548 bp, Homo sapiens
catattgctagaccatgtgagagagttctgtagaatagattcaagaatggtgtggaaaggggtggtacctcctgatcaattttctcccctgatgggggcaggtgtggaggaaaactcctgggaaataaagaagtcaggtgttctggtttaatttttctgcaaacatattaatgcaagtctcttagaaaataaactaaatagtttttggtagccaaagaatcattcttcataaaatgtttctagcagaccatgcrgagttgtctaaaattgcttatgaaaaataagccaggaatcaataaatgtagggtgatgattcccaagaaaatgtcacgttagctgtgttgctatctaagtataaaaggagatggtttgtaactgagaatacacctgagtaagtaaagcaactgtacattttacttagaaaccaaatctagaaacttggatgagaccacattcaatgaagatgaaaggacacaggtctctccccacttaacccatacatgattattttatctttgaaattattcagaaagcatgatactgagcaa

SEQ ID NO: 366732 - DNA, 548 bp, Homo sapiens
catattgctagaccatgtgagagagttctgtagaatagattcaagaatggtgtggaaaggggtggtacctcctgatcaattttctcccctgatgggggcaggtgtggaggaaaactcctgggaaataaagaagtcaggtgttctggtttaatttttctgcaaacatattaatgcaagtctcttagaaaataaactaaatagtttttggtagccaaagaatcattcttcataaaatgtttctagcagaccatgcagagttgtctaaaattgcttawgaaaaataagccaggaatcaataaatgtagggtgatgattcccaagaaaatgtcacgttagctgtgttgctatctaagtataaaaggagatggtttgtaactgagaatacacctgagtaagtaaagcaactgtacattttacttagaaaccaaatctagaaacttggatgagaccacattcaatgaagatgaaaggacacaggtctctccccacttaacccatacatgattattttatctttgaaattattcagaaagcatgatactgagcaa

SEQ ID NO: 366733 - DNA, 600 bp, Homo sapiens
actgctactactcctctccaaattgccaattggattctccttttcacatgataggaatgatacaagtgtaaatgttgacaggctttatattttccagagagaaaacaccttagttaatgctattgatacaaataataagagatagagtgaatgggataagctaatgattctctgtcttacaagacttatataaccttgagggccaaatatatatattcagagaacagtaacaaacatacaggtttagttactatacatgggattatayggagaaaaagcatttatatcatgtgcacaacagggagaaattaaaaatcagaagagaaaatagaaaggcagctcacttgaattaatttacttttgaagaaaatataaataggatttaaaaagtaagccttgatagaatttttaataagaaaataaaagcacattatcaacttttgaatcagaggagaggagtactgtagcccccaccaatcccttaaagaatcatagaaaatttgctttatttattgtggctgaaagagttcaaatccaattatgaggatagtgatatagaacagaacatacttgaacagggggctgagtttactgccttaa

SEQ ID NO: 366734 - DNA, 642 bp, Homo sapiens
ttaaggtgagatttgtcagtcctatactgagaagggtaactgctactactcctctccaaattgccaattggattctccttttcacatgataggaatgatacaagtgtaaatgttgacaggctttatattttccagagagaaaacaccttagttaatgctattgatacaaataataagagatagagtgaatgggataagctaatgattctctgtcttacaagacttatataaccttgagggccaaatatatatattcagagaacagtaacaaacatacaggtttagttactatacatgggattatacggagaaaaagcatttatatcatgtgcacaacagggagaaattaaaaatcagaagagaaaatagaaaggcagctcacttgaattaatttacttttgaagaaaatataaataggatttaaaaagtaagccttgatagaatttttaataagaaaataaaagcacattatcaacttttgaatcagaggagaggagtactgtagcccccaccaatcccttaaagaatcrtagaaaatttgctttatttattgtggctgaaagagttcaaatccaattatgaggatagtgatatagaacagaacatacttgaacagggggctgagtttactgccttaattaa

SEQ ID NO: 366735 - DNA, 467 bp, Homo sapiens
cttaaagaatcatagaaaatttgctttatttattgtggctgaaagagttcaaatccaattatgaggatagtgatatagaacagaacatacttgaacagggggctgagtttactgccttaattaaagccgtagaatctgaaaacaattaaataaagaactgaggtctgttcattccagccccagtcatggatctgaggccatatatataatttgaacaaagttacctggggtggtattcaaagtttcttatcattggtaggatgyagagcagaatttacagtaggccttatggaaggtaggaaagagtctcatacatgctctaagtgaaatctggagtgcatgaagagaacatcagggaggaaaccaaggtaaagatgaagttacaggttgaaatgtgtggttggagagaatattacctgcttgtgctacctttacataaatacaaaattgcaattgtcattcagtat

SEQ ID NO: 366736 - DNA, 467 bp, Homo sapiens
cttaaagaatcatagaaaatttgctttatttattgtggctgaaagagttcaaatccaattatgaggatagtgatatagaacagaacatacttgaacagggggctgagtttactgccttaattaaagccgtagaatctgaaaacaattaaataaagaactgaggtctgttcattccagccccagtcatggatctgaggccatatatataatttgaacaaagttacctggggtggtattcaaagtttcttatcattggtaggatgtagagcagaatttacagtaggccttatggaaggtaggaaagagtctcatacatgctctaagtgaaatctggagtgcatgaagagaacatcagggaggaaaccaaggtaaagatgamgttacaggttgaaatgtgtggttggagagaatattacctgcttgtgctacctttacataaatacaaaattgcaattgtcattcagtat

SEQ ID NO: 366737 - DNA, 467 bp, Homo sapiens
cttaaagaatcatagaaaatttgctttatttattgtggctgaaagagttcaaatccaattatgaggatagtgatatagaacagaacatacttgaacagggggctgagtttactgccttaattaaagccgtagaatctgaaaacaattaaataaagaactgaggtctgttcattccagccccagtcatggatctgaggccatatatataatttgaacaaagttacctggggtggtattcaaagtttcttatcattggtaggatgtagagcagaatttacagtaggccttatggaaggtaggaaagagtctcatacatgctctaagtgaaatctggagtgcatgaagagaacatcagggaggaaaccaaggtaaagatgaagttacaggttgaaatgtgtggttggagagaatattacctgcttgtgctaccttyacataaatacaaaattgcaattgtcattcagtat

SEQ ID NO: 366738 - DNA, 407 bp, Homo sapiens
aggtaaagatgaagttacaggttgaaatgtgtggttggagagaatattacctgcttgtgctacctttacrtaaatacaaaattgcaattgtcattcagtatgaatgggacattgtcgtctttgtgtttccacagaggatgaagactgagctcactcttcaccaaattttaatcagctctgccaaatgggatcctttggaattgctcaagctctccacagtagtaaatattaagcaatgcagaattccaagggcgcaataagagactactgttgtaattaagaaaatggttcagaaggaagttcccctccccacattaacttcctttttgtagttctaactggtcaataagtaggtagcccctggacatttacagtagagtatcaaggtggttcatttgcgtgcttca

SEQ ID NO: 366739 - DNA, 460 bp, Homo sapiens
gttacctggggtggtattcaaagtttcttatcattggtaggatgtagagcagaatttacagtaggccttatggaaggtaggaaagagtctcatacatgctctaagtgaaatctggagtgcatgaagagaacatcagggaggaaaccaaggtaaagatgaagttacaggttgaaatgtgtggttggagagaatattacctgcttgtgctacctttacataaatacaaaattgcaattgtcattcartatgaatgggacattgtcgtctttgtgtttccacagaggatgaagactgagctcactcttcaccaaattttaatcagctctgccaaatgggatcctttggaattgctcaagctctccacagtagtaaatattaagcaatgcagaattccaagggcgcaataagagactactgttgtaattaagaaaatggttcagaaggaagttcccctccccac

SEQ ID NO: 366740 - DNA, 407 bp, Homo sapiens
aggtaaagatgaagttacaggttgaaatgtgtggttggagagaatattacctgcttgtgctacctttacataaatacaaaattgcaattgtcattcagtatgaatgggacattgtcgtctttgtgtttccacagaggatgaagactgagctcactcttcaccaaattttaatcagcyctgccaaatgggatcctttggaattgctcaagctctccacagtagtaaatattaagcaatgcagaattccaagggcgcaataagagactactgttgtaattaagaaaatggttcagaaggaagttcccctccccacattaacttcctttttgtagttctaactggtcaataagtaggtagcccctggacatttacagtagagtatcaaggtggttcatttgcgtgcttca

SEQ ID NO: 366741 - DNA, 407 bp, Homo sapiens
aggtaaagatgaagttacaggttgaaatgtgtggttggagagaatattacctgcttgtgctacctttacataaatacaaaattgcaattgtcattcagtatgaatgggacattgtcgtctttgtgtttccacagaggatgaagactgagctcactcttcaccaaattttaatcagctmtgccaaatgggatcctttggaattgctcaagctctccacagtagtaaatattaagcaatgcagaattccaagggcgcaataagagactactgttgtaattaagaaaatggttcagaaggaagttcccctccccacattaacttcctttttgtagttctaactggtcaataagtaggtagcccctggacatttacagtagagtatcaaggtggttcatttgcgtgcttca

SEQ ID NO: 366742 - DNA, 538 bp, Homo sapiens
cccacattaacttcctttttgtagttctaactggtcaataagtaggtagcccctggacatttacagtagagtatcaaggtggttcatttgcrtgcttcatctgtacctgataggatgaagaatgtacagaaaataaagtagacaagaggctctgatatgttatcaagattaactacataattcatagagctgagtataaaatgaaaatgcatggatacttactcaaaaattattaagaatttccagatagctacaacagagcattaaaccaatctcaggggcctcctaagagtttttttttttaaatttcaagtaggaaaattttaagctttgcagaatagaaacaagtatatgtttactgtcttatcatggatttaaaaaaaattcattatcacatttccataatctggtaaagaatagcctaaaagatagagttcatctactactttcatggtatgatgataattttcttctcagagcaaaaattaggagaggagttaaggaccatagtcacctgtattacaaatagaagctggct

SEQ ID NO: 366743 - DNA, 538 bp, Homo sapiens
cccacattaacttcctttttgtagttctaactggtcaataagtaggtagcccctggacatttacagtagagtatcaaggtggttcatttgcgtgcttcatctgtacctgatakgatgaagaatgtacagaaaataaagtagacaagaggctctgatatgttatcaagattaactacataattcatagagctgagtataaaatgaaaatgcatggatacttactcaaaaattattaagaatttccagatagctacaacagagcattaaaccaatctcaggggcctcctaagagtttttttttttaaatttcaagtaggaaaattttaagctttgcagaatagaaacaagtatatgtttactgtcttatcatggatttaaaaaaaattcattatcacatttccataatctggtaaagaatagcctaaaagatagagttcatctactactttcatggtatgatgataattttcttctcagagcaaaaattaggagaggagttaaggaccatagtcacctgtattacaaatagaagctggct

SEQ ID NO: 366744 - DNA, 538 bp, Homo sapiens
cccacattaacttcctttttgtagttctaactggtcaataagtaggtagcccctggacatttacagtagagtatcaaggtggttcatttgcgtgcttcatctgtacctgataggatgaagaatgtacagaaaataaagtagacaagaggctctgatatgttatcaagattaactacataattcatagagctgagtataaaatgaaaatgcatggatacttactcaaaaattattaagaatttccagatagctacaacagagcattaaaccaatctcaggggcctcctaagagtttttttttttaaatttcaagtaggaaaattttaagctttgcagaatagaaacaagtatatgtttactgtcttatcatggatttaaaaaaaattcattatcacatttccataatctggtaaagaatarcctaaaagatagagttcatctactactttcatggtatgatgataattttcttctcagagcaaaaattaggagaggagttaaggaccatagtcacctgtattacaaatagaagctggct

SEQ ID NO: 366745 - DNA, 538 bp, Homo sapiens
cccacattaacttcctttttgtagttctaactggtcaataagtaggtagcccctggacatttacagtagagtatcaaggtggttcatttgcgtgcttcatctgtacctgataggatgaagaatgtacagaaaataaagtagacaagaggctctgatatgttatcaagattaactacataattcatagagctgagtataaaatgaaaatgcatggatacttactcaaaaattattaagaatttccagatagctacaacagagcattaaaccaatctcaggggcctcctaagagtttttttttttaaatttcaagtaggaaaattttaagctttgcagaatagaaacaagtatatgtttactgtcttatcatggatttaaaaaaaattcattatcacatttccataatctggtaaagaatagcctaaaagatagagttcatctactactttcatggtatgatgataattttcttctcagagcaaaaattaggagaggagttaaggaccatagtcaccygtattacaaatagaagctggct

SEQ ID NO: 366746 - DNA, 581 bp, Homo sapiens
ggaaattagtacagatcaacttaggacattccttaaactccaactaaatcctrtaaattagtgcagatcaacttaggacattccttaaactgtgagaagtaatttatatttcataggacccaccaataagcaataaactcagagactgtcaagactgttctaagaatcttgtctacccatactcacaaaataactggaaagagttcagaacgtgaatacagcattgtagtactttcctagggctgctggaacaaattaccacagactgggtagcttaaaacaactgaaatttattatttcacagttctggaggctagaagtctgaagccaaggagtcaatagggtcacgcttccttgaaaagccacagaaaaaaatcttttcttgcccctgcctaggttctactctctcctacaaatttttggagctttattacttatagatttattactccaatttctgctttcattttcaatctcttctccatgtgtcctctcttcttataaaaacacctccagtcattggaattaggaccctccttaatctagtaggagctcatcttaactaattgtatgtgcaaatt

SEQ ID NO: 366747 - DNA, 581 bp, Homo sapiens
ggaaattagtacagatcaacttaggacattccttaaactccaactaaatcctataaattagtgcagatcaacttaggacattccttaaactgtgagaagtaatttatmtttcataggacccaccaataagcaataaactcagagactgtcaagactgttctaagaatcttgtctacccatactcacaaaataactggaaagagttcagaacgtgaatacagcattgtagtactttcctagggctgctggaacaaattaccacagactgggtagcttaaaacaactgaaatttattatttcacagttctggaggctagaagtctgaagccaaggagtcaatagggtcacgcttccttgaaaagccacagaaaaaaatcttttcttgcccctgcctaggttctactctctcctacaaatttttggagctttattacttatagatttattactccaatttctgctttcattttcaatctcttctccatgtgtcctctcttcttataaaaacacctccagtcattggaattaggaccctccttaatctagtaggagctcatcttaactaattgtatgtgcaaatt

SEQ ID NO: 366748 - DNA, 313 bp, Homo sapiens
acttgtttctattgtttattaacatatccaaggaacacgtagaatgaattggcagaatataatcatattatcaaataattattagtttagtcagtttcataaacctagataatcaaatgaaaatacataataatataattatgtcataatttttatcaaaattttaaaattaatgaattaaatccagctaccaaagataagggtttgtgaaaagyagatacaatactagagtggaggttgtaatgaaaactcagaatgggctatagtattaaaaaaaaataaagacctccagtatttttttttctcaaaatgg

SEQ ID NO: 366749 - DNA, 581 bp, Homo sapiens
ggaaattagtacagatcaacttaggacattccttaaactccaactaaatcctataaattagtgcagatcaacttaggacattccttaaactgtgagaagtaatttatatttcataggacccaccaataagcaataaactcagagactgtcaagactgttctaagaatcttgtctacccatactcacaaaataactggaaagagttcagaacgtgaatacagcattgtagtactttcctagggctgctggaacaaattaccayagactgggtagcttaaaacaactgaaatttattatttcacagttctggaggctagaagtctgaagccaaggagtcaatagggtcacgcttccttgaaaagccacagaaaaaaatcttttcttgcccctgcctaggttctactctctcctacaaatttttggagctttattacttatagatttattactccaatttctgctttcattttcaatctcttctccatgtgtcctctcttcttataaaaacacctccagtcattggaattaggaccctccttaatctagtaggagctcatcttaactaattgtatgtgcaaatt

SEQ ID NO: 366750 - DNA, 505 bp, Homo sapiens
gactgtcaagactgttctaagaatcttgtctacccatactcacaaaataactggaaagagttcagaacgtgaatacagcattgtagtactttcctagggctgctggaacaaattaccacagactgggtagcttaaaacaactgaaatttattatttcacagttctggaggctagaagtctgaagccaaggagtcaatagggtcacgcttccttgaaaagccacagaaaaaaatcttttcttgcccctgcctaggttctactctctcytacaaatttttggagctttattacttatagatttattactccaatttctgctttcattttcaatctcttctccatgtgtcctctcttcttataaaaacacctccagtcattggaattaggaccctccttaatctagtaggagctcatcttaactaattgtatgtgcaaatttctaaagaaggtcaccttctgagattctgaatgaataataatttcagaagagcactacttaactcac

SEQ ID NO: 366751 - DNA, 505 bp, Homo sapiens
gactgtcaagactgttctaagaatcttgtctacccatactcacaaaataactggaaagagttcagaacgtgaatacagcattgtagtactttcctagggctgctggaacaaattaccacagactgggtagcttaaaacaactgaaatttattatttcacagttctggaggctagaagtctgaagccaaggagtcaatagggtcacgcttccttgaaaagccacagaaaaaaatcttttcttgcccctgcctaggttctactctctcctacaaatttttggagctttattacttatagatttattactccaatttctgctttcattttcaatctcttctccatgkgtcctctcttcttataaaaacacctccagtcattggaattaggaccctccttaatctagtaggagctcatcttaactaattgtatgtgcaaatttctaaagaaggtcaccttctgagattctgaatgaataataatttcagaagagcactacttaactcac

SEQ ID NO: 366752 - DNA, 633 bp, Homo sapiens
tattatttcacagttctggaggctagaagtctgaagccaaggagtcaatagggtcacgcttccttgaaaagccacagaaaaaaatcttttcttgcccctgcctaggttctactctctcctacaaatttttggagctttattacttatagatttattactccaatttctgctttcattttcaatctcttctccatgtgtcctctcttcttataaaaacacctccagtcattggaattaggaccctccttaatctagtaggagctcatcttaactaattrtatgtgcaaatttctaaagaaggtcaccttctgagattctgaatgaataataatttcagaagagcactacttaactcactgcaggtactgaacagaaataagcatgaaaagtatcgtggtaggtggtagcacaggcaataacattaggcccttatgatcccatccaactggtcagatgatattagggcatacccaaactagagccctttaggaaaagttaaatgagaccaccaatttagactccttaggattttgactcaaaatatgcctgtggcagctgtttgctataatccatttgaaagacacatgctgttgcactgaatgacacagccaatgtcaacaggaaggaccagct

SEQ ID NO: 366753 - DNA, 501 bp, Homo sapiens
gctgtttgctataatccatttgaaagacacatgctgttgcactgaatgacacagccaatgtcaacaggaaggaccagctacataacttctgtaacccagtgaaaaatgaaaagcaaggcccyttgctcaaaaattattaagggttcatttagtgaaaccattgcgtcctgagactaatatgagaaataaataacaaaatccactgtgccttactaatatcaagaggtaataatgagggagtgaaggagaatgcaataatatataactttatatctttcccacctctaatacttttatttggcctctaatggcggtctcaaacccagttttaaatttacttgcaccagaggaagattatacaatacccaagacatgatatttgtgtcatttaatttgactgtgccttttctgaaaggtaatttgtggtggatcaaaagttccttcctatgtaaccaattagggctaaaggtgaaggtagctccattatcaagcagaggagag

SEQ ID NO: 366754 - DNA, 501 bp, Homo sapiens
gctgtttgctataatccatttgaaagacacatgctgttgcactgaatgacacagccaatgtcaacaggaaggaccagctacataacttctgtaacccagtgaaaaatgaaaagcaaggccccttgctcaaaaattattaagggttcatttagtgaaaccattgcgtcctgagactaatatgagaaataaataacaaaatccactgtgccttactaatatcaagaggtartaatgagggagtgaaggagaatgcaataatatataactttatatctttcccacctctaatacttttatttggcctctaatggcggtctcaaacccagttttaaatttacttgcaccagaggaagattatacaatacccaagacatgatatttgtgtcatttaatttgactgtgccttttctgaaaggtaatttgtggtggatcaaaagttccttcctatgtaaccaattagggctaaaggtgaaggtagctccattatcaagcagaggagag

SEQ ID NO: 366755 - DNA, 565 bp, Homo sapiens
ttgtttgggtgtgctagtaaggttcttgttattgattgtgygggcaaacattatgcatgatgagttatacagcctgatattgggaggaagcatttggaaatagggtaaaatcatagcagatgggaaaggtgtttataagtagattacattaccgtggagggaagccactacaatattttcatgcaaacagctcagagtgaggatatcatacttaactatcttttgctattgtcatccaaacaaatgggctttgttggtgaaaatctcttggcctgcttactgcagaaaaggaaaattggactcctactgatttggatgttctacctgtataatttgaataaaacagatgacaaagtgccccctgacaactcagcttgtgtgtagttgactacagttatcactcagtttctaggctttgtttaccattctagattatttttttccagagaaactaccaatgaattgtacagagcagaggatgctgtagaatagaatttctgcaccctatatggccataaatcaaaatgatacattgctaagacagctccctggttatgatagaaag

SEQ ID NO: 366756 - DNA, 565 bp, Homo sapiens
ttgtttgggtgtgctagtaaggttcttgttattgattgtgcgggcaaacattatgcatgatgagttatacagcctgatattgggaggaagcrtttggaaatagggtaaaatcatagcagatgggaaaggtgtttataagtagattacattaccgtggagggaagccactacaatattttcatgcaaacagctcagagtgaggatatcatacttaactatcttttgctattgtcatccaaacaaatgggctttgttggtgaaaatctcttggcctgcttactgcagaaaaggaaaattggactcctactgatttggatgttctacctgtataatttgaataaaacagatgacaaagtgccccctgacaactcagcttgtgtgtagttgactacagttatcactcagtttctaggctttgtttaccattctagattatttttttccagagaaactaccaatgaattgtacagagcagaggatgctgtagaatagaatttctgcaccctatatggccataaatcaaaatgatacattgctaagacagctccctggttatgatagaaag

SEQ ID NO: 366757 - DNA, 565 bp, Homo sapiens
taagtagattacattaccgtggagggaagccactacaatattttcaygcaaacagctcagagtgaggatatcatacttaactatcttttgctattgtcatccaaacaaatgggctttgttggtgaaaatctcttggcctgcttactgcagaaaaggaaaattggactcctactgatttggatgttctacctgtataatttgaataaaacagatgacaaagtgccccctgacaactcagcttgtgtgtagttgactacagttatcactcagtttctaggctttgtttaccattctagattatttttttccagagaaactaccaatgaattgtacagagcagaggatgctgtagaatagaatttctgcaccctatatggccataaatcaaaatgatacattgctaagacagctccctggttatgatagaaagcagatagtggctgcctgtctggtatgtcacagcttgatctggtctgttgctttgaacatatcagtgtgaatgtaaatggaattaatttaaataatataaaactagaacctagaaagcctcagagaatgtgatttt

SEQ ID NO: 366758 - DNA, 565 bp, Homo sapiens
taagtagattacattaccgtggagggaagccactacaatattttcatgcaaacagctcagagtgaggatatcatacttaactatcttttgctattgtcatccaaacaaatgggctttgttggtgaaaatctcttggcctgcttactgcagaaaaggaaaattggactcctactgatttggatgttctacctgtataatytgaataaaacagatgacaaagtgccccctgacaactcagcttgtgtgtagttgactacagttatcactcagtttctaggctttgtttaccattctagattatttttttccagagaaactaccaatgaattgtacagagcagaggatgctgtagaatagaatttctgcaccctatatggccataaatcaaaatgatacattgctaagacagctccctggttatgatagaaagcagatagtggctgcctgtctggtatgtcacagcttgatctggtctgttgctttgaacatatcagtgtgaatgtaaatggaattaatttaaataatataaaactagaacctagaaagcctcagagaatgtgatttt

SEQ ID NO: 366759 - DNA, 565 bp, Homo sapiens
taagtagattacattaccgtggagggaagccactacaatattttcatgcaaacagctcagagtgaggatatcatacttaactatcttttgctattgtcatccaaacaaatgggctttgttggtgaaaatctcttggcctgcttactgcagaaaaggaaaattggactcctactgatttggatgttctacctgtataatttgaataaaacaratgacaaagtgccccctgacaactcagcttgtgtgtagttgactacagttatcactcagtttctaggctttgtttaccattctagattatttttttccagagaaactaccaatgaattgtacagagcagaggatgctgtagaatagaatttctgcaccctatatggccataaatcaaaatgatacattgctaagacagctccctggttatgatagaaagcagatagtggctgcctgtctggtatgtcacagcttgatctggtctgttgctttgaacatatcagtgtgaatgtaaatggaattaatttaaataatataaaactagaacctagaaagcctcagagaatgtgatttt

SEQ ID NO: 366760 - DNA, 565 bp, Homo sapiens
taagtagattacattaccgtggagggaagccactacaatattttcatgcaaacagctcagagtgaggatatcatacttaactatcttttgctattgtcatccaaacaaatgggctttgttggtgaaaatctcttggcctgcttactgcagaaaaggaaaattggactcctactgatttggatgttctacctgtataatttgaataaaacagatgacaaagtgccccctgacaactcagcttgtgtgtagttgactacagttatcactcagtttctaggctttgtttaccattctagattatttttttccagagaaactaccaatgaattgtacagagcagaggatgctgtagaatagaatttctgcaccctatatggccataaatcaaaatgatacattgctaagacagctccctggtyatgatagaaagcagatagtggctgcctgtctggtatgtcacagcttgatctggtctgttgctttgaacatatcagtgtgaatgtaaatggaattaatttaaataatataaaactagaacctagaaagcctcagagaatgtgatttt

SEQ ID NO: 366761 - DNA, 563 bp, Homo sapiens
taaataatataaaactagaacctagaaagcctcagagaatgtgattttatgtttgctttaatgctttaaaattataaataactccctcaagaggtamgtagaggacatttaagggaagcctatggcacagccagataaaacggtatctggtgctaggatatacctaattgagaatttcatgaagcacattatttgtaggtgtagacaatgctttcaaactagacacatttaattagcacataatatgaactacatgagtggcaagttaagcagcactggcccctttgccaggcattttgaaagaattacaggatttggtcatgtgatattaaatctaattgaagtagtgttctaggaggcccatcattatgataaaaatgacttgctacttcaaatagggacactagaggaagctgtttttagaggactcagttgtagtaggaaatcagtttggtttaagacaatgcttgaaccgaagacactgaataaataatgacttccatgcttattaacaacactaggattaactttgtacctttagtcaggaaggactattggatata

SEQ ID NO: 366762 - DNA, 563 bp, Homo sapiens
taaataatataaaactagaacctagaaagcctcagagaatgtgattttatgtttgctttaatgctttaaaattataaataactccctcaagaggtaagtagaggacatttaagggaagyctatggcacagccagataaaacggtatctggtgctaggatatacctaattgagaatttcatgaagcacattatttgtaggtgtagacaatgctttcaaactagacacatttaattagcacataatatgaactacatgagtggcaagttaagcagcactggcccctttgccaggcattttgaaagaattacaggatttggtcatgtgatattaaatctaattgaagtagtgttctaggaggcccatcattatgataaaaatgacttgctacttcaaatagggacactagaggaagctgtttttagaggactcagttgtagtaggaaatcagtttggtttaagacaatgcttgaaccgaagacactgaataaataatgacttccatgcttattaacaacactaggattaactttgtacctttagtcaggaaggactattggatata

SEQ ID NO: 366763 - DNA, 563 bp, Homo sapiens
taaataatataaaactagaacctagaaagcctcagagaatgtgattttatgtttgctttaatgctttaaaattataaataactccctcaagaggtaagtagaggacatttaagggaagcctatggcacagccagataaaacggtatctggtgctaggatatacctaaytgagaatttcatgaagcacattatttgtaggtgtagacaatgctttcaaactagacacatttaattagcacataatatgaactacatgagtggcaagttaagcagcactggcccctttgccaggcattttgaaagaattacaggatttggtcatgtgatattaaatctaattgaagtagtgttctaggaggcccatcattatgataaaaatgacttgctacttcaaatagggacactagaggaagctgtttttagaggactcagttgtagtaggaaatcagtttggtttaagacaatgcttgaaccgaagacactgaataaataatgacttccatgcttattaacaacactaggattaactttgtacctttagtcaggaaggactattggatata

SEQ ID NO: 366764 - DNA, 568 bp, Homo sapiens
gattttatgtttgctttaatgctttaaaattataaataactccctcaagaggtaagtagaggacatttaagggaagcctatggcacagccagataaaacggtatctggtgctaggatatacctaatwgagaatttcatgaagcacattatttgtaggtgtagacaatgctttcaaactagacacatttaattagcacataatatgaactacatgagtggcaagttaagcagcactggcccctttgccaggcattttgaaagaattacaggatttggtcatgtgatattaaatctaattgaagtagtgttctaggaggcccatcattatgataaaaatgacttgctacttcaaatagggacactagaggaagctgtttttagaggactcagttgtagtaggaaatcagtttggtttaagacaatgcttgaaccgaagacactgaataaataatgacttccatgcttattaacaacactaggattaactttgtacctttagtcaggaaggactattggatatattaatcactatgggatattatgtctttaatgttgagttgcaggaatt

SEQ ID NO: 366765 - DNA, 572 bp, Homo sapiens
tatggcacagccagataaaacggtatctggtgctaggatatacctaattgagaatttcatgaagcacattatttgtaggtgtagacaatgctttcaaactagacacatttaattagcacataatatgaactacatgagtggcaagttaagcagcactggmccctttgccaggcattttgaaagaattacaggatttggtcatgtgatattaaatctaattgaagtagtgttctaggaggcccatcattatgataaaaatgacttgctacttcaaatagggacactagaggaagctgtttttagaggactcagttgtagtaggaaatcagtttggtttaagacaatgcttgaaccgaagacactgaataaataatgacttccatgcttattaacaacactaggattaactttgtacctttagtcaggaaggactattggatatattaatcactatgggatattatgtctttaatgttgagttgcaggaattcataaagaaacaagctcaacgtcgggcgcagtggctcacacttgtaaaatcccagcacttaggtaggctgaggagtgtggat

SEQ ID NO: 366766 - DNA, 520 bp, Homo sapiens
tggtgctaggatatacctaattgagaatttcatgaagcacattatttgtaggtgtagacaatgctttcaaactagacacatttaattagcacataatatgaactacatgagtggcaagttaagcagcactggcycctttgccaggcattttgaaagaattacaggatttggtcatgtgatattaaatctaattgaagtagtgttctaggaggcccatcattatgataaaaatgacttgctacttcaaatagggacactagaggaagctgtttttagaggactcagttgtagtaggaaatcagtttggtttaagacaatgcttgaaccgaagacactgaataaataatgacttccatgcttattaacaacactaggattaactttgtacctttagtcaggaaggactattggatatattaatcactatgggatattatgtctttaatgttgagttgcaggaattcataaagaaacaagctcaacgtcgggcgcagtggctcacacttgtaaaatcccagca

SEQ ID NO: 366767 - DNA, 572 bp, Homo sapiens
tatggcacagccagataaaacggtatctggtgctaggatatacctaattgagaatttcatgaagcacattatttgtaggtgtagacaatgctttcaaactagacacatttaattagcacataatatgaactacatgagtggcaagttaagcagcactggcccctttgccaggcattttgaaagaattacaggatttggtcatgtgatattaaatctaatygaagtagtgttctaggaggcccatcattatgataaaaatgacttgctacttcaaatagggacactagaggaagctgtttttagaggactcagttgtagtaggaaatcagtttggtttaagacaatgcttgaaccgaagacactgaataaataatgacttccatgcttattaacaacactaggattaactttgtacctttagtcaggaaggactattggatatattaatcactatgggatattatgtctttaatgttgagttgcaggaattcataaagaaacaagctcaacgtcgggcgcagtggctcacacttgtaaaatcccagcacttaggtaggctgaggagtgtggat

SEQ ID NO: 366768 - DNA, 572 bp, Homo sapiens
tatggcacagccagataaaacggtatctggtgctaggatatacctaattgagaatttcatgaagcacattatttgtaggtgtagacaatgctttcaaactagacacatttaattagcacataatatgaactacatgagtggcaagttaagcagcactggcccctttgccaggcattttgaaagaattacaggatttggtcatgtgatattaaatctaattraagtagtgttctaggaggcccatcattatgataaaaatgacttgctacttcaaatagggacactagaggaagctgtttttagaggactcagttgtagtaggaaatcagtttggtttaagacaatgcttgaaccgaagacactgaataaataatgacttccatgcttattaacaacactaggattaactttgtacctttagtcaggaaggactattggatatattaatcactatgggatattatgtctttaatgttgagttgcaggaattcataaagaaacaagctcaacgtcgggcgcagtggctcacacttgtaaaatcccagcacttaggtaggctgaggagtgtggat

SEQ ID NO: 366769 - DNA, 568 bp, Homo sapiens
gattttatgtttgctttaatgctttaaaattataaataactccctcaagaggtaagtagaggacatttaagggaagcctatggcacagccagataaaacggtatctggtgctaggatatacctaattgagaatttcatgaagcacattatttgtaggtgtagacaatgctttcaaactagacacatttaattagcacataatatgaactacatgagtggcaagttaagcagcactggcccctttgccaggcattttgaaagaattacaggatttggtcatgtgatattaaatctaattgaagtagtgttctaggaggcccatcattawgataaaaatgacttgctacttcaaatagggacactagaggaagctgtttttagaggactcagttgtagtaggaaatcagtttggtttaagacaatgcttgaaccgaagacactgaataaataatgacttccatgcttattaacaacactaggattaactttgtacctttagtcaggaaggactattggatatattaatcactatgggatattatgtctttaatgttgagttgcaggaatt

SEQ ID NO: 366770 - DNA, 520 bp, Homo sapiens
tggtgctaggatatacctaattgagaatttcatgaagcacattatttgtaggtgtagacaatgctttcaaactagacacatttaattagcacataatatgaactacatgagtggcaagttaagcagcactggcccctttgccaggcattttgaaagaattacaggatttggtcatgtgatattaaatctaattgaagtagtgttctaggaggcccatcattatgataaaaatgacttgctacttcaaataggracactagaggaagctgtttttagaggactcagttgtagtaggaaatcagtttggtttaagacaatgcttgaaccgaagacactgaataaataatgacttccatgcttattaacaacactaggattaactttgtacctttagtcaggaaggactattggatatattaatcactatgggatattatgtctttaatgttgagttgcaggaattcataaagaaacaagctcaacgtcgggcgcagtggctcacacttgtaaaatcccagca

SEQ ID NO: 366771 - DNA, 568 bp, Homo sapiens
gattttatgtttgctttaatgctttaaaattataaataactccctcaagaggtaagtagaggacatttaagggaagcctatggcacagccagataaaacggtatctggtgctaggatatacctaattgagaatttcatgaagcacattatttgtaggtgtagacaatgctttcaaactagacacatttaattagcacataatatgaactacatgagtggcaagttaagcagcactggcccctttgccaggcattttgaaagaattacaggatttggtcatgtgatattaaatctaattgaagtagtgttctaggaggcccatcattatgataaaaatgacttgctacttcaaatagggacactagaggaagctgtttttagaggactcagttgyagtaggaaatcagtttggtttaagacaatgcttgaaccgaagacactgaataaataatgacttccatgcttattaacaacactaggattaactttgtacctttagtcaggaaggactattggatatattaatcactatgggatattatgtctttaatgttgagttgcaggaatt

SEQ ID NO: 366772 - DNA, 542 bp, Homo sapiens
cccatcattatgataaaaatgacttgctacttcaaatagggacactagaggaagctgtttttagaggactcagttgtagyaggaaatcagtttggtttaagacaatgcttgaaccgaagacactgaataaataatgacttccatgcttattaacaacactaggattaactttgtacctttagtcaggaaggactattggatatattaatcactatgggatattatgtctttaatgttgagttgcaggaattcataaagaaacaagctcaacgtcgggcgcagtggctcacacttgtaaaatcccagcacttaggtaggctgaggagtgtggatcacctgaggtcaggagttcaagacaagcctggtcaatatggcgaaaccccgtctctactaaaaatacaaaattagccaggcatggtggcaggtgcttgtaatcccagctactcgggaggctaaggcaggagaattgcttgaacctgtgaggtgaaggttgcagtgagccgagattgtgccactgcactccagccaggtgacaagagtga

SEQ ID NO: 366773 - DNA, 572 bp, Homo sapiens
tatggcacagccagataaaacggtatctggtgctaggatatacctaattgagaatttcatgaagcacattatttgtaggtgtagacaatgctttcaaactagacacatttaattagcacataatatgaactacatgagtggcaagttaagcagcactggcccctttgccaggcattttgaaagaattacaggatttggtcatgtgatattaaatctaattgaagtagtgttctaggaggcccatcattatgataaaaatgacttgctacttcaaatagggacactagaggaagctgtttttagaggactcagttgtagtaggaaatcagtttggtttaagacaatgcttgaacygaagacactgaataaataatgacttccatgcttattaacaacactaggattaactttgtacctttagtcaggaaggactattggatatattaatcactatgggatattatgtctttaatgttgagttgcaggaattcataaagaaacaagctcaacgtcgggcgcagtggctcacacttgtaaaatcccagcacttaggtaggctgaggagtgtggat

SEQ ID NO: 366774 - DNA, 542 bp, Homo sapiens
cccatcattatgataaaaatgacttgctacttcaaatagggacactagaggaagctgtttttagaggactcagttgtagtaggaaatcagtttggtttaagacaatgcttgaaccraagacactgaataaataatgacttccatgcttattaacaacactaggattaactttgtacctttagtcaggaaggactattggatatattaatcactatgggatattatgtctttaatgttgagttgcaggaattcataaagaaacaagctcaacgtcgggcgcagtggctcacacttgtaaaatcccagcacttaggtaggctgaggagtgtggatcacctgaggtcaggagttcaagacaagcctggtcaatatggcgaaaccccgtctctactaaaaatacaaaattagccaggcatggtggcaggtgcttgtaatcccagctactcgggaggctaaggcaggagaattgcttgaacctgtgaggtgaaggttgcagtgagccgagattgtgccactgcactccagccaggtgacaagagtga

SEQ ID NO: 366775 - DNA, 520 bp, Homo sapiens
tggtgctaggatatacctaattgagaatttcatgaagcacattatttgtaggtgtagacaatgctttcaaactagacacatttaattagcacataatatgaactacatgagtggcaagttaagcagcactggcccctttgccaggcattttgaaagaattacaggatttggtcatgtgatattaaatctaattgaagtagtgttctaggaggcccatcattatgataaaaatgacttgctacttcaaatagggacactagaggaagctgtttttagaggactcagttgtagtaggaaatcagtttggtttaagacaatgcttgaaccgaagacactgaataaataatgacttccatgcttattaacaacactaggattaactttgtacctttrgtcaggaaggactattggatatattaatcactatgggatattatgtctttaatgttgagttgcaggaattcataaagaaacaagctcaacgtcgggcgcagtggctcacacttgtaaaatcccagca

SEQ ID NO: 366776 - DNA, 520 bp, Homo sapiens
tggtgctaggatatacctaattgagaatttcatgaagcacattatttgtaggtgtagacaatgctttcaaactagacacatttaattagcacataatatgaactacatgagtggcaagttaagcagcactggcccctttgccaggcattttgaaagaattacaggatttggtcatgtgatattaaatctaattgaagtagtgttctaggaggcccatcattatgataaaaatgacttgctacttcaaatagggacactagaggaagctgtttttagaggactcagttgtagtaggaaatcagtttggtttaagacaatgcttgaaccgaagacactgaataaataatgacttccatgcttattaacaacactaggattaactttgtacctttagtcaggaaggactattggatatattaatcactrtgggatattatgtctttaatgttgagttgcaggaattcataaagaaacaagctcaacgtcgggcgcagtggctcacacttgtaaaatcccagca

SEQ ID NO: 366777 - DNA, 542 bp, Homo sapiens
cccatcattatgataaaaatgacttgctacttcaaatagggacactagaggaagctgtttttagaggactcagttgtagtaggaaatcagtttggtttaagacaatgcttgaaccgaagacactgaataaataatgacttccatgcttattaacaacactaggattaactttgtacctttagtcaggaaggactattggatatattaatcactatgggatattatgtctttaatgttgagttgcaggaattcataaagaaacaagctcaacgtygggcgcagtggctcacacttgtaaaatcccagcacttaggtaggctgaggagtgtggatcacctgaggtcaggagttcaagacaagcctggtcaatatggcgaaaccccgtctctactaaaaatacaaaattagccaggcatggtggcaggtgcttgtaatcccagctactcgggaggctaaggcaggagaattgcttgaacctgtgaggtgaaggttgcagtgagccgagattgtgccactgcactccagccaggtgacaagagtga

SEQ ID NO: 366778 - DNA, 521 bp, Homo sapiens
gaacaatcctttgacatatgtaggccatggggtgtggatgggctctttgacataatgacccctgaaaattagtgtttgtaccaacctggaatatacytaaaatacagttcatagaaacaaatttttttcagaaaatttgatttgagaagaaaaaatatgtattcaattaaatactcccataggcccatggaaaatgatgcaaataattgaggttgatggaggaaaaaggtaattgagtttgtgaatgaacatcaagagacttgtaaaggaagatgttaatgagtaacatgctttgtggagggaattcctactctctgttggatggttcaaatcaaggtcagagtattagttggcttaagtgaaacactgcagaaaatggtgtaagacaataatgataatacaccagcaatatttggcactaagatgttgaccaaggccagagcagattgggaaggaaagggtctttgattctttctgattactgagatgccctgccaggatccacagaaggaaggaagccc

SEQ ID NO: 366779 - DNA, 521 bp, Homo sapiens
gaacaatcctttgacatatgtaggccatggggtgtggatgggctctttgacataatgacccctgaaaattagtgtttgtaccaacctggaatatacctaaaatacagttcatagaaacaaatttttttcagaaaatttgatttgagaagaaaaaatatgtattcaattaaatactcccataggcccatggaaaatgatgcaaataattgaggttgatggaggaaaaaggtaattgagtttgtgaatgaacatcaagagacttgtaaaggaagatgttaatgagtaacatgctttgtggagggaattcctactctctgttggatggttcaaatcaaggtcagagtattagttggcttaagtgaaacactgcagaaaatggtgtaagacaataatgataatacaccagcaatatttggcactaagatgttgaccaargccagagcagattgggaaggaaagggtctttgattctttctgattactgagatgccctgccaggatccacagaaggaaggaagccc

SEQ ID NO: 366780 - DNA, 468 bp, Homo sapiens
tctcctaataagcatcttagctagacaactgytgaccatctttcagtattgtatattactgtatattgtatattggtgcatccagaagttttatataaatggaatcatataaggtgcactattttttggctggcatttttgctttacagcaaaattcttttgaaattcattcatgttgttgcatgtgtcagtagtcgaacctttttattgctgagcagaattttgctgtacgtatatatcaccaattacttgttaatgaatatgtgggtcatgaccacattttagctattaaagagaaaatgcctatgaatatttatatacaacaatttctttttcatttttcgagggggaaatatctagaagataaatgactagattaagtggtaagcataggtttacttttttaagaagctgtcaatctatctattttacaaagtggttgtcaatcaaaagtatattaacgtttca

SEQ ID NO: 366781 - DNA, 360 bp, Homo sapiens
tatattctttatgaaagtaatttattagtgtgttggggctccttatgaccacccttaggctcaaagattaactataatgattcacaggtcttagaaaacayattacattcatagttacagtttactacaatgaaaagatacagattaaaatcaacaaagaaaaaagcccatggggagaaatgtagaagatatcaggtacaagctttcaggtgtcctctcccagtggaatcccataagaacacacgtaattctcccagcaacaatatttgacagcatattgaagtgttgtcaatcagagaagctcatttaagttttggtctccagggcttttactgggcatcagtcatgtaaggtggtgcc

SEQ ID NO: 366782 - DNA, 360 bp, Homo sapiens
tatattctttatgaaagtaatttattagtgtgttggggctccttatgaccacccttaggctcaaagattaactataatgattcacaggtcttagaaaacacattacattcatagttacagtttactacaatgaaaagatacagattaaaatcaacaaagaaaaaagcccatggggagaaatgtagaagatatcaggtacaagctttcaggtgtcctctcccagtggaatcccayaagaacacacgtaattctcccagcaacaatatttgacagcatattgaagtgttgtcaatcagagaagctcatttaagttttggtctccagggcttttactgggcatcagtcatgtaaggtggtgcc

SEQ ID NO: 366783 - DNA, 543 bp, Homo sapiens
ctgaaaaattagaacacatggacacagggaagggaacatcacacactggggcctgtcagggggtggggggcttggggagggatagcattaggagaaatacctaaaatagatgatgggttgaagggtgcagcaaaccaccatggcatgtatrtacctatgtaacaaacctacacattctgcacattctgaacttaaagtataataatttttaaaaaagagtaaaaattttcacttttgaagaagttcaagttaatattttattttacatattaaatgtttaatgtcatatacagcacttatttgtttcaactaaggtcacaaagatttatcttatgtttatatctaagatttcaatacattcaggttggctttttattaatgtttatatattttgcaagctatgaatcaaatttgtttttctattgcttataaatacccaactgttttacatttcttgctttgaaaactcttccatttcttcaaagctgatactttccctgatgaattgacttgctatttaaaaaaaaagattttaactatatg

SEQ ID NO: 366784 - DNA, 520 bp, Homo sapiens
tgacacaatccattacagcatctgcaggcacactaacagtgcacaggaaagagaaaacttgtgtgtgacctaagctgtcacctttgcctatataaccttggcttactaggaggtcctgagtctgtccatgcgaccagttcatyactactacaggtggcattacagaaaaaccaatgcaccaagactacttataatcaagaaatctcacagagtctatgtcattctcctgtcacccccatgagagctgttgttgctactcactacagagtcttgagaacaggtcacatcactggaccccttgtagacattccccagcaccaacctggagtgtggcagtcccactaggtggctagagccagagaagtagcagcattcatactagtctggccctcagggactcctactcttaggataagggggagtgcacatcagtggcacaccccatggaaaaaagaatctagatggcaggacttgagtccagaacttcccacctgtggaaagtttctttcagtagaggcac

SEQ ID NO: 366785 - DNA, 520 bp, Homo sapiens
tgacacaatccattacagcatctgcaggcacactaacagtgcacaggaaagagaaaacttgtgtgtgacctaagctgtcacctttgcctatataaccttggcttactaggaggtcctgagtctgtccatgcgaccagttcatcactactacaggtggcattacagaaaaaccaatgcaccaagactacttataatcaakaaatctcacagagtctatgtcattctcctgtcacccccatgagagctgttgttgctactcactacagagtcttgagaacaggtcacatcactggaccccttgtagacattccccagcaccaacctggagtgtggcagtcccactaggtggctagagccagagaagtagcagcattcatactagtctggccctcagggactcctactcttaggataagggggagtgcacatcagtggcacaccccatggaaaaaagaatctagatggcaggacttgagtccagaacttcccacctgtggaaagtttctttcagtagaggcac

SEQ ID NO: 366786 - DNA, 611 bp, Homo sapiens
cacagctggtgcttctcttatgggaatttagcatgagtggacctgtagatagcctttctggaacacttcaagttaactgcgtccccagaggaggagtcccctccagattcagatttgcataaggcatagaatcacaatctctctctacttggaacrtgagaattcctgcaaataaaaagggcctgctaatctgaatagctagaactgtatttaggagtgtgacctgctttcctgggggcctggcaagggagctgaagtggctccctcccttccccgtgaaaagacctcagtgcatttcactaagagctcccacagatgccttggtcaaggcttgggcttcttcccaccattgggtattgcatttaccaatctgctggttttcactcagggacacctcccctactggcctgaaatctgaattattcaaccaggtaaagaaaacactgggagaaaaaaaaaggcaaaaaagtgcacaccacttgggaactagataagcttcatgagacctctgccattgctaccccacaggaaacagtgaacctccacacacacactgagcataatgttaccacaactagcatctgagaaagccaacatacaaacattttaaa

SEQ ID NO: 366787 - DNA, 611 bp, Homo sapiens
cacagctggtgcttctcttatgggaatttagcatgagtggacctgtagatagcctttctggaacacttcaagttaactgcgtccccagaggaggagtcccctccagattcagatttgcataaggcatagaatcacaatctctctctacttggaacatgagaattcctgcaaataaaaagggcctgctaatctgaatagctagaactgtatttaggagtgtgacctgctttcctgggggcctggcaagggagctgaagtggctccctcccttccccgtgaaaagacctcagtgcatttcactaagagctcccacagatgcctyggtcaaggcttgggcttcttcccaccattgggtattgcatttaccaatctgctggttttcactcagggacacctcccctactggcctgaaatctgaattattcaaccaggtaaagaaaacactgggagaaaaaaaaaggcaaaaaagtgcacaccacttgggaactagataagcttcatgagacctctgccattgctaccccacaggaaacagtgaacctccacacacacactgagcataatgttaccacaactagcatctgagaaagccaacatacaaacattttaaa

SEQ ID NO: 366788 - DNA, 611 bp, Homo sapiens
cacagctggtgcttctcttatgggaatttagcatgagtggacctgtagatagcctttctggaacacttcaagttaactgcgtccccagaggaggagtcccctccagattcagatttgcataaggcatagaatcacaatctctctctacttggaacatgagaattcctgcaaataaaaagggcctgctaatctgaatagctagaactgtatttaggagtgtgacctgctttcctgggggcctggcaagggagctgaagtggctccctcccttccccgtgaaaagacctcagtgcatttcactaagagctcccacagatgccttggtcaaggcttggrcttcttcccaccattgggtattgcatttaccaatctgctggttttcactcagggacacctcccctactggcctgaaatctgaattattcaaccaggtaaagaaaacactgggagaaaaaaaaaggcaaaaaagtgcacaccacttgggaactagataagcttcatgagacctctgccattgctaccccacaggaaacagtgaacctccacacacacactgagcataatgttaccacaactagcatctgagaaagccaacatacaaacattttaaa

SEQ ID NO: 366789 - DNA, 611 bp, Homo sapiens
cacagctggtgcttctcttatgggaatttagcatgagtggacctgtagatagcctttctggaacacttcaagttaactgcgtccccagaggaggagtcccctccagattcagatttgcataaggcatagaatcacaatctctctctacttggaacatgagaattcctgcaaataaaaagggcctgctaatctgaatagctagaactgtatttaggagtgtgacctgctttcctgggggcctggcaagggagctgaagtggctccctcccttccccgtgaaaagacctcagtgcatttcactaagagctcccacagatgccttggtcaaggcttgggcttcttcccaccattgggtattgcatttaccaatctgctggttttcactcagggacacctcccctactggcctgaaatctgaattattcaaccaggtaaagaaaacactgggagaaaaaaaaaggcaaaaamgtgcacaccacttgggaactagataagcttcatgagacctctgccattgctaccccacaggaaacagtgaacctccacacacacactgagcataatgttaccacaactagcatctgagaaagccaacatacaaacattttaaa

SEQ ID NO: 366790 - DNA, 595 bp, Homo sapiens
cacaactagcatctgagaaagccaacatacaaasattttaaataaccagggaacttatacagtcttcacccctgaaagcacccagagctgaattaggttacaataaactataaacattaaagtcacatcctcaaagtgaaaaaaaaaagtgaaaaatcacagtcaaatcaaaaaataaattcaaaaataattagaagatatagtctcaaaagtaattagaagatatactctatccaaatgagaagaaaccagaaaaataattccggcaataggacaaaatagggttctataacacctcaaaaagaacacactaagtccccagcaatggatcccaaccaagatgaaatctttgaaatgccagaaaaagaattcaaagaaataagcaaagtctcttagaaataggtgactatgtaaaatggccaaatatagcaattgctgttctagagggagaagaaacagcaaaactttttgaatacttatttgagggcataattgaagaaaactttgctagccttgctagatatttagatgtccaaatacaagaaactcaatgagctctggggaggttcactgcaaaactgacattacaaagcca

SEQ ID NO: 366791 - DNA, 534 bp, Homo sapiens
ttaccaatctgctggttttcactcagggacacctcccctactggcctgaaatctgaattattcaaccaggtaaagaaaacactgggagaaaaaaaaaggcaaaaaagtgcacaccacttgggaactagataagcttcatgagacctctgccattgctaccccacaggaaacagtgaacctccacacacacactgagcataatgttaccacaactagcatctgagaaagccaacatacaaacattttaaataaccagggaacttatacagtcttcacccctgaaagcacccagagctgaattagsttacaataaactataaacattaaagtcacatcctcaaagtgaaaaaaaaaagtgaaaaatcacagtcaaatcaaaaaataaattcaaaaataattagaagatatagtctcaaaagtaattagaagatatactctatccaaatgagaagaaaccagaaaaataattccggcaataggacaaaatagggttctataacacctcaaaaagaacacactaagtccccagcaatg

SEQ ID NO: 366792 - DNA, 595 bp, Homo sapiens
cacaactagcatctgagaaagccaacatacaaacattttaaataaccagggaacttatacagtcttcacccctgaaagcacccagagctgaattaggttacaataaactataaacattaaagtcacatcctcaaagtgaaaaaaaaaagtgaaaaatcacagtcaaatcaaaaaataawttcaaaaataattagaagatatagtctcaaaagtaattagaagatatactctatccaaatgagaagaaaccagaaaaataattccggcaataggacaaaatagggttctataacacctcaaaaagaacacactaagtccccagcaatggatcccaaccaagatgaaatctttgaaatgccagaaaaagaattcaaagaaataagcaaagtctcttagaaataggtgactatgtaaaatggccaaatatagcaattgctgttctagagggagaagaaacagcaaaactttttgaatacttatttgagggcataattgaagaaaactttgctagccttgctagatatttagatgtccaaatacaagaaactcaatgagctctggggaggttcactgcaaaactgacattacaaagcca

SEQ ID NO: 366793 - DNA, 534 bp, Homo sapiens
ttaccaatctgctggttttcactcagggacacctcccctactggcctgaaatctgaattattcaaccaggtaaagaaaacactgggagaaaaaaaaaggcaaaaaagtgcacaccacttgggaactagataagcttcatgagacctctgccattgctaccccacaggaaacagtgaacctccacacacacactgagcataatgttaccacaactagcatctgagaaagccaacatacaaacattttaaataaccagggaacttatacagtcttcacccctgaaagcacccagagctgaattaggttacaataaactataaacattaaagtcacatcctcaaagtgaaaaaaaaaagtgaaaaatcacagtcaaatcaaaaaataaattcaaaaataattagaagatatagtctcaaaagtaattagaagwtatactctatccaaatgagaagaaaccagaaaaataattccggcaataggacaaaatagggttctataacacctcaaaaagaacacactaagtccccagcaatg

SEQ ID NO: 366794 - DNA, 595 bp, Homo sapiens
cacaactagcatctgagaaagccaacatacaaacattttaaataaccagggaacttatacagtcttcacccctgaaagcacccagagctgaattaggttacaataaactataaacattaaagtcacatcctcaaagtgaaaaaaaaaagtgaaaaatcacagtcaaatcaaaaaataaattcaaaaataattagaagatatagtctcaaaagtaattagaagatatactctatccaaatgagaagaaaccagaaaaataattcyggcaataggacaaaatagggttctataacacctcaaaaagaacacactaagtccccagcaatggatcccaaccaagatgaaatctttgaaatgccagaaaaagaattcaaagaaataagcaaagtctcttagaaataggtgactatgtaaaatggccaaatatagcaattgctgttctagagggagaagaaacagcaaaactttttgaatacttatttgagggcataattgaagaaaactttgctagccttgctagatatttagatgtccaaatacaagaaactcaatgagctctggggaggttcactgcaaaactgacattacaaagcca

SEQ ID NO: 366795 - DNA, 607 bp, Homo sapiens
tgaaaaaaaaaagtgaaaaatcacagtcaaatcaaaaaataaattcaaaaataattagaagatatagtctcaaaagtaattagaagatatactctatccaaatgagaagaaaccagaaaaataattccggcaataggacaaaatagggttctataacacctcaaaaagaacacactaagtccccagcaatggwtcccaaccaagatgaaatctttgaaatgccagaaaaagaattcaaagaaataagcaaagtctcttagaaataggtgactatgtaaaatggccaaatatagcaattgctgttctagagggagaagaaacagcaaaactttttgaatacttatttgagggcataattgaagaaaactttgctagccttgctagatatttagatgtccaaatacaagaaactcaatgagctctggggaggttcactgcaaaactgacattacaaagccatatagtaatcaagctatctaaagtcaacatgaagaaatgaattctaagaacagtgagacaaaagcaacaagtaacctataaaggaaaacctattagactaacagcagacttctcagcagaaatcttacaggccagaagttcactgtat

SEQ ID NO: 366796 - DNA, 549 bp, Homo sapiens
aataagcaaagtctcttagaaataggtgactatgtaaaatggccaaatatagcaattgctgttctagagggagaagaaacagcaaaactttttgaatacttatttgagggcataattgaagaaaactttgctagccttgctagatatttagatgtccaaatacaagaaactcaatgagctctggggaggttcactgcaaaactgacattacaaagccatatagtaatcaagctatctaaagtcaacatgaagaaatgaattctaagaacagtgagacaaaagcwacaagtaacctataaaggaaaacctattagactaacagcagacttctcagcagaaatcttacaggccagaagttcactgtatctttaggcttatctttaatatccttagacaaaataactattagtcaaaaattttgtatccagcaaaactgagtctcataaatgaaagagaaataatgtcttcctcagacaagcaaatgctgagggaatctgtccctatcagaccagtcctacaagaaatgctaaatcttgaaacaaaatgttg

SEQ ID NO: 366797 - DNA, 573 bp, Homo sapiens
taatcaagctatctaaagtcaacatgaagaaatgaattctaagaacagtgagacaaaagcaacaagtaacctataaaggaaaacctattagactaacagcagacttctcagcagaaatcttacaggccagaagttcactgtatctttaggcttatctttaatatccttagacaaaataactattagtcaaaaattttgtatccagcaaaactgagtctcataaatgaaagagaaataatgtcttcctcagacaagcaaatgctgagggaatctgtccctatcagaccagtcctacaagaaatgctaaatcttgaaacaaaatgttgagctgcatcagaacctaacatacaaagattctcatagactcaaggtaagggggtggagaargatattcaatgcaaatggaaaccaaaagcaagcaggtgtagttatatcagataaagtagactttaaagcaacaatagtaaaaaaaaaaaccaaagaaagtcattacataataattaaataattaattcaacaaaatataataattctacataagtatgcacataacactggagctcctacatttat

SEQ ID NO: 366798 - DNA, 581 bp, Homo sapiens
agaaaactttgctagccttgctagatatttagatgtccaaatacaagaaactcaatgagctctggggaggttcactgcaaaactgacattacaaagccatatagtaatcaagctatctaaagtcaacatgaagaaatgaattctaagaacagtgagacaaaagcaacaagtaacctataaaggaaaacctattagactaacagcagacttctcagcagaaatcttacaggccagaagttcactgtatctttaggcttatctttaatatccttagacaaaataactattagtcaaaaattttgtatccagcaaaactgagtctcataaatgaaagagaaataatgtcttcctcagacaagcaaatgctgagggaatctgtccctatcagaccagtcctacaagaaatgctaaatcttgaaacaaaatgttgagctgcatcagaacctaacatacaaagattctcatagactcaaggtaagggggtggagaaagataytcaatgcaaatggaaaccaaaagcaagcaggtgtagttatatcagataaagtagactttaaagcaacaatagtaaaaaaaaaaac

SEQ ID NO: 366799 - DNA, 573 bp, Homo sapiens
taatcaagctatctaaagtcaacatgaagaaatgaattctaagaacagtgagacaaaagcaacaagtaacctataaaggaaaacctattagactaacagcagacttctcagcagaaatcttacaggccagaagttcactgtatctttaggcttatctttaatatccttagacaaaataactattagtcaaaaattttgtatccagcaaaactgagtctcataaatgaaagagaaataatgtcttcctcagacaagcaaatgctgagggaatctgtccctatcagaccagtcctacaagaaatgctaaatcttgaaacaaaatgttgagctgcatcagaacctaacatacaaagattctcatagactcaaggtaagggggtggagaaagatattcaatrcaaatggaaaccaaaagcaagcaggtgtagttatatcagataaagtagactttaaagcaacaatagtaaaaaaaaaaaccaaagaaagtcattacataataattaaataattaattcaacaaaatataataattctacataagtatgcacataacactggagctcctacatttat

SEQ ID NO: 366800 - DNA, 566 bp, Homo sapiens
aggtaagggggtggagaaagatattcaatgcaaatggaaaccaaragcaagcaggtgtagttatatcagataaagtagactttaaagcaacaatagtaaaaaaaaaaaccaaagaaagtcattacataataattaaataattaattcaacaaaatataataattctacataagtatgcacataacactggagctcctacatttataaaacaattactactagacctaagaaaaggaatagacagcaacacaataatagtgaggaactctaacactccactgacagcactagacagatcactgaagcaggaagtcaacaacaacaaaaacaaaaaaacactggacttaagttgcagtccagaagaaatggacctaacagacgtttacagaacattgtacccaaaaaccgcagaattcacattcttctcatcaacacatagaacagcctccaagacagaccataggataggccacaaaaacaaatctcaataaattttaaaaagtcaaaattatataaagtatcttctcaggtcacagtgaaataaaactagaaatgagctccaaaag

SEQ ID NO: 366801 - DNA, 581 bp, Homo sapiens
agaaaactttgctagccttgctagatatttagatgtccaaatacaagaaactcaatgagctctggggaggttcactgcaaaactgacattacaaagccatatagtaatcaagctatctaaagtcaacatgaagaaatgaattctaagaacagtgagacaaaagcaacaagtaacctataaaggaaaacctattagactaacagcagacttctcagcagaaatcttacaggccagaagttcactgtatctttaggcttatctttaatatccttagacaaaataactattagtcaaaaattttgtatccagcaaaactgagtctcataaatgaaagagaaataatgtcttcctcagacaagcaaatgctgagggaatctgtccctatcagaccagtcctacaagaaatgctaaatcttgaaacaaaatgttgagctgcatcagaacctaacatacaaagattctcatagactcaaggtaagggggtggagaaagatattcaatgcaaatggaaaccaaaagcaagcargtgtagttatatcagataaagtagactttaaagcaacaatagtaaaaaaaaaaac

SEQ ID NO: 366802 - DNA, 566 bp, Homo sapiens
aggtaagggggtggagaaagatattcaatgcaaatggaaaccaaaagcaagcaggtgtagttayatcagataaagtagactttaaagcaacaatagtaaaaaaaaaaaccaaagaaagtcattacataataattaaataattaattcaacaaaatataataattctacataagtatgcacataacactggagctcctacatttataaaacaattactactagacctaagaaaaggaatagacagcaacacaataatagtgaggaactctaacactccactgacagcactagacagatcactgaagcaggaagtcaacaacaacaaaaacaaaaaaacactggacttaagttgcagtccagaagaaatggacctaacagacgtttacagaacattgtacccaaaaaccgcagaattcacattcttctcatcaacacatagaacagcctccaagacagaccataggataggccacaaaaacaaatctcaataaattttaaaaagtcaaaattatataaagtatcttctcaggtcacagtgaaataaaactagaaatgagctccaaaag

SEQ ID NO: 366803 - DNA, 572 bp, Homo sapiens
aagcaggtgtagttatatcagataaagtagactttaaagcaacaatagtaaaaaaaaaaaccaaagaaagtcattacataataattaaataattaattcaacaaaatataataattctacataagtatgcacataacactggagctcctacatttataaaacaattactactagacctaagaaaaggaatagacagcaacacaataatagtgaggaactctaacactccactgacagcactagacagatcactgaagcaggaagtcaacaacaacaaaaacaaaaaaacactggacttaagttgcagtccagaagaaatggacctaacagaygtttacagaacattgtacccaaaaaccgcagaattcacattcttctcatcaacacatagaacagcctccaagacagaccataggataggccacaaaaacaaatctcaataaattttaaaaagtcaaaattatataaagtatcttctcaggtcacagtgaaataaaactagaaatgagctccaaaaggaacccttaaaactatacaattacctggaaattgaacaatctgcttcttaatga

SEQ ID NO: 366804 - DNA, 572 bp, Homo sapiens
aagcaggtgtagttatatcagataaagtagactttaaagcaacaatagtaaaaaaaaaaaccaaagaaagtcattacataataattaaataattaattcaacaaaatataataattctacataagtatgcacataacactggagctcctacatttataaaacaattactactagacctaagaaaaggaatagacagcaacacaataatagtgaggaactctaacactccactgacagcactagacagatcactgaagcaggaagtcaacaacaacaaaaacaaaaaaacactggacttaagttgcagtccagaagaaatggacctaacagacgtttacagaacattgtacccaaaaaccgcagaattcacattcttctcatcaacacatagaacagcctcmaagacagaccataggataggccacaaaaacaaatctcaataaattttaaaaagtcaaaattatataaagtatcttctcaggtcacagtgaaataaaactagaaatgagctccaaaaggaacccttaaaactatacaattacctggaaattgaacaatctgcttcttaatga

SEQ ID NO: 366805 - DNA, 572 bp, Homo sapiens
aagcaggtgtagttatatcagataaagtagactttaaagcaacaatagtaaaaaaaaaaaccaaagaaagtcattacataataattaaataattaattcaacaaaatataataattctacataagtatgcacataacactggagctcctacatttataaaacaattactactagacctaagaaaaggaatagacagcaacacaataatagtgaggaactctaacactccactgacagcactagacagatcactgaagcaggaagtcaacaacaacaaaaacaaaaaaacactggacttaagttgcagtccagaagaaatggacctaacagacgtttacagaacattgtacccaaaaaccgcagaattcacattcttctcatcaacacatagaacagcctccaagacagaccataggataggccacaaaaacaaatctcaataaattttaaaaagtcaaaattatataaagtaycttctcaggtcacagtgaaataaaactagaaatgagctccaaaaggaacccttaaaactatacaattacctggaaattgaacaatctgcttcttaatga

SEQ ID NO: 366806 - DNA, 515 bp, Homo sapiens
ccaataacaagcagtgagattgtataagtaagaaaaaaaaaatgccgactaaaaaacccagacagatcacagccaaattctatcagacattcaaagaagaactggtaccaagcctactgaaactactctaaaagactgagaaaaagggaatcctccttaactcattctatgaagccagtatcaccctgataccaaaaccagaaaaaggcatatcataaaaaaagaaaactacaaatgaacatctctgataaagacatacgcaaaaattcttaacagatactggcaaatcaaatccaaaagcatatcaaaaagacaattcactataatcaagtgagtctcatcccagggaggcaaggatgactcaacatacgcaaggtaataaatgtgatgtattttataaacagaattaaaaaccaaatacrtatgatcatctcaatagatgcataaaaacattcagtaaaatccagcattgctttatgataaaaaccctaaacaaactagacatagaataaaca

SEQ ID NO: 366807 - DNA, 513 bp, Homo sapiens
atcaagtgagtctcatcccagggaggcaaggatgactcaacatacgcaaggtaataaatgtgatgtattttataaacagaattaaaaaccaaatacgtatgatcatctcaatagatgcataaaaacattcagtaaaatccagcattgctttatgataaaaaccctaaacaaactagacatagaataaacatatctcaaaataataaaagctatatatgacaaacccatggccaacatcatattgaatggggaaaagttgaaagtmttcccactgagggctagaacaagttaaggatgcccattttcaccacttctacttaacatagtactggaagtcctacccagagcaatcaagcaagaggaagaaataaagggcatccaagctggaaaagaggaagacaaattatctctgtttgctgatgatttaagcatatacttagataagcctaagaattccaccaaaagactcttctatttgatgaatgaattcataaaatcttaggttacaaaatg

SEQ ID NO: 366808 - DNA, 513 bp, Homo sapiens
atcaagtgagtctcatcccagggaggcaaggatgactcaacatacgcaaggtaataaatgtgatgtattttataaacagaattaaaaaccaaatacgtatgatcatctcaatagatgcataaaaacattcagtaaaatccagcattgctttatgataaaaaccctaaacaaactagacatagaataaacatatctcaaaataataaaagctatatatgacaaacccatggccaacatcatattgaatggggaaaagttgaaagtcttcccactgagggctagaacaagttaaggatgcccattttcaccacttctacttaacatagtactggaagtcctacccagagcaatcaagcaagaggaagaaataaagggcatccaagctggaaaagaggaagwcaaattatctctgtttgctgatgatttaagcatatacttagataagcctaagaattccaccaaaagactcttctatttgatgaatgaattcataaaatcttaggttacaaaatg

SEQ ID NO: 366809 - DNA, 586 bp, Homo sapiens
ttattaaggagggcagtatgagaactatctaagatattttaggataagaagcggttttgtgaatttgaattcattawataacgctttctattttgttttgttattcatcatttaacatttttttaaaaaatataaagaattctcataagtatttttaaactagaagacaaataagtggaatgaaacatctaaatgtcaaattttggtgtgtacttcctattaatttctaagcagggacacctggcaagcagaaataactctgaggacatgtgggattttgaatttttggacacctctgtaaagttatttggcaagcaataataatagctaccacttatttatcaagtgtttactaatgtactaagcattgccatatatggtttattacttctatcctatttagtattcaaatcaatatgatgtctatttttgttctgttttaaaaataaagaagctaacatgtccaagccacatatttagtaagtattggaactacatcaaaacaagaaagaaacatttcaatggtttatcctactgtctacttcctaaaggaaaattataaatttacagtaactgatccaaatac

SEQ ID NO: 366810 - DNA, 586 bp, Homo sapiens
ttattaaggagggcagtatgagaactatctaagatattttaggataagaagcggttttgtgaatttgaattcattaaataacrctttctattttgttttgttattcatcatttaacatttttttaaaaaatataaagaattctcataagtatttttaaactagaagacaaataagtggaatgaaacatctaaatgtcaaattttggtgtgtacttcctattaatttctaagcagggacacctggcaagcagaaataactctgaggacatgtgggattttgaatttttggacacctctgtaaagttatttggcaagcaataataatagctaccacttatttatcaagtgtttactaatgtactaagcattgccatatatggtttattacttctatcctatttagtattcaaatcaatatgatgtctatttttgttctgttttaaaaataaagaagctaacatgtccaagccacatatttagtaagtattggaactacatcaaaacaagaaagaaacatttcaatggtttatcctactgtctacttcctaaaggaaaattataaatttacagtaactgatccaaatac

SEQ ID NO: 366811 - DNA, 586 bp, Homo sapiens
ttattaaggagggcagtatgagaactatctaagatattttaggataagaagcggttttgtgaatttgaattcattaaataacgctttctattttgttttgttattcatcatttaacatttttttaaaaaatataaagaattctcataagtatttttaaactagaagacaaataagtggaatgaaacatctaaatgtcaaattttggtgtgtacktcctattaatttctaagcagggacacctggcaagcagaaataactctgaggacatgtgggattttgaatttttggacacctctgtaaagttatttggcaagcaataataatagctaccacttatttatcaagtgtttactaatgtactaagcattgccatatatggtttattacttctatcctatttagtattcaaatcaatatgatgtctatttttgttctgttttaaaaataaagaagctaacatgtccaagccacatatttagtaagtattggaactacatcaaaacaagaaagaaacatttcaatggtttatcctactgtctacttcctaaaggaaaattataaatttacagtaactgatccaaatac

SEQ ID NO: 366812 - DNA, 586 bp, Homo sapiens
ttattaaggagggcagtatgagaactatctaagatattttaggataagaagcggttttgtgaatttgaattcattaaataacgctttctattttgttttgttattcatcatttaacatttttttaaaaaatataaagaattctcataagtatttttaaactagaagacaaataagtggaatgaaacatctaaatgtcaaattttggtgtgtacttcctattaatttctaagcagggacacctggcaagcagaaataactctgaggacatgtgggattttgaatttttkgacacctctgtaaagttatttggcaagcaataataatagctaccacttatttatcaagtgtttactaatgtactaagcattgccatatatggtttattacttctatcctatttagtattcaaatcaatatgatgtctatttttgttctgttttaaaaataaagaagctaacatgtccaagccacatatttagtaagtattggaactacatcaaaacaagaaagaaacatttcaatggtttatcctactgtctacttcctaaaggaaaattataaatttacagtaactgatccaaatac

SEQ ID NO: 366813 - DNA, 619 bp, Homo sapiens
acgtgtaaaattaggtttcctttagtcaatggtgtatgaaaagtaatcaactcatctaactgaagttagacattaataaattataatttgggggataacataaatatacctattaaaaacaaccagaacataacagttggctctatgttctgcttatctaggaatttttaaaattataaaaaaaaaaaggagtttcacatttttaaagaaacattaggaataaaaatgtaagtgtttctcttggataaagctcttaaaatcactagtagaataaagtcaatctagattaaaatttatattttcaaatttataatatgaccaatattgccatcaaaatgttcmggcacagaacattttaaagtagctattttattgtttctcaacatcctctttccttctatgattggcatcacaaatcatgattgggacatcttatcaaagaactatacttgtagtttttgagtgaaaagcaagggagaaattttatttgtgccttgaccttattgataatgtgtaacttgtgatggccactatcaatagaactatcaacagattcgaagggcactgtttgttcctttaatatggagaaatatcgcaaataactgggaaataatttaat

SEQ ID NO: 366814 - DNA, 545 bp, Homo sapiens
ctagcttagcacctttatcagccaatttatttccctgagcctcatctgagtattttatactatatccctcagctttaactgtaacaactagctggggcaatagcaatgactctagaagttctgctatttggggtttacttttgactggggacaagttgctgtcatgaatcctctctgttttcaaaacataccaaaatcatgcactacaccaaagacccagtgtctgtcactgtaggtgctaatcttaattccctctgccttatataagcctgaatgagaacagttaatttagccactttggctgatttaacgtgtggcaaagcttggcattcaagagttttgtgtagatgagtgatggcatatccaggctggaaggtcccaacctccttccagaagtaggagcgattgacatagagcatcaggtcracttaggagagaagggtttctgacatatctaacctaaatgagacagtgatctggtttcagtagcaccattgtgtgtgtgtgctgaggggttcccttagtggacaaaatgtacagggtag

SEQ ID NO: 366815 - DNA, 187 bp, Homo sapiens
gaagtgagtctcttataggtggcatatatttggttcttgttttactatccattcagccactctgtgtcttttgtttcactratttggtccactgatatttaaagtaactattgataggcattttgtagttttcttgttcttttatttctctcttgctgtgcatgatttgattactttgattattttc

SEQ ID NO: 366816 - DNA, 560 bp, Homo sapiens
aagacctcaacctaggagcaatattgtaaaactcttagacataaatataggagaaaagctccttgacactggtattggtaataaattttcagatttgacaccaaaagtatagacaacaaaagcaaaactagacaaatgggactaaatcaaagtaaaagattcagcacaacaaaggagacaatcaatacaatgaaaagacaacctaaagaatgggagaaaatatttacatgctatatatctgataagaagttaatatccaaataaattaggaacttagacgattccaaaggaccttgtattagtctgttttcatgctgctgataaagacatacctgagactgggtgatttataaagaaaaaagaggtttaatggactcacagttcaacacaggtrgggaggcctcatgatcacagttggaaggtgaaaggcatgtcttacatgacagccggcaaggcaggatgaaagccaagcaaaaggggaaaccccttataaagcaatcagatcttgtgagatttatttactaccatgagaacagtatgggagaaactgcccccatgat

SEQ ID NO: 366817 - DNA, 534 bp, Homo sapiens
atcacctcacatctattaggatggctattgtaacagtaaaaaggtaacaaatgttgctgaggatattgagaaaaagaaacccttgtgcttagttgatagttgatgggaatgtaaattggtacagccattagagacracagtatggactttcctcaaaaaattaaaaatggaactcccatataatccagcaatccccatctaggtatatatccaaagtaaagaaaatcactatctcaaagagatatgtatacttacatgttcattgcagtgttatgtacacagccaagatatggaaactacctgtgtccattgacagatggatgttttaaatgtattacacacacacacacacacacacaaggaatatcatttagcctttaaaaatgaggaaatactgccatttgtaacaaaatggacaaacctggagtttattatggtaagtaaaataagccaggaacacacacacacaaatatcctgcatgatttcacttatatgcatactaagaaaatgtcaaactcatggtaacagagtaa

SEQ ID NO: 366818 - DNA, 534 bp, Homo sapiens
atcacctcacatctattaggatggctattgtaacagtaaaaaggtaacaaatgttgctgaggatattgagaaaaagaaacccttgtgcttagttgatagttgatgggaatgtaaattggtacagccattagagacaacagtatggastttcctcaaaaaattaaaaatggaactcccatataatccagcaatccccatctaggtatatatccaaagtaaagaaaatcactatctcaaagagatatgtatacttacatgttcattgcagtgttatgtacacagccaagatatggaaactacctgtgtccattgacagatggatgttttaaatgtattacacacacacacacacacacacaaggaatatcatttagcctttaaaaatgaggaaatactgccatttgtaacaaaatggacaaacctggagtttattatggtaagtaaaataagccaggaacacacacacacaaatatcctgcatgatttcacttatatgcatactaagaaaatgtcaaactcatggtaacagagtaa

SEQ ID NO: 366819 - DNA, 534 bp, Homo sapiens
atcacctcacatctattaggatggctattgtaacagtaaaaaggtaacaaatgttgctgaggatattgagaaaaagaaacccttgtgcttagttgatagttgatgggaatgtaaattggtacagccattagagacaacagtatggactttcctcaaaaaattaaaaatggaactcccatataatccagcaatccccatctaggtatatatccaaagtaaagaaaatcactatctcaaagagatatgtatacttacatgttcattgcagtgttatgtacacagccaagatatggaaactacctgtgtccattgacagatggatgttttaaatgtattacacacacacacacacacacacaaggaatatcatttagcctttaaaaatgaggaaatactgccatttgtaacaaaatggacaaacctggagtttattatggtaagtaaaataagccaggaacacacacacacaaatatmctgcatgatttcacttatatgcatactaagaaaatgtcaaactcatggtaacagagtaa

SEQ ID NO: 366820 - DNA, 592 bp, Homo sapiens
gtttcctttttaatcattcaaaacaaaggtagtaaaattcctgggaaataagaaataatgcatcataaatgtataaaaatagaagaaaatactatatttttatgaatttaaaatgccagctattgtagattgttatctcttttcagaagtgctttaaaattgatggcacatagtaaaaaaatggcataaattccaacaattaatggaaaaacattaatccatcttcttgaatcttggaaccaggattcttttgggaggcttcggtgtatctgtgtatcatttcattgccttcacacaaatcaaatcatgccacctgcgactgtggtttgaaaaaaaaagaaaacataataatgatgctgtcaattcacctgagattccatgatcaaaattaacctatgaacaaagcacagactttattataattacaaaataggatgtaatttacataaaatgtgaaaatataagtatagaaccatatttgatacaagtcgaaagctatgacagggactgttggaggggagggaagttgtacactaatctccacatcctactgagccaatcagtgktgttcaaattggatggactgtatatt

SEQ ID NO: 366821 - DNA, 496 bp, Homo sapiens
tggttgcatctggttttagatgatacgaataaagcttctataaatagtcatgttcaggattttgtatggacgtaagttttcaattcaattgggcaaatacctgggggcatgactgctggattatatagcatgtttagtttttaagaaactgccaaactgtcttcccatgtgactgcaccattttgcattcccactagtaatgaaagagttttggttgcttcgcatccttgccagcatacagcactgtcagttttttggagtttagtcatgctaatagttgtatagaggtatctcattgttgttttaatttkcaattcctttttaaataatttcaacttttattttagattcagggggttcatgtgcaggtctgttacctgggtatattgtgtgatactgaggtttgaggtatgattgctcccatcactcaggtactgcgcatagtacctaatggtttttcaacccttccctcatctactccccgccagtagtcccc

SEQ ID NO: 366822 - DNA, 580 bp, Homo sapiens
tccccacttttcattccaagtgtgacacaggtttaaataataaacagacaaaaagtttagataaattcatgaattattgaaccagatgataaaaaatagggaagctatttagggcatagtctctagtgtgtaagggtgacatcctaaataataaatttatgctattgttgacaatattgytgacaaggctaaatggtcaatgtgcttgacatattgcctggtttttcatgttctattgcatgagctgattctctctctctcttttatttatatttttgaactctgccattatgttatcatggacattatgccaacaatttgatgcatctatgtatatgctttaaatctctgggaataaatttactgagtgctacttatgtgaacaaacttctcttaagcacaaatggaaatccacaaagaaagacagcctcttctatttgttttatgtgaggcaacagatacactgtagacaaaaagaccaagtataattaactcatattggtaactaacaatatctgcatattacatatttttctattatgttttctgagcaacttcgtggcttctgatttggaggggt

SEQ ID NO: 366823 - DNA, 637 bp, Homo sapiens
tgactcggcctcccaaagtgctgggattacagatgtgagctaccacatccagccatcacctcttgtaaagtgcartaaagaaatagtgggcaatagacaggcaggggatagaggaaaatgttttgggagtgggacaatatgaacttattgtcatgacaggaccaaaaagggaagacgtctgcctatcataattaatactaactctatcagtcaacatttatgttttacaattgttctgtaaaagaaaagccagcaaacattacagattctagtccctaataactgatcaagaaagacactctaagcttgtgcatcagcattctctttttatctaaaagaaaatatattaaatacagggaggaatggcaggagtaaagagacttgaaggaaaagaaaatattgactttttaatgatattttacaatgctaagatctttagaaaccaactattccatatgtcctttaaatattagtttggtgcaaaggtaattacagtttttgtcataaaagtaatggcaaaactacaattacttttgcaccaacctaactgatacattcattccattttggaggtattgcaaatatgctgaatcaatgaatttcttcagtatttttcattgtattagtacaaatttaa

SEQ ID NO: 366824 - DNA, 568 bp, Homo sapiens
cagtgagttatgtgggcccttagtctgtgcctctccatattgatttatttcctttaatgcacatatgttaaggaacgaaattttccactatgggcatgtttaggcaagctcccttagcaagtacgcttatccgcacaaaatatttggtataaacacctggggggtgggtaagaggttctccaggggaccctttcctgactgtctccctaaagcaagttggctgactcctttcattcctcccttcaggagtggagaccccaaattctgttggggaaagtgtacaaygactgctcttaactgcttcctgctgacaaggggtgctgttttgggaaagtggcagttaaggctcctcctgaggtcagtttaagggtccccaaagagaacggtgtgttcatgagtggttctgtttgcatcaccatttgatgttgaacggcctttaagtgagaagaaacaatttgggttattagaagacatattcaaaatgaaacaaagggataaggacagctcaaaacaaaacaaaacaaaacaaaatctcaaggctgccaatacagccagataactcgtggct

SEQ ID NO: 366825 - DNA, 626 bp, Homo sapiens
ggcaccttctttgttttttcccaggagccccgggctatcagaagttatcttagagcctctcatgtatgcactgaatgacaagacaaaatgggaaaaaaaaaatcattcaacagagaaagaacctttttccagaaaaacaagatccatgcagagaaaaatttaaaggcctttaaatatacctataacttggatatccactttgaattcagctgtgctctaagaaaatcgtttcatatctattacccaactttagccatgccgagcagccaatatttctggcttttgaactttattaaaaataacctcacaggtgaaaccaacaagcctcaactaaggttatgacttaactgtaagtgtaaaagttattttcaaagaggtgctaagcagtttttacagaatctaagatctttaawgttggttcagacaaaggaagatttaagaaaggaagctaaagttgtttatagaggggaagagaatcagcaaatggtaaaagtcacacagatattggccaaaatatactcattccctaagccgggattaaacccaggccaccattgtaaaatggcagaggccaaaagaaagtattatcaagtggttacaaggtcaagctcctaaggacaaaaaac

SEQ ID NO: 366826 - DNA, 487 bp, Homo sapiens
gacctcatgatccgcctgccttggcctcccaaaatgctgggattacaggygtgagccactgcacccggccctggtaagaacttttacccttttgctggtgtaccaggcttctgagttgccctttttcatgctcagttttgagccaagcagtttaaggtttggagaaattaacttttcccagtttaagagatgcatccaaagggagtgtcctgtggtacagcgacacaatgacccacccacaaagagaggacagaggaggaaaaaggagaaaggaggtgtttttccagaagagtcctagtgattcaggaggcaatcaagagaaatatgggctgcagatgattggttactcacctaagaagaggggagcaaggcatccctagtttcttctttttcctagtaaatacctgaggtacatgagggagaggagaaaagtgtcctctttctttcttctgttcttatatccctgagtcctggtgatcttggcagg

SEQ ID NO: 366827 - DNA, 487 bp, Homo sapiens
gacctcatgatccgcctgccttggcctcccaaaatgctgggattacaggcgtgagccactgcacccggccctggtaagaacttttacccttttgctggtgtaccaggcttctgagttgccctttttcatgctcagttttgagccaagcagtttaaggtttggagaaattaacttttcccagtttaagagatgcatccaaagggagtgtcctgtggtacagcgacacaatgacycacccacaaagagaggacagaggaggaaaaaggagaaaggaggtgtttttccagaagagtcctagtgattcaggaggcaatcaagagaaatatgggctgcagatgattggttactcacctaagaagaggggagcaaggcatccctagtttcttctttttcctagtaaatacctgaggtacatgagggagaggagaaaagtgtcctctttctttcttctgttcttatatccctgagtcctggtgatcttggcagg

SEQ ID NO: 366828 - DNA, 487 bp, Homo sapiens
gacctcatgatccgcctgccttggcctcccaaaatgctgggattacaggcgtgagccactgcacccggccctggtaagaacttttacccttttgctggtgtaccaggcttctgagttgccctttttcatgctcagttttgagccaagcagtttaaggtttggagaaattaacttttcccagtttaagagatgcatccaaagggagtgtcctgtggtacagcgacacaatgacccacccacaaagagaggacagaggaggaaaaaggagaaaggaggtgtttttycagaagagtcctagtgattcaggaggcaatcaagagaaatatgggctgcagatgattggttactcacctaagaagaggggagcaaggcatccctagtttcttctttttcctagtaaatacctgaggtacatgagggagaggagaaaagtgtcctctttctttcttctgttcttatatccctgagtcctggtgatcttggcagg

SEQ ID NO: 366829 - DNA, 434 bp, Homo sapiens
tgggtcttccttaaacaagggagagaaaaggctgtcttgggaattggggtcctggcctaataagaaaaaayaaaaacaaaaaccaacaaaaaacctctcataaaagttaactccttacaaagtggagaaaagaaaaaaaaataaaataaaacagcttaagtgcagggtggggaagatgcctggaggagaaaccttttattcttatgcaaatgagttcctccaatagggagagaacattttaattgctgtctcctcctttctggctcagccaggggaggaaagacactgtgggtgcatggggagagggaagagtgagcaggaaaagctggccacctagccaagtggggcccttgggctatgtgccccagacgggaggggagggggttgggagttgccactctcccatttgtctcacatgtgtacctgtggccatt

SEQ ID NO: 366830 - DNA, 434 bp, Homo sapiens
tgggtcttccttaaacaagggagagaaaaggctgtcttgggaattggggtcctggcctaataagaaaaaacaaaaacaaaaaccaacaaaaaacctctcataaaagttaactccttacaaagtggagaaaagaaaaaaaaatraaataaaacagcttaagtgcagggtggggaagatgcctggaggagaaaccttttattcttatgcaaatgagttcctccaatagggagagaacattttaattgctgtctcctcctttctggctcagccaggggaggaaagacactgtgggtgcatggggagagggaagagtgagcaggaaaagctggccacctagccaagtggggcccttgggctatgtgccccagacgggaggggagggggttgggagttgccactctcccatttgtctcacatgtgtacctgtggccatt

SEQ ID NO: 366831 - DNA, 434 bp, Homo sapiens
tgggtcttccttaaacaagggagagaaaaggctgtcttgggaattggggtcctggcctaataagaaaaaacaaaaacaaaaaccaacaaaaaacctctcataaaagttaactccttacaaagtggagaaaagaaaaaaaaataaaataaaacagcttaagtgcagggtggggaagatgcctggaggagaaaccttttattcttatgcaaatgagttcctccaatagggagagaacattttaattgctgtctcctcctttctggctcagccaggggaggaaagacactgtgggtgcatggggagagggaagagtgagcaggaaawgctggccacctagccaagtggggcccttgggctatgtgccccagacgggaggggagggggttgggagttgccactctcccatttgtctcacatgtgtacctgtggccatt

SEQ ID NO: 366832 - DNA, 354 bp, Homo sapiens
cccacctccagaaattttgatagagggggcctggagtagagccaatgagtcttacacacacagacacacacacacacacacacacaccccaaaagaaatccacamcccaaaacaaacacacacttaccctaatgactatctaggtgccagccctagcctaggccaggctggtggaacatgctggattaaaaacaacaggacactgagaaagtatttgctacacagacatatgggatttgaccatgtgttatttacagataacctaactcattggagtaaaacctatcttaaattggcatatggtataggatatgttgtagcattttattagtgaacatttgtaaggttttattt

SEQ ID NO: 366833 - DNA, 539 bp, Homo sapiens
aacacttgtggagcagataggaggttctctgggggacccttcccttagtgtctgcctaaagcaagctggctaacttttcagaaagagacagagaaaatgaagtagctaccaaagtattctrggtctacaagtgatattattttcaacaagtattcaaatgccattctagtctaaactaattcattataaatcagctaatattaagtaaatattttacaaattaaaaactagttacaaaaggtagagacctcaaagaaaggcagaaatgaggcaaatggggaaaaattatggtgacttaaagcctatatattgtgatctggagaattagaatttaatttgtctatacaaagtaggtcatgatcctgataagtttagcaattagagtatttataaaaagtaagagctaaataatttgtttcagggatgcacttttatttcaattatctagacctgaaattatatttttttgagatcgttcaggaagaagaaattacatgaggagaactttctaatcagtatgcttagtgtaaatatatctg

SEQ ID NO: 366834 - DNA, 467 bp, Homo sapiens
gacccttcccttagtgtctgcctaaagcaagctggctaacttttcagaaagagacagagaaaatgaagtagctaccaaagtattctgggtctacaagtgatattattttcaacaagtattcaaatgccattctagtctaaactaattcattataaatcagctaatattaagtaaatatttyacaaattaaaaactagttacaaaaggtagagacctcaaagaaaggcagaaatgaggcaaatggggaaaaattatggtgacttaaagcctatatattgtgatctggagaattagaatttaatttgtctatacaaagtaggtcatgatcctgataagtttagcaattagagtatttataaaaagtaagagctaaataatttgtttcagggatgcacttttatttcaattatctagacctgaaattatatttttttgagatcgttcaggaagaagaaattacatgagga

SEQ ID NO: 366835 - DNA, 539 bp, Homo sapiens
aacacttgtggagcagataggaggttctctgggggacccttcccttagtgtctgcctaaagcaagctggctaacttttcagaaagagacagagaaaatgaagtagctaccaaagtattctgggtctacaagtgatattattttcaacaagtattcaaatgccattctagtctaaactaattcattataaatcagctaatattaagtaaatattttacaaattaaaaactagttacaaaaggtagagacctcaaagaaaggcagaaatgaggcaaatgggraaaaattatggtgacttaaagcctatatattgtgatctggagaattagaatttaatttgtctatacaaagtaggtcatgatcctgataagtttagcaattagagtatttataaaaagtaagagctaaataatttgtttcagggatgcacttttatttcaattatctagacctgaaattatatttttttgagatcgttcaggaagaagaaattacatgaggagaactttctaatcagtatgcttagtgtaaatatatctg

SEQ ID NO: 366836 - DNA, 467 bp, Homo sapiens
gacccttcccttagtgtctgcctaaagcaagctggctaacttttcagaaagagacagagaaaatgaagtagctaccaaagtattctgggtctacaagtgatattattttcaacaagtattcaaatgccattctagtctaaactaattcattataaatcagctaatattaagtaaatattttacaaattaaaaactagttacaaaaggtagagacctcaaagaaaggcagaaatgaggcaaatggggaaaaattatggtgacttaaagcctatatattgtgatctggagaattagaatttaatttgtytatacaaagtaggtcatgatcctgataagtttagcaattagagtatttataaaaagtaagagctaaataatttgtttcagggatgcacttttatttcaattatctagacctgaaattatatttttttgagatcgttcaggaagaagaaattacatgagga

SEQ ID NO: 366837 - DNA, 516 bp, Homo sapiens
aaatggggaaaaattatggtgacttaaagcctatatattgtgatctggagaattagaatttaatttgtctatacaaagtaggtcatgatcctgataagtttagcaattagagtatttataaaaagtaagagctaaataatttgtttcagggatgcacttttatttcaattatctagacctgaaattatatttttttgagatcgttcaggaagaagaaattacatgaggagaactttctaatcagtatgcttagtgtaaatatatctgatgagttcataagtctgtttcatttattattcttcagtataggtctgtagcatgacacaaacaattcctgatgacttcagctacctttttaaggaaggtagacttgctccatcccctatcttctattttgcatctgaaagaggatcatactcctgtttaagtmaactttattaatgtttttcaaaatatttcttctcttgccaatataaaataatgaaattgtagtaaaatggggattgtcttcctcaa

SEQ ID NO: 366838 - DNA, 562 bp, Homo sapiens
aaattatttcaacaatttatcttatgaacatttatttcattatttattcacaccatcaaataatattttacattgagtccaaattttttgcattgctgttcatgtcaggtttatattggaattaattctctatgacctcctttttaagcactgctaaatagatagtaatctttctttctataacagttgagtttaaattgcttttcttaattttctctgacagagaacattattttttattgttgtaaacaagctatattctacatatttaattatttggaatttgatttgtgtatatttttcagtggaagctaacttcttcctaatgtctccatctacatttcatatttattcatccattcacatattcaacaaaatttgagaatctgtttttgggcttttaatactcatcttattcattttactatttatgtwtttatttctttatttatttagaaactggttctcacttagttgcccacgttagagtgtagtgatgccatcatagctcatggcagcctcaaactcctgggctcaagtttgttaattttattttaaatgt

SEQ ID NO: 366839 - DNA, 533 bp, Homo sapiens
gtgttctgtaaaatatatcattactaattggcgtttatcttgggagttcaagatggtttccatattcaatcaacccatcaatgtggactatggtcacttgaaaagaccagcaaatcctctgcacraaaggccactagaaattcattaaagcagccttccatcattctcgaaattgaccaaagcattcaactacctgagaaatatttatgtttggaaagctattgaaatgcaattaaaaatatcaggaaacctgtttttaccttttgtcctaatcttgctaaatccttcttaattttaggagacactgcttctccttccactgttcttttactttctccttcccctttgtttttgcctcccccttcctctcccttttctacattccttctctctcctaaatgctgtataaatttctacatatgtaatcatattatttacaaataggaacagttttacttatttctttccagtctgcatttattttattcttcctttttttccttacacactggatagaactctaagtattatgt

SEQ ID NO: 366840 - DNA, 580 bp, Homo sapiens
gtgagaaaagctgaattcatttttaatcatgaatggcttttaaggaaagaagatttattaactaaaataaatagattagagggaattctcacctatgagagaggaagggatgggattcaacctggaaaaagtaatgaagttttagtgaacytggtaaggtagactcaacaattaatgatggataatgctaggacccaacactggtaatgagtttgtattatgactcaatagcatcactttatcactttaacacagatggaggcctaaataaccatagggtaatggttcttcttagatgcagaaggacacatttatataatcttagggaccccatctctgaggtcactcataatttatattaattcattgttattgccattgccccaagaatagataaggataagacatcctgtagtacaggtagcagagatataaactattcttattcttgtgtcttgtctataggaagggagtgtatcctggtgtaagacagcatatagtagagaccattgtcaattagggcctgtgaactaagacagggtgactggctaagtccacaacccattagaaacccagaaat

SEQ ID NO: 366841 - DNA, 598 bp, Homo sapiens
caattaatgatggataatgctaggacccaacactggtaatgagtttgtattatgactcaatagcatcactttatcactttaacacagatggaggcctaaataaccatagggtaatggttcttcttagatgcagaaggacacatttatataatcttagggaccccatctctgaggtcactcataayttatattaattcattgttattgccattgccccaagaatagataaggataagacatcctgtagtacaggtagcagagatataaactattcttattcttgtgtcttgtctataggaagggagtgtatcctggtgtaagacagcatatagtagagaccattgtcaattagggcctgtgaactaagacagggtgactggctaagtccacaacccattagaaacccagaaataatcaaatcatggtgagtagtaataacacttatttataatactatacggtataaagacaagaaccaattatgttgagtagctgtaacaaatagctctatcattcgtaataactttttctgtaataaaactgaattgtaacatgatcatactgcaatatgacattacactagcattgttggtaagat

SEQ ID NO: 366842 - DNA, 598 bp, Homo sapiens
caattaatgatggataatgctaggacccaacactggtaatgagtttgtattatgactcaatagcatcactttatcactttaacacagatggaggcctaaataaccatagggtaatggttcttcttagatgcagaaggacacatttatataatcttagggaccccatctctgaggtcactcataatttatattaattcattgttattgccattgccccaagaatagataaggataagacatcctgtagtacaggtagcagagatataaactattcttattcttgtgtcttgtctataggaagggagtgtatcctggtgtaagacagcatatagtagagaccattgtcaattagggcctgtgaactaagacagggtgactgkctaagtccacaacccattagaaacccagaaataatcaaatcatggtgagtagtaataacacttatttataatactatacggtataaagacaagaaccaattatgttgagtagctgtaacaaatagctctatcattcgtaataactttttctgtaataaaactgaattgtaacatgatcatactgcaatatgacattacactagcattgttggtaagat

SEQ ID NO: 366843 - DNA, 576 bp, Homo sapiens
tttagtgaacttggtaaggtagactcaacaattaatgatggataatgctaggacccaacactggtaatgagtttgtattatgactcaatagcatcactttatcactttaacacagatggaggcctaaataaccatagggtaatggttcttcttagatgcagaaggacacatttatataatcttagggaccccatctctgaggtcactcataatttatattaattcattgttattgccattgccccaagaatagataaggataagacatcctgtagtacaggtagcagagatataaactattcttattcttgtgtcttgtctataggaagggagtgtatcctggtgtaagacagcatatagtagagaccattgtcaattagggcctgtgaactaagacagggtgactggctaagtccacaacccattagaaacccagaaataatcaaatcatkgtgagtagtaataacacttatttataatactatacggtataaagacaagaaccaattatgttgagtagctgtaacaaatagctctatcattcgtaataactttttctgtaataaaactgaattg

SEQ ID NO: 366844 - DNA, 467 bp, Homo sapiens
tactgttgttactgtcatataaatgccatattcaatgtagatgctcagaaaaatatgattgttttgctacaggagagattagaccagggacaataaatatggattaggcaagaatgtgttaactcagcagsccagggttttttcaaccctgcacattcaaaggtaaggtttgtttttaggactagctagcctctgagttctggaaatagtcttaccgtgaagagtgtttttgtatatctgaggccttgggtttatggtgaatgactgacttatatgcctgaggccctgagccatgctgtatttatttgaaccatgtggtatcaatttaaccagatacgtttattctaagatatgatttatgctgaatgcctggttttgttctagagggatcatggaaaggaagctgaatttgccaagttttgccacttgggcattgcatgcctatgtgattaaccaccaataaaaac

SEQ ID NO: 366845 - DNA, 467 bp, Homo sapiens
tactgttgttactgtcatataaatgccatattcaatgtagatgctcagaaaaatatgattgttttgctacaggagagattagaccagggacaataaatatggattaggcaagaatgtgttaactcagcagcccagggtttyttcaaccctgcacattcaaaggtaaggtttgtttttaggactagctagcctctgagttctggaaatagtcttaccgtgaagagtgtttttgtatatctgaggccttgggtttatggtgaatgactgacttatatgcctgaggccctgagccatgctgtatttatttgaaccatgtggtatcaatttaaccagatacgtttattctaagatatgatttatgctgaatgcctggttttgttctagagggatcatggaaaggaagctgaatttgccaagttttgccacttgggcattgcatgcctatgtgattaaccaccaataaaaac

SEQ ID NO: 366846 - DNA, 467 bp, Homo sapiens
tactgttgttactgtcatataaatgccatattcaatgtagatgctcagaaaaatatgattgttttgctacaggagagattagaccagggacaataaatatggattaggcaagaatgtgttaactcagcagcccagggttttttcaaccctgcacattcaaaggtaaggtttgtttttaggactagctagcctctgagttctggaaatagtcttaccgtgaagagtgtttttgtatatctgaggccttgggtttatggtgaaygactgacttatatgcctgaggccctgagccatgctgtatttatttgaaccatgtggtatcaatttaaccagatacgtttattctaagatatgatttatgctgaatgcctggttttgttctagagggatcatggaaaggaagctgaatttgccaagttttgccacttgggcattgcatgcctatgtgattaaccaccaataaaaac

SEQ ID NO: 366847 - DNA, 467 bp, Homo sapiens
tactgttgttactgtcatataaatgccatattcaatgtagatgctcagaaaaatatgattgttttgctacaggagagattagaccagggacaataaatatggattaggcaagaatgtgttaactcagcagcccagggttttttcaaccctgcacattcaaaggtaaggtttgtttttaggactagctagcctctgagttctggaaatagtcttaccgtgaagagtgtttttgtatatctgaggccttgggtttatggtgaatgactgacttatatgcctgaggccctgagccatgctgtatttatttgaaccatgtggtatcaatttaaccagatacgtttattctaagatatgatttatgctgaatgcctggttttgttctagagggatcatggaaaggaagctgaatttgccragttttgccacttgggcattgcatgcctatgtgattaaccaccaataaaaac

SEQ ID NO: 366848 - DNA, 562 bp, Homo sapiens
ggccctttggttacatcttgtaaataaaatcaacaaaatctgttttgagattatattgtaatataagatacccaaagtaactaggatgtgtaccatatgtttgaaggtggtaaatacgatgagaaaaatagatcaggtcaggaagaatgaagatgattgaaggtacagtttatgatgaaaacttaggtgtgccgaggaatgattcatcttatgtatcttgagtgtaatgtcttatttctcctgaatctgagaatttgatgtctttcattagggatgtcagtaaatctcactaatgaatatattagactccagtttaatatatgatagtcattttcattctgtctttcatatcactgaaycctttctctttattgttcatttttatacatctcttaatagtcaaagtgaatttaactatgttttacgttatgtggttattctcactttagctatctctaacatattatgaatgtgtcagttgtgtgtttaccgttgtttgaattaaacttttaaatcattcattttaattcttacttaattcaaacttgtttgttatacattc

SEQ ID NO: 366849 - DNA, 523 bp, Homo sapiens
ttttgtgtgtttgctcatttcaacaagggaaagagaattagaaaattggaagaaaaatatttaagtaattcttgtaaaattaatatacatattaaatatcatgaagggtagaaacagagttaacatttaaaatgtttataactaatgtgtaaatttaattgaaagccaactgattgctctgaawttttatgaggaataatcacaattgtacagaaaataactgacaccgaaagtatctaccttttcacatttaaatgcaagtgactttttgttcattcattcaaaaattatggattattatactttagcttaaatgtttgtctcccctctaaaagccattttgaaacttaatcctcaatgcaatagtattaagaagtcaggcctttaggagtaattaggccatgacgactctgtactcatagatgggattagtgcattacaaaagggctgaagggaactagctaatgtaaggacacagcattcaagttaccattttagaagcagaaactgggacctcacttgg

SEQ ID NO: 366850 - DNA, 634 bp, Homo sapiens
aaagccaactgattgctctgaaattttatgaggaataatcacaattgtacagaaaataactgacaccgaaagtatctaccttttcacatttaaatgcaagtgactttttgttcattcattcaaaaattatggattattatactttagcttaaatgtttgtctcccctctaaaagccattttgaaacttaatcctcaatgcaatagtattaagaagtcaggcctttaggagtaattaggccatgasgactctgtactcatagatgggattagtgcattacaaaagggctgaagggaactagctaatgtaaggacacagcattcaagttaccattttagaagcagaaactgggacctcacttggtgccaaacctgccagaaccatggttttgaacttttcagcctcctggactgtgagaaacaagtttctgttcttatcagtctcagctattttgttacagaagcacaagcgaactgagacctgagatgggagtgtttatgtgctaggtatggagctaatttctgaataaataaagatgaatacattctatgacctcatcatctagtgcctgttacagtcatgcagtggatattttttcttgccttcttattactcatttttgctctcctcactaa

SEQ ID NO: 366851 - DNA, 559 bp, Homo sapiens
ctccataacatggtgtcaagatatcaaaaagccttcagacaacagagtctaaggattaagttgagataaaccaatatttgttgagcacttcctgtgatgctgaggaggaattcaatcataagcaagataaaggccatggtctctaagggcagtcattttagtgggaagacagacatacataaatcattttataagacatgctaaaatcgtggtcaagtaagatgctaagagaataagagaaaggagaattacattctaattaggggtgattaggaaagtgttttagctgattggcttaaattggatcttaaagattgggtaaggatctatcaggcaatggcaatgggcattctaagcaaggatatataggtaaggtacacgagaaaaataaagttgaaaatccagctgacagtttttctagataagccttcctatttactttcctcccaggacaagactcatctytgtgaggacttcaccaagttcccagaaaagagcaaacaggtagaactgaacagaggagaaagtgaaatgacaaagaggagtgcaattcttgaaa

SEQ ID NO: 366852 - DNA, 580 bp, Homo sapiens
gagcaataaaaaggaataaattattaatacatgcagcaacatggatgaatctcaaaaacattatgcaaagtgaaaggagccaagcacaagaactacatgtgttaagattccatttatatgaaatttctacagaaagcaaaactattgcccagaaaagcagatcaatagttatgtaggtatgggtattgtagttgggactgatggcagatgggcacagagaaactttctgtggtgacagaagtgttgtaaaactgaactgtggtggtagatgcacaagtgtacacatttattaaaattcattgaactgtatacagaaaatggatacattttataatatgtaaatggtacccaaataaaactgttaaaatatatttgaacaggggatacaatggtcactggttgacttttagcttcctagtatgcctttcacygttattttggtaatagcagtgtaatcttttcctcattgacgaaagccaagggaagggcggttagtactctctgtttggaagaagggaaaatcttacttcaaactttcttaagaaataaagaagaggattaagttgttggcagtatttca

SEQ ID NO: 366853 - DNA, 590 bp, Homo sapiens
cgtgagttttacagttcttaaaggtggcgtgtctggagtttgttccttctgatgttcggatgtgtttggagtttcttccttctggtgggtttgtggtctcgctggctcaggagtgaagctgcagaccttcgcggtgagtgttgcagctcttaaagcagcgcgtctggagttgttcgttcctcctggtgggggtcgtggtctcgctggcttcaggagtgaagctgcagaccttcgcggtaagtgttacagctcataaaggcagtgtggacccaaagagtgagcagtagcaaratttattgcaatgaacaaagcttccacagtgtggaagtggaaggggaccccagccggttgtcactgctggctctggcagcctgtttttattctcttatctggccccacccacatcctgctgattggtccattttacagagagccgattggtctgttttagagctgattggtccgttttgacagggtgctgattggtgcatttacaaaccttgagttagacaggaaagttctccacctccccactagattagctagatacagagtgtccattggtatatttacaaaccctgagctagaca

SEQ ID NO: 366854 - DNA, 451 bp, Homo sapiens
ttacaaggcttattgtattaatgagaactaaaaagttcgactacatattcaaaggatccccatggccttttatattgcccatcacaaaatccttttcaagcaatttaaattgtatcatgattggctattggtatttgagaaatggcattaaactcaggcaaatagtgaaattccactgtatagaatggtatctgtaaaataaaatataaatgyaaaactgaaaaaataggagataaaatcacatgatttttacaatgacagtatgttgtttaaaatgcagaaaaaaatatgcatgagtagttccaaatctttattttattctaggtgttttatgtcttcttagactgttagatctaaaaaactcccttttcaatcctactatgtataatgagactaaatcataaactatgtttaatgcattttaaattcatatgcaacttgtcagcacctc

SEQ ID NO: 366855 - DNA, 532 bp, Homo sapiens
gaataaataattccatatatgagatatttgaagcaaatctgtttatggacattcgatcagtcaaacccacacacattctttgttagttacaggactatgcacctccatttattgatatacatcaagaaccccttcaacatacaaagaatgaagacttctggagggttccaaacctcaatacttcccagtcaggccagcattcaactctagatcttcaaatcactttttttttaaattgctaaaataattctgtgtggttcctttgtgttttttagcagactttatttttgaagtaatgttaagttcacagcaaaataaagcagaatttacagagwtttcccatatatttcctgccccaatacatgcgtagcctcacccactatcaacaactcatattttgttacaatcaataaacttacactgacacatcattgttacccagagaccgtagtttacattaagtctcactcttggagctgtacattctatcagttttgatgaatgtataatgacatgtatccaccactgtatt

SEQ ID NO: 366856 - DNA, 514 bp, Homo sapiens
aagaaaaacatctgaaaaacacagatgtctgttagagtatcaagaatttttctttggtcactttttattccttctatagttggagagtattttctgatcacatatttcccctttgggggaatgatatggtttgtctctgtatccccacccaaatcttaccttaaattgtaattcccccatgtcacaggaagtaccttttgggaggtgactggacaatgtgggtggatttcctccttgctgttctcaagttagtgagtgagttcccacaagacctgtttgtttgataattgtctgggagtttcccctgcattctttctctctcctgctgccctgtgaagaaggtgcctgcttccccttccccttccccttccgccctgatcytaagttttctgaggcctccccagccatgtggaactgtgagtcaattaaatctctttcttttataagttacctagtcctgggtagtatctttatagcagtgtgagaagagactaatacagggactcacaaaatt

SEQ ID NO: 366857 - DNA, 575 bp, Homo sapiens
gtttctcatatgggaaaaatgccatgaattaagtaagcatgattctttttattagatgccaaatgaagtcaggttttaaaagctgagtcttgtcatgttcaatcacttttctgtagctctttccacctacaacaaacacaatctgcccgttaagatgtgctttagccatctctttgcaaattgtgtaaatgtttttggaagagagtttcattcctcattgttgagctaattttctcacagtttagaaatgtctttataggagtgagctttccaaaattagggtatctatttcttgtgtttcagyagaaaaacacaataaaagagatatgtttgcctgatacatgctcattctgagagaattgcaatctattcttactgatatctttttgggaaacttggatctgcaggaaacaaagttttatcttattttgggatgtagacaactgtttagaaccatgaataaaggaaaaaagtataattgtatatctcctacaacttttaaaacatattgcaagggcttgagctctatcatagtgaaagaaaaatgaacatttttataaaaatgaacatttatt

SEQ ID NO: 366858 - DNA, 609 bp, Homo sapiens
ctatataattaccttgtctctttttacagcttttgtcttgaaatctattttgtctgatataaatatagctacttctgctcttctttggtttccatttgcagggaatatctttttccatccctttatgttgagtctgcatgtgtctttataggtgaaatatgtttattgtaggcaacagattgttgggttttgttttttatccattcagccactcctgggttttgattggagagtttaatctatwtactttcaatgtcattatttatgagtgaggacttaatcctgccattttgttatttgatttcttgttgttttgtggccttccttccttcattctttccttcctttttgggaaggtaatattttctgataatatagtacattttaatttcttttattttttgtgtatctgttgtaggtttttttatttgaggttctcatgaggcttgcaaataacatcttataactcatggttttaaactgatttcaacttggccaggtgtggtggctgatgcctttaatcccagcgctttgggaggctgaggtcagagaatcagttgaggtcaagaccagactggccaacatggtgaaacttttttgttgtaggta

SEQ ID NO: 366859 - DNA, 586 bp, Homo sapiens
ggtcctgtgcccttgaatctaagagggctctgtgactgcttgacagagtaagagggaagtgatggtttgctagttttcagcgtcaggccttaagaaactggcagcttccacttcrtatctcttggaatgttctctctgggagcccggatcttccgcataaggaagctaacttagactaaggctgtcatgctatgagaaaggccaagctaatcacacaaaaaggctggggatgggggaggaaggaagattggaatgagggaaggggaaaaatgcttggtcagtgaggtccagaaatcatacagcaattgtaggccatccgctttgtaccctgtctgaatttctgactcaaagaatcaccagatataataaggtattattttaagccactaagtttgggggtagttttatgcagcaatcagtaacggatacagggatctataaatgcccttttagccctaacaactctgattctgtgatcttcatgtgtgccagtggtcctccagctcttagcccatcctcactatggcagtcatatccaaaagatagaagggctaggtgcatgcttatattggactctcattgtctg

SEQ ID NO: 366860 - DNA, 585 bp, Homo sapiens
attaaaatgttatctttacccctaattttaaattttgatatttrcaaaaatagctcatttttttataataagcatctattataattagattttccaagtaaaggtatattaataaagtgtatttctatcttataagtagaaagataagattttgtccaggcacagtggctcacacctgtaaccctaggactttggaaggctgagacggctggataacttgaggtcaggagttcgagaccatcctgggtaacatggtgaaaccctgtctctacaaaaaatataaaaattagctgggcgtggtgcccacaactgtagtcccagctactcaggaggctgaggtgggaggattaactgagcccagcaggttgaggctgtagtgagccatgattgtgccactgcactccagcctaggtgacagagtaagaccctgtctcaagaaaaataaatgaataaatttttaaaaaaggaagaagaaaagaaagataagatttctactatggtaagatttctacctagagaaatctgggtaagatttgattgcattttaaagagtattaagccaccaaagtagtgaggtcacatatt

SEQ ID NO: 366861 - DNA, 585 bp, Homo sapiens
attaaaatgttatctttacccctaattttaaattttgatatttgcaaaaatagctcatttttttataataagcatctattataattagattttccaagtaaaggtatattaataaagtgtatttctatcttataagtagaaagataagattttgkccaggcacagtggctcacacctgtaaccctaggactttggaaggctgagacggctggataacttgaggtcaggagttcgagaccatcctgggtaacatggtgaaaccctgtctctacaaaaaatataaaaattagctgggcgtggtgcccacaactgtagtcccagctactcaggaggctgaggtgggaggattaactgagcccagcaggttgaggctgtagtgagccatgattgtgccactgcactccagcctaggtgacagagtaagaccctgtctcaagaaaaataaatgaataaatttttaaaaaaggaagaagaaaagaaagataagatttctactatggtaagatttctacctagagaaatctgggtaagatttgattgcattttaaagagtattaagccaccaaagtagtgaggtcacatatt

SEQ ID NO: 366862 - DNA, 585 bp, Homo sapiens
attaaaatgttatctttacccctaattttaaattttgatatttgcaaaaatagctcatttttttataataagcatctattataattagattttccaagtaaaggtatattaataaagtgtatttctatcttataagtagaaagataagattttgtccaggcacagtggctcacacctgtaaccctaggactttggaaggctgagacggctggataacttgaggtcaggagttcgagaccatcctgggtaacatggtgaaaccctgtctctacaaaaaatataaaaattagctgggcgtggtgcccacaactgtagtcccagctactcaggaggctgaggtgggaggattaactgagcccagcaggttgaggctgtagtgagccatgattgtgccactgcactccagcctaggtgacagagtaagaccctgtctcaagaaaaataaatgaataaatttttaaaaaaggaagaagaaaagaaagataagatttctactayggtaagatttctacctagagaaatctgggtaagatttgattgcattttaaagagtattaagccaccaaagtagtgaggtcacatatt

SEQ ID NO: 366863 - DNA, 459 bp, Homo sapiens
cctcacacttttcacaaaaattaactaaaaatggatcatagacttaaatggaaaacacagtgcaataatataacacttctaaaggataacaagaaagatacaggtgacctgagttaggtgaygagtttttacatataacaccaaaagcatgatccaagaaagaaaaaattcataagttgacttaattaaaaattaaaaagtcttctctgcaaaatgcactattaagagaacgaaaagaaataccatagactaggagaaaacatatttcataaaggttttgtatccaaattcacaaatattattaaaattcagaaataataaaagaatctcaccctccaaaagtgcaaatcatctgaacagacacctcaaaaatagaatgtacagatggcaaatatgcatataaaaatactcaatattatttgtcatcagggaattgcaaattaaaacaacaatgaagta

SEQ ID NO: 366864 - DNA, 536 bp, Homo sapiens
tttcttgtgtattcttttcattcagtaacaaagaacctaaccatcagacttgttaagaaaatggttcagaaagaggcatataaagaaatgggtacggttctgaaacaacaataggatagtgggttttgtactgctstaaggaacaatgacattctgtagaggtgttgcagatcagtcaagttatatgagaaggaaactgggaaagtatctttcaagctgcttctcctgtgttcatcagaaaaacttcattttttatttgttttacatattggagatatatatatatgtttgtaggaaaaaggctataatacttaaatacatattgaattaattgatgaaaggacacataaattataggatagttttataagtctgacttcaacgtttttcaaacagattttaaaaagaggttagtatcattttaaaaataaacgctagtgctattttaaaagatacaagatttttatgaaagttttacagacattgcatttaaataatctaccccaaaactgattattaattctacataaagtaaa

SEQ ID NO: 366865 - DNA, 650 bp, Homo sapiens
ccgtcacctacattaggtatttctcctaatgctatccctcccctagccccccaccccccgataggcccctgtgtgtgatgttcccctccctatgtccatgtgttctcattgttcaactccaacttatgagtgagaacatgcggcgtttggttttgtgttcttatgcagaattgaaggatatagagatgtgtaacttgctaatttttaaacatttaggaaatactgatttttttaaccatcatcctatttgttttgacttagataaaattattaagcacagatttaagcaacagaatttaccaattttaatcttccctgccccccagatttcagaataataaatcatactagcacaaaccaggtggctctctaacatctcactcttcaccagactccaaacctcagcagctgctattgtcttttcttttcccatccttgcagtaatgatgatgacaggagcagaaaggtagaggaggaggaggaaagaaaaggraaatgaaaaagaggaggggcgaggtagaaaaaaacaaagaaaataaagaagaacaaagagaaaataagaaagaaaaagaagcaaccatttaataaaacatgcctggcattatagtaggctgtttatgaaaattattttgttcaagccacataataat

SEQ ID NO: 366866 - DNA, 449 bp, Homo sapiens
ttgtaatataaaatattacaatgaaatcttgtttaatgaagaatacagtagacattgagctccagccagtggttatgttatgaagtaattattataattgatgttaaatcaaagacaatatatatcctttttctgtwtgttaggctcatttattaaagttaaaattatgtgttgtcagatcctccttttataaaattcaaatgttattcccataattatttattaaataaaactaaaatttacaataaagtttgatcaagacactttagttgctaattaataatgtacaaagaatgaaacactattttggcatgattttttttgggtttagttcataaaaagatgtagaaagtttaggtttgctttctacttatgtcagaattattatttagacctaatactaattatcgaataaaatacatggaaaccatgaaacaaatctataataa

SEQ ID NO: 366867 - DNA, 617 bp, Homo sapiens
taatctcaggataatgtctgaatttctcataaaattgctgtagttgagtcatcactgaatcagctttgcctgaagttggtctcagaggatttcagataatattttgaatatatgatgcatacataaaattctcaggtattcgcctgcagctaattaagtgatttaattttcctttactaattcctgagtttaataagaagcccaaatcgtgacactgtgttagcytatacttctttaaatgggaagaagaggggttagatcaacgtaggtaccatactaaatccactatgcttactaatcaaattctcatatcgagatataaaaatttgattgtatgtttcagatccagcatctattaaacaccatattaccagatttgaatgatggaatttagggaatatcaaaattaacacaattcttcccaattacaccttgtgtaagctaatgcaatttcaattctgagatttattttataaatggattttgcacctaacagaatagttccttttctataacctactttcttttaaaaaaatgtatatgtgtgtgtgtatatatatatatatatgtatatgtatatgtgtatatatttttatatatacataatggatttgtgt

SEQ ID NO: 366868 - DNA, 532 bp, Homo sapiens
ccagtgaactggagtcagggcactgcagaccagcctggatgacagaatgagaccctctcttccaccccaccccccaaaaagaattagtaatattaatctggaaaacagagatacaatagaaggaacaatatttacacttggaactaagacgttatctttattatatttcattctgcatgaaattttattctaaataagracaaacttaaacttttgtgtgatatatgttatactacatacattttctattcaatgttaaagaatagaaatgatccaacatccatttaactgtttttaatattattaaatacaaattggcaagtttcttttatatgcttttcaaagactaaaaaataattacagaggagtttcagatgttgcttatctgagcggatgagatttcttcttaatattttgtgctgttcctaataaacacataagaacattatgtgatatggttgttacatttcttcctcatttgcttacatttgctaatgctgtttaatgattatgcatatctgtgttccaagtg

SEQ ID NO: 366869 - DNA, 510 bp, Homo sapiens
ttgtttattttacctagaaatgaacagcatttcaaaaatctacttaaattgactactgggtgggagtttaagtggaaaatgtaatttgaattcaaggaaatatttacactctctaaaagaacatatggaatagaatatgagaactttgagtaatctaggacaaaaataagctatcatataactttagtaataatataatacactggctaggactcaataaaatagtaattmattcaatcctatatttaggtacacaaatggaatcagcacactttagaaaagtagggtaatttgtatcttctattgaaactgattaattctctatgaaaacttaagagagttcagaatagacaaataaagtgctcaaagcattaaaagaaaccacagaatacattttttagattaaaaaatatatggcagaggaactttaattaaatatgcaacaaagagatgccagtattaaaatttaatttaaacaaaaagatcaaaaagaaatattctatttcagaa

SEQ ID NO: 366870 - DNA, 333 bp, Homo sapiens
gtctcttgaaacttaaggccttggaccaggtttcctrttatgatttgactgaaaaatagccatgaagaattttttgtccatatcctcaagggccgtaggtgtaaaaatgctgagaagatccctaagaatttaacaaaatgcatgtatatttataaaggggcattttatatttaatgtaattaattgcttggttaatcttcaaaagtttgaatataatgtatttataatttaacatttccttttgttggatgattcaatgaataatatatttttatgcttattacctaaatatcttttaataggaataaaagtgagcaaggactagagaataag

SEQ ID NO: 366871 - DNA, 333 bp, Homo sapiens
gtctcttgaaacttaaggccttggaccaggtttcctgttatgatttgactgaaaaatagccatgaagaattttttgtccatatcctcaagggccgtaggtgtaaaaatgctgagaagatccctaagaatttaacaaaatgcatgtatatttataaaggggcattttatatttaatgtaattaattgcttggttaatcttcaaaagtttgaatataatgtatttataatttaacatttccttttgttggatgattcaatgaataatrtatttttatgcttattacctaaatatcttttaataggaataaaagtgagcaaggactagagaataag

SEQ ID NO: 366872 - DNA, 378 bp, Homo sapiens
ggaaaaaaaaaaaaagacactgatgattcctgttcaaaaatttgaattctgaatgtaaarttttagttttagaattatttaactaattttttcacttacatttcatttttttagggttgaacaagagtgacatataagaaaagtgttatttcaataagaataaaataaaagctgcaagtgatataaaatatttggtcatagttaaattgatagagcttttttcttccactttctgtgctagatataataacggtgcacatattataggtggcatcttatatccaataaaattcactgttttgaaaatttggtcctggtcaagcagaagctaaagtttgtctagaagtgctgaggaacagaattgaaaagtttaagaac

SEQ ID NO: 366873 - DNA, 591 bp, Homo sapiens
ctagcaacttatagatgaaacctgaatgaattttcctcattatcatgctaaagcttccacgctgggagaagctatggctycattaccgaaacttgcgacctacctgctggcatgtgtcactatacttcgtatgtgctcctgtccatgcgatgatgcaccctctcccctctccatcaccaggtaaaacactcctcacaatttctgaaaatataaggctttacattaagtctatccaggggcaccattgacaatgacctaagttgctaataaatggtctgtaatttatatgaatatttgatttttgcaaagttgttattattattttgtttgcttattctgacaatgacctaagttgctaataaatggtctataatttatatgaatatttgatttttgcaaagttattattttgcttattctatttcaacagacatcattttgtagctaatttaattccttttactgcatttcattaacatttaaaagaagaaagaaagatattaagacattctctgtgtatttttatacatgtttatagggttatctttgtactaaaaattccagagacatcaaatctcttcaaacaaatcc

SEQ ID NO: 366874 - DNA, 556 bp, Homo sapiens
taatgagcctccacctcagcctcccaagtagctggaactacaggtgcatgtcaccacagccagctaagtttttttttgtatttttagtagagacagggtttcgccttgttgcccaggttgatctcaaactcctggactcaagtgatccacctgcctcggtctccgaaagtgctgggactacaagcttgagccaccgcacctgtccttctctggttttttgacagtttacttgttctcttcctgccttcttgaccactcttttttttttttttaatgtatttctttttcccccctttaagacttaaatatagaaattccctacagatttgttcctgaatctccacttattattcattgacttgaaaaatgtcatstcctctactagcctctttcacctccctttacatagtcttcaaatctttatgtttatctctgattttttttcttgagctccagttcttcatttctaacaagtatccaaaattttagacatgtatattattctcaccactttgcagctttcttgactttttcacattttatatttaatcgtgtc

SEQ ID NO: 366875 - DNA, 571 bp, Homo sapiens
ctaacaagtatccaaaattttagacatgtatattattctcaccactttgcagctttcttgactttttcacattttatrtttaatcgtgtcttctgaggtgaaaaattttgtaatttctgaactttgacatttaagctacactctacattgttgctttaatcattttagttcaggtcctccctactctaaaagtaaaatgtggctgggcgcagtggctcacgcctgtaatcccagcactttgggaggctgaggcgggttgatcaccggaggtcagacgttcaagattagcctggccaatatagtgaaaccctgtctctactaaaaatacaaaaattagctgggcatggtggcaggtgcctgtaatcctaggtacttgggaggctgaggcagagtaatcgcttgaaccctggaggtggaggttgcagagagccgagattgttccattgcactccagtctgggcgatgagagaaactccatctcaaaaaaacaaagaaagaaagaaaataaaatagaagtaaaatggtctcattttcttcggccctgtttcaatttagaccaatacatctaaag

SEQ ID NO: 366876 - DNA, 571 bp, Homo sapiens
ctaacaagtatccaaaattttagacatgtatattattctcaccactttgcagctttcttgactttttcacattttatatttaatcgtgtcttctgaggtgaaaaattttgtaatttctgaactttgacatttaasctacactctacattgttgctttaatcattttagttcaggtcctccctactctaaaagtaaaatgtggctgggcgcagtggctcacgcctgtaatcccagcactttgggaggctgaggcgggttgatcaccggaggtcagacgttcaagattagcctggccaatatagtgaaaccctgtctctactaaaaatacaaaaattagctgggcatggtggcaggtgcctgtaatcctaggtacttgggaggctgaggcagagtaatcgcttgaaccctggaggtggaggttgcagagagccgagattgttccattgcactccagtctgggcgatgagagaaactccatctcaaaaaaacaaagaaagaaagaaaataaaatagaagtaaaatggtctcattttcttcggccctgtttcaatttagaccaatacatctaaag

SEQ ID NO: 366877 - DNA, 571 bp, Homo sapiens
ctaacaagtatccaaaattttagacatgtatattattctcaccactttgcagctttcttgactttttcacattttatatttaatcgtgtcttctgaggtgaaaaattttgtaatttctgaactttgacatttaagctacactctacattgttgctttwatcattttagttcaggtcctccctactctaaaagtaaaatgtggctgggcgcagtggctcacgcctgtaatcccagcactttgggaggctgaggcgggttgatcaccggaggtcagacgttcaagattagcctggccaatatagtgaaaccctgtctctactaaaaatacaaaaattagctgggcatggtggcaggtgcctgtaatcctaggtacttgggaggctgaggcagagtaatcgcttgaaccctggaggtggaggttgcagagagccgagattgttccattgcactccagtctgggcgatgagagaaactccatctcaaaaaaacaaagaaagaaagaaaataaaatagaagtaaaatggtctcattttcttcggccctgtttcaatttagaccaatacatctaaag

SEQ ID NO: 366878 - DNA, 602 bp, Homo sapiens
tattattgtttattttaaatttaaaatataactgttacttcatattaggagtgtattaataataaatgtttattgcagaataaaataaagacaaataagtagttatttagayagctatatcaatatttttgcaaacacacttgtatttttttttgcaaaaattgagactatacagaataattggatttaattcttattaattcatttataattttatgaggaagatgcttttgttcactcaacatttttcaaaatacattttaatggttacataacatttgatgtaattctaccatattaatgtactatatatttagccttttcttcattattaggtatttacattactttgaattattttcttctaaaattttataaatgtcttcactcagaagttttttttaatgtatgtagattggaattactgggcaaatatcttcaaactttctaatttattaagtatttttccatcgtgagattttaacaagtatttgtctttgagttatttgatttttatttgattacagttaactgttgtgtccatctggaaattatttttatattaaatgtaagttcaaattataacttgacatatttcaaat

SEQ ID NO: 366879 - DNA, 582 bp, Homo sapiens
tcctcgtgtcttagaccacattcttctctaatccataaatattcacaagccttatcttcagggaagtggatttaagaactgttccgcctccttgcttggctgccttgtgaataaatgttttttcttttgcaaaatcagtcatcacagtgattggttcagtgtgcatgggcaaaatgaacctggttagtgtattagctgtagtttggggggttttggtacaatactctttagcagactgaggaagttttcttctctttgtagttttatgtttctaaaaaatcctaaatagttattaaatattatttagtactttttctgaataaactgtgatgaccatttggattttctcttccatgaatctttagattttgatttctctactaaccctaacagggataaataaaattaattttgtaccaaactagacagaactcaggcaatttagagtaccaaaaagcagtacccccaaaatatatcttaaaaacaactaaagagaagtaagatattayatgagggaaaaggttattcatacacaggacacatgctaataataaatatgtaaaaggagggccaggttccatg

SEQ ID NO: 366880 - DNA, 532 bp, Homo sapiens
gtgtctgtaatcccagctcctcgggaagctgaggcaggagaatcatttgaactcggaggcagaggttgcagtgagctgatattgcaccattgcactccagcctgggagacaagagtgaaaccctgtctcaagaaaaataaatatatatatggaatgaaagaatagctttaaagtgytcagagaaacaactgccaagttaccttttatgactacaaactgttatttgtggttaatacttatgaaggctaaaaatttataaaaataaaattctaaattgtgtcctcagaaaggagaaaaatggaaagtaatacctaaaataatcctgggatgcaagagaaataataagaaaaaagagtagtaaatatggattaaatatcaacgtcagtaaaacactatcatacttaagtctaaaattttaagtaaaatcaaaaatgataaactatagcatagactaagtataagcatagtccacagaaacatttaagactattatctttttttaggaggagggaagtaataatgattattcttg

SEQ ID NO: 366881 - DNA, 532 bp, Homo sapiens
gtgtctgtaatcccagctcctcgggaagctgaggcaggagaatcatttgaactcggaggcagaggttgcagtgagctgatattgcaccattgcactccagcctgggagacaagagtgaaaccctgtctcaagaaaaataaatatatatatggaatgaaagaatagctttaaagtgttcagagaaayaactgccaagttaccttttatgactacaaactgttatttgtggttaatacttatgaaggctaaaaatttataaaaataaaattctaaattgtgtcctcagaaaggagaaaaatggaaagtaatacctaaaataatcctgggatgcaagagaaataataagaaaaaagagtagtaaatatggattaaatatcaacgtcagtaaaacactatcatacttaagtctaaaattttaagtaaaatcaaaaatgataaactatagcatagactaagtataagcatagtccacagaaacatttaagactattatctttttttaggaggagggaagtaataatgattattcttg

SEQ ID NO: 366882 - DNA, 532 bp, Homo sapiens
gtgtctgtaatcccagctcctcgggaagctgaggcaggagaatcatttgaactcggaggcagaggttgcagtgagctgatattgcaccattgcactccagcctgggagacaagagtgaaaccctgtctcaagaaaaataaatatatatatggaatgaaagaatagctttaaagtgttcagagaaacaactgccaagttaccttttatgactacaaactgttatttgtggttaatacttatgaaggctaaaaatttataaaaataaaattctaaattgtgtcctcagaaaggagaaaaatggaaagtaatacctaaaatartcctgggatgcaagagaaataataagaaaaaagagtagtaaatatggattaaatatcaacgtcagtaaaacactatcatacttaagtctaaaattttaagtaaaatcaaaaatgataaactatagcatagactaagtataagcatagtccacagaaacatttaagactattatctttttttaggaggagggaagtaataatgattattcttg

SEQ ID NO: 366883 - DNA, 561 bp, Homo sapiens
tgggcctccctgcactctcaggggcctgagaagcccccatgctcccacaggcttggaagtacctgctcccactaccaggcctctgtccctacttccagtgcttgctccagttttggagcaaagttgaggctaagmccaggaactgttgtgacctagctgggtgtgtgagtacttgaggtggcactgacataccaggtccctgctgcctgaactccctctggacttgagggagttcgagggggtcctgagggcagcttggcacaggcctgcaggcacccctaagcatgaacagcctgggcaccacggacatgattggtggtggcaggaggcagacaggcccctgggcaggaaggggtaggtccctggtgaagcctcacctttaatccagggatggtctgaagcccgggggcttgctgtcagttccaggtggagtccacatcctcaagtgaaaacctgtgctatttctggcctgcccatggctccccagggaccagtcagtgcaaacttcctccattctgagctcataaaacccccagacccagccagactcacacagacatt

SEQ ID NO: 366884 - DNA, 561 bp, Homo sapiens
tgggcctccctgcactctcaggggcctgagaagcccccatgctcccacaggcttggaagtacctgctcccactaccaggcctctgtccctacttccagtgcttgctccagttttggagcaaagttgaggctaagcccaggaactgttgtgacctagctgggtgtgtgagtacttgaggtggcactgacataccaggtccctgctgcctgaactccctctggacttgagggagttcgagggggtcctgagggcagcttggcacaggcctgcaggcacccctaagcatgaacagcctgggcaccacggacatgattggtggtggcaggaggcagacaggcccctgggcaggaaggggtaggtccctggtgaagcctcacctttaatccagggatggtctgaagcccgggggctygctgtcagttccaggtggagtccacatcctcaagtgaaaacctgtgctatttctggcctgcccatggctccccagggaccagtcagtgcaaacttcctccattctgagctcataaaacccccagacccagccagactcacacagacatt

SEQ ID NO: 366885 - DNA, 561 bp, Homo sapiens
tgggcctccctgcactctcaggggcctgagaagcccccatgctcccacaggcttggaagtacctgctcccactaccaggcctctgtccctacttccagtgcttgctccagttttggagcaaagttgaggctaagcccaggaactgttgtgacctagctgggtgtgtgagtacttgaggtggcactgacataccaggtccctgctgcctgaactccctctggacttgagggagttcgagggggtcctgagggcagcttggcacaggcctgcaggcacccctaagcatgaacagcctgggcaccacggacatgattggtggtggcaggaggcagacaggcccctgggcaggaaggggtaggtccctggtgaagcctcacctttaatccagggatggtctgaagcccgggggcttgctgtcagttccaggtggagtccacatcctcaagtgaaaacctgtgctatttctggcctgcccatggctccccagggaccagtcagtgcaaacttcctccattctgagctcataaaamccccagacccagccagactcacacagacatt

SEQ ID NO: 366886 - DNA, 548 bp, Homo sapiens
ttagcatctattcaaatgatagttctttctcttttacgttacatattttattatatcaatatatttttattgagtcattattcttgtaatcctaggataaacctttaaaaataattacggaatagttttataatataataaacaatttaatttgatagagtttatatgtgatttctaaaactataagaatcacttttttaaaaaatagatttgactgtataggactgttttagattctgttttagattctttagttttagaaaactgaggaagtagtagagagttctgatgtacccttaactcatttctcctattagtaacattttagcatagtatatttgttcagattgataaaacactgctgacgaattattattaaagccatatttcattcagatttcattagttttgacctaatgtcatgttttgtaccaggatcttgtctaagatacaagaytgtattttgttatatctctttagccttaccttggtcatgacagtttctcagaattttcatgtttttgatgatcttgctagtttggagtact

SEQ ID NO: 366887 - DNA, 530 bp, Homo sapiens
aggcttcatatccctaaaccttttaaaaattatacactaaattataagcttattgcattgaacttcaggacctctgttagaaaaaaattataaagaactatcctatatatctgcaactcatgtgtttgcaaagtgtagcattagagtgaaagtatgggctttggcatgagtcaatttcccatatcacatttttggcggaaagtatcaataatcaaagtatatcaaagaatcaaatatcaaagtgaaactgatatgtgagatcagcactcattcttttataccttcatacactgaagaaaagttatcaatatgcaattacatatacagcaggtactcctctaattaaattctacaattaaattctaccactaatacatgtgggatcttggacagcaatttaacctatctaagctytacattccttgtctgtcaagcagaaaataagaatacctatttcatttagtttttgttagaataaaattaggaattttctctaactcacttaaaagagtgccatggttatttttgta

SEQ ID NO: 366888 - DNA, 619 bp, Homo sapiens
tgtccttacattttgaaacataatcatgtccttccaacaatcccctaaagtcttaactcatttcagcattgactcaaaagtccacagtccaaagtctaatctgaggcaaggcaagtttcttctgcctatgagcctataaaattaaaagcaagttacttacttcctagatacaatggggctataggcattggataaatatacccattctaagtgggagaaattgaccaaagcaaaggggtcacaggcctcatgcaagtctgaaatccaggagggcagtcagttcttgaagctccaaaattatcttctttgaccccatgtctcacatccagatcactctgatgcaagaggtgggctcccaagactttggcaactctgcccttgtggctttgcaggacacagaccccctcctgggttgagtttctgcagcttttccaggaacacagtggaagctgtcagtagatctaccattctagggtctggaggagggtggccttcttcccgcacctccactaggkagtaccacagtggggactgtgtgggggttctgaccccacatttcccttctgcagtgccctagcagaggttctctatgagggctccacccctacaacagacttct

SEQ ID NO: 366889 - DNA, 513 bp, Homo sapiens
tggctatttagtctcttttttggttccatgtgaatattagaatactttgttctaattctgtgaaaaattacattggtagtttgataggaatggcgttgaatctgtagattgctctgggcagtatggccactttagcagtatcaattcttccaattcatgagcatgcaatattttttctatttgtgtcagctctgatttagttcaacagtattttctagttctccttgtagagaacttttgcctccttagttagatgtatmcctgggtattttcttatgtgtggttattatgaatgggattgctttcttaattgtgctctcagcttgaacattattggcatatagaaatgctactgagttttgtacattgattttatatactaagactttattgaagtcatttatcagttcaaggagacttttggcagactcttcagggttttctaggtatagaataatatattcagcaaagaaagacagcttggctttttttttttctgatttggatgcctat

SEQ ID NO: 366890 - DNA, 584 bp, Homo sapiens
gaatggtgtgtgtgtgtgcatatgtgtgtaagcatgtatatgtgtgcatataacgatgctgaggcactttataaatctgaaaaataaaatggggtgacttggttaaagtgtgataaggtttggctatgtccccacccaaatctcatcttgaattgtagtttccataatccccacctgttgtgggagggacccagtgggagataattgaatcatggggatgtttacctccatgctgctgttgtcatgctagcattaggttctcacgagacctaatggttttataaggggcttctcccygtttgctcagcatttctctctcctgccgccatatgaagaaggacgcatttgcttccccttctgccatgattataagtttcctgaggcctccccagccatgtggaattgtgcaaattaaacctctttcctttataaattaccctgtctcaggcagttttttatagcagtgtgagaatggactaatacaaaatgtaaagatatctgtataaaataagtaccatataatgatgttgcatatagataaacaaactgctttttcttcttcagttgttctcaacacagaacac

SEQ ID NO: 366891 - DNA, 515 bp, Homo sapiens
atatatacagaataaaaatgagttaggactttgtaaatattgttttaatattagtccatgttttgtgaaccccttctagaaaacccctttccttaaagaaatagtcactcatttaaaatattttgtaccaaatagattgccatataatcattgagccacctaatttttttagtttacaataagccatatataatcactgtcacatattaaaataaaacaaacaatttgactataaggaaccaaaaacttttcttagaaattctacagtataaattttggataggttattgtaaacttcaggctgtgggtaggttatcttttacttggtggragggatgtagaagaaacaaataaaaatattccttttttttaattcttcctttgaattgagaagaaaccatgttcagaagaaagacagtttctttcaaaagaatttgtacagatatatataaaaatatgtttaccttttccagtagatggtcttgaatggtggatcctagattcaataatagagc
